United States Patent Application Publication US 2014/0004565 A1 - sequence listing, part 67

SEQ ID NO: 1621541 - RNA, 19 nt, Artificial Sequence
  Description of Artificial Sequence: Synthetic oligonucleotide
ccgcgaguuucucguauuc

SEQ ID NO: 1621542 - RNA, 19 nt, Artificial Sequence
  Description of Artificial Sequence: Synthetic oligonucleotide
ccaaggaaaccaagaacau

SEQ ID NO: 1621543 - RNA, 19 nt, Artificial Sequence
  Description of Artificial Sequence: Synthetic oligonucleotide
agcguuccacgcgcauaga

SEQ ID NO: 1621544 - RNA, 19 nt, Artificial Sequence
  Description of Artificial Sequence: Synthetic oligonucleotide
ccaaagagaaugccucagu

SEQ ID NO: 1621545 - RNA, 19 nt, Artificial Sequence
  Description of Artificial Sequence: Synthetic oligonucleotide
acggaaccugccacagcau

SEQ ID NO: 1621546 - RNA, 19 nt, Artificial Sequence
  Description of Artificial Sequence: Synthetic oligonucleotide
caggcaugcacagguggcu

SEQ ID NO: 1621547 - RNA, 19 nt, Artificial Sequence
  Description of Artificial Sequence: Synthetic oligonucleotide
cuccuccgcccuccuuuuc

SEQ ID NO: 1621548 - RNA, 19 nt, Artificial Sequence
  Description of Artificial Sequence: Synthetic oligonucleotide
cgaagaagcucccgcuuga

SEQ ID NO: 1621549 - RNA, 19 nt, Artificial Sequence
  Description of Artificial Sequence: Synthetic oligonucleotide
cagccucaaagagggaggu

SEQ ID NO: 1621550 - RNA, 19 nt, Artificial Sequence
  Description of Artificial Sequence: Synthetic oligonucleotide
cucuagcccugcccauuaa

SEQ ID NO: 1621551 - RNA, 19 nt, Artificial Sequence
  Description of Artificial Sequence: Synthetic oligonucleotide
gacgggcugcacugguuuu

SEQ ID NO: 1621552 - RNA, 19 nt, Artificial Sequence
  Description of Artificial Sequence: Synthetic oligonucleotide
guaggccagcacccauaua

SEQ ID NO: 1621553 - RNA, 19 nt, Artificial Sequence
  Description of Artificial Sequence: Synthetic oligonucleotide
cuccgcgaguuucucguau

SEQ ID NO: 1621554 - RNA, 19 nt, Artificial Sequence
  Description of Artificial Sequence: Synthetic oligonucleotide
cccauauacuggagaccca

SEQ ID NO: 1621555 - RNA, 19 nt, Artificial Sequence
  Description of Artificial Sequence: Synthetic oligonucleotide
ggagcguuccacgcgcaua

SEQ ID NO: 1621556 - RNA, 19 nt, Artificial Sequence
  Description of Artificial Sequence: Synthetic oligonucleotide
guggagcguuccacgcgca

SEQ ID NO: 1621557 - RNA, 19 nt, Artificial Sequence
  Description of Artificial Sequence: Synthetic oligonucleotide
agguggcuagagagccgcu

SEQ ID NO: 1621558 - RNA, 19 nt, Artificial Sequence
  Description of Artificial Sequence: Synthetic oligonucleotide
cguauucaucuuuguccca

SEQ ID NO: 1621559 - RNA, 19 nt, Artificial Sequence
  Description of Artificial Sequence: Synthetic oligonucleotide
ggguaggccagcacccaua

SEQ ID NO: 1621560 - RNA, 19 nt, Artificial Sequence
  Description of Artificial Sequence: Synthetic oligonucleotide
ggcuagagagccgcugggu

SEQ ID NO: 1621561 - RNA, 19 nt, Artificial Sequence
  Description of Artificial Sequence: Synthetic oligonucleotide
cccagauaacccuucuguu

SEQ ID NO: 1621562 - RNA, 19 nt, Artificial Sequence
  Description of Artificial Sequence: Synthetic oligonucleotide
ggagacccagauaacccuu

SEQ ID NO: 1621563 - RNA, 19 nt, Artificial Sequence
  Description of Artificial Sequence: Synthetic oligonucleotide
gccgaagaagcucccgcuu

SEQ ID NO: 1621564 - RNA, 19 nt, Artificial Sequence
  Description of Artificial Sequence: Synthetic oligonucleotide
ccucuagcccugcccauua

SEQ ID NO: 1621565 - RNA, 19 nt, Artificial Sequence
  Description of Artificial Sequence: Synthetic oligonucleotide
cgcgaguuucucguauuca

SEQ ID NO: 1621566 - RNA, 19 nt, Artificial Sequence
  Description of Artificial Sequence: Synthetic oligonucleotide
ccgcuugacgggcugcacu

SEQ ID NO: 1621567 - RNA, 19 nt, Artificial Sequence
  Description of Artificial Sequence: Synthetic oligonucleotide
gccccucuuugugacguau

SEQ ID NO: 1621568 - RNA, 19 nt, Artificial Sequence
  Description of Artificial Sequence: Synthetic oligonucleotide
ccugcccauuaacacucuu

SEQ ID NO: 1621569 - RNA, 19 nt, Artificial Sequence
  Description of Artificial Sequence: Synthetic oligonucleotide
cccagguuucgcugauguu

SEQ ID NO: 1621570 - RNA, 19 nt, Artificial Sequence
  Description of Artificial Sequence: Synthetic oligonucleotide
gccucccauuucagacugu

SEQ ID NO: 1621571 - RNA, 19 nt, Artificial Sequence
  Description of Artificial Sequence: Synthetic oligonucleotide
cccucuagcccugcccauu

SEQ ID NO: 1621572 - RNA, 19 nt, Artificial Sequence
  Description of Artificial Sequence: Synthetic oligonucleotide
aaaacugacugcuuguacc

SEQ ID NO: 1621573 - RNA, 19 nt, Artificial Sequence
  Description of Artificial Sequence: Synthetic oligonucleotide
aauuauaguggauauuccg

SEQ ID NO: 1621574 - RNA, 19 nt, Artificial Sequence
  Description of Artificial Sequence: Synthetic oligonucleotide
aacauuuguuguucaaucc

SEQ ID NO: 1621575 - RNA, 19 nt, Artificial Sequence
  Description of Artificial Sequence: Synthetic oligonucleotide
uuuuccauagacaagcacc

SEQ ID NO: 1621576 - RNA, 19 nt, Artificial Sequence
  Description of Artificial Sequence: Synthetic oligonucleotide
uaauugaucuguaaggaag

SEQ ID NO: 1621577 - RNA, 19 nt, Artificial Sequence
  Description of Artificial Sequence: Synthetic oligonucleotide
aaugauggcaggcccagcc

SEQ ID NO: 1621578 - RNA, 19 nt, Artificial Sequence
  Description of Artificial Sequence: Synthetic oligonucleotide
guuuaauugaucuguaagg

SEQ ID NO: 1621579 - RNA, 19 nt, Artificial Sequence
  Description of Artificial Sequence: Synthetic oligonucleotide
auuuuggugaauuccaugg

SEQ ID NO: 1621580 - RNA, 19 nt, Artificial Sequence
  Description of Artificial Sequence: Synthetic oligonucleotide
aaaccaguguuccugcugc

SEQ ID NO: 1621581 - RNA, 19 nt, Artificial Sequence
  Description of Artificial Sequence: Synthetic oligonucleotide
aucccaaucauucagacca

SEQ ID NO: 1621582 - RNA, 19 nt, Artificial Sequence
  Description of Artificial Sequence: Synthetic oligonucleotide
uuuaaaugauggcaggccc

SEQ ID NO: 1621583 - RNA, 19 nt, Artificial Sequence
  Description of Artificial Sequence: Synthetic oligonucleotide
uagacaagcaccauccucc

SEQ ID NO: 1621584 - RNA, 19 nt, Artificial Sequence
  Description of Artificial Sequence: Synthetic oligonucleotide
ugaauuauaguggauauuc

SEQ ID NO: 1621585 - RNA, 19 nt, Artificial Sequence
  Description of Artificial Sequence: Synthetic oligonucleotide
uaacaaguuuaauugaucu

SEQ ID NO: 1621586 - RNA, 19 nt, Artificial Sequence
  Description of Artificial Sequence: Synthetic oligonucleotide
aaugugguuaccauggcag

SEQ ID NO: 1621587 - RNA, 19 nt, Artificial Sequence
  Description of Artificial Sequence: Synthetic oligonucleotide
uccagagcaggguagaggg

SEQ ID NO: 1621588 - RNA, 19 nt, Artificial Sequence
  Description of Artificial Sequence: Synthetic oligonucleotide
ucuauggccucauuugugg

SEQ ID NO: 1621589 - RNA, 19 nt, Artificial Sequence
  Description of Artificial Sequence: Synthetic oligonucleotide
uaugaagccuuucuugucc

SEQ ID NO: 1621590 - RNA, 19 nt, Artificial Sequence
  Description of Artificial Sequence: Synthetic oligonucleotide
aacaaguuuaauugaucug

SEQ ID NO: 1621591 - RNA, 19 nt, Artificial Sequence
  Description of Artificial Sequence: Synthetic oligonucleotide
aauugaucuguaaggaagg

SEQ ID NO: 1621592 - RNA, 19 nt, Artificial Sequence
  Description of Artificial Sequence: Synthetic oligonucleotide
aaggcuaaacaguagacuu

SEQ ID NO: 1621593 - RNA, 19 nt, Artificial Sequence
  Description of Artificial Sequence: Synthetic oligonucleotide
auaguggauauuccggugg

SEQ ID NO: 1621594 - RNA, 19 nt, Artificial Sequence
  Description of Artificial Sequence: Synthetic oligonucleotide
auuauaguggauauuccgg

SEQ ID NO: 1621595 - RNA, 19 nt, Artificial Sequence
  Description of Artificial Sequence: Synthetic oligonucleotide
auuaugaagccuuucuugu

SEQ ID NO: 1621596 - RNA, 19 nt, Artificial Sequence
  Description of Artificial Sequence: Synthetic oligonucleotide
agggaaguggaaaagaagg

SEQ ID NO: 1621597 - RNA, 19 nt, Artificial Sequence
  Description of Artificial Sequence: Synthetic oligonucleotide
gauacaccuccacaggacg

SEQ ID NO: 1621598 - RNA, 19 nt, Artificial Sequence
  Description of Artificial Sequence: Synthetic oligonucleotide
auugauacaccuccacagg

SEQ ID NO: 1621599 - RNA, 19 nt, Artificial Sequence
  Description of Artificial Sequence: Synthetic oligonucleotide
ugaucuguaaggaaggcua

SEQ ID NO: 1621600 - RNA, 19 nt, Artificial Sequence
  Description of Artificial Sequence: Synthetic oligonucleotide
uuuguuguucaauccauga

SEQ ID NO: 1621601 - RNA, 19 nt, Artificial Sequence
  Description of Artificial Sequence: Synthetic oligonucleotide
cugguuuaaaugauggcag

SEQ ID NO: 1621602 - RNA, 19 nt, Artificial Sequence
  Description of Artificial Sequence: Synthetic oligonucleotide
acaaguuuaauugaucugu

SEQ ID NO: 1621603 - RNA, 19 nt, Artificial Sequence
  Description of Artificial Sequence: Synthetic oligonucleotide
auagacaagcaccauccuc

SEQ ID NO: 1621604 - RNA, 19 nt, Artificial Sequence
  Description of Artificial Sequence: Synthetic oligonucleotide
gucuaaguauuccuguugg

SEQ ID NO: 1621605 - RNA, 19 nt, Artificial Sequence
  Description of Artificial Sequence: Synthetic oligonucleotide
uguuguucaauccaugauu

SEQ ID NO: 1621606 - RNA, 19 nt, Artificial Sequence
  Description of Artificial Sequence: Synthetic oligonucleotide
ugguagcugacacggaugg

SEQ ID NO: 1621607 - RNA, 19 nt, Artificial Sequence
  Description of Artificial Sequence: Synthetic oligonucleotide
uuucuugucccguaaggcc

SEQ ID NO: 1621608 - RNA, 19 nt, Artificial Sequence
  Description of Artificial Sequence: Synthetic oligonucleotide
uucguugccguggagaccg

SEQ ID NO: 1621609 - RNA, 19 nt, Artificial Sequence
  Description of Artificial Sequence: Synthetic oligonucleotide
uuaacaaguuuaauugauc

SEQ ID NO: 1621610 - RNA, 19 nt, Artificial Sequence
  Description of Artificial Sequence: Synthetic oligonucleotide
aaacugacugcuuguaccu

SEQ ID NO: 1621611 - RNA, 19 nt, Artificial Sequence
  Description of Artificial Sequence: Synthetic oligonucleotide
cucagcaugcaguucaggg

SEQ ID NO: 1621612 - RNA, 19 nt, Artificial Sequence
  Description of Artificial Sequence: Synthetic oligonucleotide
ugucuaaguauuccuguug

SEQ ID NO: 1621613 - RNA, 19 nt, Artificial Sequence
  Description of Artificial Sequence: Synthetic oligonucleotide
uuaaaugauggcaggccca

SEQ ID NO: 1621614 - RNA, 19 nt, Artificial Sequence
  Description of Artificial Sequence: Synthetic oligonucleotide
ucuucauacugucuaagua

SEQ ID NO: 1621615 - RNA, 19 nt, Artificial Sequence
  Description of Artificial Sequence: Synthetic oligonucleotide
auagccugcaucucaaugu

SEQ ID NO: 1621616 - RNA, 19 nt, Artificial Sequence
  Description of Artificial Sequence: Synthetic oligonucleotide
ucuaaguauuccuguuggg

SEQ ID NO: 1621617 - RNA, 19 nt, Artificial Sequence
  Description of Artificial Sequence: Synthetic oligonucleotide
agaccgacuaguccauucc

SEQ ID NO: 1621618 - RNA, 19 nt, Artificial Sequence
  Description of Artificial Sequence: Synthetic oligonucleotide
uuaauugaucuguaaggaa

SEQ ID NO: 1621619 - RNA, 19 nt, Artificial Sequence
  Description of Artificial Sequence: Synthetic oligonucleotide
auacugccagcaccgaugc

SEQ ID NO: 1621620 - RNA, 19 nt, Artificial Sequence
  Description of Artificial Sequence: Synthetic oligonucleotide
gguagagggacacaagagg

SEQ ID NO: 1621621 - RNA, 19 nt, Artificial Sequence
  Description of Artificial Sequence: Synthetic oligonucleotide
uccaucaacuuuugucugg

SEQ ID NO: 1621622 - RNA, 19 nt, Artificial Sequence
  Description of Artificial Sequence: Synthetic oligonucleotide
uaaguauuccuguugggau

SEQ ID NO: 1621623 - RNA, 19 nt, Artificial Sequence
  Description of Artificial Sequence: Synthetic oligonucleotide
uguggcacuggcuuuccgg

SEQ ID NO: 1621624 - RNA, 19 nt, Artificial Sequence
  Description of Artificial Sequence: Synthetic oligonucleotide
uccucuauggccucauuug

SEQ ID NO: 1621625 - RNA, 19 nt, Artificial Sequence
  Description of Artificial Sequence: Synthetic oligonucleotide
uugauacaccuccacagga

SEQ ID NO: 1621626 - RNA, 19 nt, Artificial Sequence
  Description of Artificial Sequence: Synthetic oligonucleotide
uguagguaggauucucgag

SEQ ID NO: 1621627 - RNA, 19 nt, Artificial Sequence
  Description of Artificial Sequence: Synthetic oligonucleotide
gcuguauugauacaccucc

SEQ ID NO: 1621628 - RNA, 19 nt, Artificial Sequence
  Description of Artificial Sequence: Synthetic oligonucleotide
uguucaauccaugauuccu

SEQ ID NO: 1621629 - RNA, 19 nt, Artificial Sequence
  Description of Artificial Sequence: Synthetic oligonucleotide
agauggauggagcgcaagg

SEQ ID NO: 1621630 - RNA, 19 nt, Artificial Sequence
  Description of Artificial Sequence: Synthetic oligonucleotide
cuguggaaugcugagacgg

SEQ ID NO: 1621631 - RNA, 19 nt, Artificial Sequence
  Description of Artificial Sequence: Synthetic oligonucleotide
cauacugucuaaguauucc

SEQ ID NO: 1621632 - RNA, 19 nt, Artificial Sequence
  Description of Artificial Sequence: Synthetic oligonucleotide
aacaguagacuuccuuugu

SEQ ID NO: 1621633 - RNA, 19 nt, Artificial Sequence
  Description of Artificial Sequence: Synthetic oligonucleotide
uauaguggauauuccggug

SEQ ID NO: 1621634 - RNA, 19 nt, Artificial Sequence
  Description of Artificial Sequence: Synthetic oligonucleotide
aguauuccuguugggauac

SEQ ID NO: 1621635 - RNA, 19 nt, Artificial Sequence
  Description of Artificial Sequence: Synthetic oligonucleotide
guacaucucugccauagcc

SEQ ID NO: 1621636 - RNA, 19 nt, Artificial Sequence
  Description of Artificial Sequence: Synthetic oligonucleotide
guuuaaaugauggcaggcc

SEQ ID NO: 1621637 - RNA, 19 nt, Artificial Sequence
  Description of Artificial Sequence: Synthetic oligonucleotide
uuuuggugaauuccaugga

SEQ ID NO: 1621638 - RNA, 19 nt, Artificial Sequence
  Description of Artificial Sequence: Synthetic oligonucleotide
uucaccacugaauuauagu

SEQ ID NO: 1621639 - RNA, 19 nt, Artificial Sequence
  Description of Artificial Sequence: Synthetic oligonucleotide
uagguaggauucucgagcc

SEQ ID NO: 1621640 - RNA, 19 nt, Artificial Sequence
  Description of Artificial Sequence: Synthetic oligonucleotide
aguagacuuccuuugucug

SEQ ID NO: 1621641 - RNA, 19 nt, Artificial Sequence
  Description of Artificial Sequence: Synthetic oligonucleotide
gauacugccagcaccgaug

SEQ ID NO: 1621642 - RNA, 19 nt, Artificial Sequence
  Description of Artificial Sequence: Synthetic oligonucleotide
aauguguugauagguucug

SEQ ID NO: 1621643 - RNA, 19 nt, Artificial Sequence
  Description of Artificial Sequence: Synthetic oligonucleotide
uccauagacaagcaccauc

SEQ ID NO: 1621644 - RNA, 19 nt, Artificial Sequence
  Description of Artificial Sequence: Synthetic oligonucleotide
ugcuugauuaugaagccuu

SEQ ID NO: 1621645 - RNA, 19 nt, Artificial Sequence
  Description of Artificial Sequence: Synthetic oligonucleotide
gaauuauaguggauauucc

SEQ ID NO: 1621646 - RNA, 19 nt, Artificial Sequence
  Description of Artificial Sequence: Synthetic oligonucleotide
uucauacugucuaaguauu

SEQ ID NO: 1621647 - RNA, 19 nt, Artificial Sequence
  Description of Artificial Sequence: Synthetic oligonucleotide
ugauacaccuccacaggac

SEQ ID NO: 1621648 - RNA, 19 nt, Artificial Sequence
  Description of Artificial Sequence: Synthetic oligonucleotide
uucuucauacugucuaagu

SEQ ID NO: 1621649 - RNA, 19 nt, Artificial Sequence
  Description of Artificial Sequence: Synthetic oligonucleotide
aacaaaggaaggaagccaa

SEQ ID NO: 1621650 - RNA, 19 nt, Artificial Sequence
  Description of Artificial Sequence: Synthetic oligonucleotide
uaaaugauggcaggcccag

SEQ ID NO: 1621651 - RNA, 19 nt, Artificial Sequence
  Description of Artificial Sequence: Synthetic oligonucleotide
agaaagccaaagaagguug

SEQ ID NO: 1621652 - RNA, 19 nt, Artificial Sequence
  Description of Artificial Sequence: Synthetic oligonucleotide
uuggugaauuccauggaau

SEQ ID NO: 1621653 - RNA, 19 nt, Artificial Sequence
  Description of Artificial Sequence: Synthetic oligonucleotide
ccauagacaagcaccaucc

SEQ ID NO: 1621654 - RNA, 19 nt, Artificial Sequence
  Description of Artificial Sequence: Synthetic oligonucleotide
gacgguuguacaucucugc

SEQ ID NO: 1621655 - RNA, 19 nt, Artificial Sequence
  Description of Artificial Sequence: Synthetic oligonucleotide
ucuguaaggaaggcuaaac

SEQ ID NO: 1621656 - RNA, 19 nt, Artificial Sequence
  Description of Artificial Sequence: Synthetic oligonucleotide
cuuucuugucccguaaggc

SEQ ID NO: 1621657 - RNA, 19 nt, Artificial Sequence
  Description of Artificial Sequence: Synthetic oligonucleotide
uagacuuccuuugucugag

SEQ ID NO: 1621658 - RNA, 19 nt, Artificial Sequence
  Description of Artificial Sequence: Synthetic oligonucleotide
ugaacuucguugccgugga

SEQ ID NO: 1621659 - RNA, 19 nt, Artificial Sequence
  Description of Artificial Sequence: Synthetic oligonucleotide
aagguuggguggcaucaag

SEQ ID NO: 1621660 - RNA, 19 nt, Artificial Sequence
  Description of Artificial Sequence: Synthetic oligonucleotide
uuugucugaguaucucucu

SEQ ID NO: 1621661 - RNA, 19 nt, Artificial Sequence
  Description of Artificial Sequence: Synthetic oligonucleotide
cauuuuggugaauuccaug

SEQ ID NO: 1621662 - RNA, 19 nt, Artificial Sequence
  Description of Artificial Sequence: Synthetic oligonucleotide
uuguuaggauucaccacug

SEQ ID NO: 1621663 - RNA, 19 nt, Artificial Sequence
  Description of Artificial Sequence: Synthetic oligonucleotide
uaaggccuuuucaaaccag

SEQ ID NO: 1621664 - RNA, 19 nt, Artificial Sequence
  Description of Artificial Sequence: Synthetic oligonucleotide
uuguuguucaauccaugau

SEQ ID NO: 1621665 - RNA, 19 nt, Artificial Sequence
  Description of Artificial Sequence: Synthetic oligonucleotide
gaugagauggauggagcgc

SEQ ID NO: 1621666 - RNA, 19 nt, Artificial Sequence
  Description of Artificial Sequence: Synthetic oligonucleotide
aauccaugauuccucugau

SEQ ID NO: 1621667 - RNA, 19 nt, Artificial Sequence
  Description of Artificial Sequence: Synthetic oligonucleotide
ggaugagauggauggagcg

SEQ ID NO: 1621668 - RNA, 19 nt, Artificial Sequence
  Description of Artificial Sequence: Synthetic oligonucleotide
ugagacggugcugugcagg

SEQ ID NO: 1621669 - RNA, 19 nt, Artificial Sequence
  Description of Artificial Sequence: Synthetic oligonucleotide
agagguggcccgaucagcc

SEQ ID NO: 1621670 - RNA, 19 nt, Artificial Sequence
  Description of Artificial Sequence: Synthetic oligonucleotide
uaguccauuccuccaggcc

SEQ ID NO: 1621671 - RNA, 19 nt, Artificial Sequence
  Description of Artificial Sequence: Synthetic oligonucleotide
acgaggcugaacuucguug

SEQ ID NO: 1621672 - RNA, 19 nt, Artificial Sequence
  Description of Artificial Sequence: Synthetic oligonucleotide
guauugauacaccuccaca

SEQ ID NO: 1621673 - RNA, 19 nt, Artificial Sequence
  Description of Artificial Sequence: Synthetic oligonucleotide
caagaggagagguggcccg

SEQ ID NO: 1621674 - RNA, 19 nt, Artificial Sequence
  Description of Artificial Sequence: Synthetic oligonucleotide
gaucucaucaucaucccaa

SEQ ID NO: 1621675 - RNA, 19 nt, Artificial Sequence
  Description of Artificial Sequence: Synthetic oligonucleotide
agguggcccgaucagcccc

SEQ ID NO: 1621676 - RNA, 19 nt, Artificial Sequence
  Description of Artificial Sequence: Synthetic oligonucleotide
cagcaugcaguucagggug

SEQ ID NO: 1621677 - RNA, 19 nt, Artificial Sequence
  Description of Artificial Sequence: Synthetic oligonucleotide
ccauggaauguguugauag

SEQ ID NO: 1621678 - RNA, 19 nt, Artificial Sequence
  Description of Artificial Sequence: Synthetic oligonucleotide
cuuguuaggauucaccacu

SEQ ID NO: 1621679 - RNA, 19 nt, Artificial Sequence
  Description of Artificial Sequence: Synthetic oligonucleotide
cugaacuucguugccgugg

SEQ ID NO: 1621680 - RNA, 19 nt, Artificial Sequence
  Description of Artificial Sequence: Synthetic oligonucleotide
uuaugaagccuuucuuguc

SEQ ID NO: 1621681 - RNA, 19 nt, Artificial Sequence
  Description of Artificial Sequence: Synthetic oligonucleotide
acuguagguaggauucucg

SEQ ID NO: 1621682 - RNA, 19 nt, Artificial Sequence
  Description of Artificial Sequence: Synthetic oligonucleotide
aggacgguuguacaucucu

SEQ ID NO: 1621683 - RNA, 19 nt, Artificial Sequence
  Description of Artificial Sequence: Synthetic oligonucleotide
ggauucucgagccaccugc

SEQ ID NO: 1621684 - RNA, 19 nt, Artificial Sequence
  Description of Artificial Sequence: Synthetic oligonucleotide
ugcuguauugauacaccuc

SEQ ID NO: 1621685 - RNA, 19 nt, Artificial Sequence
  Description of Artificial Sequence: Synthetic oligonucleotide
ugccauagccugcaucuca

SEQ ID NO: 1621686 - RNA, 19 nt, Artificial Sequence
  Description of Artificial Sequence: Synthetic oligonucleotide
acccugguuuaaaugaugg

SEQ ID NO: 1621687 - RNA, 19 nt, Artificial Sequence
  Description of Artificial Sequence: Synthetic oligonucleotide
augcuaggaucucaucauc

SEQ ID NO: 1621688 - RNA, 19 nt, Artificial Sequence
  Description of Artificial Sequence: Synthetic oligonucleotide
uguugggauacugccagca

SEQ ID NO: 1621689 - RNA, 19 nt, Artificial Sequence
  Description of Artificial Sequence: Synthetic oligonucleotide
aaaugauggcaggcccagc

SEQ ID NO: 1621690 - RNA, 19 nt, Artificial Sequence
  Description of Artificial Sequence: Synthetic oligonucleotide
ucauacugucuaaguauuc

SEQ ID NO: 1621691 - RNA, 19 nt, Artificial Sequence
  Description of Artificial Sequence: Synthetic oligonucleotide
caauaguggccuuguuagg

SEQ ID NO: 1621692 - RNA, 19 nt, Artificial Sequence
  Description of Artificial Sequence: Synthetic oligonucleotide
cuaaguauuccuguuggga

SEQ ID NO: 1621693 - RNA, 19 nt, Artificial Sequence
  Description of Artificial Sequence: Synthetic oligonucleotide
uugaucuguaaggaaggcu

SEQ ID NO: 1621694 - RNA, 19 nt, Artificial Sequence
  Description of Artificial Sequence: Synthetic oligonucleotide
caucccaaucauucagacc

SEQ ID NO: 1621695 - RNA, 19 nt, Artificial Sequence
  Description of Artificial Sequence: Synthetic oligonucleotide
uauuccuguugggauacug

SEQ ID NO: 1621696 - RNA, 19 nt, Artificial Sequence
  Description of Artificial Sequence: Synthetic oligonucleotide
uguuaggauucaccacuga

SEQ ID NO: 1621697 - RNA, 19 nt, Artificial Sequence
  Description of Artificial Sequence: Synthetic oligonucleotide
guagagggacacaagagga

SEQ ID NO: 1621698 - RNA, 19 nt, Artificial Sequence
  Description of Artificial Sequence: Synthetic oligonucleotide
ucccguaaggccuuuucaa

SEQ ID NO: 1621699 - RNA, 19 nt, Artificial Sequence
  Description of Artificial Sequence: Synthetic oligonucleotide
uaguggauauuccgguggu

SEQ ID NO: 1621700 - RNA, 19 nt, Artificial Sequence
  Description of Artificial Sequence: Synthetic oligonucleotide
gaucccucagccacuguag

SEQ ID NO: 1621701 - RNA, 19 nt, Artificial Sequence
  Description of Artificial Sequence: Synthetic oligonucleotide
gguuaacaaguuuaauuga

SEQ ID NO: 1621702 - RNA, 19 nt, Artificial Sequence
  Description of Artificial Sequence: Synthetic oligonucleotide
uaacacagugccuggggaa

SEQ ID NO: 1621703 - RNA, 19 nt, Artificial Sequence
  Description of Artificial Sequence: Synthetic oligonucleotide
agggacugcucugcaaacc

SEQ ID NO: 1621704 - RNA, 19 nt, Artificial Sequence
  Description of Artificial Sequence: Synthetic oligonucleotide
uccggugguagcugacacg

SEQ ID NO: 1621705 - RNA, 19 nt, Artificial Sequence
  Description of Artificial Sequence: Synthetic oligonucleotide
cucuauggccucauuugug

SEQ ID NO: 1621706 - RNA, 19 nt, Artificial Sequence
  Description of Artificial Sequence: Synthetic oligonucleotide
agaagguuggguggcauca

SEQ ID NO: 1621707 - RNA, 19 nt, Artificial Sequence
  Description of Artificial Sequence: Synthetic oligonucleotide
uugauagguucugugcugu

SEQ ID NO: 1621708 - RNA, 19 nt, Artificial Sequence
  Description of Artificial Sequence: Synthetic oligonucleotide
acaggacgguuguacaucu

SEQ ID NO: 1621709 - RNA, 19 nt, Artificial Sequence
  Description of Artificial Sequence: Synthetic oligonucleotide
auucaccacugaauuauag

SEQ ID NO: 1621710 - RNA, 19 nt, Artificial Sequence
  Description of Artificial Sequence: Synthetic oligonucleotide
ggcgaaaacugacugcuug

SEQ ID NO: 1621711 - RNA, 19 nt, Artificial Sequence
  Description of Artificial Sequence: Synthetic oligonucleotide
ggaauguguugauagguuc

SEQ ID NO: 1621712 - RNA, 19 nt, Artificial Sequence
  Description of Artificial Sequence: Synthetic oligonucleotide
gugacgaggcugaacuucg

SEQ ID NO: 1621713 - RNA, 19 nt, Artificial Sequence
  Description of Artificial Sequence: Synthetic oligonucleotide
ugccucucgccuaccuucg

SEQ ID NO: 1621714 - RNA, 19 nt, Artificial Sequence
  Description of Artificial Sequence: Synthetic oligonucleotide
cuauggccucauuuguggc

SEQ ID NO: 1621715 - RNA, 19 nt, Artificial Sequence
  Description of Artificial Sequence: Synthetic oligonucleotide
agccaagagggaagaaagc

SEQ ID NO: 1621716 - RNA, 19 nt, Artificial Sequence
  Description of Artificial Sequence: Synthetic oligonucleotide
cuaguccauuccuccaggc

SEQ ID NO: 1621717 - RNA, 19 nt, Artificial Sequence
  Description of Artificial Sequence: Synthetic oligonucleotide
gaugcuaggaucucaucau

SEQ ID NO: 1621718 - RNA, 19 nt, Artificial Sequence
  Description of Artificial Sequence: Synthetic oligonucleotide
ugcaguucagggugcucag

SEQ ID NO: 1621719 - RNA, 19 nt, Artificial Sequence
  Description of Artificial Sequence: Synthetic oligonucleotide
ggcuaaacaguagacuucc

SEQ ID NO: 1621720 - RNA, 19 nt, Artificial Sequence
  Description of Artificial Sequence: Synthetic oligonucleotide
uccaacauuuguuguucaa

SEQ ID NO: 1621721 - RNA, 19 nt, Artificial Sequence
  Description of Artificial Sequence: Synthetic oligonucleotide
gguuuaaaugauggcaggc

SEQ ID NO: 1621722 - RNA, 19 nt, Artificial Sequence
  Description of Artificial Sequence: Synthetic oligonucleotide
gggcuuaaugccuagcuca

SEQ ID NO: 1621723 - RNA, 19 nt, Artificial Sequence
  Description of Artificial Sequence: Synthetic oligonucleotide
aggcuaaacaguagacuuc

SEQ ID NO: 1621724 - RNA, 19 nt, Artificial Sequence
  Description of Artificial Sequence: Synthetic oligonucleotide
uucagggugcucaggugac

SEQ ID NO: 1621725 - RNA, 19 nt, Artificial Sequence
  Description of Artificial Sequence: Synthetic oligonucleotide
ggcaacagggcacaucagc

SEQ ID NO: 1621726 - RNA, 19 nt, Artificial Sequence
  Description of Artificial Sequence: Synthetic oligonucleotide
uuaaugccuagcucagcau

SEQ ID NO: 1621727 - RNA, 19 nt, Artificial Sequence
  Description of Artificial Sequence: Synthetic oligonucleotide
ugcaaacccugguuuaaau

SEQ ID NO: 1621728 - RNA, 19 nt, Artificial Sequence
  Description of Artificial Sequence: Synthetic oligonucleotide
agcugacacggauggguuc

SEQ ID NO: 1621729 - RNA, 19 nt, Artificial Sequence
  Description of Artificial Sequence: Synthetic oligonucleotide
uuaccauggcaguuguuuu

SEQ ID NO: 1621730 - RNA, 19 nt, Artificial Sequence
  Description of Artificial Sequence: Synthetic oligonucleotide
aacccugguuuaaaugaug

SEQ ID NO: 1621731 - RNA, 19 nt, Artificial Sequence
  Description of Artificial Sequence: Synthetic oligonucleotide
gagaccgacuaguccauuc

SEQ ID NO: 1621732 - RNA, 19 nt, Artificial Sequence
  Description of Artificial Sequence: Synthetic oligonucleotide
acacaagaggagagguggc

SEQ ID NO: 1621733 - RNA, 19 nt, Artificial Sequence
  Description of Artificial Sequence: Synthetic oligonucleotide
uggagcgcaagggugggcc

SEQ ID NO: 1621734 - RNA, 19 nt, Artificial Sequence
  Description of Artificial Sequence: Synthetic oligonucleotide
auauuccggugguagcuga

SEQ ID NO: 1621735 - RNA, 19 nt, Artificial Sequence
  Description of Artificial Sequence: Synthetic oligonucleotide
gcaaacccugguuuaaaug

SEQ ID NO: 1621736 - RNA, 19 nt, Artificial Sequence
  Description of Artificial Sequence: Synthetic oligonucleotide
auacaccuccacaggacgg

SEQ ID NO: 1621737 - RNA, 19 nt, Artificial Sequence
  Description of Artificial Sequence: Synthetic oligonucleotide
ugguuaccauggcaguugu

SEQ ID NO: 1621738 - RNA, 19 nt, Artificial Sequence
  Description of Artificial Sequence: Synthetic oligonucleotide
gccaagagggaagaaagcc

SEQ ID NO: 1621739 - RNA, 19 nt, Artificial Sequence
  Description of Artificial Sequence: Synthetic oligonucleotide
uaccuggugcacaggguga

SEQ ID NO: 1621740 - RNA, 19 nt, Artificial Sequence
  Description of Artificial Sequence: Synthetic oligonucleotide
gauggagcgcaaggguggg

SEQ ID NO: 1621741 - RNA, 19 nt, Artificial Sequence
  Description of Artificial Sequence: Synthetic oligonucleotide
guaaggaaggcuaaacagu

SEQ ID NO: 1621742 - RNA, 19 nt, Artificial Sequence
  Description of Artificial Sequence: Synthetic oligonucleotide
aaacccugguuuaaaugau

SEQ ID NO: 1621743 - RNA, 19 nt, Artificial Sequence
  Description of Artificial Sequence: Synthetic oligonucleotide
ugucccguaaggccuuuuc

SEQ ID NO: 1621744 - RNA, 19 nt, Artificial Sequence
  Description of Artificial Sequence: Synthetic oligonucleotide
guuaacaaguuuaauugau

SEQ ID NO: 1621745 - RNA, 19 nt, Artificial Sequence
  Description of Artificial Sequence: Synthetic oligonucleotide
agguuggguggcaucaagg

SEQ ID NO: 1621746 - RNA, 19 nt, Artificial Sequence
  Description of Artificial Sequence: Synthetic oligonucleotide
gaaggcuaaacaguagacu

SEQ ID NO: 1621747 - RNA, 19 nt, Artificial Sequence
  Description of Artificial Sequence: Synthetic oligonucleotide
agaguccccuguggaaugc

SEQ ID NO: 1621748 - RNA, 19 nt, Artificial Sequence
  Description of Artificial Sequence: Synthetic oligonucleotide
uugccguggagaccgacua

SEQ ID NO: 1621749 - RNA, 19 nt, Artificial Sequence
  Description of Artificial Sequence: Synthetic oligonucleotide
agcaccgaugcuaggaucu

SEQ ID NO: 1621750 - RNA, 19 nt, Artificial Sequence
  Description of Artificial Sequence: Synthetic oligonucleotide
caucaagggcaggaguggg

SEQ ID NO: 1621751 - RNA, 19 nt, Artificial Sequence
  Description of Artificial Sequence: Synthetic oligonucleotide
aggcugaacuucguugccg

SEQ ID NO: 1621752 - RNA, 19 nt, Artificial Sequence
  Description of Artificial Sequence: Synthetic oligonucleotide
augugguuaccauggcagu

SEQ ID NO: 1621753 - RNA, 19 nt, Artificial Sequence
  Description of Artificial Sequence: Synthetic oligonucleotide
ccuuucuugucccguaagg

SEQ ID NO: 1621754 - RNA, 19 nt, Artificial Sequence
  Description of Artificial Sequence: Synthetic oligonucleotide
agagggaaguggaaaagaa

SEQ ID NO: 1621755 - RNA, 19 nt, Artificial Sequence
  Description of Artificial Sequence: Synthetic oligonucleotide
ggugaaggagguuuggcaa

SEQ ID NO: 1621756 - RNA, 19 nt, Artificial Sequence
  Description of Artificial Sequence: Synthetic oligonucleotide
cugccagcaccgaugcuag

SEQ ID NO: 1621757 - RNA, 19 nt, Artificial Sequence
  Description of Artificial Sequence: Synthetic oligonucleotide
cuguagguaggauucucga

SEQ ID NO: 1621758 - RNA, 19 nt, Artificial Sequence
  Description of Artificial Sequence: Synthetic oligonucleotide
agcaugcaguucagggugc

SEQ ID NO: 1621759 - RNA, 19 nt, Artificial Sequence
  Description of Artificial Sequence: Synthetic oligonucleotide
caaugugguuaccauggca

SEQ ID NO: 1621760 - RNA, 19 nt, Artificial Sequence
  Description of Artificial Sequence: Synthetic oligonucleotide
gccuuguuaggauucacca

SEQ ID NO: 1621761 - RNA, 19 nt, Artificial Sequence
  Description of Artificial Sequence: Synthetic oligonucleotide
ggggacaucugcuggauga

SEQ ID NO: 1621762 - RNA, 19 nt, Artificial Sequence
  Description of Artificial Sequence: Synthetic oligonucleotide
caaaggaaggaagccaaga

SEQ ID NO: 1621763 - RNA, 19 nt, Artificial Sequence
  Description of Artificial Sequence: Synthetic oligonucleotide
agacaagcaccauccuccu

SEQ ID NO: 1621764 - RNA, 19 nt, Artificial Sequence
  Description of Artificial Sequence: Synthetic oligonucleotide
caugauuccucugaugucu

SEQ ID NO: 1621765 - RNA, 19 nt, Artificial Sequence
  Description of Artificial Sequence: Synthetic oligonucleotide
accgacuaguccauuccuc

SEQ ID NO: 1621766 - RNA, 19 nt, Artificial Sequence
  Description of Artificial Sequence: Synthetic oligonucleotide
guugggauacugccagcac

SEQ ID NO: 1621767 - RNA, 19 nt, Artificial Sequence
  Description of Artificial Sequence: Synthetic oligonucleotide
agccacuguagguaggauu

SEQ ID NO: 1621768 - RNA, 19 nt, Artificial Sequence
  Description of Artificial Sequence: Synthetic oligonucleotide
aucucaucaucaucccaau

SEQ ID NO: 1621769 - RNA, 19 nt, Artificial Sequence
  Description of Artificial Sequence: Synthetic oligonucleotide
cguaaggccuuuucaaacc

SEQ ID NO: 1621770 - RNA, 19 nt, Artificial Sequence
  Description of Artificial Sequence: Synthetic oligonucleotide
ccugguuuaaaugauggca

SEQ ID NO: 1621771 - RNA, 19 nt, Artificial Sequence
  Description of Artificial Sequence: Synthetic oligonucleotide
aggauucaccacugaauua

SEQ ID NO: 1621772 - RNA, 19 nt, Artificial Sequence
  Description of Artificial Sequence: Synthetic oligonucleotide
aagccuuucuugucccgua

SEQ ID NO: 1621773 - RNA, 19 nt, Artificial Sequence
  Description of Artificial Sequence: Synthetic oligonucleotide
uacaccuccacaggacggu

SEQ ID NO: 1621774 - RNA, 19 nt, Artificial Sequence
  Description of Artificial Sequence: Synthetic oligonucleotide
ugccguggagaccgacuag

SEQ ID NO: 1621775 - RNA, 19 nt, Artificial Sequence
  Description of Artificial Sequence: Synthetic oligonucleotide
caaguuuaauugaucugua

SEQ ID NO: 1621776 - RNA, 19 nt, Artificial Sequence
  Description of Artificial Sequence: Synthetic oligonucleotide
ccgacuaguccauuccucc

SEQ ID NO: 1621777 - RNA, 19 nt, Artificial Sequence
  Description of Artificial Sequence: Synthetic oligonucleotide
uaggauucucgagccaccu

SEQ ID NO: 1621778 - RNA, 19 nt, Artificial Sequence
  Description of Artificial Sequence: Synthetic oligonucleotide
ugugguuaccauggcaguu

SEQ ID NO: 1621779 - RNA, 19 nt, Artificial Sequence
  Description of Artificial Sequence: Synthetic oligonucleotide
ucagggugcucaggugacg

SEQ ID NO: 1621780 - RNA, 19 nt, Artificial Sequence
  Description of Artificial Sequence: Synthetic oligonucleotide
gagauggauggagcgcaag

SEQ ID NO: 1621781 - RNA, 19 nt, Artificial Sequence
  Description of Artificial Sequence: Synthetic oligonucleotide
agguuuggcaagagcuaac

SEQ ID NO: 1621782 - RNA, 19 nt, Artificial Sequence
  Description of Artificial Sequence: Synthetic oligonucleotide
gagagguggcccgaucagc

SEQ ID NO: 1621783 - RNA, 19 nt, Artificial Sequence
  Description of Artificial Sequence: Synthetic oligonucleotide
acagggcacaucagcuggc

SEQ ID NO: 1621784 - RNA, 19 nt, Artificial Sequence
  Description of Artificial Sequence: Synthetic oligonucleotide
ucgccuaccuucggcaccc

SEQ ID NO: 1621785 - RNA, 19 nt, Artificial Sequence
  Description of Artificial Sequence: Synthetic oligonucleotide
aucagccccuggcgaaaac

SEQ ID NO: 1621786 - RNA, 19 nt, Artificial Sequence
  Description of Artificial Sequence: Synthetic oligonucleotide
caggugacgaggcugaacu

SEQ ID NO: 1621787 - RNA, 19 nt, Artificial Sequence
  Description of Artificial Sequence: Synthetic oligonucleotide
ugagauggauggagcgcaa

SEQ ID NO: 1621788 - RNA, 19 nt, Artificial Sequence
  Description of Artificial Sequence: Synthetic oligonucleotide
cucgccuaccuucggcacc

SEQ ID NO: 1621789 - RNA, 19 nt, Artificial Sequence
  Description of Artificial Sequence: Synthetic oligonucleotide
uagcugacacggauggguu

SEQ ID NO: 1621790 - RNA, 19 nt, Artificial Sequence
  Description of Artificial Sequence: Synthetic oligonucleotide
aggauucucgagccaccug

SEQ ID NO: 1621791 - RNA, 19 nt, Artificial Sequence
  Description of Artificial Sequence: Synthetic oligonucleotide
ucugugugccucucgccua

SEQ ID NO: 1621792 - RNA, 19 nt, Artificial Sequence
  Description of Artificial Sequence: Synthetic oligonucleotide
cagccccuggcgaaaacug

SEQ ID NO: 1621793 - RNA, 19 nt, Artificial Sequence
  Description of Artificial Sequence: Synthetic oligonucleotide
ucucgccuaccuucggcac

SEQ ID NO: 1621794 - RNA, 19 nt, Artificial Sequence
  Description of Artificial Sequence: Synthetic oligonucleotide
guuaccauggcaguuguuu

SEQ ID NO: 1621795 - RNA, 19 nt, Artificial Sequence
  Description of Artificial Sequence: Synthetic oligonucleotide
ugcuuguaccuggugcaca

SEQ ID NO: 1621796 - RNA, 19 nt, Artificial Sequence
  Description of Artificial Sequence: Synthetic oligonucleotide
gagguggcccgaucagccc

SEQ ID NO: 1621797 - RNA, 19 nt, Artificial Sequence
  Description of Artificial Sequence: Synthetic oligonucleotide
cagaguccccuguggaaug

SEQ ID NO: 1621798 - RNA, 19 nt, Artificial Sequence
  Description of Artificial Sequence: Synthetic oligonucleotide
cauuuguuguucaauccau

SEQ ID NO: 1621799 - RNA, 19 nt, Artificial Sequence
  Description of Artificial Sequence: Synthetic oligonucleotide
cacaggacgguuguacauc

SEQ ID NO: 1621800 - RNA, 19 nt, Artificial Sequence
  Description of Artificial Sequence: Synthetic oligonucleotide
guagcugacacggaugggu

SEQ ID NO: 1621801 - RNA, 19 nt, Artificial Sequence
  Description of Artificial Sequence: Synthetic oligonucleotide
gagggguuaacaaguuuaa

SEQ ID NO: 1621802 - RNA, 19 nt, Artificial Sequence
  Description of Artificial Sequence: Synthetic oligonucleotide
gccacuguagguaggauuc

SEQ ID NO: 1621803 - RNA, 19 nt, Artificial Sequence
  Description of Artificial Sequence: Synthetic oligonucleotide
cuguauugauacaccucca

SEQ ID NO: 1621804 - RNA, 19 nt, Artificial Sequence
  Description of Artificial Sequence: Synthetic oligonucleotide
gucugaguaucucucuucu

SEQ ID NO: 1621805 - RNA, 19 nt, Artificial Sequence
  Description of Artificial Sequence: Synthetic oligonucleotide
ccuuguuaggauucaccac

SEQ ID NO: 1621806 - RNA, 19 nt, Artificial Sequence
  Description of Artificial Sequence: Synthetic oligonucleotide
gugguagcugacacggaug

SEQ ID NO: 1621807 - RNA, 19 nt, Artificial Sequence
  Description of Artificial Sequence: Synthetic oligonucleotide
ccguaaggccuuuucaaac

SEQ ID NO: 1621808 - RNA, 19 nt, Artificial Sequence
  Description of Artificial Sequence: Synthetic oligonucleotide
ucaggugacgaggcugaac

SEQ ID NO: 1621809 - RNA, 19 nt, Artificial Sequence
  Description of Artificial Sequence: Synthetic oligonucleotide
ucccaaucauucagaccaa

SEQ ID NO: 1621810 - RNA, 19 nt, Artificial Sequence
  Description of Artificial Sequence: Synthetic oligonucleotide
gcugagacggugcugugca

SEQ ID NO: 1621811 - RNA, 19 nt, Artificial Sequence
  Description of Artificial Sequence: Synthetic oligonucleotide
gucccguaaggccuuuuca

SEQ ID NO: 1621812 - RNA, 19 nt, Artificial Sequence
  Description of Artificial Sequence: Synthetic oligonucleotide
caguagacuuccuuugucu

SEQ ID NO: 1621813 - RNA, 19 nt, Artificial Sequence
  Description of Artificial Sequence: Synthetic oligonucleotide
ccggugguagcugacacgg

SEQ ID NO: 1621814 - RNA, 19 nt, Artificial Sequence
  Description of Artificial Sequence: Synthetic oligonucleotide
cgaggcugaacuucguugc

SEQ ID NO: 1621815 - RNA, 19 nt, Artificial Sequence
  Description of Artificial Sequence: Synthetic oligonucleotide
ggagagguggcccgaucag

SEQ ID NO: 1621816 - RNA, 19 nt, Artificial Sequence
  Description of Artificial Sequence: Synthetic oligonucleotide
ccuggcgaaaacugacugc

SEQ ID NO: 1621817 - RNA, 19 nt, Artificial Sequence
  Description of Artificial Sequence: Synthetic oligonucleotide
gcaucaagggcaggagugg

SEQ ID NO: 1621818 - RNA, 19 nt, Artificial Sequence
  Description of Artificial Sequence: Synthetic oligonucleotide
uccauggaauguguugaua

SEQ ID NO: 1621819 - RNA, 19 nt, Artificial Sequence
  Description of Artificial Sequence: Synthetic oligonucleotide
ggcacuggcuuuccggggc

SEQ ID NO: 1621820 - RNA, 19 nt, Artificial Sequence
  Description of Artificial Sequence: Synthetic oligonucleotide
cagggacugcucugcaaac

SEQ ID NO: 1621821 - RNA, 19 nt, Artificial Sequence
  Description of Artificial Sequence: Synthetic oligonucleotide
cucucgccuaccuucggca

SEQ ID NO: 1621822 - RNA, 19 nt, Artificial Sequence
  Description of Artificial Sequence: Synthetic oligonucleotide
agggugcucaggugacgag

SEQ ID NO: 1621823 - RNA, 19 nt, Artificial Sequence
  Description of Artificial Sequence: Synthetic oligonucleotide
gaacuucguugccguggag

SEQ ID NO: 1621824 - RNA, 19 nt, Artificial Sequence
  Description of Artificial Sequence: Synthetic oligonucleotide
aucagggacugcucugcaa

SEQ ID NO: 1621825 - RNA, 19 nt, Artificial Sequence
  Description of Artificial Sequence: Synthetic oligonucleotide
agcgcaagggugggccagc

SEQ ID NO: 1621826 - RNA, 19 nt, Artificial Sequence
  Description of Artificial Sequence: Synthetic oligonucleotide
cuguugggauacugccagc

SEQ ID NO: 1621827 - RNA, 19 nt, Artificial Sequence
  Description of Artificial Sequence: Synthetic oligonucleotide
ucgagggaugcuguccagu

SEQ ID NO: 1621828 - RNA, 19 nt, Artificial Sequence
  Description of Artificial Sequence: Synthetic oligonucleotide
ugacgaggcugaacuucgu

SEQ ID NO: 1621829 - RNA, 19 nt, Artificial Sequence
  Description of Artificial Sequence: Synthetic oligonucleotide
ggugacgaggcugaacuuc

SEQ ID NO: 1621830 - RNA, 19 nt, Artificial Sequence
  Description of Artificial Sequence: Synthetic oligonucleotide
ggcuuaaugccuagcucag

SEQ ID NO: 1621831 - RNA, 19 nt, Artificial Sequence
  Description of Artificial Sequence: Synthetic oligonucleotide
ggugcucaggugacgaggc

SEQ ID NO: 1621832 - RNA, 19 nt, Artificial Sequence
  Description of Artificial Sequence: Synthetic oligonucleotide
gggugcucaggugacgagg

SEQ ID NO: 1621833 - RNA, 19 nt, Artificial Sequence
  Description of Artificial Sequence: Synthetic oligonucleotide
gugcuguauugauacaccu

SEQ ID NO: 1621834 - RNA, 19 nt, Artificial Sequence
  Description of Artificial Sequence: Synthetic oligonucleotide
agguaggauucucgagcca

SEQ ID NO: 1621835 - RNA, 19 nt, Artificial Sequence
  Description of Artificial Sequence: Synthetic oligonucleotide
ggauucaccacugaauuau

SEQ ID NO: 1621836 - RNA, 19 nt, Artificial Sequence
  Description of Artificial Sequence: Synthetic oligonucleotide
gguuuggcaagagcuaaca

SEQ ID NO: 1621837 - RNA, 19 nt, Artificial Sequence
  Description of Artificial Sequence: Synthetic oligonucleotide
cuggcgaaaacugacugcu

SEQ ID NO: 1621838 - RNA, 19 nt, Artificial Sequence
  Description of Artificial Sequence: Synthetic oligonucleotide
auggagcgcaagggugggc

SEQ ID NO: 1621839 - RNA, 19 nt, Artificial Sequence
  Description of Artificial Sequence: Synthetic oligonucleotide
gaugagggcccggcacucc

SEQ ID NO: 1621840 - RNA, 19 nt, Artificial Sequence
  Description of Artificial Sequence: Synthetic oligonucleotide
ucggcacccuuuccagagu

SEQ ID NO: 1621841 - RNA, 19 nt, Artificial Sequence
  Description of Artificial Sequence: Synthetic oligonucleotide
cccugguuuaaaugauggc

SEQ ID NO: 1621842 - RNA, 19 nt, Artificial Sequence
  Description of Artificial Sequence: Synthetic oligonucleotide
ggucgagggaugcugucca

SEQ ID NO: 1621843 - RNA, 19 nt, Artificial Sequence
  Description of Artificial Sequence: Synthetic oligonucleotide
gagcgcaagggugggccag

SEQ ID NO: 1621844 - RNA, 19 nt, Artificial Sequence
  Description of Artificial Sequence: Synthetic oligonucleotide
gucgagggaugcuguccag

SEQ ID NO: 1621845 - RNA, 19 nt, Artificial Sequence
  Description of Artificial Sequence: Synthetic oligonucleotide
agggguuaacaaguuuaau

SEQ ID NO: 1621846 - RNA, 19 nt, Artificial Sequence
  Description of Artificial Sequence: Synthetic oligonucleotide
uggcgggccuguuucuccu

SEQ ID NO: 1621847 - RNA, 19 nt, Artificial Sequence
  Description of Artificial Sequence: Synthetic oligonucleotide
uggcuggguccccggaccu

SEQ ID NO: 1621848 - RNA, 19 nt, Artificial Sequence
  Description of Artificial Sequence: Synthetic oligonucleotide
gaccgacuaguccauuccu

SEQ ID NO: 1621849 - RNA, 19 nt, Artificial Sequence
  Description of Artificial Sequence: Synthetic oligonucleotide
gccuuuucaaaccaguguu

SEQ ID NO: 1621850 - RNA, 19 nt, Artificial Sequence
  Description of Artificial Sequence: Synthetic oligonucleotide
ggacacaagaggagaggug

SEQ ID NO: 1621851 - RNA, 19 nt, Artificial Sequence
  Description of Artificial Sequence: Synthetic oligonucleotide
cugagacggugcugugcag

SEQ ID NO: 1621852 - RNA, 19 nt, Artificial Sequence
  Description of Artificial Sequence: Synthetic oligonucleotide
ugccagcaccgaugcuagg

SEQ ID NO: 1621853 - RNA, 19 nt, Artificial Sequence
  Description of Artificial Sequence: Synthetic oligonucleotide
accgaugcuaggaucucau

SEQ ID NO: 1621854 - RNA, 19 nt, Artificial Sequence
  Description of Artificial Sequence: Synthetic oligonucleotide
gaacugcauguggcacugg

SEQ ID NO: 1621855 - RNA, 19 nt, Artificial Sequence
  Description of Artificial Sequence: Synthetic oligonucleotide
agacggugcugugcagggg

SEQ ID NO: 1621856 - RNA, 19 nt, Artificial Sequence
  Description of Artificial Sequence: Synthetic oligonucleotide
ggugaauuccauggaaugu

SEQ ID NO: 1621857 - RNA, 19 nt, Artificial Sequence
  Description of Artificial Sequence: Synthetic oligonucleotide
cgaugcuaggaucucauca

SEQ ID NO: 1621858 - RNA, 19 nt, Artificial Sequence
  Description of Artificial Sequence: Synthetic oligonucleotide
cugaugucuuuauagcauu

SEQ ID NO: 1621859 - RNA, 19 nt, Artificial Sequence
  Description of Artificial Sequence: Synthetic oligonucleotide
uggcgaaaacugacugcuu

SEQ ID NO: 1621860 - RNA, 19 nt, Artificial Sequence
  Description of Artificial Sequence: Synthetic oligonucleotide
ggcccggcacuccagagca

SEQ ID NO: 1621861 - RNA, 19 nt, Artificial Sequence
  Description of Artificial Sequence: Synthetic oligonucleotide
ggacgguuguacaucucug

SEQ ID NO: 1621862 - RNA, 19 nt, Artificial Sequence
  Description of Artificial Sequence: Synthetic oligonucleotide
cugcuuguaccuggugcac

SEQ ID NO: 1621863 - RNA, 19 nt, Artificial Sequence
  Description of Artificial Sequence: Synthetic oligonucleotide
agagcaggguagagggaca

SEQ ID NO: 1621864 - RNA, 19 nt, Artificial Sequence
  Description of Artificial Sequence: Synthetic oligonucleotide
cccuggcgaaaacugacug

SEQ ID NO: 1621865 - RNA, 19 nt, Artificial Sequence
  Description of Artificial Sequence: Synthetic oligonucleotide
ccaugauuccucugauguc

SEQ ID NO: 1621866 - RNA, 19 nt, Artificial Sequence
  Description of Artificial Sequence: Synthetic oligonucleotide
gguagcugacacggauggg

SEQ ID NO: 1621867 - RNA, 19 nt, Artificial Sequence
  Description of Artificial Sequence: Synthetic oligonucleotide
cagucuguagcucguuucu

SEQ ID NO: 1621868 - RNA, 19 nt, Artificial Sequence
  Description of Artificial Sequence: Synthetic oligonucleotide
gcugacacggauggguuca

SEQ ID NO: 1621869 - RNA, 19 nt, Artificial Sequence
  Description of Artificial Sequence: Synthetic oligonucleotide
ggauauuccggugguagcu

SEQ ID NO: 1621870 - RNA, 19 nt, Artificial Sequence
  Description of Artificial Sequence: Synthetic oligonucleotide
aagcaccauccuccuucau

SEQ ID NO: 1621871 - RNA, 19 nt, Artificial Sequence
  Description of Artificial Sequence: Synthetic oligonucleotide
gggacaucugcuggaugag

SEQ ID NO: 1621872 - RNA, 19 nt, Artificial Sequence
  Description of Artificial Sequence: Synthetic oligonucleotide
uacugccagcaccgaugcu

SEQ ID NO: 1621873 - RNA, 19 nt, Artificial Sequence
  Description of Artificial Sequence: Synthetic oligonucleotide
gauucucgagccaccugcu

SEQ ID NO: 1621874 - RNA, 19 nt, Artificial Sequence
  Description of Artificial Sequence: Synthetic oligonucleotide
uguggccucccagucugua

SEQ ID NO: 1621875 - RNA, 19 nt, Artificial Sequence
  Description of Artificial Sequence: Synthetic oligonucleotide
guccccuguggaaugcuga

SEQ ID NO: 1621876 - RNA, 19 nt, Artificial Sequence
  Description of Artificial Sequence: Synthetic oligonucleotide
aggugacgaggcugaacuu

SEQ ID NO: 1621877 - RNA, 19 nt, Artificial Sequence
  Description of Artificial Sequence: Synthetic oligonucleotide
uuguggccucccagucugu

SEQ ID NO: 1621878 - RNA, 19 nt, Artificial Sequence
  Description of Artificial Sequence: Synthetic oligonucleotide
ugugugccucucgccuacc

SEQ ID NO: 1621879 - RNA, 19 nt, Artificial Sequence
  Description of Artificial Sequence: Synthetic oligonucleotide
gggucgagggaugcugucc

SEQ ID NO: 1621880 - RNA, 19 nt, Artificial Sequence
  Description of Artificial Sequence: Synthetic oligonucleotide
ggcacuccagagcagggua

SEQ ID NO: 1621881 - RNA, 19 nt, Artificial Sequence
  Description of Artificial Sequence: Synthetic oligonucleotide
gcuuaaugccuagcucagc

SEQ ID NO: 1621882 - RNA, 19 nt, Artificial Sequence
  Description of Artificial Sequence: Synthetic oligonucleotide
cagggugcucaggugacga

SEQ ID NO: 1621883 - RNA, 19 nt, Artificial Sequence
  Description of Artificial Sequence: Synthetic oligonucleotide
cauagacaagcaccauccu

SEQ ID NO: 1621884 - RNA, 19 nt, Artificial Sequence
  Description of Artificial Sequence: Synthetic oligonucleotide
gcugaacuucguugccgug

SEQ ID NO: 1621885 - RNA, 19 nt, Artificial Sequence
  Description of Artificial Sequence: Synthetic oligonucleotide
caggacgguuguacaucuc

SEQ ID NO: 1621886 - RNA, 19 nt, Artificial Sequence
  Description of Artificial Sequence: Synthetic oligonucleotide
caugcaguucagggugcuc

SEQ ID NO: 1621887 - RNA, 19 nt, Artificial Sequence
  Description of Artificial Sequence: Synthetic oligonucleotide
accuggugcacagggugaa

SEQ ID NO: 1621888 - RNA, 19 nt, Artificial Sequence
  Description of Artificial Sequence: Synthetic oligonucleotide
gcgaaaacugacugcuugu

SEQ ID NO: 1621889 - RNA, 19 nt, Artificial Sequence
  Description of Artificial Sequence: Synthetic oligonucleotide
ugacacggauggguucauc

SEQ ID NO: 1621890 - RNA, 19 nt, Artificial Sequence
  Description of Artificial Sequence: Synthetic oligonucleotide
gacgaggcugaacuucguu

SEQ ID NO: 1621891 - RNA, 19 nt, Artificial Sequence
  Description of Artificial Sequence: Synthetic oligonucleotide
agcaggguagagggacaca

SEQ ID NO: 1621892 - RNA, 19 nt, Artificial Sequence
  Description of Artificial Sequence: Synthetic oligonucleotide
agccccuggcgaaaacuga

SEQ ID NO: 1621893 - RNA, 19 nt, Artificial Sequence
  Description of Artificial Sequence: Synthetic oligonucleotide
guagcucguuucuugucuu

SEQ ID NO: 1621894 - RNA, 19 nt, Artificial Sequence
  Description of Artificial Sequence: Synthetic oligonucleotide
gggcccggcacuccagagc

SEQ ID NO: 1621895 - RNA, 19 nt, Artificial Sequence
  Description of Artificial Sequence: Synthetic oligonucleotide
cacuccagagcaggguaga

SEQ ID NO: 1621896 - RNA, 19 nt, Artificial Sequence
  Description of Artificial Sequence: Synthetic oligonucleotide
ggcugaacuucguugccgu

SEQ ID NO: 1621897 - RNA, 19 nt, Artificial Sequence
  Description of Artificial Sequence: Synthetic oligonucleotide
cuccucuauggccucauuu

SEQ ID NO: 1621898 - RNA, 19 nt, Artificial Sequence
  Description of Artificial Sequence: Synthetic oligonucleotide
cugacugcuuguaccuggu

SEQ ID NO: 1621899 - RNA, 19 nt, Artificial Sequence
  Description of Artificial Sequence: Synthetic oligonucleotide
guugccguggagaccgacu

SEQ ID NO: 1621900 - RNA, 19 nt, Artificial Sequence
  Description of Artificial Sequence: Synthetic oligonucleotide
cccguaaggccuuuucaaa

SEQ ID NO: 1621901 - RNA, 19 nt, Artificial Sequence
  Description of Artificial Sequence: Synthetic oligonucleotide
uuuccggggcuggcugggu

SEQ ID NO: 1621902 - RNA, 19 nt, Artificial Sequence
  Description of Artificial Sequence: Synthetic oligonucleotide
caccgaugcuaggaucuca

SEQ ID NO: 1621903 - RNA, 19 nt, Artificial Sequence
  Description of Artificial Sequence: Synthetic oligonucleotide
gccccuggcgaaaacugac

SEQ ID NO: 1621904 - RNA, 19 nt, Artificial Sequence
  Description of Artificial Sequence: Synthetic oligonucleotide
cgguuguacaucucugcca

SEQ ID NO: 1621905 - RNA, 19 nt, Artificial Sequence
  Description of Artificial Sequence: Synthetic oligonucleotide
ggccucauuuguggccucc

SEQ ID NO: 1621906 - RNA, 19 nt, Artificial Sequence
  Description of Artificial Sequence: Synthetic oligonucleotide
gccucauuuguggccuccc

SEQ ID NO: 1621907 - RNA, 19 nt, Artificial Sequence
  Description of Artificial Sequence: Synthetic oligonucleotide
gccucucgccuaccuucgg

SEQ ID NO: 1621908 - RNA, 19 nt, Artificial Sequence
  Description of Artificial Sequence: Synthetic oligonucleotide
ggagcgcaagggugggcca

SEQ ID NO: 1621909 - RNA, 19 nt, Artificial Sequence
  Description of Artificial Sequence: Synthetic oligonucleotide
ccguggagaccgacuaguc

SEQ ID NO: 1621910 - RNA, 19 nt, Artificial Sequence
  Description of Artificial Sequence: Synthetic oligonucleotide
ggauacugccagcaccgau

SEQ ID NO: 1621911 - RNA, 19 nt, Artificial Sequence
  Description of Artificial Sequence: Synthetic oligonucleotide
ccgaugcuaggaucucauc

SEQ ID NO: 1621912 - RNA, 19 nt, Artificial Sequence
  Description of Artificial Sequence: Synthetic oligonucleotide
ggggucgagggaugcuguc

SEQ ID NO: 1621913 - RNA, 19 nt, Artificial Sequence
  Description of Artificial Sequence: Synthetic oligonucleotide
ccucuauggccucauuugu

SEQ ID NO: 1621914 - RNA, 19 nt, Artificial Sequence
  Description of Artificial Sequence: Synthetic oligonucleotide
gacaagcaccauccuccuu

SEQ ID NO: 1621915 - RNA, 19 nt, Artificial Sequence
  Description of Artificial Sequence: Synthetic oligonucleotide
ccaacauuuguuguucaau

SEQ ID NO: 1621916 - RNA, 19 nt, Artificial Sequence
  Description of Artificial Sequence: Synthetic oligonucleotide
gggcaacagggcacaucag

SEQ ID NO: 1621917 - RNA, 19 nt, Artificial Sequence
  Description of Artificial Sequence: Synthetic oligonucleotide
uugucccguaaggccuuuu

SEQ ID NO: 1621918 - RNA, 19 nt, Artificial Sequence
  Description of Artificial Sequence: Synthetic oligonucleotide
cccgaucagccccuggcga

SEQ ID NO: 1621919 - RNA, 19 nt, Artificial Sequence
  Description of Artificial Sequence: Synthetic oligonucleotide
ccuagcucagcaugcaguu

SEQ ID NO: 1621920 - RNA, 19 nt, Artificial Sequence
  Description of Artificial Sequence: Synthetic oligonucleotide
cgacuaguccauuccucca

SEQ ID NO: 1621921 - RNA, 19 nt, Artificial Sequence
  Description of Artificial Sequence: Synthetic oligonucleotide
gaguccccuguggaaugcu

SEQ ID NO: 1621922 - RNA, 19 nt, Artificial Sequence
  Description of Artificial Sequence: Synthetic oligonucleotide
gccguggagaccgacuagu

SEQ ID NO: 1621923 - RNA, 19 nt, Artificial Sequence
  Description of Artificial Sequence: Synthetic oligonucleotide
ccgaucagccccuggcgaa

SEQ ID NO: 1621924 - RNA, 19 nt, Artificial Sequence
  Description of Artificial Sequence: Synthetic oligonucleotide
gggagggguuaacaaguuu

SEQ ID NO: 1621925 - RNA, 19 nt, Artificial Sequence
  Description of Artificial Sequence: Synthetic oligonucleotide
gggauacugccagcaccga

SEQ ID NO: 1621926 - RNA, 19 nt, Artificial Sequence
  Description of Artificial Sequence: Synthetic oligonucleotide
gcuaaacaguagacuuccu

SEQ ID NO: 1621927 - RNA, 19 nt, Artificial Sequence
  Description of Artificial Sequence: Synthetic oligonucleotide
cucaggugacgaggcugaa

SEQ ID NO: 1621928 - RNA, 19 nt, Artificial Sequence
  Description of Artificial Sequence: Synthetic oligonucleotide
gcuugauuaugaagccuuu

SEQ ID NO: 1621929 - RNA, 19 nt, Artificial Sequence
  Description of Artificial Sequence: Synthetic oligonucleotide
gcgcaagggugggccagcc

SEQ ID NO: 1621930 - RNA, 19 nt, Artificial Sequence
  Description of Artificial Sequence: Synthetic oligonucleotide
ccagaguccccuguggaau

SEQ ID NO: 1621931 - RNA, 19 nt, Artificial Sequence
  Description of Artificial Sequence: Synthetic oligonucleotide
ccacugaauuauaguggau

SEQ ID NO: 1621932 - RNA, 19 nt, Artificial Sequence
  Description of Artificial Sequence: Synthetic oligonucleotide
ccccuggcgaaaacugacu

SEQ ID NO: 1621933 - RNA, 19 nt, Artificial Sequence
  Description of Artificial Sequence: Synthetic oligonucleotide
ccugcaucucaaugugguu

SEQ ID NO: 1621934 - RNA, 19 nt, Artificial Sequence
  Description of Artificial Sequence: Synthetic oligonucleotide
cguugccguggagaccgac

SEQ ID NO: 1621935 - RNA, 19 nt, Artificial Sequence
  Description of Artificial Sequence: Synthetic oligonucleotide
cugacacggauggguucau

SEQ ID NO: 1621936 - RNA, 19 nt, Artificial Sequence
  Description of Artificial Sequence: Synthetic oligonucleotide
cccagucuguagcucguuu

SEQ ID NO: 1621937 - RNA, 19 nt, Artificial Sequence
  Description of Artificial Sequence: Synthetic oligonucleotide
ccauagccugcaucucaau

SEQ ID NO: 1621938 - RNA, 19 nt, Artificial Sequence
  Description of Artificial Sequence: Synthetic oligonucleotide
gguuaccauggcaguuguu

SEQ ID NO: 1621939 - RNA, 19 nt, Artificial Sequence
  Description of Artificial Sequence: Synthetic oligonucleotide
cuugucccguaaggccuuu

SEQ ID NO: 1621940 - RNA, 19 nt, Artificial Sequence
  Description of Artificial Sequence: Synthetic oligonucleotide
cgaucagccccuggcgaaa

SEQ ID NO: 1621941 - RNA, 19 nt, Artificial Sequence
  Description of Artificial Sequence: Synthetic oligonucleotide
cggugguagcugacacgga

SEQ ID NO: 1621942 - RNA, 19 nt, Artificial Sequence
  Description of Artificial Sequence: Synthetic oligonucleotide
ggagaccgacuaguccauu

SEQ ID NO: 1621943 - RNA, 19 nt, Artificial Sequence
  Description of Artificial Sequence: Synthetic oligonucleotide
gccuaccuucggcacccuu

SEQ ID NO: 1621944 - RNA, 19 nt, Artificial Sequence
  Description of Artificial Sequence: Synthetic oligonucleotide
gcacagggugaaggagguu

SEQ ID NO: 1621945 - RNA, 19 nt, Artificial Sequence
  Description of Artificial Sequence: Synthetic oligonucleotide
aacaaauuggaggagagcc

SEQ ID NO: 1621946 - RNA, 19 nt, Artificial Sequence
  Description of Artificial Sequence: Synthetic oligonucleotide
aguggcaagacguagaugg

SEQ ID NO: 1621947 - RNA, 19 nt, Artificial Sequence
  Description of Artificial Sequence: Synthetic oligonucleotide
aaaaguuugauaucgugcu

SEQ ID NO: 1621948 - RNA, 19 nt, Artificial Sequence
  Description of Artificial Sequence: Synthetic oligonucleotide
auugugagaucuuggaacc

SEQ ID NO: 1621949 - RNA, 19 nt, Artificial Sequence
  Description of Artificial Sequence: Synthetic oligonucleotide
ugcauaaauuccaagaggu

SEQ ID NO: 1621950 - RNA, 19 nt, Artificial Sequence
  Description of Artificial Sequence: Synthetic oligonucleotide
ucaacaugcauaaauucca

SEQ ID NO: 1621951 - RNA, 19 nt, Artificial Sequence
  Description of Artificial Sequence: Synthetic oligonucleotide
gaugauauuccucaugaac

SEQ ID NO: 1621952 - RNA, 19 nt, Artificial Sequence
  Description of Artificial Sequence: Synthetic oligonucleotide
uaaaagucugucguaaggg

SEQ ID NO: 1621953 - RNA, 19 nt, Artificial Sequence
  Description of Artificial Sequence: Synthetic oligonucleotide
uagcgugucaucucuaugg

SEQ ID NO: 1621954 - RNA, 19 nt, Artificial Sequence
  Description of Artificial Sequence: Synthetic oligonucleotide
aggggcaucacucugauga

SEQ ID NO: 1621955 - RNA, 19 nt, Artificial Sequence
  Description of Artificial Sequence: Synthetic oligonucleotide
aauuucagccuucuuccag

SEQ ID NO: 1621956 - RNA, 19 nt, Artificial Sequence
  Description of Artificial Sequence: Synthetic oligonucleotide
aguggaaaacuucuguauc

SEQ ID NO: 1621957 - RNA, 19 nt, Artificial Sequence
  Description of Artificial Sequence: Synthetic oligonucleotide
gaugggaucggauauugug

SEQ ID NO: 1621958 - RNA, 19 nt, Artificial Sequence
  Description of Artificial Sequence: Synthetic oligonucleotide
ucucucaaggcaauaaaga

SEQ ID NO: 1621959 - RNA, 19 nt, Artificial Sequence
  Description of Artificial Sequence: Synthetic oligonucleotide
gaggcagaaguacugaugc

SEQ ID NO: 1621960 - RNA, 19 nt, Artificial Sequence
  Description of Artificial Sequence: Synthetic oligonucleotide
aguacaugaacacugccga

SEQ ID NO: 1621961 - RNA, 19 nt, Artificial Sequence
  Description of Artificial Sequence: Synthetic oligonucleotide
aaaagucugucguaaggga

SEQ ID NO: 1621962 - RNA, 19 nt, Artificial Sequence
  Description of Artificial Sequence: Synthetic oligonucleotide
gaugcagaguucuugucag

SEQ ID NO: 1621963 - RNA, 19 nt, Artificial Sequence
  Description of Artificial Sequence: Synthetic oligonucleotide
gauauugugagaucuugga

SEQ ID NO: 1621964 - RNA, 19 nt, Artificial Sequence
  Description of Artificial Sequence: Synthetic oligonucleotide
ggauuuuaagcacugugcg

SEQ ID NO: 1621965 - RNA, 19 nt, Artificial Sequence
  Description of Artificial Sequence: Synthetic oligonucleotide
aagagcguaguguggccgc

SEQ ID NO: 1621966 - RNA, 19 nt, Artificial Sequence
  Description of Artificial Sequence: Synthetic oligonucleotide
agggucauguaugacacgc

SEQ ID NO: 1621967 - RNA, 19 nt, Artificial Sequence
  Description of Artificial Sequence: Synthetic oligonucleotide
ucugauuugaguggaaaac

SEQ ID NO: 1621968 - RNA, 19 nt, Artificial Sequence
  Description of Artificial Sequence: Synthetic oligonucleotide
cuuggaaccaccagagccc

SEQ ID NO: 1621969 - RNA, 19 nt, Artificial Sequence
  Description of Artificial Sequence: Synthetic oligonucleotide
uucacaaucagagggaaaa

SEQ ID NO: 1621970 - RNA, 19 nt, Artificial Sequence
  Description of Artificial Sequence: Synthetic oligonucleotide
guucuugucagaaugagca

SEQ ID NO: 1621971 - RNA, 19 nt, Artificial Sequence
  Description of Artificial Sequence: Synthetic oligonucleotide
aguacugaugcagcgaggg

SEQ ID NO: 1621972 - RNA, 19 nt, Artificial Sequence
  Description of Artificial Sequence: Synthetic oligonucleotide
cauugaauugcaucugcag

SEQ ID NO: 1621973 - RNA, 19 nt, Artificial Sequence
  Description of Artificial Sequence: Synthetic oligonucleotide
ugucguaagggaccucugg

SEQ ID NO: 1621974 - RNA, 19 nt, Artificial Sequence
  Description of Artificial Sequence: Synthetic oligonucleotide
aggguuguggguaaaaguc

SEQ ID NO: 1621975 - RNA, 19 nt, Artificial Sequence
  Description of Artificial Sequence: Synthetic oligonucleotide
uguggaacgaacgcugggg

SEQ ID NO: 1621976 - RNA, 19 nt, Artificial Sequence
  Description of Artificial Sequence: Synthetic oligonucleotide
ucuauggaggcccuguaaa

SEQ ID NO: 1621977 - RNA, 19 nt, Artificial Sequence
  Description of Artificial Sequence: Synthetic oligonucleotide
caagacguagaugggaucg

SEQ ID NO: 1621978 - RNA, 19 nt, Artificial Sequence
  Description of Artificial Sequence: Synthetic oligonucleotide
cuugucagaaugagcacag

SEQ ID NO: 1621979 - RNA, 19 nt, Artificial Sequence
  Description of Artificial Sequence: Synthetic oligonucleotide
ugauccccugccaauuugg

SEQ ID NO: 1621980 - RNA, 19 nt, Artificial Sequence
  Description of Artificial Sequence: Synthetic oligonucleotide
gcaaggaccguacaggugg

SEQ ID NO: 1621981 - RNA, 19 nt, Artificial Sequence
  Description of Artificial Sequence: Synthetic oligonucleotide
gaggcaaugugucaggguc

SEQ ID NO: 1621982 - RNA, 19 nt, Artificial Sequence
  Description of Artificial Sequence: Synthetic oligonucleotide
ugggaucggauauugugag

SEQ ID NO: 1621983 - RNA, 19 nt, Artificial Sequence
  Description of Artificial Sequence: Synthetic oligonucleotide
acgggcaagaccauuaggg

SEQ ID NO: 1621984 - RNA, 19 nt, Artificial Sequence
  Description of Artificial Sequence: Synthetic oligonucleotide
agaagagcguaguguggcc

SEQ ID NO: 1621985 - RNA, 19 nt, Artificial Sequence
  Description of Artificial Sequence: Synthetic oligonucleotide
gaucuugacugcuucucgc

SEQ ID NO: 1621986 - RNA, 19 nt, Artificial Sequence
  Description of Artificial Sequence: Synthetic oligonucleotide
gaaugaguggccgcaaaag

SEQ ID NO: 1621987 - RNA, 19 nt, Artificial Sequence
  Description of Artificial Sequence: Synthetic oligonucleotide
uguugggagggugauuugg

SEQ ID NO: 1621988 - RNA, 19 nt, Artificial Sequence
  Description of Artificial Sequence: Synthetic oligonucleotide
accuagcucaaggacaccc

SEQ ID NO: 1621989 - RNA, 19 nt, Artificial Sequence
  Description of Artificial Sequence: Synthetic oligonucleotide
acuaccaguggcaagacgu

SEQ ID NO: 1621990 - RNA, 19 nt, Artificial Sequence
  Description of Artificial Sequence: Synthetic oligonucleotide
cagaaguacugaugcagcg

SEQ ID NO: 1621991 - RNA, 19 nt, Artificial Sequence
  Description of Artificial Sequence: Synthetic oligonucleotide
aagaccauuaggggcauca

SEQ ID NO: 1621992 - RNA, 19 nt, Artificial Sequence
  Description of Artificial Sequence: Synthetic oligonucleotide
agguagaaugaguggccgc

SEQ ID NO: 1621993 - RNA, 19 nt, Artificial Sequence
  Description of Artificial Sequence: Synthetic oligonucleotide
cacaaucagagggaaaacc

SEQ ID NO: 1621994 - RNA, 19 nt, Artificial Sequence
  Description of Artificial Sequence: Synthetic oligonucleotide
ugaguggaaaacuucugua

SEQ ID NO: 1621995 - RNA, 19 nt, Artificial Sequence
  Description of Artificial Sequence: Synthetic oligonucleotide
gacgcuguggaacgaacgc

SEQ ID NO: 1621996 - RNA, 19 nt, Artificial Sequence
  Description of Artificial Sequence: Synthetic oligonucleotide
gaugagucccacuggggug

SEQ ID NO: 1621997 - RNA, 19 nt, Artificial Sequence
  Description of Artificial Sequence: Synthetic oligonucleotide
gugagagguagaaugagug

SEQ ID NO: 1621998 - RNA, 19 nt, Artificial Sequence
  Description of Artificial Sequence: Synthetic oligonucleotide
auauugugagaucuuggaa

SEQ ID NO: 1621999 - RNA, 19 nt, Artificial Sequence
  Description of Artificial Sequence: Synthetic oligonucleotide
ugugcuguagcagaggguu

SEQ ID NO: 1622000 - RNA, 19 nt, Artificial Sequence
  Description of Artificial Sequence: Synthetic oligonucleotide
gagaucuuggaaccaccag

SEQ ID NO: 1622001 - RNA, 19 nt, Artificial Sequence
  Description of Artificial Sequence: Synthetic oligonucleotide
acaaucagagggaaaacca

SEQ ID NO: 1622002 - RNA, 19 nt, Artificial Sequence
  Description of Artificial Sequence: Synthetic oligonucleotide
agaacaaauuggaggagag

SEQ ID NO: 1622003 - RNA, 19 nt, Artificial Sequence
  Description of Artificial Sequence: Synthetic oligonucleotide
aucggauauugugagaucu

SEQ ID NO: 1622004 - RNA, 19 nt, Artificial Sequence
  Description of Artificial Sequence: Synthetic oligonucleotide
agcaagaagagcguagugu

SEQ ID NO: 1622005 - RNA, 19 nt, Artificial Sequence
  Description of Artificial Sequence: Synthetic oligonucleotide
ugaguggccgcaaaaguuu

SEQ ID NO: 1622006 - RNA, 19 nt, Artificial Sequence
  Description of Artificial Sequence: Synthetic oligonucleotide
uggaugagucccacugggg

SEQ ID NO: 1622007 - RNA, 19 nt, Artificial Sequence
  Description of Artificial Sequence: Synthetic oligonucleotide
gaagagcguaguguggccg

SEQ ID NO: 1622008 - RNA, 19 nt, Artificial Sequence
  Description of Artificial Sequence: Synthetic oligonucleotide
gauuugaguggaaaacuuc

SEQ ID NO: 1622009 - RNA, 19 nt, Artificial Sequence
  Description of Artificial Sequence: Synthetic oligonucleotide
gggagggugauuuggauug

SEQ ID NO: 1622010 - RNA, 19 nt, Artificial Sequence
  Description of Artificial Sequence: Synthetic oligonucleotide
acuggcaugugguugugga

SEQ ID NO: 1622011 - RNA, 19 nt, Artificial Sequence
  Description of Artificial Sequence: Synthetic oligonucleotide
ggugauuuggauugugcug

SEQ ID NO: 1622012 - RNA, 19 nt, Artificial Sequence
  Description of Artificial Sequence: Synthetic oligonucleotide
aaaguuugauaucgugcuu

SEQ ID NO: 1622013 - RNA, 19 nt, Artificial Sequence
  Description of Artificial Sequence: Synthetic oligonucleotide
ucguaagggaccucuggca

SEQ ID NO: 1622014 - RNA, 19 nt, Artificial Sequence
  Description of Artificial Sequence: Synthetic oligonucleotide
gaauugcaucugcaguucc

SEQ ID NO: 1622015 - RNA, 19 nt, Artificial Sequence
  Description of Artificial Sequence: Synthetic oligonucleotide
ucugucguaagggaccucu

SEQ ID NO: 1622016 - RNA, 19 nt, Artificial Sequence
  Description of Artificial Sequence: Synthetic oligonucleotide
agugugucgugccaaggcu

SEQ ID NO: 1622017 - RNA, 19 nt, Artificial Sequence
  Description of Artificial Sequence: Synthetic oligonucleotide
gguacuacaggaggggugg

SEQ ID NO: 1622018 - RNA, 19 nt, Artificial Sequence
  Description of Artificial Sequence: Synthetic oligonucleotide
aagacguagaugggaucgg

SEQ ID NO: 1622019 - RNA, 19 nt, Artificial Sequence
  Description of Artificial Sequence: Synthetic oligonucleotide
aaguggauggucacgggca

SEQ ID NO: 1622020 - RNA, 19 nt, Artificial Sequence
  Description of Artificial Sequence: Synthetic oligonucleotide
agggugauuuggauugugc

SEQ ID NO: 1622021 - RNA, 19 nt, Artificial Sequence
  Description of Artificial Sequence: Synthetic oligonucleotide
gucauguaugacacgcugg

SEQ ID NO: 1622022 - RNA, 19 nt, Artificial Sequence
  Description of Artificial Sequence: Synthetic oligonucleotide
uagaugggaucggauauug

SEQ ID NO: 1622023 - RNA, 19 nt, Artificial Sequence
  Description of Artificial Sequence: Synthetic oligonucleotide
gucguaagggaccucuggc

SEQ ID NO: 1622024 - RNA, 19 nt, Artificial Sequence
  Description of Artificial Sequence: Synthetic oligonucleotide
gaagccuucccgaggaggc

SEQ ID NO: 1622025 - RNA, 19 nt, Artificial Sequence
  Description of Artificial Sequence: Synthetic oligonucleotide
aacacugccgaggggaagu

SEQ ID NO: 1622026 - RNA, 19 nt, Artificial Sequence
  Description of Artificial Sequence: Synthetic oligonucleotide
gcaaaaguuugauaucgug

SEQ ID NO: 1622027 - RNA, 19 nt, Artificial Sequence
  Description of Artificial Sequence: Synthetic oligonucleotide
gaaaucagccaaguguguc

SEQ ID NO: 1622028 - RNA, 19 nt, Artificial Sequence
  Description of Artificial Sequence: Synthetic oligonucleotide
cucucaaggcaauaaagaa

SEQ ID NO: 1622029 - RNA, 19 nt, Artificial Sequence
  Description of Artificial Sequence: Synthetic oligonucleotide
ugugcgcacagcuggaauc

SEQ ID NO: 1622030 - RNA, 19 nt, Artificial Sequence
  Description of Artificial Sequence: Synthetic oligonucleotide
aaucagccaagugugucgu

SEQ ID NO: 1622031 - RNA, 19 nt, Artificial Sequence
  Description of Artificial Sequence: Synthetic oligonucleotide
agugacuaccaguggcaag

SEQ ID NO: 1622032 - RNA, 19 nt, Artificial Sequence
  Description of Artificial Sequence: Synthetic oligonucleotide
gggauuuuaagcacugugc

SEQ ID NO: 1622033 - RNA, 19 nt, Artificial Sequence
  Description of Artificial Sequence: Synthetic oligonucleotide
aggcagauuggccaucucu

SEQ ID NO: 1622034 - RNA, 19 nt, Artificial Sequence
  Description of Artificial Sequence: Synthetic oligonucleotide
gaacaaauuggaggagagc

SEQ ID NO: 1622035 - RNA, 19 nt, Artificial Sequence
  Description of Artificial Sequence: Synthetic oligonucleotide
ucacgggcaagaccauuag

SEQ ID NO: 1622036 - RNA, 19 nt, Artificial Sequence
  Description of Artificial Sequence: Synthetic oligonucleotide
ggaacgaacgcuggggucg

SEQ ID NO: 1622037 - RNA, 19 nt, Artificial Sequence
  Description of Artificial Sequence: Synthetic oligonucleotide
agaagccuucccgaggagg

SEQ ID NO: 1622038 - RNA, 19 nt, Artificial Sequence
  Description of Artificial Sequence: Synthetic oligonucleotide
aauugcaucugcaguuccu

SEQ ID NO: 1622039 - RNA, 19 nt, Artificial Sequence
  Description of Artificial Sequence: Synthetic oligonucleotide
gacuaccaguggcaagacg

SEQ ID NO: 1622040 - RNA, 19 nt, Artificial Sequence
  Description of Artificial Sequence: Synthetic oligonucleotide
cauccucuguucacgcucc

SEQ ID NO: 1622041 - RNA, 19 nt, Artificial Sequence
  Description of Artificial Sequence: Synthetic oligonucleotide
auagcgugucaucucuaug

SEQ ID NO: 1622042 - RNA, 19 nt, Artificial Sequence
  Description of Artificial Sequence: Synthetic oligonucleotide
ggcagaaguacugaugcag

SEQ ID NO: 1622043 - RNA, 19 nt, Artificial Sequence
  Description of Artificial Sequence: Synthetic oligonucleotide
guggguaaaagucugucgu

SEQ ID NO: 1622044 - RNA, 19 nt, Artificial Sequence
  Description of Artificial Sequence: Synthetic oligonucleotide
cuggccgcacacuaaacuc

SEQ ID NO: 1622045 - RNA, 19 nt, Artificial Sequence
  Description of Artificial Sequence: Synthetic oligonucleotide
ccgcacacuaaacucaucg

SEQ ID NO: 1622046 - RNA, 19 nt, Artificial Sequence
  Description of Artificial Sequence: Synthetic oligonucleotide
uguuuguaggcugggcaca

SEQ ID NO: 1622047 - RNA, 19 nt, Artificial Sequence
  Description of Artificial Sequence: Synthetic oligonucleotide
gugacuaccaguggcaaga

SEQ ID NO: 1622048 - RNA, 19 nt, Artificial Sequence
  Description of Artificial Sequence: Synthetic oligonucleotide
ugcgacgaggagcucggug

SEQ ID NO: 1622049 - RNA, 19 nt, Artificial Sequence
  Description of Artificial Sequence: Synthetic oligonucleotide
ggccucucugauuugagug

SEQ ID NO: 1622050 - RNA, 19 nt, Artificial Sequence
  Description of Artificial Sequence: Synthetic oligonucleotide
guaagggaccucuggcagc

SEQ ID NO: 1622051 - RNA, 19 nt, Artificial Sequence
  Description of Artificial Sequence: Synthetic oligonucleotide
uggcaugugguuguggauc

SEQ ID NO: 1622052 - RNA, 19 nt, Artificial Sequence
  Description of Artificial Sequence: Synthetic oligonucleotide
ucucgcuggcccuucacaa

SEQ ID NO: 1622053 - RNA, 19 nt, Artificial Sequence
  Description of Artificial Sequence: Synthetic oligonucleotide
uuaggggcaucacucugau

SEQ ID NO: 1622054 - RNA, 19 nt, Artificial Sequence
  Description of Artificial Sequence: Synthetic oligonucleotide
agcaccuagcucaaggaca

SEQ ID NO: 1622055 - RNA, 19 nt, Artificial Sequence
  Description of Artificial Sequence: Synthetic oligonucleotide
gggcaagaccauuaggggc

SEQ ID NO: 1622056 - RNA, 19 nt, Artificial Sequence
  Description of Artificial Sequence: Synthetic oligonucleotide
uggauggucacgggcaaga

SEQ ID NO: 1622057 - RNA, 19 nt, Artificial Sequence
  Description of Artificial Sequence: Synthetic oligonucleotide
acguagaugggaucggaua

SEQ ID NO: 1622058 - RNA, 19 nt, Artificial Sequence
  Description of Artificial Sequence: Synthetic oligonucleotide
ccgcaaaaguuugauaucg

SEQ ID NO: 1622059 - RNA, 19 nt, Artificial Sequence
  Description of Artificial Sequence: Synthetic oligonucleotide
gagcugaugugcaauuuca

SEQ ID NO: 1622060 - RNA, 19 nt, Artificial Sequence
  Description of Artificial Sequence: Synthetic oligonucleotide
uuguggguaaaagucuguc

SEQ ID NO: 1622061 - RNA, 19 nt, Artificial Sequence
  Description of Artificial Sequence: Synthetic oligonucleotide
gacccugcgacgcugugga

SEQ ID NO: 1622062 - RNA, 19 nt, Artificial Sequence
  Description of Artificial Sequence: Synthetic oligonucleotide
agcugcgacgaggagcucg

SEQ ID NO: 1622063 - RNA, 19 nt, Artificial Sequence
  Description of Artificial Sequence: Synthetic oligonucleotide
agcgugucaucucuaugga

SEQ ID NO: 1622064 - RNA, 19 nt, Artificial Sequence
  Description of Artificial Sequence: Synthetic oligonucleotide
gaguggaaaacuucuguau

SEQ ID NO: 1622065 - RNA, 19 nt, Artificial Sequence
  Description of Artificial Sequence: Synthetic oligonucleotide
aguuugauaucgugcuuuu

SEQ ID NO: 1622066 - RNA, 19 nt, Artificial Sequence
  Description of Artificial Sequence: Synthetic oligonucleotide
agcgguuucagggacccug

SEQ ID NO: 1622067 - RNA, 19 nt, Artificial Sequence
  Description of Artificial Sequence: Synthetic oligonucleotide
ucgcuggcccuucacaauc

SEQ ID NO: 1622068 - RNA, 19 nt, Artificial Sequence
  Description of Artificial Sequence: Synthetic oligonucleotide
gaugcagcgagggcuugag

SEQ ID NO: 1622069 - RNA, 19 nt, Artificial Sequence
  Description of Artificial Sequence: Synthetic oligonucleotide
guccaaguguuucugcauc

SEQ ID NO: 1622070 - RNA, 19 nt, Artificial Sequence
  Description of Artificial Sequence: Synthetic oligonucleotide
acaaauuggaggagagcca

SEQ ID NO: 1622071 - RNA, 19 nt, Artificial Sequence
  Description of Artificial Sequence: Synthetic oligonucleotide
agggaccucuggcagcuag

SEQ ID NO: 1622072 - RNA, 19 nt, Artificial Sequence
  Description of Artificial Sequence: Synthetic oligonucleotide
gaucggauauugugagauc

SEQ ID NO: 1622073 - RNA, 19 nt, Artificial Sequence
  Description of Artificial Sequence: Synthetic oligonucleotide
gagagccaguacaugaaca

SEQ ID NO: 1622074 - RNA, 19 nt, Artificial Sequence
  Description of Artificial Sequence: Synthetic oligonucleotide
cuguggaacgaacgcuggg

SEQ ID NO: 1622075 - RNA, 19 nt, Artificial Sequence
  Description of Artificial Sequence: Synthetic oligonucleotide
acccaggcgagcugcgacg

SEQ ID NO: 1622076 - RNA, 19 nt, Artificial Sequence
  Description of Artificial Sequence: Synthetic oligonucleotide
ggacaccccacauuguggc

SEQ ID NO: 1622077 - RNA, 19 nt, Artificial Sequence
  Description of Artificial Sequence: Synthetic oligonucleotide
agaguucuugucagaauga

SEQ ID NO: 1622078 - RNA, 19 nt, Artificial Sequence
  Description of Artificial Sequence: Synthetic oligonucleotide
auuaggggcaucacucuga

SEQ ID NO: 1622079 - RNA, 19 nt, Artificial Sequence
  Description of Artificial Sequence: Synthetic oligonucleotide
gaggguuguggguaaaagu

SEQ ID NO: 1622080 - RNA, 19 nt, Artificial Sequence
  Description of Artificial Sequence: Synthetic oligonucleotide
ugggagggugauuuggauu

SEQ ID NO: 1622081 - RNA, 19 nt, Artificial Sequence
  Description of Artificial Sequence: Synthetic oligonucleotide
agcacagagcagaaaucag

SEQ ID NO: 1622082 - RNA, 19 nt, Artificial Sequence
  Description of Artificial Sequence: Synthetic oligonucleotide
cuuugacuugggcuugcug

SEQ ID NO: 1622083 - RNA, 19 nt, Artificial Sequence
  Description of Artificial Sequence: Synthetic oligonucleotide
guggaggaaucugugaaga

SEQ ID NO: 1622084 - RNA, 19 nt, Artificial Sequence
  Description of Artificial Sequence: Synthetic oligonucleotide
cacgggcaagaccauuagg

SEQ ID NO: 1622085 - RNA, 19 nt, Artificial Sequence
  Description of Artificial Sequence: Synthetic oligonucleotide
aggaggcaaugugucaggg

SEQ ID NO: 1622086 - RNA, 19 nt, Artificial Sequence
  Description of Artificial Sequence: Synthetic oligonucleotide
uuuguaggcugggcacagg

SEQ ID NO: 1622087 - RNA, 19 nt, Artificial Sequence
  Description of Artificial Sequence: Synthetic oligonucleotide
ucggauauugugagaucuu

SEQ ID NO: 1622088 - RNA, 19 nt, Artificial Sequence
  Description of Artificial Sequence: Synthetic oligonucleotide
agaccauuaggggcaucac

SEQ ID NO: 1622089 - RNA, 19 nt, Artificial Sequence
  Description of Artificial Sequence: Synthetic oligonucleotide
cuggaauccggaggcaggc

SEQ ID NO: 1622090 - RNA, 19 nt, Artificial Sequence
  Description of Artificial Sequence: Synthetic oligonucleotide
agagcguaguguggccgcc

SEQ ID NO: 1622091 - RNA, 19 nt, Artificial Sequence
  Description of Artificial Sequence: Synthetic oligonucleotide
uggaacgaacgcugggguc

SEQ ID NO: 1622092 - RNA, 19 nt, Artificial Sequence
  Description of Artificial Sequence: Synthetic oligonucleotide
aggucaacaugcauaaauu

SEQ ID NO: 1622093 - RNA, 19 nt, Artificial Sequence
  Description of Artificial Sequence: Synthetic oligonucleotide
cugcauccucuguucacgc

SEQ ID NO: 1622094 - RNA, 19 nt, Artificial Sequence
  Description of Artificial Sequence: Synthetic oligonucleotide
auuguggcagugacuacca

SEQ ID NO: 1622095 - RNA, 19 nt, Artificial Sequence
  Description of Artificial Sequence: Synthetic oligonucleotide
agcugaugugcaauuucag

SEQ ID NO: 1622096 - RNA, 19 nt, Artificial Sequence
  Description of Artificial Sequence: Synthetic oligonucleotide
cagccaagugugucgugcc

SEQ ID NO: 1622097 - RNA, 19 nt, Artificial Sequence
  Description of Artificial Sequence: Synthetic oligonucleotide
caagugugucgugccaagg

SEQ ID NO: 1622098 - RNA, 19 nt, Artificial Sequence
  Description of Artificial Sequence: Synthetic oligonucleotide
agucccacugggguguaag

SEQ ID NO: 1622099 - RNA, 19 nt, Artificial Sequence
  Description of Artificial Sequence: Synthetic oligonucleotide
augagucccacuggggugu

SEQ ID NO: 1622100 - RNA, 19 nt, Artificial Sequence
  Description of Artificial Sequence: Synthetic oligonucleotide
gcacagagcagaaaucagc

SEQ ID NO: 1622101 - RNA, 19 nt, Artificial Sequence
  Description of Artificial Sequence: Synthetic oligonucleotide
aucucuauggaggcccugu

SEQ ID NO: 1622102 - RNA, 19 nt, Artificial Sequence
  Description of Artificial Sequence: Synthetic oligonucleotide
ccugcgacgcuguggaacg

SEQ ID NO: 1622103 - RNA, 19 nt, Artificial Sequence
  Description of Artificial Sequence: Synthetic oligonucleotide
guacugaugcagcgagggc

SEQ ID NO: 1622104 - RNA, 19 nt, Artificial Sequence
  Description of Artificial Sequence: Synthetic oligonucleotide
ggcaauaaagaaggagaug

SEQ ID NO: 1622105 - RNA, 19 nt, Artificial Sequence
  Description of Artificial Sequence: Synthetic oligonucleotide
cuagcucaaggacacccca

SEQ ID NO: 1622106 - RNA, 19 nt, Artificial Sequence
  Description of Artificial Sequence: Synthetic oligonucleotide
ugucgugccaaggcuuuga

SEQ ID NO: 1622107 - RNA, 19 nt, Artificial Sequence
  Description of Artificial Sequence: Synthetic oligonucleotide
ucgugccaaggcuuugacu

SEQ ID NO: 1622108 - RNA, 19 nt, Artificial Sequence
  Description of Artificial Sequence: Synthetic oligonucleotide
caggucaacaugcauaaau

SEQ ID NO: 1622109 - RNA, 19 nt, Artificial Sequence
  Description of Artificial Sequence: Synthetic oligonucleotide
uggccagcgguuucaggga

SEQ ID NO: 1622110 - RNA, 19 nt, Artificial Sequence
  Description of Artificial Sequence: Synthetic oligonucleotide
ggagcugaugugcaauuuc

SEQ ID NO: 1622111 - RNA, 19 nt, Artificial Sequence
  Description of Artificial Sequence: Synthetic oligonucleotide
ggccgcaaaaguuugauau

SEQ ID NO: 1622112 - RNA, 19 nt, Artificial Sequence
  Description of Artificial Sequence: Synthetic oligonucleotide
ugauagcgugucaucucua

SEQ ID NO: 1622113 - RNA, 19 nt, Artificial Sequence
  Description of Artificial Sequence: Synthetic oligonucleotide
gauagcgugucaucucuau

SEQ ID NO: 1622114 - RNA, 19 nt, Artificial Sequence
  Description of Artificial Sequence: Synthetic oligonucleotide
gguagaaugaguggccgca

SEQ ID NO: 1622115 - RNA, 19 nt, Artificial Sequence
  Description of Artificial Sequence: Synthetic oligonucleotide
gaguggccgcaaaaguuug

SEQ ID NO: 1622116 - RNA, 19 nt, Artificial Sequence
  Description of Artificial Sequence: Synthetic oligonucleotide
cuauggaggcccuguaaaa

SEQ ID NO: 1622117 - RNA, 19 nt, Artificial Sequence
  Description of Artificial Sequence: Synthetic oligonucleotide
agguacuacaggaggggug

SEQ ID NO: 1622118 - RNA, 19 nt, Artificial Sequence
  Description of Artificial Sequence: Synthetic oligonucleotide
ggaaccaccagagcccacc

SEQ ID NO: 1622119 - RNA, 19 nt, Artificial Sequence
  Description of Artificial Sequence: Synthetic oligonucleotide
gagggugauuuggauugug

SEQ ID NO: 1622120 - RNA, 19 nt, Artificial Sequence
  Description of Artificial Sequence: Synthetic oligonucleotide
cucugcacgccugucucag

SEQ ID NO: 1622121 - RNA, 19 nt, Artificial Sequence
  Description of Artificial Sequence: Synthetic oligonucleotide
gugccaaggcuuugacuug

SEQ ID NO: 1622122 - RNA, 19 nt, Artificial Sequence
  Description of Artificial Sequence: Synthetic oligonucleotide
ggagaacaaauuggaggag

SEQ ID NO: 1622123 - RNA, 19 nt, Artificial Sequence
  Description of Artificial Sequence: Synthetic oligonucleotide
ccuagcucaaggacacccc

SEQ ID NO: 1622124 - RNA, 19 nt, Artificial Sequence
  Description of Artificial Sequence: Synthetic oligonucleotide
accaguggcaagacguaga

SEQ ID NO: 1622125 - RNA, 19 nt, Artificial Sequence
  Description of Artificial Sequence: Synthetic oligonucleotide
agcguaguguggccgccca

SEQ ID NO: 1622126 - RNA, 19 nt, Artificial Sequence
  Description of Artificial Sequence: Synthetic oligonucleotide
cugauagcgugucaucucu

SEQ ID NO: 1622127 - RNA, 19 nt, Artificial Sequence
  Description of Artificial Sequence: Synthetic oligonucleotide
agacguagaugggaucgga

SEQ ID NO: 1622128 - RNA, 19 nt, Artificial Sequence
  Description of Artificial Sequence: Synthetic oligonucleotide
gaacgaacgcuggggucgc

SEQ ID NO: 1622129 - RNA, 19 nt, Artificial Sequence
  Description of Artificial Sequence: Synthetic oligonucleotide
cugucguaagggaccucug

SEQ ID NO: 1622130 - RNA, 19 nt, Artificial Sequence
  Description of Artificial Sequence: Synthetic oligonucleotide
cguaagggaccucuggcag

SEQ ID NO: 1622131 - RNA, 19 nt, Artificial Sequence
  Description of Artificial Sequence: Synthetic oligonucleotide
ugaugcagcgagggcuuga

SEQ ID NO: 1622132 - RNA, 19 nt, Artificial Sequence
  Description of Artificial Sequence: Synthetic oligonucleotide
acgcuguggaacgaacgcu

SEQ ID NO: 1622133 - RNA, 19 nt, Artificial Sequence
  Description of Artificial Sequence: Synthetic oligonucleotide
ugcacgccugucucagcac

SEQ ID NO: 1622134 - RNA, 19 nt, Artificial Sequence
  Description of Artificial Sequence: Synthetic oligonucleotide
guaguguggccgcccacca

SEQ ID NO: 1622135 - RNA, 19 nt, Artificial Sequence
  Description of Artificial Sequence: Synthetic oligonucleotide
gacaccccacauuguggca

SEQ ID NO: 1622136 - RNA, 19 nt, Artificial Sequence
  Description of Artificial Sequence: Synthetic oligonucleotide
ugacuaccaguggcaagac

SEQ ID NO: 1622137 - RNA, 19 nt, Artificial Sequence
  Description of Artificial Sequence: Synthetic oligonucleotide
cgggcaagaccauuagggg

SEQ ID NO: 1622138 - RNA, 19 nt, Artificial Sequence
  Description of Artificial Sequence: Synthetic oligonucleotide
gucgugccaaggcuuugac

SEQ ID NO: 1622139 - RNA, 19 nt, Artificial Sequence
  Description of Artificial Sequence: Synthetic oligonucleotide
uggccgcaaaaguuugaua

SEQ ID NO: 1622140 - RNA, 19 nt, Artificial Sequence
  Description of Artificial Sequence: Synthetic oligonucleotide
ucgguggccagcgguuuca

SEQ ID NO: 1622141 - RNA, 19 nt, Artificial Sequence
  Description of Artificial Sequence: Synthetic oligonucleotide
gcgggcaaggaccguacag

SEQ ID NO: 1622142 - RNA, 19 nt, Artificial Sequence
  Description of Artificial Sequence: Synthetic oligonucleotide
gcuguggaacgaacgcugg

SEQ ID NO: 1622143 - RNA, 19 nt, Artificial Sequence
  Description of Artificial Sequence: Synthetic oligonucleotide
aaggaccguacagguggca

SEQ ID NO: 1622144 - RNA, 19 nt, Artificial Sequence
  Description of Artificial Sequence: Synthetic oligonucleotide
gggugauuuggauugugcu

SEQ ID NO: 1622145 - RNA, 19 nt, Artificial Sequence
  Description of Artificial Sequence: Synthetic oligonucleotide
ugccgcuggccgcacacua

SEQ ID NO: 1622146 - RNA, 19 nt, Artificial Sequence
  Description of Artificial Sequence: Synthetic oligonucleotide
acgaacgcuggggucgcag

SEQ ID NO: 1622147 - RNA, 19 nt, Artificial Sequence
  Description of Artificial Sequence: Synthetic oligonucleotide
gcgugucaucucuauggag

SEQ ID NO: 1622148 - RNA, 19 nt, Artificial Sequence
  Description of Artificial Sequence: Synthetic oligonucleotide
ggguaaaagucugucguaa

SEQ ID NO: 1622149 - RNA, 19 nt, Artificial Sequence
  Description of Artificial Sequence: Synthetic oligonucleotide
cucuauggaggcccuguaa

SEQ ID NO: 1622150 - RNA, 19 nt, Artificial Sequence
  Description of Artificial Sequence: Synthetic oligonucleotide
uggagcugaugugcaauuu

SEQ ID NO: 1622151 - RNA, 19 nt, Artificial Sequence
  Description of Artificial Sequence: Synthetic oligonucleotide
gcacauugaauugcaucug

SEQ ID NO: 1622152 - RNA, 19 nt, Artificial Sequence
  Description of Artificial Sequence: Synthetic oligonucleotide
gccgcaaaaguuugauauc

SEQ ID NO: 1622153 - RNA, 19 nt, Artificial Sequence
  Description of Artificial Sequence: Synthetic oligonucleotide
guacuacaggagggguggg

SEQ ID NO: 1622154 - RNA, 19 nt, Artificial Sequence
  Description of Artificial Sequence: Synthetic oligonucleotide
ggaucggauauugugagau

SEQ ID NO: 1622155 - RNA, 19 nt, Artificial Sequence
  Description of Artificial Sequence: Synthetic oligonucleotide
uaggggcaucacucugaug

SEQ ID NO: 1622156 - RNA, 19 nt, Artificial Sequence
  Description of Artificial Sequence: Synthetic oligonucleotide
guguugggagggugauuug

SEQ ID NO: 1622157 - RNA, 19 nt, Artificial Sequence
  Description of Artificial Sequence: Synthetic oligonucleotide
gccaguacaugaacacugc

SEQ ID NO: 1622158 - RNA, 19 nt, Artificial Sequence
  Description of Artificial Sequence: Synthetic oligonucleotide
guggaacgaacgcuggggu

SEQ ID NO: 1622159 - RNA, 19 nt, Artificial Sequence
  Description of Artificial Sequence: Synthetic oligonucleotide
gcgagcugcgacgaggagc

SEQ ID NO: 1622160 - RNA, 19 nt, Artificial Sequence
  Description of Artificial Sequence: Synthetic oligonucleotide
cagccuguuuugaagcucu

SEQ ID NO: 1622161 - RNA, 19 nt, Artificial Sequence
  Description of Artificial Sequence: Synthetic oligonucleotide
ugcgacgcuguggaacgaa

SEQ ID NO: 1622162 - RNA, 19 nt, Artificial Sequence
  Description of Artificial Sequence: Synthetic oligonucleotide
cagcgggcaaggaccguac

SEQ ID NO: 1622163 - RNA, 19 nt, Artificial Sequence
  Description of Artificial Sequence: Synthetic oligonucleotide
gucacgggcaagaccauua

SEQ ID NO: 1622164 - RNA, 19 nt, Artificial Sequence
  Description of Artificial Sequence: Synthetic oligonucleotide
cuaccaguggcaagacgua

SEQ ID NO: 1622165 - RNA, 19 nt, Artificial Sequence
  Description of Artificial Sequence: Synthetic oligonucleotide
agaugggaucggauauugu

SEQ ID NO: 1622166 - RNA, 19 nt, Artificial Sequence
  Description of Artificial Sequence: Synthetic oligonucleotide
cccgaggaggcaauguguc

SEQ ID NO: 1622167 - RNA, 19 nt, Artificial Sequence
  Description of Artificial Sequence: Synthetic oligonucleotide
gagccaguacaugaacacu

SEQ ID NO: 1622168 - RNA, 19 nt, Artificial Sequence
  Description of Artificial Sequence: Synthetic oligonucleotide
gcaagacguagaugggauc

SEQ ID NO: 1622169 - RNA, 19 nt, Artificial Sequence
  Description of Artificial Sequence: Synthetic oligonucleotide
cgacgcuguggaacgaacg

SEQ ID NO: 1622170 - RNA, 19 nt, Artificial Sequence
  Description of Artificial Sequence: Synthetic oligonucleotide
gagcguaguguggccgccc

SEQ ID NO: 1622171 - RNA, 19 nt, Artificial Sequence
  Description of Artificial Sequence: Synthetic oligonucleotide
agcgggcaaggaccguaca

SEQ ID NO: 1622172 - RNA, 19 nt, Artificial Sequence
  Description of Artificial Sequence: Synthetic oligonucleotide
cuggcagcuagguccaagu

SEQ ID NO: 1622173 - RNA, 19 nt, Artificial Sequence
  Description of Artificial Sequence: Synthetic oligonucleotide
ggacccugcgacgcugugg

SEQ ID NO: 1622174 - RNA, 19 nt, Artificial Sequence
  Description of Artificial Sequence: Synthetic oligonucleotide
aguggccgcaaaaguuuga

SEQ ID NO: 1622175 - RNA, 19 nt, Artificial Sequence
  Description of Artificial Sequence: Synthetic oligonucleotide
guagaaugaguggccgcaa

SEQ ID NO: 1622176 - RNA, 19 nt, Artificial Sequence
  Description of Artificial Sequence: Synthetic oligonucleotide
gguguugggagggugauuu

SEQ ID NO: 1622177 - RNA, 19 nt, Artificial Sequence
  Description of Artificial Sequence: Synthetic oligonucleotide
uggucacgggcaagaccau

SEQ ID NO: 1622178 - RNA, 19 nt, Artificial Sequence
  Description of Artificial Sequence: Synthetic oligonucleotide
ccguacagguggcaauggc

SEQ ID NO: 1622179 - RNA, 19 nt, Artificial Sequence
  Description of Artificial Sequence: Synthetic oligonucleotide
ccagcgguuucagggaccc

SEQ ID NO: 1622180 - RNA, 19 nt, Artificial Sequence
  Description of Artificial Sequence: Synthetic oligonucleotide
ggcaaggaccguacaggug

SEQ ID NO: 1622181 - RNA, 19 nt, Artificial Sequence
  Description of Artificial Sequence: Synthetic oligonucleotide
guuguggguaaaagucugu

SEQ ID NO: 1622182 - RNA, 19 nt, Artificial Sequence
  Description of Artificial Sequence: Synthetic oligonucleotide
caucucuauggaggcccug

SEQ ID NO: 1622183 - RNA, 19 nt, Artificial Sequence
  Description of Artificial Sequence: Synthetic oligonucleotide
gggaucggauauugugaga

SEQ ID NO: 1622184 - RNA, 19 nt, Artificial Sequence
  Description of Artificial Sequence: Synthetic oligonucleotide
cacugugcgcacagcugga

SEQ ID NO: 1622185 - RNA, 19 nt, Artificial Sequence
  Description of Artificial Sequence: Synthetic oligonucleotide
gcuggccgcacacuaaacu

SEQ ID NO: 1622186 - RNA, 19 nt, Artificial Sequence
  Description of Artificial Sequence: Synthetic oligonucleotide
cagccugauccccugccaa

SEQ ID NO: 1622187 - RNA, 19 nt, Artificial Sequence
  Description of Artificial Sequence: Synthetic oligonucleotide
gcagauuggccaucucucu

SEQ ID NO: 1622188 - RNA, 19 nt, Artificial Sequence
  Description of Artificial Sequence: Synthetic oligonucleotide
ggccagcgguuucagggac

SEQ ID NO: 1622189 - RNA, 19 nt, Artificial Sequence
  Description of Artificial Sequence: Synthetic oligonucleotide
guguggccgcccaccaccc

SEQ ID NO: 1622190 - RNA, 19 nt, Artificial Sequence
  Description of Artificial Sequence: Synthetic oligonucleotide
gcgcacagcuggaauccgg

SEQ ID NO: 1622191 - RNA, 19 nt, Artificial Sequence
  Description of Artificial Sequence: Synthetic oligonucleotide
ggaggcccuguaaaacuca

SEQ ID NO: 1622192 - RNA, 19 nt, Artificial Sequence
  Description of Artificial Sequence: Synthetic oligonucleotide
gggcaaggaccguacaggu

SEQ ID NO: 1622193 - RNA, 19 nt, Artificial Sequence
  Description of Artificial Sequence: Synthetic oligonucleotide
gugucgugccaaggcuuug

SEQ ID NO: 1622194 - RNA, 19 nt, Artificial Sequence
  Description of Artificial Sequence: Synthetic oligonucleotide
cugaugcagcgagggcuug

SEQ ID NO: 1622195 - RNA, 19 nt, Artificial Sequence
  Description of Artificial Sequence: Synthetic oligonucleotide
gguccaaguguuucugcau

SEQ ID NO: 1622196 - RNA, 19 nt, Artificial Sequence
  Description of Artificial Sequence: Synthetic oligonucleotide
gcccaggucaacaugcaua

SEQ ID NO: 1622197 - RNA, 19 nt, Artificial Sequence
  Description of Artificial Sequence: Synthetic oligonucleotide
ugcuucucgcuggcccuuc

SEQ ID NO: 1622198 - RNA, 19 nt, Artificial Sequence
  Description of Artificial Sequence: Synthetic oligonucleotide
caggcagauuggccaucuc

SEQ ID NO: 1622199 - RNA, 19 nt, Artificial Sequence
  Description of Artificial Sequence: Synthetic oligonucleotide
gcgguuucagggacccugc

SEQ ID NO: 1622200 - RNA, 19 nt, Artificial Sequence
  Description of Artificial Sequence: Synthetic oligonucleotide
guagaugggaucggauauu

SEQ ID NO: 1622201 - RNA, 19 nt, Artificial Sequence
  Description of Artificial Sequence: Synthetic oligonucleotide
agcucgguggccagcgguu

SEQ ID NO: 1622202 - RNA, 19 nt, Artificial Sequence
  Description of Artificial Sequence: Synthetic oligonucleotide
cacugggguguaagaccca

SEQ ID NO: 1622203 - RNA, 19 nt, Artificial Sequence
  Description of Artificial Sequence: Synthetic oligonucleotide
ccuucacaaucagagggaa

SEQ ID NO: 1622204 - RNA, 19 nt, Artificial Sequence
  Description of Artificial Sequence: Synthetic oligonucleotide
aggccacuuggcacaggga

SEQ ID NO: 1622205 - RNA, 19 nt, Artificial Sequence
  Description of Artificial Sequence: Synthetic oligonucleotide
cgagcugcgacgaggagcu

SEQ ID NO: 1622206 - RNA, 19 nt, Artificial Sequence
  Description of Artificial Sequence: Synthetic oligonucleotide
caagaccauuaggggcauc

SEQ ID NO: 1622207 - RNA, 19 nt, Artificial Sequence
  Description of Artificial Sequence: Synthetic oligonucleotide
cagguacuacaggaggggu

SEQ ID NO: 1622208 - RNA, 19 nt, Artificial Sequence
  Description of Artificial Sequence: Synthetic oligonucleotide
cguagaugggaucggauau

SEQ ID NO: 1622209 - RNA, 19 nt, Artificial Sequence
  Description of Artificial Sequence: Synthetic oligonucleotide
cucgcuggcccuucacaau

SEQ ID NO: 1622210 - RNA, 19 nt, Artificial Sequence
  Description of Artificial Sequence: Synthetic oligonucleotide
gccagcgguuucagggacc

SEQ ID NO: 1622211 - RNA, 19 nt, Artificial Sequence
  Description of Artificial Sequence: Synthetic oligonucleotide
gcauaaauuccaagagguu

SEQ ID NO: 1622212 - RNA, 19 nt, Artificial Sequence
  Description of Artificial Sequence: Synthetic oligonucleotide
cagagcucugcacgccugu

SEQ ID NO: 1622213 - RNA, 19 nt, Artificial Sequence
  Description of Artificial Sequence: Synthetic oligonucleotide
ggaccguacagguggcaau

SEQ ID NO: 1622214 - RNA, 19 nt, Artificial Sequence
  Description of Artificial Sequence: Synthetic oligonucleotide
gcgacgcuguggaacgaac

SEQ ID NO: 1622215 - RNA, 19 nt, Artificial Sequence
  Description of Artificial Sequence: Synthetic oligonucleotide
cugugcgcacagcuggaau

SEQ ID NO: 1622216 - RNA, 19 nt, Artificial Sequence
  Description of Artificial Sequence: Synthetic oligonucleotide
ggcaaugugucagggucau

SEQ ID NO: 1622217 - RNA, 19 nt, Artificial Sequence
  Description of Artificial Sequence: Synthetic oligonucleotide
aagggaccucuggcagcua

SEQ ID NO: 1622218 - RNA, 19 nt, Artificial Sequence
  Description of Artificial Sequence: Synthetic oligonucleotide
gcuucucgcuggcccuuca

SEQ ID NO: 1622219 - RNA, 19 nt, Artificial Sequence
  Description of Artificial Sequence: Synthetic oligonucleotide
ccaguggcaagacguagau

SEQ ID NO: 1622220 - RNA, 19 nt, Artificial Sequence
  Description of Artificial Sequence: Synthetic oligonucleotide
gcguaguguggccgcccac

SEQ ID NO: 1622221 - RNA, 19 nt, Artificial Sequence
  Description of Artificial Sequence: Synthetic oligonucleotide
gggucauguaugacacgcu

SEQ ID NO: 1622222 - RNA, 19 nt, Artificial Sequence
  Description of Artificial Sequence: Synthetic oligonucleotide
cgcaaaaguuugauaucgu

SEQ ID NO: 1622223 - RNA, 19 nt, Artificial Sequence
  Description of Artificial Sequence: Synthetic oligonucleotide
ccaggcgagcugcgacgag

SEQ ID NO: 1622224 - RNA, 19 nt, Artificial Sequence
  Description of Artificial Sequence: Synthetic oligonucleotide
gagucccacugggguguaa

SEQ ID NO: 1622225 - RNA, 19 nt, Artificial Sequence
  Description of Artificial Sequence: Synthetic oligonucleotide
cgcuggccgcacacuaaac

SEQ ID NO: 1622226 - RNA, 19 nt, Artificial Sequence
  Description of Artificial Sequence: Synthetic oligonucleotide
cugcgacgcuguggaacga

SEQ ID NO: 1622227 - RNA, 19 nt, Artificial Sequence
  Description of Artificial Sequence: Synthetic oligonucleotide
ggagggugauuuggauugu

SEQ ID NO: 1622228 - RNA, 19 nt, Artificial Sequence
  Description of Artificial Sequence: Synthetic oligonucleotide
ccgcuggccgcacacuaaa

SEQ ID NO: 1622229 - RNA, 19 nt, Artificial Sequence
  Description of Artificial Sequence: Synthetic oligonucleotide
ggccgcacacuaaacucau

SEQ ID NO: 1622230 - RNA, 19 nt, Artificial Sequence
  Description of Artificial Sequence: Synthetic oligonucleotide
gccgcacacuaaacucauc

SEQ ID NO: 1622231 - RNA, 19 nt, Artificial Sequence
  Description of Artificial Sequence: Synthetic oligonucleotide
cagcuagguccaaguguuu

SEQ ID NO: 1622232 - RNA, 19 nt, Artificial Sequence
  Description of Artificial Sequence: Synthetic oligonucleotide
gccgcuggccgcacacuaa

SEQ ID NO: 1622233 - RNA, 19 nt, Artificial Sequence
  Description of Artificial Sequence: Synthetic oligonucleotide
ccugauccccugccaauuu

SEQ ID NO: 1622234 - RNA, 19 nt, Artificial Sequence
  Description of Artificial Sequence: Synthetic oligonucleotide
ggucacgggcaagaccauu

SEQ ID NO: 1622235 - RNA, 19 nt, Artificial Sequence
  Description of Artificial Sequence: Synthetic oligonucleotide
ccccaccaaggcaggccca

SEQ ID NO: 1622236 - RNA, 19 nt, Artificial Sequence
  Description of Artificial Sequence: Synthetic oligonucleotide
cugccgcuggccgcacacu

SEQ ID NO: 1622237 - RNA, 19 nt, Artificial Sequence
  Description of Artificial Sequence: Synthetic oligonucleotide
cagcgguuucagggacccu

SEQ ID NO: 1622238 - RNA, 19 nt, Artificial Sequence
  Description of Artificial Sequence: Synthetic oligonucleotide
cugcgacgaggagcucggu

SEQ ID NO: 1622239 - RNA, 19 nt, Artificial Sequence
  Description of Artificial Sequence: Synthetic oligonucleotide
ccgaggggaaguggauggu

SEQ ID NO: 1622240 - RNA, 19 nt, Artificial Sequence
  Description of Artificial Sequence: Synthetic oligonucleotide
gccuucccgaggaggcaau

SEQ ID NO: 1622241 - RNA, 19 nt, Artificial Sequence
  Description of Artificial Sequence: Synthetic oligonucleotide
agaaguugaccucagaggg

SEQ ID NO: 1622242 - RNA, 19 nt, Artificial Sequence
  Description of Artificial Sequence: Synthetic oligonucleotide
aaggaguugagccacgagg

SEQ ID NO: 1622243 - RNA, 19 nt, Artificial Sequence
  Description of Artificial Sequence: Synthetic oligonucleotide
cacuaacacacuuagagag

SEQ ID NO: 1622244 - RNA, 19 nt, Artificial Sequence
  Description of Artificial Sequence: Synthetic oligonucleotide
aggucugugccacaaagcc

SEQ ID NO: 1622245 - RNA, 19 nt, Artificial Sequence
  Description of Artificial Sequence: Synthetic oligonucleotide
aaaacacuccuccagcgcu

SEQ ID NO: 1622246 - RNA, 19 nt, Artificial Sequence
  Description of Artificial Sequence: Synthetic oligonucleotide
ucugcguuuagcaagcccu

SEQ ID NO: 1622247 - RNA, 19 nt, Artificial Sequence
  Description of Artificial Sequence: Synthetic oligonucleotide
uuagcaagcccucuggcug

SEQ ID NO: 1622248 - RNA, 19 nt, Artificial Sequence
  Description of Artificial Sequence: Synthetic oligonucleotide
augggugacgaguacagcg

SEQ ID NO: 1622249 - RNA, 19 nt, Artificial Sequence
  Description of Artificial Sequence: Synthetic oligonucleotide
gauguggaccacuagggcc

SEQ ID NO: 1622250 - RNA, 19 nt, Artificial Sequence
  Description of Artificial Sequence: Synthetic oligonucleotide
uccgcuuagcuccaggaag

SEQ ID NO: 1622251 - RNA, 19 nt, Artificial Sequence
  Description of Artificial Sequence: Synthetic oligonucleotide
gaagacgagagggagaggc

SEQ ID NO: 1622252 - RNA, 19 nt, Artificial Sequence
  Description of Artificial Sequence: Synthetic oligonucleotide
acuccuagcuccugggccc

SEQ ID NO: 1622253 - RNA, 19 nt, Artificial Sequence
  Description of Artificial Sequence: Synthetic oligonucleotide
accacguucagcgucacgg

SEQ ID NO: 1622254 - RNA, 19 nt, Artificial Sequence
  Description of Artificial Sequence: Synthetic oligonucleotide
cuccgcgcgaacaugaccg

SEQ ID NO: 1622255 - RNA, 19 nt, Artificial Sequence
  Description of Artificial Sequence: Synthetic oligonucleotide
aaaccgucggggaaggccg

SEQ ID NO: 1622256 - RNA, 19 nt, Artificial Sequence
  Description of Artificial Sequence: Synthetic oligonucleotide
aagggguucuugacgaugg

SEQ ID NO: 1622257 - RNA, 19 nt, Artificial Sequence
  Description of Artificial Sequence: Synthetic oligonucleotide
aguacagcggcauguggag

SEQ ID NO: 1622258 - RNA, 19 nt, Artificial Sequence
  Description of Artificial Sequence: Synthetic oligonucleotide
gaagccgugcggcaggucc

SEQ ID NO: 1622259 - RNA, 19 nt, Artificial Sequence
  Description of Artificial Sequence: Synthetic oligonucleotide
gaugauggggacuccuagc

SEQ ID NO: 1622260 - RNA, 19 nt, Artificial Sequence
  Description of Artificial Sequence: Synthetic oligonucleotide
ucucggguggaaaccgucg

SEQ ID NO: 1622261 - RNA, 19 nt, Artificial Sequence
  Description of Artificial Sequence: Synthetic oligonucleotide
gucucuguaccugaguagg

SEQ ID NO: 1622262 - RNA, 19 nt, Artificial Sequence
  Description of Artificial Sequence: Synthetic oligonucleotide
gacacggugaugcagaggu

SEQ ID NO: 1622263 - RNA, 19 nt, Artificial Sequence
  Description of Artificial Sequence: Synthetic oligonucleotide
ugucucuguaccugaguag

SEQ ID NO: 1622264 - RNA, 19 nt, Artificial Sequence
  Description of Artificial Sequence: Synthetic oligonucleotide
aaggcauauccucucuccu

SEQ ID NO: 1622265 - RNA, 19 nt, Artificial Sequence
  Description of Artificial Sequence: Synthetic oligonucleotide
ugagccacgaggaggcacc

SEQ ID NO: 1622266 - RNA, 19 nt, Artificial Sequence
  Description of Artificial Sequence: Synthetic oligonucleotide
augauggggacuccuagcu

SEQ ID NO: 1622267 - RNA, 19 nt, Artificial Sequence
  Description of Artificial Sequence: Synthetic oligonucleotide
accacuagggcccgugagg

SEQ ID NO: 1622268 - RNA, 19 nt, Artificial Sequence
  Description of Artificial Sequence: Synthetic oligonucleotide
guagaaguggguccaugag

SEQ ID NO: 1622269 - RNA, 19 nt, Artificial Sequence
  Description of Artificial Sequence: Synthetic oligonucleotide
gaccgagucguccagcaug

SEQ ID NO: 1622270 - RNA, 19 nt, Artificial Sequence
  Description of Artificial Sequence: Synthetic oligonucleotide
acuaacacacuuagagagg

SEQ ID NO: 1622271 - RNA, 19 nt, Artificial Sequence
  Description of Artificial Sequence: Synthetic oligonucleotide
gaaaccgucggggaaggcc

SEQ ID NO: 1622272 - RNA, 19 nt, Artificial Sequence
  Description of Artificial Sequence: Synthetic oligonucleotide
ugagacucagaagacgaga

SEQ ID NO: 1622273 - RNA, 19 nt, Artificial Sequence
  Description of Artificial Sequence: Synthetic oligonucleotide
cagaagacgagagggagag

SEQ ID NO: 1622274 - RNA, 19 nt, Artificial Sequence
  Description of Artificial Sequence: Synthetic oligonucleotide
agcgacaucuccggggugc

SEQ ID NO: 1622275 - RNA, 19 nt, Artificial Sequence
  Description of Artificial Sequence: Synthetic oligonucleotide
ucuguaccugaguaggcac

SEQ ID NO: 1622276 - RNA, 19 nt, Artificial Sequence
  Description of Artificial Sequence: Synthetic oligonucleotide
gucgauggagaugaugggg

SEQ ID NO: 1622277 - RNA, 19 nt, Artificial Sequence
  Description of Artificial Sequence: Synthetic oligonucleotide
gcaagaggucuuuagugcg

SEQ ID NO: 1622278 - RNA, 19 nt, Artificial Sequence
  Description of Artificial Sequence: Synthetic oligonucleotide
ugcacgcacaacuccgcgg

SEQ ID NO: 1622279 - RNA, 19 nt, Artificial Sequence
  Description of Artificial Sequence: Synthetic oligonucleotide
ugaugcagagguucccgcc

SEQ ID NO: 1622280 - RNA, 19 nt, Artificial Sequence
  Description of Artificial Sequence: Synthetic oligonucleotide
ugcccgaagggacacggug

SEQ ID NO: 1622281 - RNA, 19 nt, Artificial Sequence
  Description of Artificial Sequence: Synthetic oligonucleotide
gaacaugaccgagucgucc

SEQ ID NO: 1622282 - RNA, 19 nt, Artificial Sequence
  Description of Artificial Sequence: Synthetic oligonucleotide
ucaucacggaggcugcgca

SEQ ID NO: 1622283 - RNA, 19 nt, Artificial Sequence
  Description of Artificial Sequence: Synthetic oligonucleotide
agggugucugcguuuagca

SEQ ID NO: 1622284 - RNA, 19 nt, Artificial Sequence
  Description of Artificial Sequence: Synthetic oligonucleotide
gacuccguggagcgcacgg

SEQ ID NO: 1622285 - RNA, 19 nt, Artificial Sequence
  Description of Artificial Sequence: Synthetic oligonucleotide
agggaugugucccucugca

SEQ ID NO: 1622286 - RNA, 19 nt, Artificial Sequence
  Description of Artificial Sequence: Synthetic oligonucleotide
agaggucuuuagugcgccc

SEQ ID NO: 1622287 - RNA, 19 nt, Artificial Sequence
  Description of Artificial Sequence: Synthetic oligonucleotide
augcgcugcacgcacaacu

SEQ ID NO: 1622288 - RNA, 19 nt, Artificial Sequence
  Description of Artificial Sequence: Synthetic oligonucleotide
uaccugaguaggcacuaac

SEQ ID NO: 1622289 - RNA, 19 nt, Artificial Sequence
  Description of Artificial Sequence: Synthetic oligonucleotide
ucuccggggugccugacgu

SEQ ID NO: 1622290 - RNA, 19 nt, Artificial Sequence
  Description of Artificial Sequence: Synthetic oligonucleotide
ucucuccuguugaaccgag

SEQ ID NO: 1622291 - RNA, 19 nt, Artificial Sequence
  Description of Artificial Sequence: Synthetic oligonucleotide
agugcuugacagcccagca

SEQ ID NO: 1622292 - RNA, 19 nt, Artificial Sequence
  Description of Artificial Sequence: Synthetic oligonucleotide
agcgucucggguggaaacc

SEQ ID NO: 1622293 - RNA, 19 nt, Artificial Sequence
  Description of Artificial Sequence: Synthetic oligonucleotide
agucguccagcaugggguc

SEQ ID NO: 1622294 - RNA, 19 nt, Artificial Sequence
  Description of Artificial Sequence: Synthetic oligonucleotide
cacgccacgaggugcacag

SEQ ID NO: 1622295 - RNA, 19 nt, Artificial Sequence
  Description of Artificial Sequence: Synthetic oligonucleotide
cugccaugaugccaucugg

SEQ ID NO: 1622296 - RNA, 19 nt, Artificial Sequence
  Description of Artificial Sequence: Synthetic oligonucleotide
ucuccgcgcgaacaugacc

SEQ ID NO: 1622297 - RNA, 19 nt, Artificial Sequence
  Description of Artificial Sequence: Synthetic oligonucleotide
gacacucagugguagaagu

SEQ ID NO: 1622298 - RNA, 19 nt, Artificial Sequence
  Description of Artificial Sequence: Synthetic oligonucleotide
agcgcucggggaaaggggc

SEQ ID NO: 1622299 - RNA, 19 nt, Artificial Sequence
  Description of Artificial Sequence: Synthetic oligonucleotide
agcgcacucaucacggagg

SEQ ID NO: 1622300 - RNA, 19 nt, Artificial Sequence
  Description of Artificial Sequence: Synthetic oligonucleotide
aguaggcacuaacacacuu

SEQ ID NO: 1622301 - RNA, 19 nt, Artificial Sequence
  Description of Artificial Sequence: Synthetic oligonucleotide
uugaccucagagggugugg

SEQ ID NO: 1622302 - RNA, 19 nt, Artificial Sequence
  Description of Artificial Sequence: Synthetic oligonucleotide
gaaagaaguugaccucaga

SEQ ID NO: 1622303 - RNA, 19 nt, Artificial Sequence
  Description of Artificial Sequence: Synthetic oligonucleotide
ugacgaugggugacgagua

SEQ ID NO: 1622304 - RNA, 19 nt, Artificial Sequence
  Description of Artificial Sequence: Synthetic oligonucleotide
gaccacuagggcccgugag

SEQ ID NO: 1622305 - RNA, 19 nt, Artificial Sequence
  Description of Artificial Sequence: Synthetic oligonucleotide
agcggagacaugaaggggu

SEQ ID NO: 1622306 - RNA, 19 nt, Artificial Sequence
  Description of Artificial Sequence: Synthetic oligonucleotide
agaaagaaguugaccucag

SEQ ID NO: 1622307 - RNA, 19 nt, Artificial Sequence
  Description of Artificial Sequence: Synthetic oligonucleotide
agcgcacgccacgaggugc

SEQ ID NO: 1622308 - RNA, 19 nt, Artificial Sequence
  Description of Artificial Sequence: Synthetic oligonucleotide
gaaggccgcgcgcacgcgg

SEQ ID NO: 1622309 - RNA, 19 nt, Artificial Sequence
  Description of Artificial Sequence: Synthetic oligonucleotide
augaccgagucguccagca

SEQ ID NO: 1622310 - RNA, 19 nt, Artificial Sequence
  Description of Artificial Sequence: Synthetic oligonucleotide
guggaaaccgucggggaag

SEQ ID NO: 1622311 - RNA, 19 nt, Artificial Sequence
  Description of Artificial Sequence: Synthetic oligonucleotide
ccugaguaggcacuaacac

SEQ ID NO: 1622312 - RNA, 19 nt, Artificial Sequence
  Description of Artificial Sequence: Synthetic oligonucleotide
ucagacgagcggcgcggcg

SEQ ID NO: 1622313 - RNA, 19 nt, Artificial Sequence
  Description of Artificial Sequence: Synthetic oligonucleotide
uggaaaccgucggggaagg

SEQ ID NO: 1622314 - RNA, 19 nt, Artificial Sequence
  Description of Artificial Sequence: Synthetic oligonucleotide
cuugacagcccagcaguag

SEQ ID NO: 1622315 - RNA, 19 nt, Artificial Sequence
  Description of Artificial Sequence: Synthetic oligonucleotide
cacuccugcgcauggacuc

SEQ ID NO: 1622316 - RNA, 19 nt, Artificial Sequence
  Description of Artificial Sequence: Synthetic oligonucleotide
cauggauguggaccacuag

SEQ ID NO: 1622317 - RNA, 19 nt, Artificial Sequence
  Description of Artificial Sequence: Synthetic oligonucleotide
guagucgauggagaugaug

SEQ ID NO: 1622318 - RNA, 19 nt, Artificial Sequence
  Description of Artificial Sequence: Synthetic oligonucleotide
gguagaaguggguccauga

SEQ ID NO: 1622319 - RNA, 19 nt, Artificial Sequence
  Description of Artificial Sequence: Synthetic oligonucleotide
ggguucuugacgaugggug

SEQ ID NO: 1622320 - RNA, 19 nt, Artificial Sequence
  Description of Artificial Sequence: Synthetic oligonucleotide
acuggguaggcugccauga

SEQ ID NO: 1622321 - RNA, 19 nt, Artificial Sequence
  Description of Artificial Sequence: Synthetic oligonucleotide
accgagucguccagcaugg

SEQ ID NO: 1622322 - RNA, 19 nt, Artificial Sequence
  Description of Artificial Sequence: Synthetic oligonucleotide
uggcuugagcgucucgggu

SEQ ID NO: 1622323 - RNA, 19 nt, Artificial Sequence
  Description of Artificial Sequence: Synthetic oligonucleotide
ugcgcagaugggagcaaga

SEQ ID NO: 1622324 - RNA, 19 nt, Artificial Sequence
  Description of Artificial Sequence: Synthetic oligonucleotide
gacaucuccggggugccug

SEQ ID NO: 1622325 - RNA, 19 nt, Artificial Sequence
  Description of Artificial Sequence: Synthetic oligonucleotide
cacguucagcgucacgggc

SEQ ID NO: 1622326 - RNA, 19 nt, Artificial Sequence
  Description of Artificial Sequence: Synthetic oligonucleotide
agacaugaagggguucuug

SEQ ID NO: 1622327 - RNA, 19 nt, Artificial Sequence
  Description of Artificial Sequence: Synthetic oligonucleotide
gucugcguuuagcaagccc

SEQ ID NO: 1622328 - RNA, 19 nt, Artificial Sequence
  Description of Artificial Sequence: Synthetic oligonucleotide
gugaugcagagguucccgc

SEQ ID NO: 1622329 - RNA, 19 nt, Artificial Sequence
  Description of Artificial Sequence: Synthetic oligonucleotide
caugggauuuggaggucug

SEQ ID NO: 1622330 - RNA, 19 nt, Artificial Sequence
  Description of Artificial Sequence: Synthetic oligonucleotide
cuugacgaugggugacgag

SEQ ID NO: 1622331 - RNA, 19 nt, Artificial Sequence
  Description of Artificial Sequence: Synthetic oligonucleotide
gcuugagcgucucgggugg

SEQ ID NO: 1622332 - RNA, 19 nt, Artificial Sequence
  Description of Artificial Sequence: Synthetic oligonucleotide
cagcgcucggggaaagggg

SEQ ID NO: 1622333 - RNA, 19 nt, Artificial Sequence
  Description of Artificial Sequence: Synthetic oligonucleotide
ggucucgcggcacagcgcc

SEQ ID NO: 1622334 - RNA, 19 nt, Artificial Sequence
  Description of Artificial Sequence: Synthetic oligonucleotide
ucuugacgaugggugacga

SEQ ID NO: 1622335 - RNA, 19 nt, Artificial Sequence
  Description of Artificial Sequence: Synthetic oligonucleotide
acaacuccgcggccugccg

SEQ ID NO: 1622336 - RNA, 19 nt, Artificial Sequence
  Description of Artificial Sequence: Synthetic oligonucleotide
uucccgccugcacuguccc

SEQ ID NO: 1622337 - RNA, 19 nt, Artificial Sequence
  Description of Artificial Sequence: Synthetic oligonucleotide
acagcccagcaguaggcga

SEQ ID NO: 1622338 - RNA, 19 nt, Artificial Sequence
  Description of Artificial Sequence: Synthetic oligonucleotide
gaugggugacgaguacagc

SEQ ID NO: 1622339 - RNA, 19 nt, Artificial Sequence
  Description of Artificial Sequence: Synthetic oligonucleotide
ggcacccucacuccauagg

SEQ ID NO: 1622340 - RNA, 19 nt, Artificial Sequence
  Description of Artificial Sequence: Synthetic oligonucleotide
aucuccggggugccugacg

SEQ ID NO: 1622341 - RNA, 19 nt, Artificial Sequence
  Description of Artificial Sequence: Synthetic oligonucleotide
acgagagggagaggcagag

SEQ ID NO: 1622342 - RNA, 19 nt, Artificial Sequence
  Description of Artificial Sequence: Synthetic oligonucleotide
agcgucacgggcuggccca

SEQ ID NO: 1622343 - RNA, 19 nt, Artificial Sequence
  Description of Artificial Sequence: Synthetic oligonucleotide
accugaguaggcacuaaca

SEQ ID NO: 1622344 - RNA, 19 nt, Artificial Sequence
  Description of Artificial Sequence: Synthetic oligonucleotide
agcggcauguggaggacuc

SEQ ID NO: 1622345 - RNA, 19 nt, Artificial Sequence
  Description of Artificial Sequence: Synthetic oligonucleotide
gagcgucucggguggaaac

SEQ ID NO: 1622346 - RNA, 19 nt, Artificial Sequence
  Description of Artificial Sequence: Synthetic oligonucleotide
agacgagcggcgcggcggg

SEQ ID NO: 1622347 - RNA, 19 nt, Artificial Sequence
  Description of Artificial Sequence: Synthetic oligonucleotide
augagacucagaagacgag

SEQ ID NO: 1622348 - RNA, 19 nt, Artificial Sequence
  Description of Artificial Sequence: Synthetic oligonucleotide
gaugcagagguucccgccu

SEQ ID NO: 1622349 - RNA, 19 nt, Artificial Sequence
  Description of Artificial Sequence: Synthetic oligonucleotide
gagucguccagcauggggu

SEQ ID NO: 1622350 - RNA, 19 nt, Artificial Sequence
  Description of Artificial Sequence: Synthetic oligonucleotide
gcacuaacacacuuagaga

SEQ ID NO: 1622351 - RNA, 19 nt, Artificial Sequence
  Description of Artificial Sequence: Synthetic oligonucleotide
caucacggaggcugcgcag

SEQ ID NO: 1622352 - RNA, 19 nt, Artificial Sequence
  Description of Artificial Sequence: Synthetic oligonucleotide
cagacgagcggcgcggcgg

SEQ ID NO: 1622353 - RNA, 19 nt, Artificial Sequence
  Description of Artificial Sequence: Synthetic oligonucleotide
uggcacccucacuccauag

SEQ ID NO: 1622354 - RNA, 19 nt, Artificial Sequence
  Description of Artificial Sequence: Synthetic oligonucleotide
acgaugggugacgaguaca

SEQ ID NO: 1622355 - RNA, 19 nt, Artificial Sequence
  Description of Artificial Sequence: Synthetic oligonucleotide
gagucagagugguccucug

SEQ ID NO: 1622356 - RNA, 19 nt, Artificial Sequence
  Description of Artificial Sequence: Synthetic oligonucleotide
cagcggagacaugaagggg

SEQ ID NO: 1622357 - RNA, 19 nt, Artificial Sequence
  Description of Artificial Sequence: Synthetic oligonucleotide
cagcagcggagacaugaag

SEQ ID NO: 1622358 - RNA, 19 nt, Artificial Sequence
  Description of Artificial Sequence: Synthetic oligonucleotide
gaagggacacggugaugca

SEQ ID NO: 1622359 - RNA, 19 nt, Artificial Sequence
  Description of Artificial Sequence: Synthetic oligonucleotide
cugcguuuagcaagcccuc

SEQ ID NO: 1622360 - RNA, 19 nt, Artificial Sequence
  Description of Artificial Sequence: Synthetic oligonucleotide
gccacgaggaggcacccag

SEQ ID NO: 1622361 - RNA, 19 nt, Artificial Sequence
  Description of Artificial Sequence: Synthetic oligonucleotide
aucuggcacccucacucca

SEQ ID NO: 1622362 - RNA, 19 nt, Artificial Sequence
  Description of Artificial Sequence: Synthetic oligonucleotide
ugcguuuagcaagcccucu

SEQ ID NO: 1622363 - RNA, 19 nt, Artificial Sequence
  Description of Artificial Sequence: Synthetic oligonucleotide
gagcgcacggugucugcug

SEQ ID NO: 1622364 - RNA, 19 nt, Artificial Sequence
  Description of Artificial Sequence: Synthetic oligonucleotide
uccagagcgcacgccacga

SEQ ID NO: 1622365 - RNA, 19 nt, Artificial Sequence
  Description of Artificial Sequence: Synthetic oligonucleotide
cguuuagcaagcccucugg

SEQ ID NO: 1622366 - RNA, 19 nt, Artificial Sequence
  Description of Artificial Sequence: Synthetic oligonucleotide
agagcgcacgccacgaggu

SEQ ID NO: 1622367 - RNA, 19 nt, Artificial Sequence
  Description of Artificial Sequence: Synthetic oligonucleotide
ugaagggguucuugacgau

SEQ ID NO: 1622368 - RNA, 19 nt, Artificial Sequence
  Description of Artificial Sequence: Synthetic oligonucleotide
gacgaguacagcggcaugu

SEQ ID NO: 1622369 - RNA, 19 nt, Artificial Sequence
  Description of Artificial Sequence: Synthetic oligonucleotide
uggggcuugcguccgcuua

SEQ ID NO: 1622370 - RNA, 19 nt, Artificial Sequence
  Description of Artificial Sequence: Synthetic oligonucleotide
uggaccacuagggcccgug

SEQ ID NO: 1622371 - RNA, 19 nt, Artificial Sequence
  Description of Artificial Sequence: Synthetic oligonucleotide
caugaccgagucguccagc

SEQ ID NO: 1622372 - RNA, 19 nt, Artificial Sequence
  Description of Artificial Sequence: Synthetic oligonucleotide
cacuagggcccgugaggcg

SEQ ID NO: 1622373 - RNA, 19 nt, Artificial Sequence
  Description of Artificial Sequence: Synthetic oligonucleotide
ggaguagucgauggagaug

SEQ ID NO: 1622374 - RNA, 19 nt, Artificial Sequence
  Description of Artificial Sequence: Synthetic oligonucleotide
uccgcggccugccgggucu

SEQ ID NO: 1622375 - RNA, 19 nt, Artificial Sequence
  Description of Artificial Sequence: Synthetic oligonucleotide
ccacgaggugcacaggcgg

SEQ ID NO: 1622376 - RNA, 19 nt, Artificial Sequence
  Description of Artificial Sequence: Synthetic oligonucleotide
agaagacgagagggagagg

SEQ ID NO: 1622377 - RNA, 19 nt, Artificial Sequence
  Description of Artificial Sequence: Synthetic oligonucleotide
gcgaacaugaccgagucgu

SEQ ID NO: 1622378 - RNA, 19 nt, Artificial Sequence
  Description of Artificial Sequence: Synthetic oligonucleotide
ugagcgucucggguggaaa

SEQ ID NO: 1622379 - RNA, 19 nt, Artificial Sequence
  Description of Artificial Sequence: Synthetic oligonucleotide
gcauguggaggacucccug

SEQ ID NO: 1622380 - RNA, 19 nt, Artificial Sequence
  Description of Artificial Sequence: Synthetic oligonucleotide
cagagguucccgccugcac

SEQ ID NO: 1622381 - RNA, 19 nt, Artificial Sequence
  Description of Artificial Sequence: Synthetic oligonucleotide
uugaaccgagcagggcaca

SEQ ID NO: 1622382 - RNA, 19 nt, Artificial Sequence
  Description of Artificial Sequence: Synthetic oligonucleotide
ggacacucagugguagaag

SEQ ID NO: 1622383 - RNA, 19 nt, Artificial Sequence
  Description of Artificial Sequence: Synthetic oligonucleotide
ggcggggugaggacgagcc

SEQ ID NO: 1622384 - RNA, 19 nt, Artificial Sequence
  Description of Artificial Sequence: Synthetic oligonucleotide
gcguuuagcaagcccucug

SEQ ID NO: 1622385 - RNA, 19 nt, Artificial Sequence
  Description of Artificial Sequence: Synthetic oligonucleotide
ucacggaggcugcgcagau

SEQ ID NO: 1622386 - RNA, 19 nt, Artificial Sequence
  Description of Artificial Sequence: Synthetic oligonucleotide
aggaaggaguugagccacg

SEQ ID NO: 1622387 - RNA, 19 nt, Artificial Sequence
  Description of Artificial Sequence: Synthetic oligonucleotide
cgaugggugacgaguacag

SEQ ID NO: 1622388 - RNA, 19 nt, Artificial Sequence
  Description of Artificial Sequence: Synthetic oligonucleotide
gagcgcacgccacgaggug

SEQ ID NO: 1622389 - RNA, 19 nt, Artificial Sequence
  Description of Artificial Sequence: Synthetic oligonucleotide
gcugcccgaagggacacgg

SEQ ID NO: 1622390 - RNA, 19 nt, Artificial Sequence
  Description of Artificial Sequence: Synthetic oligonucleotide
uccgcgcgaacaugaccga

SEQ ID NO: 1622391 - RNA, 19 nt, Artificial Sequence
  Description of Artificial Sequence: Synthetic oligonucleotide
ucuguccacggagcccacc

SEQ ID NO: 1622392 - RNA, 19 nt, Artificial Sequence
  Description of Artificial Sequence: Synthetic oligonucleotide
gguggaaaccgucggggaa

SEQ ID NO: 1622393 - RNA, 19 nt, Artificial Sequence
  Description of Artificial Sequence: Synthetic oligonucleotide
ugucugcguuuagcaagcc

SEQ ID NO: 1622394 - RNA, 19 nt, Artificial Sequence
  Description of Artificial Sequence: Synthetic oligonucleotide
cucaggaagccgugcggca

SEQ ID NO: 1622395 - RNA, 19 nt, Artificial Sequence
  Description of Artificial Sequence: Synthetic oligonucleotide
aggcggggugcuugcuggg

SEQ ID NO: 1622396 - RNA, 19 nt, Artificial Sequence
  Description of Artificial Sequence: Synthetic oligonucleotide
cccgucuuuggcgucagcc

SEQ ID NO: 1622397 - RNA, 19 nt, Artificial Sequence
  Description of Artificial Sequence: Synthetic oligonucleotide
ccacguucagcgucacggg

SEQ ID NO: 1622398 - RNA, 19 nt, Artificial Sequence
  Description of Artificial Sequence: Synthetic oligonucleotide
gcucagacgagcggcgcgg

SEQ ID NO: 1622399 - RNA, 19 nt, Artificial Sequence
  Description of Artificial Sequence: Synthetic oligonucleotide
aagccgugcggcagguccu

SEQ ID NO: 1622400 - RNA, 19 nt, Artificial Sequence
  Description of Artificial Sequence: Synthetic oligonucleotide
gcccaccccgucuuuggcg

SEQ ID NO: 1622401 - RNA, 19 nt, Artificial Sequence
  Description of Artificial Sequence: Synthetic oligonucleotide
ggacagcgacaucuccggg

SEQ ID NO: 1622402 - RNA, 19 nt, Artificial Sequence
  Description of Artificial Sequence: Synthetic oligonucleotide
cuccugcgcauggacuccg

SEQ ID NO: 1622403 - RNA, 19 nt, Artificial Sequence
  Description of Artificial Sequence: Synthetic oligonucleotide
cauggacuccguggagcgc

SEQ ID NO: 1622404 - RNA, 19 nt, Artificial Sequence
  Description of Artificial Sequence: Synthetic oligonucleotide
uggacuccguggagcgcac

SEQ ID NO: 1622405 - RNA, 19 nt, Artificial Sequence
  Description of Artificial Sequence: Synthetic oligonucleotide
cgcugcacgcacaacuccg

SEQ ID NO: 1622406 - RNA, 19 nt, Artificial Sequence
  Description of Artificial Sequence: Synthetic oligonucleotide
ggccgccucagacacacuc

SEQ ID NO: 1622407 - RNA, 19 nt, Artificial Sequence
  Description of Artificial Sequence: Synthetic oligonucleotide
gcgcacucaucacggaggc

SEQ ID NO: 1622408 - RNA, 19 nt, Artificial Sequence
  Description of Artificial Sequence: Synthetic oligonucleotide
acgcacaacuccgcggccu

SEQ ID NO: 1622409 - RNA, 19 nt, Artificial Sequence
  Description of Artificial Sequence: Synthetic oligonucleotide
uugcguccgcuuagcucca

SEQ ID NO: 1622410 - RNA, 19 nt, Artificial Sequence
  Description of Artificial Sequence: Synthetic oligonucleotide
cacgcacaacuccgcggcc

SEQ ID NO: 1622411 - RNA, 19 nt, Artificial Sequence
  Description of Artificial Sequence: Synthetic oligonucleotide
uggcucagacgagcggcgc

SEQ ID NO: 1622412 - RNA, 19 nt, Artificial Sequence
  Description of Artificial Sequence: Synthetic oligonucleotide
gcgcagaugggagcaagag

SEQ ID NO: 1622413 - RNA, 19 nt, Artificial Sequence
  Description of Artificial Sequence: Synthetic oligonucleotide
guguugcucaagucauuua

SEQ ID NO: 1622414 - RNA, 19 nt, Artificial Sequence
  Description of Artificial Sequence: Synthetic oligonucleotide
ccgcagaaagaaguugacc

SEQ ID NO: 1622415 - RNA, 19 nt, Artificial Sequence
  Description of Artificial Sequence: Synthetic oligonucleotide
gcgucucggguggaaaccg

SEQ ID NO: 1622416 - RNA, 19 nt, Artificial Sequence
  Description of Artificial Sequence: Synthetic oligonucleotide
ggagacaugaagggguucu

SEQ ID NO: 1622417 - RNA, 19 nt, Artificial Sequence
  Description of Artificial Sequence: Synthetic oligonucleotide
ccagcgcucggggaaaggg

SEQ ID NO: 1622418 - RNA, 19 nt, Artificial Sequence
  Description of Artificial Sequence: Synthetic oligonucleotide
gaugcgcugcacgcacaac

SEQ ID NO: 1622419 - RNA, 19 nt, Artificial Sequence
  Description of Artificial Sequence: Synthetic oligonucleotide
uugagcgucucggguggaa

SEQ ID NO: 1622420 - RNA, 19 nt, Artificial Sequence
  Description of Artificial Sequence: Synthetic oligonucleotide
cuguaccugaguaggcacu

SEQ ID NO: 1622421 - RNA, 19 nt, Artificial Sequence
  Description of Artificial Sequence: Synthetic oligonucleotide
ggucugugccacaaagcca

SEQ ID NO: 1622422 - RNA, 19 nt, Artificial Sequence
  Description of Artificial Sequence: Synthetic oligonucleotide
agguaggcucaugggauuu

SEQ ID NO: 1622423 - RNA, 19 nt, Artificial Sequence
  Description of Artificial Sequence: Synthetic oligonucleotide
acggagcccaccccgucuu

SEQ ID NO: 1622424 - RNA, 19 nt, Artificial Sequence
  Description of Artificial Sequence: Synthetic oligonucleotide
uccugcgcauggacuccgu

SEQ ID NO: 1622425 - RNA, 19 nt, Artificial Sequence
  Description of Artificial Sequence: Synthetic oligonucleotide
ggacgagccggaugcgcug

SEQ ID NO: 1622426 - RNA, 19 nt, Artificial Sequence
  Description of Artificial Sequence: Synthetic oligonucleotide
gucucggguggaaaccguc

SEQ ID NO: 1622427 - RNA, 19 nt, Artificial Sequence
  Description of Artificial Sequence: Synthetic oligonucleotide
gguaggcucaugggauuug

SEQ ID NO: 1622428 - RNA, 19 nt, Artificial Sequence
  Description of Artificial Sequence: Synthetic oligonucleotide
cccucacuccauaggcugc

SEQ ID NO: 1622429 - RNA, 19 nt, Artificial Sequence
  Description of Artificial Sequence: Synthetic oligonucleotide
cucagacgagcggcgcggc

SEQ ID NO: 1622430 - RNA, 19 nt, Artificial Sequence
  Description of Artificial Sequence: Synthetic oligonucleotide
guucagcgucacgggcugg

SEQ ID NO: 1622431 - RNA, 19 nt, Artificial Sequence
  Description of Artificial Sequence: Synthetic oligonucleotide
gagccacgaggaggcaccc

SEQ ID NO: 1622432 - RNA, 19 nt, Artificial Sequence
  Description of Artificial Sequence: Synthetic oligonucleotide
ucgcgcagucuccgcgcga

SEQ ID NO: 1622433 - RNA, 19 nt, Artificial Sequence
  Description of Artificial Sequence: Synthetic oligonucleotide
gucuugagguaggcucaug

SEQ ID NO: 1622434 - RNA, 19 nt, Artificial Sequence
  Description of Artificial Sequence: Synthetic oligonucleotide
agccgugcggcagguccuc

SEQ ID NO: 1622435 - RNA, 19 nt, Artificial Sequence
  Description of Artificial Sequence: Synthetic oligonucleotide
cucacuccauaggcugcug

SEQ ID NO: 1622436 - RNA, 19 nt, Artificial Sequence
  Description of Artificial Sequence: Synthetic oligonucleotide
gggaguagucgauggagau

SEQ ID NO: 1622437 - RNA, 19 nt, Artificial Sequence
  Description of Artificial Sequence: Synthetic oligonucleotide
ccauggacagcgacaucuc

SEQ ID NO: 1622438 - RNA, 19 nt, Artificial Sequence
  Description of Artificial Sequence: Synthetic oligonucleotide
uggggacuccuagcuccug

SEQ ID NO: 1622439 - RNA, 19 nt, Artificial Sequence
  Description of Artificial Sequence: Synthetic oligonucleotide
gugacgaguacagcggcau

SEQ ID NO: 1622440 - RNA, 19 nt, Artificial Sequence
  Description of Artificial Sequence: Synthetic oligonucleotide
cggguggaaaccgucgggg

SEQ ID NO: 1622441 - RNA, 19 nt, Artificial Sequence
  Description of Artificial Sequence: Synthetic oligonucleotide
cugcugcccgaagggacac

SEQ ID NO: 1622442 - RNA, 19 nt, Artificial Sequence
  Description of Artificial Sequence: Synthetic oligonucleotide
gcguccgcuuagcuccagg

SEQ ID NO: 1622443 - RNA, 19 nt, Artificial Sequence
  Description of Artificial Sequence: Synthetic oligonucleotide
ggaugcgcugcacgcacaa

SEQ ID NO: 1622444 - RNA, 19 nt, Artificial Sequence
  Description of Artificial Sequence: Synthetic oligonucleotide
cggggugaggacgagccgg

SEQ ID NO: 1622445 - RNA, 19 nt, Artificial Sequence
  Description of Artificial Sequence: Synthetic oligonucleotide
gccgcagaaagaaguugac

SEQ ID NO: 1622446 - RNA, 19 nt, Artificial Sequence
  Description of Artificial Sequence: Synthetic oligonucleotide
ggugacgaguacagcggca

SEQ ID NO: 1622447 - RNA, 19 nt, Artificial Sequence
  Description of Artificial Sequence: Synthetic oligonucleotide
ccggaugcgcugcacgcac

SEQ ID NO: 1622448 - RNA, 19 nt, Artificial Sequence
  Description of Artificial Sequence: Synthetic oligonucleotide
gcggggugaggacgagccg

SEQ ID NO: 1622449 - RNA, 19 nt, Artificial Sequence
  Description of Artificial Sequence: Synthetic oligonucleotide
ugcguccgcuuagcuccag

SEQ ID NO: 1622450 - RNA, 19 nt, Artificial Sequence
  Description of Artificial Sequence: Synthetic oligonucleotide
ggagcccaccccgucuuug

SEQ ID NO: 1622451 - RNA, 19 nt, Artificial Sequence
  Description of Artificial Sequence: Synthetic oligonucleotide
gaaccgagcagggcacagu

SEQ ID NO: 1622452 - RNA, 19 nt, Artificial Sequence
  Description of Artificial Sequence: Synthetic oligonucleotide
gucuccgcgcgaacaugac

SEQ ID NO: 1622453 - RNA, 19 nt, Artificial Sequence
  Description of Artificial Sequence: Synthetic oligonucleotide
gucucgcggcacagcgccg

SEQ ID NO: 1622454 - RNA, 19 nt, Artificial Sequence
  Description of Artificial Sequence: Synthetic oligonucleotide
cguucagcgucacgggcug

SEQ ID NO: 1622455 - RNA, 19 nt, Artificial Sequence
  Description of Artificial Sequence: Synthetic oligonucleotide
guaccugaguaggcacuaa

SEQ ID NO: 1622456 - RNA, 19 nt, Artificial Sequence
  Description of Artificial Sequence: Synthetic oligonucleotide
cuccggggugccugacguc

SEQ ID NO: 1622457 - RNA, 19 nt, Artificial Sequence
  Description of Artificial Sequence: Synthetic oligonucleotide
aguagucgauggagaugau

SEQ ID NO: 1622458 - RNA, 19 nt, Artificial Sequence
  Description of Artificial Sequence: Synthetic oligonucleotide
ggaccacuagggcccguga

SEQ ID NO: 1622459 - RNA, 19 nt, Artificial Sequence
  Description of Artificial Sequence: Synthetic oligonucleotide
accccgucuuuggcgucag

SEQ ID NO: 1622460 - RNA, 19 nt, Artificial Sequence
  Description of Artificial Sequence: Synthetic oligonucleotide
ggucuucuggggcuugcgu

SEQ ID NO: 1622461 - RNA, 19 nt, Artificial Sequence
  Description of Artificial Sequence: Synthetic oligonucleotide
cgcacggugucugcugugg

SEQ ID NO: 1622462 - RNA, 19 nt, Artificial Sequence
  Description of Artificial Sequence: Synthetic oligonucleotide
cgugaggcggggugcuugc

SEQ ID NO: 1622463 - RNA, 19 nt, Artificial Sequence
  Description of Artificial Sequence: Synthetic oligonucleotide
agcccagcaguaggcgaaa

SEQ ID NO: 1622464 - RNA, 19 nt, Artificial Sequence
  Description of Artificial Sequence: Synthetic oligonucleotide
cuggcacccucacuccaua

SEQ ID NO: 1622465 - RNA, 19 nt, Artificial Sequence
  Description of Artificial Sequence: Synthetic oligonucleotide
guccccugcaaggcauauc

SEQ ID NO: 1622466 - RNA, 19 nt, Artificial Sequence
  Description of Artificial Sequence: Synthetic oligonucleotide
gagacaugaagggguucuu

SEQ ID NO: 1622467 - RNA, 19 nt, Artificial Sequence
  Description of Artificial Sequence: Synthetic oligonucleotide
ccgagcagggcacagugcu

SEQ ID NO: 1622468 - RNA, 19 nt, Artificial Sequence
  Description of Artificial Sequence: Synthetic oligonucleotide
ccugcgcauggacuccgug

SEQ ID NO: 1622469 - RNA, 19 nt, Artificial Sequence
  Description of Artificial Sequence: Synthetic oligonucleotide
caucuccggggugccugac

SEQ ID NO: 1622470 - RNA, 19 nt, Artificial Sequence
  Description of Artificial Sequence: Synthetic oligonucleotide
cgaacaugaccgagucguc

SEQ ID NO: 1622471 - RNA, 19 nt, Artificial Sequence
  Description of Artificial Sequence: Synthetic oligonucleotide
agccacgaggaggcaccca

SEQ ID NO: 1622472 - RNA, 19 nt, Artificial Sequence
  Description of Artificial Sequence: Synthetic oligonucleotide
ggaaggccgcgcgcacgcg

SEQ ID NO: 1622473 - RNA, 19 nt, Artificial Sequence
  Description of Artificial Sequence: Synthetic oligonucleotide
agguucccgccugcacugu

SEQ ID NO: 1622474 - RNA, 19 nt, Artificial Sequence
  Description of Artificial Sequence: Synthetic oligonucleotide
caccccgucuuuggcguca

SEQ ID NO: 1622475 - RNA, 19 nt, Artificial Sequence
  Description of Artificial Sequence: Synthetic oligonucleotide
ggaaaccgucggggaaggc

SEQ ID NO: 1622476 - RNA, 19 nt, Artificial Sequence
  Description of Artificial Sequence: Synthetic oligonucleotide
ggacuccguggagcgcacg

SEQ ID NO: 1622477 - RNA, 19 nt, Artificial Sequence
  Description of Artificial Sequence: Synthetic oligonucleotide
gggcuugcguccgcuuagc

SEQ ID NO: 1622478 - RNA, 19 nt, Artificial Sequence
  Description of Artificial Sequence: Synthetic oligonucleotide
ccguggagcgcacgguguc

SEQ ID NO: 1622479 - RNA, 19 nt, Artificial Sequence
  Description of Artificial Sequence: Synthetic oligonucleotide
ggcccgugaggcggggugc

SEQ ID NO: 1622480 - RNA, 19 nt, Artificial Sequence
  Description of Artificial Sequence: Synthetic oligonucleotide
gacgagcggcgcggcgggc

SEQ ID NO: 1622481 - RNA, 19 nt, Artificial Sequence
  Description of Artificial Sequence: Synthetic oligonucleotide
cguccgcuuagcuccagga

SEQ ID NO: 1622482 - RNA, 19 nt, Artificial Sequence
  Description of Artificial Sequence: Synthetic oligonucleotide
cuccgcggccugccggguc

SEQ ID NO: 1622483 - RNA, 19 nt, Artificial Sequence
  Description of Artificial Sequence: Synthetic oligonucleotide
cuugagcgucucgggugga

SEQ ID NO: 1622484 - RNA, 19 nt, Artificial Sequence
  Description of Artificial Sequence: Synthetic oligonucleotide
cgugcggcagguccuccac

SEQ ID NO: 1622485 - RNA, 19 nt, Artificial Sequence
  Description of Artificial Sequence: Synthetic oligonucleotide
ccgucuuuggcgucagccu

SEQ ID NO: 1622486 - RNA, 19 nt, Artificial Sequence
  Description of Artificial Sequence: Synthetic oligonucleotide
gcgcacggugucugcugug

SEQ ID NO: 1622487 - RNA, 19 nt, Artificial Sequence
  Description of Artificial Sequence: Synthetic oligonucleotide
gcgcucggggaaaggggcc

SEQ ID NO: 1622488 - RNA, 19 nt, Artificial Sequence
  Description of Artificial Sequence: Synthetic oligonucleotide
ccgugaggcggggugcuug

SEQ ID NO: 1622489 - RNA, 19 nt, Artificial Sequence
  Description of Artificial Sequence: Synthetic oligonucleotide
gcacaacuccgcggccugc

SEQ ID NO: 1622490 - RNA, 19 nt, Artificial Sequence
  Description of Artificial Sequence: Synthetic oligonucleotide
gcccagcgucuccauggac

SEQ ID NO: 1622491 - RNA, 19 nt, Artificial Sequence
  Description of Artificial Sequence: Synthetic oligonucleotide
ggcggaggucucugaggaa

SEQ ID NO: 1622492 - RNA, 19 nt, Artificial Sequence
  Description of Artificial Sequence: Synthetic oligonucleotide
ccgcgcgaacaugaccgag

SEQ ID NO: 1622493 - RNA, 19 nt, Artificial Sequence
  Description of Artificial Sequence: Synthetic oligonucleotide
cuggguaggcugccaugau

SEQ ID NO: 1622494 - RNA, 19 nt, Artificial Sequence
  Description of Artificial Sequence: Synthetic oligonucleotide
gggcggggugaggacgagc

SEQ ID NO: 1622495 - RNA, 19 nt, Artificial Sequence
  Description of Artificial Sequence: Synthetic oligonucleotide
gccggaugcgcugcacgca

SEQ ID NO: 1622496 - RNA, 19 nt, Artificial Sequence
  Description of Artificial Sequence: Synthetic oligonucleotide
ccccgcccuggcucagacg

SEQ ID NO: 1622497 - RNA, 19 nt, Artificial Sequence
  Description of Artificial Sequence: Synthetic oligonucleotide
cccaccccgucuuuggcgu

SEQ ID NO: 1622498 - RNA, 19 nt, Artificial Sequence
  Description of Artificial Sequence: Synthetic oligonucleotide
ggagcgcacggugucugcu

SEQ ID NO: 1622499 - RNA, 19 nt, Artificial Sequence
  Description of Artificial Sequence: Synthetic oligonucleotide
cugcccgaagggacacggu

SEQ ID NO: 1622500 - RNA, 19 nt, Artificial Sequence
  Description of Artificial Sequence: Synthetic oligonucleotide
cacaggcggcagggucuug

SEQ ID NO: 1622501 - RNA, 19 nt, Artificial Sequence
  Description of Artificial Sequence: Synthetic oligonucleotide
ccgcccuggcucagacgag

SEQ ID NO: 1622502 - RNA, 19 nt, Artificial Sequence
  Description of Artificial Sequence: Synthetic oligonucleotide
ccugccgggucucgcggca

SEQ ID NO: 1622503 - RNA, 19 nt, Artificial Sequence
  Description of Artificial Sequence: Synthetic oligonucleotide
gcacgccacgaggugcaca

SEQ ID NO: 1622504 - RNA, 19 nt, Artificial Sequence
  Description of Artificial Sequence: Synthetic oligonucleotide
cgcagucuccgcgcgaaca

SEQ ID NO: 1622505 - RNA, 19 nt, Artificial Sequence
  Description of Artificial Sequence: Synthetic oligonucleotide
ccggggugccugacgucuc

SEQ ID NO: 1622506 - RNA, 19 nt, Artificial Sequence
  Description of Artificial Sequence: Synthetic oligonucleotide
gcucggggaaaggggccuc

SEQ ID NO: 1622507 - RNA, 19 nt, Artificial Sequence
  Description of Artificial Sequence: Synthetic oligonucleotide
gcgcagucuccgcgcgaac

SEQ ID NO: 1622508 - RNA, 19 nt, Artificial Sequence
  Description of Artificial Sequence: Synthetic oligonucleotide
gcgucacgggcuggcccag

SEQ ID NO: 1622509 - RNA, 19 nt, Artificial Sequence
  Description of Artificial Sequence: Synthetic oligonucleotide
cccgaagggacacggugau

SEQ ID NO: 1622510 - RNA, 19 nt, Artificial Sequence
  Description of Artificial Sequence: Synthetic oligonucleotide
ccgugcggcagguccucca

SEQ ID NO: 1622511 - RNA, 19 nt, Artificial Sequence
  Description of Artificial Sequence: Synthetic oligonucleotide
cagcggcauguggaggacu

SEQ ID NO: 1622512 - RNA, 19 nt, Artificial Sequence
  Description of Artificial Sequence: Synthetic oligonucleotide
gcugcgcagaugggagcaa

SEQ ID NO: 1622513 - RNA, 19 nt, Artificial Sequence
  Description of Artificial Sequence: Synthetic oligonucleotide
ccucacuccauaggcugcu

SEQ ID NO: 1622514 - RNA, 19 nt, Artificial Sequence
  Description of Artificial Sequence: Synthetic oligonucleotide
cuggggcuugcguccgcuu

SEQ ID NO: 1622515 - RNA, 19 nt, Artificial Sequence
  Description of Artificial Sequence: Synthetic oligonucleotide
ccccgucuuuggcgucagc

SEQ ID NO: 1622516 - RNA, 19 nt, Artificial Sequence
  Description of Artificial Sequence: Synthetic oligonucleotide
cggaugcgcugcacgcaca

SEQ ID NO: 1622517 - RNA, 19 nt, Artificial Sequence
  Description of Artificial Sequence: Synthetic oligonucleotide
gcacaggcggcagggucuu

SEQ ID NO: 1622518 - RNA, 19 nt, Artificial Sequence
  Description of Artificial Sequence: Synthetic oligonucleotide
gcccgugaggcggggugcu

SEQ ID NO: 1622519 - RNA, 19 nt, Artificial Sequence
  Description of Artificial Sequence: Synthetic oligonucleotide
cgcacgccacgaggugcac

SEQ ID NO: 1622520 - RNA, 19 nt, Artificial Sequence
  Description of Artificial Sequence: Synthetic oligonucleotide
cggggugccugacgucucu

SEQ ID NO: 1622521 - RNA, 19 nt, Artificial Sequence
  Description of Artificial Sequence: Synthetic oligonucleotide
ccgcggccugccgggucuc

SEQ ID NO: 1622522 - RNA, 19 nt, Artificial Sequence
  Description of Artificial Sequence: Synthetic oligonucleotide
gggccgccucagacacacu

SEQ ID NO: 1622523 - RNA, 19 nt, Artificial Sequence
  Description of Artificial Sequence: Synthetic oligonucleotide
aaggaaaagaaauaggcgc

SEQ ID NO: 1622524 - RNA, 19 nt, Artificial Sequence
  Description of Artificial Sequence: Synthetic oligonucleotide
uaaaucauggccugcaccu

SEQ ID NO: 1622525 - RNA, 19 nt, Artificial Sequence
  Description of Artificial Sequence: Synthetic oligonucleotide
uugcgcaccagcaucaccg

SEQ ID NO: 1622526 - RNA, 19 nt, Artificial Sequence
  Description of Artificial Sequence: Synthetic oligonucleotide
guucacauacaccuugucg

SEQ ID NO: 1622527 - RNA, 19 nt, Artificial Sequence
  Description of Artificial Sequence: Synthetic oligonucleotide
gaaggugauguacuugccg

SEQ ID NO: 1622528 - RNA, 19 nt, Artificial Sequence
  Description of Artificial Sequence: Synthetic oligonucleotide
aggaaaagaaauaggcgcc

SEQ ID NO: 1622529 - RNA, 19 nt, Artificial Sequence
  Description of Artificial Sequence: Synthetic oligonucleotide
aagaaauaggcgccgggca

SEQ ID NO: 1622530 - RNA, 19 nt, Artificial Sequence
  Description of Artificial Sequence: Synthetic oligonucleotide
ucgucguaaaucauggccu

SEQ ID NO: 1622531 - RNA, 19 nt, Artificial Sequence
  Description of Artificial Sequence: Synthetic oligonucleotide
gucgucguaaaucauggcc

SEQ ID NO: 1622532 - RNA, 19 nt, Artificial Sequence
  Description of Artificial Sequence: Synthetic oligonucleotide
aaggucaccgccauuuccg

SEQ ID NO: 1622533 - RNA, 19 nt, Artificial Sequence
  Description of Artificial Sequence: Synthetic oligonucleotide
uuaugcucaggccgguggg

SEQ ID NO: 1622534 - RNA, 19 nt, Artificial Sequence
  Description of Artificial Sequence: Synthetic oligonucleotide
agaaauaggcgccgggcag

SEQ ID NO: 1622535 - RNA, 19 nt, Artificial Sequence
  Description of Artificial Sequence: Synthetic oligonucleotide
guuaugcucaggccggugg

SEQ ID NO: 1622536 - RNA, 19 nt, Artificial Sequence
  Description of Artificial Sequence: Synthetic oligonucleotide
uagucgagcugcagcaugg

SEQ ID NO: 1622537 - RNA, 19 nt, Artificial Sequence
  Description of Artificial Sequence: Synthetic oligonucleotide
gucaccgccauuuccgacg

SEQ ID NO: 1622538 - RNA, 19 nt, Artificial Sequence
  Description of Artificial Sequence: Synthetic oligonucleotide
ggcuguuaugcucaggccg

SEQ ID NO: 1622539 - RNA, 19 nt, Artificial Sequence
  Description of Artificial Sequence: Synthetic oligonucleotide
aaauaggcgccgggcaggc

SEQ ID NO: 1622540 - RNA, 19 nt, Artificial Sequence
  Description of Artificial Sequence: Synthetic oligonucleotide
accgccauuuccgacgugc

SEQ ID NO: 1622541 - RNA, 19 nt, Artificial Sequence
  Description of Artificial Sequence: Synthetic oligonucleotide
acgguugcgcaccagcauc

SEQ ID NO: 1622542 - RNA, 19 nt, Artificial Sequence
  Description of Artificial Sequence: Synthetic oligonucleotide
accuugucgaaggucaccg

SEQ ID NO: 1622543 - RNA, 19 nt, Artificial Sequence
  Description of Artificial Sequence: Synthetic oligonucleotide
aggcuguuaugcucaggcc

SEQ ID NO: 1622544 - RNA, 19 nt, Artificial Sequence
  Description of Artificial Sequence: Synthetic oligonucleotide
ucgaagucgccaccuaugu

SEQ ID NO: 1622545 - RNA, 19 nt, Artificial Sequence
  Description of Artificial Sequence: Synthetic oligonucleotide
agcgugaaggaaaagaaau

SEQ ID NO: 1622546 - RNA, 19 nt, Artificial Sequence
  Description of Artificial Sequence: Synthetic oligonucleotide
uugucgaaggucaccgcca

SEQ ID NO: 1622547 - RNA, 19 nt, Artificial Sequence
  Description of Artificial Sequence: Synthetic oligonucleotide
ucggcgucggcguacacca

SEQ ID NO: 1622548 - RNA, 19 nt, Artificial Sequence
  Description of Artificial Sequence: Synthetic oligonucleotide
ucggcaugcacgccccacg

SEQ ID NO: 1622549 - RNA, 19 nt, Artificial Sequence
  Description of Artificial Sequence: Synthetic oligonucleotide
gaagaaguaggcgccgggc

SEQ ID NO: 1622550 - RNA, 19 nt, Artificial Sequence
  Description of Artificial Sequence: Synthetic oligonucleotide
aucaccgacaggcucuugu

SEQ ID NO: 1622551 - RNA, 19 nt, Artificial Sequence
  Description of Artificial Sequence: Synthetic oligonucleotide
ucucgcggcgccucgaggc

SEQ ID NO: 1622552 - RNA, 19 nt, Artificial Sequence
  Description of Artificial Sequence: Synthetic oligonucleotide
ucguaaaucauggccugca

SEQ ID NO: 1622553 - RNA, 19 nt, Artificial Sequence
  Description of Artificial Sequence: Synthetic oligonucleotide
ucacauacaccuugucgaa

SEQ ID NO: 1622554 - RNA, 19 nt, Artificial Sequence
  Description of Artificial Sequence: Synthetic oligonucleotide
cuuagcaagcccagcagga

SEQ ID NO: 1622555 - RNA, 19 nt, Artificial Sequence
  Description of Artificial Sequence: Synthetic oligonucleotide
ccuauguugaccagcucgg

SEQ ID NO: 1622556 - RNA, 19 nt, Artificial Sequence
  Description of Artificial Sequence: Synthetic oligonucleotide
agcauggcgcucuggcugg

SEQ ID NO: 1622557 - RNA, 19 nt, Artificial Sequence
  Description of Artificial Sequence: Synthetic oligonucleotide
gaaguaggcgccgggcacg

SEQ ID NO: 1622558 - RNA, 19 nt, Artificial Sequence
  Description of Artificial Sequence: Synthetic oligonucleotide
ucggugucgaaggccagcg

SEQ ID NO: 1622559 - RNA, 19 nt, Artificial Sequence
  Description of Artificial Sequence: Synthetic oligonucleotide
ucacgguugcgcaccagca

SEQ ID NO: 1622560 - RNA, 19 nt, Artificial Sequence
  Description of Artificial Sequence: Synthetic oligonucleotide
agcauccgagcccaccagg

SEQ ID NO: 1622561 - RNA, 19 nt, Artificial Sequence
  Description of Artificial Sequence: Synthetic oligonucleotide
uuuccgacgugcccuccag

SEQ ID NO: 1622562 - RNA, 19 nt, Artificial Sequence
  Description of Artificial Sequence: Synthetic oligonucleotide
agccagacggcgucaccgc

SEQ ID NO: 1622563 - RNA, 19 nt, Artificial Sequence
  Description of Artificial Sequence: Synthetic oligonucleotide
ugucgaaggccagcggccg

SEQ ID NO: 1622564 - RNA, 19 nt, Artificial Sequence
  Description of Artificial Sequence: Synthetic oligonucleotide
uggggaccccggcacaggg

SEQ ID NO: 1622565 - RNA, 19 nt, Artificial Sequence
  Description of Artificial Sequence: Synthetic oligonucleotide
aaguaggcgccgggcacgc

SEQ ID NO: 1622566 - RNA, 19 nt, Artificial Sequence
  Description of Artificial Sequence: Synthetic oligonucleotide
ggugucgaaggccagcggc

SEQ ID NO: 1622567 - RNA, 19 nt, Artificial Sequence
  Description of Artificial Sequence: Synthetic oligonucleotide
auacaccuugucgaagguc

SEQ ID NO: 1622568 - RNA, 19 nt, Artificial Sequence
  Description of Artificial Sequence: Synthetic oligonucleotide
auccgagcccaccaggcug

SEQ ID NO: 1622569 - RNA, 19 nt, Artificial Sequence
  Description of Artificial Sequence: Synthetic oligonucleotide
gucgccguagucgagcugc

SEQ ID NO: 1622570 - RNA, 19 nt, Artificial Sequence
  Description of Artificial Sequence: Synthetic oligonucleotide
ugcaccucgucccgguucu

SEQ ID NO: 1622571 - RNA, 19 nt, Artificial Sequence
  Description of Artificial Sequence: Synthetic oligonucleotide
gcguacaccagguagccgc

SEQ ID NO: 1622572 - RNA, 19 nt, Artificial Sequence
  Description of Artificial Sequence: Synthetic oligonucleotide
gucacgguugcgcaccagc

SEQ ID NO: 1622573 - RNA, 19 nt, Artificial Sequence
  Description of Artificial Sequence: Synthetic oligonucleotide
gugcgcgccgccgagaagg

SEQ ID NO: 1622574 - RNA, 19 nt, Artificial Sequence
  Description of Artificial Sequence: Synthetic oligonucleotide
ucgucccgguucuucauca

SEQ ID NO: 1622575 - RNA, 19 nt, Artificial Sequence
  Description of Artificial Sequence: Synthetic oligonucleotide
ucgucgaaggccagcgccu

SEQ ID NO: 1622576 - RNA, 19 nt, Artificial Sequence
  Description of Artificial Sequence: Synthetic oligonucleotide
gucgagcugcagcauggcg

SEQ ID NO: 1622577 - RNA, 19 nt, Artificial Sequence
  Description of Artificial Sequence: Synthetic oligonucleotide
gcuguuaugcucaggccgg

SEQ ID NO: 1622578 - RNA, 19 nt, Artificial Sequence
  Description of Artificial Sequence: Synthetic oligonucleotide
cagcggaacacgccggccg

SEQ ID NO: 1622579 - RNA, 19 nt, Artificial Sequence
  Description of Artificial Sequence: Synthetic oligonucleotide
gugcgagccgccgagaaug

SEQ ID NO: 1622580 - RNA, 19 nt, Artificial Sequence
  Description of Artificial Sequence: Synthetic oligonucleotide
cuuggucgggccugcgggg

SEQ ID NO: 1622581 - RNA, 19 nt, Artificial Sequence
  Description of Artificial Sequence: Synthetic oligonucleotide
ggcgggucggcuucggucg

SEQ ID NO: 1622582 - RNA, 19 nt, Artificial Sequence
  Description of Artificial Sequence: Synthetic oligonucleotide
ccgucgucguaaaucaugg

SEQ ID NO: 1622583 - RNA, 19 nt, Artificial Sequence
  Description of Artificial Sequence: Synthetic oligonucleotide
accgugucgccguagucga

SEQ ID NO: 1622584 - RNA, 19 nt, Artificial Sequence
  Description of Artificial Sequence: Synthetic oligonucleotide
gcuuggucgggccugcggg

SEQ ID NO: 1622585 - RNA, 19 nt, Artificial Sequence
  Description of Artificial Sequence: Synthetic oligonucleotide
gucgccaccuauguugacc

SEQ ID NO: 1622586 - RNA, 19 nt, Artificial Sequence
  Description of Artificial Sequence: Synthetic oligonucleotide
guucaggcgcguugggcag

SEQ ID NO: 1622587 - RNA, 19 nt, Artificial Sequence
  Description of Artificial Sequence: Synthetic oligonucleotide
agcaucaccgacaggcucu

SEQ ID NO: 1622588 - RNA, 19 nt, Artificial Sequence
  Description of Artificial Sequence: Synthetic oligonucleotide
ucaccgccauuuccgacgu

SEQ ID NO: 1622589 - RNA, 19 nt, Artificial Sequence
  Description of Artificial Sequence: Synthetic oligonucleotide
cucgucacgguugcgcacc

SEQ ID NO: 1622590 - RNA, 19 nt, Artificial Sequence
  Description of Artificial Sequence: Synthetic oligonucleotide
gccgagaaggccgagcgcg

SEQ ID NO: 1622591 - RNA, 19 nt, Artificial Sequence
  Description of Artificial Sequence: Synthetic oligonucleotide
agucgagcugcagcauggc

SEQ ID NO: 1622592 - RNA, 19 nt, Artificial Sequence
  Description of Artificial Sequence: Synthetic oligonucleotide
auuuccgacgugcccucca

SEQ ID NO: 1622593 - RNA, 19 nt, Artificial Sequence
  Description of Artificial Sequence: Synthetic oligonucleotide
gucgaagucgccaccuaug

SEQ ID NO: 1622594 - RNA, 19 nt, Artificial Sequence
  Description of Artificial Sequence: Synthetic oligonucleotide
ugcccagcgugaaggaaaa

SEQ ID NO: 1622595 - RNA, 19 nt, Artificial Sequence
  Description of Artificial Sequence: Synthetic oligonucleotide
guaggcgccauagccauca

SEQ ID NO: 1622596 - RNA, 19 nt, Artificial Sequence
  Description of Artificial Sequence: Synthetic oligonucleotide
gaaggacagcagaagcuga

SEQ ID NO: 1622597 - RNA, 19 nt, Artificial Sequence
  Description of Artificial Sequence: Synthetic oligonucleotide
uucccggguuccuccaagc

SEQ ID NO: 1622598 - RNA, 19 nt, Artificial Sequence
  Description of Artificial Sequence: Synthetic oligonucleotide
ucccggguuccuccaagca

SEQ ID NO: 1622599 - RNA, 19 nt, Artificial Sequence
  Description of Artificial Sequence: Synthetic oligonucleotide
ccgccgagaaugcugaccg

SEQ ID NO: 1622600 - RNA, 19 nt, Artificial Sequence
  Description of Artificial Sequence: Synthetic oligonucleotide
cuugccggccgugaaggag

SEQ ID NO: 1622601 - RNA, 19 nt, Artificial Sequence
  Description of Artificial Sequence: Synthetic oligonucleotide
gcaugcacgccccacggcc

SEQ ID NO: 1622602 - RNA, 19 nt, Artificial Sequence
  Description of Artificial Sequence: Synthetic oligonucleotide
cacauacaccuugucgaag

SEQ ID NO: 1622603 - RNA, 19 nt, Artificial Sequence
  Description of Artificial Sequence: Synthetic oligonucleotide
accucgucacgguugcgca

SEQ ID NO: 1622604 - RNA, 19 nt, Artificial Sequence
  Description of Artificial Sequence: Synthetic oligonucleotide
uguuaugcucaggccggug

SEQ ID NO: 1622605 - RNA, 19 nt, Artificial Sequence
  Description of Artificial Sequence: Synthetic oligonucleotide
gaccccggcacagggaggc

SEQ ID NO: 1622606 - RNA, 19 nt, Artificial Sequence
  Description of Artificial Sequence: Synthetic oligonucleotide
caccucgucacgguugcgc

SEQ ID NO: 1622607 - RNA, 19 nt, Artificial Sequence
  Description of Artificial Sequence: Synthetic oligonucleotide
cccgauguucacauacacc

SEQ ID NO: 1622608 - RNA, 19 nt, Artificial Sequence
  Description of Artificial Sequence: Synthetic oligonucleotide
gaagcgcaggggcggggag

SEQ ID NO: 1622609 - RNA, 19 nt, Artificial Sequence
  Description of Artificial Sequence: Synthetic oligonucleotide
ugcgagccgccgagaaugc

SEQ ID NO: 1622610 - RNA, 19 nt, Artificial Sequence
  Description of Artificial Sequence: Synthetic oligonucleotide
agcgggguggugcgagccg

SEQ ID NO: 1622611 - RNA, 19 nt, Artificial Sequence
  Description of Artificial Sequence: Synthetic oligonucleotide
aggcgcguugggcaggcug

SEQ ID NO: 1622612 - RNA, 19 nt, Artificial Sequence
  Description of Artificial Sequence: Synthetic oligonucleotide
aauaggcgccgggcaggcg

SEQ ID NO: 1622613 - RNA, 19 nt, Artificial Sequence
  Description of Artificial Sequence: Synthetic oligonucleotide
agucgccaccuauguugac

SEQ ID NO: 1622614 - RNA, 19 nt, Artificial Sequence
  Description of Artificial Sequence: Synthetic oligonucleotide
ggcgucggcguacaccagg

SEQ ID NO: 1622615 - RNA, 19 nt, Artificial Sequence
  Description of Artificial Sequence: Synthetic oligonucleotide
gggaccccggcacagggag

SEQ ID NO: 1622616 - RNA, 19 nt, Artificial Sequence
  Description of Artificial Sequence: Synthetic oligonucleotide
aucucgcggcgccucgagg

SEQ ID NO: 1622617 - RNA, 19 nt, Artificial Sequence
  Description of Artificial Sequence: Synthetic oligonucleotide
uuccgacgugcccuccagc

SEQ ID NO: 1622618 - RNA, 19 nt, Artificial Sequence
  Description of Artificial Sequence: Synthetic oligonucleotide
uggugcgagccgccgagaa

SEQ ID NO: 1622619 - RNA, 19 nt, Artificial Sequence
  Description of Artificial Sequence: Synthetic oligonucleotide
aggacgccgggcugcgcac

SEQ ID NO: 1622620 - RNA, 19 nt, Artificial Sequence
  Description of Artificial Sequence: Synthetic oligonucleotide
guagccgcugaagguggcg

SEQ ID NO: 1622621 - RNA, 19 nt, Artificial Sequence
  Description of Artificial Sequence: Synthetic oligonucleotide
gguggugcgagccgccgag

SEQ ID NO: 1622622 - RNA, 19 nt, Artificial Sequence
  Description of Artificial Sequence: Synthetic oligonucleotide
uucaggcgcguugggcagg

SEQ ID NO: 1622623 - RNA, 19 nt, Artificial Sequence
  Description of Artificial Sequence: Synthetic oligonucleotide
guugaccagcucggugucg

SEQ ID NO: 1622624 - RNA, 19 nt, Artificial Sequence
  Description of Artificial Sequence: Synthetic oligonucleotide
cagcgugaaggaaaagaaa

SEQ ID NO: 1622625 - RNA, 19 nt, Artificial Sequence
  Description of Artificial Sequence: Synthetic oligonucleotide
ugcgcacuggucgcccgcg

SEQ ID NO: 1622626 - RNA, 19 nt, Artificial Sequence
  Description of Artificial Sequence: Synthetic oligonucleotide
gucgaaggccagcggccgg

SEQ ID NO: 1622627 - RNA, 19 nt, Artificial Sequence
  Description of Artificial Sequence: Synthetic oligonucleotide
cagcaucaccgacaggcuc

SEQ ID NO: 1622628 - RNA, 19 nt, Artificial Sequence
  Description of Artificial Sequence: Synthetic oligonucleotide
gagccgccgauccggcucc

SEQ ID NO: 1622629 - RNA, 19 nt, Artificial Sequence
  Description of Artificial Sequence: Synthetic oligonucleotide
aggucaccgccauuuccga

SEQ ID NO: 1622630 - RNA, 19 nt, Artificial Sequence
  Description of Artificial Sequence: Synthetic oligonucleotide
ggcauucgggccguggucc

SEQ ID NO: 1622631 - RNA, 19 nt, Artificial Sequence
  Description of Artificial Sequence: Synthetic oligonucleotide
uggggcauucgggccgugg

SEQ ID NO: 1622632 - RNA, 19 nt, Artificial Sequence
  Description of Artificial Sequence: Synthetic oligonucleotide
agcgcguacugcggagcgc

SEQ ID NO: 1622633 - RNA, 19 nt, Artificial Sequence
  Description of Artificial Sequence: Synthetic oligonucleotide
gggcuuagcaagcccagca

SEQ ID NO: 1622634 - RNA, 19 nt, Artificial Sequence
  Description of Artificial Sequence: Synthetic oligonucleotide
caccuugucgaaggucacc

SEQ ID NO: 1622635 - RNA, 19 nt, Artificial Sequence
  Description of Artificial Sequence: Synthetic oligonucleotide
ugucgccguagucgagcug

SEQ ID NO: 1622636 - RNA, 19 nt, Artificial Sequence
  Description of Artificial Sequence: Synthetic oligonucleotide
cagcggaaccgccccgugg

SEQ ID NO: 1622637 - RNA, 19 nt, Artificial Sequence
  Description of Artificial Sequence: Synthetic oligonucleotide
aggcgcgucggcgucggcg

SEQ ID NO: 1622638 - RNA, 19 nt, Artificial Sequence
  Description of Artificial Sequence: Synthetic oligonucleotide
gcugaagcggagaagcgca

SEQ ID NO: 1622639 - RNA, 19 nt, Artificial Sequence
  Description of Artificial Sequence: Synthetic oligonucleotide
gccaggucgggguacacca

SEQ ID NO: 1622640 - RNA, 19 nt, Artificial Sequence
  Description of Artificial Sequence: Synthetic oligonucleotide
cucgcggcgccucgaggcg

SEQ ID NO: 1622641 - RNA, 19 nt, Artificial Sequence
  Description of Artificial Sequence: Synthetic oligonucleotide
cuugcgcggcagcuugccc

SEQ ID NO: 1622642 - RNA, 19 nt, Artificial Sequence
  Description of Artificial Sequence: Synthetic oligonucleotide
gucggcgucggcguacacc

SEQ ID NO: 1622643 - RNA, 19 nt, Artificial Sequence
  Description of Artificial Sequence: Synthetic oligonucleotide
ugcgcgugcgcgccgccga

SEQ ID NO: 1622644 - RNA, 19 nt, Artificial Sequence
  Description of Artificial Sequence: Synthetic oligonucleotide
accgggcuuagcaagccca

SEQ ID NO: 1622645 - RNA, 19 nt, Artificial Sequence
  Description of Artificial Sequence: Synthetic oligonucleotide
gccgugguugcuguaggcg

SEQ ID NO: 1622646 - RNA, 19 nt, Artificial Sequence
  Description of Artificial Sequence: Synthetic oligonucleotide
guggccgcgucgaagucgc

SEQ ID NO: 1622647 - RNA, 19 nt, Artificial Sequence
  Description of Artificial Sequence: Synthetic oligonucleotide
ccagcgugaaggaaaagaa

SEQ ID NO: 1622648 - RNA, 19 nt, Artificial Sequence
  Description of Artificial Sequence: Synthetic oligonucleotide
agggaggcgugagcgagug

SEQ ID NO: 1622649 - RNA, 19 nt, Artificial Sequence
  Description of Artificial Sequence: Synthetic oligonucleotide
gcgcccagcgcguacugcg

SEQ ID NO: 1622650 - RNA, 19 nt, Artificial Sequence
  Description of Artificial Sequence: Synthetic oligonucleotide
gccgguggggcauucgggc

SEQ ID NO: 1622651 - RNA, 19 nt, Artificial Sequence
  Description of Artificial Sequence: Synthetic oligonucleotide
cucgucccgguucuucauc

SEQ ID NO: 1622652 - RNA, 19 nt, Artificial Sequence
  Description of Artificial Sequence: Synthetic oligonucleotide
acuggucgcccgcgcugcg

SEQ ID NO: 1622653 - RNA, 19 nt, Artificial Sequence
  Description of Artificial Sequence: Synthetic oligonucleotide
caucucgcggcgccucgag

SEQ ID NO: 1622654 - RNA, 19 nt, Artificial Sequence
  Description of Artificial Sequence: Synthetic oligonucleotide
ggcgcucuggcuggcagcg

SEQ ID NO: 1622655 - RNA, 19 nt, Artificial Sequence
  Description of Artificial Sequence: Synthetic oligonucleotide
gccgucgucguaaaucaug

SEQ ID NO: 1622656 - RNA, 19 nt, Artificial Sequence
  Description of Artificial Sequence: Synthetic oligonucleotide
gagccgccgagaaugcuga

SEQ ID NO: 1622657 - RNA, 19 nt, Artificial Sequence
  Description of Artificial Sequence: Synthetic oligonucleotide
gccaccuauguugaccagc

SEQ ID NO: 1622658 - RNA, 19 nt, Artificial Sequence
  Description of Artificial Sequence: Synthetic oligonucleotide
ccgcgcugcggcuuggucg

SEQ ID NO: 1622659 - RNA, 19 nt, Artificial Sequence
  Description of Artificial Sequence: Synthetic oligonucleotide
caccgggcuuagcaagccc

SEQ ID NO: 1622660 - RNA, 19 nt, Artificial Sequence
  Description of Artificial Sequence: Synthetic oligonucleotide
gacgugcccuccagcgggg

SEQ ID NO: 1622661 - RNA, 19 nt, Artificial Sequence
  Description of Artificial Sequence: Synthetic oligonucleotide
ggcuuggucgggccugcgg

SEQ ID NO: 1622662 - RNA, 19 nt, Artificial Sequence
  Description of Artificial Sequence: Synthetic oligonucleotide
ccgagaaugcugaccgcag

SEQ ID NO: 1622663 - RNA, 19 nt, Artificial Sequence
  Description of Artificial Sequence: Synthetic oligonucleotide
uucggucggagccgccgau

SEQ ID NO: 1622664 - RNA, 19 nt, Artificial Sequence
  Description of Artificial Sequence: Synthetic oligonucleotide
cuggcuggcggcgggcggg

SEQ ID NO: 1622665 - RNA, 19 nt, Artificial Sequence
  Description of Artificial Sequence: Synthetic oligonucleotide
gacgccgggcugcgcacug

SEQ ID NO: 1622666 - RNA, 19 nt, Artificial Sequence
  Description of Artificial Sequence: Synthetic oligonucleotide
gccgcgucgaagucgcccc

SEQ ID NO: 1622667 - RNA, 19 nt, Artificial Sequence
  Description of Artificial Sequence: Synthetic oligonucleotide
cccggguuccuccaagcag

SEQ ID NO: 1622668 - RNA, 19 nt, Artificial Sequence
  Description of Artificial Sequence: Synthetic oligonucleotide
gugagcgagugggaaggac

SEQ ID NO: 1622669 - RNA, 19 nt, Artificial Sequence
  Description of Artificial Sequence: Synthetic oligonucleotide
ggaaccgccccguggccgc

SEQ ID NO: 1622670 - RNA, 19 nt, Artificial Sequence
  Description of Artificial Sequence: Synthetic oligonucleotide
agccgccgagaaugcugac

SEQ ID NO: 1622671 - RNA, 19 nt, Artificial Sequence
  Description of Artificial Sequence: Synthetic oligonucleotide
ggagccgccgauccggcuc

SEQ ID NO: 1622672 - RNA, 19 nt, Artificial Sequence
  Description of Artificial Sequence: Synthetic oligonucleotide
cauucgggccguggucccg

SEQ ID NO: 1622673 - RNA, 19 nt, Artificial Sequence
  Description of Artificial Sequence: Synthetic oligonucleotide
gccgugaaggagaagaagu

SEQ ID NO: 1622674 - RNA, 19 nt, Artificial Sequence
  Description of Artificial Sequence: Synthetic oligonucleotide
cgacgugcccuccagcggg

SEQ ID NO: 1622675 - RNA, 19 nt, Artificial Sequence
  Description of Artificial Sequence: Synthetic oligonucleotide
cgucguaaaucauggccug

SEQ ID NO: 1622676 - RNA, 19 nt, Artificial Sequence
  Description of Artificial Sequence: Synthetic oligonucleotide
cgugguugcuguaggcgcc

SEQ ID NO: 1622677 - RNA, 19 nt, Artificial Sequence
  Description of Artificial Sequence: Synthetic oligonucleotide
ccggguuccuccaagcaga

SEQ ID NO: 1622678 - RNA, 19 nt, Artificial Sequence
  Description of Artificial Sequence: Synthetic oligonucleotide
ccagacggcgucaccgcgc

SEQ ID NO: 1622679 - RNA, 19 nt, Artificial Sequence
  Description of Artificial Sequence: Synthetic oligonucleotide
cauuuccgacgugcccucc

SEQ ID NO: 1622680 - RNA, 19 nt, Artificial Sequence
  Description of Artificial Sequence: Synthetic oligonucleotide
gccgauccggcuccgcgag

SEQ ID NO: 1622681 - RNA, 19 nt, Artificial Sequence
  Description of Artificial Sequence: Synthetic oligonucleotide
cugcgcacuggucgcccgc

SEQ ID NO: 1622682 - RNA, 19 nt, Artificial Sequence
  Description of Artificial Sequence: Synthetic oligonucleotide
ccucgaggcgccgucgucg

SEQ ID NO: 1622683 - RNA, 19 nt, Artificial Sequence
  Description of Artificial Sequence: Synthetic oligonucleotide
gccgcagccacaccguguc

SEQ ID NO: 1622684 - RNA, 19 nt, Artificial Sequence
  Description of Artificial Sequence: Synthetic oligonucleotide
cucggcaugcacgccccac

SEQ ID NO: 1622685 - RNA, 19 nt, Artificial Sequence
  Description of Artificial Sequence: Synthetic oligonucleotide
ggucggagccgccgauccg

SEQ ID NO: 1622686 - RNA, 19 nt, Artificial Sequence
  Description of Artificial Sequence: Synthetic oligonucleotide
cccggcucggcaugcacgc

SEQ ID NO: 1622687 - RNA, 19 nt, Artificial Sequence
  Description of Artificial Sequence: Synthetic oligonucleotide
gccgagaaugcugaccgca

SEQ ID NO: 1622688 - RNA, 19 nt, Artificial Sequence
  Description of Artificial Sequence: Synthetic oligonucleotide
guacugcggagcgccgugc

SEQ ID NO: 1622689 - RNA, 19 nt, Artificial Sequence
  Description of Artificial Sequence: Synthetic oligonucleotide
gagaaggccgagcgcggcu

SEQ ID NO: 1622690 - RNA, 19 nt, Artificial Sequence
  Description of Artificial Sequence: Synthetic oligonucleotide
cgagaaugcugaccgcagc

SEQ ID NO: 1622691 - RNA, 19 nt, Artificial Sequence
  Description of Artificial Sequence: Synthetic oligonucleotide
gccgcgucgaagucgccac

SEQ ID NO: 1622692 - RNA, 19 nt, Artificial Sequence
  Description of Artificial Sequence: Synthetic oligonucleotide
ucgcccgcgcugcggcuug

SEQ ID NO: 1622693 - RNA, 19 nt, Artificial Sequence
  Description of Artificial Sequence: Synthetic oligonucleotide
cgcgcugcggcuuggucgg

SEQ ID NO: 1622694 - RNA, 19 nt, Artificial Sequence
  Description of Artificial Sequence: Synthetic oligonucleotide
ggcuccgcgaggacgccgg

SEQ ID NO: 1622695 - RNA, 19 nt, Artificial Sequence
  Description of Artificial Sequence: Synthetic oligonucleotide
ccggccgugaaggagaaga

SEQ ID NO: 1622696 - RNA, 19 nt, Artificial Sequence
  Description of Artificial Sequence: Synthetic oligonucleotide
cuucggucggagccgccga

SEQ ID NO: 1622697 - RNA, 19 nt, Artificial Sequence
  Description of Artificial Sequence: Synthetic oligonucleotide
cgagccgccgagaaugcug

SEQ ID NO: 1622698 - RNA, 19 nt, Artificial Sequence
  Description of Artificial Sequence: Synthetic oligonucleotide
gcacgcggcagcggaaccg

SEQ ID NO: 1622699 - RNA, 19 nt, Artificial Sequence
  Description of Artificial Sequence: Synthetic oligonucleotide
gcgcguacugcggagcgcc

SEQ ID NO: 1622700 - RNA, 19 nt, Artificial Sequence
  Description of Artificial Sequence: Synthetic oligonucleotide
ccgagaaggccgagcgcgg

SEQ ID NO: 1622701 - RNA, 19 nt, Artificial Sequence
  Description of Artificial Sequence: Synthetic oligonucleotide
gcauucgggccgugguccc

SEQ ID NO: 1622702 - RNA, 19 nt, Artificial Sequence
  Description of Artificial Sequence: Synthetic oligonucleotide
gccgccgagaaugcugacc

SEQ ID NO: 1622703 - RNA, 19 nt, Artificial Sequence
  Description of Artificial Sequence: Synthetic oligonucleotide
guggcguggccccgggcca

SEQ ID NO: 1622704 - RNA, 19 nt, Artificial Sequence
  Description of Artificial Sequence: Synthetic oligonucleotide
cuugcccagcgugaaggaa

SEQ ID NO: 1622705 - RNA, 19 nt, Artificial Sequence
  Description of Artificial Sequence: Synthetic oligonucleotide
gggcgggucggcuucgguc

SEQ ID NO: 1622706 - RNA, 19 nt, Artificial Sequence
  Description of Artificial Sequence: Synthetic oligonucleotide
ggccgguggggcauucggg

SEQ ID NO: 1622707 - RNA, 19 nt, Artificial Sequence
  Description of Artificial Sequence: Synthetic oligonucleotide
ucggucggagccgccgauc

SEQ ID NO: 1622708 - RNA, 19 nt, Artificial Sequence
  Description of Artificial Sequence: Synthetic oligonucleotide
gaaccgccccguggccgcg

SEQ ID NO: 1622709 - RNA, 19 nt, Artificial Sequence
  Description of Artificial Sequence: Synthetic oligonucleotide
ccgggcuuagcaagcccag

SEQ ID NO: 1622710 - RNA, 19 nt, Artificial Sequence
  Description of Artificial Sequence: Synthetic oligonucleotide
ccgacgugcccuccagcgg

SEQ ID NO: 1622711 - RNA, 19 nt, Artificial Sequence
  Description of Artificial Sequence: Synthetic oligonucleotide
ccgguggggcauucgggcc

SEQ ID NO: 1622712 - RNA, 19 nt, Artificial Sequence
  Description of Artificial Sequence: Synthetic oligonucleotide
aguaggcgccgggcacgcg

SEQ ID NO: 1622713 - RNA, 19 nt, Artificial Sequence
  Description of Artificial Sequence: Synthetic oligonucleotide
cuucaccgacagcgucuug

SEQ ID NO: 1622714 - RNA, 19 nt, Artificial Sequence
  Description of Artificial Sequence: Synthetic oligonucleotide
ggccgcgucgaagucgccc

SEQ ID NO: 1622715 - RNA, 19 nt, Artificial Sequence
  Description of Artificial Sequence: Synthetic oligonucleotide
ccgugaaggagaagaagua

SEQ ID NO: 1622716 - RNA, 19 nt, Artificial Sequence
  Description of Artificial Sequence: Synthetic oligonucleotide
cagcggggcccagugcccc

SEQ ID NO: 1622717 - RNA, 19 nt, Artificial Sequence
  Description of Artificial Sequence: Synthetic oligonucleotide
cacggccuucccggguucc

SEQ ID NO: 1622718 - RNA, 19 nt, Artificial Sequence
  Description of Artificial Sequence: Synthetic oligonucleotide
gggcauucgggccgugguc

SEQ ID NO: 1622719 - RNA, 19 nt, Artificial Sequence
  Description of Artificial Sequence: Synthetic oligonucleotide
ccacuuuauugacagaguu

SEQ ID NO: 1622720 - RNA, 19 nt, Artificial Sequence
  Description of Artificial Sequence: Synthetic oligonucleotide
gcaccuggcuggcggcggg

SEQ ID NO: 1622721 - RNA, 19 nt, Artificial Sequence
  Description of Artificial Sequence: Synthetic oligonucleotide
acggcgucaccgcgccgca

SEQ ID NO: 1622722 - RNA, 19 nt, Artificial Sequence
  Description of Artificial Sequence: Synthetic oligonucleotide
uaggcgccauagccaucau

SEQ ID NO: 1622723 - RNA, 19 nt, Artificial Sequence
  Description of Artificial Sequence: Synthetic oligonucleotide
gccaccgggcuuagcaagc

SEQ ID NO: 1622724 - RNA, 19 nt, Artificial Sequence
  Description of Artificial Sequence: Synthetic oligonucleotide
ggcacgcggcagcggaacc

SEQ ID NO: 1622725 - RNA, 19 nt, Artificial Sequence
  Description of Artificial Sequence: Synthetic oligonucleotide
ggcaccuggcuggcggcgg

SEQ ID NO: 1622726 - RNA, 19 nt, Artificial Sequence
  Description of Artificial Sequence: Synthetic oligonucleotide
caggccgguggggcauucg

SEQ ID NO: 1622727 - RNA, 19 nt, Artificial Sequence
  Description of Artificial Sequence: Synthetic oligonucleotide
gaggcgccgucgucguaaa

SEQ ID NO: 1622728 - RNA, 19 nt, Artificial Sequence
  Description of Artificial Sequence: Synthetic oligonucleotide
cgucgucguaaaucauggc

SEQ ID NO: 1622729 - RNA, 19 nt, Artificial Sequence
  Description of Artificial Sequence: Synthetic oligonucleotide
ggccgccgcgucgaagucg

SEQ ID NO: 1622730 - RNA, 19 nt, Artificial Sequence
  Description of Artificial Sequence: Synthetic oligonucleotide
cgguggggcauucgggccg

SEQ ID NO: 1622731 - RNA, 19 nt, Artificial Sequence
  Description of Artificial Sequence: Synthetic oligonucleotide
cugcgcgugcgcgccgccg

SEQ ID NO: 1622732 - RNA, 19 nt, Artificial Sequence
  Description of Artificial Sequence: Synthetic oligonucleotide
ccgccgauccggcuccgcg

SEQ ID NO: 1622733 - RNA, 19 nt, Artificial Sequence
  Description of Artificial Sequence: Synthetic oligonucleotide
caccgcgccgcagcgccag

SEQ ID NO: 1622734 - RNA, 19 nt, Artificial Sequence
  Description of Artificial Sequence: Synthetic oligonucleotide
gcucgucgaaggccagcgc

SEQ ID NO: 1622735 - RNA, 19 nt, Artificial Sequence
  Description of Artificial Sequence: Synthetic oligonucleotide
gcagccagacggcgucacc

SEQ ID NO: 1622736 - RNA, 19 nt, Artificial Sequence
  Description of Artificial Sequence: Synthetic oligonucleotide
cccagcgcguacugcggag

SEQ ID NO: 1622737 - RNA, 19 nt, Artificial Sequence
  Description of Artificial Sequence: Synthetic oligonucleotide
gcgaguggggaccccggca

SEQ ID NO: 1622738 - RNA, 19 nt, Artificial Sequence
  Description of Artificial Sequence: Synthetic oligonucleotide
ggucggcuucggucggagc

SEQ ID NO: 1622739 - RNA, 19 nt, Artificial Sequence
  Description of Artificial Sequence: Synthetic oligonucleotide
cauccgagcccaccaggcu

SEQ ID NO: 1622740 - RNA, 19 nt, Artificial Sequence
  Description of Artificial Sequence: Synthetic oligonucleotide
ggcucggcaugcacgcccc

SEQ ID NO: 1622741 - RNA, 19 nt, Artificial Sequence
  Description of Artificial Sequence: Synthetic oligonucleotide
cacaccgugucgccguagu

SEQ ID NO: 1622742 - RNA, 19 nt, Artificial Sequence
  Description of Artificial Sequence: Synthetic oligonucleotide
gggaggcgugagcgagugg

SEQ ID NO: 1622743 - RNA, 19 nt, Artificial Sequence
  Description of Artificial Sequence: Synthetic oligonucleotide
cuauguugaccagcucggu

SEQ ID NO: 1622744 - RNA, 19 nt, Artificial Sequence
  Description of Artificial Sequence: Synthetic oligonucleotide
cguggccgcgucgaagucg

SEQ ID NO: 1622745 - RNA, 19 nt, Artificial Sequence
  Description of Artificial Sequence: Synthetic oligonucleotide
ccagcggggcccagugccc

SEQ ID NO: 1622746 - RNA, 19 nt, Artificial Sequence
  Description of Artificial Sequence: Synthetic oligonucleotide
ggucgggguacaccaggaa

SEQ ID NO: 1622747 - RNA, 19 nt, Artificial Sequence
  Description of Artificial Sequence: Synthetic oligonucleotide
ccucgucacgguugcgcac

SEQ ID NO: 1622748 - RNA, 19 nt, Artificial Sequence
  Description of Artificial Sequence: Synthetic oligonucleotide
cgccauuuccgacgugccc

SEQ ID NO: 1622749 - RNA, 19 nt, Artificial Sequence
  Description of Artificial Sequence: Synthetic oligonucleotide
acgccgggcugcgcacugg

SEQ ID NO: 1622750 - RNA, 19 nt, Artificial Sequence
  Description of Artificial Sequence: Synthetic oligonucleotide
ccagcggccgguggcgugg

SEQ ID NO: 1622751 - RNA, 19 nt, Artificial Sequence
  Description of Artificial Sequence: Synthetic oligonucleotide
cguacugcggagcgccgug

SEQ ID NO: 1622752 - RNA, 19 nt, Artificial Sequence
  Description of Artificial Sequence: Synthetic oligonucleotide
uggccgcgucgaagucgcc

SEQ ID NO: 1622753 - RNA, 19 nt, Artificial Sequence
  Description of Artificial Sequence: Synthetic oligonucleotide
gggucggcuucggucggag

SEQ ID NO: 1622754 - RNA, 19 nt, Artificial Sequence
  Description of Artificial Sequence: Synthetic oligonucleotide
gcagcggaaccgccccgug

SEQ ID NO: 1622755 - RNA, 19 nt, Artificial Sequence
  Description of Artificial Sequence: Synthetic oligonucleotide
gcgggucggcuucggucgg

SEQ ID NO: 1622756 - RNA, 19 nt, Artificial Sequence
  Description of Artificial Sequence: Synthetic oligonucleotide
ggggcauucgggccguggu

SEQ ID NO: 1622757 - RNA, 19 nt, Artificial Sequence
  Description of Artificial Sequence: Synthetic oligonucleotide
caccuggcuggcggcgggc

SEQ ID NO: 1622758 - RNA, 19 nt, Artificial Sequence
  Description of Artificial Sequence: Synthetic oligonucleotide
cggcucggcaugcacgccc

SEQ ID NO: 1622759 - RNA, 19 nt, Artificial Sequence
  Description of Artificial Sequence: Synthetic oligonucleotide
cacgccccacggccuuccc

SEQ ID NO: 1622760 - RNA, 19 nt, Artificial Sequence
  Description of Artificial Sequence: Synthetic oligonucleotide
cacgguugcgcaccagcau

SEQ ID NO: 1622761 - RNA, 19 nt, Artificial Sequence
  Description of Artificial Sequence: Synthetic oligonucleotide
ucgaggcgccgucgucgua

SEQ ID NO: 1622762 - RNA, 19 nt, Artificial Sequence
  Description of Artificial Sequence: Synthetic oligonucleotide
ccaccgggcuuagcaagcc

SEQ ID NO: 1622763 - RNA, 19 nt, Artificial Sequence
  Description of Artificial Sequence: Synthetic oligonucleotide
cgggcugcgcacuggucgc

SEQ ID NO: 1622764 - RNA, 19 nt, Artificial Sequence
  Description of Artificial Sequence: Synthetic oligonucleotide
ggaccccggcacagggagg

SEQ ID NO: 1622765 - RNA, 19 nt, Artificial Sequence
  Description of Artificial Sequence: Synthetic oligonucleotide
gcaggcgcgucggcgucgg

SEQ ID NO: 1622766 - RNA, 19 nt, Artificial Sequence
  Description of Artificial Sequence: Synthetic oligonucleotide
gcgggguggugcgagccgc

SEQ ID NO: 1622767 - RNA, 19 nt, Artificial Sequence
  Description of Artificial Sequence: Synthetic oligonucleotide
caucaccgacaggcucuug

SEQ ID NO: 1622768 - RNA, 19 nt, Artificial Sequence
  Description of Artificial Sequence: Synthetic oligonucleotide
gcgcaccagcaucaccgac

SEQ ID NO: 1622769 - RNA, 19 nt, Artificial Sequence
  Description of Artificial Sequence: Synthetic oligonucleotide
gccgugcagccgcagccac

SEQ ID NO: 1622770 - RNA, 19 nt, Artificial Sequence
  Description of Artificial Sequence: Synthetic oligonucleotide
cucgaggcgccgucgucgu

SEQ ID NO: 1622771 - RNA, 19 nt, Artificial Sequence
  Description of Artificial Sequence: Synthetic oligonucleotide
aaccgccccguggccgcgu

SEQ ID NO: 1622772 - RNA, 19 nt, Artificial Sequence
  Description of Artificial Sequence: Synthetic oligonucleotide
cacgggcggcggcgagugg

SEQ ID NO: 1622773 - RNA, 19 nt, Artificial Sequence
  Description of Artificial Sequence: Synthetic oligonucleotide
gcguugggcaggcuguuau

SEQ ID NO: 1622774 - RNA, 19 nt, Artificial Sequence
  Description of Artificial Sequence: Synthetic oligonucleotide
gcucuugugcggggccuug

SEQ ID NO: 1622775 - RNA, 19 nt, Artificial Sequence
  Description of Artificial Sequence: Synthetic oligonucleotide
cgaaggucaccgccauuuc

SEQ ID NO: 1622776 - RNA, 19 nt, Artificial Sequence
  Description of Artificial Sequence: Synthetic oligonucleotide
gggcacgcggcagcggaac

SEQ ID NO: 1622777 - RNA, 19 nt, Artificial Sequence
  Description of Artificial Sequence: Synthetic oligonucleotide
ggguggugcgagccgccga

SEQ ID NO: 1622778 - RNA, 19 nt, Artificial Sequence
  Description of Artificial Sequence: Synthetic oligonucleotide
ggccagcggggcccagugc

SEQ ID NO: 1622779 - RNA, 19 nt, Artificial Sequence
  Description of Artificial Sequence: Synthetic oligonucleotide
cgcccagcgcguacugcgg

SEQ ID NO: 1622780 - RNA, 19 nt, Artificial Sequence
  Description of Artificial Sequence: Synthetic oligonucleotide
cggaaccgccccguggccg

SEQ ID NO: 1622781 - RNA, 19 nt, Artificial Sequence
  Description of Artificial Sequence: Synthetic oligonucleotide
caccgccauuuccgacgug

SEQ ID NO: 1622782 - RNA, 19 nt, Artificial Sequence
  Description of Artificial Sequence: Synthetic oligonucleotide
cgagaaggccgagcgcggc

SEQ ID NO: 1622783 - RNA, 19 nt, Artificial Sequence
  Description of Artificial Sequence: Synthetic oligonucleotide
ggcgcguugggcaggcugu

SEQ ID NO: 1622784 - RNA, 19 nt, Artificial Sequence
  Description of Artificial Sequence: Synthetic oligonucleotide
gccagcggccgguggcgug

SEQ ID NO: 1622785 - RNA, 19 nt, Artificial Sequence
  Description of Artificial Sequence: Synthetic oligonucleotide
ggucguggcugagcagcca

SEQ ID NO: 1622786 - RNA, 19 nt, Artificial Sequence
  Description of Artificial Sequence: Synthetic oligonucleotide
gcaucacgcucuggcucug

SEQ ID NO: 1622787 - RNA, 19 nt, Artificial Sequence
  Description of Artificial Sequence: Synthetic oligonucleotide
ccgcgucgaagucgccacc

SEQ ID NO: 1622788 - RNA, 19 nt, Artificial Sequence
  Description of Artificial Sequence: Synthetic oligonucleotide
ccgcagccacaccgugucg

SEQ ID NO: 1622789 - RNA, 19 nt, Artificial Sequence
  Description of Artificial Sequence: Synthetic oligonucleotide
cuguuaugcucaggccggu

SEQ ID NO: 1622790 - RNA, 19 nt, Artificial Sequence
  Description of Artificial Sequence: Synthetic oligonucleotide
ggugcgagccgccgagaau

SEQ ID NO: 1622791 - RNA, 19 nt, Artificial Sequence
  Description of Artificial Sequence: Synthetic oligonucleotide
cgcgaggacgccgggcugc

SEQ ID NO: 1622792 - RNA, 19 nt, Artificial Sequence
  Description of Artificial Sequence: Synthetic oligonucleotide
ccgauccggcuccgcgagg

SEQ ID NO: 1622793 - RNA, 19 nt, Artificial Sequence
  Description of Artificial Sequence: Synthetic oligonucleotide
ccgugucgccguagucgag

SEQ ID NO: 1622794 - RNA, 19 nt, Artificial Sequence
  Description of Artificial Sequence: Synthetic oligonucleotide
cagcggccgguggcguggc

SEQ ID NO: 1622795 - RNA, 19 nt, Artificial Sequence
  Description of Artificial Sequence: Synthetic oligonucleotide
cgcguacugcggagcgccg

SEQ ID NO: 1622796 - RNA, 19 nt, Artificial Sequence
  Description of Artificial Sequence: Synthetic oligonucleotide
cccguggccgcgucgaagu

SEQ ID NO: 1622797 - RNA, 19 nt, Artificial Sequence
  Description of Artificial Sequence: Synthetic oligonucleotide
cgccgagaaugcugaccgc

SEQ ID NO: 1622798 - RNA, 19 nt, Artificial Sequence
  Description of Artificial Sequence: Synthetic oligonucleotide
cgcugaagguggcgccggg

SEQ ID NO: 1622799 - RNA, 19 nt, Artificial Sequence
  Description of Artificial Sequence: Synthetic oligonucleotide
gcacgccccacggccuucc

SEQ ID NO: 1622800 - RNA, 19 nt, Artificial Sequence
  Description of Artificial Sequence: Synthetic oligonucleotide
cgggcuuagcaagcccagc

SEQ ID NO: 1622801 - RNA, 19 nt, Artificial Sequence
  Description of Artificial Sequence: Synthetic oligonucleotide
ggcgggcgggucggcuucg

SEQ ID NO: 1622802 - RNA, 19 nt, Artificial Sequence
  Description of Artificial Sequence: Synthetic oligonucleotide
gcggcuuggucgggccugc

SEQ ID NO: 1622803 - RNA, 19 nt, Artificial Sequence
  Description of Artificial Sequence: Synthetic oligonucleotide
ggccccgggccagcauccg

SEQ ID NO: 1622804 - RNA, 19 nt, Artificial Sequence
  Description of Artificial Sequence: Synthetic oligonucleotide
gucgaaggucaccgccauu

SEQ ID NO: 1622805 - RNA, 19 nt, Artificial Sequence
  Description of Artificial Sequence: Synthetic oligonucleotide
gggcugcgcacuggucgcc

SEQ ID NO: 1622806 - RNA, 19 nt, Artificial Sequence
  Description of Artificial Sequence: Synthetic oligonucleotide
gcgccgcagcgccagcauc

SEQ ID NO: 1622807 - RNA, 19 nt, Artificial Sequence
  Description of Artificial Sequence: Synthetic oligonucleotide
cgucgaaggccagcgccug

SEQ ID NO: 1622808 - RNA, 19 nt, Artificial Sequence
  Description of Artificial Sequence: Synthetic oligonucleotide
ccccguggccgcgucgaag

SEQ ID NO: 1622809 - RNA, 19 nt, Artificial Sequence
  Description of Artificial Sequence: Synthetic oligonucleotide
gccguggucccggcucggc

SEQ ID NO: 1622810 - RNA, 19 nt, Artificial Sequence
  Description of Artificial Sequence: Synthetic oligonucleotide
gcugcgcgugcgcgccgcc

SEQ ID NO: 1622811 - RNA, 19 nt, Artificial Sequence
  Description of Artificial Sequence: Synthetic oligonucleotide
cuccgcgcgcaggcgcguc

SEQ ID NO: 1622812 - RNA, 19 nt, Artificial Sequence
  Description of Artificial Sequence: Synthetic oligonucleotide
caggcgcgucggcgucggc

SEQ ID NO: 1622813 - RNA, 19 nt, Artificial Sequence
  Description of Artificial Sequence: Synthetic oligonucleotide
cgauccggcuccgcgagga

SEQ ID NO: 1622814 - RNA, 19 nt, Artificial Sequence
  Description of Artificial Sequence: Synthetic oligonucleotide
gcgucgaagucgccaccua

SEQ ID NO: 1622815 - RNA, 19 nt, Artificial Sequence
  Description of Artificial Sequence: Synthetic oligonucleotide
ccgguggcguggccccggg

SEQ ID NO: 1622816 - RNA, 19 nt, Artificial Sequence
  Description of Artificial Sequence: Synthetic oligonucleotide
cgcgucggcgucggcgucg

SEQ ID NO: 1622817 - RNA, 19 nt, Artificial Sequence
  Description of Artificial Sequence: Synthetic oligonucleotide
cgggguggugcgagccgcc

SEQ ID NO: 1622818 - RNA, 19 nt, Artificial Sequence
  Description of Artificial Sequence: Synthetic oligonucleotide
gccccgggccagcauccga

SEQ ID NO: 1622819 - RNA, 19 nt, Artificial Sequence
  Description of Artificial Sequence: Synthetic oligonucleotide
ccguggucccggcucggca

SEQ ID NO: 1622820 - RNA, 19 nt, Artificial Sequence
  Description of Artificial Sequence: Synthetic oligonucleotide
gcgucggcguacaccaggu

SEQ ID NO: 1622821 - RNA, 19 nt, Artificial Sequence
  Description of Artificial Sequence: Synthetic oligonucleotide
ccacggccuucccggguuc

SEQ ID NO: 1622822 - RNA, 19 nt, Artificial Sequence
  Description of Artificial Sequence: Synthetic oligonucleotide
cgaggcgccgucgucguaa

SEQ ID NO: 1622823 - RNA, 19 nt, Artificial Sequence
  Description of Artificial Sequence: Synthetic oligonucleotide
ccguggccgcgucgaaguc

SEQ ID NO: 1622824 - RNA, 19 nt, Artificial Sequence
  Description of Artificial Sequence: Synthetic oligonucleotide
ccgagcccaccaggcugcg

SEQ ID NO: 1622825 - RNA, 19 nt, Artificial Sequence
  Description of Artificial Sequence: Synthetic oligonucleotide
cgccgauccggcuccgcga

SEQ ID NO: 1622826 - RNA, 19 nt, Artificial Sequence
  Description of Artificial Sequence: Synthetic oligonucleotide
gcgggcgggucggcuucgg

SEQ ID NO: 1622827 - RNA, 19 nt, Artificial Sequence
  Description of Artificial Sequence: Synthetic oligonucleotide
ccggcucggcaugcacgcc

SEQ ID NO: 1622828 - RNA, 19 nt, Artificial Sequence
  Description of Artificial Sequence: Synthetic oligonucleotide
gccacaccgugucgccgua

SEQ ID NO: 1622829 - RNA, 19 nt, Artificial Sequence
  Description of Artificial Sequence: Synthetic oligonucleotide
gcgucggcgucggcguaca

SEQ ID NO: 1622830 - RNA, 19 nt, Artificial Sequence
  Description of Artificial Sequence: Synthetic oligonucleotide
cgcaggcgcgucggcgucg

SEQ ID NO: 1622831 - RNA, 19 nt, Artificial Sequence
  Description of Artificial Sequence: Synthetic oligonucleotide
cgugcgcgccgccgagaag

SEQ ID NO: 1622832 - RNA, 19 nt, Artificial Sequence
  Description of Artificial Sequence: Synthetic oligonucleotide
ccgccccguggccgcgucg

SEQ ID NO: 1622833 - RNA, 19 nt, Artificial Sequence
  Description of Artificial Sequence: Synthetic oligonucleotide
gcguacugcggagcgccgu

SEQ ID NO: 1622834 - RNA, 19 nt, Artificial Sequence
  Description of Artificial Sequence: Synthetic oligonucleotide
gcgcucuggcuggcagcgc

SEQ ID NO: 1622835 - RNA, 19 nt, Artificial Sequence
  Description of Artificial Sequence: Synthetic oligonucleotide
cggcuccgcgaggacgccg

SEQ ID NO: 1622836 - RNA, 19 nt, Artificial Sequence
  Description of Artificial Sequence: Synthetic oligonucleotide
cgucacgguugcgcaccag

SEQ ID NO: 1622837 - RNA, 19 nt, Artificial Sequence
  Description of Artificial Sequence: Synthetic oligonucleotide
gccgggcugcgcacugguc

SEQ ID NO: 1622838 - RNA, 19 nt, Artificial Sequence
  Description of Artificial Sequence: Synthetic oligonucleotide
cgccgcgucgaagucgcca

SEQ ID NO: 1622839 - RNA, 19 nt, Artificial Sequence
  Description of Artificial Sequence: Synthetic oligonucleotide
gucgcccgcgcugcggcuu

SEQ ID NO: 1622840 - RNA, 19 nt, Artificial Sequence
  Description of Artificial Sequence: Synthetic oligonucleotide
gcaucaccgacaggcucuu

SEQ ID NO: 1622841 - RNA, 19 nt, Artificial Sequence
  Description of Artificial Sequence: Synthetic oligonucleotide
ccgcaggccaccgggcuua

SEQ ID NO: 1622842 - RNA, 19 nt, Artificial Sequence
  Description of Artificial Sequence: Synthetic oligonucleotide
ccgccgcgucgaagucgcc

SEQ ID NO: 1622843 - RNA, 19 nt, Artificial Sequence
  Description of Artificial Sequence: Synthetic oligonucleotide
ggacgccgggcugcgcacu

SEQ ID NO: 1622844 - RNA, 19 nt, Artificial Sequence
  Description of Artificial Sequence: Synthetic oligonucleotide
gcgagccgccgagaaugcu

SEQ ID NO: 1622845 - RNA, 19 nt, Artificial Sequence
  Description of Artificial Sequence: Synthetic oligonucleotide
ccggcacagggaggcguga

SEQ ID NO: 1622846 - RNA, 19 nt, Artificial Sequence
  Description of Artificial Sequence: Synthetic oligonucleotide
cgcgucgaagucgccaccu

SEQ ID NO: 1622847 - RNA, 19 nt, Artificial Sequence
  Description of Artificial Sequence: Synthetic oligonucleotide
gcgucuugcgcggcagcuu

SEQ ID NO: 1622848 - RNA, 19 nt, Artificial Sequence
  Description of Artificial Sequence: Synthetic oligonucleotide
cgccgugcagccgcagcca

SEQ ID NO: 1622849 - RNA, 19 nt, Artificial Sequence
  Description of Artificial Sequence: Synthetic oligonucleotide
cggcuuggucgggccugcg

SEQ ID NO: 1622850 - RNA, 19 nt, Artificial Sequence
  Description of Artificial Sequence: Synthetic oligonucleotide
cgcacuggucgcccgcgcu

SEQ ID NO: 1622851 - RNA, 19 nt, Artificial Sequence
  Description of Artificial Sequence: Synthetic oligonucleotide
cgaggacgccgggcugcgc

SEQ ID NO: 1622852 - RNA, 19 nt, Artificial Sequence
  Description of Artificial Sequence: Synthetic oligonucleotide
cgucggcgucggcguacac

SEQ ID NO: 1622853 - RNA, 19 nt, Artificial Sequence
  Description of Artificial Sequence: Synthetic oligonucleotide
cggcggcgaguggggaccc

SEQ ID NO: 1622854 - RNA, 19 nt, Artificial Sequence
  Description of Artificial Sequence: Synthetic oligonucleotide
cggccgccgcgucgaaguc

SEQ ID NO: 1622855 - RNA, 19 nt, Artificial Sequence
  Description of Artificial Sequence: Synthetic oligonucleotide
ggccagcggccgguggcgu

SEQ ID NO: 1622856 - RNA, 19 nt, Artificial Sequence
  Description of Artificial Sequence: Synthetic oligonucleotide
cgggcacgcggcagcggaa

SEQ ID NO: 1622857 - RNA, 19 nt, Artificial Sequence
  Description of Artificial Sequence: Synthetic oligonucleotide
cggcgucaccgcgccgcag

SEQ ID NO: 1622858 - RNA, 19 nt, Artificial Sequence
  Description of Artificial Sequence: Synthetic oligonucleotide
cccgcaggccaccgggcuu

SEQ ID NO: 1622859 - RNA, 19 nt, Artificial Sequence
  Description of Artificial Sequence: Synthetic oligonucleotide
caggcgcguugggcaggcu

SEQ ID NO: 1622860 - RNA, 19 nt, Artificial Sequence
  Description of Artificial Sequence: Synthetic oligonucleotide
cgcguugggcaggcuguua

SEQ ID NO: 1622861 - RNA, 19 nt, Artificial Sequence
  Description of Artificial Sequence: Synthetic oligonucleotide
gcgcguugggcaggcuguu

SEQ ID NO: 1622862 - RNA, 19 nt, Artificial Sequence
  Description of Artificial Sequence: Synthetic oligonucleotide
gcuccgcgcgcaggcgcgu

SEQ ID NO: 1622863 - RNA, 19 nt, Artificial Sequence
  Description of Artificial Sequence: Synthetic oligonucleotide
cgccgggcugcgcacuggu

SEQ ID NO: 1622864 - RNA, 19 nt, Artificial Sequence
  Description of Artificial Sequence: Synthetic oligonucleotide
cgccgucgucguaaaucau

SEQ ID NO: 1622865 - RNA, 19 nt, Artificial Sequence
  Description of Artificial Sequence: Synthetic oligonucleotide
cgggucggcuucggucgga

SEQ ID NO: 1622866 - RNA, 19 nt, Artificial Sequence
  Description of Artificial Sequence: Synthetic oligonucleotide
cgcgugcgcgccgccgaga

SEQ ID NO: 1622867 - RNA, 19 nt, Artificial Sequence
  Description of Artificial Sequence: Synthetic oligonucleotide
gcccgcgcugcggcuuggu

SEQ ID NO: 1622868 - RNA, 19 nt, Artificial Sequence
  Description of Artificial Sequence: Synthetic oligonucleotide
cgggcgggucggcuucggu

SEQ ID NO: 1622869 - RNA, 19 nt, Artificial Sequence
  Description of Artificial Sequence: Synthetic oligonucleotide
cggcgccucgaggcgccgu

SEQ ID NO: 1622870 - RNA, 19 nt, Artificial Sequence
  Description of Artificial Sequence: Synthetic oligonucleotide
acuaucauaaaucauauag

SEQ ID NO: 1622871 - RNA, 19 nt, Artificial Sequence
  Description of Artificial Sequence: Synthetic oligonucleotide
uauguuaacuauuaaaagg

SEQ ID NO: 1622872 - RNA, 19 nt, Artificial Sequence
  Description of Artificial Sequence: Synthetic oligonucleotide
aaauauguaaguauauacc

SEQ ID NO: 1622873 - RNA, 19 nt, Artificial Sequence
  Description of Artificial Sequence: Synthetic oligonucleotide
aaaccaauguaccaguuac

SEQ ID NO: 1622874 - RNA, 19 nt, Artificial Sequence
  Description of Artificial Sequence: Synthetic oligonucleotide
aaucauauagcacaaauau

SEQ ID NO: 1622875 - RNA, 19 nt, Artificial Sequence
  Description of Artificial Sequence: Synthetic oligonucleotide
uuuaaaagaacaaacuacu

SEQ ID NO: 1622876 - RNA, 19 nt, Artificial Sequence
  Description of Artificial Sequence: Synthetic oligonucleotide
aauaaaccaauauaacaag

SEQ ID NO: 1622877 - RNA, 19 nt, Artificial Sequence
  Description of Artificial Sequence: Synthetic oligonucleotide
acuguauggacauacaagg

SEQ ID NO: 1622878 - RNA, 19 nt, Artificial Sequence
  Description of Artificial Sequence: Synthetic oligonucleotide
uauagcacaaauauuggcc

SEQ ID NO: 1622879 - RNA, 19 nt, Artificial Sequence
  Description of Artificial Sequence: Synthetic oligonucleotide
uaucauaaaucauauagca

SEQ ID NO: 1622880 - RNA, 19 nt, Artificial Sequence
  Description of Artificial Sequence: Synthetic oligonucleotide
auuaguuucaguguauacc

SEQ ID NO: 1622881 - RNA, 19 nt, Artificial Sequence
  Description of Artificial Sequence: Synthetic oligonucleotide
aaaauuggauaucccaagg

SEQ ID NO: 1622882 - RNA, 19 nt, Artificial Sequence
  Description of Artificial Sequence: Synthetic oligonucleotide
uuucagacauuuaacaaag

SEQ ID NO: 1622883 - RNA, 19 nt, Artificial Sequence
  Description of Artificial Sequence: Synthetic oligonucleotide
aaauuggauaucccaaggg

SEQ ID NO: 1622884 - RNA, 19 nt, Artificial Sequence
  Description of Artificial Sequence: Synthetic oligonucleotide
aaaaucuaaucuuguacag

SEQ ID NO: 1622885 - RNA, 19 nt, Artificial Sequence
  Description of Artificial Sequence: Synthetic oligonucleotide
auauagcacaaauauuggc

SEQ ID NO: 1622886 - RNA, 19 nt, Artificial Sequence
  Description of Artificial Sequence: Synthetic oligonucleotide
uucaguguauaccugaaug

SEQ ID NO: 1622887 - RNA, 19 nt, Artificial Sequence
  Description of Artificial Sequence: Synthetic oligonucleotide
aaaacuaucauaaaucaua

SEQ ID NO: 1622888 - RNA, 19 nt, Artificial Sequence
  Description of Artificial Sequence: Synthetic oligonucleotide
accaguuacucucauauuc

SEQ ID NO: 1622889 - RNA, 19 nt, Artificial Sequence
  Description of Artificial Sequence: Synthetic oligonucleotide
uuaguuucaguguauaccu

SEQ ID NO: 1622890 - RNA, 19 nt, Artificial Sequence
  Description of Artificial Sequence: Synthetic oligonucleotide
aaaccaauauaacaagcca

SEQ ID NO: 1622891 - RNA, 19 nt, Artificial Sequence
  Description of Artificial Sequence: Synthetic oligonucleotide
uauguaaguauauaccugu

SEQ ID NO: 1622892 - RNA, 19 nt, Artificial Sequence
  Description of Artificial Sequence: Synthetic oligonucleotide
auuuggcugacagagaagc

SEQ ID NO: 1622893 - RNA, 19 nt, Artificial Sequence
  Description of Artificial Sequence: Synthetic oligonucleotide
caaacuugcuuuaucaacc

SEQ ID NO: 1622894 - RNA, 19 nt, Artificial Sequence
  Description of Artificial Sequence: Synthetic oligonucleotide
cuaucauaaaucauauagc

SEQ ID NO: 1622895 - RNA, 19 nt, Artificial Sequence
  Description of Artificial Sequence: Synthetic oligonucleotide
auaugaauaucuuuuaaau

SEQ ID NO: 1622896 - RNA, 19 nt, Artificial Sequence
  Description of Artificial Sequence: Synthetic oligonucleotide
gaaaauuggauaucccaag

SEQ ID NO: 1622897 - RNA, 19 nt, Artificial Sequence
  Description of Artificial Sequence: Synthetic oligonucleotide
ugagcuuggauacuguacc

SEQ ID NO: 1622898 - RNA, 19 nt, Artificial Sequence
  Description of Artificial Sequence: Synthetic oligonucleotide
agugagguuccucaaaagg

SEQ ID NO: 1622899 - RNA, 19 nt, Artificial Sequence
  Description of Artificial Sequence: Synthetic oligonucleotide
uguauggacauacaaggcu

SEQ ID NO: 1622900 - RNA, 19 nt, Artificial Sequence
  Description of Artificial Sequence: Synthetic oligonucleotide
ugcuuuccgaacuaguugg

SEQ ID NO: 1622901 - RNA, 19 nt, Artificial Sequence
  Description of Artificial Sequence: Synthetic oligonucleotide
uuggauaucccaagggagg

SEQ ID NO: 1622902 - RNA, 19 nt, Artificial Sequence
  Description of Artificial Sequence: Synthetic oligonucleotide
ugaagagaaaauuggauau

SEQ ID NO: 1622903 - RNA, 19 nt, Artificial Sequence
  Description of Artificial Sequence: Synthetic oligonucleotide
uagaccuccauucuucggg

SEQ ID NO: 1622904 - RNA, 19 nt, Artificial Sequence
  Description of Artificial Sequence: Synthetic oligonucleotide
aagccauuacuguauggac

SEQ ID NO: 1622905 - RNA, 19 nt, Artificial Sequence
  Description of Artificial Sequence: Synthetic oligonucleotide
ugagucauuuggcugacag

SEQ ID NO: 1622906 - RNA, 19 nt, Artificial Sequence
  Description of Artificial Sequence: Synthetic oligonucleotide
auaaaccaauauaacaagc

SEQ ID NO: 1622907 - RNA, 19 nt, Artificial Sequence
  Description of Artificial Sequence: Synthetic oligonucleotide
acugcgaacaacugaacuc

SEQ ID NO: 1622908 - RNA, 19 nt, Artificial Sequence
  Description of Artificial Sequence: Synthetic oligonucleotide
uguaaguauauaccuguug

SEQ ID NO: 1622909 - RNA, 19 nt, Artificial Sequence
  Description of Artificial Sequence: Synthetic oligonucleotide
uauaacaagccauuacugu

SEQ ID NO: 1622910 - RNA, 19 nt, Artificial Sequence
  Description of Artificial Sequence: Synthetic oligonucleotide
ugagguuccucaaaaggag

SEQ ID NO: 1622911 - RNA, 19 nt, Artificial Sequence
  Description of Artificial Sequence: Synthetic oligonucleotide
ucuauuggacccaaacuug

SEQ ID NO: 1622912 - RNA, 19 nt, Artificial Sequence
  Description of Artificial Sequence: Synthetic oligonucleotide
aagaacaaacuacuuuuca

SEQ ID NO: 1622913 - RNA, 19 nt, Artificial Sequence
  Description of Artificial Sequence: Synthetic oligonucleotide
uucuauuggacccaaacuu

SEQ ID NO: 1622914 - RNA, 19 nt, Artificial Sequence
  Description of Artificial Sequence: Synthetic oligonucleotide
agucauuuggcugacagag

SEQ ID NO: 1622915 - RNA, 19 nt, Artificial Sequence
  Description of Artificial Sequence: Synthetic oligonucleotide
aacaacugaacuccacgag

SEQ ID NO: 1622916 - RNA, 19 nt, Artificial Sequence
  Description of Artificial Sequence: Synthetic oligonucleotide
auaccagucuucuggaaac

SEQ ID NO: 1622917 - RNA, 19 nt, Artificial Sequence
  Description of Artificial Sequence: Synthetic oligonucleotide
cugauuucucuuuugagug

SEQ ID NO: 1622918 - RNA, 19 nt, Artificial Sequence
  Description of Artificial Sequence: Synthetic oligonucleotide
cuaggcaacacauugucug

SEQ ID NO: 1622919 - RNA, 19 nt, Artificial Sequence
  Description of Artificial Sequence: Synthetic oligonucleotide
guaaguauauaccuguuga

SEQ ID NO: 1622920 - RNA, 19 nt, Artificial Sequence
  Description of Artificial Sequence: Synthetic oligonucleotide
uuacuaucugaccaggacu

SEQ ID NO: 1622921 - RNA, 19 nt, Artificial Sequence
  Description of Artificial Sequence: Synthetic oligonucleotide
uuuaacuagugucuccucu

SEQ ID NO: 1622922 - RNA, 19 nt, Artificial Sequence
  Description of Artificial Sequence: Synthetic oligonucleotide
gagaaaauuggauauccca

SEQ ID NO: 1622923 - RNA, 19 nt, Artificial Sequence
  Description of Artificial Sequence: Synthetic oligonucleotide
aaaggagugggugagcuug

SEQ ID NO: 1622924 - RNA, 19 nt, Artificial Sequence
  Description of Artificial Sequence: Synthetic oligonucleotide
cauacuagacucauacccc

SEQ ID NO: 1622925 - RNA, 19 nt, Artificial Sequence
  Description of Artificial Sequence: Synthetic oligonucleotide
aggacuaggcaacacauug

SEQ ID NO: 1622926 - RNA, 19 nt, Artificial Sequence
  Description of Artificial Sequence: Synthetic oligonucleotide
aaguauauaccuguugacu

SEQ ID NO: 1622927 - RNA, 19 nt, Artificial Sequence
  Description of Artificial Sequence: Synthetic oligonucleotide
acuagugucuccucuagug

SEQ ID NO: 1622928 - RNA, 19 nt, Artificial Sequence
  Description of Artificial Sequence: Synthetic oligonucleotide
auguuaacuauuaaaagga

SEQ ID NO: 1622929 - RNA, 19 nt, Artificial Sequence
  Description of Artificial Sequence: Synthetic oligonucleotide
ucguugguggcauaaagca

SEQ ID NO: 1622930 - RNA, 19 nt, Artificial Sequence
  Description of Artificial Sequence: Synthetic oligonucleotide
auagcacaaauauuggcca

SEQ ID NO: 1622931 - RNA, 19 nt, Artificial Sequence
  Description of Artificial Sequence: Synthetic oligonucleotide
uaucugaccaggacuaggc

SEQ ID NO: 1622932 - RNA, 19 nt, Artificial Sequence
  Description of Artificial Sequence: Synthetic oligonucleotide
ucuucggguaaacucagca

SEQ ID NO: 1622933 - RNA, 19 nt, Artificial Sequence
  Description of Artificial Sequence: Synthetic oligonucleotide
uuggauacuguaccgcucc

SEQ ID NO: 1622934 - RNA, 19 nt, Artificial Sequence
  Description of Artificial Sequence: Synthetic oligonucleotide
uguuugagucauuuggcug

SEQ ID NO: 1622935 - RNA, 19 nt, Artificial Sequence
  Description of Artificial Sequence: Synthetic oligonucleotide
ucucgagaaauuacaaaac

SEQ ID NO: 1622936 - RNA, 19 nt, Artificial Sequence
  Description of Artificial Sequence: Synthetic oligonucleotide
uaaagcaguucccaugaga

SEQ ID NO: 1622937 - RNA, 19 nt, Artificial Sequence
  Description of Artificial Sequence: Synthetic oligonucleotide
uugagugaaaacauuccaa

SEQ ID NO: 1622938 - RNA, 19 nt, Artificial Sequence
  Description of Artificial Sequence: Synthetic oligonucleotide
ugccuuaaaacaaacugau

SEQ ID NO: 1622939 - RNA, 19 nt, Artificial Sequence
  Description of Artificial Sequence: Synthetic oligonucleotide
auggugacaguauguuucc

SEQ ID NO: 1622940 - RNA, 19 nt, Artificial Sequence
  Description of Artificial Sequence: Synthetic oligonucleotide
aaagucucgagaaauuaca

SEQ ID NO: 1622941 - RNA, 19 nt, Artificial Sequence
  Description of Artificial Sequence: Synthetic oligonucleotide
acugaacuccacgagaggg

SEQ ID NO: 1622942 - RNA, 19 nt, Artificial Sequence
  Description of Artificial Sequence: Synthetic oligonucleotide
aucauaaaucauauagcac

SEQ ID NO: 1622943 - RNA, 19 nt, Artificial Sequence
  Description of Artificial Sequence: Synthetic oligonucleotide
uccucuagugcucucggag

SEQ ID NO: 1622944 - RNA, 19 nt, Artificial Sequence
  Description of Artificial Sequence: Synthetic oligonucleotide
gaugucuuuagcuacuaaa

SEQ ID NO: 1622945 - RNA, 19 nt, Artificial Sequence
  Description of Artificial Sequence: Synthetic oligonucleotide
uuccgaacuaguuggaaca

SEQ ID NO: 1622946 - RNA, 19 nt, Artificial Sequence
  Description of Artificial Sequence: Synthetic oligonucleotide
uauagagagagguuuugaa

SEQ ID NO: 1622947 - RNA, 19 nt, Artificial Sequence
  Description of Artificial Sequence: Synthetic oligonucleotide
uaaguauauaccuguugac

SEQ ID NO: 1622948 - RNA, 19 nt, Artificial Sequence
  Description of Artificial Sequence: Synthetic oligonucleotide
ugcucucggaguuagacgu

SEQ ID NO: 1622949 - RNA, 19 nt, Artificial Sequence
  Description of Artificial Sequence: Synthetic oligonucleotide
aaggauucaucauuauuua

SEQ ID NO: 1622950 - RNA, 19 nt, Artificial Sequence
  Description of Artificial Sequence: Synthetic oligonucleotide
ccauacuagacucauaccc

SEQ ID NO: 1622951 - RNA, 19 nt, Artificial Sequence
  Description of Artificial Sequence: Synthetic oligonucleotide
acuaacacaaauguauaga

SEQ ID NO: 1622952 - RNA, 19 nt, Artificial Sequence
  Description of Artificial Sequence: Synthetic oligonucleotide
cuuacuaucugaccaggac

SEQ ID NO: 1622953 - RNA, 19 nt, Artificial Sequence
  Description of Artificial Sequence: Synthetic oligonucleotide
uacucucauauucucugag

SEQ ID NO: 1622954 - RNA, 19 nt, Artificial Sequence
  Description of Artificial Sequence: Synthetic oligonucleotide
ucgagaaauuacaaaacuu

SEQ ID NO: 1622955 - RNA, 19 nt, Artificial Sequence
  Description of Artificial Sequence: Synthetic oligonucleotide
acccucgacguguaaacgc

SEQ ID NO: 1622956 - RNA, 19 nt, Artificial Sequence
  Description of Artificial Sequence: Synthetic oligonucleotide
acugauaugaauaucuuuu

SEQ ID NO: 1622957 - RNA, 19 nt, Artificial Sequence
  Description of Artificial Sequence: Synthetic oligonucleotide
cuauuggacccaaacuugc

SEQ ID NO: 1622958 - RNA, 19 nt, Artificial Sequence
  Description of Artificial Sequence: Synthetic oligonucleotide
auaacaagccauuacugua

SEQ ID NO: 1622959 - RNA, 19 nt, Artificial Sequence
  Description of Artificial Sequence: Synthetic oligonucleotide
aaacuaucauaaaucauau

SEQ ID NO: 1622960 - RNA, 19 nt, Artificial Sequence
  Description of Artificial Sequence: Synthetic oligonucleotide
uuguagacucuuacuaucu

SEQ ID NO: 1622961 - RNA, 19 nt, Artificial Sequence
  Description of Artificial Sequence: Synthetic oligonucleotide
gucucgagaaauuacaaaa

SEQ ID NO: 1622962 - RNA, 19 nt, Artificial Sequence
  Description of Artificial Sequence: Synthetic oligonucleotide
acuacuucugcccauguua

SEQ ID NO: 1622963 - RNA, 19 nt, Artificial Sequence
  Description of Artificial Sequence: Synthetic oligonucleotide
uagaauggugacaguaugu

SEQ ID NO: 1622964 - RNA, 19 nt, Artificial Sequence
  Description of Artificial Sequence: Synthetic oligonucleotide
uaacuagugucuccucuag

SEQ ID NO: 1622965 - RNA, 19 nt, Artificial Sequence
  Description of Artificial Sequence: Synthetic oligonucleotide
acuagacucauaccccagg

SEQ ID NO: 1622966 - RNA, 19 nt, Artificial Sequence
  Description of Artificial Sequence: Synthetic oligonucleotide
uuuccgaacuaguuggaac

SEQ ID NO: 1622967 - RNA, 19 nt, Artificial Sequence
  Description of Artificial Sequence: Synthetic oligonucleotide
agagaaaauuggauauccc

SEQ ID NO: 1622968 - RNA, 19 nt, Artificial Sequence
  Description of Artificial Sequence: Synthetic oligonucleotide
auuggauaucccaagggag

SEQ ID NO: 1622969 - RNA, 19 nt, Artificial Sequence
  Description of Artificial Sequence: Synthetic oligonucleotide
agagguuuugaagagaaaa

SEQ ID NO: 1622970 - RNA, 19 nt, Artificial Sequence
  Description of Artificial Sequence: Synthetic oligonucleotide
acaacugaacuccacgaga

SEQ ID NO: 1622971 - RNA, 19 nt, Artificial Sequence
  Description of Artificial Sequence: Synthetic oligonucleotide
aucguugguggcauaaagc

SEQ ID NO: 1622972 - RNA, 19 nt, Artificial Sequence
  Description of Artificial Sequence: Synthetic oligonucleotide
uaacaagccauuacuguau

SEQ ID NO: 1622973 - RNA, 19 nt, Artificial Sequence
  Description of Artificial Sequence: Synthetic oligonucleotide
guuugagucauuuggcuga

SEQ ID NO: 1622974 - RNA, 19 nt, Artificial Sequence
  Description of Artificial Sequence: Synthetic oligonucleotide
aacaagccauuacuguaug

SEQ ID NO: 1622975 - RNA, 19 nt, Artificial Sequence
  Description of Artificial Sequence: Synthetic oligonucleotide
gauacuguaccgcuccuca

SEQ ID NO: 1622976 - RNA, 19 nt, Artificial Sequence
  Description of Artificial Sequence: Synthetic oligonucleotide
uuaggcacagaggagcugc

SEQ ID NO: 1622977 - RNA, 19 nt, Artificial Sequence
  Description of Artificial Sequence: Synthetic oligonucleotide
cuagacucauaccccaggg

SEQ ID NO: 1622978 - RNA, 19 nt, Artificial Sequence
  Description of Artificial Sequence: Synthetic oligonucleotide
guagaauggugacaguaug

SEQ ID NO: 1622979 - RNA, 19 nt, Artificial Sequence
  Description of Artificial Sequence: Synthetic oligonucleotide
uguagacucuuacuaucug

SEQ ID NO: 1622980 - RNA, 19 nt, Artificial Sequence
  Description of Artificial Sequence: Synthetic oligonucleotide
aaccaauauaacaagccau

SEQ ID NO: 1622981 - RNA, 19 nt, Artificial Sequence
  Description of Artificial Sequence: Synthetic oligonucleotide
uucucgauugccccuguca

SEQ ID NO: 1622982 - RNA, 19 nt, Artificial Sequence
  Description of Artificial Sequence: Synthetic oligonucleotide
auauaacaagccauuacug

SEQ ID NO: 1622983 - RNA, 19 nt, Artificial Sequence
  Description of Artificial Sequence: Synthetic oligonucleotide
ucucauauucucugaggca

SEQ ID NO: 1622984 - RNA, 19 nt, Artificial Sequence
  Description of Artificial Sequence: Synthetic oligonucleotide
cauuacuguauggacauac

SEQ ID NO: 1622985 - RNA, 19 nt, Artificial Sequence
  Description of Artificial Sequence: Synthetic oligonucleotide
acaaaaccguccuguaaag

SEQ ID NO: 1622986 - RNA, 19 nt, Artificial Sequence
  Description of Artificial Sequence: Synthetic oligonucleotide
uggauaucccaagggaggg

SEQ ID NO: 1622987 - RNA, 19 nt, Artificial Sequence
  Description of Artificial Sequence: Synthetic oligonucleotide
uguaaacgcccauacuaga

SEQ ID NO: 1622988 - RNA, 19 nt, Artificial Sequence
  Description of Artificial Sequence: Synthetic oligonucleotide
agacucauaccccagggaa

SEQ ID NO: 1622989 - RNA, 19 nt, Artificial Sequence
  Description of Artificial Sequence: Synthetic oligonucleotide
gguuuugaagagaaaauug

SEQ ID NO: 1622990 - RNA, 19 nt, Artificial Sequence
  Description of Artificial Sequence: Synthetic oligonucleotide
uccacgagagggauguaug

SEQ ID NO: 1622991 - RNA, 19 nt, Artificial Sequence
  Description of Artificial Sequence: Synthetic oligonucleotide
uuagaccuccauucuucgg

SEQ ID NO: 1622992 - RNA, 19 nt, Artificial Sequence
  Description of Artificial Sequence: Synthetic oligonucleotide
auauguaaguauauaccug

SEQ ID NO: 1622993 - RNA, 19 nt, Artificial Sequence
  Description of Artificial Sequence: Synthetic oligonucleotide
caaacugauaccagucuuc

SEQ ID NO: 1622994 - RNA, 19 nt, Artificial Sequence
  Description of Artificial Sequence: Synthetic oligonucleotide
gacguguaaacgcccauac

SEQ ID NO: 1622995 - RNA, 19 nt, Artificial Sequence
  Description of Artificial Sequence: Synthetic oligonucleotide
gacuaggcaacacauuguc

SEQ ID NO: 1622996 - RNA, 19 nt, Artificial Sequence
  Description of Artificial Sequence: Synthetic oligonucleotide
auacuagacucauacccca

SEQ ID NO: 1622997 - RNA, 19 nt, Artificial Sequence
  Description of Artificial Sequence: Synthetic oligonucleotide
cuguauggacauacaaggc

SEQ ID NO: 1622998 - RNA, 19 nt, Artificial Sequence
  Description of Artificial Sequence: Synthetic oligonucleotide
uguauagagagagguuuug

SEQ ID NO: 1622999 - RNA, 19 nt, Artificial Sequence
  Description of Artificial Sequence: Synthetic oligonucleotide
uccaguacaccugauuucu

SEQ ID NO: 1623000 - RNA, 19 nt, Artificial Sequence
  Description of Artificial Sequence: Synthetic oligonucleotide
gauaccagucuucuggaaa

SEQ ID NO: 1623001 - RNA, 19 nt, Artificial Sequence
  Description of Artificial Sequence: Synthetic oligonucleotide
cugcgaacaacugaacucc

SEQ ID NO: 1623002 - RNA, 19 nt, Artificial Sequence
  Description of Artificial Sequence: Synthetic oligonucleotide
guucccaugagagauuggc

SEQ ID NO: 1623003 - RNA, 19 nt, Artificial Sequence
  Description of Artificial Sequence: Synthetic oligonucleotide
agaaaauuggauaucccaa

SEQ ID NO: 1623004 - RNA, 19 nt, Artificial Sequence
  Description of Artificial Sequence: Synthetic oligonucleotide
gagcuuggauacuguaccg

SEQ ID NO: 1623005 - RNA, 19 nt, Artificial Sequence
  Description of Artificial Sequence: Synthetic oligonucleotide
gaacgggguguacaguuag

SEQ ID NO: 1623006 - RNA, 19 nt, Artificial Sequence
  Description of Artificial Sequence: Synthetic oligonucleotide
cuuauucuggaacggggug

SEQ ID NO: 1623007 - RNA, 19 nt, Artificial Sequence
  Description of Artificial Sequence: Synthetic oligonucleotide
acaagccauuacuguaugg

SEQ ID NO: 1623008 - RNA, 19 nt, Artificial Sequence
  Description of Artificial Sequence: Synthetic oligonucleotide
gagaagcagccucacagac

SEQ ID NO: 1623009 - RNA, 19 nt, Artificial Sequence
  Description of Artificial Sequence: Synthetic oligonucleotide
uguuaggcacagaggagcu

SEQ ID NO: 1623010 - RNA, 19 nt, Artificial Sequence
  Description of Artificial Sequence: Synthetic oligonucleotide
ucucgauugccccugucaa

SEQ ID NO: 1623011 - RNA, 19 nt, Artificial Sequence
  Description of Artificial Sequence: Synthetic oligonucleotide
ucgauugccccugucaaca

SEQ ID NO: 1623012 - RNA, 19 nt, Artificial Sequence
  Description of Artificial Sequence: Synthetic oligonucleotide
caaacuacuuuucagacau

SEQ ID NO: 1623013 - RNA, 19 nt, Artificial Sequence
  Description of Artificial Sequence: Synthetic oligonucleotide
aaccguccuguaaagauca

SEQ ID NO: 1623014 - RNA, 19 nt, Artificial Sequence
  Description of Artificial Sequence: Synthetic oligonucleotide
acaaauguauagagagagg

SEQ ID NO: 1623015 - RNA, 19 nt, Artificial Sequence
  Description of Artificial Sequence: Synthetic oligonucleotide
agcaagugugacugcgaac

SEQ ID NO: 1623016 - RNA, 19 nt, Artificial Sequence
  Description of Artificial Sequence: Synthetic oligonucleotide
uauuggacccaaacuugcu

SEQ ID NO: 1623017 - RNA, 19 nt, Artificial Sequence
  Description of Artificial Sequence: Synthetic oligonucleotide
ucggguaaacucagcaagu

SEQ ID NO: 1623018 - RNA, 19 nt, Artificial Sequence
  Description of Artificial Sequence: Synthetic oligonucleotide
ggacauacaaggcuuucag

SEQ ID NO: 1623019 - RNA, 19 nt, Artificial Sequence
  Description of Artificial Sequence: Synthetic oligonucleotide
uacuagacucauaccccag

SEQ ID NO: 1623020 - RNA, 19 nt, Artificial Sequence
  Description of Artificial Sequence: Synthetic oligonucleotide
acaaacugauaccagucuu

SEQ ID NO: 1623021 - RNA, 19 nt, Artificial Sequence
  Description of Artificial Sequence: Synthetic oligonucleotide
aguuggaacaguucugguu

SEQ ID NO: 1623022 - RNA, 19 nt, Artificial Sequence
  Description of Artificial Sequence: Synthetic oligonucleotide
acgagagggauguaugcca

SEQ ID NO: 1623023 - RNA, 19 nt, Artificial Sequence
  Description of Artificial Sequence: Synthetic oligonucleotide
guguaaacgcccauacuag

SEQ ID NO: 1623024 - RNA, 19 nt, Artificial Sequence
  Description of Artificial Sequence: Synthetic oligonucleotide
guagacucuuacuaucuga

SEQ ID NO: 1623025 - RNA, 19 nt, Artificial Sequence
  Description of Artificial Sequence: Synthetic oligonucleotide
caucguugguggcauaaag

SEQ ID NO: 1623026 - RNA, 19 nt, Artificial Sequence
  Description of Artificial Sequence: Synthetic oligonucleotide
aacugauaccagucuucug

SEQ ID NO: 1623027 - RNA, 19 nt, Artificial Sequence
  Description of Artificial Sequence: Synthetic oligonucleotide
uuacucucauauucucuga

SEQ ID NO: 1623028 - RNA, 19 nt, Artificial Sequence
  Description of Artificial Sequence: Synthetic oligonucleotide
aaauauuggccaacuacuu

SEQ ID NO: 1623029 - RNA, 19 nt, Artificial Sequence
  Description of Artificial Sequence: Synthetic oligonucleotide
aacuuagacucuuccuuuu

SEQ ID NO: 1623030 - RNA, 19 nt, Artificial Sequence
  Description of Artificial Sequence: Synthetic oligonucleotide
agucucgagaaauuacaaa

SEQ ID NO: 1623031 - RNA, 19 nt, Artificial Sequence
  Description of Artificial Sequence: Synthetic oligonucleotide
gaagagaaaauuggauauc

SEQ ID NO: 1623032 - RNA, 19 nt, Artificial Sequence
  Description of Artificial Sequence: Synthetic oligonucleotide
cuaaucuuguacagauguc

SEQ ID NO: 1623033 - RNA, 19 nt, Artificial Sequence
  Description of Artificial Sequence: Synthetic oligonucleotide
aaggcuuucagagcuuuau

SEQ ID NO: 1623034 - RNA, 19 nt, Artificial Sequence
  Description of Artificial Sequence: Synthetic oligonucleotide
cucagcaagugugacugcg

SEQ ID NO: 1623035 - RNA, 19 nt, Artificial Sequence
  Description of Artificial Sequence: Synthetic oligonucleotide
uacuguaccgcuccucauc

SEQ ID NO: 1623036 - RNA, 19 nt, Artificial Sequence
  Description of Artificial Sequence: Synthetic oligonucleotide
aggcuuucagagcuuuauc

SEQ ID NO: 1623037 - RNA, 19 nt, Artificial Sequence
  Description of Artificial Sequence: Synthetic oligonucleotide
acgggguguacaguuagac

SEQ ID NO: 1623038 - RNA, 19 nt, Artificial Sequence
  Description of Artificial Sequence: Synthetic oligonucleotide
uaguuucaguguauaccug

SEQ ID NO: 1623039 - RNA, 19 nt, Artificial Sequence
  Description of Artificial Sequence: Synthetic oligonucleotide
ucccuuauucuggaacggg

SEQ ID NO: 1623040 - RNA, 19 nt, Artificial Sequence
  Description of Artificial Sequence: Synthetic oligonucleotide
ucagcaagugugacugcga

SEQ ID NO: 1623041 - RNA, 19 nt, Artificial Sequence
  Description of Artificial Sequence: Synthetic oligonucleotide
caaauguauagagagaggu

SEQ ID NO: 1623042 - RNA, 19 nt, Artificial Sequence
  Description of Artificial Sequence: Synthetic oligonucleotide
aagcaguucccaugagaga

SEQ ID NO: 1623043 - RNA, 19 nt, Artificial Sequence
  Description of Artificial Sequence: Synthetic oligonucleotide
accaggacuaggcaacaca

SEQ ID NO: 1623044 - RNA, 19 nt, Artificial Sequence
  Description of Artificial Sequence: Synthetic oligonucleotide
uacuucugcccauguuagg

SEQ ID NO: 1623045 - RNA, 19 nt, Artificial Sequence
  Description of Artificial Sequence: Synthetic oligonucleotide
uuggacccaaacuugcuuu

SEQ ID NO: 1623046 - RNA, 19 nt, Artificial Sequence
  Description of Artificial Sequence: Synthetic oligonucleotide
gauaucccaagggaggguc

SEQ ID NO: 1623047 - RNA, 19 nt, Artificial Sequence
  Description of Artificial Sequence: Synthetic oligonucleotide
uuccaguacaccugauuuc

SEQ ID NO: 1623048 - RNA, 19 nt, Artificial Sequence
  Description of Artificial Sequence: Synthetic oligonucleotide
gugagguuccucaaaagga

SEQ ID NO: 1623049 - RNA, 19 nt, Artificial Sequence
  Description of Artificial Sequence: Synthetic oligonucleotide
caccauuguagacucuuac

SEQ ID NO: 1623050 - RNA, 19 nt, Artificial Sequence
  Description of Artificial Sequence: Synthetic oligonucleotide
gcccauacuagacucauac

SEQ ID NO: 1623051 - RNA, 19 nt, Artificial Sequence
  Description of Artificial Sequence: Synthetic oligonucleotide
ggugacaguauguuuccug

SEQ ID NO: 1623052 - RNA, 19 nt, Artificial Sequence
  Description of Artificial Sequence: Synthetic oligonucleotide
caauccaaggugccagagc

SEQ ID NO: 1623053 - RNA, 19 nt, Artificial Sequence
  Description of Artificial Sequence: Synthetic oligonucleotide
guaaacgcccauacuagac

SEQ ID NO: 1623054 - RNA, 19 nt, Artificial Sequence
  Description of Artificial Sequence: Synthetic oligonucleotide
uggacauacaaggcuuuca

SEQ ID NO: 1623055 - RNA, 19 nt, Artificial Sequence
  Description of Artificial Sequence: Synthetic oligonucleotide
gauugccccugucaacagc

SEQ ID NO: 1623056 - RNA, 19 nt, Artificial Sequence
  Description of Artificial Sequence: Synthetic oligonucleotide
aacauuccaacugccuuaa

SEQ ID NO: 1623057 - RNA, 19 nt, Artificial Sequence
  Description of Artificial Sequence: Synthetic oligonucleotide
agggaaacaagcauggcuu

SEQ ID NO: 1623058 - RNA, 19 nt, Artificial Sequence
  Description of Artificial Sequence: Synthetic oligonucleotide
acauugucuggauccaaau

SEQ ID NO: 1623059 - RNA, 19 nt, Artificial Sequence
  Description of Artificial Sequence: Synthetic oligonucleotide
uauggacauacaaggcuuu

SEQ ID NO: 1623060 - RNA, 19 nt, Artificial Sequence
  Description of Artificial Sequence: Synthetic oligonucleotide
guuggaacaguucugguuu

SEQ ID NO: 1623061 - RNA, 19 nt, Artificial Sequence
  Description of Artificial Sequence: Synthetic oligonucleotide
uccgaacuaguuggaacag

SEQ ID NO: 1623062 - RNA, 19 nt, Artificial Sequence
  Description of Artificial Sequence: Synthetic oligonucleotide
cuuggauacuguaccgcuc

SEQ ID NO: 1623063 - RNA, 19 nt, Artificial Sequence
  Description of Artificial Sequence: Synthetic oligonucleotide
gcaagugugacugcgaaca

SEQ ID NO: 1623064 - RNA, 19 nt, Artificial Sequence
  Description of Artificial Sequence: Synthetic oligonucleotide
uuuguagaauggugacagu

SEQ ID NO: 1623065 - RNA, 19 nt, Artificial Sequence
  Description of Artificial Sequence: Synthetic oligonucleotide
aacuacuucugcccauguu

SEQ ID NO: 1623066 - RNA, 19 nt, Artificial Sequence
  Description of Artificial Sequence: Synthetic oligonucleotide
agccaauccaaggugccag

SEQ ID NO: 1623067 - RNA, 19 nt, Artificial Sequence
  Description of Artificial Sequence: Synthetic oligonucleotide
ucagagcuuuauccuuggc

SEQ ID NO: 1623068 - RNA, 19 nt, Artificial Sequence
  Description of Artificial Sequence: Synthetic oligonucleotide
aguuacucucauauucucu

SEQ ID NO: 1623069 - RNA, 19 nt, Artificial Sequence
  Description of Artificial Sequence: Synthetic oligonucleotide
uuccgaugugcaccaggag

SEQ ID NO: 1623070 - RNA, 19 nt, Artificial Sequence
  Description of Artificial Sequence: Synthetic oligonucleotide
agaggaaagucucgagaaa

SEQ ID NO: 1623071 - RNA, 19 nt, Artificial Sequence
  Description of Artificial Sequence: Synthetic oligonucleotide
ccucccuuauucuggaacg

SEQ ID NO: 1623072 - RNA, 19 nt, Artificial Sequence
  Description of Artificial Sequence: Synthetic oligonucleotide
caguuacucucauauucuc

SEQ ID NO: 1623073 - RNA, 19 nt, Artificial Sequence
  Description of Artificial Sequence: Synthetic oligonucleotide
cucgagaaauuacaaaacu

SEQ ID NO: 1623074 - RNA, 19 nt, Artificial Sequence
  Description of Artificial Sequence: Synthetic oligonucleotide
agccauuacuguauggaca

SEQ ID NO: 1623075 - RNA, 19 nt, Artificial Sequence
  Description of Artificial Sequence: Synthetic oligonucleotide
ugcgaacaacugaacucca

SEQ ID NO: 1623076 - RNA, 19 nt, Artificial Sequence
  Description of Artificial Sequence: Synthetic oligonucleotide
uuuggaagcuguguuugua

SEQ ID NO: 1623077 - RNA, 19 nt, Artificial Sequence
  Description of Artificial Sequence: Synthetic oligonucleotide
gugacugcgaacaacugaa

SEQ ID NO: 1623078 - RNA, 19 nt, Artificial Sequence
  Description of Artificial Sequence: Synthetic oligonucleotide
cacgagagggauguaugcc

SEQ ID NO: 1623079 - RNA, 19 nt, Artificial Sequence
  Description of Artificial Sequence: Synthetic oligonucleotide
ucaaaaggagugggugagc

SEQ ID NO: 1623080 - RNA, 19 nt, Artificial Sequence
  Description of Artificial Sequence: Synthetic oligonucleotide
agaccuuaguucuucucuu

SEQ ID NO: 1623081 - RNA, 19 nt, Artificial Sequence
  Description of Artificial Sequence: Synthetic oligonucleotide
uguaccaguuacucucaua

SEQ ID NO: 1623082 - RNA, 19 nt, Artificial Sequence
  Description of Artificial Sequence: Synthetic oligonucleotide
uagcacaaauauuggccaa

SEQ ID NO: 1623083 - RNA, 19 nt, Artificial Sequence
  Description of Artificial Sequence: Synthetic oligonucleotide
guaugccacaucuucucga

SEQ ID NO: 1623084 - RNA, 19 nt, Artificial Sequence
  Description of Artificial Sequence: Synthetic oligonucleotide
auggacauacaaggcuuuc

SEQ ID NO: 1623085 - RNA, 19 nt, Artificial Sequence
  Description of Artificial Sequence: Synthetic oligonucleotide
gacugcgaacaacugaacu

SEQ ID NO: 1623086 - RNA, 19 nt, Artificial Sequence
  Description of Artificial Sequence: Synthetic oligonucleotide
agcuuccgaauucagcuuu

SEQ ID NO: 1623087 - RNA, 19 nt, Artificial Sequence
  Description of Artificial Sequence: Synthetic oligonucleotide
agguuccucaaaaggagug

SEQ ID NO: 1623088 - RNA, 19 nt, Artificial Sequence
  Description of Artificial Sequence: Synthetic oligonucleotide
uaguuggaacaguucuggu

SEQ ID NO: 1623089 - RNA, 19 nt, Artificial Sequence
  Description of Artificial Sequence: Synthetic oligonucleotide
aucauauagcacaaauauu

SEQ ID NO: 1623090 - RNA, 19 nt, Artificial Sequence
  Description of Artificial Sequence: Synthetic oligonucleotide
gacccucgacguguaaacg

SEQ ID NO: 1623091 - RNA, 19 nt, Artificial Sequence
  Description of Artificial Sequence: Synthetic oligonucleotide
ugacugcgaacaacugaac

SEQ ID NO: 1623092 - RNA, 19 nt, Artificial Sequence
  Description of Artificial Sequence: Synthetic oligonucleotide
cuggaaacaaggggcuugc

SEQ ID NO: 1623093 - RNA, 19 nt, Artificial Sequence
  Description of Artificial Sequence: Synthetic oligonucleotide
guggcauaaagcaguuccc

SEQ ID NO: 1623094 - RNA, 19 nt, Artificial Sequence
  Description of Artificial Sequence: Synthetic oligonucleotide
aggguaagccaccauugua

SEQ ID NO: 1623095 - RNA, 19 nt, Artificial Sequence
  Description of Artificial Sequence: Synthetic oligonucleotide
gcuguuugagucauuuggc

SEQ ID NO: 1623096 - RNA, 19 nt, Artificial Sequence
  Description of Artificial Sequence: Synthetic oligonucleotide
ugauaccagucuucuggaa

SEQ ID NO: 1623097 - RNA, 19 nt, Artificial Sequence
  Description of Artificial Sequence: Synthetic oligonucleotide
cuucuauuggacccaaacu

SEQ ID NO: 1623098 - RNA, 19 nt, Artificial Sequence
  Description of Artificial Sequence: Synthetic oligonucleotide
cuggucaguucuuugaagu

SEQ ID NO: 1623099 - RNA, 19 nt, Artificial Sequence
  Description of Artificial Sequence: Synthetic oligonucleotide
gugacaguauguuuccugu

SEQ ID NO: 1623100 - RNA, 19 nt, Artificial Sequence
  Description of Artificial Sequence: Synthetic oligonucleotide
cucccuuauucuggaacgg

SEQ ID NO: 1623101 - RNA, 19 nt, Artificial Sequence
  Description of Artificial Sequence: Synthetic oligonucleotide
acguguaaacgcccauacu

SEQ ID NO: 1623102 - RNA, 19 nt, Artificial Sequence
  Description of Artificial Sequence: Synthetic oligonucleotide
aagcauggcuuuucuucua

SEQ ID NO: 1623103 - RNA, 19 nt, Artificial Sequence
  Description of Artificial Sequence: Synthetic oligonucleotide
acuaucugaccaggacuag

SEQ ID NO: 1623104 - RNA, 19 nt, Artificial Sequence
  Description of Artificial Sequence: Synthetic oligonucleotide
ccaagggagggucagcggc

SEQ ID NO: 1623105 - RNA, 19 nt, Artificial Sequence
  Description of Artificial Sequence: Synthetic oligonucleotide
cuucggguaaacucagcaa

SEQ ID NO: 1623106 - RNA, 19 nt, Artificial Sequence
  Description of Artificial Sequence: Synthetic oligonucleotide
aguguauaccugaaugcuu

SEQ ID NO: 1623107 - RNA, 19 nt, Artificial Sequence
  Description of Artificial Sequence: Synthetic oligonucleotide
uggauacuguaccgcuccu

SEQ ID NO: 1623108 - RNA, 19 nt, Artificial Sequence
  Description of Artificial Sequence: Synthetic oligonucleotide
agcggcuuggacagugagg

SEQ ID NO: 1623109 - RNA, 19 nt, Artificial Sequence
  Description of Artificial Sequence: Synthetic oligonucleotide
caaaccaauguaccaguua

SEQ ID NO: 1623110 - RNA, 19 nt, Artificial Sequence
  Description of Artificial Sequence: Synthetic oligonucleotide
acuaggcaacacauugucu

SEQ ID NO: 1623111 - RNA, 19 nt, Artificial Sequence
  Description of Artificial Sequence: Synthetic oligonucleotide
caagcauggcuuuucuucu

SEQ ID NO: 1623112 - RNA, 19 nt, Artificial Sequence
  Description of Artificial Sequence: Synthetic oligonucleotide
cuguuugagucauuuggcu

SEQ ID NO: 1623113 - RNA, 19 nt, Artificial Sequence
  Description of Artificial Sequence: Synthetic oligonucleotide
aacgcccauacuagacuca

SEQ ID NO: 1623114 - RNA, 19 nt, Artificial Sequence
  Description of Artificial Sequence: Synthetic oligonucleotide
ggacccucgacguguaaac

SEQ ID NO: 1623115 - RNA, 19 nt, Artificial Sequence
  Description of Artificial Sequence: Synthetic oligonucleotide
ucgacguguaaacgcccau

SEQ ID NO: 1623116 - RNA, 19 nt, Artificial Sequence
  Description of Artificial Sequence: Synthetic oligonucleotide
cucggaguuagacguaaaa

SEQ ID NO: 1623117 - RNA, 19 nt, Artificial Sequence
  Description of Artificial Sequence: Synthetic oligonucleotide
ucucggaguuagacguaaa

SEQ ID NO: 1623118 - RNA, 19 nt, Artificial Sequence
  Description of Artificial Sequence: Synthetic oligonucleotide
ucuucucgauugccccugu

SEQ ID NO: 1623119 - RNA, 19 nt, Artificial Sequence
  Description of Artificial Sequence: Synthetic oligonucleotide
uaccaguuacucucauauu

SEQ ID NO: 1623120 - RNA, 19 nt, Artificial Sequence
  Description of Artificial Sequence: Synthetic oligonucleotide
cccucgacguguaaacgcc

SEQ ID NO: 1623121 - RNA, 19 nt, Artificial Sequence
  Description of Artificial Sequence: Synthetic oligonucleotide
cucgacguguaaacgccca

SEQ ID NO: 1623122 - RNA, 19 nt, Artificial Sequence
  Description of Artificial Sequence: Synthetic oligonucleotide
auacuguaccgcuccucau

SEQ ID NO: 1623123 - RNA, 19 nt, Artificial Sequence
  Description of Artificial Sequence: Synthetic oligonucleotide
gcuugccucccuuauucug

SEQ ID NO: 1623124 - RNA, 19 nt, Artificial Sequence
  Description of Artificial Sequence: Synthetic oligonucleotide
gacucauaccccagggaaa

SEQ ID NO: 1623125 - RNA, 19 nt, Artificial Sequence
  Description of Artificial Sequence: Synthetic oligonucleotide
gagggauguaugccacauc

SEQ ID NO: 1623126 - RNA, 19 nt, Artificial Sequence
  Description of Artificial Sequence: Synthetic oligonucleotide
gccucacagaccuuaguuc

SEQ ID NO: 1623127 - RNA, 19 nt, Artificial Sequence
  Description of Artificial Sequence: Synthetic oligonucleotide
ucaucguugguggcauaaa

SEQ ID NO: 1623128 - RNA, 19 nt, Artificial Sequence
  Description of Artificial Sequence: Synthetic oligonucleotide
ccacgagagggauguaugc

SEQ ID NO: 1623129 - RNA, 19 nt, Artificial Sequence
  Description of Artificial Sequence: Synthetic oligonucleotide
auggacuaacacaaaugua

SEQ ID NO: 1623130 - RNA, 19 nt, Artificial Sequence
  Description of Artificial Sequence: Synthetic oligonucleotide
uggccucgaacagcuuccg

SEQ ID NO: 1623131 - RNA, 19 nt, Artificial Sequence
  Description of Artificial Sequence: Synthetic oligonucleotide
cccauacuagacucauacc

SEQ ID NO: 1623132 - RNA, 19 nt, Artificial Sequence
  Description of Artificial Sequence: Synthetic oligonucleotide
ucuagugcucucggaguua

SEQ ID NO: 1623133 - RNA, 19 nt, Artificial Sequence
  Description of Artificial Sequence: Synthetic oligonucleotide
guauggacauacaaggcuu

SEQ ID NO: 1623134 - RNA, 19 nt, Artificial Sequence
  Description of Artificial Sequence: Synthetic oligonucleotide
aacgggguguacaguuaga

SEQ ID NO: 1623135 - RNA, 19 nt, Artificial Sequence
  Description of Artificial Sequence: Synthetic oligonucleotide
aggcaacacauugucugga

SEQ ID NO: 1623136 - RNA, 19 nt, Artificial Sequence
  Description of Artificial Sequence: Synthetic oligonucleotide
cguguaaacgcccauacua

SEQ ID NO: 1623137 - RNA, 19 nt, Artificial Sequence
  Description of Artificial Sequence: Synthetic oligonucleotide
acacugauaugaauaucuu

SEQ ID NO: 1623138 - RNA, 19 nt, Artificial Sequence
  Description of Artificial Sequence: Synthetic oligonucleotide
ggggcaagaggaaagucuc

SEQ ID NO: 1623139 - RNA, 19 nt, Artificial Sequence
  Description of Artificial Sequence: Synthetic oligonucleotide
cagcggcuuggacagugag

SEQ ID NO: 1623140 - RNA, 19 nt, Artificial Sequence
  Description of Artificial Sequence: Synthetic oligonucleotide
caaaaccguccuguaaaga

SEQ ID NO: 1623141 - RNA, 19 nt, Artificial Sequence
  Description of Artificial Sequence: Synthetic oligonucleotide
caguguauaccugaaugcu

SEQ ID NO: 1623142 - RNA, 19 nt, Artificial Sequence
  Description of Artificial Sequence: Synthetic oligonucleotide
auguaaguauauaccuguu

SEQ ID NO: 1623143 - RNA, 19 nt, Artificial Sequence
  Description of Artificial Sequence: Synthetic oligonucleotide
gccucgaacagcuuccgaa

SEQ ID NO: 1623144 - RNA, 19 nt, Artificial Sequence
  Description of Artificial Sequence: Synthetic oligonucleotide
aggacccucgacguguaaa

SEQ ID NO: 1623145 - RNA, 19 nt, Artificial Sequence
  Description of Artificial Sequence: Synthetic oligonucleotide
cacugauaugaauaucuuu

SEQ ID NO: 1623146 - RNA, 19 nt, Artificial Sequence
  Description of Artificial Sequence: Synthetic oligonucleotide
gagccaauccaaggugcca

SEQ ID NO: 1623147 - RNA, 19 nt, Artificial Sequence
  Description of Artificial Sequence: Synthetic oligonucleotide
gugugacugcgaacaacug

SEQ ID NO: 1623148 - RNA, 19 nt, Artificial Sequence
  Description of Artificial Sequence: Synthetic oligonucleotide
ucggggcaagaggaaaguc

SEQ ID NO: 1623149 - RNA, 19 nt, Artificial Sequence
  Description of Artificial Sequence: Synthetic oligonucleotide
auaucccaagggaggguca

SEQ ID NO: 1623150 - RNA, 19 nt, Artificial Sequence
  Description of Artificial Sequence: Synthetic oligonucleotide
cagcaagugugacugcgaa

SEQ ID NO: 1623151 - RNA, 19 nt, Artificial Sequence
  Description of Artificial Sequence: Synthetic oligonucleotide
cuuuccgaacuaguuggaa

SEQ ID NO: 1623152 - RNA, 19 nt, Artificial Sequence
  Description of Artificial Sequence: Synthetic oligonucleotide
agucuucuauuggacccaa

SEQ ID NO: 1623153 - RNA, 19 nt, Artificial Sequence
  Description of Artificial Sequence: Synthetic oligonucleotide
uugagucauuuggcugaca

SEQ ID NO: 1623154 - RNA, 19 nt, Artificial Sequence
  Description of Artificial Sequence: Synthetic oligonucleotide
gcuuggauacuguaccgcu

SEQ ID NO: 1623155 - RNA, 19 nt, Artificial Sequence
  Description of Artificial Sequence: Synthetic oligonucleotide
gaccaggacuaggcaacac

SEQ ID NO: 1623156 - RNA, 19 nt, Artificial Sequence
  Description of Artificial Sequence: Synthetic oligonucleotide
acgcccauacuagacucau

SEQ ID NO: 1623157 - RNA, 19 nt, Artificial Sequence
  Description of Artificial Sequence: Synthetic oligonucleotide
ggguaaacucagcaagugu

SEQ ID NO: 1623158 - RNA, 19 nt, Artificial Sequence
  Description of Artificial Sequence: Synthetic oligonucleotide
ccucgacguguaaacgccc

SEQ ID NO: 1623159 - RNA, 19 nt, Artificial Sequence
  Description of Artificial Sequence: Synthetic oligonucleotide
ggaaucccaacaaaaccgu

SEQ ID NO: 1623160 - RNA, 19 nt, Artificial Sequence
  Description of Artificial Sequence: Synthetic oligonucleotide
ggcacagaggagcugcugu

SEQ ID NO: 1623161 - RNA, 19 nt, Artificial Sequence
  Description of Artificial Sequence: Synthetic oligonucleotide
ggccaacuacuucugccca

SEQ ID NO: 1623162 - RNA, 19 nt, Artificial Sequence
  Description of Artificial Sequence: Synthetic oligonucleotide
cauauucucugaggcagcu

SEQ ID NO: 1623163 - RNA, 19 nt, Artificial Sequence
  Description of Artificial Sequence: Synthetic oligonucleotide
ccaguuacucucauauucu

SEQ ID NO: 1623164 - RNA, 19 nt, Artificial Sequence
  Description of Artificial Sequence: Synthetic oligonucleotide
ccaacuacuucugcccaug

SEQ ID NO: 1623165 - RNA, 19 nt, Artificial Sequence
  Description of Artificial Sequence: Synthetic oligonucleotide
gcggcuuggacagugaggu

SEQ ID NO: 1623166 - RNA, 19 nt, Artificial Sequence
  Description of Artificial Sequence: Synthetic oligonucleotide
cucucggaguuagacguaa

SEQ ID NO: 1623167 - RNA, 19 nt, Artificial Sequence
  Description of Artificial Sequence: Synthetic oligonucleotide
ugguggcauaaagcaguuc

SEQ ID NO: 1623168 - RNA, 19 nt, Artificial Sequence
  Description of Artificial Sequence: Synthetic oligonucleotide
augccacaucuucucgauu

SEQ ID NO: 1623169 - RNA, 19 nt, Artificial Sequence
  Description of Artificial Sequence: Synthetic oligonucleotide
caagggagggucagcggcu

SEQ ID NO: 1623170 - RNA, 19 nt, Artificial Sequence
  Description of Artificial Sequence: Synthetic oligonucleotide
ugccucccuuauucuggaa

SEQ ID NO: 1623171 - RNA, 19 nt, Artificial Sequence
  Description of Artificial Sequence: Synthetic oligonucleotide
gaccuccauucuucgggua

SEQ ID NO: 1623172 - RNA, 19 nt, Artificial Sequence
  Description of Artificial Sequence: Synthetic oligonucleotide
ccuuauucuggaacggggu

SEQ ID NO: 1623173 - RNA, 19 nt, Artificial Sequence
  Description of Artificial Sequence: Synthetic oligonucleotide
ccgaugugcaccaggagcu

SEQ ID NO: 1623174 - RNA, 19 nt, Artificial Sequence
  Description of Artificial Sequence: Synthetic oligonucleotide
caggguaagccaccauugu

SEQ ID NO: 1623175 - RNA, 19 nt, Artificial Sequence
  Description of Artificial Sequence: Synthetic oligonucleotide
cucuagugcucucggaguu

SEQ ID NO: 1623176 - RNA, 19 nt, Artificial Sequence
  Description of Artificial Sequence: Synthetic oligonucleotide
ccaugagagauuggcccac

SEQ ID NO: 1623177 - RNA, 19 nt, Artificial Sequence
  Description of Artificial Sequence: Synthetic oligonucleotide
ccaguacaccugauuucuc

SEQ ID NO: 1623178 - RNA, 19 nt, Artificial Sequence
  Description of Artificial Sequence: Synthetic oligonucleotide
gccaauccaaggugccaga

SEQ ID NO: 1623179 - RNA, 19 nt, Artificial Sequence
  Description of Artificial Sequence: Synthetic oligonucleotide
cggguaaacucagcaagug

SEQ ID NO: 1623180 - RNA, 19 nt, Artificial Sequence
  Description of Artificial Sequence: Synthetic oligonucleotide
ccaggacuaggcaacacau

SEQ ID NO: 1623181 - RNA, 19 nt, Artificial Sequence
  Description of Artificial Sequence: Synthetic oligonucleotide
ggcagccucggggcaagag

SEQ ID NO: 1623182 - RNA, 19 nt, Artificial Sequence
  Description of Artificial Sequence: Synthetic oligonucleotide
cucgaacagcuuccgaauu

SEQ ID NO: 1623183 - RNA, 19 nt, Artificial Sequence
  Description of Artificial Sequence: Synthetic oligonucleotide
ggacuaggcaacacauugu

SEQ ID NO: 1623184 - RNA, 19 nt, Artificial Sequence
  Description of Artificial Sequence: Synthetic oligonucleotide
caacuacuucugcccaugu

SEQ ID NO: 1623185 - RNA, 19 nt, Artificial Sequence
  Description of Artificial Sequence: Synthetic oligonucleotide
gcuuuccgaacuaguugga

SEQ ID NO: 1623186 - RNA, 19 nt, Artificial Sequence
  Description of Artificial Sequence: Synthetic oligonucleotide
cuccacgagagggauguau

SEQ ID NO: 1623187 - RNA, 19 nt, Artificial Sequence
  Description of Artificial Sequence: Synthetic oligonucleotide
cucggggcaagaggaaagu

SEQ ID NO: 1623188 - RNA, 19 nt, Artificial Sequence
  Description of Artificial Sequence: Synthetic oligonucleotide
caucaucguugguggcaua

SEQ ID NO: 1623189 - RNA, 19 nt, Artificial Sequence
  Description of Artificial Sequence: Synthetic oligonucleotide
agccaccauuguagacucu

SEQ ID NO: 1623190 - RNA, 19 nt, Artificial Sequence
  Description of Artificial Sequence: Synthetic oligonucleotide
ggagggucagcggcuugga

SEQ ID NO: 1623191 - RNA, 19 nt, Artificial Sequence
  Description of Artificial Sequence: Synthetic oligonucleotide
ggauaucccaagggagggu

SEQ ID NO: 1623192 - RNA, 19 nt, Artificial Sequence
  Description of Artificial Sequence: Synthetic oligonucleotide
gugggugagcuuggauacu

SEQ ID NO: 1623193 - RNA, 19 nt, Artificial Sequence
  Description of Artificial Sequence: Synthetic oligonucleotide
gcacagaggagcugcuguu

SEQ ID NO: 1623194 - RNA, 19 nt, Artificial Sequence
  Description of Artificial Sequence: Synthetic oligonucleotide
cuggaacgggguguacagu

SEQ ID NO: 1623195 - RNA, 19 nt, Artificial Sequence
  Description of Artificial Sequence: Synthetic oligonucleotide
gccucggggcaagaggaaa

SEQ ID NO: 1623196 - RNA, 19 nt, Artificial Sequence
  Description of Artificial Sequence: Synthetic oligonucleotide
caggacccucgacguguaa

SEQ ID NO: 1623197 - RNA, 19 nt, Artificial Sequence
  Description of Artificial Sequence: Synthetic oligonucleotide
acuccacgagagggaugua

SEQ ID NO: 1623198 - RNA, 19 nt, Artificial Sequence
  Description of Artificial Sequence: Synthetic oligonucleotide
gcucucggaguuagacgua

SEQ ID NO: 1623199 - RNA, 19 nt, Artificial Sequence
  Description of Artificial Sequence: Synthetic oligonucleotide
ccgaacuaguuggaacagu

SEQ ID NO: 1623200 - RNA, 19 nt, Artificial Sequence
  Description of Artificial Sequence: Synthetic oligonucleotide
ggggcuugccucccuuauu

SEQ ID NO: 1623201 - RNA, 19 nt, Artificial Sequence
  Description of Artificial Sequence: Synthetic oligonucleotide
ccaggacccucgacgugua

SEQ ID NO: 1623202 - RNA, 19 nt, Artificial Sequence
  Description of Artificial Sequence: Synthetic oligonucleotide
ccauuacuguauggacaua

SEQ ID NO: 1623203 - RNA, 19 nt, Artificial Sequence
  Description of Artificial Sequence: Synthetic oligonucleotide
cgcccauacuagacucaua

SEQ ID NO: 1623204 - RNA, 19 nt, Artificial Sequence
  Description of Artificial Sequence: Synthetic oligonucleotide
agaaccacaagcuuggccg

SEQ ID NO: 1623205 - RNA, 19 nt, Artificial Sequence
  Description of Artificial Sequence: Synthetic oligonucleotide
cagaugaacagacagauag

SEQ ID NO: 1623206 - RNA, 19 nt, Artificial Sequence
  Description of Artificial Sequence: Synthetic oligonucleotide
aaugcguccccaaacacgc

SEQ ID NO: 1623207 - RNA, 19 nt, Artificial Sequence
  Description of Artificial Sequence: Synthetic oligonucleotide
uggacagaugaacagacag

SEQ ID NO: 1623208 - RNA, 19 nt, Artificial Sequence
  Description of Artificial Sequence: Synthetic oligonucleotide
ugucaauccccauuggcgg

SEQ ID NO: 1623209 - RNA, 19 nt, Artificial Sequence
  Description of Artificial Sequence: Synthetic oligonucleotide
auagaaugcguccccaaac

SEQ ID NO: 1623210 - RNA, 19 nt, Artificial Sequence
  Description of Artificial Sequence: Synthetic oligonucleotide
augaaguccguccaggguc

SEQ ID NO: 1623211 - RNA, 19 nt, Artificial Sequence
  Description of Artificial Sequence: Synthetic oligonucleotide
uguguuguggggaacuucc

SEQ ID NO: 1623212 - RNA, 19 nt, Artificial Sequence
  Description of Artificial Sequence: Synthetic oligonucleotide
caacauaugaaguccgucc

SEQ ID NO: 1623213 - RNA, 19 nt, Artificial Sequence
  Description of Artificial Sequence: Synthetic oligonucleotide
aacauaugaaguccgucca

SEQ ID NO: 1623214 - RNA, 19 nt, Artificial Sequence
  Description of Artificial Sequence: Synthetic oligonucleotide
aggaggacggaacauugcc

SEQ ID NO: 1623215 - RNA, 19 nt, Artificial Sequence
  Description of Artificial Sequence: Synthetic oligonucleotide
aguguucauacccugacca

SEQ ID NO: 1623216 - RNA, 19 nt, Artificial Sequence
  Description of Artificial Sequence: Synthetic oligonucleotide
agcauugcaagcucagaac

SEQ ID NO: 1623217 - RNA, 19 nt, Artificial Sequence
  Description of Artificial Sequence: Synthetic oligonucleotide
ggucauucaacauaugaag

SEQ ID NO: 1623218 - RNA, 19 nt, Artificial Sequence
  Description of Artificial Sequence: Synthetic oligonucleotide
aaacacgcugcccagggug

SEQ ID NO: 1623219 - RNA, 19 nt, Artificial Sequence
  Description of Artificial Sequence: Synthetic oligonucleotide
uggccguuggcaaaggagg

SEQ ID NO: 1623220 - RNA, 19 nt, Artificial Sequence
  Description of Artificial Sequence: Synthetic oligonucleotide
ugauauuggggauuccgcc

SEQ ID NO: 1623221 - RNA, 19 nt, Artificial Sequence
  Description of Artificial Sequence: Synthetic oligonucleotide
cuugagccaggcaucaugg

SEQ ID NO: 1623222 - RNA, 19 nt, Artificial Sequence
  Description of Artificial Sequence: Synthetic oligonucleotide
ugccguuaggaacugacca

SEQ ID NO: 1623223 - RNA, 19 nt, Artificial Sequence
  Description of Artificial Sequence: Synthetic oligonucleotide
guuguggggaacuuccagg

SEQ ID NO: 1623224 - RNA, 19 nt, Artificial Sequence
  Description of Artificial Sequence: Synthetic oligonucleotide
ugaacaaccgggguagcgg

SEQ ID NO: 1623225 - RNA, 19 nt, Artificial Sequence
  Description of Artificial Sequence: Synthetic oligonucleotide
ucagggucauucaacauau

SEQ ID NO: 1623226 - RNA, 19 nt, Artificial Sequence
  Description of Artificial Sequence: Synthetic oligonucleotide
uaggaacugaccagcggcg

SEQ ID NO: 1623227 - RNA, 19 nt, Artificial Sequence
  Description of Artificial Sequence: Synthetic oligonucleotide
uagaaugcguccccaaaca

SEQ ID NO: 1623228 - RNA, 19 nt, Artificial Sequence
  Description of Artificial Sequence: Synthetic oligonucleotide
ucgauaggcagccuggagu

SEQ ID NO: 1623229 - RNA, 19 nt, Artificial Sequence
  Description of Artificial Sequence: Synthetic oligonucleotide
ugaccagugcugcugacgc

SEQ ID NO: 1623230 - RNA, 19 nt, Artificial Sequence
  Description of Artificial Sequence: Synthetic oligonucleotide
cagauagccagccugguac

SEQ ID NO: 1623231 - RNA, 19 nt, Artificial Sequence
  Description of Artificial Sequence: Synthetic oligonucleotide
auugcaagcucagaaccac

SEQ ID NO: 1623232 - RNA, 19 nt, Artificial Sequence
  Description of Artificial Sequence: Synthetic oligonucleotide
cucacauccccagugaggg

SEQ ID NO: 1623233 - RNA, 19 nt, Artificial Sequence
  Description of Artificial Sequence: Synthetic oligonucleotide
ucacaggcgguccauucgg

SEQ ID NO: 1623234 - RNA, 19 nt, Artificial Sequence
  Description of Artificial Sequence: Synthetic oligonucleotide
agaaugcguccccaaacac

SEQ ID NO: 1623235 - RNA, 19 nt, Artificial Sequence
  Description of Artificial Sequence: Synthetic oligonucleotide
uuggccguuggcaaaggag

SEQ ID NO: 1623236 - RNA, 19 nt, Artificial Sequence
  Description of Artificial Sequence: Synthetic oligonucleotide
gaaugcguccccaaacacg

SEQ ID NO: 1623237 - RNA, 19 nt, Artificial Sequence
  Description of Artificial Sequence: Synthetic oligonucleotide
gugagcugcgucuuuagag

SEQ ID NO: 1623238 - RNA, 19 nt, Artificial Sequence
  Description of Artificial Sequence: Synthetic oligonucleotide
gugucaauccccauuggcg

SEQ ID NO: 1623239 - RNA, 19 nt, Artificial Sequence
  Description of Artificial Sequence: Synthetic oligonucleotide
agagggucaaucuucaguu

SEQ ID NO: 1623240 - RNA, 19 nt, Artificial Sequence
  Description of Artificial Sequence: Synthetic oligonucleotide
ugagcugcgucuuuagagu

SEQ ID NO: 1623241 - RNA, 19 nt, Artificial Sequence
  Description of Artificial Sequence: Synthetic oligonucleotide
ugcgguacugcagagccgg

SEQ ID NO: 1623242 - RNA, 19 nt, Artificial Sequence
  Description of Artificial Sequence: Synthetic oligonucleotide
uccccaaacacgcugccca

SEQ ID NO: 1623243 - RNA, 19 nt, Artificial Sequence
  Description of Artificial Sequence: Synthetic oligonucleotide
auucaacauaugaaguccg

SEQ ID NO: 1623244 - RNA, 19 nt, Artificial Sequence
  Description of Artificial Sequence: Synthetic oligonucleotide
ucugaugaggguucucaca

SEQ ID NO: 1623245 - RNA, 19 nt, Artificial Sequence
  Description of Artificial Sequence: Synthetic oligonucleotide
cauaugaaguccguccagg

SEQ ID NO: 1623246 - RNA, 19 nt, Artificial Sequence
  Description of Artificial Sequence: Synthetic oligonucleotide
uaugaaguccguccagggu

SEQ ID NO: 1623247 - RNA, 19 nt, Artificial Sequence
  Description of Artificial Sequence: Synthetic oligonucleotide
uugaguguagagccugggc

SEQ ID NO: 1623248 - RNA, 19 nt, Artificial Sequence
  Description of Artificial Sequence: Synthetic oligonucleotide
ugauuggagacuggagagg

SEQ ID NO: 1623249 - RNA, 19 nt, Artificial Sequence
  Description of Artificial Sequence: Synthetic oligonucleotide
caugggaggugaacaaccg

SEQ ID NO: 1623250 - RNA, 19 nt, Artificial Sequence
  Description of Artificial Sequence: Synthetic oligonucleotide
gaguguagagccugggcug

SEQ ID NO: 1623251 - RNA, 19 nt, Artificial Sequence
  Description of Artificial Sequence: Synthetic oligonucleotide
agcgcauuggccugccugg

SEQ ID NO: 1623252 - RNA, 19 nt, Artificial Sequence
  Description of Artificial Sequence: Synthetic oligonucleotide
ucuccaucauguugaacug

SEQ ID NO: 1623253 - RNA, 19 nt, Artificial Sequence
  Description of Artificial Sequence: Synthetic oligonucleotide
aggcgguccauucggaagg

SEQ ID NO: 1623254 - RNA, 19 nt, Artificial Sequence
  Description of Artificial Sequence: Synthetic oligonucleotide
uucaacauaugaaguccgu

SEQ ID NO: 1623255 - RNA, 19 nt, Artificial Sequence
  Description of Artificial Sequence: Synthetic oligonucleotide
caugggaaguccacggggc

SEQ ID NO: 1623256 - RNA, 19 nt, Artificial Sequence
  Description of Artificial Sequence: Synthetic oligonucleotide
uccgggucaaagcugacau

SEQ ID NO: 1623257 - RNA, 19 nt, Artificial Sequence
  Description of Artificial Sequence: Synthetic oligonucleotide
acauaugaaguccguccag

SEQ ID NO: 1623258 - RNA, 19 nt, Artificial Sequence
  Description of Artificial Sequence: Synthetic oligonucleotide
ugcaagcucagaaccacaa

SEQ ID NO: 1623259 - RNA, 19 nt, Artificial Sequence
  Description of Artificial Sequence: Synthetic oligonucleotide
cacucaggcccaucgauag

SEQ ID NO: 1623260 - RNA, 19 nt, Artificial Sequence
  Description of Artificial Sequence: Synthetic oligonucleotide
cugcucauagaaugcgucc

SEQ ID NO: 1623261 - RNA, 19 nt, Artificial Sequence
  Description of Artificial Sequence: Synthetic oligonucleotide
uguucauacccugaccagu

SEQ ID NO: 1623262 - RNA, 19 nt, Artificial Sequence
  Description of Artificial Sequence: Synthetic oligonucleotide
gaacaaccgggguagcggc

SEQ ID NO: 1623263 - RNA, 19 nt, Artificial Sequence
  Description of Artificial Sequence: Synthetic oligonucleotide
gcauugcaagcucagaacc

SEQ ID NO: 1623264 - RNA, 19 nt, Artificial Sequence
  Description of Artificial Sequence: Synthetic oligonucleotide
agugggaacuggugguccg

SEQ ID NO: 1623265 - RNA, 19 nt, Artificial Sequence
  Description of Artificial Sequence: Synthetic oligonucleotide
gaacuuccaggggagaagc

SEQ ID NO: 1623266 - RNA, 19 nt, Artificial Sequence
  Description of Artificial Sequence: Synthetic oligonucleotide
augggaggugaacaaccgg

SEQ ID NO: 1623267 - RNA, 19 nt, Artificial Sequence
  Description of Artificial Sequence: Synthetic oligonucleotide
aggugaacaaccgggguag

SEQ ID NO: 1623268 - RNA, 19 nt, Artificial Sequence
  Description of Artificial Sequence: Synthetic oligonucleotide
auauuggggauuccgccgu

SEQ ID NO: 1623269 - RNA, 19 nt, Artificial Sequence
  Description of Artificial Sequence: Synthetic oligonucleotide
acggaacauugccaucccc

SEQ ID NO: 1623270 - RNA, 19 nt, Artificial Sequence
  Description of Artificial Sequence: Synthetic oligonucleotide
gaguguucauacccugacc

SEQ ID NO: 1623271 - RNA, 19 nt, Artificial Sequence
  Description of Artificial Sequence: Synthetic oligonucleotide
ugcguccccaaacacgcug

SEQ ID NO: 1623272 - RNA, 19 nt, Artificial Sequence
  Description of Artificial Sequence: Synthetic oligonucleotide
ucaacauaugaaguccguc

SEQ ID NO: 1623273 - RNA, 19 nt, Artificial Sequence
  Description of Artificial Sequence: Synthetic oligonucleotide
ugguccgggucaaagcuga

SEQ ID NO: 1623274 - RNA, 19 nt, Artificial Sequence
  Description of Artificial Sequence: Synthetic oligonucleotide
uaguugaguguagagccug

SEQ ID NO: 1623275 - RNA, 19 nt, Artificial Sequence
  Description of Artificial Sequence: Synthetic oligonucleotide
aggguucucacauccccag

SEQ ID NO: 1623276 - RNA, 19 nt, Artificial Sequence
  Description of Artificial Sequence: Synthetic oligonucleotide
uggcaaaggaggacggaac

SEQ ID NO: 1623277 - RNA, 19 nt, Artificial Sequence
  Description of Artificial Sequence: Synthetic oligonucleotide
gcugggaguguucauaccc

SEQ ID NO: 1623278 - RNA, 19 nt, Artificial Sequence
  Description of Artificial Sequence: Synthetic oligonucleotide
gagccugggcuguacaggc

SEQ ID NO: 1623279 - RNA, 19 nt, Artificial Sequence
  Description of Artificial Sequence: Synthetic oligonucleotide
cucaggcccaucgauaggc

SEQ ID NO: 1623280 - RNA, 19 nt, Artificial Sequence
  Description of Artificial Sequence: Synthetic oligonucleotide
accgugaggaugauauugg

SEQ ID NO: 1623281 - RNA, 19 nt, Artificial Sequence
  Description of Artificial Sequence: Synthetic oligonucleotide
ugagucugcugccgccugg

SEQ ID NO: 1623282 - RNA, 19 nt, Artificial Sequence
  Description of Artificial Sequence: Synthetic oligonucleotide
uccagguggacagaugaac

SEQ ID NO: 1623283 - RNA, 19 nt, Artificial Sequence
  Description of Artificial Sequence: Synthetic oligonucleotide
cucacaggcgguccauucg

SEQ ID NO: 1623284 - RNA, 19 nt, Artificial Sequence
  Description of Artificial Sequence: Synthetic oligonucleotide
gugagagcggggaaggcgg

SEQ ID NO: 1623285 - RNA, 19 nt, Artificial Sequence
  Description of Artificial Sequence: Synthetic oligonucleotide
cagaaccacaagcuuggcc

SEQ ID NO: 1623286 - RNA, 19 nt, Artificial Sequence
  Description of Artificial Sequence: Synthetic oligonucleotide
acaagcuuggccguuggca

SEQ ID NO: 1623287 - RNA, 19 nt, Artificial Sequence
  Description of Artificial Sequence: Synthetic oligonucleotide
uucauacccugaccagugc

SEQ ID NO: 1623288 - RNA, 19 nt, Artificial Sequence
  Description of Artificial Sequence: Synthetic oligonucleotide
uugagccaggcaucauggg

SEQ ID NO: 1623289 - RNA, 19 nt, Artificial Sequence
  Description of Artificial Sequence: Synthetic oligonucleotide
uccgccguggccuguguag

SEQ ID NO: 1623290 - RNA, 19 nt, Artificial Sequence
  Description of Artificial Sequence: Synthetic oligonucleotide
cauggccacggccugagug

SEQ ID NO: 1623291 - RNA, 19 nt, Artificial Sequence
  Description of Artificial Sequence: Synthetic oligonucleotide
aucgauaggcagccuggag

SEQ ID NO: 1623292 - RNA, 19 nt, Artificial Sequence
  Description of Artificial Sequence: Synthetic oligonucleotide
caccgugaggaugauauug

SEQ ID NO: 1623293 - RNA, 19 nt, Artificial Sequence
  Description of Artificial Sequence: Synthetic oligonucleotide
cacauccccagugaggggc

SEQ ID NO: 1623294 - RNA, 19 nt, Artificial Sequence
  Description of Artificial Sequence: Synthetic oligonucleotide
uucugaugaggguucucac

SEQ ID NO: 1623295 - RNA, 19 nt, Artificial Sequence
  Description of Artificial Sequence: Synthetic oligonucleotide
guguucauacccugaccag

SEQ ID NO: 1623296 - RNA, 19 nt, Artificial Sequence
  Description of Artificial Sequence: Synthetic oligonucleotide
gguacugcagagccggugc

SEQ ID NO: 1623297 - RNA, 19 nt, Artificial Sequence
  Description of Artificial Sequence: Synthetic oligonucleotide
agacugguuggcuggugag

SEQ ID NO: 1623298 - RNA, 19 nt, Artificial Sequence
  Description of Artificial Sequence: Synthetic oligonucleotide
ggcauucuccaucauguug

SEQ ID NO: 1623299 - RNA, 19 nt, Artificial Sequence
  Description of Artificial Sequence: Synthetic oligonucleotide
ggugacucuccugucaccg

SEQ ID NO: 1623300 - RNA, 19 nt, Artificial Sequence
  Description of Artificial Sequence: Synthetic oligonucleotide
uggaguaguugaguguaga

SEQ ID NO: 1623301 - RNA, 19 nt, Artificial Sequence
  Description of Artificial Sequence: Synthetic oligonucleotide
ucauagaaugcguccccaa

SEQ ID NO: 1623302 - RNA, 19 nt, Artificial Sequence
  Description of Artificial Sequence: Synthetic oligonucleotide
cucccacucaggcccaucg

SEQ ID NO: 1623303 - RNA, 19 nt, Artificial Sequence
  Description of Artificial Sequence: Synthetic oligonucleotide
guggacguguguugugggg

SEQ ID NO: 1623304 - RNA, 19 nt, Artificial Sequence
  Description of Artificial Sequence: Synthetic oligonucleotide
uuggggauuccgccguggc

SEQ ID NO: 1623305 - RNA, 19 nt, Artificial Sequence
  Description of Artificial Sequence: Synthetic oligonucleotide
cauugcaagcucagaacca

SEQ ID NO: 1623306 - RNA, 19 nt, Artificial Sequence
  Description of Artificial Sequence: Synthetic oligonucleotide
uggacguguguugugggga

SEQ ID NO: 1623307 - RNA, 19 nt, Artificial Sequence
  Description of Artificial Sequence: Synthetic oligonucleotide
uggugguccgggucaaagc

SEQ ID NO: 1623308 - RNA, 19 nt, Artificial Sequence
  Description of Artificial Sequence: Synthetic oligonucleotide
guugaguguagagccuggg

SEQ ID NO: 1623309 - RNA, 19 nt, Artificial Sequence
  Description of Artificial Sequence: Synthetic oligonucleotide
gaggugaacaaccggggua

SEQ ID NO: 1623310 - RNA, 19 nt, Artificial Sequence
  Description of Artificial Sequence: Synthetic oligonucleotide
gagacugguuggcugguga

SEQ ID NO: 1623311 - RNA, 19 nt, Artificial Sequence
  Description of Artificial Sequence: Synthetic oligonucleotide
gugaacaaccgggguagcg

SEQ ID NO: 1623312 - RNA, 19 nt, Artificial Sequence
  Description of Artificial Sequence: Synthetic oligonucleotide
guucugaugaggguucuca

SEQ ID NO: 1623313 - RNA, 19 nt, Artificial Sequence
  Description of Artificial Sequence: Synthetic oligonucleotide
gacggaacauugccauccc

SEQ ID NO: 1623314 - RNA, 19 nt, Artificial Sequence
  Description of Artificial Sequence: Synthetic oligonucleotide
gucuuuagaguaggcuggg

SEQ ID NO: 1623315 - RNA, 19 nt, Artificial Sequence
  Description of Artificial Sequence: Synthetic oligonucleotide
uggggauuccgccguggcc

SEQ ID NO: 1623316 - RNA, 19 nt, Artificial Sequence
  Description of Artificial Sequence: Synthetic oligonucleotide
gucaauccccauuggcggc

SEQ ID NO: 1623317 - RNA, 19 nt, Artificial Sequence
  Description of Artificial Sequence: Synthetic oligonucleotide
ggacggaacauugccaucc

SEQ ID NO: 1623318 - RNA, 19 nt, Artificial Sequence
  Description of Artificial Sequence: Synthetic oligonucleotide
aauccccauuggcggcugg

SEQ ID NO: 1623319 - RNA, 19 nt, Artificial Sequence
  Description of Artificial Sequence: Synthetic oligonucleotide
uacugcagagccggugccg

SEQ ID NO: 1623320 - RNA, 19 nt, Artificial Sequence
  Description of Artificial Sequence: Synthetic oligonucleotide
gagaagccuugauuggaga

SEQ ID NO: 1623321 - RNA, 19 nt, Artificial Sequence
  Description of Artificial Sequence: Synthetic oligonucleotide
gcugaccccagccagugag

SEQ ID NO: 1623322 - RNA, 19 nt, Artificial Sequence
  Description of Artificial Sequence: Synthetic oligonucleotide
cugcugcucauagaaugcg

SEQ ID NO: 1623323 - RNA, 19 nt, Artificial Sequence
  Description of Artificial Sequence: Synthetic oligonucleotide
cgucuuuagaguaggcugg

SEQ ID NO: 1623324 - RNA, 19 nt, Artificial Sequence
  Description of Artificial Sequence: Synthetic oligonucleotide
gcugaugacugcuggccgg

SEQ ID NO: 1623325 - RNA, 19 nt, Artificial Sequence
  Description of Artificial Sequence: Synthetic oligonucleotide
ggaguguucauacccugac

SEQ ID NO: 1623326 - RNA, 19 nt, Artificial Sequence
  Description of Artificial Sequence: Synthetic oligonucleotide
gagacugcgguggcugggg

SEQ ID NO: 1623327 - RNA, 19 nt, Artificial Sequence
  Description of Artificial Sequence: Synthetic oligonucleotide
acucaggcccaucgauagg

SEQ ID NO: 1623328 - RNA, 19 nt, Artificial Sequence
  Description of Artificial Sequence: Synthetic oligonucleotide
ucacauccccagugagggg

SEQ ID NO: 1623329 - RNA, 19 nt, Artificial Sequence
  Description of Artificial Sequence: Synthetic oligonucleotide
gauuggagacuggagaggu

SEQ ID NO: 1623330 - RNA, 19 nt, Artificial Sequence
  Description of Artificial Sequence: Synthetic oligonucleotide
uccauucggaagguguccu

SEQ ID NO: 1623331 - RNA, 19 nt, Artificial Sequence
  Description of Artificial Sequence: Synthetic oligonucleotide
ggggagaagccuugauugg

SEQ ID NO: 1623332 - RNA, 19 nt, Artificial Sequence
  Description of Artificial Sequence: Synthetic oligonucleotide
aguugaguguagagccugg

SEQ ID NO: 1623333 - RNA, 19 nt, Artificial Sequence
  Description of Artificial Sequence: Synthetic oligonucleotide
cagcacaguucugaugagg

SEQ ID NO: 1623334 - RNA, 19 nt, Artificial Sequence
  Description of Artificial Sequence: Synthetic oligonucleotide
uauuggggauuccgccgug

SEQ ID NO: 1623335 - RNA, 19 nt, Artificial Sequence
  Description of Artificial Sequence: Synthetic oligonucleotide
gcugacgccaagaugggcc

SEQ ID NO: 1623336 - RNA, 19 nt, Artificial Sequence
  Description of Artificial Sequence: Synthetic oligonucleotide
cuggaguaguugaguguag

SEQ ID NO: 1623337 - RNA, 19 nt, Artificial Sequence
  Description of Artificial Sequence: Synthetic oligonucleotide
aggcauggccacucacagg

SEQ ID NO: 1623338 - RNA, 19 nt, Artificial Sequence
  Description of Artificial Sequence: Synthetic oligonucleotide
aggaacugaccagcggcgg

SEQ ID NO: 1623339 - RNA, 19 nt, Artificial Sequence
  Description of Artificial Sequence: Synthetic oligonucleotide
ccaucgauaggcagccugg

SEQ ID NO: 1623340 - RNA, 19 nt, Artificial Sequence
  Description of Artificial Sequence: Synthetic oligonucleotide
ggaacugaccagcggcggg

SEQ ID NO: 1623341 - RNA, 19 nt, Artificial Sequence
  Description of Artificial Sequence: Synthetic oligonucleotide
gucauucaacauaugaagu

SEQ ID NO: 1623342 - RNA, 19 nt, Artificial Sequence
  Description of Artificial Sequence: Synthetic oligonucleotide
cagguuuggagcggugccg

SEQ ID NO: 1623343 - RNA, 19 nt, Artificial Sequence
  Description of Artificial Sequence: Synthetic oligonucleotide
ugucagggucauucaacau

SEQ ID NO: 1623344 - RNA, 19 nt, Artificial Sequence
  Description of Artificial Sequence: Synthetic oligonucleotide
gucaccgugaggaugauau

SEQ ID NO: 1623345 - RNA, 19 nt, Artificial Sequence
  Description of Artificial Sequence: Synthetic oligonucleotide
gaggacggaacauugccau

SEQ ID NO: 1623346 - RNA, 19 nt, Artificial Sequence
  Description of Artificial Sequence: Synthetic oligonucleotide
agcggugccguuaggaacu

SEQ ID NO: 1623347 - RNA, 19 nt, Artificial Sequence
  Description of Artificial Sequence: Synthetic oligonucleotide
gcggcucccacucaggccc

SEQ ID NO: 1623348 - RNA, 19 nt, Artificial Sequence
  Description of Artificial Sequence: Synthetic oligonucleotide
gccguuaggaacugaccag

SEQ ID NO: 1623349 - RNA, 19 nt, Artificial Sequence
  Description of Artificial Sequence: Synthetic oligonucleotide
cauagaaugcguccccaaa

SEQ ID NO: 1623350 - RNA, 19 nt, Artificial Sequence
  Description of Artificial Sequence: Synthetic oligonucleotide
ugaugaggguucucacauc

SEQ ID NO: 1623351 - RNA, 19 nt, Artificial Sequence
  Description of Artificial Sequence: Synthetic oligonucleotide
ucaauccccauuggcggcu

SEQ ID NO: 1623352 - RNA, 19 nt, Artificial Sequence
  Description of Artificial Sequence: Synthetic oligonucleotide
ccaaacacgcugcccaggg

SEQ ID NO: 1623353 - RNA, 19 nt, Artificial Sequence
  Description of Artificial Sequence: Synthetic oligonucleotide
gguggacguguguuguggg

SEQ ID NO: 1623354 - RNA, 19 nt, Artificial Sequence
  Description of Artificial Sequence: Synthetic oligonucleotide
cugcugacgccaagauggg

SEQ ID NO: 1623355 - RNA, 19 nt, Artificial Sequence
  Description of Artificial Sequence: Synthetic oligonucleotide
cagcgcauuggccugccug

SEQ ID NO: 1623356 - RNA, 19 nt, Artificial Sequence
  Description of Artificial Sequence: Synthetic oligonucleotide
uugccauccccagguuugg

SEQ ID NO: 1623357 - RNA, 19 nt, Artificial Sequence
  Description of Artificial Sequence: Synthetic oligonucleotide
gauaggcagccuggaguag

SEQ ID NO: 1623358 - RNA, 19 nt, Artificial Sequence
  Description of Artificial Sequence: Synthetic oligonucleotide
aguucugaugaggguucuc

SEQ ID NO: 1623359 - RNA, 19 nt, Artificial Sequence
  Description of Artificial Sequence: Synthetic oligonucleotide
uccagcggcgucgggagug

SEQ ID NO: 1623360 - RNA, 19 nt, Artificial Sequence
  Description of Artificial Sequence: Synthetic oligonucleotide
accagcggcgggugguagg

SEQ ID NO: 1623361 - RNA, 19 nt, Artificial Sequence
  Description of Artificial Sequence: Synthetic oligonucleotide
gcugcgucuuuagaguagg

SEQ ID NO: 1623362 - RNA, 19 nt, Artificial Sequence
  Description of Artificial Sequence: Synthetic oligonucleotide
ugaccccagccagugagcu

SEQ ID NO: 1623363 - RNA, 19 nt, Artificial Sequence
  Description of Artificial Sequence: Synthetic oligonucleotide
aguguagagccugggcugu

SEQ ID NO: 1623364 - RNA, 19 nt, Artificial Sequence
  Description of Artificial Sequence: Synthetic oligonucleotide
cgugcgguacugcagagcc

SEQ ID NO: 1623365 - RNA, 19 nt, Artificial Sequence
  Description of Artificial Sequence: Synthetic oligonucleotide
gccgagguggugucaaucc

SEQ ID NO: 1623366 - RNA, 19 nt, Artificial Sequence
  Description of Artificial Sequence: Synthetic oligonucleotide
uguagagccugggcuguac

SEQ ID NO: 1623367 - RNA, 19 nt, Artificial Sequence
  Description of Artificial Sequence: Synthetic oligonucleotide
aaccgggguagcggcuggc

SEQ ID NO: 1623368 - RNA, 19 nt, Artificial Sequence
  Description of Artificial Sequence: Synthetic oligonucleotide
cugaccccagccagugagc

SEQ ID NO: 1623369 - RNA, 19 nt, Artificial Sequence
  Description of Artificial Sequence: Synthetic oligonucleotide
guccauucggaaggugucc

SEQ ID NO: 1623370 - RNA, 19 nt, Artificial Sequence
  Description of Artificial Sequence: Synthetic oligonucleotide
acacaguggccuugagcca

SEQ ID NO: 1623371 - RNA, 19 nt, Artificial Sequence
  Description of Artificial Sequence: Synthetic oligonucleotide
cuggugguccgggucaaag

SEQ ID NO: 1623372 - RNA, 19 nt, Artificial Sequence
  Description of Artificial Sequence: Synthetic oligonucleotide
ucccacucaggcccaucga

SEQ ID NO: 1623373 - RNA, 19 nt, Artificial Sequence
  Description of Artificial Sequence: Synthetic oligonucleotide
gggucauucaacauaugaa

SEQ ID NO: 1623374 - RNA, 19 nt, Artificial Sequence
  Description of Artificial Sequence: Synthetic oligonucleotide
gggaggugaacaaccgggg

SEQ ID NO: 1623375 - RNA, 19 nt, Artificial Sequence
  Description of Artificial Sequence: Synthetic oligonucleotide
ugacaucgcugaccccagc

SEQ ID NO: 1623376 - RNA, 19 nt, Artificial Sequence
  Description of Artificial Sequence: Synthetic oligonucleotide
uggccggaguucucugcag

SEQ ID NO: 1623377 - RNA, 19 nt, Artificial Sequence
  Description of Artificial Sequence: Synthetic oligonucleotide
acaaccgggguagcggcug

SEQ ID NO: 1623378 - RNA, 19 nt, Artificial Sequence
  Description of Artificial Sequence: Synthetic oligonucleotide
ggugccguuaggaacugac

SEQ ID NO: 1623379 - RNA, 19 nt, Artificial Sequence
  Description of Artificial Sequence: Synthetic oligonucleotide
gguccagcggcgucgggag

SEQ ID NO: 1623380 - RNA, 19 nt, Artificial Sequence
  Description of Artificial Sequence: Synthetic oligonucleotide
agcugcgucuuuagaguag

SEQ ID NO: 1623381 - RNA, 19 nt, Artificial Sequence
  Description of Artificial Sequence: Synthetic oligonucleotide
gaggguucucacaucccca

SEQ ID NO: 1623382 - RNA, 19 nt, Artificial Sequence
  Description of Artificial Sequence: Synthetic oligonucleotide
ggcgggacagcgcauuggc

SEQ ID NO: 1623383 - RNA, 19 nt, Artificial Sequence
  Description of Artificial Sequence: Synthetic oligonucleotide
cugcgucuuuagaguaggc

SEQ ID NO: 1623384 - RNA, 19 nt, Artificial Sequence
  Description of Artificial Sequence: Synthetic oligonucleotide
ggguggacguguguugugg

SEQ ID NO: 1623385 - RNA, 19 nt, Artificial Sequence
  Description of Artificial Sequence: Synthetic oligonucleotide
ccuugagccaggcaucaug

SEQ ID NO: 1623386 - RNA, 19 nt, Artificial Sequence
  Description of Artificial Sequence: Synthetic oligonucleotide
ggccggaguucucugcagg

SEQ ID NO: 1623387 - RNA, 19 nt, Artificial Sequence
  Description of Artificial Sequence: Synthetic oligonucleotide
ucgcugaccccagccagug

SEQ ID NO: 1623388 - RNA, 19 nt, Artificial Sequence
  Description of Artificial Sequence: Synthetic oligonucleotide
cucgugcgguacugcagag

SEQ ID NO: 1623389 - RNA, 19 nt, Artificial Sequence
  Description of Artificial Sequence: Synthetic oligonucleotide
ugugaucagccuggcucca

SEQ ID NO: 1623390 - RNA, 19 nt, Artificial Sequence
  Description of Artificial Sequence: Synthetic oligonucleotide
gagcugcgucuuuagagua

SEQ ID NO: 1623391 - RNA, 19 nt, Artificial Sequence
  Description of Artificial Sequence: Synthetic oligonucleotide
gugccguuaggaacugacc

SEQ ID NO: 1623392 - RNA, 19 nt, Artificial Sequence
  Description of Artificial Sequence: Synthetic oligonucleotide
accacaagcuuggccguug

SEQ ID NO: 1623393 - RNA, 19 nt, Artificial Sequence
  Description of Artificial Sequence: Synthetic oligonucleotide
ugcugacgccaagaugggc

SEQ ID NO: 1623394 - RNA, 19 nt, Artificial Sequence
  Description of Artificial Sequence: Synthetic oligonucleotide
ucgugcgguacugcagagc

SEQ ID NO: 1623395 - RNA, 19 nt, Artificial Sequence
  Description of Artificial Sequence: Synthetic oligonucleotide
acggccugagugaugggug

SEQ ID NO: 1623396 - RNA, 19 nt, Artificial Sequence
  Description of Artificial Sequence: Synthetic oligonucleotide
agguuuggagcggugccgu

SEQ ID NO: 1623397 - RNA, 19 nt, Artificial Sequence
  Description of Artificial Sequence: Synthetic oligonucleotide
gugggaacuggugguccgg

SEQ ID NO: 1623398 - RNA, 19 nt, Artificial Sequence
  Description of Artificial Sequence: Synthetic oligonucleotide
auuggcggcuggccggagu

SEQ ID NO: 1623399 - RNA, 19 nt, Artificial Sequence
  Description of Artificial Sequence: Synthetic oligonucleotide
aacaaccgggguagcggcu

SEQ ID NO: 1623400 - RNA, 19 nt, Artificial Sequence
  Description of Artificial Sequence: Synthetic oligonucleotide
guagagccugggcuguaca

SEQ ID NO: 1623401 - RNA, 19 nt, Artificial Sequence
  Description of Artificial Sequence: Synthetic oligonucleotide
cguuaggaacugaccagcg

SEQ ID NO: 1623402 - RNA, 19 nt, Artificial Sequence
  Description of Artificial Sequence: Synthetic oligonucleotide
ggagggaaaauggguguug

SEQ ID NO: 1623403 - RNA, 19 nt, Artificial Sequence
  Description of Artificial Sequence: Synthetic oligonucleotide
gauuccgccguggccugug

SEQ ID NO: 1623404 - RNA, 19 nt, Artificial Sequence
  Description of Artificial Sequence: Synthetic oligonucleotide
ggacagaugaacagacaga

SEQ ID NO: 1623405 - RNA, 19 nt, Artificial Sequence
  Description of Artificial Sequence: Synthetic oligonucleotide
ugccgccuggucucugagc

SEQ ID NO: 1623406 - RNA, 19 nt, Artificial Sequence
  Description of Artificial Sequence: Synthetic oligonucleotide
cagggucagagggucaauc

SEQ ID NO: 1623407 - RNA, 19 nt, Artificial Sequence
  Description of Artificial Sequence: Synthetic oligonucleotide
ccguuaggaacugaccagc

SEQ ID NO: 1623408 - RNA, 19 nt, Artificial Sequence
  Description of Artificial Sequence: Synthetic oligonucleotide
ggugguccgggucaaagcu

SEQ ID NO: 1623409 - RNA, 19 nt, Artificial Sequence
  Description of Artificial Sequence: Synthetic oligonucleotide
ugccgagguggugucaauc

SEQ ID NO: 1623410 - RNA, 19 nt, Artificial Sequence
  Description of Artificial Sequence: Synthetic oligonucleotide
ggggugacucuccugucac

SEQ ID NO: 1623411 - RNA, 19 nt, Artificial Sequence
  Description of Artificial Sequence: Synthetic oligonucleotide
aggcguagggcagcuguug

SEQ ID NO: 1623412 - RNA, 19 nt, Artificial Sequence
  Description of Artificial Sequence: Synthetic oligonucleotide
uggcauucuccaucauguu

SEQ ID NO: 1623413 - RNA, 19 nt, Artificial Sequence
  Description of Artificial Sequence: Synthetic oligonucleotide
cgagguggugucaaucccc

SEQ ID NO: 1623414 - RNA, 19 nt, Artificial Sequence
  Description of Artificial Sequence: Synthetic oligonucleotide
ggcagcauugcaagcucag

SEQ ID NO: 1623415 - RNA, 19 nt, Artificial Sequence
  Description of Artificial Sequence: Synthetic oligonucleotide
gggacagcgcauuggccug

SEQ ID NO: 1623416 - RNA, 19 nt, Artificial Sequence
  Description of Artificial Sequence: Synthetic oligonucleotide
guccguccagggucagagg

SEQ ID NO: 1623417 - RNA, 19 nt, Artificial Sequence
  Description of Artificial Sequence: Synthetic oligonucleotide
ggcacucauggccucugug

SEQ ID NO: 1623418 - RNA, 19 nt, Artificial Sequence
  Description of Artificial Sequence: Synthetic oligonucleotide
agcggcgggugguaggcau

SEQ ID NO: 1623419 - RNA, 19 nt, Artificial Sequence
  Description of Artificial Sequence: Synthetic oligonucleotide
caaccgggguagcggcugg

SEQ ID NO: 1623420 - RNA, 19 nt, Artificial Sequence
  Description of Artificial Sequence: Synthetic oligonucleotide
cugagucugcugccgccug

SEQ ID NO: 1623421 - RNA, 19 nt, Artificial Sequence
  Description of Artificial Sequence: Synthetic oligonucleotide
auuggccugccuggcuguc

SEQ ID NO: 1623422 - RNA, 19 nt, Artificial Sequence
  Description of Artificial Sequence: Synthetic oligonucleotide
gugguccgggucaaagcug

SEQ ID NO: 1623423 - RNA, 19 nt, Artificial Sequence
  Description of Artificial Sequence: Synthetic oligonucleotide
gacucuccugucaccguga

SEQ ID NO: 1623424 - RNA, 19 nt, Artificial Sequence
  Description of Artificial Sequence: Synthetic oligonucleotide
cuggccggaguucucugca

SEQ ID NO: 1623425 - RNA, 19 nt, Artificial Sequence
  Description of Artificial Sequence: Synthetic oligonucleotide
ucaccgugaggaugauauu

SEQ ID NO: 1623426 - RNA, 19 nt, Artificial Sequence
  Description of Artificial Sequence: Synthetic oligonucleotide
cguuggcaaaggaggacgg

SEQ ID NO: 1623427 - RNA, 19 nt, Artificial Sequence
  Description of Artificial Sequence: Synthetic oligonucleotide
ugaugacugcuggccggug

SEQ ID NO: 1623428 - RNA, 19 nt, Artificial Sequence
  Description of Artificial Sequence: Synthetic oligonucleotide
gaucagccuggcuccaggu

SEQ ID NO: 1623429 - RNA, 19 nt, Artificial Sequence
  Description of Artificial Sequence: Synthetic oligonucleotide
gcucgugcgguacugcaga

SEQ ID NO: 1623430 - RNA, 19 nt, Artificial Sequence
  Description of Artificial Sequence: Synthetic oligonucleotide
cagggucauucaacauaug

SEQ ID NO: 1623431 - RNA, 19 nt, Artificial Sequence
  Description of Artificial Sequence: Synthetic oligonucleotide
guuggcaaaggaggacgga

SEQ ID NO: 1623432 - RNA, 19 nt, Artificial Sequence
  Description of Artificial Sequence: Synthetic oligonucleotide
cugguacacaguggccuug

SEQ ID NO: 1623433 - RNA, 19 nt, Artificial Sequence
  Description of Artificial Sequence: Synthetic oligonucleotide
ugcgcucgugcgguacugc

SEQ ID NO: 1623434 - RNA, 19 nt, Artificial Sequence
  Description of Artificial Sequence: Synthetic oligonucleotide
cugggaguguucauacccu

SEQ ID NO: 1623435 - RNA, 19 nt, Artificial Sequence
  Description of Artificial Sequence: Synthetic oligonucleotide
gagagcggggaaggcgggc

SEQ ID NO: 1623436 - RNA, 19 nt, Artificial Sequence
  Description of Artificial Sequence: Synthetic oligonucleotide
cuuggccguuggcaaagga

SEQ ID NO: 1623437 - RNA, 19 nt, Artificial Sequence
  Description of Artificial Sequence: Synthetic oligonucleotide
ggcaucaugggaggugaac

SEQ ID NO: 1623438 - RNA, 19 nt, Artificial Sequence
  Description of Artificial Sequence: Synthetic oligonucleotide
aaguccguccagggucaga

SEQ ID NO: 1623439 - RNA, 19 nt, Artificial Sequence
  Description of Artificial Sequence: Synthetic oligonucleotide
gacagcgcauuggccugcc

SEQ ID NO: 1623440 - RNA, 19 nt, Artificial Sequence
  Description of Artificial Sequence: Synthetic oligonucleotide
gaacugaccagcggcgggu

SEQ ID NO: 1623441 - RNA, 19 nt, Artificial Sequence
  Description of Artificial Sequence: Synthetic oligonucleotide
aaccacaagcuuggccguu

SEQ ID NO: 1623442 - RNA, 19 nt, Artificial Sequence
  Description of Artificial Sequence: Synthetic oligonucleotide
cacaguucugaugaggguu

SEQ ID NO: 1623443 - RNA, 19 nt, Artificial Sequence
  Description of Artificial Sequence: Synthetic oligonucleotide
cuggcgggacagcgcauug

SEQ ID NO: 1623444 - RNA, 19 nt, Artificial Sequence
  Description of Artificial Sequence: Synthetic oligonucleotide
ccgagguggugucaauccc

SEQ ID NO: 1623445 - RNA, 19 nt, Artificial Sequence
  Description of Artificial Sequence: Synthetic oligonucleotide
ggagcuggugagagcgggg

SEQ ID NO: 1623446 - RNA, 19 nt, Artificial Sequence
  Description of Artificial Sequence: Synthetic oligonucleotide
gaaguccguccagggucag

SEQ ID NO: 1623447 - RNA, 19 nt, Artificial Sequence
  Description of Artificial Sequence: Synthetic oligonucleotide
agcggcgucgggagugggg

SEQ ID NO: 1623448 - RNA, 19 nt, Artificial Sequence
  Description of Artificial Sequence: Synthetic oligonucleotide
aaggcguagggcagcuguu

SEQ ID NO: 1623449 - RNA, 19 nt, Artificial Sequence
  Description of Artificial Sequence: Synthetic oligonucleotide
agcgagcaugggaagucca

SEQ ID NO: 1623450 - RNA, 19 nt, Artificial Sequence
  Description of Artificial Sequence: Synthetic oligonucleotide
guaguugaguguagagccu

SEQ ID NO: 1623451 - RNA, 19 nt, Artificial Sequence
  Description of Artificial Sequence: Synthetic oligonucleotide
ggcgucgggaguggggagg

SEQ ID NO: 1623452 - RNA, 19 nt, Artificial Sequence
  Description of Artificial Sequence: Synthetic oligonucleotide
ccaggguggacguguguug

SEQ ID NO: 1623453 - RNA, 19 nt, Artificial Sequence
  Description of Artificial Sequence: Synthetic oligonucleotide
gggugacaccugcugaguc

SEQ ID NO: 1623454 - RNA, 19 nt, Artificial Sequence
  Description of Artificial Sequence: Synthetic oligonucleotide
cagccagugagcugcgucu

SEQ ID NO: 1623455 - RNA, 19 nt, Artificial Sequence
  Description of Artificial Sequence: Synthetic oligonucleotide
aucgcugaccccagccagu

SEQ ID NO: 1623456 - RNA, 19 nt, Artificial Sequence
  Description of Artificial Sequence: Synthetic oligonucleotide
aggcacucauggccucugu

SEQ ID NO: 1623457 - RNA, 19 nt, Artificial Sequence
  Description of Artificial Sequence: Synthetic oligonucleotide
cagggcguccauggccacg

SEQ ID NO: 1623458 - RNA, 19 nt, Artificial Sequence
  Description of Artificial Sequence: Synthetic oligonucleotide
guccgggucaaagcugaca

SEQ ID NO: 1623459 - RNA, 19 nt, Artificial Sequence
  Description of Artificial Sequence: Synthetic oligonucleotide
cgagcaugggaaguccacg

SEQ ID NO: 1623460 - RNA, 19 nt, Artificial Sequence
  Description of Artificial Sequence: Synthetic oligonucleotide
cugccgccuggucucugag

SEQ ID NO: 1623461 - RNA, 19 nt, Artificial Sequence
  Description of Artificial Sequence: Synthetic oligonucleotide
caucgauaggcagccugga

SEQ ID NO: 1623462 - RNA, 19 nt, Artificial Sequence
  Description of Artificial Sequence: Synthetic oligonucleotide
ccccauuggcggcuggccg

SEQ ID NO: 1623463 - RNA, 19 nt, Artificial Sequence
  Description of Artificial Sequence: Synthetic oligonucleotide
gggugacucuccugucacc

SEQ ID NO: 1623464 - RNA, 19 nt, Artificial Sequence
  Description of Artificial Sequence: Synthetic oligonucleotide
uuccgccguggccugugua

SEQ ID NO: 1623465 - RNA, 19 nt, Artificial Sequence
  Description of Artificial Sequence: Synthetic oligonucleotide
caaaggaggacggaacauu

SEQ ID NO: 1623466 - RNA, 19 nt, Artificial Sequence
  Description of Artificial Sequence: Synthetic oligonucleotide
cacucauggccucugugau

SEQ ID NO: 1623467 - RNA, 19 nt, Artificial Sequence
  Description of Artificial Sequence: Synthetic oligonucleotide
ugucaccgugaggaugaua

SEQ ID NO: 1623468 - RNA, 19 nt, Artificial Sequence
  Description of Artificial Sequence: Synthetic oligonucleotide
gagcggggaaggcgggcuc

SEQ ID NO: 1623469 - RNA, 19 nt, Artificial Sequence
  Description of Artificial Sequence: Synthetic oligonucleotide
guguuguggggaacuucca

SEQ ID NO: 1623470 - RNA, 19 nt, Artificial Sequence
  Description of Artificial Sequence: Synthetic oligonucleotide
ggacguguguuguggggaa

SEQ ID NO: 1623471 - RNA, 19 nt, Artificial Sequence
  Description of Artificial Sequence: Synthetic oligonucleotide
ggaggugaacaaccggggu

SEQ ID NO: 1623472 - RNA, 19 nt, Artificial Sequence
  Description of Artificial Sequence: Synthetic oligonucleotide
ccuggaguaguugagugua

SEQ ID NO: 1623473 - RNA, 19 nt, Artificial Sequence
  Description of Artificial Sequence: Synthetic oligonucleotide
ccaggcaucaugggaggug

SEQ ID NO: 1623474 - RNA, 19 nt, Artificial Sequence
  Description of Artificial Sequence: Synthetic oligonucleotide
gggaguguucauacccuga

SEQ ID NO: 1623475 - RNA, 19 nt, Artificial Sequence
  Description of Artificial Sequence: Synthetic oligonucleotide
gccgccuggucucugagcu

SEQ ID NO: 1623476 - RNA, 19 nt, Artificial Sequence
  Description of Artificial Sequence: Synthetic oligonucleotide
gccggaguucucugcagga

SEQ ID NO: 1623477 - RNA, 19 nt, Artificial Sequence
  Description of Artificial Sequence: Synthetic oligonucleotide
uggccacggccugagugau

SEQ ID NO: 1623478 - RNA, 19 nt, Artificial Sequence
  Description of Artificial Sequence: Synthetic oligonucleotide
acagcgcauuggccugccu

SEQ ID NO: 1623479 - RNA, 19 nt, Artificial Sequence
  Description of Artificial Sequence: Synthetic oligonucleotide
cguagggcagcuguuguuc

SEQ ID NO: 1623480 - RNA, 19 nt, Artificial Sequence
  Description of Artificial Sequence: Synthetic oligonucleotide
gggauuccgccguggccug

SEQ ID NO: 1623481 - RNA, 19 nt, Artificial Sequence
  Description of Artificial Sequence: Synthetic oligonucleotide
gcguccccaaacacgcugc

SEQ ID NO: 1623482 - RNA, 19 nt, Artificial Sequence
  Description of Artificial Sequence: Synthetic oligonucleotide
ggcugucaucugcugcuca

SEQ ID NO: 1623483 - RNA, 19 nt, Artificial Sequence
  Description of Artificial Sequence: Synthetic oligonucleotide
ggugaacaaccgggguagc

SEQ ID NO: 1623484 - RNA, 19 nt, Artificial Sequence
  Description of Artificial Sequence: Synthetic oligonucleotide
gcgagcaugggaaguccac

SEQ ID NO: 1623485 - RNA, 19 nt, Artificial Sequence
  Description of Artificial Sequence: Synthetic oligonucleotide
cugcgcucgugcgguacug

SEQ ID NO: 1623486 - RNA, 19 nt, Artificial Sequence
  Description of Artificial Sequence: Synthetic oligonucleotide
ccggaguucucugcaggag

SEQ ID NO: 1623487 - RNA, 19 nt, Artificial Sequence
  Description of Artificial Sequence: Synthetic oligonucleotide
agccagugagcugcgucuu

SEQ ID NO: 1623488 - RNA, 19 nt, Artificial Sequence
  Description of Artificial Sequence: Synthetic oligonucleotide
gcgucgggaguggggaggg

SEQ ID NO: 1623489 - RNA, 19 nt, Artificial Sequence
  Description of Artificial Sequence: Synthetic oligonucleotide
gccguuggcaaaggaggac

SEQ ID NO: 1623490 - RNA, 19 nt, Artificial Sequence
  Description of Artificial Sequence: Synthetic oligonucleotide
gccugguacacaguggccu

SEQ ID NO: 1623491 - RNA, 19 nt, Artificial Sequence
  Description of Artificial Sequence: Synthetic oligonucleotide
ggagacugguuggcuggug

SEQ ID NO: 1623492 - RNA, 19 nt, Artificial Sequence
  Description of Artificial Sequence: Synthetic oligonucleotide
ccagcggcgggugguaggc

SEQ ID NO: 1623493 - RNA, 19 nt, Artificial Sequence
  Description of Artificial Sequence: Synthetic oligonucleotide
cuccaucauguugaacugu

SEQ ID NO: 1623494 - RNA, 19 nt, Artificial Sequence
  Description of Artificial Sequence: Synthetic oligonucleotide
acacgcugcccagggugga

SEQ ID NO: 1623495 - RNA, 19 nt, Artificial Sequence
  Description of Artificial Sequence: Synthetic oligonucleotide
uggcugggucagcgaggac

SEQ ID NO: 1623496 - RNA, 19 nt, Artificial Sequence
  Description of Artificial Sequence: Synthetic oligonucleotide
gcuuggccguuggcaaagg

SEQ ID NO: 1623497 - RNA, 19 nt, Artificial Sequence
  Description of Artificial Sequence: Synthetic oligonucleotide
ugcgguggcuggggcgugu

SEQ ID NO: 1623498 - RNA, 19 nt, Artificial Sequence
  Description of Artificial Sequence: Synthetic oligonucleotide
cacggccugagugaugggu

SEQ ID NO: 1623499 - RNA, 19 nt, Artificial Sequence
  Description of Artificial Sequence: Synthetic oligonucleotide
cugucaucugcugcucaua

SEQ ID NO: 1623500 - RNA, 19 nt, Artificial Sequence
  Description of Artificial Sequence: Synthetic oligonucleotide
gccuggaguaguugagugu

SEQ ID NO: 1623501 - RNA, 19 nt, Artificial Sequence
  Description of Artificial Sequence: Synthetic oligonucleotide
ggccacucacaggcggucc

SEQ ID NO: 1623502 - RNA, 19 nt, Artificial Sequence
  Description of Artificial Sequence: Synthetic oligonucleotide
ggguccagcggcgucggga

SEQ ID NO: 1623503 - RNA, 19 nt, Artificial Sequence
  Description of Artificial Sequence: Synthetic oligonucleotide
ccuggucucugagcucagg

SEQ ID NO: 1623504 - RNA, 19 nt, Artificial Sequence
  Description of Artificial Sequence: Synthetic oligonucleotide
gggucagagggucaaucuu

SEQ ID NO: 1623505 - RNA, 19 nt, Artificial Sequence
  Description of Artificial Sequence: Synthetic oligonucleotide
caaacacgcugcccagggu

SEQ ID NO: 1623506 - RNA, 19 nt, Artificial Sequence
  Description of Artificial Sequence: Synthetic oligonucleotide
gcugucaucugcugcucau

SEQ ID NO: 1623507 - RNA, 19 nt, Artificial Sequence
  Description of Artificial Sequence: Synthetic oligonucleotide
cagagccggugccgaggug

SEQ ID NO: 1623508 - RNA, 19 nt, Artificial Sequence
  Description of Artificial Sequence: Synthetic oligonucleotide
cgcucgugcgguacugcag

SEQ ID NO: 1623509 - RNA, 19 nt, Artificial Sequence
  Description of Artificial Sequence: Synthetic oligonucleotide
ggcguagggcagcuguugu

SEQ ID NO: 1623510 - RNA, 19 nt, Artificial Sequence
  Description of Artificial Sequence: Synthetic oligonucleotide
ugcugccgccuggucucug

SEQ ID NO: 1623511 - RNA, 19 nt, Artificial Sequence
  Description of Artificial Sequence: Synthetic oligonucleotide
ccgggucaaagcugacauc

SEQ ID NO: 1623512 - RNA, 19 nt, Artificial Sequence
  Description of Artificial Sequence: Synthetic oligonucleotide
cugaugacugcuggccggu

SEQ ID NO: 1623513 - RNA, 19 nt, Artificial Sequence
  Description of Artificial Sequence: Synthetic oligonucleotide
gcgcucgugcgguacugca

SEQ ID NO: 1623514 - RNA, 19 nt, Artificial Sequence
  Description of Artificial Sequence: Synthetic oligonucleotide
gcugccgccuggucucuga

SEQ ID NO: 1623515 - RNA, 19 nt, Artificial Sequence
  Description of Artificial Sequence: Synthetic oligonucleotide
gcgggacagcgcauuggcc

SEQ ID NO: 1623516 - RNA, 19 nt, Artificial Sequence
  Description of Artificial Sequence: Synthetic oligonucleotide
ccggugcuguggagaagag

SEQ ID NO: 1623517 - RNA, 19 nt, Artificial Sequence
  Description of Artificial Sequence: Synthetic oligonucleotide
gggcagcauugcaagcuca

SEQ ID NO: 1623518 - RNA, 19 nt, Artificial Sequence
  Description of Artificial Sequence: Synthetic oligonucleotide
augcguccccaaacacgcu

SEQ ID NO: 1623519 - RNA, 19 nt, Artificial Sequence
  Description of Artificial Sequence: Synthetic oligonucleotide
gcggcgucgggagugggga

SEQ ID NO: 1623520 - RNA, 19 nt, Artificial Sequence
  Description of Artificial Sequence: Synthetic oligonucleotide
ccacucaggcccaucgaua

SEQ ID NO: 1623521 - RNA, 19 nt, Artificial Sequence
  Description of Artificial Sequence: Synthetic oligonucleotide
cugguuggcuggugagccu

SEQ ID NO: 1623522 - RNA, 19 nt, Artificial Sequence
  Description of Artificial Sequence: Synthetic oligonucleotide
acuggugguccgggucaaa

SEQ ID NO: 1623523 - RNA, 19 nt, Artificial Sequence
  Description of Artificial Sequence: Synthetic oligonucleotide
cguccccaaacacgcugcc

SEQ ID NO: 1623524 - RNA, 19 nt, Artificial Sequence
  Description of Artificial Sequence: Synthetic oligonucleotide
ggucagcgaggaccauguc

SEQ ID NO: 1623525 - RNA, 19 nt, Artificial Sequence
  Description of Artificial Sequence: Synthetic oligonucleotide
gcgcauuggccugccuggc

SEQ ID NO: 1623526 - RNA, 19 nt, Artificial Sequence
  Description of Artificial Sequence: Synthetic oligonucleotide
ccgccguggccuguguagc

SEQ ID NO: 1623527 - RNA, 19 nt, Artificial Sequence
  Description of Artificial Sequence: Synthetic oligonucleotide
ggugguaggcauggccacu

SEQ ID NO: 1623528 - RNA, 19 nt, Artificial Sequence
  Description of Artificial Sequence: Synthetic oligonucleotide
ccguggccuguguagcuga

SEQ ID NO: 1623529 - RNA, 19 nt, Artificial Sequence
  Description of Artificial Sequence: Synthetic oligonucleotide
gggguccagcggcgucggg

SEQ ID NO: 1623530 - RNA, 19 nt, Artificial Sequence
  Description of Artificial Sequence: Synthetic oligonucleotide
cgguacugcagagccggug

SEQ ID NO: 1623531 - RNA, 19 nt, Artificial Sequence
  Description of Artificial Sequence: Synthetic oligonucleotide
gcggcgggugguaggcaug

SEQ ID NO: 1623532 - RNA, 19 nt, Artificial Sequence
  Description of Artificial Sequence: Synthetic oligonucleotide
ccggugccgaggugguguc

SEQ ID NO: 1623533 - RNA, 19 nt, Artificial Sequence
  Description of Artificial Sequence: Synthetic oligonucleotide
gccugcgcucgugcgguac

SEQ ID NO: 1623534 - RNA, 19 nt, Artificial Sequence
  Description of Artificial Sequence: Synthetic oligonucleotide
cccacucaggcccaucgau

SEQ ID NO: 1623535 - RNA, 19 nt, Artificial Sequence
  Description of Artificial Sequence: Synthetic oligonucleotide
agccugcgcucgugcggua

SEQ ID NO: 1623536 - RNA, 19 nt, Artificial Sequence
  Description of Artificial Sequence: Synthetic oligonucleotide
ggcgggugguaggcauggc

SEQ ID NO: 1623537 - RNA, 19 nt, Artificial Sequence
  Description of Artificial Sequence: Synthetic oligonucleotide
gcggugccguuaggaacug

SEQ ID NO: 1623538 - RNA, 19 nt, Artificial Sequence
  Description of Artificial Sequence: Synthetic oligonucleotide
ccgccuggucucugagcuc

SEQ ID NO: 1623539 - RNA, 19 nt, Artificial Sequence
  Description of Artificial Sequence: Synthetic oligonucleotide
gcguagggcagcuguuguu

SEQ ID NO: 1623540 - RNA, 19 nt, Artificial Sequence
  Description of Artificial Sequence: Synthetic oligonucleotide
gcgguggcuggggcgugug

SEQ ID NO: 1623541 - RNA, 19 nt, Artificial Sequence
  Description of Artificial Sequence: Synthetic oligonucleotide
gugccgagguggugucaau

SEQ ID NO: 1623542 - RNA, 19 nt, Artificial Sequence
  Description of Artificial Sequence: Synthetic oligonucleotide
cagcggcgggugguaggca

SEQ ID NO: 1623543 - RNA, 19 nt, Artificial Sequence
  Description of Artificial Sequence: Synthetic oligonucleotide
ggcgguccauucggaaggu

SEQ ID NO: 1623544 - RNA, 19 nt, Artificial Sequence
  Description of Artificial Sequence: Synthetic oligonucleotide
cggcgucgggaguggggag

SEQ ID NO: 1623545 - RNA, 19 nt, Artificial Sequence
  Description of Artificial Sequence: Synthetic oligonucleotide
gcuggcgggacagcgcauu

SEQ ID NO: 1623546 - RNA, 19 nt, Artificial Sequence
  Description of Artificial Sequence: Synthetic oligonucleotide
cccaggguggacguguguu

SEQ ID NO: 1623547 - RNA, 19 nt, Artificial Sequence
  Description of Artificial Sequence: Synthetic oligonucleotide
ccugcgcucgugcgguacu

SEQ ID NO: 1623548 - RNA, 19 nt, Artificial Sequence
  Description of Artificial Sequence: Synthetic oligonucleotide
gcccaggguggacgugugu

SEQ ID NO: 1623549 - RNA, 19 nt, Artificial Sequence
  Description of Artificial Sequence: Synthetic oligonucleotide
ggauuccgccguggccugu

SEQ ID NO: 1623550 - RNA, 19 nt, Artificial Sequence
  Description of Artificial Sequence: Synthetic oligonucleotide
cgcugaccccagccaguga

SEQ ID NO: 1623551 - RNA, 19 nt, Artificial Sequence
  Description of Artificial Sequence: Synthetic oligonucleotide
ccacucacaggcgguccau

SEQ ID NO: 1623552 - RNA, 19 nt, Artificial Sequence
  Description of Artificial Sequence: Synthetic oligonucleotide
gcgguacugcagagccggu

SEQ ID NO: 1623553 - RNA, 19 nt, Artificial Sequence
  Description of Artificial Sequence: Synthetic oligonucleotide
ccacggggccaggcacuca

SEQ ID NO: 1623554 - RNA, 19 nt, Artificial Sequence
  Description of Artificial Sequence: Synthetic oligonucleotide
gcccaucgauaggcagccu

SEQ ID NO: 1623555 - RNA, 19 nt, Artificial Sequence
  Description of Artificial Sequence: Synthetic oligonucleotide
ccauggccacggccugagu

SEQ ID NO: 1623556 - RNA, 19 nt, Artificial Sequence
  Description of Artificial Sequence: Synthetic oligonucleotide
cggugccguuaggaacuga

SEQ ID NO: 1623557 - RNA, 19 nt, Artificial Sequence
  Description of Artificial Sequence: Synthetic oligonucleotide
cccagccagugagcugcgu

SEQ ID NO: 1623558 - RNA, 19 nt, Artificial Sequence
  Description of Artificial Sequence: Synthetic oligonucleotide
ugaaugaaaguaaauagag

SEQ ID NO: 1623559 - RNA, 19 nt, Artificial Sequence
  Description of Artificial Sequence: Synthetic oligonucleotide
ucugaaaucagacaccuag

SEQ ID NO: 1623560 - RNA, 19 nt, Artificial Sequence
  Description of Artificial Sequence: Synthetic oligonucleotide
uuauaaauccuacugacca

SEQ ID NO: 1623561 - RNA, 19 nt, Artificial Sequence
  Description of Artificial Sequence: Synthetic oligonucleotide
aauggacaacuuuuaaugc

SEQ ID NO: 1623562 - RNA, 19 nt, Artificial Sequence
  Description of Artificial Sequence: Synthetic oligonucleotide
agacuuauuacccagggac

SEQ ID NO: 1623563 - RNA, 19 nt, Artificial Sequence
  Description of Artificial Sequence: Synthetic oligonucleotide
aaugaaaggauguauaaaa

SEQ ID NO: 1623564 - RNA, 19 nt, Artificial Sequence
  Description of Artificial Sequence: Synthetic oligonucleotide
ucagcuauacauauaagag

SEQ ID NO: 1623565 - RNA, 19 nt, Artificial Sequence
  Description of Artificial Sequence: Synthetic oligonucleotide
auagcuaugcacuaucccc

SEQ ID NO: 1623566 - RNA, 19 nt, Artificial Sequence
  Description of Artificial Sequence: Synthetic oligonucleotide
agcuuuaucucuaagaagc

SEQ ID NO: 1623567 - RNA, 19 nt, Artificial Sequence
  Description of Artificial Sequence: Synthetic oligonucleotide
uuuauaugcacaaagccgu

SEQ ID NO: 1623568 - RNA, 19 nt, Artificial Sequence
  Description of Artificial Sequence: Synthetic oligonucleotide
uauacucuuaauuauuucc

SEQ ID NO: 1623569 - RNA, 19 nt, Artificial Sequence
  Description of Artificial Sequence: Synthetic oligonucleotide
uguuuauucaaugaaagga

SEQ ID NO: 1623570 - RNA, 19 nt, Artificial Sequence
  Description of Artificial Sequence: Synthetic oligonucleotide
acuuuuaaugcuguuaggc

SEQ ID NO: 1623571 - RNA, 19 nt, Artificial Sequence
  Description of Artificial Sequence: Synthetic oligonucleotide
agucuaguaauacaguuuc

SEQ ID NO: 1623572 - RNA, 19 nt, Artificial Sequence
  Description of Artificial Sequence: Synthetic oligonucleotide
uauucaguuucuaacauac

SEQ ID NO: 1623573 - RNA, 19 nt, Artificial Sequence
  Description of Artificial Sequence: Synthetic oligonucleotide
aauccuacugaccauuauc

SEQ ID NO: 1623574 - RNA, 19 nt, Artificial Sequence
  Description of Artificial Sequence: Synthetic oligonucleotide
acacucugaaaucagacac

SEQ ID NO: 1623575 - RNA, 19 nt, Artificial Sequence
  Description of Artificial Sequence: Synthetic oligonucleotide
aaucugagaacucagcuau

SEQ ID NO: 1623576 - RNA, 19 nt, Artificial Sequence
  Description of Artificial Sequence: Synthetic oligonucleotide
agcuauacauauaagaggg

SEQ ID NO: 1623577 - RNA, 19 nt, Artificial Sequence
  Description of Artificial Sequence: Synthetic oligonucleotide
aaugcuguuaggccagugg

SEQ ID NO: 1623578 - RNA, 19 nt, Artificial Sequence
  Description of Artificial Sequence: Synthetic oligonucleotide
aaggauacacucugaaauc

SEQ ID NO: 1623579 - RNA, 19 nt, Artificial Sequence
  Description of Artificial Sequence: Synthetic oligonucleotide
agcuuaccaaauuauauuc

SEQ ID NO: 1623580 - RNA, 19 nt, Artificial Sequence
  Description of Artificial Sequence: Synthetic oligonucleotide
ugaaagacauucuauagaa

SEQ ID NO: 1623581 - RNA, 19 nt, Artificial Sequence
  Description of Artificial Sequence: Synthetic oligonucleotide
uuuuaaugcuguuaggcca

SEQ ID NO: 1623582 - RNA, 19 nt, Artificial Sequence
  Description of Artificial Sequence: Synthetic oligonucleotide
aauuauuuccaaguuaggu

SEQ ID NO: 1623583 - RNA, 19 nt, Artificial Sequence
  Description of Artificial Sequence: Synthetic oligonucleotide
uuuauucaaugaaaggaug

SEQ ID NO: 1623584 - RNA, 19 nt, Artificial Sequence
  Description of Artificial Sequence: Synthetic oligonucleotide
cuuuauaaauccuacugac

SEQ ID NO: 1623585 - RNA, 19 nt, Artificial Sequence
  Description of Artificial Sequence: Synthetic oligonucleotide
aacucagcuauacauauaa

SEQ ID NO: 1623586 - RNA, 19 nt, Artificial Sequence
  Description of Artificial Sequence: Synthetic oligonucleotide
uuauccauccaauaucccc

SEQ ID NO: 1623587 - RNA, 19 nt, Artificial Sequence
  Description of Artificial Sequence: Synthetic oligonucleotide
uuauucaaugaaaggaugu

SEQ ID NO: 1623588 - RNA, 19 nt, Artificial Sequence
  Description of Artificial Sequence: Synthetic oligonucleotide
uacgguauagcuaugcacu

SEQ ID NO: 1623589 - RNA, 19 nt, Artificial Sequence
  Description of Artificial Sequence: Synthetic oligonucleotide
uugaaagacauucuauaga

SEQ ID NO: 1623590 - RNA, 19 nt, Artificial Sequence
  Description of Artificial Sequence: Synthetic oligonucleotide
augaaaguaaauagagucc

SEQ ID NO: 1623591 - RNA, 19 nt, Artificial Sequence
  Description of Artificial Sequence: Synthetic oligonucleotide
uuuaaugcuguuaggccag

SEQ ID NO: 1623592 - RNA, 19 nt, Artificial Sequence
  Description of Artificial Sequence: Synthetic oligonucleotide
acaaguaacauucagucua

SEQ ID NO: 1623593 - RNA, 19 nt, Artificial Sequence
  Description of Artificial Sequence: Synthetic oligonucleotide
uuagcuuaccaaauuauau

SEQ ID NO: 1623594 - RNA, 19 nt, Artificial Sequence
  Description of Artificial Sequence: Synthetic oligonucleotide
aagacauucuauagaagcg

SEQ ID NO: 1623595 - RNA, 19 nt, Artificial Sequence
  Description of Artificial Sequence: Synthetic oligonucleotide
uuaccaaauuauauucuag

SEQ ID NO: 1623596 - RNA, 19 nt, Artificial Sequence
  Description of Artificial Sequence: Synthetic oligonucleotide
ucagauuccguuacuuccg

SEQ ID NO: 1623597 - RNA, 19 nt, Artificial Sequence
  Description of Artificial Sequence: Synthetic oligonucleotide
acacaggacggucagauuc

SEQ ID NO: 1623598 - RNA, 19 nt, Artificial Sequence
  Description of Artificial Sequence: Synthetic oligonucleotide
cuuuuaaugcuguuaggcc

SEQ ID NO: 1623599 - RNA, 19 nt, Artificial Sequence
  Description of Artificial Sequence: Synthetic oligonucleotide
cuggacauaaucucaaaag

SEQ ID NO: 1623600 - RNA, 19 nt, Artificial Sequence
  Description of Artificial Sequence: Synthetic oligonucleotide
uccaauauccccugaauga

SEQ ID NO: 1623601 - RNA, 19 nt, Artificial Sequence
  Description of Artificial Sequence: Synthetic oligonucleotide
ucuaacauacacauacggu

SEQ ID NO: 1623602 - RNA, 19 nt, Artificial Sequence
  Description of Artificial Sequence: Synthetic oligonucleotide
agaagcuguauuuuccgac

SEQ ID NO: 1623603 - RNA, 19 nt, Artificial Sequence
  Description of Artificial Sequence: Synthetic oligonucleotide
aaaauucagguguuaacaa

SEQ ID NO: 1623604 - RNA, 19 nt, Artificial Sequence
  Description of Artificial Sequence: Synthetic oligonucleotide
uuucuaacauacacauacg

SEQ ID NO: 1623605 - RNA, 19 nt, Artificial Sequence
  Description of Artificial Sequence: Synthetic oligonucleotide
uauuuuccgacuuuguuuc

SEQ ID NO: 1623606 - RNA, 19 nt, Artificial Sequence
  Description of Artificial Sequence: Synthetic oligonucleotide
auaugcacaaagccguuac

SEQ ID NO: 1623607 - RNA, 19 nt, Artificial Sequence
  Description of Artificial Sequence: Synthetic oligonucleotide
uucaaguuuccccacaccu

SEQ ID NO: 1623608 - RNA, 19 nt, Artificial Sequence
  Description of Artificial Sequence: Synthetic oligonucleotide
auacgguauagcuaugcac

SEQ ID NO: 1623609 - RNA, 19 nt, Artificial Sequence
  Description of Artificial Sequence: Synthetic oligonucleotide
cuaagaagcuguauuuucc

SEQ ID NO: 1623610 - RNA, 19 nt, Artificial Sequence
  Description of Artificial Sequence: Synthetic oligonucleotide
agaacgucuuaucacacag

SEQ ID NO: 1623611 - RNA, 19 nt, Artificial Sequence
  Description of Artificial Sequence: Synthetic oligonucleotide
uuuucuuauuggcccaagg

SEQ ID NO: 1623612 - RNA, 19 nt, Artificial Sequence
  Description of Artificial Sequence: Synthetic oligonucleotide
aaauaaucuaaaacuucuc

SEQ ID NO: 1623613 - RNA, 19 nt, Artificial Sequence
  Description of Artificial Sequence: Synthetic oligonucleotide
aaagccguuacggggaugg

SEQ ID NO: 1623614 - RNA, 19 nt, Artificial Sequence
  Description of Artificial Sequence: Synthetic oligonucleotide
aagauuaauggacaacuuu

SEQ ID NO: 1623615 - RNA, 19 nt, Artificial Sequence
  Description of Artificial Sequence: Synthetic oligonucleotide
ucuuauuggcccaagggaa

SEQ ID NO: 1623616 - RNA, 19 nt, Artificial Sequence
  Description of Artificial Sequence: Synthetic oligonucleotide
auccuacugaccauuaucc

SEQ ID NO: 1623617 - RNA, 19 nt, Artificial Sequence
  Description of Artificial Sequence: Synthetic oligonucleotide
uuaauggacaacuuuuaau

SEQ ID NO: 1623618 - RNA, 19 nt, Artificial Sequence
  Description of Artificial Sequence: Synthetic oligonucleotide
uuggguuucaaguuucccc

SEQ ID NO: 1623619 - RNA, 19 nt, Artificial Sequence
  Description of Artificial Sequence: Synthetic oligonucleotide
acaccuagagggcaaauag

SEQ ID NO: 1623620 - RNA, 19 nt, Artificial Sequence
  Description of Artificial Sequence: Synthetic oligonucleotide
auacacauacgguauagcu

SEQ ID NO: 1623621 - RNA, 19 nt, Artificial Sequence
  Description of Artificial Sequence: Synthetic oligonucleotide
uauaagagggugaugggau

SEQ ID NO: 1623622 - RNA, 19 nt, Artificial Sequence
  Description of Artificial Sequence: Synthetic oligonucleotide
aauauccccugaaugaaag

SEQ ID NO: 1623623 - RNA, 19 nt, Artificial Sequence
  Description of Artificial Sequence: Synthetic oligonucleotide
aauuuuagcuuaccaaauu

SEQ ID NO: 1623624 - RNA, 19 nt, Artificial Sequence
  Description of Artificial Sequence: Synthetic oligonucleotide
uaccaaauuauauucuagu

SEQ ID NO: 1623625 - RNA, 19 nt, Artificial Sequence
  Description of Artificial Sequence: Synthetic oligonucleotide
auuauauucuaguuguuuu

SEQ ID NO: 1623626 - RNA, 19 nt, Artificial Sequence
  Description of Artificial Sequence: Synthetic oligonucleotide
ucuuaacuagugauuuucc

SEQ ID NO: 1623627 - RNA, 19 nt, Artificial Sequence
  Description of Artificial Sequence: Synthetic oligonucleotide
uuauauacucuuaauuauu

SEQ ID NO: 1623628 - RNA, 19 nt, Artificial Sequence
  Description of Artificial Sequence: Synthetic oligonucleotide
gguuuauaugcacaaagcc

SEQ ID NO: 1623629 - RNA, 19 nt, Artificial Sequence
  Description of Artificial Sequence: Synthetic oligonucleotide
uugauuucuuaacuaguga

SEQ ID NO: 1623630 - RNA, 19 nt, Artificial Sequence
  Description of Artificial Sequence: Synthetic oligonucleotide
ucuaguaauacaguuuccu

SEQ ID NO: 1623631 - RNA, 19 nt, Artificial Sequence
  Description of Artificial Sequence: Synthetic oligonucleotide
ugaugggauauucaguuuc

SEQ ID NO: 1623632 - RNA, 19 nt, Artificial Sequence
  Description of Artificial Sequence: Synthetic oligonucleotide
auuccguuacuuccgaguc

SEQ ID NO: 1623633 - RNA, 19 nt, Artificial Sequence
  Description of Artificial Sequence: Synthetic oligonucleotide
uguugauuucuuaacuagu

SEQ ID NO: 1623634 - RNA, 19 nt, Artificial Sequence
  Description of Artificial Sequence: Synthetic oligonucleotide
agguuuauaugcacaaagc

SEQ ID NO: 1623635 - RNA, 19 nt, Artificial Sequence
  Description of Artificial Sequence: Synthetic oligonucleotide
ugugcgucaauucuccugu

SEQ ID NO: 1623636 - RNA, 19 nt, Artificial Sequence
  Description of Artificial Sequence: Synthetic oligonucleotide
uccuuaacuggacauaauc

SEQ ID NO: 1623637 - RNA, 19 nt, Artificial Sequence
  Description of Artificial Sequence: Synthetic oligonucleotide
ugcacaaagccguuacggg

SEQ ID NO: 1623638 - RNA, 19 nt, Artificial Sequence
  Description of Artificial Sequence: Synthetic oligonucleotide
gucagauuccguuacuucc

SEQ ID NO: 1623639 - RNA, 19 nt, Artificial Sequence
  Description of Artificial Sequence: Synthetic oligonucleotide
aauuauauucuaguuguuu

SEQ ID NO: 1623640 - RNA, 19 nt, Artificial Sequence
  Description of Artificial Sequence: Synthetic oligonucleotide
uggagaacgucuuaucaca

SEQ ID NO: 1623641 - RNA, 19 nt, Artificial Sequence
  Description of Artificial Sequence: Synthetic oligonucleotide
aaucagacaccuagagggc

SEQ ID NO: 1623642 - RNA, 19 nt, Artificial Sequence
  Description of Artificial Sequence: Synthetic oligonucleotide
cauguguccgcucacacac

SEQ ID NO: 1623643 - RNA, 19 nt, Artificial Sequence
  Description of Artificial Sequence: Synthetic oligonucleotide
uuaacuagugauuuuccuu

SEQ ID NO: 1623644 - RNA, 19 nt, Artificial Sequence
  Description of Artificial Sequence: Synthetic oligonucleotide
gaagauugccaucacauua

SEQ ID NO: 1623645 - RNA, 19 nt, Artificial Sequence
  Description of Artificial Sequence: Synthetic oligonucleotide
uggguuucaaguuucccca

SEQ ID NO: 1623646 - RNA, 19 nt, Artificial Sequence
  Description of Artificial Sequence: Synthetic oligonucleotide
aauucagguguuaacaaaa

SEQ ID NO: 1623647 - RNA, 19 nt, Artificial Sequence
  Description of Artificial Sequence: Synthetic oligonucleotide
uguaggguuuuauuggccu

SEQ ID NO: 1623648 - RNA, 19 nt, Artificial Sequence
  Description of Artificial Sequence: Synthetic oligonucleotide
cugaaugaaaguaaauaga

SEQ ID NO: 1623649 - RNA, 19 nt, Artificial Sequence
  Description of Artificial Sequence: Synthetic oligonucleotide
agcaaguauccaugugucc

SEQ ID NO: 1623650 - RNA, 19 nt, Artificial Sequence
  Description of Artificial Sequence: Synthetic oligonucleotide
uaugcacaaagccguuacg

SEQ ID NO: 1623651 - RNA, 19 nt, Artificial Sequence
  Description of Artificial Sequence: Synthetic oligonucleotide
aaggaagacuuauuaccca

SEQ ID NO: 1623652 - RNA, 19 nt, Artificial Sequence
  Description of Artificial Sequence: Synthetic oligonucleotide
cuaugcacuauccccaccc

SEQ ID NO: 1623653 - RNA, 19 nt, Artificial Sequence
  Description of Artificial Sequence: Synthetic oligonucleotide
accauuauccauccaauau

SEQ ID NO: 1623654 - RNA, 19 nt, Artificial Sequence
  Description of Artificial Sequence: Synthetic oligonucleotide
auuuuagcuuaccaaauua

SEQ ID NO: 1623655 - RNA, 19 nt, Artificial Sequence
  Description of Artificial Sequence: Synthetic oligonucleotide
auggacaacuuuuaaugcu

SEQ ID NO: 1623656 - RNA, 19 nt, Artificial Sequence
  Description of Artificial Sequence: Synthetic oligonucleotide
acauacgguauagcuaugc

SEQ ID NO: 1623657 - RNA, 19 nt, Artificial Sequence
  Description of Artificial Sequence: Synthetic oligonucleotide
cauauaagagggugauggg

SEQ ID NO: 1623658 - RNA, 19 nt, Artificial Sequence
  Description of Artificial Sequence: Synthetic oligonucleotide
ucguccagggcaaacacgu

SEQ ID NO: 1623659 - RNA, 19 nt, Artificial Sequence
  Description of Artificial Sequence: Synthetic oligonucleotide
uguagcaaguauccaugug

SEQ ID NO: 1623660 - RNA, 19 nt, Artificial Sequence
  Description of Artificial Sequence: Synthetic oligonucleotide
uucuuaacuagugauuuuc

SEQ ID NO: 1623661 - RNA, 19 nt, Artificial Sequence
  Description of Artificial Sequence: Synthetic oligonucleotide
aguaaauagaguccagguu

SEQ ID NO: 1623662 - RNA, 19 nt, Artificial Sequence
  Description of Artificial Sequence: Synthetic oligonucleotide
uagcuaugcacuaucccca

SEQ ID NO: 1623663 - RNA, 19 nt, Artificial Sequence
  Description of Artificial Sequence: Synthetic oligonucleotide
ugccaucacauuauuacuc

SEQ ID NO: 1623664 - RNA, 19 nt, Artificial Sequence
  Description of Artificial Sequence: Synthetic oligonucleotide
cuuauuggcccaagggaag

SEQ ID NO: 1623665 - RNA, 19 nt, Artificial Sequence
  Description of Artificial Sequence: Synthetic oligonucleotide
cuacugaccauuauccauc

SEQ ID NO: 1623666 - RNA, 19 nt, Artificial Sequence
  Description of Artificial Sequence: Synthetic oligonucleotide
aagaagcuguauuuuccga

SEQ ID NO: 1623667 - RNA, 19 nt, Artificial Sequence
  Description of Artificial Sequence: Synthetic oligonucleotide
ccaaauuauauucuaguug

SEQ ID NO: 1623668 - RNA, 19 nt, Artificial Sequence
  Description of Artificial Sequence: Synthetic oligonucleotide
augcacaaagccguuacgg

SEQ ID NO: 1623669 - RNA, 19 nt, Artificial Sequence
  Description of Artificial Sequence: Synthetic oligonucleotide
uucagucuaguaauacagu

SEQ ID NO: 1623670 - RNA, 19 nt, Artificial Sequence
  Description of Artificial Sequence: Synthetic oligonucleotide
ggaguguuugaccaccucg

SEQ ID NO: 1623671 - RNA, 19 nt, Artificial Sequence
  Description of Artificial Sequence: Synthetic oligonucleotide
agcauguuguccaucuggc

SEQ ID NO: 1623672 - RNA, 19 nt, Artificial Sequence
  Description of Artificial Sequence: Synthetic oligonucleotide
uaaauagaguccagguuua

SEQ ID NO: 1623673 - RNA, 19 nt, Artificial Sequence
  Description of Artificial Sequence: Synthetic oligonucleotide
agaagcgugcuuucagauc

SEQ ID NO: 1623674 - RNA, 19 nt, Artificial Sequence
  Description of Artificial Sequence: Synthetic oligonucleotide
guaaauagaguccagguuu

SEQ ID NO: 1623675 - RNA, 19 nt, Artificial Sequence
  Description of Artificial Sequence: Synthetic oligonucleotide
aguggggaaaauucaggug

SEQ ID NO: 1623676 - RNA, 19 nt, Artificial Sequence
  Description of Artificial Sequence: Synthetic oligonucleotide
gaagcgugcuuucagaucu

SEQ ID NO: 1623677 - RNA, 19 nt, Artificial Sequence
  Description of Artificial Sequence: Synthetic oligonucleotide
uucuaguuguuuuauuaua

SEQ ID NO: 1623678 - RNA, 19 nt, Artificial Sequence
  Description of Artificial Sequence: Synthetic oligonucleotide
aacacgucugaguucuggu

SEQ ID NO: 1623679 - RNA, 19 nt, Artificial Sequence
  Description of Artificial Sequence: Synthetic oligonucleotide
auccugugagaccauuuuc

SEQ ID NO: 1623680 - RNA, 19 nt, Artificial Sequence
  Description of Artificial Sequence: Synthetic oligonucleotide
uagauuugcauagcagagc

SEQ ID NO: 1623681 - RNA, 19 nt, Artificial Sequence
  Description of Artificial Sequence: Synthetic oligonucleotide
caucggguaaggcaugugc

SEQ ID NO: 1623682 - RNA, 19 nt, Artificial Sequence
  Description of Artificial Sequence: Synthetic oligonucleotide
agauuaauggacaacuuuu

SEQ ID NO: 1623683 - RNA, 19 nt, Artificial Sequence
  Description of Artificial Sequence: Synthetic oligonucleotide
uucucaaaaccuauuucuu

SEQ ID NO: 1623684 - RNA, 19 nt, Artificial Sequence
  Description of Artificial Sequence: Synthetic oligonucleotide
auauaagagggugauggga

SEQ ID NO: 1623685 - RNA, 19 nt, Artificial Sequence
  Description of Artificial Sequence: Synthetic oligonucleotide
cgucuuaucacacagguug

SEQ ID NO: 1623686 - RNA, 19 nt, Artificial Sequence
  Description of Artificial Sequence: Synthetic oligonucleotide
uccguuacuuccgaguccc

SEQ ID NO: 1623687 - RNA, 19 nt, Artificial Sequence
  Description of Artificial Sequence: Synthetic oligonucleotide
uauaaauccuacugaccau

SEQ ID NO: 1623688 - RNA, 19 nt, Artificial Sequence
  Description of Artificial Sequence: Synthetic oligonucleotide
guuuguaucaugccaugga

SEQ ID NO: 1623689 - RNA, 19 nt, Artificial Sequence
  Description of Artificial Sequence: Synthetic oligonucleotide
caaguauccauguguccgc

SEQ ID NO: 1623690 - RNA, 19 nt, Artificial Sequence
  Description of Artificial Sequence: Synthetic oligonucleotide
ugggauauucaguuucuaa

SEQ ID NO: 1623691 - RNA, 19 nt, Artificial Sequence
  Description of Artificial Sequence: Synthetic oligonucleotide
ugaccauuauccauccaau

SEQ ID NO: 1623692 - RNA, 19 nt, Artificial Sequence
  Description of Artificial Sequence: Synthetic oligonucleotide
cuagagggcaaauaguaaa

SEQ ID NO: 1623693 - RNA, 19 nt, Artificial Sequence
  Description of Artificial Sequence: Synthetic oligonucleotide
gacauucuauagaagcgug

SEQ ID NO: 1623694 - RNA, 19 nt, Artificial Sequence
  Description of Artificial Sequence: Synthetic oligonucleotide
aucacauuauuacucuuuu

SEQ ID NO: 1623695 - RNA, 19 nt, Artificial Sequence
  Description of Artificial Sequence: Synthetic oligonucleotide
uauucaaugaaaggaugua

SEQ ID NO: 1623696 - RNA, 19 nt, Artificial Sequence
  Description of Artificial Sequence: Synthetic oligonucleotide
aagauugccaucacauuau

SEQ ID NO: 1623697 - RNA, 19 nt, Artificial Sequence
  Description of Artificial Sequence: Synthetic oligonucleotide
agacauucuauagaagcgu

SEQ ID NO: 1623698 - RNA, 19 nt, Artificial Sequence
  Description of Artificial Sequence: Synthetic oligonucleotide
uuauuacucuuuugcauuu

SEQ ID NO: 1623699 - RNA, 19 nt, Artificial Sequence
  Description of Artificial Sequence: Synthetic oligonucleotide
agucauaauuuuagcuuac

SEQ ID NO: 1623700 - RNA, 19 nt, Artificial Sequence
  Description of Artificial Sequence: Synthetic oligonucleotide
uuauuacccagggacaguc

SEQ ID NO: 1623701 - RNA, 19 nt, Artificial Sequence
  Description of Artificial Sequence: Synthetic oligonucleotide
aagcuugucagaaaccaaa

SEQ ID NO: 1623702 - RNA, 19 nt, Artificial Sequence
  Description of Artificial Sequence: Synthetic oligonucleotide
aaauccuacugaccauuau

SEQ ID NO: 1623703 - RNA, 19 nt, Artificial Sequence
  Description of Artificial Sequence: Synthetic oligonucleotide
uuuuauuggccugcaccag

SEQ ID NO: 1623704 - RNA, 19 nt, Artificial Sequence
  Description of Artificial Sequence: Synthetic oligonucleotide
auacauauaagagggugau

SEQ ID NO: 1623705 - RNA, 19 nt, Artificial Sequence
  Description of Artificial Sequence: Synthetic oligonucleotide
agcuaugcacuauccccac

SEQ ID NO: 1623706 - RNA, 19 nt, Artificial Sequence
  Description of Artificial Sequence: Synthetic oligonucleotide
augugcgucaauucuccug

SEQ ID NO: 1623707 - RNA, 19 nt, Artificial Sequence
  Description of Artificial Sequence: Synthetic oligonucleotide
uaacacaggacggucagau

SEQ ID NO: 1623708 - RNA, 19 nt, Artificial Sequence
  Description of Artificial Sequence: Synthetic oligonucleotide
ggaaaauucagguguuaac

SEQ ID NO: 1623709 - RNA, 19 nt, Artificial Sequence
  Description of Artificial Sequence: Synthetic oligonucleotide
auauucaguuucuaacaua

SEQ ID NO: 1623710 - RNA, 19 nt, Artificial Sequence
  Description of Artificial Sequence: Synthetic oligonucleotide
aucggguaaggcaugugcg

SEQ ID NO: 1623711 - RNA, 19 nt, Artificial Sequence
  Description of Artificial Sequence: Synthetic oligonucleotide
uauccccugaaugaaagua

SEQ ID NO: 1623712 - RNA, 19 nt, Artificial Sequence
  Description of Artificial Sequence: Synthetic oligonucleotide
gcacaaagccguuacgggg

SEQ ID NO: 1623713 - RNA, 19 nt, Artificial Sequence
  Description of Artificial Sequence: Synthetic oligonucleotide
acaacuuuuaaugcuguua

SEQ ID NO: 1623714 - RNA, 19 nt, Artificial Sequence
  Description of Artificial Sequence: Synthetic oligonucleotide
uuguagcaaguauccaugu

SEQ ID NO: 1623715 - RNA, 19 nt, Artificial Sequence
  Description of Artificial Sequence: Synthetic oligonucleotide
ucaaguuuccccacaccuu

SEQ ID NO: 1623716 - RNA, 19 nt, Artificial Sequence
  Description of Artificial Sequence: Synthetic oligonucleotide
guuacuuccgaguccccac

SEQ ID NO: 1623717 - RNA, 19 nt, Artificial Sequence
  Description of Artificial Sequence: Synthetic oligonucleotide
uuccguuacuuccgagucc

SEQ ID NO: 1623718 - RNA, 19 nt, Artificial Sequence
  Description of Artificial Sequence: Synthetic oligonucleotide
gauauucaguuucuaacau

SEQ ID NO: 1623719 - RNA, 19 nt, Artificial Sequence
  Description of Artificial Sequence: Synthetic oligonucleotide
gauacacucugaaaucaga

SEQ ID NO: 1623720 - RNA, 19 nt, Artificial Sequence
  Description of Artificial Sequence: Synthetic oligonucleotide
gacauaaucucaaaaggau

SEQ ID NO: 1623721 - RNA, 19 nt, Artificial Sequence
  Description of Artificial Sequence: Synthetic oligonucleotide
cacaggacggucagauucc

SEQ ID NO: 1623722 - RNA, 19 nt, Artificial Sequence
  Description of Artificial Sequence: Synthetic oligonucleotide
cugaccauuauccauccaa

SEQ ID NO: 1623723 - RNA, 19 nt, Artificial Sequence
  Description of Artificial Sequence: Synthetic oligonucleotide
uuggcccaagggaagauua

SEQ ID NO: 1623724 - RNA, 19 nt, Artificial Sequence
  Description of Artificial Sequence: Synthetic oligonucleotide
uaaauccuacugaccauua

SEQ ID NO: 1623725 - RNA, 19 nt, Artificial Sequence
  Description of Artificial Sequence: Synthetic oligonucleotide
guauccauguguccgcuca

SEQ ID NO: 1623726 - RNA, 19 nt, Artificial Sequence
  Description of Artificial Sequence: Synthetic oligonucleotide
uccuacugaccauuaucca

SEQ ID NO: 1623727 - RNA, 19 nt, Artificial Sequence
  Description of Artificial Sequence: Synthetic oligonucleotide
aacuggacauaaucucaaa

SEQ ID NO: 1623728 - RNA, 19 nt, Artificial Sequence
  Description of Artificial Sequence: Synthetic oligonucleotide
gauuaauggacaacuuuua

SEQ ID NO: 1623729 - RNA, 19 nt, Artificial Sequence
  Description of Artificial Sequence: Synthetic oligonucleotide
gauuccguuacuuccgagu

SEQ ID NO: 1623730 - RNA, 19 nt, Artificial Sequence
  Description of Artificial Sequence: Synthetic oligonucleotide
cuggaaaggagugggcccg

SEQ ID NO: 1623731 - RNA, 19 nt, Artificial Sequence
  Description of Artificial Sequence: Synthetic oligonucleotide
cacgucugaguucugguuc

SEQ ID NO: 1623732 - RNA, 19 nt, Artificial Sequence
  Description of Artificial Sequence: Synthetic oligonucleotide
aauagaguccagguuuaua

SEQ ID NO: 1623733 - RNA, 19 nt, Artificial Sequence
  Description of Artificial Sequence: Synthetic oligonucleotide
auaaauccuacugaccauu

SEQ ID NO: 1623734 - RNA, 19 nt, Artificial Sequence
  Description of Artificial Sequence: Synthetic oligonucleotide
cauacacauacgguauagc

SEQ ID NO: 1623735 - RNA, 19 nt, Artificial Sequence
  Description of Artificial Sequence: Synthetic oligonucleotide
uauuacccagggacaguca

SEQ ID NO: 1623736 - RNA, 19 nt, Artificial Sequence
  Description of Artificial Sequence: Synthetic oligonucleotide
aacucacagccugucaggu

SEQ ID NO: 1623737 - RNA, 19 nt, Artificial Sequence
  Description of Artificial Sequence: Synthetic oligonucleotide
ucggguaaggcaugugcgu

SEQ ID NO: 1623738 - RNA, 19 nt, Artificial Sequence
  Description of Artificial Sequence: Synthetic oligonucleotide
cuagugauuuuccuuaacu

SEQ ID NO: 1623739 - RNA, 19 nt, Artificial Sequence
  Description of Artificial Sequence: Synthetic oligonucleotide
ucuuaucacacagguugca

SEQ ID NO: 1623740 - RNA, 19 nt, Artificial Sequence
  Description of Artificial Sequence: Synthetic oligonucleotide
caaaaggauacacucugaa

SEQ ID NO: 1623741 - RNA, 19 nt, Artificial Sequence
  Description of Artificial Sequence: Synthetic oligonucleotide
gguauagcuaugcacuauc

SEQ ID NO: 1623742 - RNA, 19 nt, Artificial Sequence
  Description of Artificial Sequence: Synthetic oligonucleotide
gucauaauuuuagcuuacc

SEQ ID NO: 1623743 - RNA, 19 nt, Artificial Sequence
  Description of Artificial Sequence: Synthetic oligonucleotide
aggacggucagauuccguu

SEQ ID NO: 1623744 - RNA, 19 nt, Artificial Sequence
  Description of Artificial Sequence: Synthetic oligonucleotide
aguauccauguguccgcuc

SEQ ID NO: 1623745 - RNA, 19 nt, Artificial Sequence
  Description of Artificial Sequence: Synthetic oligonucleotide
gacuuauuacccagggaca

SEQ ID NO: 1623746 - RNA, 19 nt, Artificial Sequence
  Description of Artificial Sequence: Synthetic oligonucleotide
uuauaugcacaaagccguu

SEQ ID NO: 1623747 - RNA, 19 nt, Artificial Sequence
  Description of Artificial Sequence: Synthetic oligonucleotide
auauucuaguuguuuuauu

SEQ ID NO: 1623748 - RNA, 19 nt, Artificial Sequence
  Description of Artificial Sequence: Synthetic oligonucleotide
gguggagaacgucuuauca

SEQ ID NO: 1623749 - RNA, 19 nt, Artificial Sequence
  Description of Artificial Sequence: Synthetic oligonucleotide
caccccucaccccuuagcc

SEQ ID NO: 1623750 - RNA, 19 nt, Artificial Sequence
  Description of Artificial Sequence: Synthetic oligonucleotide
ccauuauccauccaauauc

SEQ ID NO: 1623751 - RNA, 19 nt, Artificial Sequence
  Description of Artificial Sequence: Synthetic oligonucleotide
agugggcccguuuguauca

SEQ ID NO: 1623752 - RNA, 19 nt, Artificial Sequence
  Description of Artificial Sequence: Synthetic oligonucleotide
gacaaguaacauucagucu

SEQ ID NO: 1623753 - RNA, 19 nt, Artificial Sequence
  Description of Artificial Sequence: Synthetic oligonucleotide
acauaaucucaaaaggaua

SEQ ID NO: 1623754 - RNA, 19 nt, Artificial Sequence
  Description of Artificial Sequence: Synthetic oligonucleotide
ggaagauuaauggacaacu

SEQ ID NO: 1623755 - RNA, 19 nt, Artificial Sequence
  Description of Artificial Sequence: Synthetic oligonucleotide
cuuggguuucaaguuuccc

SEQ ID NO: 1623756 - RNA, 19 nt, Artificial Sequence
  Description of Artificial Sequence: Synthetic oligonucleotide
accccuuagcccucacuuc

SEQ ID NO: 1623757 - RNA, 19 nt, Artificial Sequence
  Description of Artificial Sequence: Synthetic oligonucleotide
guuacggggauggggcugg

SEQ ID NO: 1623758 - RNA, 19 nt, Artificial Sequence
  Description of Artificial Sequence: Synthetic oligonucleotide
auauccccugaaugaaagu

SEQ ID NO: 1623759 - RNA, 19 nt, Artificial Sequence
  Description of Artificial Sequence: Synthetic oligonucleotide
guaauacaguuuccuguuc

SEQ ID NO: 1623760 - RNA, 19 nt, Artificial Sequence
  Description of Artificial Sequence: Synthetic oligonucleotide
cuuaacuagugauuuuccu

SEQ ID NO: 1623761 - RNA, 19 nt, Artificial Sequence
  Description of Artificial Sequence: Synthetic oligonucleotide
caugccauggagaaacugu

SEQ ID NO: 1623762 - RNA, 19 nt, Artificial Sequence
  Description of Artificial Sequence: Synthetic oligonucleotide
agauuccguuacuuccgag

SEQ ID NO: 1623763 - RNA, 19 nt, Artificial Sequence
  Description of Artificial Sequence: Synthetic oligonucleotide
ggaugcuaacacaggacgg

SEQ ID NO: 1623764 - RNA, 19 nt, Artificial Sequence
  Description of Artificial Sequence: Synthetic oligonucleotide
ggacagucauaauuuuagc

SEQ ID NO: 1623765 - RNA, 19 nt, Artificial Sequence
  Description of Artificial Sequence: Synthetic oligonucleotide
gcgucaauucuccuguuug

SEQ ID NO: 1623766 - RNA, 19 nt, Artificial Sequence
  Description of Artificial Sequence: Synthetic oligonucleotide
accuagagggcaaauagua

SEQ ID NO: 1623767 - RNA, 19 nt, Artificial Sequence
  Description of Artificial Sequence: Synthetic oligonucleotide
uuuccgacuuuguuucuuu

SEQ ID NO: 1623768 - RNA, 19 nt, Artificial Sequence
  Description of Artificial Sequence: Synthetic oligonucleotide
uauaugcacaaagccguua

SEQ ID NO: 1623769 - RNA, 19 nt, Artificial Sequence
  Description of Artificial Sequence: Synthetic oligonucleotide
cauacgguauagcuaugca

SEQ ID NO: 1623770 - RNA, 19 nt, Artificial Sequence
  Description of Artificial Sequence: Synthetic oligonucleotide
aaacuucucaaaaccuauu

SEQ ID NO: 1623771 - RNA, 19 nt, Artificial Sequence
  Description of Artificial Sequence: Synthetic oligonucleotide
aaguauccauguguccgcu

SEQ ID NO: 1623772 - RNA, 19 nt, Artificial Sequence
  Description of Artificial Sequence: Synthetic oligonucleotide
gagugggcccguuuguauc

SEQ ID NO: 1623773 - RNA, 19 nt, Artificial Sequence
  Description of Artificial Sequence: Synthetic oligonucleotide
agccguuacggggaugggg

SEQ ID NO: 1623774 - RNA, 19 nt, Artificial Sequence
  Description of Artificial Sequence: Synthetic oligonucleotide
aaauagaguccagguuuau

SEQ ID NO: 1623775 - RNA, 19 nt, Artificial Sequence
  Description of Artificial Sequence: Synthetic oligonucleotide
gaccauuauccauccaaua

SEQ ID NO: 1623776 - RNA, 19 nt, Artificial Sequence
  Description of Artificial Sequence: Synthetic oligonucleotide
ccgacuuuguuucuuugag

SEQ ID NO: 1623777 - RNA, 19 nt, Artificial Sequence
  Description of Artificial Sequence: Synthetic oligonucleotide
ugcgucaauucuccuguuu

SEQ ID NO: 1623778 - RNA, 19 nt, Artificial Sequence
  Description of Artificial Sequence: Synthetic oligonucleotide
gagaagguucuguguaaaa

SEQ ID NO: 1623779 - RNA, 19 nt, Artificial Sequence
  Description of Artificial Sequence: Synthetic oligonucleotide
gucuaguaauacaguuucc

SEQ ID NO: 1623780 - RNA, 19 nt, Artificial Sequence
  Description of Artificial Sequence: Synthetic oligonucleotide
auuuuccgacuuuguuucu

SEQ ID NO: 1623781 - RNA, 19 nt, Artificial Sequence
  Description of Artificial Sequence: Synthetic oligonucleotide
uuguuucuuugagaaggaa

SEQ ID NO: 1623782 - RNA, 19 nt, Artificial Sequence
  Description of Artificial Sequence: Synthetic oligonucleotide
ggauacacucugaaaucag

SEQ ID NO: 1623783 - RNA, 19 nt, Artificial Sequence
  Description of Artificial Sequence: Synthetic oligonucleotide
uuacccagggacagucaua

SEQ ID NO: 1623784 - RNA, 19 nt, Artificial Sequence
  Description of Artificial Sequence: Synthetic oligonucleotide
uuuuccgacuuuguuucuu

SEQ ID NO: 1623785 - RNA, 19 nt, Artificial Sequence
  Description of Artificial Sequence: Synthetic oligonucleotide
cauucuauagaagcgugcu

SEQ ID NO: 1623786 - RNA, 19 nt, Artificial Sequence
  Description of Artificial Sequence: Synthetic oligonucleotide
acaggacggucagauuccg

SEQ ID NO: 1623787 - RNA, 19 nt, Artificial Sequence
  Description of Artificial Sequence: Synthetic oligonucleotide
uaaugcuguuaggccagug

SEQ ID NO: 1623788 - RNA, 19 nt, Artificial Sequence
  Description of Artificial Sequence: Synthetic oligonucleotide
acacgucugaguucugguu

SEQ ID NO: 1623789 - RNA, 19 nt, Artificial Sequence
  Description of Artificial Sequence: Synthetic oligonucleotide
ggucagauuccguuacuuc

SEQ ID NO: 1623790 - RNA, 19 nt, Artificial Sequence
  Description of Artificial Sequence: Synthetic oligonucleotide
acgguauagcuaugcacua

SEQ ID NO: 1623791 - RNA, 19 nt, Artificial Sequence
  Description of Artificial Sequence: Synthetic oligonucleotide
gccagcaucggguaaggca

SEQ ID NO: 1623792 - RNA, 19 nt, Artificial Sequence
  Description of Artificial Sequence: Synthetic oligonucleotide
ucaccccuuagcccucacu

SEQ ID NO: 1623793 - RNA, 19 nt, Artificial Sequence
  Description of Artificial Sequence: Synthetic oligonucleotide
agauugccaucacauuauu

SEQ ID NO: 1623794 - RNA, 19 nt, Artificial Sequence
  Description of Artificial Sequence: Synthetic oligonucleotide
gaugggauauucaguuucu

SEQ ID NO: 1623795 - RNA, 19 nt, Artificial Sequence
  Description of Artificial Sequence: Synthetic oligonucleotide
cuguugcauccugugagac

SEQ ID NO: 1623796 - RNA, 19 nt, Artificial Sequence
  Description of Artificial Sequence: Synthetic oligonucleotide
cugagaacucagcuauaca

SEQ ID NO: 1623797 - RNA, 19 nt, Artificial Sequence
  Description of Artificial Sequence: Synthetic oligonucleotide
uggcccaagggaagauuaa

SEQ ID NO: 1623798 - RNA, 19 nt, Artificial Sequence
  Description of Artificial Sequence: Synthetic oligonucleotide
aaguuuccccacaccuucu

SEQ ID NO: 1623799 - RNA, 19 nt, Artificial Sequence
  Description of Artificial Sequence: Synthetic oligonucleotide
gcaugugcgucaauucucc

SEQ ID NO: 1623800 - RNA, 19 nt, Artificial Sequence
  Description of Artificial Sequence: Synthetic oligonucleotide
gacaccuagagggcaaaua

SEQ ID NO: 1623801 - RNA, 19 nt, Artificial Sequence
  Description of Artificial Sequence: Synthetic oligonucleotide
acaaagccguuacggggau

SEQ ID NO: 1623802 - RNA, 19 nt, Artificial Sequence
  Description of Artificial Sequence: Synthetic oligonucleotide
gguuucaaguuuccccaca

SEQ ID NO: 1623803 - RNA, 19 nt, Artificial Sequence
  Description of Artificial Sequence: Synthetic oligonucleotide
caccuucuagauuugcaua

SEQ ID NO: 1623804 - RNA, 19 nt, Artificial Sequence
  Description of Artificial Sequence: Synthetic oligonucleotide
gccguuacggggauggggc

SEQ ID NO: 1623805 - RNA, 19 nt, Artificial Sequence
  Description of Artificial Sequence: Synthetic oligonucleotide
gcaggaguguuugaccacc

SEQ ID NO: 1623806 - RNA, 19 nt, Artificial Sequence
  Description of Artificial Sequence: Synthetic oligonucleotide
uuaaugcuguuaggccagu

SEQ ID NO: 1623807 - RNA, 19 nt, Artificial Sequence
  Description of Artificial Sequence: Synthetic oligonucleotide
gcaaacacgucugaguucu

SEQ ID NO: 1623808 - RNA, 19 nt, Artificial Sequence
  Description of Artificial Sequence: Synthetic oligonucleotide
aagccguuacggggauggg

SEQ ID NO: 1623809 - RNA, 19 nt, Artificial Sequence
  Description of Artificial Sequence: Synthetic oligonucleotide
gaagauuaauggacaacuu

SEQ ID NO: 1623810 - RNA, 19 nt, Artificial Sequence
  Description of Artificial Sequence: Synthetic oligonucleotide
acggucagauuccguuacu

SEQ ID NO: 1623811 - RNA, 19 nt, Artificial Sequence
  Description of Artificial Sequence: Synthetic oligonucleotide
cacauacgguauagcuaug

SEQ ID NO: 1623812 - RNA, 19 nt, Artificial Sequence
  Description of Artificial Sequence: Synthetic oligonucleotide
aaccaaaccccagcaucuu

SEQ ID NO: 1623813 - RNA, 19 nt, Artificial Sequence
  Description of Artificial Sequence: Synthetic oligonucleotide
uucuggcaggaguguuuga

SEQ ID NO: 1623814 - RNA, 19 nt, Artificial Sequence
  Description of Artificial Sequence: Synthetic oligonucleotide
acacaaacucacagccugu

SEQ ID NO: 1623815 - RNA, 19 nt, Artificial Sequence
  Description of Artificial Sequence: Synthetic oligonucleotide
gcccguuuguaucaugcca

SEQ ID NO: 1623816 - RNA, 19 nt, Artificial Sequence
  Description of Artificial Sequence: Synthetic oligonucleotide
cagucuaguaauacaguuu

SEQ ID NO: 1623817 - RNA, 19 nt, Artificial Sequence
  Description of Artificial Sequence: Synthetic oligonucleotide
ggcaugugcgucaauucuc

SEQ ID NO: 1623818 - RNA, 19 nt, Artificial Sequence
  Description of Artificial Sequence: Synthetic oligonucleotide
gggcccguuuguaucaugc

SEQ ID NO: 1623819 - RNA, 19 nt, Artificial Sequence
  Description of Artificial Sequence: Synthetic oligonucleotide
cagauuccguuacuuccga

SEQ ID NO: 1623820 - RNA, 19 nt, Artificial Sequence
  Description of Artificial Sequence: Synthetic oligonucleotide
ugggcccguuuguaucaug

SEQ ID NO: 1623821 - RNA, 19 nt, Artificial Sequence
  Description of Artificial Sequence: Synthetic oligonucleotide
aagcgugcuuucagaucug

SEQ ID NO: 1623822 - RNA, 19 nt, Artificial Sequence
  Description of Artificial Sequence: Synthetic oligonucleotide
uccccacaccuucuagauu

SEQ ID NO: 1623823 - RNA, 19 nt, Artificial Sequence
  Description of Artificial Sequence: Synthetic oligonucleotide
gccaucacauuauuacucu

SEQ ID NO: 1623824 - RNA, 19 nt, Artificial Sequence
  Description of Artificial Sequence: Synthetic oligonucleotide
ggcccguuuguaucaugcc

SEQ ID NO: 1623825 - RNA, 19 nt, Artificial Sequence
  Description of Artificial Sequence: Synthetic oligonucleotide
gaacucagcuauacauaua

SEQ ID NO: 1623826 - RNA, 19 nt, Artificial Sequence
  Description of Artificial Sequence: Synthetic oligonucleotide
cagcaucggguaaggcaug

SEQ ID NO: 1623827 - RNA, 19 nt, Artificial Sequence
  Description of Artificial Sequence: Synthetic oligonucleotide
agcgugcuuucagaucuga

SEQ ID NO: 1623828 - RNA, 19 nt, Artificial Sequence
  Description of Artificial Sequence: Synthetic oligonucleotide
cccugaaugaaaguaaaua

SEQ ID NO: 1623829 - RNA, 19 nt, Artificial Sequence
  Description of Artificial Sequence: Synthetic oligonucleotide
caccuagagggcaaauagu

SEQ ID NO: 1623830 - RNA, 19 nt, Artificial Sequence
  Description of Artificial Sequence: Synthetic oligonucleotide
ggguuucaaguuuccccac

SEQ ID NO: 1623831 - RNA, 19 nt, Artificial Sequence
  Description of Artificial Sequence: Synthetic oligonucleotide
augggauauucaguuucua

SEQ ID NO: 1623832 - RNA, 19 nt, Artificial Sequence
  Description of Artificial Sequence: Synthetic oligonucleotide
gggagaagguucuguguaa

SEQ ID NO: 1623833 - RNA, 19 nt, Artificial Sequence
  Description of Artificial Sequence: Synthetic oligonucleotide
ggguggagaacgucuuauc

SEQ ID NO: 1623834 - RNA, 19 nt, Artificial Sequence
  Description of Artificial Sequence: Synthetic oligonucleotide
gcuuaccaaauuauauucu

SEQ ID NO: 1623835 - RNA, 19 nt, Artificial Sequence
  Description of Artificial Sequence: Synthetic oligonucleotide
ccuagagggcaaauaguaa

SEQ ID NO: 1623836 - RNA, 19 nt, Artificial Sequence
  Description of Artificial Sequence: Synthetic oligonucleotide
gaaaggagugggcccguuu

SEQ ID NO: 1623837 - RNA, 19 nt, Artificial Sequence
  Description of Artificial Sequence: Synthetic oligonucleotide
ggagaagguucuguguaaa

SEQ ID NO: 1623838 - RNA, 19 nt, Artificial Sequence
  Description of Artificial Sequence: Synthetic oligonucleotide
cauccugugagaccauuuu

SEQ ID NO: 1623839 - RNA, 19 nt, Artificial Sequence
  Description of Artificial Sequence: Synthetic oligonucleotide
ccuacugaccauuauccau

SEQ ID NO: 1623840 - RNA, 19 nt, Artificial Sequence
  Description of Artificial Sequence: Synthetic oligonucleotide
ccaauauccccugaaugaa

SEQ ID NO: 1623841 - RNA, 19 nt, Artificial Sequence
  Description of Artificial Sequence: Synthetic oligonucleotide
uugcauccugugagaccau

SEQ ID NO: 1623842 - RNA, 19 nt, Artificial Sequence
  Description of Artificial Sequence: Synthetic oligonucleotide
ccagcaucggguaaggcau

SEQ ID NO: 1623843 - RNA, 19 nt, Artificial Sequence
  Description of Artificial Sequence: Synthetic oligonucleotide
caccccuuagcccucacuu

SEQ ID NO: 1623844 - RNA, 19 nt, Artificial Sequence
  Description of Artificial Sequence: Synthetic oligonucleotide
agacaccuagagggcaaau

SEQ ID NO: 1623845 - RNA, 19 nt, Artificial Sequence
  Description of Artificial Sequence: Synthetic oligonucleotide
ggccaguggggaaaauuca

SEQ ID NO: 1623846 - RNA, 19 nt, Artificial Sequence
  Description of Artificial Sequence: Synthetic oligonucleotide
ggacggucagauuccguua

SEQ ID NO: 1623847 - RNA, 19 nt, Artificial Sequence
  Description of Artificial Sequence: Synthetic oligonucleotide
caaagccguuacggggaug

SEQ ID NO: 1623848 - RNA, 19 nt, Artificial Sequence
  Description of Artificial Sequence: Synthetic oligonucleotide
cucugaaaucagacaccua

SEQ ID NO: 1623849 - RNA, 19 nt, Artificial Sequence
  Description of Artificial Sequence: Synthetic oligonucleotide
aggacggagcggcccucgu

SEQ ID NO: 1623850 - RNA, 19 nt, Artificial Sequence
  Description of Artificial Sequence: Synthetic oligonucleotide
cgacuuuguuucuuugaga

SEQ ID NO: 1623851 - RNA, 19 nt, Artificial Sequence
  Description of Artificial Sequence: Synthetic oligonucleotide
caugugcgucaauucuccu

SEQ ID NO: 1623852 - RNA, 19 nt, Artificial Sequence
  Description of Artificial Sequence: Synthetic oligonucleotide
cccguuuguaucaugccau

SEQ ID NO: 1623853 - RNA, 19 nt, Artificial Sequence
  Description of Artificial Sequence: Synthetic oligonucleotide
ggagugggcccguuuguau

SEQ ID NO: 1623854 - RNA, 19 nt, Artificial Sequence
  Description of Artificial Sequence: Synthetic oligonucleotide
cagacaccuagagggcaaa

SEQ ID NO: 1623855 - RNA, 19 nt, Artificial Sequence
  Description of Artificial Sequence: Synthetic oligonucleotide
gcaucggguaaggcaugug

SEQ ID NO: 1623856 - RNA, 19 nt, Artificial Sequence
  Description of Artificial Sequence: Synthetic oligonucleotide
ccagguuuauaugcacaaa

SEQ ID NO: 1623857 - RNA, 19 nt, Artificial Sequence
  Description of Artificial Sequence: Synthetic oligonucleotide
ccguuacuuccgagucccc

SEQ ID NO: 1623858 - RNA, 19 nt, Artificial Sequence
  Description of Artificial Sequence: Synthetic oligonucleotide
cgucaauucuccuguuugu

SEQ ID NO: 1623859 - RNA, 19 nt, Artificial Sequence
  Description of Artificial Sequence: Synthetic oligonucleotide
cguuacuuccgagucccca

SEQ ID NO: 1623860 - RNA, 19 nt, Artificial Sequence
  Description of Artificial Sequence: Synthetic oligonucleotide
caggacggucagauuccgu

SEQ ID NO: 1623861 - RNA, 19 nt, Artificial Sequence
  Description of Artificial Sequence: Synthetic oligonucleotide
gguucuggcaggaguguuu

SEQ ID NO: 1623862 - RNA, 19 nt, Artificial Sequence
  Description of Artificial Sequence: Synthetic oligonucleotide
ggcccaagggaagauuaau

SEQ ID NO: 1623863 - RNA, 19 nt, Artificial Sequence
  Description of Artificial Sequence: Synthetic oligonucleotide
guaaggcaugugcgucaau

SEQ ID NO: 1623864 - RNA, 19 nt, Artificial Sequence
  Description of Artificial Sequence: Synthetic oligonucleotide
cguccagggcaaacacguc

SEQ ID NO: 1623865 - RNA, 19 nt, Artificial Sequence
  Description of Artificial Sequence: Synthetic oligonucleotide
gugcgucaauucuccuguu

SEQ ID NO: 1623866 - RNA, 19 nt, Artificial Sequence
  Description of Artificial Sequence: Synthetic oligonucleotide
gugggcccguuuguaucau

SEQ ID NO: 1623867 - RNA, 19 nt, Artificial Sequence
  Description of Artificial Sequence: Synthetic oligonucleotide
gcgugcuuucagaucugau

SEQ ID NO: 1623868 - RNA, 19 nt, Artificial Sequence
  Description of Artificial Sequence: Synthetic oligonucleotide
ccguuacggggauggggcu

SEQ ID NO: 1623869 - RNA, 19 nt, Artificial Sequence
  Description of Artificial Sequence: Synthetic oligonucleotide
cgguauagcuaugcacuau

SEQ ID NO: 1623870 - RNA, 19 nt, Artificial Sequence
  Description of Artificial Sequence: Synthetic oligonucleotide
cggucagauuccguuacuu

SEQ ID NO: 1623871 - RNA, 19 nt, Artificial Sequence
  Description of Artificial Sequence: Synthetic oligonucleotide
aaaacauucaacccuaagg

SEQ ID NO: 1623872 - RNA, 19 nt, Artificial Sequence
  Description of Artificial Sequence: Synthetic oligonucleotide
uuuaguaaaagucuccucg

SEQ ID NO: 1623873 - RNA, 19 nt, Artificial Sequence
  Description of Artificial Sequence: Synthetic oligonucleotide
aauaucuugagauuuuagg

SEQ ID NO: 1623874 - RNA, 19 nt, Artificial Sequence
  Description of Artificial Sequence: Synthetic oligonucleotide
uauggcugaacccagaagg

SEQ ID NO: 1623875 - RNA, 19 nt, Artificial Sequence
  Description of Artificial Sequence: Synthetic oligonucleotide
cuuaagguuagaaagacag

SEQ ID NO: 1623876 - RNA, 19 nt, Artificial Sequence
  Description of Artificial Sequence: Synthetic oligonucleotide
auuauggccagacagcacc

SEQ ID NO: 1623877 - RNA, 19 nt, Artificial Sequence
  Description of Artificial Sequence: Synthetic oligonucleotide
auaucuugagauuuuaggg

SEQ ID NO: 1623878 - RNA, 19 nt, Artificial Sequence
  Description of Artificial Sequence: Synthetic oligonucleotide
aaugauaugaauaucuuga

SEQ ID NO: 1623879 - RNA, 19 nt, Artificial Sequence
  Description of Artificial Sequence: Synthetic oligonucleotide
ucgacguucacuuucagag

SEQ ID NO: 1623880 - RNA, 19 nt, Artificial Sequence
  Description of Artificial Sequence: Synthetic oligonucleotide
aacauggcugcuuucacgg

SEQ ID NO: 1623881 - RNA, 19 nt, Artificial Sequence
  Description of Artificial Sequence: Synthetic oligonucleotide
ugacacgauagcaacaugg

SEQ ID NO: 1623882 - RNA, 19 nt, Artificial Sequence
  Description of Artificial Sequence: Synthetic oligonucleotide
aaaugauaugaauaucuug

SEQ ID NO: 1623883 - RNA, 19 nt, Artificial Sequence
  Description of Artificial Sequence: Synthetic oligonucleotide
cuugcagaaaauuauggcc

SEQ ID NO: 1623884 - RNA, 19 nt, Artificial Sequence
  Description of Artificial Sequence: Synthetic oligonucleotide
uuuacuauauaauuccccu

SEQ ID NO: 1623885 - RNA, 19 nt, Artificial Sequence
  Description of Artificial Sequence: Synthetic oligonucleotide
ucuuaaaugauaugaauau

SEQ ID NO: 1623886 - RNA, 19 nt, Artificial Sequence
  Description of Artificial Sequence: Synthetic oligonucleotide
uucuccacgaaaaugaccu

SEQ ID NO: 1623887 - RNA, 19 nt, Artificial Sequence
  Description of Artificial Sequence: Synthetic oligonucleotide
uuugaggcaaccuggagag

SEQ ID NO: 1623888 - RNA, 19 nt, Artificial Sequence
  Description of Artificial Sequence: Synthetic oligonucleotide
uuuacuuugaguggguggg

SEQ ID NO: 1623889 - RNA, 19 nt, Artificial Sequence
  Description of Artificial Sequence: Synthetic oligonucleotide
uucuugcagaaaauuaugg

SEQ ID NO: 1623890 - RNA, 19 nt, Artificial Sequence
  Description of Artificial Sequence: Synthetic oligonucleotide
acucgaugggguuugaggc

SEQ ID NO: 1623891 - RNA, 19 nt, Artificial Sequence
  Description of Artificial Sequence: Synthetic oligonucleotide
ugaacaggcuaucacgugg

SEQ ID NO: 1623892 - RNA, 19 nt, Artificial Sequence
  Description of Artificial Sequence: Synthetic oligonucleotide
ugauguggaaacaugguca

SEQ ID NO: 1623893 - RNA, 19 nt, Artificial Sequence
  Description of Artificial Sequence: Synthetic oligonucleotide
gaaaagguugaagagaagc

SEQ ID NO: 1623894 - RNA, 19 nt, Artificial Sequence
  Description of Artificial Sequence: Synthetic oligonucleotide
acgaaaaugaccuuagagu

SEQ ID NO: 1623895 - RNA, 19 nt, Artificial Sequence
  Description of Artificial Sequence: Synthetic oligonucleotide
uacuauauaauuccccucu

SEQ ID NO: 1623896 - RNA, 19 nt, Artificial Sequence
  Description of Artificial Sequence: Synthetic oligonucleotide
agucuagugauguggaaac

SEQ ID NO: 1623897 - RNA, 19 nt, Artificial Sequence
  Description of Artificial Sequence: Synthetic oligonucleotide
uugugaacaggcuaucacg

SEQ ID NO: 1623898 - RNA, 19 nt, Artificial Sequence
  Description of Artificial Sequence: Synthetic oligonucleotide
augaccuuagaguucuugc

SEQ ID NO: 1623899 - RNA, 19 nt, Artificial Sequence
  Description of Artificial Sequence: Synthetic oligonucleotide
uugcagaaaauuauggcca

SEQ ID NO: 1623900 - RNA, 19 nt, Artificial Sequence
  Description of Artificial Sequence: Synthetic oligonucleotide
uuagaguucuugcagaaaa

SEQ ID NO: 1623901 - RNA, 19 nt, Artificial Sequence
  Description of Artificial Sequence: Synthetic oligonucleotide
gauaugaauaucuugagau

SEQ ID NO: 1623902 - RNA, 19 nt, Artificial Sequence
  Description of Artificial Sequence: Synthetic oligonucleotide
cuuacucaaaauacaacag

SEQ ID NO: 1623903 - RNA, 19 nt, Artificial Sequence
  Description of Artificial Sequence: Synthetic oligonucleotide
aaauacaacagaacucagg

SEQ ID NO: 1623904 - RNA, 19 nt, Artificial Sequence
  Description of Artificial Sequence: Synthetic oligonucleotide
aaaaugaccuuagaguucu

SEQ ID NO: 1623905 - RNA, 19 nt, Artificial Sequence
  Description of Artificial Sequence: Synthetic oligonucleotide
aggaugaaaagguugaaga

SEQ ID NO: 1623906 - RNA, 19 nt, Artificial Sequence
  Description of Artificial Sequence: Synthetic oligonucleotide
agaacucaggguaacaacc

SEQ ID NO: 1623907 - RNA, 19 nt, Artificial Sequence
  Description of Artificial Sequence: Synthetic oligonucleotide
acgauagcaacauggcugc

SEQ ID NO: 1623908 - RNA, 19 nt, Artificial Sequence
  Description of Artificial Sequence: Synthetic oligonucleotide
aagugauuaccccagcaug

SEQ ID NO: 1623909 - RNA, 19 nt, Artificial Sequence
  Description of Artificial Sequence: Synthetic oligonucleotide
cuuuacuauauaauucccc

SEQ ID NO: 1623910 - RNA, 19 nt, Artificial Sequence
  Description of Artificial Sequence: Synthetic oligonucleotide
aacauucaacccuaaggug

SEQ ID NO: 1623911 - RNA, 19 nt, Artificial Sequence
  Description of Artificial Sequence: Synthetic oligonucleotide
aaccuggagagacaguguc

SEQ ID NO: 1623912 - RNA, 19 nt, Artificial Sequence
  Description of Artificial Sequence: Synthetic oligonucleotide
ugagcuuacucaaaauaca

SEQ ID NO: 1623913 - RNA, 19 nt, Artificial Sequence
  Description of Artificial Sequence: Synthetic oligonucleotide
acauucaacccuaaggugg

SEQ ID NO: 1623914 - RNA, 19 nt, Artificial Sequence
  Description of Artificial Sequence: Synthetic oligonucleotide
ugauaugaauaucuugaga

SEQ ID NO: 1623915 - RNA, 19 nt, Artificial Sequence
  Description of Artificial Sequence: Synthetic oligonucleotide
cacgauagcaacauggcug

SEQ ID NO: 1623916 - RNA, 19 nt, Artificial Sequence
  Description of Artificial Sequence: Synthetic oligonucleotide
gacguagaaacugacuugg

SEQ ID NO: 1623917 - RNA, 19 nt, Artificial Sequence
  Description of Artificial Sequence: Synthetic oligonucleotide
aaaagucuccucgacguuc

SEQ ID NO: 1623918 - RNA, 19 nt, Artificial Sequence
  Description of Artificial Sequence: Synthetic oligonucleotide
auaauuccccucuuaaaug

SEQ ID NO: 1623919 - RNA, 19 nt, Artificial Sequence
  Description of Artificial Sequence: Synthetic oligonucleotide
aagguacgugaauugcugg

SEQ ID NO: 1623920 - RNA, 19 nt, Artificial Sequence
  Description of Artificial Sequence: Synthetic oligonucleotide
uaauuccccucuuaaauga

SEQ ID NO: 1623921 - RNA, 19 nt, Artificial Sequence
  Description of Artificial Sequence: Synthetic oligonucleotide
cacgaaaaugaccuuagag

SEQ ID NO: 1623922 - RNA, 19 nt, Artificial Sequence
  Description of Artificial Sequence: Synthetic oligonucleotide
guagaaacugacuuggaca

SEQ ID NO: 1623923 - RNA, 19 nt, Artificial Sequence
  Description of Artificial Sequence: Synthetic oligonucleotide
aaagguugaagagaagcca

SEQ ID NO: 1623924 - RNA, 19 nt, Artificial Sequence
  Description of Artificial Sequence: Synthetic oligonucleotide
cuuuacuuugagugggugg

SEQ ID NO: 1623925 - RNA, 19 nt, Artificial Sequence
  Description of Artificial Sequence: Synthetic oligonucleotide
ugugaacaggcuaucacgu

SEQ ID NO: 1623926 - RNA, 19 nt, Artificial Sequence
  Description of Artificial Sequence: Synthetic oligonucleotide
uuaagguuagaaagacagc

SEQ ID NO: 1623927 - RNA, 19 nt, Artificial Sequence
  Description of Artificial Sequence: Synthetic oligonucleotide
ucacagucuagugaugugg

SEQ ID NO: 1623928 - RNA, 19 nt, Artificial Sequence
  Description of Artificial Sequence: Synthetic oligonucleotide
ugugaaacaacauccucuc

SEQ ID NO: 1623929 - RNA, 19 nt, Artificial Sequence
  Description of Artificial Sequence: Synthetic oligonucleotide
aagacagcguuaccauugg

SEQ ID NO: 1623930 - RNA, 19 nt, Artificial Sequence
  Description of Artificial Sequence: Synthetic oligonucleotide
accagucgcacccuggucg

SEQ ID NO: 1623931 - RNA, 19 nt, Artificial Sequence
  Description of Artificial Sequence: Synthetic oligonucleotide
uccacgaaaaugaccuuag

SEQ ID NO: 1623932 - RNA, 19 nt, Artificial Sequence
  Description of Artificial Sequence: Synthetic oligonucleotide
cuuggucuugugaacaggc

SEQ ID NO: 1623933 - RNA, 19 nt, Artificial Sequence
  Description of Artificial Sequence: Synthetic oligonucleotide
agcuuaagguuagaaagac

SEQ ID NO: 1623934 - RNA, 19 nt, Artificial Sequence
  Description of Artificial Sequence: Synthetic oligonucleotide
accauuggcaggaagguac

SEQ ID NO: 1623935 - RNA, 19 nt, Artificial Sequence
  Description of Artificial Sequence: Synthetic oligonucleotide
ugggauguggacucggaag

SEQ ID NO: 1623936 - RNA, 19 nt, Artificial Sequence
  Description of Artificial Sequence: Synthetic oligonucleotide
guggugugaaacaacaucc

SEQ ID NO: 1623937 - RNA, 19 nt, Artificial Sequence
  Description of Artificial Sequence: Synthetic oligonucleotide
cacaggaaacccuggaugc

SEQ ID NO: 1623938 - RNA, 19 nt, Artificial Sequence
  Description of Artificial Sequence: Synthetic oligonucleotide
aagguugaagagaagccag

SEQ ID NO: 1623939 - RNA, 19 nt, Artificial Sequence
  Description of Artificial Sequence: Synthetic oligonucleotide
ugggguuucguccaucugu

SEQ ID NO: 1623940 - RNA, 19 nt, Artificial Sequence
  Description of Artificial Sequence: Synthetic oligonucleotide
aacccagaagggcugagga

SEQ ID NO: 1623941 - RNA, 19 nt, Artificial Sequence
  Description of Artificial Sequence: Synthetic oligonucleotide
ugguaucuccaccaccagg

SEQ ID NO: 1623942 - RNA, 19 nt, Artificial Sequence
  Description of Artificial Sequence: Synthetic oligonucleotide
ugcagaaaauuauggccag

SEQ ID NO: 1623943 - RNA, 19 nt, Artificial Sequence
  Description of Artificial Sequence: Synthetic oligonucleotide
uagcaagugauuaccccag

SEQ ID NO: 1623944 - RNA, 19 nt, Artificial Sequence
  Description of Artificial Sequence: Synthetic oligonucleotide
aacccacucuguucucugc

SEQ ID NO: 1623945 - RNA, 19 nt, Artificial Sequence
  Description of Artificial Sequence: Synthetic oligonucleotide
ugaccuuagaguucuugca

SEQ ID NO: 1623946 - RNA, 19 nt, Artificial Sequence
  Description of Artificial Sequence: Synthetic oligonucleotide
ugaauugcugguacuggcu

SEQ ID NO: 1623947 - RNA, 19 nt, Artificial Sequence
  Description of Artificial Sequence: Synthetic oligonucleotide
agggaauuuggcuugcaca

SEQ ID NO: 1623948 - RNA, 19 nt, Artificial Sequence
  Description of Artificial Sequence: Synthetic oligonucleotide
gagcaaacaaaguguggag

SEQ ID NO: 1623949 - RNA, 19 nt, Artificial Sequence
  Description of Artificial Sequence: Synthetic oligonucleotide
cucuuaaaugauaugaaua

SEQ ID NO: 1623950 - RNA, 19 nt, Artificial Sequence
  Description of Artificial Sequence: Synthetic oligonucleotide
uuuuaguaaaagucuccuc

SEQ ID NO: 1623951 - RNA, 19 nt, Artificial Sequence
  Description of Artificial Sequence: Synthetic oligonucleotide
cauucaacccuaagguggc

SEQ ID NO: 1623952 - RNA, 19 nt, Artificial Sequence
  Description of Artificial Sequence: Synthetic oligonucleotide
gacucggaagaccagucgc

SEQ ID NO: 1623953 - RNA, 19 nt, Artificial Sequence
  Description of Artificial Sequence: Synthetic oligonucleotide
cacucgaugggguuugagg

SEQ ID NO: 1623954 - RNA, 19 nt, Artificial Sequence
  Description of Artificial Sequence: Synthetic oligonucleotide
ugaaggagcucacagucua

SEQ ID NO: 1623955 - RNA, 19 nt, Artificial Sequence
  Description of Artificial Sequence: Synthetic oligonucleotide
aacccuaagguggccaagg

SEQ ID NO: 1623956 - RNA, 19 nt, Artificial Sequence
  Description of Artificial Sequence: Synthetic oligonucleotide
agacguagaaacugacuug

SEQ ID NO: 1623957 - RNA, 19 nt, Artificial Sequence
  Description of Artificial Sequence: Synthetic oligonucleotide
cuagugauguggaaacaug

SEQ ID NO: 1623958 - RNA, 19 nt, Artificial Sequence
  Description of Artificial Sequence: Synthetic oligonucleotide
ucgccuuuacuuugagugg

SEQ ID NO: 1623959 - RNA, 19 nt, Artificial Sequence
  Description of Artificial Sequence: Synthetic oligonucleotide
aauuauggccagacagcac

SEQ ID NO: 1623960 - RNA, 19 nt, Artificial Sequence
  Description of Artificial Sequence: Synthetic oligonucleotide
gaagguacgugaauugcug

SEQ ID NO: 1623961 - RNA, 19 nt, Artificial Sequence
  Description of Artificial Sequence: Synthetic oligonucleotide
ugaaaagguugaagagaag

SEQ ID NO: 1623962 - RNA, 19 nt, Artificial Sequence
  Description of Artificial Sequence: Synthetic oligonucleotide
cucggcuccaugcuggugg

SEQ ID NO: 1623963 - RNA, 19 nt, Artificial Sequence
  Description of Artificial Sequence: Synthetic oligonucleotide
uuagaaagacagcguuacc

SEQ ID NO: 1623964 - RNA, 19 nt, Artificial Sequence
  Description of Artificial Sequence: Synthetic oligonucleotide
aaaggcuagcaagugauua

SEQ ID NO: 1623965 - RNA, 19 nt, Artificial Sequence
  Description of Artificial Sequence: Synthetic oligonucleotide
guaaaagucuccucgacgu

SEQ ID NO: 1623966 - RNA, 19 nt, Artificial Sequence
  Description of Artificial Sequence: Synthetic oligonucleotide
auauaauuccccucuuaaa

SEQ ID NO: 1623967 - RNA, 19 nt, Artificial Sequence
  Description of Artificial Sequence: Synthetic oligonucleotide
caggcuaucacguggugug

SEQ ID NO: 1623968 - RNA, 19 nt, Artificial Sequence
  Description of Artificial Sequence: Synthetic oligonucleotide
uaucacguggugugaaaca

SEQ ID NO: 1623969 - RNA, 19 nt, Artificial Sequence
  Description of Artificial Sequence: Synthetic oligonucleotide
cagaaaauuauggccagac

SEQ ID NO: 1623970 - RNA, 19 nt, Artificial Sequence
  Description of Artificial Sequence: Synthetic oligonucleotide
uucacgggcagccuuuacu

SEQ ID NO: 1623971 - RNA, 19 nt, Artificial Sequence
  Description of Artificial Sequence: Synthetic oligonucleotide
augaaaagguugaagagaa

SEQ ID NO: 1623972 - RNA, 19 nt, Artificial Sequence
  Description of Artificial Sequence: Synthetic oligonucleotide
uggaagcugcaucaaggug

SEQ ID NO: 1623973 - RNA, 19 nt, Artificial Sequence
  Description of Artificial Sequence: Synthetic oligonucleotide
ugggacacaccuuucuaca

SEQ ID NO: 1623974 - RNA, 19 nt, Artificial Sequence
  Description of Artificial Sequence: Synthetic oligonucleotide
cuagcaagugauuacccca

SEQ ID NO: 1623975 - RNA, 19 nt, Artificial Sequence
  Description of Artificial Sequence: Synthetic oligonucleotide
uacuuugagugggugggcg

SEQ ID NO: 1623976 - RNA, 19 nt, Artificial Sequence
  Description of Artificial Sequence: Synthetic oligonucleotide
agcuuacucaaaauacaac

SEQ ID NO: 1623977 - RNA, 19 nt, Artificial Sequence
  Description of Artificial Sequence: Synthetic oligonucleotide
gacacgauagcaacauggc

SEQ ID NO: 1623978 - RNA, 19 nt, Artificial Sequence
  Description of Artificial Sequence: Synthetic oligonucleotide
ugcaucacacaggagguug

SEQ ID NO: 1623979 - RNA, 19 nt, Artificial Sequence
  Description of Artificial Sequence: Synthetic oligonucleotide
gaauggugguaucuccacc

SEQ ID NO: 1623980 - RNA, 19 nt, Artificial Sequence
  Description of Artificial Sequence: Synthetic oligonucleotide
gugaauugcugguacuggc

SEQ ID NO: 1623981 - RNA, 19 nt, Artificial Sequence
  Description of Artificial Sequence: Synthetic oligonucleotide
accaccagggaauuuggcu

SEQ ID NO: 1623982 - RNA, 19 nt, Artificial Sequence
  Description of Artificial Sequence: Synthetic oligonucleotide
ucuagugauguggaaacau

SEQ ID NO: 1623983 - RNA, 19 nt, Artificial Sequence
  Description of Artificial Sequence: Synthetic oligonucleotide
uuggcuugcacaggucucg

SEQ ID NO: 1623984 - RNA, 19 nt, Artificial Sequence
  Description of Artificial Sequence: Synthetic oligonucleotide
ucacaggaaaacacaccca

SEQ ID NO: 1623985 - RNA, 19 nt, Artificial Sequence
  Description of Artificial Sequence: Synthetic oligonucleotide
agcaagugauuaccccagc

SEQ ID NO: 1623986 - RNA, 19 nt, Artificial Sequence
  Description of Artificial Sequence: Synthetic oligonucleotide
aaaacacacccaggcuucg

SEQ ID NO: 1623987 - RNA, 19 nt, Artificial Sequence
  Description of Artificial Sequence: Synthetic oligonucleotide
gugauguggaaacaugguc

SEQ ID NO: 1623988 - RNA, 19 nt, Artificial Sequence
  Description of Artificial Sequence: Synthetic oligonucleotide
uggugugaaacaacauccu

SEQ ID NO: 1623989 - RNA, 19 nt, Artificial Sequence
  Description of Artificial Sequence: Synthetic oligonucleotide
uggucuugugaacaggcua

SEQ ID NO: 1623990 - RNA, 19 nt, Artificial Sequence
  Description of Artificial Sequence: Synthetic oligonucleotide
aaacacacccaggcuucgc

SEQ ID NO: 1623991 - RNA, 19 nt, Artificial Sequence
  Description of Artificial Sequence: Synthetic oligonucleotide
gaccauauggcugaaccca

SEQ ID NO: 1623992 - RNA, 19 nt, Artificial Sequence
  Description of Artificial Sequence: Synthetic oligonucleotide
ggcagugacgaacucagcc

SEQ ID NO: 1623993 - RNA, 19 nt, Artificial Sequence
  Description of Artificial Sequence: Synthetic oligonucleotide
guguggagcagcuggcacg

SEQ ID NO: 1623994 - RNA, 19 nt, Artificial Sequence
  Description of Artificial Sequence: Synthetic oligonucleotide
aagguuagaaagacagcgu

SEQ ID NO: 1623995 - RNA, 19 nt, Artificial Sequence
  Description of Artificial Sequence: Synthetic oligonucleotide
aggagaauggccacaccac

SEQ ID NO: 1623996 - RNA, 19 nt, Artificial Sequence
  Description of Artificial Sequence: Synthetic oligonucleotide
gaaaacacacccaggcuuc

SEQ ID NO: 1623997 - RNA, 19 nt, Artificial Sequence
  Description of Artificial Sequence: Synthetic oligonucleotide
guugaagagaagccaggac

SEQ ID NO: 1623998 - RNA, 19 nt, Artificial Sequence
  Description of Artificial Sequence: Synthetic oligonucleotide
cagaacucaggguaacaac

SEQ ID NO: 1623999 - RNA, 19 nt, Artificial Sequence
  Description of Artificial Sequence: Synthetic oligonucleotide
aaggugggauggcagugug

SEQ ID NO: 1624000 - RNA, 19 nt, Artificial Sequence
  Description of Artificial Sequence: Synthetic oligonucleotide
auacaacagaacucagggu

SEQ ID NO: 1624001 - RNA, 19 nt, Artificial Sequence
  Description of Artificial Sequence: Synthetic oligonucleotide
auuaccccagcaugcacca

SEQ ID NO: 1624002 - RNA, 19 nt, Artificial Sequence
  Description of Artificial Sequence: Synthetic oligonucleotide
uuaccauuggcaggaaggu

SEQ ID NO: 1624003 - RNA, 19 nt, Artificial Sequence
  Description of Artificial Sequence: Synthetic oligonucleotide
uggagagacaguguccggc

SEQ ID NO: 1624004 - RNA, 19 nt, Artificial Sequence
  Description of Artificial Sequence: Synthetic oligonucleotide
ugggccucacugcacacug

SEQ ID NO: 1624005 - RNA, 19 nt, Artificial Sequence
  Description of Artificial Sequence: Synthetic oligonucleotide
acacgauagcaacauggcu

SEQ ID NO: 1624006 - RNA, 19 nt, Artificial Sequence
  Description of Artificial Sequence: Synthetic oligonucleotide
agcguuaccauuggcagga

SEQ ID NO: 1624007 - RNA, 19 nt, Artificial Sequence
  Description of Artificial Sequence: Synthetic oligonucleotide
auggugguaucuccaccac

SEQ ID NO: 1624008 - RNA, 19 nt, Artificial Sequence
  Description of Artificial Sequence: Synthetic oligonucleotide
caucaaggugggauggcag

SEQ ID NO: 1624009 - RNA, 19 nt, Artificial Sequence
  Description of Artificial Sequence: Synthetic oligonucleotide
ugcagacguagaaacugac

SEQ ID NO: 1624010 - RNA, 19 nt, Artificial Sequence
  Description of Artificial Sequence: Synthetic oligonucleotide
ucucccagacaugauggcc

SEQ ID NO: 1624011 - RNA, 19 nt, Artificial Sequence
  Description of Artificial Sequence: Synthetic oligonucleotide
uuauggccagacagcacca

SEQ ID NO: 1624012 - RNA, 19 nt, Artificial Sequence
  Description of Artificial Sequence: Synthetic oligonucleotide
aucaaggugggauggcagu

SEQ ID NO: 1624013 - RNA, 19 nt, Artificial Sequence
  Description of Artificial Sequence: Synthetic oligonucleotide
gugacgaacucagccaccg

SEQ ID NO: 1624014 - RNA, 19 nt, Artificial Sequence
  Description of Artificial Sequence: Synthetic oligonucleotide
agacagcguuaccauuggc

SEQ ID NO: 1624015 - RNA, 19 nt, Artificial Sequence
  Description of Artificial Sequence: Synthetic oligonucleotide
gagugggugggcgacuugg

SEQ ID NO: 1624016 - RNA, 19 nt, Artificial Sequence
  Description of Artificial Sequence: Synthetic oligonucleotide
caggaagguacgugaauug

SEQ ID NO: 1624017 - RNA, 19 nt, Artificial Sequence
  Description of Artificial Sequence: Synthetic oligonucleotide
gaccccucugacacgauag

SEQ ID NO: 1624018 - RNA, 19 nt, Artificial Sequence
  Description of Artificial Sequence: Synthetic oligonucleotide
gcaaacaaaguguggagca

SEQ ID NO: 1624019 - RNA, 19 nt, Artificial Sequence
  Description of Artificial Sequence: Synthetic oligonucleotide
uggugguaucuccaccacc

SEQ ID NO: 1624020 - RNA, 19 nt, Artificial Sequence
  Description of Artificial Sequence: Synthetic oligonucleotide
accccucugacacgauagc

SEQ ID NO: 1624021 - RNA, 19 nt, Artificial Sequence
  Description of Artificial Sequence: Synthetic oligonucleotide
guacgugaauugcugguac

SEQ ID NO: 1624022 - RNA, 19 nt, Artificial Sequence
  Description of Artificial Sequence: Synthetic oligonucleotide
acacacauccugccacagg

SEQ ID NO: 1624023 - RNA, 19 nt, Artificial Sequence
  Description of Artificial Sequence: Synthetic oligonucleotide
aaagucuccucgacguuca

SEQ ID NO: 1624024 - RNA, 19 nt, Artificial Sequence
  Description of Artificial Sequence: Synthetic oligonucleotide
gagcuuaagguuagaaaga

SEQ ID NO: 1624025 - RNA, 19 nt, Artificial Sequence
  Description of Artificial Sequence: Synthetic oligonucleotide
caggagaauggccacacca

SEQ ID NO: 1624026 - RNA, 19 nt, Artificial Sequence
  Description of Artificial Sequence: Synthetic oligonucleotide
gcuacguggacugugggag

SEQ ID NO: 1624027 - RNA, 19 nt, Artificial Sequence
  Description of Artificial Sequence: Synthetic oligonucleotide
aacaggcuaucacguggug

SEQ ID NO: 1624028 - RNA, 19 nt, Artificial Sequence
  Description of Artificial Sequence: Synthetic oligonucleotide
uggacagggcugguuaucc

SEQ ID NO: 1624029 - RNA, 19 nt, Artificial Sequence
  Description of Artificial Sequence: Synthetic oligonucleotide
acuuggucuugugaacagg

SEQ ID NO: 1624030 - RNA, 19 nt, Artificial Sequence
  Description of Artificial Sequence: Synthetic oligonucleotide
aagaccagucgcacccugg

SEQ ID NO: 1624031 - RNA, 19 nt, Artificial Sequence
  Description of Artificial Sequence: Synthetic oligonucleotide
acaggagguugaugggcgg

SEQ ID NO: 1624032 - RNA, 19 nt, Artificial Sequence
  Description of Artificial Sequence: Synthetic oligonucleotide
uuauccucugguugcggaa

SEQ ID NO: 1624033 - RNA, 19 nt, Artificial Sequence
  Description of Artificial Sequence: Synthetic oligonucleotide
uucucugcacacacauccu

SEQ ID NO: 1624034 - RNA, 19 nt, Artificial Sequence
  Description of Artificial Sequence: Synthetic oligonucleotide
acugacuuggacagggcug

SEQ ID NO: 1624035 - RNA, 19 nt, Artificial Sequence
  Description of Artificial Sequence: Synthetic oligonucleotide
gagaauggccacaccacac

SEQ ID NO: 1624036 - RNA, 19 nt, Artificial Sequence
  Description of Artificial Sequence: Synthetic oligonucleotide
ucacguggugugaaacaac

SEQ ID NO: 1624037 - RNA, 19 nt, Artificial Sequence
  Description of Artificial Sequence: Synthetic oligonucleotide
uacgugaauugcugguacu

SEQ ID NO: 1624038 - RNA, 19 nt, Artificial Sequence
  Description of Artificial Sequence: Synthetic oligonucleotide
cuaucacguggugugaaac

SEQ ID NO: 1624039 - RNA, 19 nt, Artificial Sequence
  Description of Artificial Sequence: Synthetic oligonucleotide
gcuagcaagugauuacccc

SEQ ID NO: 1624040 - RNA, 19 nt, Artificial Sequence
  Description of Artificial Sequence: Synthetic oligonucleotide
gugguuuuaguaaaagucu

SEQ ID NO: 1624041 - RNA, 19 nt, Artificial Sequence
  Description of Artificial Sequence: Synthetic oligonucleotide
gaacccagaagggcugagg

SEQ ID NO: 1624042 - RNA, 19 nt, Artificial Sequence
  Description of Artificial Sequence: Synthetic oligonucleotide
acuauauaauuccccucuu

SEQ ID NO: 1624043 - RNA, 19 nt, Artificial Sequence
  Description of Artificial Sequence: Synthetic oligonucleotide
ugguuauccucugguugcg

SEQ ID NO: 1624044 - RNA, 19 nt, Artificial Sequence
  Description of Artificial Sequence: Synthetic oligonucleotide
accuggagagacagugucc

SEQ ID NO: 1624045 - RNA, 19 nt, Artificial Sequence
  Description of Artificial Sequence: Synthetic oligonucleotide
uucaacccuaagguggcca

SEQ ID NO: 1624046 - RNA, 19 nt, Artificial Sequence
  Description of Artificial Sequence: Synthetic oligonucleotide
uggcacgccuggaagcugc

SEQ ID NO: 1624047 - RNA, 19 nt, Artificial Sequence
  Description of Artificial Sequence: Synthetic oligonucleotide
cagcguuaccauuggcagg

SEQ ID NO: 1624048 - RNA, 19 nt, Artificial Sequence
  Description of Artificial Sequence: Synthetic oligonucleotide
uggacucggaagaccaguc

SEQ ID NO: 1624049 - RNA, 19 nt, Artificial Sequence
  Description of Artificial Sequence: Synthetic oligonucleotide
ucggaagaccagucgcacc

SEQ ID NO: 1624050 - RNA, 19 nt, Artificial Sequence
  Description of Artificial Sequence: Synthetic oligonucleotide
acgugaauugcugguacug

SEQ ID NO: 1624051 - RNA, 19 nt, Artificial Sequence
  Description of Artificial Sequence: Synthetic oligonucleotide
caguguccggccauugggc

SEQ ID NO: 1624052 - RNA, 19 nt, Artificial Sequence
  Description of Artificial Sequence: Synthetic oligonucleotide
cucugguugcggaauggug

SEQ ID NO: 1624053 - RNA, 19 nt, Artificial Sequence
  Description of Artificial Sequence: Synthetic oligonucleotide
ggacacaccuuucuacaag

SEQ ID NO: 1624054 - RNA, 19 nt, Artificial Sequence
  Description of Artificial Sequence: Synthetic oligonucleotide
gauccagccaagaggcuac

SEQ ID NO: 1624055 - RNA, 19 nt, Artificial Sequence
  Description of Artificial Sequence: Synthetic oligonucleotide
agguugaagagaagccagg

SEQ ID NO: 1624056 - RNA, 19 nt, Artificial Sequence
  Description of Artificial Sequence: Synthetic oligonucleotide
acagaacucaggguaacaa

SEQ ID NO: 1624057 - RNA, 19 nt, Artificial Sequence
  Description of Artificial Sequence: Synthetic oligonucleotide
ucaacccuaagguggccaa

SEQ ID NO: 1624058 - RNA, 19 nt, Artificial Sequence
  Description of Artificial Sequence: Synthetic oligonucleotide
cagagcuuaagguuagaaa

SEQ ID NO: 1624059 - RNA, 19 nt, Artificial Sequence
  Description of Artificial Sequence: Synthetic oligonucleotide
aagucuccucgacguucac

SEQ ID NO: 1624060 - RNA, 19 nt, Artificial Sequence
  Description of Artificial Sequence: Synthetic oligonucleotide
guuauccucugguugcgga

SEQ ID NO: 1624061 - RNA, 19 nt, Artificial Sequence
  Description of Artificial Sequence: Synthetic oligonucleotide
gaggaagaccugcaucaca

SEQ ID NO: 1624062 - RNA, 19 nt, Artificial Sequence
  Description of Artificial Sequence: Synthetic oligonucleotide
gaagaccagucgcacccug

SEQ ID NO: 1624063 - RNA, 19 nt, Artificial Sequence
  Description of Artificial Sequence: Synthetic oligonucleotide
ucuugggauuggaggcaag

SEQ ID NO: 1624064 - RNA, 19 nt, Artificial Sequence
  Description of Artificial Sequence: Synthetic oligonucleotide
auugggcugugggaugugg

SEQ ID NO: 1624065 - RNA, 19 nt, Artificial Sequence
  Description of Artificial Sequence: Synthetic oligonucleotide
gugaacaggcuaucacgug

SEQ ID NO: 1624066 - RNA, 19 nt, Artificial Sequence
  Description of Artificial Sequence: Synthetic oligonucleotide
uccucugguugcggaaugg

SEQ ID NO: 1624067 - RNA, 19 nt, Artificial Sequence
  Description of Artificial Sequence: Synthetic oligonucleotide
acuuugagugggugggcga

SEQ ID NO: 1624068 - RNA, 19 nt, Artificial Sequence
  Description of Artificial Sequence: Synthetic oligonucleotide
guagcugucugugcuuugc

SEQ ID NO: 1624069 - RNA, 19 nt, Artificial Sequence
  Description of Artificial Sequence: Synthetic oligonucleotide
auugcugguacuggcuucu

SEQ ID NO: 1624070 - RNA, 19 nt, Artificial Sequence
  Description of Artificial Sequence: Synthetic oligonucleotide
caccagggaauuuggcuug

SEQ ID NO: 1624071 - RNA, 19 nt, Artificial Sequence
  Description of Artificial Sequence: Synthetic oligonucleotide
cucacagucuagugaugug

SEQ ID NO: 1624072 - RNA, 19 nt, Artificial Sequence
  Description of Artificial Sequence: Synthetic oligonucleotide
gaacucagccaccgugcgc

SEQ ID NO: 1624073 - RNA, 19 nt, Artificial Sequence
  Description of Artificial Sequence: Synthetic oligonucleotide
ggaccauauggcugaaccc

SEQ ID NO: 1624074 - RNA, 19 nt, Artificial Sequence
  Description of Artificial Sequence: Synthetic oligonucleotide
guuucguccaucugugugu

SEQ ID NO: 1624075 - RNA, 19 nt, Artificial Sequence
  Description of Artificial Sequence: Synthetic oligonucleotide
ggagagacaguguccggcc

SEQ ID NO: 1624076 - RNA, 19 nt, Artificial Sequence
  Description of Artificial Sequence: Synthetic oligonucleotide
uccccucuuaaaugauaug

SEQ ID NO: 1624077 - RNA, 19 nt, Artificial Sequence
  Description of Artificial Sequence: Synthetic oligonucleotide
auguggacucggaagacca

SEQ ID NO: 1624078 - RNA, 19 nt, Artificial Sequence
  Description of Artificial Sequence: Synthetic oligonucleotide
ccuggagagacaguguccg

SEQ ID NO: 1624079 - RNA, 19 nt, Artificial Sequence
  Description of Artificial Sequence: Synthetic oligonucleotide
aucacguggugugaaacaa

SEQ ID NO: 1624080 - RNA, 19 nt, Artificial Sequence
  Description of Artificial Sequence: Synthetic oligonucleotide
uuacuuugagugggugggc

SEQ ID NO: 1624081 - RNA, 19 nt, Artificial Sequence
  Description of Artificial Sequence: Synthetic oligonucleotide
cagggaauuuggcuugcac

SEQ ID NO: 1624082 - RNA, 19 nt, Artificial Sequence
  Description of Artificial Sequence: Synthetic oligonucleotide
ugggaggcggacuggugca

SEQ ID NO: 1624083 - RNA, 19 nt, Artificial Sequence
  Description of Artificial Sequence: Synthetic oligonucleotide
cuccucgacguucacuuuc

SEQ ID NO: 1624084 - RNA, 19 nt, Artificial Sequence
  Description of Artificial Sequence: Synthetic oligonucleotide
cuuugagugggugggcgac

SEQ ID NO: 1624085 - RNA, 19 nt, Artificial Sequence
  Description of Artificial Sequence: Synthetic oligonucleotide
gaggcggacuggugcagag

SEQ ID NO: 1624086 - RNA, 19 nt, Artificial Sequence
  Description of Artificial Sequence: Synthetic oligonucleotide
aggcaaccuggagagacag

SEQ ID NO: 1624087 - RNA, 19 nt, Artificial Sequence
  Description of Artificial Sequence: Synthetic oligonucleotide
ggacucggaagaccagucg

SEQ ID NO: 1624088 - RNA, 19 nt, Artificial Sequence
  Description of Artificial Sequence: Synthetic oligonucleotide
ucuugccgccaaugacugg

SEQ ID NO: 1624089 - RNA, 19 nt, Artificial Sequence
  Description of Artificial Sequence: Synthetic oligonucleotide
ggaauggugguaucuccac

SEQ ID NO: 1624090 - RNA, 19 nt, Artificial Sequence
  Description of Artificial Sequence: Synthetic oligonucleotide
cuaagguggccaaggucuc

SEQ ID NO: 1624091 - RNA, 19 nt, Artificial Sequence
  Description of Artificial Sequence: Synthetic oligonucleotide
agagacaguguccggccau

SEQ ID NO: 1624092 - RNA, 19 nt, Artificial Sequence
  Description of Artificial Sequence: Synthetic oligonucleotide
cugguacuggcuucucuuc

SEQ ID NO: 1624093 - RNA, 19 nt, Artificial Sequence
  Description of Artificial Sequence: Synthetic oligonucleotide
acaggcuaucacguggugu

SEQ ID NO: 1624094 - RNA, 19 nt, Artificial Sequence
  Description of Artificial Sequence: Synthetic oligonucleotide
agaggcuacguggacugug

SEQ ID NO: 1624095 - RNA, 19 nt, Artificial Sequence
  Description of Artificial Sequence: Synthetic oligonucleotide
ucgaugggguuugaggcaa

SEQ ID NO: 1624096 - RNA, 19 nt, Artificial Sequence
  Description of Artificial Sequence: Synthetic oligonucleotide
accauauggcugaacccag

SEQ ID NO: 1624097 - RNA, 19 nt, Artificial Sequence
  Description of Artificial Sequence: Synthetic oligonucleotide
gggaggauccagccaagag

SEQ ID NO: 1624098 - RNA, 19 nt, Artificial Sequence
  Description of Artificial Sequence: Synthetic oligonucleotide
agccucugugguuuuagua

SEQ ID NO: 1624099 - RNA, 19 nt, Artificial Sequence
  Description of Artificial Sequence: Synthetic oligonucleotide
cagacguagaaacugacuu

SEQ ID NO: 1624100 - RNA, 19 nt, Artificial Sequence
  Description of Artificial Sequence: Synthetic oligonucleotide
ugacuggguagcugucugu

SEQ ID NO: 1624101 - RNA, 19 nt, Artificial Sequence
  Description of Artificial Sequence: Synthetic oligonucleotide
agucgcacccuggucguuc

SEQ ID NO: 1624102 - RNA, 19 nt, Artificial Sequence
  Description of Artificial Sequence: Synthetic oligonucleotide
caacccacucuguucucug

SEQ ID NO: 1624103 - RNA, 19 nt, Artificial Sequence
  Description of Artificial Sequence: Synthetic oligonucleotide
ugcaucaaggugggauggc

SEQ ID NO: 1624104 - RNA, 19 nt, Artificial Sequence
  Description of Artificial Sequence: Synthetic oligonucleotide
gcagugacgaacucagcca

SEQ ID NO: 1624105 - RNA, 19 nt, Artificial Sequence
  Description of Artificial Sequence: Synthetic oligonucleotide
uguccggccauugggcugu

SEQ ID NO: 1624106 - RNA, 19 nt, Artificial Sequence
  Description of Artificial Sequence: Synthetic oligonucleotide
gacuggugcagagcaaaca

SEQ ID NO: 1624107 - RNA, 19 nt, Artificial Sequence
  Description of Artificial Sequence: Synthetic oligonucleotide
uugcggaauggugguaucu

SEQ ID NO: 1624108 - RNA, 19 nt, Artificial Sequence
  Description of Artificial Sequence: Synthetic oligonucleotide
ggcgacuuggucuugugaa

SEQ ID NO: 1624109 - RNA, 19 nt, Artificial Sequence
  Description of Artificial Sequence: Synthetic oligonucleotide
ccucugacacgauagcaac

SEQ ID NO: 1624110 - RNA, 19 nt, Artificial Sequence
  Description of Artificial Sequence: Synthetic oligonucleotide
cucgacguucacuuucaga

SEQ ID NO: 1624111 - RNA, 19 nt, Artificial Sequence
  Description of Artificial Sequence: Synthetic oligonucleotide
ugaacccagaagggcugag

SEQ ID NO: 1624112 - RNA, 19 nt, Artificial Sequence
  Description of Artificial Sequence: Synthetic oligonucleotide
agcaugcaccagucacagg

SEQ ID NO: 1624113 - RNA, 19 nt, Artificial Sequence
  Description of Artificial Sequence: Synthetic oligonucleotide
gccgccaaugacuggguag

SEQ ID NO: 1624114 - RNA, 19 nt, Artificial Sequence
  Description of Artificial Sequence: Synthetic oligonucleotide
cguagaaacugacuuggac

SEQ ID NO: 1624115 - RNA, 19 nt, Artificial Sequence
  Description of Artificial Sequence: Synthetic oligonucleotide
cacagaccccucugacacg

SEQ ID NO: 1624116 - RNA, 19 nt, Artificial Sequence
  Description of Artificial Sequence: Synthetic oligonucleotide
cguggugugaaacaacauc

SEQ ID NO: 1624117 - RNA, 19 nt, Artificial Sequence
  Description of Artificial Sequence: Synthetic oligonucleotide
ugggccgaccgcugggagc

SEQ ID NO: 1624118 - RNA, 19 nt, Artificial Sequence
  Description of Artificial Sequence: Synthetic oligonucleotide
caggagguugaugggcggg

SEQ ID NO: 1624119 - RNA, 19 nt, Artificial Sequence
  Description of Artificial Sequence: Synthetic oligonucleotide
uggcuugcacaggucucgg

SEQ ID NO: 1624120 - RNA, 19 nt, Artificial Sequence
  Description of Artificial Sequence: Synthetic oligonucleotide
cucggaagaccagucgcac

SEQ ID NO: 1624121 - RNA, 19 nt, Artificial Sequence
  Description of Artificial Sequence: Synthetic oligonucleotide
gcuugcacaggucucgguc

SEQ ID NO: 1624122 - RNA, 19 nt, Artificial Sequence
  Description of Artificial Sequence: Synthetic oligonucleotide
uuugagugggugggcgacu

SEQ ID NO: 1624123 - RNA, 19 nt, Artificial Sequence
  Description of Artificial Sequence: Synthetic oligonucleotide
acgggcagccuuuacuaua

SEQ ID NO: 1624124 - RNA, 19 nt, Artificial Sequence
  Description of Artificial Sequence: Synthetic oligonucleotide
gugaaacaacauccucuca

SEQ ID NO: 1624125 - RNA, 19 nt, Artificial Sequence
  Description of Artificial Sequence: Synthetic oligonucleotide
ugacgaacucagccaccgu

SEQ ID NO: 1624126 - RNA, 19 nt, Artificial Sequence
  Description of Artificial Sequence: Synthetic oligonucleotide
cugacacgauagcaacaug

SEQ ID NO: 1624127 - RNA, 19 nt, Artificial Sequence
  Description of Artificial Sequence: Synthetic oligonucleotide
cagucuagugauguggaaa

SEQ ID NO: 1624128 - RNA, 19 nt, Artificial Sequence
  Description of Artificial Sequence: Synthetic oligonucleotide
cggaagaccagucgcaccc

SEQ ID NO: 1624129 - RNA, 19 nt, Artificial Sequence
  Description of Artificial Sequence: Synthetic oligonucleotide
ccauuggcaggaagguacg

SEQ ID NO: 1624130 - RNA, 19 nt, Artificial Sequence
  Description of Artificial Sequence: Synthetic oligonucleotide
gcaagugauuaccccagca

SEQ ID NO: 1624131 - RNA, 19 nt, Artificial Sequence
  Description of Artificial Sequence: Synthetic oligonucleotide
ggcagccuuuacuauauaa

SEQ ID NO: 1624132 - RNA, 19 nt, Artificial Sequence
  Description of Artificial Sequence: Synthetic oligonucleotide
acccuaagguggccaaggu

SEQ ID NO: 1624133 - RNA, 19 nt, Artificial Sequence
  Description of Artificial Sequence: Synthetic oligonucleotide
ggcggacuggugcagagca

SEQ ID NO: 1624134 - RNA, 19 nt, Artificial Sequence
  Description of Artificial Sequence: Synthetic oligonucleotide
gccaucuggggccuucucc

SEQ ID NO: 1624135 - RNA, 19 nt, Artificial Sequence
  Description of Artificial Sequence: Synthetic oligonucleotide
uuucguccaucuguguguu

SEQ ID NO: 1624136 - RNA, 19 nt, Artificial Sequence
  Description of Artificial Sequence: Synthetic oligonucleotide
cagcaccaucuucuugccg

SEQ ID NO: 1624137 - RNA, 19 nt, Artificial Sequence
  Description of Artificial Sequence: Synthetic oligonucleotide
caggguaacaacccacucu

SEQ ID NO: 1624138 - RNA, 19 nt, Artificial Sequence
  Description of Artificial Sequence: Synthetic oligonucleotide
acauccugccacaggagaa

SEQ ID NO: 1624139 - RNA, 19 nt, Artificial Sequence
  Description of Artificial Sequence: Synthetic oligonucleotide
guugcggaauggugguauc

SEQ ID NO: 1624140 - RNA, 19 nt, Artificial Sequence
  Description of Artificial Sequence: Synthetic oligonucleotide
guguccggccauugggcug

SEQ ID NO: 1624141 - RNA, 19 nt, Artificial Sequence
  Description of Artificial Sequence: Synthetic oligonucleotide
ccagccaagaggcuacgug

SEQ ID NO: 1624142 - RNA, 19 nt, Artificial Sequence
  Description of Artificial Sequence: Synthetic oligonucleotide
ccccucuuaaaugauauga

SEQ ID NO: 1624143 - RNA, 19 nt, Artificial Sequence
  Description of Artificial Sequence: Synthetic oligonucleotide
agccaagaggcuacgugga

SEQ ID NO: 1624144 - RNA, 19 nt, Artificial Sequence
  Description of Artificial Sequence: Synthetic oligonucleotide
guaucuccaccaccaggga

SEQ ID NO: 1624145 - RNA, 19 nt, Artificial Sequence
  Description of Artificial Sequence: Synthetic oligonucleotide
gggguuucguccaucugug

SEQ ID NO: 1624146 - RNA, 19 nt, Artificial Sequence
  Description of Artificial Sequence: Synthetic oligonucleotide
ggcuagcaagugauuaccc

SEQ ID NO: 1624147 - RNA, 19 nt, Artificial Sequence
  Description of Artificial Sequence: Synthetic oligonucleotide
gaacaggcuaucacguggu

SEQ ID NO: 1624148 - RNA, 19 nt, Artificial Sequence
  Description of Artificial Sequence: Synthetic oligonucleotide
uugccgccaaugacugggu

SEQ ID NO: 1624149 - RNA, 19 nt, Artificial Sequence
  Description of Artificial Sequence: Synthetic oligonucleotide
uggguagcugucugugcuu

SEQ ID NO: 1624150 - RNA, 19 nt, Artificial Sequence
  Description of Artificial Sequence: Synthetic oligonucleotide
ccggccauugggcuguggg

SEQ ID NO: 1624151 - RNA, 19 nt, Artificial Sequence
  Description of Artificial Sequence: Synthetic oligonucleotide
cuggguagcugucugugcu

SEQ ID NO: 1624152 - RNA, 19 nt, Artificial Sequence
  Description of Artificial Sequence: Synthetic oligonucleotide
agaccccucugacacgaua

SEQ ID NO: 1624153 - RNA, 19 nt, Artificial Sequence
  Description of Artificial Sequence: Synthetic oligonucleotide
gguuauccucugguugcgg

SEQ ID NO: 1624154 - RNA, 19 nt, Artificial Sequence
  Description of Artificial Sequence: Synthetic oligonucleotide
gaccagucgcacccugguc

SEQ ID NO: 1624155 - RNA, 19 nt, Artificial Sequence
  Description of Artificial Sequence: Synthetic oligonucleotide
aagaggcuacguggacugu

SEQ ID NO: 1624156 - RNA, 19 nt, Artificial Sequence
  Description of Artificial Sequence: Synthetic oligonucleotide
aucuugggauuggaggcaa

SEQ ID NO: 1624157 - RNA, 19 nt, Artificial Sequence
  Description of Artificial Sequence: Synthetic oligonucleotide
agacaguguccggccauug

SEQ ID NO: 1624158 - RNA, 19 nt, Artificial Sequence
  Description of Artificial Sequence: Synthetic oligonucleotide
gugggauguggacucggaa

SEQ ID NO: 1624159 - RNA, 19 nt, Artificial Sequence
  Description of Artificial Sequence: Synthetic oligonucleotide
gcgacuuggucuugugaac

SEQ ID NO: 1624160 - RNA, 19 nt, Artificial Sequence
  Description of Artificial Sequence: Synthetic oligonucleotide
auuccccucuuaaaugaua

SEQ ID NO: 1624161 - RNA, 19 nt, Artificial Sequence
  Description of Artificial Sequence: Synthetic oligonucleotide
caacccuaagguggccaag

SEQ ID NO: 1624162 - RNA, 19 nt, Artificial Sequence
  Description of Artificial Sequence: Synthetic oligonucleotide
cuccacgaaaaugaccuua

SEQ ID NO: 1624163 - RNA, 19 nt, Artificial Sequence
  Description of Artificial Sequence: Synthetic oligonucleotide
gaccgcugggagcacucga

SEQ ID NO: 1624164 - RNA, 19 nt, Artificial Sequence
  Description of Artificial Sequence: Synthetic oligonucleotide
uugagugggugggcgacuu

SEQ ID NO: 1624165 - RNA, 19 nt, Artificial Sequence
  Description of Artificial Sequence: Synthetic oligonucleotide
gucuagugauguggaaaca

SEQ ID NO: 1624166 - RNA, 19 nt, Artificial Sequence
  Description of Artificial Sequence: Synthetic oligonucleotide
gguggccaaggucucucug

SEQ ID NO: 1624167 - RNA, 19 nt, Artificial Sequence
  Description of Artificial Sequence: Synthetic oligonucleotide
gguaacaacccacucuguu

SEQ ID NO: 1624168 - RNA, 19 nt, Artificial Sequence
  Description of Artificial Sequence: Synthetic oligonucleotide
acguggacugugggaggcg

SEQ ID NO: 1624169 - RNA, 19 nt, Artificial Sequence
  Description of Artificial Sequence: Synthetic oligonucleotide
ccgccaaugacuggguagc

SEQ ID NO: 1624170 - RNA, 19 nt, Artificial Sequence
  Description of Artificial Sequence: Synthetic oligonucleotide
ggcuacguggacuguggga

SEQ ID NO: 1624171 - RNA, 19 nt, Artificial Sequence
  Description of Artificial Sequence: Synthetic oligonucleotide
cgccuuuacuuugaguggg

SEQ ID NO: 1624172 - RNA, 19 nt, Artificial Sequence
  Description of Artificial Sequence: Synthetic oligonucleotide
gcuuaagguuagaaagaca

SEQ ID NO: 1624173 - RNA, 19 nt, Artificial Sequence
  Description of Artificial Sequence: Synthetic oligonucleotide
uccagccaagaggcuacgu

SEQ ID NO: 1624174 - RNA, 19 nt, Artificial Sequence
  Description of Artificial Sequence: Synthetic oligonucleotide
gguagcugucugugcuuug

SEQ ID NO: 1624175 - RNA, 19 nt, Artificial Sequence
  Description of Artificial Sequence: Synthetic oligonucleotide
caccuuucuacaagcuugu

SEQ ID NO: 1624176 - RNA, 19 nt, Artificial Sequence
  Description of Artificial Sequence: Synthetic oligonucleotide
ugccgccaaugacugggua

SEQ ID NO: 1624177 - RNA, 19 nt, Artificial Sequence
  Description of Artificial Sequence: Synthetic oligonucleotide
ggaagguacgugaauugcu

SEQ ID NO: 1624178 - RNA, 19 nt, Artificial Sequence
  Description of Artificial Sequence: Synthetic oligonucleotide
cgacguucacuuucagagc

SEQ ID NO: 1624179 - RNA, 19 nt, Artificial Sequence
  Description of Artificial Sequence: Synthetic oligonucleotide
cgaacucagccaccgugcg

SEQ ID NO: 1624180 - RNA, 19 nt, Artificial Sequence
  Description of Artificial Sequence: Synthetic oligonucleotide
gguacgugaauugcuggua

SEQ ID NO: 1624181 - RNA, 19 nt, Artificial Sequence
  Description of Artificial Sequence: Synthetic oligonucleotide
ggccaaggucucucugaag

SEQ ID NO: 1624182 - RNA, 19 nt, Artificial Sequence
  Description of Artificial Sequence: Synthetic oligonucleotide
cugggccgaccgcugggag

SEQ ID NO: 1624183 - RNA, 19 nt, Artificial Sequence
  Description of Artificial Sequence: Synthetic oligonucleotide
ccuuuacuuugagugggug

SEQ ID NO: 1624184 - RNA, 19 nt, Artificial Sequence
  Description of Artificial Sequence: Synthetic oligonucleotide
gguugaugggcgggcuggg

SEQ ID NO: 1624185 - RNA, 19 nt, Artificial Sequence
  Description of Artificial Sequence: Synthetic oligonucleotide
ggauguggacucggaagac

SEQ ID NO: 1624186 - RNA, 19 nt, Artificial Sequence
  Description of Artificial Sequence: Synthetic oligonucleotide
caggcuucgccuuuacuuu

SEQ ID NO: 1624187 - RNA, 19 nt, Artificial Sequence
  Description of Artificial Sequence: Synthetic oligonucleotide
ccucuuaaaugauaugaau

SEQ ID NO: 1624188 - RNA, 19 nt, Artificial Sequence
  Description of Artificial Sequence: Synthetic oligonucleotide
gcaucaaggugggauggca

SEQ ID NO: 1624189 - RNA, 19 nt, Artificial Sequence
  Description of Artificial Sequence: Synthetic oligonucleotide
agugggugggcgacuuggu

SEQ ID NO: 1624190 - RNA, 19 nt, Artificial Sequence
  Description of Artificial Sequence: Synthetic oligonucleotide
ggucuugugaacaggcuau

SEQ ID NO: 1624191 - RNA, 19 nt, Artificial Sequence
  Description of Artificial Sequence: Synthetic oligonucleotide
aggcuaucacgugguguga

SEQ ID NO: 1624192 - RNA, 19 nt, Artificial Sequence
  Description of Artificial Sequence: Synthetic oligonucleotide
ugggcgggcugggaggauc

SEQ ID NO: 1624193 - RNA, 19 nt, Artificial Sequence
  Description of Artificial Sequence: Synthetic oligonucleotide
gcuaucacguggugugaaa

SEQ ID NO: 1624194 - RNA, 19 nt, Artificial Sequence
  Description of Artificial Sequence: Synthetic oligonucleotide
acguggugugaaacaacau

SEQ ID NO: 1624195 - RNA, 19 nt, Artificial Sequence
  Description of Artificial Sequence: Synthetic oligonucleotide
accgcugggagcacucgau

SEQ ID NO: 1624196 - RNA, 19 nt, Artificial Sequence
  Description of Artificial Sequence: Synthetic oligonucleotide
caaccuggagagacagugu

SEQ ID NO: 1624197 - RNA, 19 nt, Artificial Sequence
  Description of Artificial Sequence: Synthetic oligonucleotide
guggacucggaagaccagu

SEQ ID NO: 1624198 - RNA, 19 nt, Artificial Sequence
  Description of Artificial Sequence: Synthetic oligonucleotide
ugacuuggacagggcuggu

SEQ ID NO: 1624199 - RNA, 19 nt, Artificial Sequence
  Description of Artificial Sequence: Synthetic oligonucleotide
acauccucucagagccucu

SEQ ID NO: 1624200 - RNA, 19 nt, Artificial Sequence
  Description of Artificial Sequence: Synthetic oligonucleotide
caggaaacccuggaugccu

SEQ ID NO: 1624201 - RNA, 19 nt, Artificial Sequence
  Description of Artificial Sequence: Synthetic oligonucleotide
guugaugggcgggcuggga

SEQ ID NO: 1624202 - RNA, 19 nt, Artificial Sequence
  Description of Artificial Sequence: Synthetic oligonucleotide
gcugugggauguggacucg

SEQ ID NO: 1624203 - RNA, 19 nt, Artificial Sequence
  Description of Artificial Sequence: Synthetic oligonucleotide
gcagaaaauuauggccaga

SEQ ID NO: 1624204 - RNA, 19 nt, Artificial Sequence
  Description of Artificial Sequence: Synthetic oligonucleotide
aaaugaccuuagaguucuu

SEQ ID NO: 1624205 - RNA, 19 nt, Artificial Sequence
  Description of Artificial Sequence: Synthetic oligonucleotide
gccacaccacacaggaaac

SEQ ID NO: 1624206 - RNA, 19 nt, Artificial Sequence
  Description of Artificial Sequence: Synthetic oligonucleotide
caggaccauauggcugaac

SEQ ID NO: 1624207 - RNA, 19 nt, Artificial Sequence
  Description of Artificial Sequence: Synthetic oligonucleotide
cauugggcugugggaugug

SEQ ID NO: 1624208 - RNA, 19 nt, Artificial Sequence
  Description of Artificial Sequence: Synthetic oligonucleotide
uucguccaucuguguguuu

SEQ ID NO: 1624209 - RNA, 19 nt, Artificial Sequence
  Description of Artificial Sequence: Synthetic oligonucleotide
uccggccauugggcugugg

SEQ ID NO: 1624210 - RNA, 19 nt, Artificial Sequence
  Description of Artificial Sequence: Synthetic oligonucleotide
ugguugcggaaugguggua

SEQ ID NO: 1624211 - RNA, 19 nt, Artificial Sequence
  Description of Artificial Sequence: Synthetic oligonucleotide
gggccgaccgcugggagca

SEQ ID NO: 1624212 - RNA, 19 nt, Artificial Sequence
  Description of Artificial Sequence: Synthetic oligonucleotide
uugcugguacuggcuucuc

SEQ ID NO: 1624213 - RNA, 19 nt, Artificial Sequence
  Description of Artificial Sequence: Synthetic oligonucleotide
gaugccugggacacaccuu

SEQ ID NO: 1624214 - RNA, 19 nt, Artificial Sequence
  Description of Artificial Sequence: Synthetic oligonucleotide
caaggugggauggcagugu

SEQ ID NO: 1624215 - RNA, 19 nt, Artificial Sequence
  Description of Artificial Sequence: Synthetic oligonucleotide
acguucacuuucagagcuu

SEQ ID NO: 1624216 - RNA, 19 nt, Artificial Sequence
  Description of Artificial Sequence: Synthetic oligonucleotide
ccccacagaccccucugac

SEQ ID NO: 1624217 - RNA, 19 nt, Artificial Sequence
  Description of Artificial Sequence: Synthetic oligonucleotide
gguugcggaauggugguau

SEQ ID NO: 1624218 - RNA, 19 nt, Artificial Sequence
  Description of Artificial Sequence: Synthetic oligonucleotide
gcacucgaugggguuugag

SEQ ID NO: 1624219 - RNA, 19 nt, Artificial Sequence
  Description of Artificial Sequence: Synthetic oligonucleotide
ggcuaucacguggugugaa

SEQ ID NO: 1624220 - RNA, 19 nt, Artificial Sequence
  Description of Artificial Sequence: Synthetic oligonucleotide
guggacugugggaggcgga

SEQ ID NO: 1624221 - RNA, 19 nt, Artificial Sequence
  Description of Artificial Sequence: Synthetic oligonucleotide
cauccugccacaggagaau

SEQ ID NO: 1624222 - RNA, 19 nt, Artificial Sequence
  Description of Artificial Sequence: Synthetic oligonucleotide
gccucacugcacacugccc

SEQ ID NO: 1624223 - RNA, 19 nt, Artificial Sequence
  Description of Artificial Sequence: Synthetic oligonucleotide
gucgcacccuggucguucu

SEQ ID NO: 1624224 - RNA, 19 nt, Artificial Sequence
  Description of Artificial Sequence: Synthetic oligonucleotide
ccucgacguucacuuucag

SEQ ID NO: 1624225 - RNA, 19 nt, Artificial Sequence
  Description of Artificial Sequence: Synthetic oligonucleotide
gagacaguguccggccauu

SEQ ID NO: 1624226 - RNA, 19 nt, Artificial Sequence
  Description of Artificial Sequence: Synthetic oligonucleotide
ucgcacccuggucguucuu

SEQ ID NO: 1624227 - RNA, 19 nt, Artificial Sequence
  Description of Artificial Sequence: Synthetic oligonucleotide
cauuggcaggaagguacgu

SEQ ID NO: 1624228 - RNA, 19 nt, Artificial Sequence
  Description of Artificial Sequence: Synthetic oligonucleotide
cacgggcagccuuuacuau

SEQ ID NO: 1624229 - RNA, 19 nt, Artificial Sequence
  Description of Artificial Sequence: Synthetic oligonucleotide
ggcugguuauccucugguu

SEQ ID NO: 1624230 - RNA, 19 nt, Artificial Sequence
  Description of Artificial Sequence: Synthetic oligonucleotide
ccgaccgcugggagcacuc

SEQ ID NO: 1624231 - RNA, 19 nt, Artificial Sequence
  Description of Artificial Sequence: Synthetic oligonucleotide
ggaggcggacuggugcaga

SEQ ID NO: 1624232 - RNA, 19 nt, Artificial Sequence
  Description of Artificial Sequence: Synthetic oligonucleotide
ccccucugacacgauagca

SEQ ID NO: 1624233 - RNA, 19 nt, Artificial Sequence
  Description of Artificial Sequence: Synthetic oligonucleotide
gccaccgugcgcugggccu

SEQ ID NO: 1624234 - RNA, 19 nt, Artificial Sequence
  Description of Artificial Sequence: Synthetic oligonucleotide
accgugcgcugggccucac

SEQ ID NO: 1624235 - RNA, 19 nt, Artificial Sequence
  Description of Artificial Sequence: Synthetic oligonucleotide
cugugggaggcggacuggu

SEQ ID NO: 1624236 - RNA, 19 nt, Artificial Sequence
  Description of Artificial Sequence: Synthetic oligonucleotide
gggugggcgacuuggucuu

SEQ ID NO: 1624237 - RNA, 19 nt, Artificial Sequence
  Description of Artificial Sequence: Synthetic oligonucleotide
ggguuucguccaucugugu

SEQ ID NO: 1624238 - RNA, 19 nt, Artificial Sequence
  Description of Artificial Sequence: Synthetic oligonucleotide
ggagcacucgaugggguuu

SEQ ID NO: 1624239 - RNA, 19 nt, Artificial Sequence
  Description of Artificial Sequence: Synthetic oligonucleotide
cacaggucucggucaguuu

SEQ ID NO: 1624240 - RNA, 19 nt, Artificial Sequence
  Description of Artificial Sequence: Synthetic oligonucleotide
ggugggcgacuuggucuug

SEQ ID NO: 1624241 - RNA, 19 nt, Artificial Sequence
  Description of Artificial Sequence: Synthetic oligonucleotide
ggaagaccagucgcacccu

SEQ ID NO: 1624242 - RNA, 19 nt, Artificial Sequence
  Description of Artificial Sequence: Synthetic oligonucleotide
cgaugggguuugaggcaac

SEQ ID NO: 1624243 - RNA, 19 nt, Artificial Sequence
  Description of Artificial Sequence: Synthetic oligonucleotide
gccuuuacuuugagugggu

SEQ ID NO: 1624244 - RNA, 19 nt, Artificial Sequence
  Description of Artificial Sequence: Synthetic oligonucleotide
ggguaacaacccacucugu

SEQ ID NO: 1624245 - RNA, 19 nt, Artificial Sequence
  Description of Artificial Sequence: Synthetic oligonucleotide
cagagccucugugguuuua

SEQ ID NO: 1624246 - RNA, 19 nt, Artificial Sequence
  Description of Artificial Sequence: Synthetic oligonucleotide
ccagucgcacccuggucgu

SEQ ID NO: 1624247 - RNA, 19 nt, Artificial Sequence
  Description of Artificial Sequence: Synthetic oligonucleotide
ggacugugggaggcggacu

SEQ ID NO: 1624248 - RNA, 19 nt, Artificial Sequence
  Description of Artificial Sequence: Synthetic oligonucleotide
ccaccgugcgcugggccuc

SEQ ID NO: 1624249 - RNA, 19 nt, Artificial Sequence
  Description of Artificial Sequence: Synthetic oligonucleotide
augggcgggcugggaggau

SEQ ID NO: 1624250 - RNA, 19 nt, Artificial Sequence
  Description of Artificial Sequence: Synthetic oligonucleotide
cugcaucacacaggagguu

SEQ ID NO: 1624251 - RNA, 19 nt, Artificial Sequence
  Description of Artificial Sequence: Synthetic oligonucleotide
cgaccgcugggagcacucg

SEQ ID NO: 1624252 - RNA, 19 nt, Artificial Sequence
  Description of Artificial Sequence: Synthetic oligonucleotide
gggcagccuuuacuauaua

SEQ ID NO: 1624253 - RNA, 19 nt, Artificial Sequence
  Description of Artificial Sequence: Synthetic oligonucleotide
ccucggcuccaugcuggug

SEQ ID NO: 1624254 - RNA, 19 nt, Artificial Sequence
  Description of Artificial Sequence: Synthetic oligonucleotide
caccgugcgcugggccuca

SEQ ID NO: 1624255 - RNA, 19 nt, Artificial Sequence
  Description of Artificial Sequence: Synthetic oligonucleotide
ggugguggacagccaucuu

SEQ ID NO: 1624256 - RNA, 19 nt, Artificial Sequence
  Description of Artificial Sequence: Synthetic oligonucleotide
ccucugguugcggaauggu

SEQ ID NO: 1624257 - RNA, 19 nt, Artificial Sequence
  Description of Artificial Sequence: Synthetic oligonucleotide
gcggacuggugcagagcaa

SEQ ID NO: 1624258 - RNA, 19 nt, Artificial Sequence
  Description of Artificial Sequence: Synthetic oligonucleotide
cagaccccucugacacgau

SEQ ID NO: 1624259 - RNA, 19 nt, Artificial Sequence
  Description of Artificial Sequence: Synthetic oligonucleotide
cccaggcuucgccuuuacu

SEQ ID NO: 1624260 - RNA, 19 nt, Artificial Sequence
  Description of Artificial Sequence: Synthetic oligonucleotide
gcguuaccauuggcaggaa

SEQ ID NO: 1624261 - RNA, 19 nt, Artificial Sequence
  Description of Artificial Sequence: Synthetic oligonucleotide
gccgaccgcugggagcacu

SEQ ID NO: 1624262 - RNA, 19 nt, Artificial Sequence
  Description of Artificial Sequence: Synthetic oligonucleotide
ggccgaccgcugggagcac

SEQ ID NO: 1624263 - RNA, 19 nt, Artificial Sequence
  Description of Artificial Sequence: Synthetic oligonucleotide
cggcuccaugcugguggug

SEQ ID NO: 1624264 - RNA, 19 nt, Artificial Sequence
  Description of Artificial Sequence: Synthetic oligonucleotide
cagucgcacccuggucguu

SEQ ID NO: 1624265 - RNA, 19 nt, Artificial Sequence
  Description of Artificial Sequence: Synthetic oligonucleotide
cgccaaugacuggguagcu

SEQ ID NO: 1624266 - RNA, 19 nt, Artificial Sequence
  Description of Artificial Sequence: Synthetic oligonucleotide
ccgugcgcugggccucacu

SEQ ID NO: 1624267 - RNA, 19 nt, Artificial Sequence
  Description of Artificial Sequence: Synthetic oligonucleotide
aauauaauuguacugguuc

SEQ ID NO: 1624268 - RNA, 19 nt, Artificial Sequence
  Description of Artificial Sequence: Synthetic oligonucleotide
aaauacgauaagcagaggc

SEQ ID NO: 1624269 - RNA, 19 nt, Artificial Sequence
  Description of Artificial Sequence: Synthetic oligonucleotide
agaauuggcaaguagaacc

SEQ ID NO: 1624270 - RNA, 19 nt, Artificial Sequence
  Description of Artificial Sequence: Synthetic oligonucleotide
acaauuuuguaccugaugc

SEQ ID NO: 1624271 - RNA, 19 nt, Artificial Sequence
  Description of Artificial Sequence: Synthetic oligonucleotide
aagguuaaugguuucaugg

SEQ ID NO: 1624272 - RNA, 19 nt, Artificial Sequence
  Description of Artificial Sequence: Synthetic oligonucleotide
uaaaauacgauaagcagag

SEQ ID NO: 1624273 - RNA, 19 nt, Artificial Sequence
  Description of Artificial Sequence: Synthetic oligonucleotide
ugaugaauacuauuuaugg

SEQ ID NO: 1624274 - RNA, 19 nt, Artificial Sequence
  Description of Artificial Sequence: Synthetic oligonucleotide
aagucuaugggcugaagcc

SEQ ID NO: 1624275 - RNA, 19 nt, Artificial Sequence
  Description of Artificial Sequence: Synthetic oligonucleotide
gauacuaaucgcuugaaag

SEQ ID NO: 1624276 - RNA, 19 nt, Artificial Sequence
  Description of Artificial Sequence: Synthetic oligonucleotide
aaagucuaugggcugaagc

SEQ ID NO: 1624277 - RNA, 19 nt, Artificial Sequence
  Description of Artificial Sequence: Synthetic oligonucleotide
aagccuaacaguuaacuuc

SEQ ID NO: 1624278 - RNA, 19 nt, Artificial Sequence
  Description of Artificial Sequence: Synthetic oligonucleotide
aacuaaauuugccuguugg

SEQ ID NO: 1624279 - RNA, 19 nt, Artificial Sequence
  Description of Artificial Sequence: Synthetic oligonucleotide
gaaguuauggugcaaaacc

SEQ ID NO: 1624280 - RNA, 19 nt, Artificial Sequence
  Description of Artificial Sequence: Synthetic oligonucleotide
ugauaaaauacgauaagca

SEQ ID NO: 1624281 - RNA, 19 nt, Artificial Sequence
  Description of Artificial Sequence: Synthetic oligonucleotide
uaagaagagaacaauggcc

SEQ ID NO: 1624282 - RNA, 19 nt, Artificial Sequence
  Description of Artificial Sequence: Synthetic oligonucleotide
agugaaguaacuuggcagc

SEQ ID NO: 1624283 - RNA, 19 nt, Artificial Sequence
  Description of Artificial Sequence: Synthetic oligonucleotide
aaucgcuugaaagugaagg

SEQ ID NO: 1624284 - RNA, 19 nt, Artificial Sequence
  Description of Artificial Sequence: Synthetic oligonucleotide
auuaaacuaaauuugccug

SEQ ID NO: 1624285 - RNA, 19 nt, Artificial Sequence
  Description of Artificial Sequence: Synthetic oligonucleotide
auuuagcuuacuuaaauug

SEQ ID NO: 1624286 - RNA, 19 nt, Artificial Sequence
  Description of Artificial Sequence: Synthetic oligonucleotide
augaauacuauuuauggcu

SEQ ID NO: 1624287 - RNA, 19 nt, Artificial Sequence
  Description of Artificial Sequence: Synthetic oligonucleotide
gaugaugcuuacuuuacgg

SEQ ID NO: 1624288 - RNA, 19 nt, Artificial Sequence
  Description of Artificial Sequence: Synthetic oligonucleotide
ucggauuaaacuaaauuug

SEQ ID NO: 1624289 - RNA, 19 nt, Artificial Sequence
  Description of Artificial Sequence: Synthetic oligonucleotide
ucuuacacaaacauuagau

SEQ ID NO: 1624290 - RNA, 19 nt, Artificial Sequence
  Description of Artificial Sequence: Synthetic oligonucleotide
aauacgauaagcagaggcg

SEQ ID NO: 1624291 - RNA, 19 nt, Artificial Sequence
  Description of Artificial Sequence: Synthetic oligonucleotide
uuuaguagagguugaauca

SEQ ID NO: 1624292 - RNA, 19 nt, Artificial Sequence
  Description of Artificial Sequence: Synthetic oligonucleotide
agugguguauuguacaagg

SEQ ID NO: 1624293 - RNA, 19 nt, Artificial Sequence
  Description of Artificial Sequence: Synthetic oligonucleotide
uuaacuucccacauguugu

SEQ ID NO: 1624294 - RNA, 19 nt, Artificial Sequence
  Description of Artificial Sequence: Synthetic oligonucleotide
agugucaaaauuuacaauu

SEQ ID NO: 1624295 - RNA, 19 nt, Artificial Sequence
  Description of Artificial Sequence: Synthetic oligonucleotide
uagagguugaaucacaauc

SEQ ID NO: 1624296 - RNA, 19 nt, Artificial Sequence
  Description of Artificial Sequence: Synthetic oligonucleotide
uaaauuguaguucacuuua

SEQ ID NO: 1624297 - RNA, 19 nt, Artificial Sequence
  Description of Artificial Sequence: Synthetic oligonucleotide
gaugaauacuauuuauggc

SEQ ID NO: 1624298 - RNA, 19 nt, Artificial Sequence
  Description of Artificial Sequence: Synthetic oligonucleotide
aauaaugacuuuaguagag

SEQ ID NO: 1624299 - RNA, 19 nt, Artificial Sequence
  Description of Artificial Sequence: Synthetic oligonucleotide
aauaccguuuuccagcacu

SEQ ID NO: 1624300 - RNA, 19 nt, Artificial Sequence
  Description of Artificial Sequence: Synthetic oligonucleotide
agagacucaagccuaacag

SEQ ID NO: 1624301 - RNA, 19 nt, Artificial Sequence
  Description of Artificial Sequence: Synthetic oligonucleotide
cuugaagugaccauuccag

SEQ ID NO: 1624302 - RNA, 19 nt, Artificial Sequence
  Description of Artificial Sequence: Synthetic oligonucleotide
acacuguuaagccaggauc

SEQ ID NO: 1624303 - RNA, 19 nt, Artificial Sequence
  Description of Artificial Sequence: Synthetic oligonucleotide
acuuuacggaaugacaucc

SEQ ID NO: 1624304 - RNA, 19 nt, Artificial Sequence
  Description of Artificial Sequence: Synthetic oligonucleotide
uuagagucgcgucagacga

SEQ ID NO: 1624305 - RNA, 19 nt, Artificial Sequence
  Description of Artificial Sequence: Synthetic oligonucleotide
uuauagucaagauagccaa

SEQ ID NO: 1624306 - RNA, 19 nt, Artificial Sequence
  Description of Artificial Sequence: Synthetic oligonucleotide
augaauaucugcgacaaag

SEQ ID NO: 1624307 - RNA, 19 nt, Artificial Sequence
  Description of Artificial Sequence: Synthetic oligonucleotide
uuagauacuaaucgcuuga

SEQ ID NO: 1624308 - RNA, 19 nt, Artificial Sequence
  Description of Artificial Sequence: Synthetic oligonucleotide
uuacuuuacggaaugacau

SEQ ID NO: 1624309 - RNA, 19 nt, Artificial Sequence
  Description of Artificial Sequence: Synthetic oligonucleotide
ugaauacuauuuauggcug

SEQ ID NO: 1624310 - RNA, 19 nt, Artificial Sequence
  Description of Artificial Sequence: Synthetic oligonucleotide
acuaaauuugccuguuggg

SEQ ID NO: 1624311 - RNA, 19 nt, Artificial Sequence
  Description of Artificial Sequence: Synthetic oligonucleotide
auuguaguucacuuuaugu

SEQ ID NO: 1624312 - RNA, 19 nt, Artificial Sequence
  Description of Artificial Sequence: Synthetic oligonucleotide
aauuguaguucacuuuaug

SEQ ID NO: 1624313 - RNA, 19 nt, Artificial Sequence
  Description of Artificial Sequence: Synthetic oligonucleotide
gaacguuccacauaggauc

SEQ ID NO: 1624314 - RNA, 19 nt, Artificial Sequence
  Description of Artificial Sequence: Synthetic oligonucleotide
auagccaauauaauuguac

SEQ ID NO: 1624315 - RNA, 19 nt, Artificial Sequence
  Description of Artificial Sequence: Synthetic oligonucleotide
guuaacuucccacauguug

SEQ ID NO: 1624316 - RNA, 19 nt, Artificial Sequence
  Description of Artificial Sequence: Synthetic oligonucleotide
uuaaacuaaauuugccugu

SEQ ID NO: 1624317 - RNA, 19 nt, Artificial Sequence
  Description of Artificial Sequence: Synthetic oligonucleotide
aaauuugccuguugggucu

SEQ ID NO: 1624318 - RNA, 19 nt, Artificial Sequence
  Description of Artificial Sequence: Synthetic oligonucleotide
cacuguuaagccaggaucg

SEQ ID NO: 1624319 - RNA, 19 nt, Artificial Sequence
  Description of Artificial Sequence: Synthetic oligonucleotide
aguguucuacuguacaauc

SEQ ID NO: 1624320 - RNA, 19 nt, Artificial Sequence
  Description of Artificial Sequence: Synthetic oligonucleotide
ugcuccacgaauaaugacu

SEQ ID NO: 1624321 - RNA, 19 nt, Artificial Sequence
  Description of Artificial Sequence: Synthetic oligonucleotide
cuuacuuaaauuguaguuc

SEQ ID NO: 1624322 - RNA, 19 nt, Artificial Sequence
  Description of Artificial Sequence: Synthetic oligonucleotide
ugcgacaaagucuaugggc

SEQ ID NO: 1624323 - RNA, 19 nt, Artificial Sequence
  Description of Artificial Sequence: Synthetic oligonucleotide
uguacugguucccugcucc

SEQ ID NO: 1624324 - RNA, 19 nt, Artificial Sequence
  Description of Artificial Sequence: Synthetic oligonucleotide
cugauaaaauacgauaagc

SEQ ID NO: 1624325 - RNA, 19 nt, Artificial Sequence
  Description of Artificial Sequence: Synthetic oligonucleotide
ugcacugggaaccagaauu

SEQ ID NO: 1624326 - RNA, 19 nt, Artificial Sequence
  Description of Artificial Sequence: Synthetic oligonucleotide
augacuuuaguagagguug

SEQ ID NO: 1624327 - RNA, 19 nt, Artificial Sequence
  Description of Artificial Sequence: Synthetic oligonucleotide
aaagguuaaugguuucaug

SEQ ID NO: 1624328 - RNA, 19 nt, Artificial Sequence
  Description of Artificial Sequence: Synthetic oligonucleotide
uaugaugaauacuauuuau

SEQ ID NO: 1624329 - RNA, 19 nt, Artificial Sequence
  Description of Artificial Sequence: Synthetic oligonucleotide
ugaugaugcuuacuuuacg

SEQ ID NO: 1624330 - RNA, 19 nt, Artificial Sequence
  Description of Artificial Sequence: Synthetic oligonucleotide
uugagcguaacaauguaaa

SEQ ID NO: 1624331 - RNA, 19 nt, Artificial Sequence
  Description of Artificial Sequence: Synthetic oligonucleotide
aaaaucacauuggaucgag

SEQ ID NO: 1624332 - RNA, 19 nt, Artificial Sequence
  Description of Artificial Sequence: Synthetic oligonucleotide
ucgaguguuaugaugaaua

SEQ ID NO: 1624333 - RNA, 19 nt, Artificial Sequence
  Description of Artificial Sequence: Synthetic oligonucleotide
cacauaggaucaauggugg

SEQ ID NO: 1624334 - RNA, 19 nt, Artificial Sequence
  Description of Artificial Sequence: Synthetic oligonucleotide
aucgcuugaaagugaaggg

SEQ ID NO: 1624335 - RNA, 19 nt, Artificial Sequence
  Description of Artificial Sequence: Synthetic oligonucleotide
uacauuaaguuucauccau

SEQ ID NO: 1624336 - RNA, 19 nt, Artificial Sequence
  Description of Artificial Sequence: Synthetic oligonucleotide
uggcgaacguuccacauag

SEQ ID NO: 1624337 - RNA, 19 nt, Artificial Sequence
  Description of Artificial Sequence: Synthetic oligonucleotide
uuaugaugaauacuauuua

SEQ ID NO: 1624338 - RNA, 19 nt, Artificial Sequence
  Description of Artificial Sequence: Synthetic oligonucleotide
uaacaguuaacuucccaca

SEQ ID NO: 1624339 - RNA, 19 nt, Artificial Sequence
  Description of Artificial Sequence: Synthetic oligonucleotide
aguguuaugaugaauacua

SEQ ID NO: 1624340 - RNA, 19 nt, Artificial Sequence
  Description of Artificial Sequence: Synthetic oligonucleotide
agccuaacaguuaacuucc

SEQ ID NO: 1624341 - RNA, 19 nt, Artificial Sequence
  Description of Artificial Sequence: Synthetic oligonucleotide
auuggaucgaguguuauga

SEQ ID NO: 1624342 - RNA, 19 nt, Artificial Sequence
  Description of Artificial Sequence: Synthetic oligonucleotide
uaaauuugccuguuggguc

SEQ ID NO: 1624343 - RNA, 19 nt, Artificial Sequence
  Description of Artificial Sequence: Synthetic oligonucleotide
guuagagucgcgucagacg

SEQ ID NO: 1624344 - RNA, 19 nt, Artificial Sequence
  Description of Artificial Sequence: Synthetic oligonucleotide
uugggucuggaauauacca

SEQ ID NO: 1624345 - RNA, 19 nt, Artificial Sequence
  Description of Artificial Sequence: Synthetic oligonucleotide
ugucuuacacaaacauuag

SEQ ID NO: 1624346 - RNA, 19 nt, Artificial Sequence
  Description of Artificial Sequence: Synthetic oligonucleotide
ugaauaucugcgacaaagu

SEQ ID NO: 1624347 - RNA, 19 nt, Artificial Sequence
  Description of Artificial Sequence: Synthetic oligonucleotide
ucauggaaagcuuacgaau

SEQ ID NO: 1624348 - RNA, 19 nt, Artificial Sequence
  Description of Artificial Sequence: Synthetic oligonucleotide
gugaaggggagguagagug

SEQ ID NO: 1624349 - RNA, 19 nt, Artificial Sequence
  Description of Artificial Sequence: Synthetic oligonucleotide
uuagcuuacuuaaauugua

SEQ ID NO: 1624350 - RNA, 19 nt, Artificial Sequence
  Description of Artificial Sequence: Synthetic oligonucleotide
auacgauaagcagaggcgg

SEQ ID NO: 1624351 - RNA, 19 nt, Artificial Sequence
  Description of Artificial Sequence: Synthetic oligonucleotide
ucuucuacauuaaguuuca

SEQ ID NO: 1624352 - RNA, 19 nt, Artificial Sequence
  Description of Artificial Sequence: Synthetic oligonucleotide
uacaaggcaagaauaucac

SEQ ID NO: 1624353 - RNA, 19 nt, Artificial Sequence
  Description of Artificial Sequence: Synthetic oligonucleotide
ugcuacagagacucaagcc

SEQ ID NO: 1624354 - RNA, 19 nt, Artificial Sequence
  Description of Artificial Sequence: Synthetic oligonucleotide
gucaagauagccaauauaa

SEQ ID NO: 1624355 - RNA, 19 nt, Artificial Sequence
  Description of Artificial Sequence: Synthetic oligonucleotide
ucuguggguugcuacagag

SEQ ID NO: 1624356 - RNA, 19 nt, Artificial Sequence
  Description of Artificial Sequence: Synthetic oligonucleotide
aaccagaauuggcaaguag

SEQ ID NO: 1624357 - RNA, 19 nt, Artificial Sequence
  Description of Artificial Sequence: Synthetic oligonucleotide
uuaaauuguaguucacuuu

SEQ ID NO: 1624358 - RNA, 19 nt, Artificial Sequence
  Description of Artificial Sequence: Synthetic oligonucleotide
gacaagccagguuagaguc

SEQ ID NO: 1624359 - RNA, 19 nt, Artificial Sequence
  Description of Artificial Sequence: Synthetic oligonucleotide
uacuaaucgcuugaaagug

SEQ ID NO: 1624360 - RNA, 19 nt, Artificial Sequence
  Description of Artificial Sequence: Synthetic oligonucleotide
uggugcaaaaccaguaaga

SEQ ID NO: 1624361 - RNA, 19 nt, Artificial Sequence
  Description of Artificial Sequence: Synthetic oligonucleotide
aauacuauuuauggcugca

SEQ ID NO: 1624362 - RNA, 19 nt, Artificial Sequence
  Description of Artificial Sequence: Synthetic oligonucleotide
uugaugaauaucugcgaca

SEQ ID NO: 1624363 - RNA, 19 nt, Artificial Sequence
  Description of Artificial Sequence: Synthetic oligonucleotide
uuugagguauccauauguc

SEQ ID NO: 1624364 - RNA, 19 nt, Artificial Sequence
  Description of Artificial Sequence: Synthetic oligonucleotide
auggaaagcuuacgaauuc

SEQ ID NO: 1624365 - RNA, 19 nt, Artificial Sequence
  Description of Artificial Sequence: Synthetic oligonucleotide
aacaguuaacuucccacau

SEQ ID NO: 1624366 - RNA, 19 nt, Artificial Sequence
  Description of Artificial Sequence: Synthetic oligonucleotide
augucuucggauuaaacua

SEQ ID NO: 1624367 - RNA, 19 nt, Artificial Sequence
  Description of Artificial Sequence: Synthetic oligonucleotide
uauggugcaaaaccaguaa

SEQ ID NO: 1624368 - RNA, 19 nt, Artificial Sequence
  Description of Artificial Sequence: Synthetic oligonucleotide
uguugaugaauaucugcga

SEQ ID NO: 1624369 - RNA, 19 nt, Artificial Sequence
  Description of Artificial Sequence: Synthetic oligonucleotide
cugucuuacacaaacauua

SEQ ID NO: 1624370 - RNA, 19 nt, Artificial Sequence
  Description of Artificial Sequence: Synthetic oligonucleotide
uuuucagggaaacacuguu

SEQ ID NO: 1624371 - RNA, 19 nt, Artificial Sequence
  Description of Artificial Sequence: Synthetic oligonucleotide
agccuuuacaaacuggggu

SEQ ID NO: 1624372 - RNA, 19 nt, Artificial Sequence
  Description of Artificial Sequence: Synthetic oligonucleotide
gaauacuauuuauggcugc

SEQ ID NO: 1624373 - RNA, 19 nt, Artificial Sequence
  Description of Artificial Sequence: Synthetic oligonucleotide
agauagccaauauaauugu

SEQ ID NO: 1624374 - RNA, 19 nt, Artificial Sequence
  Description of Artificial Sequence: Synthetic oligonucleotide
aauuuuguaccugaugcuu

SEQ ID NO: 1624375 - RNA, 19 nt, Artificial Sequence
  Description of Artificial Sequence: Synthetic oligonucleotide
cuuacuuuacggaaugaca

SEQ ID NO: 1624376 - RNA, 19 nt, Artificial Sequence
  Description of Artificial Sequence: Synthetic oligonucleotide
uucugaaaaugcagcagca

SEQ ID NO: 1624377 - RNA, 19 nt, Artificial Sequence
  Description of Artificial Sequence: Synthetic oligonucleotide
ucuacuguacaaucccucu

SEQ ID NO: 1624378 - RNA, 19 nt, Artificial Sequence
  Description of Artificial Sequence: Synthetic oligonucleotide
ugaugcuuacuuuacggaa

SEQ ID NO: 1624379 - RNA, 19 nt, Artificial Sequence
  Description of Artificial Sequence: Synthetic oligonucleotide
uugucucccauuuacugga

SEQ ID NO: 1624380 - RNA, 19 nt, Artificial Sequence
  Description of Artificial Sequence: Synthetic oligonucleotide
cauaugaagcagcucuucc

SEQ ID NO: 1624381 - RNA, 19 nt, Artificial Sequence
  Description of Artificial Sequence: Synthetic oligonucleotide
ucucccauuuacuggaugu

SEQ ID NO: 1624382 - RNA, 19 nt, Artificial Sequence
  Description of Artificial Sequence: Synthetic oligonucleotide
acuucauuccuuagcaaac

SEQ ID NO: 1624383 - RNA, 19 nt, Artificial Sequence
  Description of Artificial Sequence: Synthetic oligonucleotide
ucaagccuaacaguuaacu

SEQ ID NO: 1624384 - RNA, 19 nt, Artificial Sequence
  Description of Artificial Sequence: Synthetic oligonucleotide
aggaucaaugguggaaugc

SEQ ID NO: 1624385 - RNA, 19 nt, Artificial Sequence
  Description of Artificial Sequence: Synthetic oligonucleotide
uugagguauccauaugucu

SEQ ID NO: 1624386 - RNA, 19 nt, Artificial Sequence
  Description of Artificial Sequence: Synthetic oligonucleotide
aaguuauggugcaaaacca

SEQ ID NO: 1624387 - RNA, 19 nt, Artificial Sequence
  Description of Artificial Sequence: Synthetic oligonucleotide
aacacuguuaagccaggau

SEQ ID NO: 1624388 - RNA, 19 nt, Artificial Sequence
  Description of Artificial Sequence: Synthetic oligonucleotide
caaguagaaccuugcaaag

SEQ ID NO: 1624389 - RNA, 19 nt, Artificial Sequence
  Description of Artificial Sequence: Synthetic oligonucleotide
uacuguacaaucccucuuc

SEQ ID NO: 1624390 - RNA, 19 nt, Artificial Sequence
  Description of Artificial Sequence: Synthetic oligonucleotide
uuauggugcaaaaccagua

SEQ ID NO: 1624391 - RNA, 19 nt, Artificial Sequence
  Description of Artificial Sequence: Synthetic oligonucleotide
agaauaucaccuuguacaa

SEQ ID NO: 1624392 - RNA, 19 nt, Artificial Sequence
  Description of Artificial Sequence: Synthetic oligonucleotide
gucgcgucagacgaaaucg

SEQ ID NO: 1624393 - RNA, 19 nt, Artificial Sequence
  Description of Artificial Sequence: Synthetic oligonucleotide
ugaauaccguuuuccagca

SEQ ID NO: 1624394 - RNA, 19 nt, Artificial Sequence
  Description of Artificial Sequence: Synthetic oligonucleotide
aagguggcgaacguuccac

SEQ ID NO: 1624395 - RNA, 19 nt, Artificial Sequence
  Description of Artificial Sequence: Synthetic oligonucleotide
ugucuucggauuaaacuaa

SEQ ID NO: 1624396 - RNA, 19 nt, Artificial Sequence
  Description of Artificial Sequence: Synthetic oligonucleotide
agcuuacuuaaauuguagu

SEQ ID NO: 1624397 - RNA, 19 nt, Artificial Sequence
  Description of Artificial Sequence: Synthetic oligonucleotide
uuaguagagguugaaucac

SEQ ID NO: 1624398 - RNA, 19 nt, Artificial Sequence
  Description of Artificial Sequence: Synthetic oligonucleotide
uguauuguacaaggcaaga

SEQ ID NO: 1624399 - RNA, 19 nt, Artificial Sequence
  Description of Artificial Sequence: Synthetic oligonucleotide
uggguugcuacagagacuc

SEQ ID NO: 1624400 - RNA, 19 nt, Artificial Sequence
  Description of Artificial Sequence: Synthetic oligonucleotide
agucgcgucagacgaaauc

SEQ ID NO: 1624401 - RNA, 19 nt, Artificial Sequence
  Description of Artificial Sequence: Synthetic oligonucleotide
acuuaaauuguaguucacu

SEQ ID NO: 1624402 - RNA, 19 nt, Artificial Sequence
  Description of Artificial Sequence: Synthetic oligonucleotide
acauuagauacuaaucgcu

SEQ ID NO: 1624403 - RNA, 19 nt, Artificial Sequence
  Description of Artificial Sequence: Synthetic oligonucleotide
ugacaagccagguuagagu

SEQ ID NO: 1624404 - RNA, 19 nt, Artificial Sequence
  Description of Artificial Sequence: Synthetic oligonucleotide
agguuaaugguuucaugga

SEQ ID NO: 1624405 - RNA, 19 nt, Artificial Sequence
  Description of Artificial Sequence: Synthetic oligonucleotide
uauccauaugucuucggau

SEQ ID NO: 1624406 - RNA, 19 nt, Artificial Sequence
  Description of Artificial Sequence: Synthetic oligonucleotide
ucugucuuacacaaacauu

SEQ ID NO: 1624407 - RNA, 19 nt, Artificial Sequence
  Description of Artificial Sequence: Synthetic oligonucleotide
agagguugaaucacaaucu

SEQ ID NO: 1624408 - RNA, 19 nt, Artificial Sequence
  Description of Artificial Sequence: Synthetic oligonucleotide
augaugcuuacuuuacgga

SEQ ID NO: 1624409 - RNA, 19 nt, Artificial Sequence
  Description of Artificial Sequence: Synthetic oligonucleotide
aaaauacgauaagcagagg

SEQ ID NO: 1624410 - RNA, 19 nt, Artificial Sequence
  Description of Artificial Sequence: Synthetic oligonucleotide
uuugcacugggaaccagaa

SEQ ID NO: 1624411 - RNA, 19 nt, Artificial Sequence
  Description of Artificial Sequence: Synthetic oligonucleotide
uggugaugcugccagccag

SEQ ID NO: 1624412 - RNA, 19 nt, Artificial Sequence
  Description of Artificial Sequence: Synthetic oligonucleotide
uacggaaugacauccuuuu

SEQ ID NO: 1624413 - RNA, 19 nt, Artificial Sequence
  Description of Artificial Sequence: Synthetic oligonucleotide
ucuuccccaaggcuugaag

SEQ ID NO: 1624414 - RNA, 19 nt, Artificial Sequence
  Description of Artificial Sequence: Synthetic oligonucleotide
cuuucauggaaagcuuacg

SEQ ID NO: 1624415 - RNA, 19 nt, Artificial Sequence
  Description of Artificial Sequence: Synthetic oligonucleotide
gcugauaaaauacgauaag

SEQ ID NO: 1624416 - RNA, 19 nt, Artificial Sequence
  Description of Artificial Sequence: Synthetic oligonucleotide
acugguucccugcuccacg

SEQ ID NO: 1624417 - RNA, 19 nt, Artificial Sequence
  Description of Artificial Sequence: Synthetic oligonucleotide
uaguagagguugaaucaca

SEQ ID NO: 1624418 - RNA, 19 nt, Artificial Sequence
  Description of Artificial Sequence: Synthetic oligonucleotide
aguuauggugcaaaaccag

SEQ ID NO: 1624419 - RNA, 19 nt, Artificial Sequence
  Description of Artificial Sequence: Synthetic oligonucleotide
guuugagguauccauaugu

SEQ ID NO: 1624420 - RNA, 19 nt, Artificial Sequence
  Description of Artificial Sequence: Synthetic oligonucleotide
uugcaaagguuaaugguuu

SEQ ID NO: 1624421 - RNA, 19 nt, Artificial Sequence
  Description of Artificial Sequence: Synthetic oligonucleotide
auaucugcgacaaagucua

SEQ ID NO: 1624422 - RNA, 19 nt, Artificial Sequence
  Description of Artificial Sequence: Synthetic oligonucleotide
caucagcauaugaagcagc

SEQ ID NO: 1624423 - RNA, 19 nt, Artificial Sequence
  Description of Artificial Sequence: Synthetic oligonucleotide
augcuuacuuuacggaaug

SEQ ID NO: 1624424 - RNA, 19 nt, Artificial Sequence
  Description of Artificial Sequence: Synthetic oligonucleotide
gagugcugcauuuagcuua

SEQ ID NO: 1624425 - RNA, 19 nt, Artificial Sequence
  Description of Artificial Sequence: Synthetic oligonucleotide
uuuacggaaugacauccuu

SEQ ID NO: 1624426 - RNA, 19 nt, Artificial Sequence
  Description of Artificial Sequence: Synthetic oligonucleotide
accagaauuggcaaguaga

SEQ ID NO: 1624427 - RNA, 19 nt, Artificial Sequence
  Description of Artificial Sequence: Synthetic oligonucleotide
ggugaauaccguuuuccag

SEQ ID NO: 1624428 - RNA, 19 nt, Artificial Sequence
  Description of Artificial Sequence: Synthetic oligonucleotide
uuacaaacuggggugaaua

SEQ ID NO: 1624429 - RNA, 19 nt, Artificial Sequence
  Description of Artificial Sequence: Synthetic oligonucleotide
aacaauggccaggacccag

SEQ ID NO: 1624430 - RNA, 19 nt, Artificial Sequence
  Description of Artificial Sequence: Synthetic oligonucleotide
auaugucuucggauuaaac

SEQ ID NO: 1624431 - RNA, 19 nt, Artificial Sequence
  Description of Artificial Sequence: Synthetic oligonucleotide
ugacuuuaguagagguuga

SEQ ID NO: 1624432 - RNA, 19 nt, Artificial Sequence
  Description of Artificial Sequence: Synthetic oligonucleotide
auccauaugucuucggauu

SEQ ID NO: 1624433 - RNA, 19 nt, Artificial Sequence
  Description of Artificial Sequence: Synthetic oligonucleotide
guauccauaugucuucgga

SEQ ID NO: 1624434 - RNA, 19 nt, Artificial Sequence
  Description of Artificial Sequence: Synthetic oligonucleotide
ugcauuuagcuuacuuaaa

SEQ ID NO: 1624435 - RNA, 19 nt, Artificial Sequence
  Description of Artificial Sequence: Synthetic oligonucleotide
accaagguggcgaacguuc

SEQ ID NO: 1624436 - RNA, 19 nt, Artificial Sequence
  Description of Artificial Sequence: Synthetic oligonucleotide
uccauaugucuucggauua

SEQ ID NO: 1624437 - RNA, 19 nt, Artificial Sequence
  Description of Artificial Sequence: Synthetic oligonucleotide
ucggagauggucuucugua

SEQ ID NO: 1624438 - RNA, 19 nt, Artificial Sequence
  Description of Artificial Sequence: Synthetic oligonucleotide
uguugagcguaacaaugua

SEQ ID NO: 1624439 - RNA, 19 nt, Artificial Sequence
  Description of Artificial Sequence: Synthetic oligonucleotide
agucaagauagccaauaua

SEQ ID NO: 1624440 - RNA, 19 nt, Artificial Sequence
  Description of Artificial Sequence: Synthetic oligonucleotide
ggauuaaacuaaauuugcc

SEQ ID NO: 1624441 - RNA, 19 nt, Artificial Sequence
  Description of Artificial Sequence: Synthetic oligonucleotide
uacaaucccucuucuacau

SEQ ID NO: 1624442 - RNA, 19 nt, Artificial Sequence
  Description of Artificial Sequence: Synthetic oligonucleotide
auuguacaaggcaagaaua

SEQ ID NO: 1624443 - RNA, 19 nt, Artificial Sequence
  Description of Artificial Sequence: Synthetic oligonucleotide
uacgauaagcagaggcggu

SEQ ID NO: 1624444 - RNA, 19 nt, Artificial Sequence
  Description of Artificial Sequence: Synthetic oligonucleotide
cugcaauugucccacccag

SEQ ID NO: 1624445 - RNA, 19 nt, Artificial Sequence
  Description of Artificial Sequence: Synthetic oligonucleotide
ugagcguaacaauguaaaa

SEQ ID NO: 1624446 - RNA, 19 nt, Artificial Sequence
  Description of Artificial Sequence: Synthetic oligonucleotide
gguuaaugguuucauggac

SEQ ID NO: 1624447 - RNA, 19 nt, Artificial Sequence
  Description of Artificial Sequence: Synthetic oligonucleotide
uucuguacuguugagcgua

SEQ ID NO: 1624448 - RNA, 19 nt, Artificial Sequence
  Description of Artificial Sequence: Synthetic oligonucleotide
uuacggaaugacauccuuu

SEQ ID NO: 1624449 - RNA, 19 nt, Artificial Sequence
  Description of Artificial Sequence: Synthetic oligonucleotide
auaggaucaaugguggaau

SEQ ID NO: 1624450 - RNA, 19 nt, Artificial Sequence
  Description of Artificial Sequence: Synthetic oligonucleotide
aagugaccauuccagugaa

SEQ ID NO: 1624451 - RNA, 19 nt, Artificial Sequence
  Description of Artificial Sequence: Synthetic oligonucleotide
ggaaccaagguggcgaacg

SEQ ID NO: 1624452 - RNA, 19 nt, Artificial Sequence
  Description of Artificial Sequence: Synthetic oligonucleotide
gaucccgccacgcacugac

SEQ ID NO: 1624453 - RNA, 19 nt, Artificial Sequence
  Description of Artificial Sequence: Synthetic oligonucleotide
gcaauugucccacccagcc

SEQ ID NO: 1624454 - RNA, 19 nt, Artificial Sequence
  Description of Artificial Sequence: Synthetic oligonucleotide
aacguuccacauaggauca

SEQ ID NO: 1624455 - RNA, 19 nt, Artificial Sequence
  Description of Artificial Sequence: Synthetic oligonucleotide
uauagucaagauagccaau

SEQ ID NO: 1624456 - RNA, 19 nt, Artificial Sequence
  Description of Artificial Sequence: Synthetic oligonucleotide
cugacaagccagguuagag

SEQ ID NO: 1624457 - RNA, 19 nt, Artificial Sequence
  Description of Artificial Sequence: Synthetic oligonucleotide
ugccuguugggucuggaau

SEQ ID NO: 1624458 - RNA, 19 nt, Artificial Sequence
  Description of Artificial Sequence: Synthetic oligonucleotide
cauuggaucgaguguuaug

SEQ ID NO: 1624459 - RNA, 19 nt, Artificial Sequence
  Description of Artificial Sequence: Synthetic oligonucleotide
ucuucggauuaaacuaaau

SEQ ID NO: 1624460 - RNA, 19 nt, Artificial Sequence
  Description of Artificial Sequence: Synthetic oligonucleotide
agauacuaaucgcuugaaa

SEQ ID NO: 1624461 - RNA, 19 nt, Artificial Sequence
  Description of Artificial Sequence: Synthetic oligonucleotide
uaggaucaaugguggaaug

SEQ ID NO: 1624462 - RNA, 19 nt, Artificial Sequence
  Description of Artificial Sequence: Synthetic oligonucleotide
auagucaagauagccaaua

SEQ ID NO: 1624463 - RNA, 19 nt, Artificial Sequence
  Description of Artificial Sequence: Synthetic oligonucleotide
auuggcaaguagaaccuug

SEQ ID NO: 1624464 - RNA, 19 nt, Artificial Sequence
  Description of Artificial Sequence: Synthetic oligonucleotide
aguggcgcucccgggaucc

SEQ ID NO: 1624465 - RNA, 19 nt, Artificial Sequence
  Description of Artificial Sequence: Synthetic oligonucleotide
acggaaugacauccuuuuc

SEQ ID NO: 1624466 - RNA, 19 nt, Artificial Sequence
  Description of Artificial Sequence: Synthetic oligonucleotide
uccauucagucaaguuugc

SEQ ID NO: 1624467 - RNA, 19 nt, Artificial Sequence
  Description of Artificial Sequence: Synthetic oligonucleotide
acuguuaagccaggaucgg

SEQ ID NO: 1624468 - RNA, 19 nt, Artificial Sequence
  Description of Artificial Sequence: Synthetic oligonucleotide
uggaaagcuuacgaauucu

SEQ ID NO: 1624469 - RNA, 19 nt, Artificial Sequence
  Description of Artificial Sequence: Synthetic oligonucleotide
agugcugcauuuagcuuac

SEQ ID NO: 1624470 - RNA, 19 nt, Artificial Sequence
  Description of Artificial Sequence: Synthetic oligonucleotide
uggcaaguagaaccuugca

SEQ ID NO: 1624471 - RNA, 19 nt, Artificial Sequence
  Description of Artificial Sequence: Synthetic oligonucleotide
gucuuacacaaacauuaga

SEQ ID NO: 1624472 - RNA, 19 nt, Artificial Sequence
  Description of Artificial Sequence: Synthetic oligonucleotide
agucaaguuugcaacaaaa

SEQ ID NO: 1624473 - RNA, 19 nt, Artificial Sequence
  Description of Artificial Sequence: Synthetic oligonucleotide
ggaucgaguguuaugauga

SEQ ID NO: 1624474 - RNA, 19 nt, Artificial Sequence
  Description of Artificial Sequence: Synthetic oligonucleotide
aguuuagugucaaaauuua

SEQ ID NO: 1624475 - RNA, 19 nt, Artificial Sequence
  Description of Artificial Sequence: Synthetic oligonucleotide
guguucuacuguacaaucc

SEQ ID NO: 1624476 - RNA, 19 nt, Artificial Sequence
  Description of Artificial Sequence: Synthetic oligonucleotide
cauuccuuagcaaacugcu

SEQ ID NO: 1624477 - RNA, 19 nt, Artificial Sequence
  Description of Artificial Sequence: Synthetic oligonucleotide
aucggagauggucuucugu

SEQ ID NO: 1624478 - RNA, 19 nt, Artificial Sequence
  Description of Artificial Sequence: Synthetic oligonucleotide
cuugcaaagguuaaugguu

SEQ ID NO: 1624479 - RNA, 19 nt, Artificial Sequence
  Description of Artificial Sequence: Synthetic oligonucleotide
ugaaguaacuuggcagccu

SEQ ID NO: 1624480 - RNA, 19 nt, Artificial Sequence
  Description of Artificial Sequence: Synthetic oligonucleotide
aaauuguaguucacuuuau

SEQ ID NO: 1624481 - RNA, 19 nt, Artificial Sequence
  Description of Artificial Sequence: Synthetic oligonucleotide
cagcauaugaagcagcucu

SEQ ID NO: 1624482 - RNA, 19 nt, Artificial Sequence
  Description of Artificial Sequence: Synthetic oligonucleotide
agagaacaauggccaggac

SEQ ID NO: 1624483 - RNA, 19 nt, Artificial Sequence
  Description of Artificial Sequence: Synthetic oligonucleotide
ucacuuuauguuugaggua

SEQ ID NO: 1624484 - RNA, 19 nt, Artificial Sequence
  Description of Artificial Sequence: Synthetic oligonucleotide
cuaaucgcuugaaagugaa

SEQ ID NO: 1624485 - RNA, 19 nt, Artificial Sequence
  Description of Artificial Sequence: Synthetic oligonucleotide
agguauccauaugucuucg

SEQ ID NO: 1624486 - RNA, 19 nt, Artificial Sequence
  Description of Artificial Sequence: Synthetic oligonucleotide
ccaggauugaaggagcagg

SEQ ID NO: 1624487 - RNA, 19 nt, Artificial Sequence
  Description of Artificial Sequence: Synthetic oligonucleotide
gacaaagucuaugggcuga

SEQ ID NO: 1624488 - RNA, 19 nt, Artificial Sequence
  Description of Artificial Sequence: Synthetic oligonucleotide
aggaaguuauggugcaaaa

SEQ ID NO: 1624489 - RNA, 19 nt, Artificial Sequence
  Description of Artificial Sequence: Synthetic oligonucleotide
guugggucuggaauauacc

SEQ ID NO: 1624490 - RNA, 19 nt, Artificial Sequence
  Description of Artificial Sequence: Synthetic oligonucleotide
agacucaagccuaacaguu

SEQ ID NO: 1624491 - RNA, 19 nt, Artificial Sequence
  Description of Artificial Sequence: Synthetic oligonucleotide
aaacacuguuaagccagga

SEQ ID NO: 1624492 - RNA, 19 nt, Artificial Sequence
  Description of Artificial Sequence: Synthetic oligonucleotide
guagaguggcgcucccggg

SEQ ID NO: 1624493 - RNA, 19 nt, Artificial Sequence
  Description of Artificial Sequence: Synthetic oligonucleotide
gagacucaagccuaacagu

SEQ ID NO: 1624494 - RNA, 19 nt, Artificial Sequence
  Description of Artificial Sequence: Synthetic oligonucleotide
gugaaguaacuuggcagcc

SEQ ID NO: 1624495 - RNA, 19 nt, Artificial Sequence
  Description of Artificial Sequence: Synthetic oligonucleotide
cuaaauuugccuguugggu

SEQ ID NO: 1624496 - RNA, 19 nt, Artificial Sequence
  Description of Artificial Sequence: Synthetic oligonucleotide
acuaaucgcuugaaaguga

SEQ ID NO: 1624497 - RNA, 19 nt, Artificial Sequence
  Description of Artificial Sequence: Synthetic oligonucleotide
gcuacagagacucaagccu

SEQ ID NO: 1624498 - RNA, 19 nt, Artificial Sequence
  Description of Artificial Sequence: Synthetic oligonucleotide
uuuacaaacuggggugaau

SEQ ID NO: 1624499 - RNA, 19 nt, Artificial Sequence
  Description of Artificial Sequence: Synthetic oligonucleotide
acauaggaucaauggugga

SEQ ID NO: 1624500 - RNA, 19 nt, Artificial Sequence
  Description of Artificial Sequence: Synthetic oligonucleotide
uaccguuuuccagcacugg

SEQ ID NO: 1624501 - RNA, 19 nt, Artificial Sequence
  Description of Artificial Sequence: Synthetic oligonucleotide
gaauuggcaaguagaaccu

SEQ ID NO: 1624502 - RNA, 19 nt, Artificial Sequence
  Description of Artificial Sequence: Synthetic oligonucleotide
aucugcgacaaagucuaug

SEQ ID NO: 1624503 - RNA, 19 nt, Artificial Sequence
  Description of Artificial Sequence: Synthetic oligonucleotide
gauugaaggagcaggugcu

SEQ ID NO: 1624504 - RNA, 19 nt, Artificial Sequence
  Description of Artificial Sequence: Synthetic oligonucleotide
uagauacuaaucgcuugaa

SEQ ID NO: 1624505 - RNA, 19 nt, Artificial Sequence
  Description of Artificial Sequence: Synthetic oligonucleotide
gguauccauaugucuucgg

SEQ ID NO: 1624506 - RNA, 19 nt, Artificial Sequence
  Description of Artificial Sequence: Synthetic oligonucleotide
cauaggaucaaugguggaa

SEQ ID NO: 1624507 - RNA, 19 nt, Artificial Sequence
  Description of Artificial Sequence: Synthetic oligonucleotide
ucgcgucagacgaaaucgu

SEQ ID NO: 1624508 - RNA, 19 nt, Artificial Sequence
  Description of Artificial Sequence: Synthetic oligonucleotide
ugucccacccagccugucu

SEQ ID NO: 1624509 - RNA, 19 nt, Artificial Sequence
  Description of Artificial Sequence: Synthetic oligonucleotide
acgauaagcagaggcggug

SEQ ID NO: 1624510 - RNA, 19 nt, Artificial Sequence
  Description of Artificial Sequence: Synthetic oligonucleotide
cagguuagagucgcgucag

SEQ ID NO: 1624511 - RNA, 19 nt, Artificial Sequence
  Description of Artificial Sequence: Synthetic oligonucleotide
ggcaaguagaaccuugcaa

SEQ ID NO: 1624512 - RNA, 19 nt, Artificial Sequence
  Description of Artificial Sequence: Synthetic oligonucleotide
aacuucccacauguugugu

SEQ ID NO: 1624513 - RNA, 19 nt, Artificial Sequence
  Description of Artificial Sequence: Synthetic oligonucleotide
ggaaguuauggugcaaaac

SEQ ID NO: 1624514 - RNA, 19 nt, Artificial Sequence
  Description of Artificial Sequence: Synthetic oligonucleotide
gggaaccagaauuggcaag

SEQ ID NO: 1624515 - RNA, 19 nt, Artificial Sequence
  Description of Artificial Sequence: Synthetic oligonucleotide
gcgucagacgaaaucgucg

SEQ ID NO: 1624516 - RNA, 19 nt, Artificial Sequence
  Description of Artificial Sequence: Synthetic oligonucleotide
uuggaucgaguguuaugau

SEQ ID NO: 1624517 - RNA, 19 nt, Artificial Sequence
  Description of Artificial Sequence: Synthetic oligonucleotide
ucccgccacgcacugacaa

SEQ ID NO: 1624518 - RNA, 19 nt, Artificial Sequence
  Description of Artificial Sequence: Synthetic oligonucleotide
cugaggaaguuauggugca

SEQ ID NO: 1624519 - RNA, 19 nt, Artificial Sequence
  Description of Artificial Sequence: Synthetic oligonucleotide
agugaaggggagguagagu

SEQ ID NO: 1624520 - RNA, 19 nt, Artificial Sequence
  Description of Artificial Sequence: Synthetic oligonucleotide
gcuuacuuuacggaaugac

SEQ ID NO: 1624521 - RNA, 19 nt, Artificial Sequence
  Description of Artificial Sequence: Synthetic oligonucleotide
gaugcuuacuuuacggaau

SEQ ID NO: 1624522 - RNA, 19 nt, Artificial Sequence
  Description of Artificial Sequence: Synthetic oligonucleotide
uuguacugguucccugcuc

SEQ ID NO: 1624523 - RNA, 19 nt, Artificial Sequence
  Description of Artificial Sequence: Synthetic oligonucleotide
uuccagcugguuaguuaca

SEQ ID NO: 1624524 - RNA, 19 nt, Artificial Sequence
  Description of Artificial Sequence: Synthetic oligonucleotide
agcauguccuggcuucagu

SEQ ID NO: 1624525 - RNA, 19 nt, Artificial Sequence
  Description of Artificial Sequence: Synthetic oligonucleotide
guugagcguaacaauguaa

SEQ ID NO: 1624526 - RNA, 19 nt, Artificial Sequence
  Description of Artificial Sequence: Synthetic oligonucleotide
cacuuuauguuugagguau

SEQ ID NO: 1624527 - RNA, 19 nt, Artificial Sequence
  Description of Artificial Sequence: Synthetic oligonucleotide
gcacugacaagccagguua

SEQ ID NO: 1624528 - RNA, 19 nt, Artificial Sequence
  Description of Artificial Sequence: Synthetic oligonucleotide
cugcuccacgaauaaugac

SEQ ID NO: 1624529 - RNA, 19 nt, Artificial Sequence
  Description of Artificial Sequence: Synthetic oligonucleotide
gugaccauuccagugaagu

SEQ ID NO: 1624530 - RNA, 19 nt, Artificial Sequence
  Description of Artificial Sequence: Synthetic oligonucleotide
gaucggagauggucuucug

SEQ ID NO: 1624531 - RNA, 19 nt, Artificial Sequence
  Description of Artificial Sequence: Synthetic oligonucleotide
gcauguccuggcuucagug

SEQ ID NO: 1624532 - RNA, 19 nt, Artificial Sequence
  Description of Artificial Sequence: Synthetic oligonucleotide
gauagccaauauaauugua

SEQ ID NO: 1624533 - RNA, 19 nt, Artificial Sequence
  Description of Artificial Sequence: Synthetic oligonucleotide
gaaguaacuuggcagccuu

SEQ ID NO: 1624534 - RNA, 19 nt, Artificial Sequence
  Description of Artificial Sequence: Synthetic oligonucleotide
gaucgaguguuaugaugaa

SEQ ID NO: 1624535 - RNA, 19 nt, Artificial Sequence
  Description of Artificial Sequence: Synthetic oligonucleotide
ugcuuacuuuacggaauga

SEQ ID NO: 1624536 - RNA, 19 nt, Artificial Sequence
  Description of Artificial Sequence: Synthetic oligonucleotide
gcgaacguuccacauagga

SEQ ID NO: 1624537 - RNA, 19 nt, Artificial Sequence
  Description of Artificial Sequence: Synthetic oligonucleotide
ccacgcacugacaagccag

SEQ ID NO: 1624538 - RNA, 19 nt, Artificial Sequence
  Description of Artificial Sequence: Synthetic oligonucleotide
gaauaccguuuuccagcac

SEQ ID NO: 1624539 - RNA, 19 nt, Artificial Sequence
  Description of Artificial Sequence: Synthetic oligonucleotide
cuguugagcguaacaaugu

SEQ ID NO: 1624540 - RNA, 19 nt, Artificial Sequence
  Description of Artificial Sequence: Synthetic oligonucleotide
uugccuguugggucuggaa

SEQ ID NO: 1624541 - RNA, 19 nt, Artificial Sequence
  Description of Artificial Sequence: Synthetic oligonucleotide
acuggggugaauaccguuu

SEQ ID NO: 1624542 - RNA, 19 nt, Artificial Sequence
  Description of Artificial Sequence: Synthetic oligonucleotide
gaccacgggaaucuccucu

SEQ ID NO: 1624543 - RNA, 19 nt, Artificial Sequence
  Description of Artificial Sequence: Synthetic oligonucleotide
gguuagagucgcgucagac

SEQ ID NO: 1624544 - RNA, 19 nt, Artificial Sequence
  Description of Artificial Sequence: Synthetic oligonucleotide
ggcgguguggugaugcugc

SEQ ID NO: 1624545 - RNA, 19 nt, Artificial Sequence
  Description of Artificial Sequence: Synthetic oligonucleotide
uagagucgcgucagacgaa

SEQ ID NO: 1624546 - RNA, 19 nt, Artificial Sequence
  Description of Artificial Sequence: Synthetic oligonucleotide
uuugccuguugggucugga

SEQ ID NO: 1624547 - RNA, 19 nt, Artificial Sequence
  Description of Artificial Sequence: Synthetic oligonucleotide
gacuuuaguagagguugaa

SEQ ID NO: 1624548 - RNA, 19 nt, Artificial Sequence
  Description of Artificial Sequence: Synthetic oligonucleotide
ggcugcaauugucccaccc

SEQ ID NO: 1624549 - RNA, 19 nt, Artificial Sequence
  Description of Artificial Sequence: Synthetic oligonucleotide
aucgaguguuaugaugaau

SEQ ID NO: 1624550 - RNA, 19 nt, Artificial Sequence
  Description of Artificial Sequence: Synthetic oligonucleotide
gcauuuagcuuacuuaaau

SEQ ID NO: 1624551 - RNA, 19 nt, Artificial Sequence
  Description of Artificial Sequence: Synthetic oligonucleotide
ugaggaaguuauggugcaa

SEQ ID NO: 1624552 - RNA, 19 nt, Artificial Sequence
  Description of Artificial Sequence: Synthetic oligonucleotide
agagucgcgucagacgaaa

SEQ ID NO: 1624553 - RNA, 19 nt, Artificial Sequence
  Description of Artificial Sequence: Synthetic oligonucleotide
cgaguguuaugaugaauac

SEQ ID NO: 1624554 - RNA, 19 nt, Artificial Sequence
  Description of Artificial Sequence: Synthetic oligonucleotide
accacgggaaucuccucuu

SEQ ID NO: 1624555 - RNA, 19 nt, Artificial Sequence
  Description of Artificial Sequence: Synthetic oligonucleotide
acauuggaucgaguguuau

SEQ ID NO: 1624556 - RNA, 19 nt, Artificial Sequence
  Description of Artificial Sequence: Synthetic oligonucleotide
agccagguuagagucgcgu

SEQ ID NO: 1624557 - RNA, 19 nt, Artificial Sequence
  Description of Artificial Sequence: Synthetic oligonucleotide
ugucucccauuuacuggau

SEQ ID NO: 1624558 - RNA, 19 nt, Artificial Sequence
  Description of Artificial Sequence: Synthetic oligonucleotide
aaccaagguggcgaacguu

SEQ ID NO: 1624559 - RNA, 19 nt, Artificial Sequence
  Description of Artificial Sequence: Synthetic oligonucleotide
ggagguagaguggcgcucc

SEQ ID NO: 1624560 - RNA, 19 nt, Artificial Sequence
  Description of Artificial Sequence: Synthetic oligonucleotide
cuguggguugcuacagaga

SEQ ID NO: 1624561 - RNA, 19 nt, Artificial Sequence
  Description of Artificial Sequence: Synthetic oligonucleotide
uacugguucccugcuccac

SEQ ID NO: 1624562 - RNA, 19 nt, Artificial Sequence
  Description of Artificial Sequence: Synthetic oligonucleotide
acaaucccucuucuacauu

SEQ ID NO: 1624563 - RNA, 19 nt, Artificial Sequence
  Description of Artificial Sequence: Synthetic oligonucleotide
gacucaagccuaacaguua

SEQ ID NO: 1624564 - RNA, 19 nt, Artificial Sequence
  Description of Artificial Sequence: Synthetic oligonucleotide
ccaagguggcgaacguucc

SEQ ID NO: 1624565 - RNA, 19 nt, Artificial Sequence
  Description of Artificial Sequence: Synthetic oligonucleotide
gcaaagguuaaugguuuca

SEQ ID NO: 1624566 - RNA, 19 nt, Artificial Sequence
  Description of Artificial Sequence: Synthetic oligonucleotide
ugccagccaguguucuacu

SEQ ID NO: 1624567 - RNA, 19 nt, Artificial Sequence
  Description of Artificial Sequence: Synthetic oligonucleotide
cuuuacggaaugacauccu

SEQ ID NO: 1624568 - RNA, 19 nt, Artificial Sequence
  Description of Artificial Sequence: Synthetic oligonucleotide
ugcucaagcugaggaaguu

SEQ ID NO: 1624569 - RNA, 19 nt, Artificial Sequence
  Description of Artificial Sequence: Synthetic oligonucleotide
cauaugucuucggauuaaa

SEQ ID NO: 1624570 - RNA, 19 nt, Artificial Sequence
  Description of Artificial Sequence: Synthetic oligonucleotide
auaucaccuuguacaauua

SEQ ID NO: 1624571 - RNA, 19 nt, Artificial Sequence
  Description of Artificial Sequence: Synthetic oligonucleotide
ggaucaaugguggaaugcu

SEQ ID NO: 1624572 - RNA, 19 nt, Artificial Sequence
  Description of Artificial Sequence: Synthetic oligonucleotide
agcauaugaagcagcucuu

SEQ ID NO: 1624573 - RNA, 19 nt, Artificial Sequence
  Description of Artificial Sequence: Synthetic oligonucleotide
ggaaccagaauuggcaagu

SEQ ID NO: 1624574 - RNA, 19 nt, Artificial Sequence
  Description of Artificial Sequence: Synthetic oligonucleotide
agguuagagucgcgucaga

SEQ ID NO: 1624575 - RNA, 19 nt, Artificial Sequence
  Description of Artificial Sequence: Synthetic oligonucleotide
caagccuaacaguuaacuu

SEQ ID NO: 1624576 - RNA, 19 nt, Artificial Sequence
  Description of Artificial Sequence: Synthetic oligonucleotide
cuucauuccuuagcaaacu

SEQ ID NO: 1624577 - RNA, 19 nt, Artificial Sequence
  Description of Artificial Sequence: Synthetic oligonucleotide
cacgaauaaugacuuuagu

SEQ ID NO: 1624578 - RNA, 19 nt, Artificial Sequence
  Description of Artificial Sequence: Synthetic oligonucleotide
ugguggaaugcugcugaua

SEQ ID NO: 1624579 - RNA, 19 nt, Artificial Sequence
  Description of Artificial Sequence: Synthetic oligonucleotide
gauggucuucuguacuguu

SEQ ID NO: 1624580 - RNA, 19 nt, Artificial Sequence
  Description of Artificial Sequence: Synthetic oligonucleotide
gcgacaaagucuaugggcu

SEQ ID NO: 1624581 - RNA, 19 nt, Artificial Sequence
  Description of Artificial Sequence: Synthetic oligonucleotide
ugaccacgggaaucuccuc

SEQ ID NO: 1624582 - RNA, 19 nt, Artificial Sequence
  Description of Artificial Sequence: Synthetic oligonucleotide
cuguuaagccaggaucgga

SEQ ID NO: 1624583 - RNA, 19 nt, Artificial Sequence
  Description of Artificial Sequence: Synthetic oligonucleotide
gccaggaucggagaugguc

SEQ ID NO: 1624584 - RNA, 19 nt, Artificial Sequence
  Description of Artificial Sequence: Synthetic oligonucleotide
guacugguucccugcucca

SEQ ID NO: 1624585 - RNA, 19 nt, Artificial Sequence
  Description of Artificial Sequence: Synthetic oligonucleotide
caagguggcgaacguucca

SEQ ID NO: 1624586 - RNA, 19 nt, Artificial Sequence
  Description of Artificial Sequence: Synthetic oligonucleotide
cuaugggcugaagccccag

SEQ ID NO: 1624587 - RNA, 19 nt, Artificial Sequence
  Description of Artificial Sequence: Synthetic oligonucleotide
uaucugcgacaaagucuau

SEQ ID NO: 1624588 - RNA, 19 nt, Artificial Sequence
  Description of Artificial Sequence: Synthetic oligonucleotide
guucccugcuccacgaaua

SEQ ID NO: 1624589 - RNA, 19 nt, Artificial Sequence
  Description of Artificial Sequence: Synthetic oligonucleotide
guggcgaacguuccacaua

SEQ ID NO: 1624590 - RNA, 19 nt, Artificial Sequence
  Description of Artificial Sequence: Synthetic oligonucleotide
gaacaauggccaggaccca

SEQ ID NO: 1624591 - RNA, 19 nt, Artificial Sequence
  Description of Artificial Sequence: Synthetic oligonucleotide
ugguucccugcuccacgaa

SEQ ID NO: 1624592 - RNA, 19 nt, Artificial Sequence
  Description of Artificial Sequence: Synthetic oligonucleotide
gcaaugaccacgggaaucu

SEQ ID NO: 1624593 - RNA, 19 nt, Artificial Sequence
  Description of Artificial Sequence: Synthetic oligonucleotide
gucuucggauuaaacuaaa

SEQ ID NO: 1624594 - RNA, 19 nt, Artificial Sequence
  Description of Artificial Sequence: Synthetic oligonucleotide
gccagguuagagucgcguc

SEQ ID NO: 1624595 - RNA, 19 nt, Artificial Sequence
  Description of Artificial Sequence: Synthetic oligonucleotide
cuguacuguugagcguaac

SEQ ID NO: 1624596 - RNA, 19 nt, Artificial Sequence
  Description of Artificial Sequence: Synthetic oligonucleotide
ggcaagaauaucaccuugu

SEQ ID NO: 1624597 - RNA, 19 nt, Artificial Sequence
  Description of Artificial Sequence: Synthetic oligonucleotide
ccaguguucuacuguacaa

SEQ ID NO: 1624598 - RNA, 19 nt, Artificial Sequence
  Description of Artificial Sequence: Synthetic oligonucleotide
cuggucaggauccuccuuu

SEQ ID NO: 1624599 - RNA, 19 nt, Artificial Sequence
  Description of Artificial Sequence: Synthetic oligonucleotide
cuggaaccaagguggcgaa

SEQ ID NO: 1624600 - RNA, 19 nt, Artificial Sequence
  Description of Artificial Sequence: Synthetic oligonucleotide
cccacauguugugucuucc

SEQ ID NO: 1624601 - RNA, 19 nt, Artificial Sequence
  Description of Artificial Sequence: Synthetic oligonucleotide
ccuuguacaauuacaucau

SEQ ID NO: 1624602 - RNA, 19 nt, Artificial Sequence
  Description of Artificial Sequence: Synthetic oligonucleotide
ccuuagcaaacugcucaag

SEQ ID NO: 1624603 - RNA, 19 nt, Artificial Sequence
  Description of Artificial Sequence: Synthetic oligonucleotide
ccgccacgcacugacaagc

SEQ ID NO: 1624604 - RNA, 19 nt, Artificial Sequence
  Description of Artificial Sequence: Synthetic oligonucleotide
caauugucccacccagccu

SEQ ID NO: 1624605 - RNA, 19 nt, Artificial Sequence
  Description of Artificial Sequence: Synthetic oligonucleotide
ccaggaucggagauggucu

SEQ ID NO: 1624606 - RNA, 19 nt, Artificial Sequence
  Description of Artificial Sequence: Synthetic oligonucleotide
caauuacaucaucauccau

SEQ ID NO: 1624607 - RNA, 19 nt, Artificial Sequence
  Description of Artificial Sequence: Synthetic oligonucleotide
acgcacugacaagccaggu

SEQ ID NO: 1624608 - RNA, 19 nt, Artificial Sequence
  Description of Artificial Sequence: Synthetic oligonucleotide
cccaaggcuugaagugacc

SEQ ID NO: 1624609 - RNA, 19 nt, Artificial Sequence
  Description of Artificial Sequence: Synthetic oligonucleotide
ccuuuacaaacugggguga

SEQ ID NO: 1624610 - RNA, 19 nt, Artificial Sequence
  Description of Artificial Sequence: Synthetic oligonucleotide
cuacuguacaaucccucuu

SEQ ID NO: 1624611 - RNA, 19 nt, Artificial Sequence
  Description of Artificial Sequence: Synthetic oligonucleotide
gugcuggcuuucauggaaa

SEQ ID NO: 1624612 - RNA, 19 nt, Artificial Sequence
  Description of Artificial Sequence: Synthetic oligonucleotide
cggaaugacauccuuuucu

SEQ ID NO: 1624613 - RNA, 19 nt, Artificial Sequence
  Description of Artificial Sequence: Synthetic oligonucleotide
cacgggaaucuccucuugu

SEQ ID NO: 1624614 - RNA, 19 nt, Artificial Sequence
  Description of Artificial Sequence: Synthetic oligonucleotide
ggcuuucauggaaagcuua

SEQ ID NO: 1624615 - RNA, 19 nt, Artificial Sequence
  Description of Artificial Sequence: Synthetic oligonucleotide
cugaagccccagaauuccu

SEQ ID NO: 1624616 - RNA, 19 nt, Artificial Sequence
  Description of Artificial Sequence: Synthetic oligonucleotide
ccgggaucccgccacgcac

SEQ ID NO: 1624617 - RNA, 19 nt, Artificial Sequence
  Description of Artificial Sequence: Synthetic oligonucleotide
ggaucggagauggucuucu

SEQ ID NO: 1624618 - RNA, 19 nt, Artificial Sequence
  Description of Artificial Sequence: Synthetic oligonucleotide
ggcgaacguuccacauagg

SEQ ID NO: 1624619 - RNA, 19 nt, Artificial Sequence
  Description of Artificial Sequence: Synthetic oligonucleotide
cccgccacgcacugacaag

SEQ ID NO: 1624620 - RNA, 19 nt, Artificial Sequence
  Description of Artificial Sequence: Synthetic oligonucleotide
cgcgucagacgaaaucguc

SEQ ID NO: 1624621 - RNA, 19 nt, Artificial Sequence
  Description of Artificial Sequence: Synthetic oligonucleotide
gguggcgaacguuccacau

SEQ ID NO: 1624622 - RNA, 19 nt, Artificial Sequence
  Description of Artificial Sequence: Synthetic oligonucleotide
acguuccacauaggaucaa

SEQ ID NO: 1624623 - RNA, 19 nt, Artificial Sequence
  Description of Artificial Sequence: Synthetic oligonucleotide
guggguugcuacagagacu

SEQ ID NO: 1624624 - RNA, 19 nt, Artificial Sequence
  Description of Artificial Sequence: Synthetic oligonucleotide
ccacgggaaucuccucuug

SEQ ID NO: 1624625 - RNA, 19 nt, Artificial Sequence
  Description of Artificial Sequence: Synthetic oligonucleotide
ccauucagucaaguuugca

SEQ ID NO: 1624626 - RNA, 19 nt, Artificial Sequence
  Description of Artificial Sequence: Synthetic oligonucleotide
cgaacguuccacauaggau

SEQ ID NO: 1624627 - RNA, 19 nt, Artificial Sequence
  Description of Artificial Sequence: Synthetic oligonucleotide
ggugaugcugccagccagu

SEQ ID NO: 1624628 - RNA, 19 nt, Artificial Sequence
  Description of Artificial Sequence: Synthetic oligonucleotide
caggaucggagauggucuu

SEQ ID NO: 1624629 - RNA, 19 nt, Artificial Sequence
  Description of Artificial Sequence: Synthetic oligonucleotide
cgccacgcacugacaagcc

SEQ ID NO: 1624630 - RNA, 19 nt, Artificial Sequence
  Description of Artificial Sequence: Synthetic oligonucleotide
cucccauuuacuggauguu

SEQ ID NO: 1624631 - RNA, 19 nt, Artificial Sequence
  Description of Artificial Sequence: Synthetic oligonucleotide
gagucgcgucagacgaaau

SEQ ID NO: 1624632 - RNA, 19 nt, Artificial Sequence
  Description of Artificial Sequence: Synthetic oligonucleotide
ccagaugaugaugcuuacu

SEQ ID NO: 1624633 - RNA, 19 nt, Artificial Sequence
  Description of Artificial Sequence: Synthetic oligonucleotide
ggguugcuacagagacuca

SEQ ID NO: 1624634 - RNA, 19 nt, Artificial Sequence
  Description of Artificial Sequence: Synthetic oligonucleotide
ccagcugguuaguuacauu

SEQ ID NO: 1624635 - RNA, 19 nt, Artificial Sequence
  Description of Artificial Sequence: Synthetic oligonucleotide
cgcacugacaagccagguu

SEQ ID NO: 1624636 - RNA, 19 nt, Artificial Sequence
  Description of Artificial Sequence: Synthetic oligonucleotide
cguuccacauaggaucaau

SEQ ID NO: 1624637 - RNA, 19 nt, Artificial Sequence
  Description of Artificial Sequence: Synthetic oligonucleotide
gugcugcauuuagcuuacu

SEQ ID NO: 1624638 - RNA, 19 nt, Artificial Sequence
  Description of Artificial Sequence: Synthetic oligonucleotide
auauuaaagacacacaagg

SEQ ID NO: 1624639 - RNA, 19 nt, Artificial Sequence
  Description of Artificial Sequence: Synthetic oligonucleotide
auuuaguuaauauuguccc

SEQ ID NO: 1624640 - RNA, 19 nt, Artificial Sequence
  Description of Artificial Sequence: Synthetic oligonucleotide
aagacaaugguccaaaguc

SEQ ID NO: 1624641 - RNA, 19 nt, Artificial Sequence
  Description of Artificial Sequence: Synthetic oligonucleotide
aagugaaagacaauggucc

SEQ ID NO: 1624642 - RNA, 19 nt, Artificial Sequence
  Description of Artificial Sequence: Synthetic oligonucleotide
aaauguuggacugauggcc

SEQ ID NO: 1624643 - RNA, 19 nt, Artificial Sequence
  Description of Artificial Sequence: Synthetic oligonucleotide
uauaguguaugcuaguuag

SEQ ID NO: 1624644 - RNA, 19 nt, Artificial Sequence
  Description of Artificial Sequence: Synthetic oligonucleotide
aauauugucccacacaaaa

SEQ ID NO: 1624645 - RNA, 19 nt, Artificial Sequence
  Description of Artificial Sequence: Synthetic oligonucleotide
acauugaaaggcuaaauag

SEQ ID NO: 1624646 - RNA, 19 nt, Artificial Sequence
  Description of Artificial Sequence: Synthetic oligonucleotide
aguuaggguauguuuaucc

SEQ ID NO: 1624647 - RNA, 19 nt, Artificial Sequence
  Description of Artificial Sequence: Synthetic oligonucleotide
uguuuauccagcuaugcag

SEQ ID NO: 1624648 - RNA, 19 nt, Artificial Sequence
  Description of Artificial Sequence: Synthetic oligonucleotide
cauuuaguuaauauugucc

SEQ ID NO: 1624649 - RNA, 19 nt, Artificial Sequence
  Description of Artificial Sequence: Synthetic oligonucleotide
aagaauaacuucaaaagug

SEQ ID NO: 1624650 - RNA, 19 nt, Artificial Sequence
  Description of Artificial Sequence: Synthetic oligonucleotide
ucugaaaugcccaagguuc

SEQ ID NO: 1624651 - RNA, 19 nt, Artificial Sequence
  Description of Artificial Sequence: Synthetic oligonucleotide
guacaugggacauauauag

SEQ ID NO: 1624652 - RNA, 19 nt, Artificial Sequence
  Description of Artificial Sequence: Synthetic oligonucleotide
gaagccacuauucuaaccc

SEQ ID NO: 1624653 - RNA, 19 nt, Artificial Sequence
  Description of Artificial Sequence: Synthetic oligonucleotide
ucuucuaguauuuuggagu

SEQ ID NO: 1624654 - RNA, 19 nt, Artificial Sequence
  Description of Artificial Sequence: Synthetic oligonucleotide
guuacagacacauacuacc

SEQ ID NO: 1624655 - RNA, 19 nt, Artificial Sequence
  Description of Artificial Sequence: Synthetic oligonucleotide
guaagugugacucacuggc

SEQ ID NO: 1624656 - RNA, 19 nt, Artificial Sequence
  Description of Artificial Sequence: Synthetic oligonucleotide
cucacacucauacagaagc

SEQ ID NO: 1624657 - RNA, 19 nt, Artificial Sequence
  Description of Artificial Sequence: Synthetic oligonucleotide
uccaaagucccucuuauga

SEQ ID NO: 1624658 - RNA, 19 nt, Artificial Sequence
  Description of Artificial Sequence: Synthetic oligonucleotide
agcuugggaacauaagacc

SEQ ID NO: 1624659 - RNA, 19 nt, Artificial Sequence
  Description of Artificial Sequence: Synthetic oligonucleotide
agucauaccguuuagucca

SEQ ID NO: 1624660 - RNA, 19 nt, Artificial Sequence
  Description of Artificial Sequence: Synthetic oligonucleotide
acaugggacauauauagug

SEQ ID NO: 1624661 - RNA, 19 nt, Artificial Sequence
  Description of Artificial Sequence: Synthetic oligonucleotide
ugauugaaccaacaguccc

SEQ ID NO: 1624662 - RNA, 19 nt, Artificial Sequence
  Description of Artificial Sequence: Synthetic oligonucleotide
acuauucuaacccugggga

SEQ ID NO: 1624663 - RNA, 19 nt, Artificial Sequence
  Description of Artificial Sequence: Synthetic oligonucleotide
uuaaguggaauucuccuaa

SEQ ID NO: 1624664 - RNA, 19 nt, Artificial Sequence
  Description of Artificial Sequence: Synthetic oligonucleotide
aaucucucaggacuccaac

SEQ ID NO: 1624665 - RNA, 19 nt, Artificial Sequence
  Description of Artificial Sequence: Synthetic oligonucleotide
ggcauaaggaagaagaugg

SEQ ID NO: 1624666 - RNA, 19 nt, Artificial Sequence
  Description of Artificial Sequence: Synthetic oligonucleotide
aguuaauauugucccacac

SEQ ID NO: 1624667 - RNA, 19 nt, Artificial Sequence
  Description of Artificial Sequence: Synthetic oligonucleotide
uaguguaugcuaguuaggg

SEQ ID NO: 1624668 - RNA, 19 nt, Artificial Sequence
  Description of Artificial Sequence: Synthetic oligonucleotide
uuggaaaccaccagguuac

SEQ ID NO: 1624669 - RNA, 19 nt, Artificial Sequence
  Description of Artificial Sequence: Synthetic oligonucleotide
ccuaauuuccccuaaacag

SEQ ID NO: 1624670 - RNA, 19 nt, Artificial Sequence
  Description of Artificial Sequence: Synthetic oligonucleotide
uccuaauuuccccuaaaca

SEQ ID NO: 1624671 - RNA, 19 nt, Artificial Sequence
  Description of Artificial Sequence: Synthetic oligonucleotide
aaaccaccagguuacagga

SEQ ID NO: 1624672 - RNA, 19 nt, Artificial Sequence
  Description of Artificial Sequence: Synthetic oligonucleotide
cuuugggucaggcagcugg

SEQ ID NO: 1624673 - RNA, 19 nt, Artificial Sequence
  Description of Artificial Sequence: Synthetic oligonucleotide
cauagagcaaacugggaag

SEQ ID NO: 1624674 - RNA, 19 nt, Artificial Sequence
  Description of Artificial Sequence: Synthetic oligonucleotide
agagcuugggaacauaaga

SEQ ID NO: 1624675 - RNA, 19 nt, Artificial Sequence
  Description of Artificial Sequence: Synthetic oligonucleotide
uuaguuaauauugucccac

SEQ ID NO: 1624676 - RNA, 19 nt, Artificial Sequence
  Description of Artificial Sequence: Synthetic oligonucleotide
uaggguauguuuauccagc

SEQ ID NO: 1624677 - RNA, 19 nt, Artificial Sequence
  Description of Artificial Sequence: Synthetic oligonucleotide
uguaagugugacucacugg

SEQ ID NO: 1624678 - RNA, 19 nt, Artificial Sequence
  Description of Artificial Sequence: Synthetic oligonucleotide
uuauccuccugucucaacu

SEQ ID NO: 1624679 - RNA, 19 nt, Artificial Sequence
  Description of Artificial Sequence: Synthetic oligonucleotide
acauauauaguguaugcua

SEQ ID NO: 1624680 - RNA, 19 nt, Artificial Sequence
  Description of Artificial Sequence: Synthetic oligonucleotide
augcccaagguucaaagag

SEQ ID NO: 1624681 - RNA, 19 nt, Artificial Sequence
  Description of Artificial Sequence: Synthetic oligonucleotide
uaacuucaaaagugggugg

SEQ ID NO: 1624682 - RNA, 19 nt, Artificial Sequence
  Description of Artificial Sequence: Synthetic oligonucleotide
ugucauuggacagugcucc

SEQ ID NO: 1624683 - RNA, 19 nt, Artificial Sequence
  Description of Artificial Sequence: Synthetic oligonucleotide
cuuaacuuugcugaccgcc

SEQ ID NO: 1624684 - RNA, 19 nt, Artificial Sequence
  Description of Artificial Sequence: Synthetic oligonucleotide
uuuaguuaauauuguccca

SEQ ID NO: 1624685 - RNA, 19 nt, Artificial Sequence
  Description of Artificial Sequence: Synthetic oligonucleotide
uuacagacacauacuacca

SEQ ID NO: 1624686 - RNA, 19 nt, Artificial Sequence
  Description of Artificial Sequence: Synthetic oligonucleotide
gagucauaccguuuagucc

SEQ ID NO: 1624687 - RNA, 19 nt, Artificial Sequence
  Description of Artificial Sequence: Synthetic oligonucleotide
uaccguuuaguccaagcug

SEQ ID NO: 1624688 - RNA, 19 nt, Artificial Sequence
  Description of Artificial Sequence: Synthetic oligonucleotide
uaguauuuuggaguaaucu

SEQ ID NO: 1624689 - RNA, 19 nt, Artificial Sequence
  Description of Artificial Sequence: Synthetic oligonucleotide
agacaaugguccaaagucc

SEQ ID NO: 1624690 - RNA, 19 nt, Artificial Sequence
  Description of Artificial Sequence: Synthetic oligonucleotide
cuuagagguagccuuuggg

SEQ ID NO: 1624691 - RNA, 19 nt, Artificial Sequence
  Description of Artificial Sequence: Synthetic oligonucleotide
gaauucuccuaauuucccc

SEQ ID NO: 1624692 - RNA, 19 nt, Artificial Sequence
  Description of Artificial Sequence: Synthetic oligonucleotide
acuaccauauccaguuucc

SEQ ID NO: 1624693 - RNA, 19 nt, Artificial Sequence
  Description of Artificial Sequence: Synthetic oligonucleotide
aggagaugcuuccuaaguc

SEQ ID NO: 1624694 - RNA, 19 nt, Artificial Sequence
  Description of Artificial Sequence: Synthetic oligonucleotide
ucucucaggacuccaacga

SEQ ID NO: 1624695 - RNA, 19 nt, Artificial Sequence
  Description of Artificial Sequence: Synthetic oligonucleotide
uuaacuuugcugaccgcca

SEQ ID NO: 1624696 - RNA, 19 nt, Artificial Sequence
  Description of Artificial Sequence: Synthetic oligonucleotide
uccuuaaguggaauucucc

SEQ ID NO: 1624697 - RNA, 19 nt, Artificial Sequence
  Description of Artificial Sequence: Synthetic oligonucleotide
accaagaauccuuaguccu

SEQ ID NO: 1624698 - RNA, 19 nt, Artificial Sequence
  Description of Artificial Sequence: Synthetic oligonucleotide
cuaaacagagagauuagga

SEQ ID NO: 1624699 - RNA, 19 nt, Artificial Sequence
  Description of Artificial Sequence: Synthetic oligonucleotide
cauuaggcuuuuaacuagg

SEQ ID NO: 1624700 - RNA, 19 nt, Artificial Sequence
  Description of Artificial Sequence: Synthetic oligonucleotide
caggacuuaggccauacag

SEQ ID NO: 1624701 - RNA, 19 nt, Artificial Sequence
  Description of Artificial Sequence: Synthetic oligonucleotide
uauucuaacccuggggaag

SEQ ID NO: 1624702 - RNA, 19 nt, Artificial Sequence
  Description of Artificial Sequence: Synthetic oligonucleotide
caggacuccaacgauaggg

SEQ ID NO: 1624703 - RNA, 19 nt, Artificial Sequence
  Description of Artificial Sequence: Synthetic oligonucleotide
aggacuuaggccauacagc

SEQ ID NO: 1624704 - RNA, 19 nt, Artificial Sequence
  Description of Artificial Sequence: Synthetic oligonucleotide
ugggagacauuccaggcca

SEQ ID NO: 1624705 - RNA, 19 nt, Artificial Sequence
  Description of Artificial Sequence: Synthetic oligonucleotide
agagcucaagcccauuuag

SEQ ID NO: 1624706 - RNA, 19 nt, Artificial Sequence
  Description of Artificial Sequence: Synthetic oligonucleotide
uuguuggaaaccaccaggu

SEQ ID NO: 1624707 - RNA, 19 nt, Artificial Sequence
  Description of Artificial Sequence: Synthetic oligonucleotide
aacgauagggcuguugaca

SEQ ID NO: 1624708 - RNA, 19 nt, Artificial Sequence
  Description of Artificial Sequence: Synthetic oligonucleotide
ggacugauggcccauagag

SEQ ID NO: 1624709 - RNA, 19 nt, Artificial Sequence
  Description of Artificial Sequence: Synthetic oligonucleotide
cuaauuuccccuaaacaga

SEQ ID NO: 1624710 - RNA, 19 nt, Artificial Sequence
  Description of Artificial Sequence: Synthetic oligonucleotide
guuuaccugcuuuauuucc

SEQ ID NO: 1624711 - RNA, 19 nt, Artificial Sequence
  Description of Artificial Sequence: Synthetic oligonucleotide
gauagggcuguugacaaug

SEQ ID NO: 1624712 - RNA, 19 nt, Artificial Sequence
  Description of Artificial Sequence: Synthetic oligonucleotide
uuaugaggcaggcuauucu

SEQ ID NO: 1624713 - RNA, 19 nt, Artificial Sequence
  Description of Artificial Sequence: Synthetic oligonucleotide
aagcccauuuaguuaauau

SEQ ID NO: 1624714 - RNA, 19 nt, Artificial Sequence
  Description of Artificial Sequence: Synthetic oligonucleotide
aucucucaggacuccaacg

SEQ ID NO: 1624715 - RNA, 19 nt, Artificial Sequence
  Description of Artificial Sequence: Synthetic oligonucleotide
gaaaggcucccucucacug

SEQ ID NO: 1624716 - RNA, 19 nt, Artificial Sequence
  Description of Artificial Sequence: Synthetic oligonucleotide
auaccguuuaguccaagcu

SEQ ID NO: 1624717 - RNA, 19 nt, Artificial Sequence
  Description of Artificial Sequence: Synthetic oligonucleotide
augauugaaccaacagucc

SEQ ID NO: 1624718 - RNA, 19 nt, Artificial Sequence
  Description of Artificial Sequence: Synthetic oligonucleotide
accguuuaguccaagcugg

SEQ ID NO: 1624719 - RNA, 19 nt, Artificial Sequence
  Description of Artificial Sequence: Synthetic oligonucleotide
auugaaaggcuaaauagau

SEQ ID NO: 1624720 - RNA, 19 nt, Artificial Sequence
  Description of Artificial Sequence: Synthetic oligonucleotide
ggacuuaggccauacagcc

SEQ ID NO: 1624721 - RNA, 19 nt, Artificial Sequence
  Description of Artificial Sequence: Synthetic oligonucleotide
uccuaagucaaauguugga

SEQ ID NO: 1624722 - RNA, 19 nt, Artificial Sequence
  Description of Artificial Sequence: Synthetic oligonucleotide
uugcugaccgccaggcugg

SEQ ID NO: 1624723 - RNA, 19 nt, Artificial Sequence
  Description of Artificial Sequence: Synthetic oligonucleotide
aaagagcucaagcccauuu

SEQ ID NO: 1624724 - RNA, 19 nt, Artificial Sequence
  Description of Artificial Sequence: Synthetic oligonucleotide
gacaaugguccaaaguccc

SEQ ID NO: 1624725 - RNA, 19 nt, Artificial Sequence
  Description of Artificial Sequence: Synthetic oligonucleotide
uuauccagcuaugcagugg

SEQ ID NO: 1624726 - RNA, 19 nt, Artificial Sequence
  Description of Artificial Sequence: Synthetic oligonucleotide
ucuaguauuuuggaguaau

SEQ ID NO: 1624727 - RNA, 19 nt, Artificial Sequence
  Description of Artificial Sequence: Synthetic oligonucleotide
cauaccguuuaguccaagc

SEQ ID NO: 1624728 - RNA, 19 nt, Artificial Sequence
  Description of Artificial Sequence: Synthetic oligonucleotide
caccaagaauccuuagucc

SEQ ID NO: 1624729 - RNA, 19 nt, Artificial Sequence
  Description of Artificial Sequence: Synthetic oligonucleotide
ccuaagugaaagacaaugg

SEQ ID NO: 1624730 - RNA, 19 nt, Artificial Sequence
  Description of Artificial Sequence: Synthetic oligonucleotide
ucagucauguaagugugac

SEQ ID NO: 1624731 - RNA, 19 nt, Artificial Sequence
  Description of Artificial Sequence: Synthetic oligonucleotide
uguaugcuaguuaggguau

SEQ ID NO: 1624732 - RNA, 19 nt, Artificial Sequence
  Description of Artificial Sequence: Synthetic oligonucleotide
uaggaugauugaaccaaca

SEQ ID NO: 1624733 - RNA, 19 nt, Artificial Sequence
  Description of Artificial Sequence: Synthetic oligonucleotide
ggacauauauaguguaugc

SEQ ID NO: 1624734 - RNA, 19 nt, Artificial Sequence
  Description of Artificial Sequence: Synthetic oligonucleotide
uggcauaaggaagaagaug

SEQ ID NO: 1624735 - RNA, 19 nt, Artificial Sequence
  Description of Artificial Sequence: Synthetic oligonucleotide
cacauacuaccauauccag

SEQ ID NO: 1624736 - RNA, 19 nt, Artificial Sequence
  Description of Artificial Sequence: Synthetic oligonucleotide
uccuguucagagcaugagu

SEQ ID NO: 1624737 - RNA, 19 nt, Artificial Sequence
  Description of Artificial Sequence: Synthetic oligonucleotide
uaugcaccaagaauccuua

SEQ ID NO: 1624738 - RNA, 19 nt, Artificial Sequence
  Description of Artificial Sequence: Synthetic oligonucleotide
guuggaaaccaccagguua

SEQ ID NO: 1624739 - RNA, 19 nt, Artificial Sequence
  Description of Artificial Sequence: Synthetic oligonucleotide
gagcuugggaacauaagac

SEQ ID NO: 1624740 - RNA, 19 nt, Artificial Sequence
  Description of Artificial Sequence: Synthetic oligonucleotide
ucauguaagugugacucac

SEQ ID NO: 1624741 - RNA, 19 nt, Artificial Sequence
  Description of Artificial Sequence: Synthetic oligonucleotide
agugguugcaguuccuagu

SEQ ID NO: 1624742 - RNA, 19 nt, Artificial Sequence
  Description of Artificial Sequence: Synthetic oligonucleotide
aguggcauuaggcuuuuaa

SEQ ID NO: 1624743 - RNA, 19 nt, Artificial Sequence
  Description of Artificial Sequence: Synthetic oligonucleotide
aggacuccaacgauagggc

SEQ ID NO: 1624744 - RNA, 19 nt, Artificial Sequence
  Description of Artificial Sequence: Synthetic oligonucleotide
uaguuaauauugucccaca

SEQ ID NO: 1624745 - RNA, 19 nt, Artificial Sequence
  Description of Artificial Sequence: Synthetic oligonucleotide
uauauaguguaugcuaguu

SEQ ID NO: 1624746 - RNA, 19 nt, Artificial Sequence
  Description of Artificial Sequence: Synthetic oligonucleotide
acacauacuaccauaucca

SEQ ID NO: 1624747 - RNA, 19 nt, Artificial Sequence
  Description of Artificial Sequence: Synthetic oligonucleotide
guguaugcuaguuagggua

SEQ ID NO: 1624748 - RNA, 19 nt, Artificial Sequence
  Description of Artificial Sequence: Synthetic oligonucleotide
uuccaugugacacucccuu

SEQ ID NO: 1624749 - RNA, 19 nt, Artificial Sequence
  Description of Artificial Sequence: Synthetic oligonucleotide
caauuguuggaaaccacca

SEQ ID NO: 1624750 - RNA, 19 nt, Artificial Sequence
  Description of Artificial Sequence: Synthetic oligonucleotide
agauuaggaagccacuauu

SEQ ID NO: 1624751 - RNA, 19 nt, Artificial Sequence
  Description of Artificial Sequence: Synthetic oligonucleotide
uccacucuaugcaccaaga

SEQ ID NO: 1624752 - RNA, 19 nt, Artificial Sequence
  Description of Artificial Sequence: Synthetic oligonucleotide
guuaggguauguuuaucca

SEQ ID NO: 1624753 - RNA, 19 nt, Artificial Sequence
  Description of Artificial Sequence: Synthetic oligonucleotide
uuccgcuucaugccccacg

SEQ ID NO: 1624754 - RNA, 19 nt, Artificial Sequence
  Description of Artificial Sequence: Synthetic oligonucleotide
cauuggacagugcuccacc

SEQ ID NO: 1624755 - RNA, 19 nt, Artificial Sequence
  Description of Artificial Sequence: Synthetic oligonucleotide
agagguagccuuugggaga

SEQ ID NO: 1624756 - RNA, 19 nt, Artificial Sequence
  Description of Artificial Sequence: Synthetic oligonucleotide
ugcuaguuaggguauguuu

SEQ ID NO: 1624757 - RNA, 19 nt, Artificial Sequence
  Description of Artificial Sequence: Synthetic oligonucleotide
gauugaaccaacaguccca

SEQ ID NO: 1624758 - RNA, 19 nt, Artificial Sequence
  Description of Artificial Sequence: Synthetic oligonucleotide
auaagaccuggcuaauuaa

SEQ ID NO: 1624759 - RNA, 19 nt, Artificial Sequence
  Description of Artificial Sequence: Synthetic oligonucleotide
aagagagagcuugggaaca

SEQ ID NO: 1624760 - RNA, 19 nt, Artificial Sequence
  Description of Artificial Sequence: Synthetic oligonucleotide
auaggaugauugaaccaac

SEQ ID NO: 1624761 - RNA, 19 nt, Artificial Sequence
  Description of Artificial Sequence: Synthetic oligonucleotide
cuucaugccccacgaagcc

SEQ ID NO: 1624762 - RNA, 19 nt, Artificial Sequence
  Description of Artificial Sequence: Synthetic oligonucleotide
ucaugccccacgaagccac

SEQ ID NO: 1624763 - RNA, 19 nt, Artificial Sequence
  Description of Artificial Sequence: Synthetic oligonucleotide
gccuuaacuuugcugaccg

SEQ ID NO: 1624764 - RNA, 19 nt, Artificial Sequence
  Description of Artificial Sequence: Synthetic oligonucleotide
cuaacccuggggaagcuuc

SEQ ID NO: 1624765 - RNA, 19 nt, Artificial Sequence
  Description of Artificial Sequence: Synthetic oligonucleotide
cauacuaccauauccaguu

SEQ ID NO: 1624766 - RNA, 19 nt, Artificial Sequence
  Description of Artificial Sequence: Synthetic oligonucleotide
gugguugcaguuccuagug

SEQ ID NO: 1624767 - RNA, 19 nt, Artificial Sequence
  Description of Artificial Sequence: Synthetic oligonucleotide
cuguucagagcaugaguag

SEQ ID NO: 1624768 - RNA, 19 nt, Artificial Sequence
  Description of Artificial Sequence: Synthetic oligonucleotide
cauaggaugauugaaccaa

SEQ ID NO: 1624769 - RNA, 19 nt, Artificial Sequence
  Description of Artificial Sequence: Synthetic oligonucleotide
ggaagaagauggcauuucc

SEQ ID NO: 1624770 - RNA, 19 nt, Artificial Sequence
  Description of Artificial Sequence: Synthetic oligonucleotide
gccauaggaugauugaacc

SEQ ID NO: 1624771 - RNA, 19 nt, Artificial Sequence
  Description of Artificial Sequence: Synthetic oligonucleotide
cuaguauuuuggaguaauc

SEQ ID NO: 1624772 - RNA, 19 nt, Artificial Sequence
  Description of Artificial Sequence: Synthetic oligonucleotide
uaggccauacagccagaag

SEQ ID NO: 1624773 - RNA, 19 nt, Artificial Sequence
  Description of Artificial Sequence: Synthetic oligonucleotide
cuccuaauuuccccuaaac

SEQ ID NO: 1624774 - RNA, 19 nt, Artificial Sequence
  Description of Artificial Sequence: Synthetic oligonucleotide
uacaggagaugcuuccuaa

SEQ ID NO: 1624775 - RNA, 19 nt, Artificial Sequence
  Description of Artificial Sequence: Synthetic oligonucleotide
ggagucauaccguuuaguc

SEQ ID NO: 1624776 - RNA, 19 nt, Artificial Sequence
  Description of Artificial Sequence: Synthetic oligonucleotide
gaguuuaccugcuuuauuu

SEQ ID NO: 1624777 - RNA, 19 nt, Artificial Sequence
  Description of Artificial Sequence: Synthetic oligonucleotide
agugguacaugggacauau

SEQ ID NO: 1624778 - RNA, 19 nt, Artificial Sequence
  Description of Artificial Sequence: Synthetic oligonucleotide
gcauuaggcuuuuaacuag

SEQ ID NO: 1624779 - RNA, 19 nt, Artificial Sequence
  Description of Artificial Sequence: Synthetic oligonucleotide
uccggcaauuguuggaaac

SEQ ID NO: 1624780 - RNA, 19 nt, Artificial Sequence
  Description of Artificial Sequence: Synthetic oligonucleotide
ucucaggacuccaacgaua

SEQ ID NO: 1624781 - RNA, 19 nt, Artificial Sequence
  Description of Artificial Sequence: Synthetic oligonucleotide
ugugacucacuggccauag

SEQ ID NO: 1624782 - RNA, 19 nt, Artificial Sequence
  Description of Artificial Sequence: Synthetic oligonucleotide
caaugagacacggucacuc

SEQ ID NO: 1624783 - RNA, 19 nt, Artificial Sequence
  Description of Artificial Sequence: Synthetic oligonucleotide
uuuaguccaagcuggccuu

SEQ ID NO: 1624784 - RNA, 19 nt, Artificial Sequence
  Description of Artificial Sequence: Synthetic oligonucleotide
gccuaagugaaagacaaug

SEQ ID NO: 1624785 - RNA, 19 nt, Artificial Sequence
  Description of Artificial Sequence: Synthetic oligonucleotide
uccgcuucaugccccacga

SEQ ID NO: 1624786 - RNA, 19 nt, Artificial Sequence
  Description of Artificial Sequence: Synthetic oligonucleotide
cuaagugaaagacaauggu

SEQ ID NO: 1624787 - RNA, 19 nt, Artificial Sequence
  Description of Artificial Sequence: Synthetic oligonucleotide
acuucccaagugcuuuggg

SEQ ID NO: 1624788 - RNA, 19 nt, Artificial Sequence
  Description of Artificial Sequence: Synthetic oligonucleotide
auaguguaugcuaguuagg

SEQ ID NO: 1624789 - RNA, 19 nt, Artificial Sequence
  Description of Artificial Sequence: Synthetic oligonucleotide
guuuaguccaagcuggccu

SEQ ID NO: 1624790 - RNA, 19 nt, Artificial Sequence
  Description of Artificial Sequence: Synthetic oligonucleotide
gacuccaacgauagggcug

SEQ ID NO: 1624791 - RNA, 19 nt, Artificial Sequence
  Description of Artificial Sequence: Synthetic oligonucleotide
acucuccggcaauuguugg

SEQ ID NO: 1624792 - RNA, 19 nt, Artificial Sequence
  Description of Artificial Sequence: Synthetic oligonucleotide
ggagaugcuuccuaaguca

SEQ ID NO: 1624793 - RNA, 19 nt, Artificial Sequence
  Description of Artificial Sequence: Synthetic oligonucleotide
cauaaggaagaagauggca

SEQ ID NO: 1624794 - RNA, 19 nt, Artificial Sequence
  Description of Artificial Sequence: Synthetic oligonucleotide
aagucaaauguuggacuga

SEQ ID NO: 1624795 - RNA, 19 nt, Artificial Sequence
  Description of Artificial Sequence: Synthetic oligonucleotide
uagggcuguugacaaugag

SEQ ID NO: 1624796 - RNA, 19 nt, Artificial Sequence
  Description of Artificial Sequence: Synthetic oligonucleotide
acgauagggcuguugacaa

SEQ ID NO: 1624797 - RNA, 19 nt, Artificial Sequence
  Description of Artificial Sequence: Synthetic oligonucleotide
gguaguuuccaggacuuag

SEQ ID NO: 1624798 - RNA, 19 nt, Artificial Sequence
  Description of Artificial Sequence: Synthetic oligonucleotide
cuaagucaaauguuggacu

SEQ ID NO: 1624799 - RNA, 19 nt, Artificial Sequence
  Description of Artificial Sequence: Synthetic oligonucleotide
uaugcuaguuaggguaugu

SEQ ID NO: 1624800 - RNA, 19 nt, Artificial Sequence
  Description of Artificial Sequence: Synthetic oligonucleotide
gguauguuuauccagcuau

SEQ ID NO: 1624801 - RNA, 19 nt, Artificial Sequence
  Description of Artificial Sequence: Synthetic oligonucleotide
gcaauuguuggaaaccacc

SEQ ID NO: 1624802 - RNA, 19 nt, Artificial Sequence
  Description of Artificial Sequence: Synthetic oligonucleotide
aguuuccuuaaguggaauu

SEQ ID NO: 1624803 - RNA, 19 nt, Artificial Sequence
  Description of Artificial Sequence: Synthetic oligonucleotide
agggcggccuaagugaagg

SEQ ID NO: 1624804 - RNA, 19 nt, Artificial Sequence
  Description of Artificial Sequence: Synthetic oligonucleotide
agucccucuuaugaggcag

SEQ ID NO: 1624805 - RNA, 19 nt, Artificial Sequence
  Description of Artificial Sequence: Synthetic oligonucleotide
ucuccuaauuuccccuaaa

SEQ ID NO: 1624806 - RNA, 19 nt, Artificial Sequence
  Description of Artificial Sequence: Synthetic oligonucleotide
cacucuccggcaauuguug

SEQ ID NO: 1624807 - RNA, 19 nt, Artificial Sequence
  Description of Artificial Sequence: Synthetic oligonucleotide
aguccaagcuggccuuaac

SEQ ID NO: 1624808 - RNA, 19 nt, Artificial Sequence
  Description of Artificial Sequence: Synthetic oligonucleotide
gagagcuugggaacauaag

SEQ ID NO: 1624809 - RNA, 19 nt, Artificial Sequence
  Description of Artificial Sequence: Synthetic oligonucleotide
agcucacccagcucaaggu

SEQ ID NO: 1624810 - RNA, 19 nt, Artificial Sequence
  Description of Artificial Sequence: Synthetic oligonucleotide
auuggacagugcuccaccu

SEQ ID NO: 1624811 - RNA, 19 nt, Artificial Sequence
  Description of Artificial Sequence: Synthetic oligonucleotide
ggcccauagagcaaacugg

SEQ ID NO: 1624812 - RNA, 19 nt, Artificial Sequence
  Description of Artificial Sequence: Synthetic oligonucleotide
gacugauggcccauagagc

SEQ ID NO: 1624813 - RNA, 19 nt, Artificial Sequence
  Description of Artificial Sequence: Synthetic oligonucleotide
aggguauguuuauccagcu

SEQ ID NO: 1624814 - RNA, 19 nt, Artificial Sequence
  Description of Artificial Sequence: Synthetic oligonucleotide
agugcuccaccucccaaca

SEQ ID NO: 1624815 - RNA, 19 nt, Artificial Sequence
  Description of Artificial Sequence: Synthetic oligonucleotide
cucagggcggccuaaguga

SEQ ID NO: 1624816 - RNA, 19 nt, Artificial Sequence
  Description of Artificial Sequence: Synthetic oligonucleotide
ggaacauaagaccuggcua

SEQ ID NO: 1624817 - RNA, 19 nt, Artificial Sequence
  Description of Artificial Sequence: Synthetic oligonucleotide
cugucauuggacagugcuc

SEQ ID NO: 1624818 - RNA, 19 nt, Artificial Sequence
  Description of Artificial Sequence: Synthetic oligonucleotide
aggccuuagagguagccuu

SEQ ID NO: 1624819 - RNA, 19 nt, Artificial Sequence
  Description of Artificial Sequence: Synthetic oligonucleotide
gggacauauauaguguaug

SEQ ID NO: 1624820 - RNA, 19 nt, Artificial Sequence
  Description of Artificial Sequence: Synthetic oligonucleotide
ccuaagucaaauguuggac

SEQ ID NO: 1624821 - RNA, 19 nt, Artificial Sequence
  Description of Artificial Sequence: Synthetic oligonucleotide
aagucccucuuaugaggca

SEQ ID NO: 1624822 - RNA, 19 nt, Artificial Sequence
  Description of Artificial Sequence: Synthetic oligonucleotide
acuccaacgauagggcugu

SEQ ID NO: 1624823 - RNA, 19 nt, Artificial Sequence
  Description of Artificial Sequence: Synthetic oligonucleotide
ucccaguacuucuggccag

SEQ ID NO: 1624824 - RNA, 19 nt, Artificial Sequence
  Description of Artificial Sequence: Synthetic oligonucleotide
ggcauuaggcuuuuaacua

SEQ ID NO: 1624825 - RNA, 19 nt, Artificial Sequence
  Description of Artificial Sequence: Synthetic oligonucleotide
ugggaacauaagaccuggc

SEQ ID NO: 1624826 - RNA, 19 nt, Artificial Sequence
  Description of Artificial Sequence: Synthetic oligonucleotide
uaaguggaauucuccuaau

SEQ ID NO: 1624827 - RNA, 19 nt, Artificial Sequence
  Description of Artificial Sequence: Synthetic oligonucleotide
gacaccuuugggucaggca

SEQ ID NO: 1624828 - RNA, 19 nt, Artificial Sequence
  Description of Artificial Sequence: Synthetic oligonucleotide
agagauuaggaagccacua

SEQ ID NO: 1624829 - RNA, 19 nt, Artificial Sequence
  Description of Artificial Sequence: Synthetic oligonucleotide
agucaaauguuggacugau

SEQ ID NO: 1624830 - RNA, 19 nt, Artificial Sequence
  Description of Artificial Sequence: Synthetic oligonucleotide
uaacccuggggaagcuuca

SEQ ID NO: 1624831 - RNA, 19 nt, Artificial Sequence
  Description of Artificial Sequence: Synthetic oligonucleotide
acauacuaccauauccagu

SEQ ID NO: 1624832 - RNA, 19 nt, Artificial Sequence
  Description of Artificial Sequence: Synthetic oligonucleotide
cacaagguaggauccagaa

SEQ ID NO: 1624833 - RNA, 19 nt, Artificial Sequence
  Description of Artificial Sequence: Synthetic oligonucleotide
gguugcaguuccuaguguc

SEQ ID NO: 1624834 - RNA, 19 nt, Artificial Sequence
  Description of Artificial Sequence: Synthetic oligonucleotide
aacauaagaccuggcuaau

SEQ ID NO: 1624835 - RNA, 19 nt, Artificial Sequence
  Description of Artificial Sequence: Synthetic oligonucleotide
cuuaugaggcaggcuauuc

SEQ ID NO: 1624836 - RNA, 19 nt, Artificial Sequence
  Description of Artificial Sequence: Synthetic oligonucleotide
ugauggcccauagagcaaa

SEQ ID NO: 1624837 - RNA, 19 nt, Artificial Sequence
  Description of Artificial Sequence: Synthetic oligonucleotide
ccauuuaguuaauauuguc

SEQ ID NO: 1624838 - RNA, 19 nt, Artificial Sequence
  Description of Artificial Sequence: Synthetic oligonucleotide
ugguccaaagucccucuua

SEQ ID NO: 1624839 - RNA, 19 nt, Artificial Sequence
  Description of Artificial Sequence: Synthetic oligonucleotide
uacuucuggccagaagaga

SEQ ID NO: 1624840 - RNA, 19 nt, Artificial Sequence
  Description of Artificial Sequence: Synthetic oligonucleotide
ccaacagucccagaugagg

SEQ ID NO: 1624841 - RNA, 19 nt, Artificial Sequence
  Description of Artificial Sequence: Synthetic oligonucleotide
ucagggcggccuaagugaa

SEQ ID NO: 1624842 - RNA, 19 nt, Artificial Sequence
  Description of Artificial Sequence: Synthetic oligonucleotide
cacccacgaccucagggcg

SEQ ID NO: 1624843 - RNA, 19 nt, Artificial Sequence
  Description of Artificial Sequence: Synthetic oligonucleotide
gcccauagagcaaacuggg

SEQ ID NO: 1624844 - RNA, 19 nt, Artificial Sequence
  Description of Artificial Sequence: Synthetic oligonucleotide
ugguugcaguuccuagugu

SEQ ID NO: 1624845 - RNA, 19 nt, Artificial Sequence
  Description of Artificial Sequence: Synthetic oligonucleotide
ucccaagugcuuuggguua

SEQ ID NO: 1624846 - RNA, 19 nt, Artificial Sequence
  Description of Artificial Sequence: Synthetic oligonucleotide
agguuacaggagaugcuuc

SEQ ID NO: 1624847 - RNA, 19 nt, Artificial Sequence
  Description of Artificial Sequence: Synthetic oligonucleotide
cuauucuaacccuggggaa

SEQ ID NO: 1624848 - RNA, 19 nt, Artificial Sequence
  Description of Artificial Sequence: Synthetic oligonucleotide
uccaacgauagggcuguug

SEQ ID NO: 1624849 - RNA, 19 nt, Artificial Sequence
  Description of Artificial Sequence: Synthetic oligonucleotide
uacagaagccucuccuguu

SEQ ID NO: 1624850 - RNA, 19 nt, Artificial Sequence
  Description of Artificial Sequence: Synthetic oligonucleotide
gagauuaggaagccacuau

SEQ ID NO: 1624851 - RNA, 19 nt, Artificial Sequence
  Description of Artificial Sequence: Synthetic oligonucleotide
gguuacagacacauacuac

SEQ ID NO: 1624852 - RNA, 19 nt, Artificial Sequence
  Description of Artificial Sequence: Synthetic oligonucleotide
auucuccuaauuuccccua

SEQ ID NO: 1624853 - RNA, 19 nt, Artificial Sequence
  Description of Artificial Sequence: Synthetic oligonucleotide
augcaccaagaauccuuag

SEQ ID NO: 1624854 - RNA, 19 nt, Artificial Sequence
  Description of Artificial Sequence: Synthetic oligonucleotide
gauggcauuuccugaacuu

SEQ ID NO: 1624855 - RNA, 19 nt, Artificial Sequence
  Description of Artificial Sequence: Synthetic oligonucleotide
augaguuuaccugcuuuau

SEQ ID NO: 1624856 - RNA, 19 nt, Artificial Sequence
  Description of Artificial Sequence: Synthetic oligonucleotide
uuaggccauacagccagaa

SEQ ID NO: 1624857 - RNA, 19 nt, Artificial Sequence
  Description of Artificial Sequence: Synthetic oligonucleotide
gccacuauucuaacccugg

SEQ ID NO: 1624858 - RNA, 19 nt, Artificial Sequence
  Description of Artificial Sequence: Synthetic oligonucleotide
uucaugccccacgaagcca

SEQ ID NO: 1624859 - RNA, 19 nt, Artificial Sequence
  Description of Artificial Sequence: Synthetic oligonucleotide
guuuauccagcuaugcagu

SEQ ID NO: 1624860 - RNA, 19 nt, Artificial Sequence
  Description of Artificial Sequence: Synthetic oligonucleotide
ugaaaugcccaagguucaa

SEQ ID NO: 1624861 - RNA, 19 nt, Artificial Sequence
  Description of Artificial Sequence: Synthetic oligonucleotide
uggccuuaacuuugcugac

SEQ ID NO: 1624862 - RNA, 19 nt, Artificial Sequence
  Description of Artificial Sequence: Synthetic oligonucleotide
cuggccauaggaugauuga

SEQ ID NO: 1624863 - RNA, 19 nt, Artificial Sequence
  Description of Artificial Sequence: Synthetic oligonucleotide
guccaaagucccucuuaug

SEQ ID NO: 1624864 - RNA, 19 nt, Artificial Sequence
  Description of Artificial Sequence: Synthetic oligonucleotide
auguuggacugauggccca

SEQ ID NO: 1624865 - RNA, 19 nt, Artificial Sequence
  Description of Artificial Sequence: Synthetic oligonucleotide
caguacuucuggccagaag

SEQ ID NO: 1624866 - RNA, 19 nt, Artificial Sequence
  Description of Artificial Sequence: Synthetic oligonucleotide
uggguacagggacaccuuu

SEQ ID NO: 1624867 - RNA, 19 nt, Artificial Sequence
  Description of Artificial Sequence: Synthetic oligonucleotide
uggguggagucauaccguu

SEQ ID NO: 1624868 - RNA, 19 nt, Artificial Sequence
  Description of Artificial Sequence: Synthetic oligonucleotide
uucccagcaucugguuccg

SEQ ID NO: 1624869 - RNA, 19 nt, Artificial Sequence
  Description of Artificial Sequence: Synthetic oligonucleotide
gguggagucauaccguuua

SEQ ID NO: 1624870 - RNA, 19 nt, Artificial Sequence
  Description of Artificial Sequence: Synthetic oligonucleotide
guuauccuccugucucaac

SEQ ID NO: 1624871 - RNA, 19 nt, Artificial Sequence
  Description of Artificial Sequence: Synthetic oligonucleotide
gugacacucccuuuuauuu

SEQ ID NO: 1624872 - RNA, 19 nt, Artificial Sequence
  Description of Artificial Sequence: Synthetic oligonucleotide
uccaggacuuaggccauac

SEQ ID NO: 1624873 - RNA, 19 nt, Artificial Sequence
  Description of Artificial Sequence: Synthetic oligonucleotide
uaguuaggguauguuuauc

SEQ ID NO: 1624874 - RNA, 19 nt, Artificial Sequence
  Description of Artificial Sequence: Synthetic oligonucleotide
augugacacucccuuuuau

SEQ ID NO: 1624875 - RNA, 19 nt, Artificial Sequence
  Description of Artificial Sequence: Synthetic oligonucleotide
gcuaguuaggguauguuua

SEQ ID NO: 1624876 - RNA, 19 nt, Artificial Sequence
  Description of Artificial Sequence: Synthetic oligonucleotide
ggaagcuucaugaguuuac

SEQ ID NO: 1624877 - RNA, 19 nt, Artificial Sequence
  Description of Artificial Sequence: Synthetic oligonucleotide
gaacuggccaggcccuuuc

SEQ ID NO: 1624878 - RNA, 19 nt, Artificial Sequence
  Description of Artificial Sequence: Synthetic oligonucleotide
ucccucuuaugaggcaggc

SEQ ID NO: 1624879 - RNA, 19 nt, Artificial Sequence
  Description of Artificial Sequence: Synthetic oligonucleotide
uucuaguauuuuggaguaa

SEQ ID NO: 1624880 - RNA, 19 nt, Artificial Sequence
  Description of Artificial Sequence: Synthetic oligonucleotide
ucuuaugaggcaggcuauu

SEQ ID NO: 1624881 - RNA, 19 nt, Artificial Sequence
  Description of Artificial Sequence: Synthetic oligonucleotide
caagugcuuuggguuacag

SEQ ID NO: 1624882 - RNA, 19 nt, Artificial Sequence
  Description of Artificial Sequence: Synthetic oligonucleotide
ccaacgauagggcuguuga

SEQ ID NO: 1624883 - RNA, 19 nt, Artificial Sequence
  Description of Artificial Sequence: Synthetic oligonucleotide
cacucuaugcaccaagaau

SEQ ID NO: 1624884 - RNA, 19 nt, Artificial Sequence
  Description of Artificial Sequence: Synthetic oligonucleotide
ucauaccguuuaguccaag

SEQ ID NO: 1624885 - RNA, 19 nt, Artificial Sequence
  Description of Artificial Sequence: Synthetic oligonucleotide
ggccauaggaugauugaac

SEQ ID NO: 1624886 - RNA, 19 nt, Artificial Sequence
  Description of Artificial Sequence: Synthetic oligonucleotide
cuaugcaccaagaauccuu

SEQ ID NO: 1624887 - RNA, 19 nt, Artificial Sequence
  Description of Artificial Sequence: Synthetic oligonucleotide
cucuccuguucagagcaug

SEQ ID NO: 1624888 - RNA, 19 nt, Artificial Sequence
  Description of Artificial Sequence: Synthetic oligonucleotide
guagcccaagcagagaacu

SEQ ID NO: 1624889 - RNA, 19 nt, Artificial Sequence
  Description of Artificial Sequence: Synthetic oligonucleotide
gggaacauaagaccuggcu

SEQ ID NO: 1624890 - RNA, 19 nt, Artificial Sequence
  Description of Artificial Sequence: Synthetic oligonucleotide
caccucccaacagugguac

SEQ ID NO: 1624891 - RNA, 19 nt, Artificial Sequence
  Description of Artificial Sequence: Synthetic oligonucleotide
acacggucacucuccggca

SEQ ID NO: 1624892 - RNA, 19 nt, Artificial Sequence
  Description of Artificial Sequence: Synthetic oligonucleotide
guaugcuaguuaggguaug

SEQ ID NO: 1624893 - RNA, 19 nt, Artificial Sequence
  Description of Artificial Sequence: Synthetic oligonucleotide
ggaaaccaccagguuacag

SEQ ID NO: 1624894 - RNA, 19 nt, Artificial Sequence
  Description of Artificial Sequence: Synthetic oligonucleotide
ccucuuaugaggcaggcua

SEQ ID NO: 1624895 - RNA, 19 nt, Artificial Sequence
  Description of Artificial Sequence: Synthetic oligonucleotide
auacuaccauauccaguuu

SEQ ID NO: 1624896 - RNA, 19 nt, Artificial Sequence
  Description of Artificial Sequence: Synthetic oligonucleotide
ccacuauucuaacccuggg

SEQ ID NO: 1624897 - RNA, 19 nt, Artificial Sequence
  Description of Artificial Sequence: Synthetic oligonucleotide
cucuccggcaauuguugga

SEQ ID NO: 1624898 - RNA, 19 nt, Artificial Sequence
  Description of Artificial Sequence: Synthetic oligonucleotide
gacuuaggccauacagcca

SEQ ID NO: 1624899 - RNA, 19 nt, Artificial Sequence
  Description of Artificial Sequence: Synthetic oligonucleotide
gcauaaggaagaagauggc

SEQ ID NO: 1624900 - RNA, 19 nt, Artificial Sequence
  Description of Artificial Sequence: Synthetic oligonucleotide
acacaagguaggauccaga

SEQ ID NO: 1624901 - RNA, 19 nt, Artificial Sequence
  Description of Artificial Sequence: Synthetic oligonucleotide
cagacacauacuaccauau

SEQ ID NO: 1624902 - RNA, 19 nt, Artificial Sequence
  Description of Artificial Sequence: Synthetic oligonucleotide
uggccgcaaacuugcaguu

SEQ ID NO: 1624903 - RNA, 19 nt, Artificial Sequence
  Description of Artificial Sequence: Synthetic oligonucleotide
cacugucauuggacagugc

SEQ ID NO: 1624904 - RNA, 19 nt, Artificial Sequence
  Description of Artificial Sequence: Synthetic oligonucleotide
auagggcuguugacaauga

SEQ ID NO: 1624905 - RNA, 19 nt, Artificial Sequence
  Description of Artificial Sequence: Synthetic oligonucleotide
ccuuagagguagccuuugg

SEQ ID NO: 1624906 - RNA, 19 nt, Artificial Sequence
  Description of Artificial Sequence: Synthetic oligonucleotide
gguacaugggacauauaua

SEQ ID NO: 1624907 - RNA, 19 nt, Artificial Sequence
  Description of Artificial Sequence: Synthetic oligonucleotide
uguuggacugauggcccau

SEQ ID NO: 1624908 - RNA, 19 nt, Artificial Sequence
  Description of Artificial Sequence: Synthetic oligonucleotide
acauaagaccuggcuaauu

SEQ ID NO: 1624909 - RNA, 19 nt, Artificial Sequence
  Description of Artificial Sequence: Synthetic oligonucleotide
aguuauccuccugucucaa

SEQ ID NO: 1624910 - RNA, 19 nt, Artificial Sequence
  Description of Artificial Sequence: Synthetic oligonucleotide
ggggucagucauguaagug

SEQ ID NO: 1624911 - RNA, 19 nt, Artificial Sequence
  Description of Artificial Sequence: Synthetic oligonucleotide
caugugacacucccuuuua

SEQ ID NO: 1624912 - RNA, 19 nt, Artificial Sequence
  Description of Artificial Sequence: Synthetic oligonucleotide
agagagagcuugggaacau

SEQ ID NO: 1624913 - RNA, 19 nt, Artificial Sequence
  Description of Artificial Sequence: Synthetic oligonucleotide
accuuugggucaggcagcu

SEQ ID NO: 1624914 - RNA, 19 nt, Artificial Sequence
  Description of Artificial Sequence: Synthetic oligonucleotide
ucuaacccuggggaagcuu

SEQ ID NO: 1624915 - RNA, 19 nt, Artificial Sequence
  Description of Artificial Sequence: Synthetic oligonucleotide
accucagggcggccuaagu

SEQ ID NO: 1624916 - RNA, 19 nt, Artificial Sequence
  Description of Artificial Sequence: Synthetic oligonucleotide
ccccuaaacagagagauua

SEQ ID NO: 1624917 - RNA, 19 nt, Artificial Sequence
  Description of Artificial Sequence: Synthetic oligonucleotide
gcucaagcccauuuaguua

SEQ ID NO: 1624918 - RNA, 19 nt, Artificial Sequence
  Description of Artificial Sequence: Synthetic oligonucleotide
ccauaggaugauugaacca

SEQ ID NO: 1624919 - RNA, 19 nt, Artificial Sequence
  Description of Artificial Sequence: Synthetic oligonucleotide
uggaaaccaccagguuaca

SEQ ID NO: 1624920 - RNA, 19 nt, Artificial Sequence
  Description of Artificial Sequence: Synthetic oligonucleotide
gucacucuccggcaauugu

SEQ ID NO: 1624921 - RNA, 19 nt, Artificial Sequence
  Description of Artificial Sequence: Synthetic oligonucleotide
ccuuaaguggaauucuccu

SEQ ID NO: 1624922 - RNA, 19 nt, Artificial Sequence
  Description of Artificial Sequence: Synthetic oligonucleotide
agcuggccuuaacuuugcu

SEQ ID NO: 1624923 - RNA, 19 nt, Artificial Sequence
  Description of Artificial Sequence: Synthetic oligonucleotide
acccacgaccucagggcgg

SEQ ID NO: 1624924 - RNA, 19 nt, Artificial Sequence
  Description of Artificial Sequence: Synthetic oligonucleotide
cucaagguccagccacaca

SEQ ID NO: 1624925 - RNA, 19 nt, Artificial Sequence
  Description of Artificial Sequence: Synthetic oligonucleotide
gacucacuggccauaggau

SEQ ID NO: 1624926 - RNA, 19 nt, Artificial Sequence
  Description of Artificial Sequence: Synthetic oligonucleotide
gaggccuuagagguagccu

SEQ ID NO: 1624927 - RNA, 19 nt, Artificial Sequence
  Description of Artificial Sequence: Synthetic oligonucleotide
gaccucagggcggccuaag

SEQ ID NO: 1624928 - RNA, 19 nt, Artificial Sequence
  Description of Artificial Sequence: Synthetic oligonucleotide
agcucaagguccagccaca

SEQ ID NO: 1624929 - RNA, 19 nt, Artificial Sequence
  Description of Artificial Sequence: Synthetic oligonucleotide
gucagucauguaaguguga

SEQ ID NO: 1624930 - RNA, 19 nt, Artificial Sequence
  Description of Artificial Sequence: Synthetic oligonucleotide
gagcucaagcccauuuagu

SEQ ID NO: 1624931 - RNA, 19 nt, Artificial Sequence
  Description of Artificial Sequence: Synthetic oligonucleotide
cagggcggccuaagugaag

SEQ ID NO: 1624932 - RNA, 19 nt, Artificial Sequence
  Description of Artificial Sequence: Synthetic oligonucleotide
cuuaggccauacagccaga

SEQ ID NO: 1624933 - RNA, 19 nt, Artificial Sequence
  Description of Artificial Sequence: Synthetic oligonucleotide
ccuuaacuuugcugaccgc

SEQ ID NO: 1624934 - RNA, 19 nt, Artificial Sequence
  Description of Artificial Sequence: Synthetic oligonucleotide
caaaaguggguggagucau

SEQ ID NO: 1624935 - RNA, 19 nt, Artificial Sequence
  Description of Artificial Sequence: Synthetic oligonucleotide
cucuuaugaggcaggcuau

SEQ ID NO: 1624936 - RNA, 19 nt, Artificial Sequence
  Description of Artificial Sequence: Synthetic oligonucleotide
ccguuuaguccaagcuggc

SEQ ID NO: 1624937 - RNA, 19 nt, Artificial Sequence
  Description of Artificial Sequence: Synthetic oligonucleotide
accucccaacagugguaca

SEQ ID NO: 1624938 - RNA, 19 nt, Artificial Sequence
  Description of Artificial Sequence: Synthetic oligonucleotide
cccauuuaguuaauauugu

SEQ ID NO: 1624939 - RNA, 19 nt, Artificial Sequence
  Description of Artificial Sequence: Synthetic oligonucleotide
cagucauguaagugugacu

SEQ ID NO: 1624940 - RNA, 19 nt, Artificial Sequence
  Description of Artificial Sequence: Synthetic oligonucleotide
uccuggguacagggacacc

SEQ ID NO: 1624941 - RNA, 19 nt, Artificial Sequence
  Description of Artificial Sequence: Synthetic oligonucleotide
acgaccucagggcggccua

SEQ ID NO: 1624942 - RNA, 19 nt, Artificial Sequence
  Description of Artificial Sequence: Synthetic oligonucleotide
cagcuaugcaguggcauua

SEQ ID NO: 1624943 - RNA, 19 nt, Artificial Sequence
  Description of Artificial Sequence: Synthetic oligonucleotide
gagagagcuugggaacaua

SEQ ID NO: 1624944 - RNA, 19 nt, Artificial Sequence
  Description of Artificial Sequence: Synthetic oligonucleotide
ggguauguuuauccagcua

SEQ ID NO: 1624945 - RNA, 19 nt, Artificial Sequence
  Description of Artificial Sequence: Synthetic oligonucleotide
ggcggccuaagugaagguc

SEQ ID NO: 1624946 - RNA, 19 nt, Artificial Sequence
  Description of Artificial Sequence: Synthetic oligonucleotide
cguuuaguccaagcuggcc

SEQ ID NO: 1624947 - RNA, 19 nt, Artificial Sequence
  Description of Artificial Sequence: Synthetic oligonucleotide
cagguuacaggagaugcuu

SEQ ID NO: 1624948 - RNA, 19 nt, Artificial Sequence
  Description of Artificial Sequence: Synthetic oligonucleotide
ggacaccuuugggucaggc

SEQ ID NO: 1624949 - RNA, 19 nt, Artificial Sequence
  Description of Artificial Sequence: Synthetic oligonucleotide
ccugcuuuauuuccaggua

SEQ ID NO: 1624950 - RNA, 19 nt, Artificial Sequence
  Description of Artificial Sequence: Synthetic oligonucleotide
gucccagaugaggccuaag

SEQ ID NO: 1624951 - RNA, 19 nt, Artificial Sequence
  Description of Artificial Sequence: Synthetic oligonucleotide
ggacuccaacgauagggcu

SEQ ID NO: 1624952 - RNA, 19 nt, Artificial Sequence
  Description of Artificial Sequence: Synthetic oligonucleotide
cuaccauauccaguuuccu

SEQ ID NO: 1624953 - RNA, 19 nt, Artificial Sequence
  Description of Artificial Sequence: Synthetic oligonucleotide
gccuuagagguagccuuug

SEQ ID NO: 1624954 - RNA, 19 nt, Artificial Sequence
  Description of Artificial Sequence: Synthetic oligonucleotide
guggguggagucauaccgu

SEQ ID NO: 1624955 - RNA, 19 nt, Artificial Sequence
  Description of Artificial Sequence: Synthetic oligonucleotide
cacggucacucuccggcaa

SEQ ID NO: 1624956 - RNA, 19 nt, Artificial Sequence
  Description of Artificial Sequence: Synthetic oligonucleotide
agguaguuuccaggacuua

SEQ ID NO: 1624957 - RNA, 19 nt, Artificial Sequence
  Description of Artificial Sequence: Synthetic oligonucleotide
cucucaggacuccaacgau

SEQ ID NO: 1624958 - RNA, 19 nt, Artificial Sequence
  Description of Artificial Sequence: Synthetic oligonucleotide
cccaagguucaaagagcuc

SEQ ID NO: 1624959 - RNA, 19 nt, Artificial Sequence
  Description of Artificial Sequence: Synthetic oligonucleotide
gcccaagguucaaagagcu

SEQ ID NO: 1624960 - RNA, 19 nt, Artificial Sequence
  Description of Artificial Sequence: Synthetic oligonucleotide
gggaagcuucaugaguuua

SEQ ID NO: 1624961 - RNA, 19 nt, Artificial Sequence
  Description of Artificial Sequence: Synthetic oligonucleotide
gcuuccuaagucaaauguu

SEQ ID NO: 1624962 - RNA, 19 nt, Artificial Sequence
  Description of Artificial Sequence: Synthetic oligonucleotide
gccuaagugaaggucaguu

SEQ ID NO: 1624963 - RNA, 19 nt, Artificial Sequence
  Description of Artificial Sequence: Synthetic oligonucleotide
ugcugaccgccaggcuggc

SEQ ID NO: 1624964 - RNA, 19 nt, Artificial Sequence
  Description of Artificial Sequence: Synthetic oligonucleotide
gucauaccguuuaguccaa

SEQ ID NO: 1624965 - RNA, 19 nt, Artificial Sequence
  Description of Artificial Sequence: Synthetic oligonucleotide
cccaagugcuuuggguuac

SEQ ID NO: 1624966 - RNA, 19 nt, Artificial Sequence
  Description of Artificial Sequence: Synthetic oligonucleotide
uuccaggacuuaggccaua

SEQ ID NO: 1624967 - RNA, 19 nt, Artificial Sequence
  Description of Artificial Sequence: Synthetic oligonucleotide
cccacgaccucagggcggc

SEQ ID NO: 1624968 - RNA, 19 nt, Artificial Sequence
  Description of Artificial Sequence: Synthetic oligonucleotide
ccacucuaugcaccaagaa

SEQ ID NO: 1624969 - RNA, 19 nt, Artificial Sequence
  Description of Artificial Sequence: Synthetic oligonucleotide
gugugacucacuggccaua

SEQ ID NO: 1624970 - RNA, 19 nt, Artificial Sequence
  Description of Artificial Sequence: Synthetic oligonucleotide
caggcuauucugaggccuu

SEQ ID NO: 1624971 - RNA, 19 nt, Artificial Sequence
  Description of Artificial Sequence: Synthetic oligonucleotide
gguagccuuugggagacau

SEQ ID NO: 1624972 - RNA, 19 nt, Artificial Sequence
  Description of Artificial Sequence: Synthetic oligonucleotide
ccgcaaacuugcaguuauc

SEQ ID NO: 1624973 - RNA, 19 nt, Artificial Sequence
  Description of Artificial Sequence: Synthetic oligonucleotide
caguuccuaguguccacuu

SEQ ID NO: 1624974 - RNA, 19 nt, Artificial Sequence
  Description of Artificial Sequence: Synthetic oligonucleotide
ccaagaauccuuaguccuu

SEQ ID NO: 1624975 - RNA, 19 nt, Artificial Sequence
  Description of Artificial Sequence: Synthetic oligonucleotide
ccaugugacacucccuuuu

SEQ ID NO: 1624976 - RNA, 19 nt, Artificial Sequence
  Description of Artificial Sequence: Synthetic oligonucleotide
ccaggacuuaggccauaca

SEQ ID NO: 1624977 - RNA, 19 nt, Artificial Sequence
  Description of Artificial Sequence: Synthetic oligonucleotide
cagugguacaugggacaua

SEQ ID NO: 1624978 - RNA, 19 nt, Artificial Sequence
  Description of Artificial Sequence: Synthetic oligonucleotide
caugccccacgaagccacu

SEQ ID NO: 1624979 - RNA, 19 nt, Artificial Sequence
  Description of Artificial Sequence: Synthetic oligonucleotide
ccagugguugcaguuccua

SEQ ID NO: 1624980 - RNA, 19 nt, Artificial Sequence
  Description of Artificial Sequence: Synthetic oligonucleotide
ggccgcaaacuugcaguua

SEQ ID NO: 1624981 - RNA, 19 nt, Artificial Sequence
  Description of Artificial Sequence: Synthetic oligonucleotide
caaagagcucaagcccauu

SEQ ID NO: 1624982 - RNA, 19 nt, Artificial Sequence
  Description of Artificial Sequence: Synthetic oligonucleotide
gcugaccgccaggcuggcc

SEQ ID NO: 1624983 - RNA, 19 nt, Artificial Sequence
  Description of Artificial Sequence: Synthetic oligonucleotide
ccaccagguuacaggagau

SEQ ID NO: 1624984 - RNA, 19 nt, Artificial Sequence
  Description of Artificial Sequence: Synthetic oligonucleotide
ccuuugggucaggcagcug

SEQ ID NO: 1624985 - RNA, 19 nt, Artificial Sequence
  Description of Artificial Sequence: Synthetic oligonucleotide
ggccuuagagguagccuuu

SEQ ID NO: 1624986 - RNA, 19 nt, Artificial Sequence
  Description of Artificial Sequence: Synthetic oligonucleotide
gggcggccuaagugaaggu

SEQ ID NO: 1624987 - RNA, 19 nt, Artificial Sequence
  Description of Artificial Sequence: Synthetic oligonucleotide
ggccuaagugaaagacaau

SEQ ID NO: 1624988 - RNA, 19 nt, Artificial Sequence
  Description of Artificial Sequence: Synthetic oligonucleotide
ggguggagucauaccguuu

SEQ ID NO: 1624989 - RNA, 19 nt, Artificial Sequence
  Description of Artificial Sequence: Synthetic oligonucleotide
ccgcuucaugccccacgaa

SEQ ID NO: 1624990 - RNA, 19 nt, Artificial Sequence
  Description of Artificial Sequence: Synthetic oligonucleotide
cgaccucagggcggccuaa

SEQ ID NO: 1624991 - RNA, 19 nt, Artificial Sequence
  Description of Artificial Sequence: Synthetic oligonucleotide
cuccaacgauagggcuguu

SEQ ID NO: 1624992 - RNA, 19 nt, Artificial Sequence
  Description of Artificial Sequence: Synthetic oligonucleotide
aaugccuugguucaaagcc

SEQ ID NO: 1624993 - RNA, 19 nt, Artificial Sequence
  Description of Artificial Sequence: Synthetic oligonucleotide
uguacauaaggucugaacg

SEQ ID NO: 1624994 - RNA, 19 nt, Artificial Sequence
  Description of Artificial Sequence: Synthetic oligonucleotide
aguagagucaccugguggc

SEQ ID NO: 1624995 - RNA, 19 nt, Artificial Sequence
  Description of Artificial Sequence: Synthetic oligonucleotide
  modified_base (7)..(7): a, c, u, g, unknown or other
  modified_base (14)..(14): a, c, u, g, unknown or other
ucagcancugccancgggg

SEQ ID NO: 1624996 - RNA, 19 nt, Artificial Sequence
  Description of Artificial Sequence: Synthetic oligonucleotide
ugggauuucuucuaggacc

SEQ ID NO: 1624997 - RNA, 19 nt, Artificial Sequence
  Description of Artificial Sequence: Synthetic oligonucleotide
aagucggcgacucuggcgg

SEQ ID NO: 1624998 - RNA, 19 nt, Artificial Sequence
  Description of Artificial Sequence: Synthetic oligonucleotide
agcaacaccggaaugaggc

SEQ ID NO: 1624999 - RNA, 19 nt, Artificial Sequence
  Description of Artificial Sequence: Synthetic oligonucleotide
gaugcugagcaucuggccg

SEQ ID NO: 1625000 - RNA, 19 nt, Artificial Sequence
  Description of Artificial Sequence: Synthetic oligonucleotide
agucguagggacccgaggc

SEQ ID NO: 1625001 - RNA, 19 nt, Artificial Sequence
  Description of Artificial Sequence: Synthetic oligonucleotide
ugugaggaauuugagaucc

SEQ ID NO: 1625002 - RNA, 19 nt, Artificial Sequence
  Description of Artificial Sequence: Synthetic oligonucleotide
gaaagcaaaucugauugcg

SEQ ID NO: 1625003 - RNA, 19 nt, Artificial Sequence
  Description of Artificial Sequence: Synthetic oligonucleotide
aagcaaaucugauugcgga

SEQ ID NO: 1625004 - RNA, 19 nt, Artificial Sequence
  Description of Artificial Sequence: Synthetic oligonucleotide
aaucugaacucaaacagcu

SEQ ID NO: 1625005 - RNA, 19 nt, Artificial Sequence
  Description of Artificial Sequence: Synthetic oligonucleotide
  modified_base (18)..(18): a, c, u, g, unknown or other
uugcgaacuacucagcanc

SEQ ID NO: 1625006 - RNA, 19 nt, Artificial Sequence
  Description of Artificial Sequence: Synthetic oligonucleotide
  modified_base (10)..(10): a, c, u, g, unknown or other
  modified_base (17)..(17): a, c, u, g, unknown or other
uacucagcancugccancg

SEQ ID NO: 1625007 - RNA, 19 nt, Artificial Sequence
  Description of Artificial Sequence: Synthetic oligonucleotide
uugguucaaagccugugag

SEQ ID NO: 1625008 - RNA, 19 nt, Artificial Sequence
  Description of Artificial Sequence: Synthetic oligonucleotide
aaagcaaaucugauugcgg

SEQ ID NO: 1625009 - RNA, 19 nt, Artificial Sequence
  Description of Artificial Sequence: Synthetic oligonucleotide
ugaaggucugggcacaagc

SEQ ID NO: 1625010 - RNA, 19 nt, Artificial Sequence
  Description of Artificial Sequence: Synthetic oligonucleotide
gaaaggaaugggcuggagc

SEQ ID NO: 1625011 - RNA, 19 nt, Artificial Sequence
  Description of Artificial Sequence: Synthetic oligonucleotide
ucguacaggaaguuggccc

SEQ ID NO: 1625012 - RNA, 19 nt, Artificial Sequence
  Description of Artificial Sequence: Synthetic oligonucleotide
acaccuuggucguaccugc

SEQ ID NO: 1625013 - RNA, 19 nt, Artificial Sequence
  Description of Artificial Sequence: Synthetic oligonucleotide
ugaaagcaaaucugauugc

SEQ ID NO: 1625014 - RNA, 19 nt, Artificial Sequence
  Description of Artificial Sequence: Synthetic oligonucleotide
  modified_base (2)..(2): a, c, u, g, unknown or other
ancggggcgaugaagucgg

SEQ ID NO: 1625015 - RNA, 19 nt, Artificial Sequence
  Description of Artificial Sequence: Synthetic oligonucleotide
uucaccaccucaauguaau

SEQ ID NO: 1625016 - RNA, 19 nt, Artificial Sequence
  Description of Artificial Sequence: Synthetic oligonucleotide
  modified_base (8)..(8): a, c, u, g, unknown or other
  modified_base (15)..(15): a, c, u, g, unknown or other
cucagcancugccancggg

SEQ ID NO: 1625017 - RNA, 19 nt, Artificial Sequence
  Description of Artificial Sequence: Synthetic oligonucleotide
aagucguagggacccgagg

SEQ ID NO: 1625018 - RNA, 19 nt, Artificial Sequence
  Description of Artificial Sequence: Synthetic oligonucleotide
aagaaggggucguuggcca

SEQ ID NO: 1625019 - RNA, 19 nt, Artificial Sequence
  Description of Artificial Sequence: Synthetic oligonucleotide
uugguagucacacucccau

SEQ ID NO: 1625020 - RNA, 19 nt, Artificial Sequence
  Description of Artificial Sequence: Synthetic oligonucleotide
gaugaagucggcgacucug

SEQ ID NO: 1625021 - RNA, 19 nt, Artificial Sequence
  Description of Artificial Sequence: Synthetic oligonucleotide
gaagucggcgacucuggcg

SEQ ID NO: 1625022 - RNA, 19 nt, Artificial Sequence
  Description of Artificial Sequence: Synthetic oligonucleotide
guccuugcgaacuacucag

SEQ ID NO: 1625023 - RNA, 19 nt, Artificial Sequence
  Description of Artificial Sequence: Synthetic oligonucleotide
acaagcagccucucuuugg

SEQ ID NO: 1625024 - RNA, 19 nt, Artificial Sequence
  Description of Artificial Sequence: Synthetic oligonucleotide
agcagccucucuuugguag

SEQ ID NO: 1625025 - RNA, 19 nt, Artificial Sequence
  Description of Artificial Sequence: Synthetic oligonucleotide
gaauuugagauccugggau

SEQ ID NO: 1625026 - RNA, 19 nt, Artificial Sequence
  Description of Artificial Sequence: Synthetic oligonucleotide
uuucugaaggucugggcac

SEQ ID NO: 1625027 - RNA, 19 nt, Artificial Sequence
  Description of Artificial Sequence: Synthetic oligonucleotide
agcgcaggcuaagaaagcc

SEQ ID NO: 1625028 - RNA, 19 nt, Artificial Sequence
  Description of Artificial Sequence: Synthetic oligonucleotide
guacauaaggucugaacga

SEQ ID NO: 1625029 - RNA, 19 nt, Artificial Sequence
  Description of Artificial Sequence: Synthetic oligonucleotide
uugggauccgucugcauga

SEQ ID NO: 1625030 - RNA, 19 nt, Artificial Sequence
  Description of Artificial Sequence: Synthetic oligonucleotide
cuguacauaaggucugaac

SEQ ID NO: 1625031 - RNA, 19 nt, Artificial Sequence
  Description of Artificial Sequence: Synthetic oligonucleotide
gaaugaggcccuguauucg

SEQ ID NO: 1625032 - RNA, 19 nt, Artificial Sequence
  Description of Artificial Sequence: Synthetic oligonucleotide
gaaugccuugguucaaagc

SEQ ID NO: 1625033 - RNA, 19 nt, Artificial Sequence
  Description of Artificial Sequence: Synthetic oligonucleotide
aacaaccccucuggcaggc

SEQ ID NO: 1625034 - RNA, 19 nt, Artificial Sequence
  Description of Artificial Sequence: Synthetic oligonucleotide
cugcacgucacucuggaug

SEQ ID NO: 1625035 - RNA, 19 nt, Artificial Sequence
  Description of Artificial Sequence: Synthetic oligonucleotide
accuuggucguaccugccc

SEQ ID NO: 1625036 - RNA, 19 nt, Artificial Sequence
  Description of Artificial Sequence: Synthetic oligonucleotide
ucugaaagucaggaggcug

SEQ ID NO: 1625037 - RNA, 19 nt, Artificial Sequence
  Description of Artificial Sequence: Synthetic oligonucleotide
auguaauggucugugaacu

SEQ ID NO: 1625038 - RNA, 19 nt, Artificial Sequence
  Description of Artificial Sequence: Synthetic oligonucleotide
uuugguagucacacuccca

SEQ ID NO: 1625039 - RNA, 19 nt, Artificial Sequence
  Description of Artificial Sequence: Synthetic oligonucleotide
  modified_base (5)..(5): a, c, u, g, unknown or other
  modified_base (12)..(12): a, c, u, g, unknown or other
agcancugccancggggcg

SEQ ID NO: 1625040 - RNA, 19 nt, Artificial Sequence
  Description of Artificial Sequence: Synthetic oligonucleotide
ucaauguaauggucuguga

SEQ ID NO: 1625041 - RNA, 19 nt, Artificial Sequence
  Description of Artificial Sequence: Synthetic oligonucleotide
ugaacgauccucucagcau

SEQ ID NO: 1625042 - RNA, 19 nt, Artificial Sequence
  Description of Artificial Sequence: Synthetic oligonucleotide
gaagaaggggucguuggcc

SEQ ID NO: 1625043 - RNA, 19 nt, Artificial Sequence
  Description of Artificial Sequence: Synthetic oligonucleotide
ucguaccugcccaauggag

SEQ ID NO: 1625044 - RNA, 19 nt, Artificial Sequence
  Description of Artificial Sequence: Synthetic oligonucleotide
aagaggucccggcaggcga

SEQ ID NO: 1625045 - RNA, 19 nt, Artificial Sequence
  Description of Artificial Sequence: Synthetic oligonucleotide
cugcucagcaaacaacccc

SEQ ID NO: 1625046 - RNA, 19 nt, Artificial Sequence
  Description of Artificial Sequence: Synthetic oligonucleotide
aggcuaagaaagccccggc

SEQ ID NO: 1625047 - RNA, 19 nt, Artificial Sequence
  Description of Artificial Sequence: Synthetic oligonucleotide
caagauccgcugcagcugg

SEQ ID NO: 1625048 - RNA, 19 nt, Artificial Sequence
  Description of Artificial Sequence: Synthetic oligonucleotide
caaacgcccggcuugcacc

SEQ ID NO: 1625049 - RNA, 19 nt, Artificial Sequence
  Description of Artificial Sequence: Synthetic oligonucleotide
cccucugaaagucaggagg

SEQ ID NO: 1625050 - RNA, 19 nt, Artificial Sequence
  Description of Artificial Sequence: Synthetic oligonucleotide
guaccugcccaauggaggc

SEQ ID NO: 1625051 - RNA, 19 nt, Artificial Sequence
  Description of Artificial Sequence: Synthetic oligonucleotide
ggaggcgucguacaggaag

SEQ ID NO: 1625052 - RNA, 19 nt, Artificial Sequence
  Description of Artificial Sequence: Synthetic oligonucleotide
uauucggcgagccgucucu

SEQ ID NO: 1625053 - RNA, 19 nt, Artificial Sequence
  Description of Artificial Sequence: Synthetic oligonucleotide
ucucgugcacagcuccggg

SEQ ID NO: 1625054 - RNA, 19 nt, Artificial Sequence
  Description of Artificial Sequence: Synthetic oligonucleotide
cuagcuugcgguguagggc

SEQ ID NO: 1625055 - RNA, 19 nt, Artificial Sequence
  Description of Artificial Sequence: Synthetic oligonucleotide
uagucacacucccaugcca

SEQ ID NO: 1625056 - RNA, 19 nt, Artificial Sequence
  Description of Artificial Sequence: Synthetic oligonucleotide
aaaucugauugcggauguc

SEQ ID NO: 1625057 - RNA, 19 nt, Artificial Sequence
  Description of Artificial Sequence: Synthetic oligonucleotide
ggucguaccugcccaaugg

SEQ ID NO: 1625058 - RNA, 19 nt, Artificial Sequence
  Description of Artificial Sequence: Synthetic oligonucleotide
uacauaaggucugaacgau

SEQ ID NO: 1625059 - RNA, 19 nt, Artificial Sequence
  Description of Artificial Sequence: Synthetic oligonucleotide
ugcaugaaucugaacucaa

SEQ ID NO: 1625060 - RNA, 19 nt, Artificial Sequence
  Description of Artificial Sequence: Synthetic oligonucleotide
aacggugguaggugucuug

SEQ ID NO: 1625061 - RNA, 19 nt, Artificial Sequence
  Description of Artificial Sequence: Synthetic oligonucleotide
ucgugcacagcuccgggac

SEQ ID NO: 1625062 - RNA, 19 nt, Artificial Sequence
  Description of Artificial Sequence: Synthetic oligonucleotide
ccggcuugcaccaaagucc

SEQ ID NO: 1625063 - RNA, 19 nt, Artificial Sequence
  Description of Artificial Sequence: Synthetic oligonucleotide
ugggcgucagagaaugccu

SEQ ID NO: 1625064 - RNA, 19 nt, Artificial Sequence
  Description of Artificial Sequence: Synthetic oligonucleotide
  modified_base (13)..(13): a, c, u, g, unknown or other
aacuacucagcancugcca

SEQ ID NO: 1625065 - RNA, 19 nt, Artificial Sequence
  Description of Artificial Sequence: Synthetic oligonucleotide
  modified_base (12)..(12): a, c, u, g, unknown or other
  modified_base (19)..(19): a, c, u, g, unknown or other
acuacucagcancugccan

SEQ ID NO: 1625066 - RNA, 19 nt, Artificial Sequence
  Description of Artificial Sequence: Synthetic oligonucleotide
ggagcugaaagcaaaucug

SEQ ID NO: 1625067 - RNA, 19 nt, Artificial Sequence
  Description of Artificial Sequence: Synthetic oligonucleotide
  modified_base (17)..(17): a, c, u, g, unknown or other
ugcgaacuacucagcancu

SEQ ID NO: 1625068 - RNA, 19 nt, Artificial Sequence
  Description of Artificial Sequence: Synthetic oligonucleotide
caaaguccaguagagucac

SEQ ID NO: 1625069 - RNA, 19 nt, Artificial Sequence
  Description of Artificial Sequence: Synthetic oligonucleotide
gacccgaucccugucuccg

SEQ ID NO: 1625070 - RNA, 19 nt, Artificial Sequence
  Description of Artificial Sequence: Synthetic oligonucleotide
agcaaaucugauugcggau

SEQ ID NO: 1625071 - RNA, 19 nt, Artificial Sequence
  Description of Artificial Sequence: Synthetic oligonucleotide
aaacgcccggcuugcacca

SEQ ID NO: 1625072 - RNA, 19 nt, Artificial Sequence
  Description of Artificial Sequence: Synthetic oligonucleotide
cuugguucaaagccuguga

SEQ ID NO: 1625073 - RNA, 19 nt, Artificial Sequence
  Description of Artificial Sequence: Synthetic oligonucleotide
  modified_base (3)..(3): a, c, u, g, unknown or other
cancggggcgaugaagucg

SEQ ID NO: 1625074 - RNA, 19 nt, Artificial Sequence
  Description of Artificial Sequence: Synthetic oligonucleotide
caacaccggaaugaggccc

SEQ ID NO: 1625075 - RNA, 19 nt, Artificial Sequence
  Description of Artificial Sequence: Synthetic oligonucleotide
ucccucugaaagucaggag

SEQ ID NO: 1625076 - RNA, 19 nt, Artificial Sequence
  Description of Artificial Sequence: Synthetic oligonucleotide
ucugaacgauccucucagc

SEQ ID NO: 1625077 - RNA, 19 nt, Artificial Sequence
  Description of Artificial Sequence: Synthetic oligonucleotide
uugagauccugggauuucu

SEQ ID NO: 1625078 - RNA, 19 nt, Artificial Sequence
  Description of Artificial Sequence: Synthetic oligonucleotide
ugccgaagcaacaccggaa

SEQ ID NO: 1625079 - RNA, 19 nt, Artificial Sequence
  Description of Artificial Sequence: Synthetic oligonucleotide
aaaguccaguagagucacc

SEQ ID NO: 1625080 - RNA, 19 nt, Artificial Sequence
  Description of Artificial Sequence: Synthetic oligonucleotide
uggcgacuggcccaguaac

SEQ ID NO: 1625081 - RNA, 19 nt, Artificial Sequence
  Description of Artificial Sequence: Synthetic oligonucleotide
ugcgguguagggcguaggu

SEQ ID NO: 1625082 - RNA, 19 nt, Artificial Sequence
  Description of Artificial Sequence: Synthetic oligonucleotide
acggugguaggugucuugg

SEQ ID NO: 1625083 - RNA, 19 nt, Artificial Sequence
  Description of Artificial Sequence: Synthetic oligonucleotide
acauaaggucugaacgauc

SEQ ID NO: 1625084 - RNA, 19 nt, Artificial Sequence
  Description of Artificial Sequence: Synthetic oligonucleotide
aagcaacaccggaaugagg

SEQ ID NO: 1625085 - RNA, 19 nt, Artificial Sequence
  Description of Artificial Sequence: Synthetic oligonucleotide
cugaacgauccucucagca

SEQ ID NO: 1625086 - RNA, 19 nt, Artificial Sequence
  Description of Artificial Sequence: Synthetic oligonucleotide
aguaacggugguagguguc

SEQ ID NO: 1625087 - RNA, 19 nt, Artificial Sequence
  Description of Artificial Sequence: Synthetic oligonucleotide
gaagaggucccggcaggcg

SEQ ID NO: 1625088 - RNA, 19 nt, Artificial Sequence
  Description of Artificial Sequence: Synthetic oligonucleotide
ucguagggacccgaggcag

SEQ ID NO: 1625089 - RNA, 19 nt, Artificial Sequence
  Description of Artificial Sequence: Synthetic oligonucleotide
ggcgaugugggcguggagg

SEQ ID NO: 1625090 - RNA, 19 nt, Artificial Sequence
  Description of Artificial Sequence: Synthetic oligonucleotide
uccuugcgaacuacucagc

SEQ ID NO: 1625091 - RNA, 19 nt, Artificial Sequence
  Description of Artificial Sequence: Synthetic oligonucleotide
uaggacccgaucccugucu

SEQ ID NO: 1625092 - RNA, 19 nt, Artificial Sequence
  Description of Artificial Sequence: Synthetic oligonucleotide
gaaggucugggcacaagca

SEQ ID NO: 1625093 - RNA, 19 nt, Artificial Sequence
  Description of Artificial Sequence: Synthetic oligonucleotide
  modified_base (9)..(9): a, c, u, g, unknown or other
  modified_base (16)..(16): a, c, u, g, unknown or other
acucagcancugccancgg

SEQ ID NO: 1625094 - RNA, 19 nt, Artificial Sequence
  Description of Artificial Sequence: Synthetic oligonucleotide
augaagucggcgacucugg

SEQ ID NO: 1625095 - RNA, 19 nt, Artificial Sequence
  Description of Artificial Sequence: Synthetic oligonucleotide
uggucguaccugcccaaug

SEQ ID NO: 1625096 - RNA, 19 nt, Artificial Sequence
  Description of Artificial Sequence: Synthetic oligonucleotide
uugcggauguccugacuca

SEQ ID NO: 1625097 - RNA, 19 nt, Artificial Sequence
  Description of Artificial Sequence: Synthetic oligonucleotide
ggaaugaggcccuguauuc

SEQ ID NO: 1625098 - RNA, 19 nt, Artificial Sequence
  Description of Artificial Sequence: Synthetic oligonucleotide
gcuagcuugcgguguaggg

SEQ ID NO: 1625099 - RNA, 19 nt, Artificial Sequence
  Description of Artificial Sequence: Synthetic oligonucleotide
agcuaccucagucccauuu

SEQ ID NO: 1625100 - RNA, 19 nt, Artificial Sequence
  Description of Artificial Sequence: Synthetic oligonucleotide
gcgucguacaggaaguugg

SEQ ID NO: 1625101 - RNA, 19 nt, Artificial Sequence
  Description of Artificial Sequence: Synthetic oligonucleotide
gugggcgucagagaaugcc

SEQ ID NO: 1625102 - RNA, 19 nt, Artificial Sequence
  Description of Artificial Sequence: Synthetic oligonucleotide
ugguagucacacucccaug

SEQ ID NO: 1625103 - RNA, 19 nt, Artificial Sequence
  Description of Artificial Sequence: Synthetic oligonucleotide
gaagucguagggacccgag

SEQ ID NO: 1625104 - RNA, 19 nt, Artificial Sequence
  Description of Artificial Sequence: Synthetic oligonucleotide
aggacccgaucccugucuc

SEQ ID NO: 1625105 - RNA, 19 nt, Artificial Sequence
  Description of Artificial Sequence: Synthetic oligonucleotide
gauccugggauuucuucua

SEQ ID NO: 1625106 - RNA, 19 nt, Artificial Sequence
  Description of Artificial Sequence: Synthetic oligonucleotide
cucucgcagacacagccuc

SEQ ID NO: 1625107 - RNA, 19 nt, Artificial Sequence
  Description of Artificial Sequence: Synthetic oligonucleotide
gauccgucugcaugaaucu

SEQ ID NO: 1625108 - RNA, 19 nt, Artificial Sequence
  Description of Artificial Sequence: Synthetic oligonucleotide
ucggcgagccgucucucca

SEQ ID NO: 1625109 - RNA, 19 nt, Artificial Sequence
  Description of Artificial Sequence: Synthetic oligonucleotide
  modified_base (6)..(6): a, c, u, g, unknown or other
  modified_base (13)..(13): a, c, u, g, unknown or other
cagcancugccancggggc

SEQ ID NO: 1625110 - RNA, 19 nt, Artificial Sequence
  Description of Artificial Sequence: Synthetic oligonucleotide
acgugggcgucagagaaug

SEQ ID NO: 1625111 - RNA, 19 nt, Artificial Sequence
  Description of Artificial Sequence: Synthetic oligonucleotide
aacaccggaaugaggcccu

SEQ ID NO: 1625112 - RNA, 19 nt, Artificial Sequence
  Description of Artificial Sequence: Synthetic oligonucleotide
  modified_base (19)..(19): a, c, u, g, unknown or other
cuugcgaacuacucagcan

SEQ ID NO: 1625113 - RNA, 19 nt, Artificial Sequence
  Description of Artificial Sequence: Synthetic oligonucleotide
cacaccuuggucguaccug

SEQ ID NO: 1625114 - RNA, 19 nt, Artificial Sequence
  Description of Artificial Sequence: Synthetic oligonucleotide
acgcgucucgugcacagcu

SEQ ID NO: 1625115 - RNA, 19 nt, Artificial Sequence
  Description of Artificial Sequence: Synthetic oligonucleotide
caguccuugcgaacuacuc

SEQ ID NO: 1625116 - RNA, 19 nt, Artificial Sequence
  Description of Artificial Sequence: Synthetic oligonucleotide
ugcggauguccugacucag

SEQ ID NO: 1625117 - RNA, 19 nt, Artificial Sequence
  Description of Artificial Sequence: Synthetic oligonucleotide
ggauccgucugcaugaauc

SEQ ID NO: 1625118 - RNA, 19 nt, Artificial Sequence
  Description of Artificial Sequence: Synthetic oligonucleotide
cuggaggcgucguacagga

SEQ ID NO: 1625119 - RNA, 19 nt, Artificial Sequence
  Description of Artificial Sequence: Synthetic oligonucleotide
cgagcgcaggcuaagaaag

SEQ ID NO: 1625120 - RNA, 19 nt, Artificial Sequence
  Description of Artificial Sequence: Synthetic oligonucleotide
cucaagauccgcugcagcu

SEQ ID NO: 1625121 - RNA, 19 nt, Artificial Sequence
  Description of Artificial Sequence: Synthetic oligonucleotide
cucagcauuggccucggaa

SEQ ID NO: 1625122 - RNA, 19 nt, Artificial Sequence
  Description of Artificial Sequence: Synthetic oligonucleotide
uccagccccgaagucguag

SEQ ID NO: 1625123 - RNA, 19 nt, Artificial Sequence
  Description of Artificial Sequence: Synthetic oligonucleotide
ucaucacggccuccacgug

SEQ ID NO: 1625124 - RNA, 19 nt, Artificial Sequence
  Description of Artificial Sequence: Synthetic oligonucleotide
ugucuccgucagcagcagc

SEQ ID NO: 1625125 - RNA, 19 nt, Artificial Sequence
  Description of Artificial Sequence: Synthetic oligonucleotide
guacuggaucuucacagcu

SEQ ID NO: 1625126 - RNA, 19 nt, Artificial Sequence
  Description of Artificial Sequence: Synthetic oligonucleotide
gucccggcaggcgaugugg

SEQ ID NO: 1625127 - RNA, 19 nt, Artificial Sequence
  Description of Artificial Sequence: Synthetic oligonucleotide
cuguauucggcgagccguc

SEQ ID NO: 1625128 - RNA, 19 nt, Artificial Sequence
  Description of Artificial Sequence: Synthetic oligonucleotide
ugggcaacaccuggguacu

SEQ ID NO: 1625129 - RNA, 19 nt, Artificial Sequence
  Description of Artificial Sequence: Synthetic oligonucleotide
ucguuggccaagugcuuuc

SEQ ID NO: 1625130 - RNA, 19 nt, Artificial Sequence
  Description of Artificial Sequence: Synthetic oligonucleotide
gucucgugcacagcuccgg

SEQ ID NO: 1625131 - RNA, 19 nt, Artificial Sequence
  Description of Artificial Sequence: Synthetic oligonucleotide
caccucaauguaauggucu

SEQ ID NO: 1625132 - RNA, 19 nt, Artificial Sequence
  Description of Artificial Sequence: Synthetic oligonucleotide
uucggcgagccgucucucc

SEQ ID NO: 1625133 - RNA, 19 nt, Artificial Sequence
  Description of Artificial Sequence: Synthetic oligonucleotide
  modified_base (6)..(6): a, c, u, g, unknown or other
ugccancggggcgaugaag

SEQ ID NO: 1625134 - RNA, 19 nt, Artificial Sequence
  Description of Artificial Sequence: Synthetic oligonucleotide
ccccggacuguacauaagg

SEQ ID NO: 1625135 - RNA, 19 nt, Artificial Sequence
  Description of Artificial Sequence: Synthetic oligonucleotide
ggagcagaggaccgccccg

SEQ ID NO: 1625136 - RNA, 19 nt, Artificial Sequence
  Description of Artificial Sequence: Synthetic oligonucleotide
aggaccgccccgcugugga

SEQ ID NO: 1625137 - RNA, 19 nt, Artificial Sequence
  Description of Artificial Sequence: Synthetic oligonucleotide
uguagggcguaggucuccu

SEQ ID NO: 1625138 - RNA, 19 nt, Artificial Sequence
  Description of Artificial Sequence: Synthetic oligonucleotide
accggaaugaggcccugua

SEQ ID NO: 1625139 - RNA, 19 nt, Artificial Sequence
  Description of Artificial Sequence: Synthetic oligonucleotide
uccugccaguccuugcgaa

SEQ ID NO: 1625140 - RNA, 19 nt, Artificial Sequence
  Description of Artificial Sequence: Synthetic oligonucleotide
ggugguaggugucuuggaa

SEQ ID NO: 1625141 - RNA, 19 nt, Artificial Sequence
  Description of Artificial Sequence: Synthetic oligonucleotide
gcgacuggcccaguaacgg

SEQ ID NO: 1625142 - RNA, 19 nt, Artificial Sequence
  Description of Artificial Sequence: Synthetic oligonucleotide
cugcaaggacugcaggcuc

SEQ ID NO: 1625143 - RNA, 19 nt, Artificial Sequence
  Description of Artificial Sequence: Synthetic oligonucleotide
gagcuggcguccccggaug

SEQ ID NO: 1625144 - RNA, 19 nt, Artificial Sequence
  Description of Artificial Sequence: Synthetic oligonucleotide
uguauucggcgagccgucu

SEQ ID NO: 1625145 - RNA, 19 nt, Artificial Sequence
  Description of Artificial Sequence: Synthetic oligonucleotide
ccggacuguacauaagguc

SEQ ID NO: 1625146 - RNA, 19 nt, Artificial Sequence
  Description of Artificial Sequence: Synthetic oligonucleotide
ggacuguacauaaggucug

SEQ ID NO: 1625147 - RNA, 19 nt, Artificial Sequence
  Description of Artificial Sequence: Synthetic oligonucleotide
uccgggaccacggcuggca

SEQ ID NO: 1625148 - RNA, 19 nt, Artificial Sequence
  Description of Artificial Sequence: Synthetic oligonucleotide
gucguaccugcccaaugga

SEQ ID NO: 1625149 - RNA, 19 nt, Artificial Sequence
  Description of Artificial Sequence: Synthetic oligonucleotide
ggcgggacgucucucaaga

SEQ ID NO: 1625150 - RNA, 19 nt, Artificial Sequence
  Description of Artificial Sequence: Synthetic oligonucleotide
gagcgcaggcuaagaaagc

SEQ ID NO: 1625151 - RNA, 19 nt, Artificial Sequence
  Description of Artificial Sequence: Synthetic oligonucleotide
gagcagaggaccgccccgc

SEQ ID NO: 1625152 - RNA, 19 nt, Artificial Sequence
  Description of Artificial Sequence: Synthetic oligonucleotide
aagauccgcugcagcuggg

SEQ ID NO: 1625153 - RNA, 19 nt, Artificial Sequence
  Description of Artificial Sequence: Synthetic oligonucleotide
cugagcaucuggccgaucu

SEQ ID NO: 1625154 - RNA, 19 nt, Artificial Sequence
  Description of Artificial Sequence: Synthetic oligonucleotide
agccugugaggaauuugag

SEQ ID NO: 1625155 - RNA, 19 nt, Artificial Sequence
  Description of Artificial Sequence: Synthetic oligonucleotide
aaggggucguuggccaagu

SEQ ID NO: 1625156 - RNA, 19 nt, Artificial Sequence
  Description of Artificial Sequence: Synthetic oligonucleotide
uugcgguguagggcguagg

SEQ ID NO: 1625157 - RNA, 19 nt, Artificial Sequence
  Description of Artificial Sequence: Synthetic oligonucleotide
agccccggcuagcuugcgg

SEQ ID NO: 1625158 - RNA, 19 nt, Artificial Sequence
  Description of Artificial Sequence: Synthetic oligonucleotide
caaaucugauugcggaugu

SEQ ID NO: 1625159 - RNA, 19 nt, Artificial Sequence
  Description of Artificial Sequence: Synthetic oligonucleotide
cagccccgaagucguaggg

SEQ ID NO: 1625160 - RNA, 19 nt, Artificial Sequence
  Description of Artificial Sequence: Synthetic oligonucleotide
ccaguugggauccgucugc

SEQ ID NO: 1625161 - RNA, 19 nt, Artificial Sequence
  Description of Artificial Sequence: Synthetic oligonucleotide
gcaacaccggaaugaggcc

SEQ ID NO: 1625162 - RNA, 19 nt, Artificial Sequence
  Description of Artificial Sequence: Synthetic oligonucleotide
ggugccgaagcaacaccgg

SEQ ID NO: 1625163 - RNA, 19 nt, Artificial Sequence
  Description of Artificial Sequence: Synthetic oligonucleotide
gugccgaagcaacaccgga

SEQ ID NO: 1625164 - RNA, 19 nt, Artificial Sequence
  Description of Artificial Sequence: Synthetic oligonucleotide
gaggcgagcgcaggcuaag

SEQ ID NO: 1625165 - RNA, 19 nt, Artificial Sequence
  Description of Artificial Sequence: Synthetic oligonucleotide
  modified_base (4)..(4): a, c, u, g, unknown or other
  modified_base (11)..(11): a, c, u, g, unknown or other
gcancugccancggggcga

SEQ ID NO: 1625166 - RNA, 19 nt, Artificial Sequence
  Description of Artificial Sequence: Synthetic oligonucleotide
acuguacauaaggucugaa

SEQ ID NO: 1625167 - RNA, 19 nt, Artificial Sequence
  Description of Artificial Sequence: Synthetic oligonucleotide
guauucggcgagccgucuc

SEQ ID NO: 1625168 - RNA, 19 nt, Artificial Sequence
  Description of Artificial Sequence: Synthetic oligonucleotide
cuugcgguguagggcguag

SEQ ID NO: 1625169 - RNA, 19 nt, Artificial Sequence
  Description of Artificial Sequence: Synthetic oligonucleotide
agucggcgacucuggcggg

SEQ ID NO: 1625170 - RNA, 19 nt, Artificial Sequence
  Description of Artificial Sequence: Synthetic oligonucleotide
gcguaggucuccucgggug

SEQ ID NO: 1625171 - RNA, 19 nt, Artificial Sequence
  Description of Artificial Sequence: Synthetic oligonucleotide
acucuggcgggacgucucu

SEQ ID NO: 1625172 - RNA, 19 nt, Artificial Sequence
  Description of Artificial Sequence: Synthetic oligonucleotide
cuaggacccgaucccuguc

SEQ ID NO: 1625173 - RNA, 19 nt, Artificial Sequence
  Description of Artificial Sequence: Synthetic oligonucleotide
cuggcguccccggauggag

SEQ ID NO: 1625174 - RNA, 19 nt, Artificial Sequence
  Description of Artificial Sequence: Synthetic oligonucleotide
caccugguggcuggaggcg

SEQ ID NO: 1625175 - RNA, 19 nt, Artificial Sequence
  Description of Artificial Sequence: Synthetic oligonucleotide
ggcgacuggcccaguaacg

SEQ ID NO: 1625176 - RNA, 19 nt, Artificial Sequence
  Description of Artificial Sequence: Synthetic oligonucleotide
ggaggucccucugaaaguc

SEQ ID NO: 1625177 - RNA, 19 nt, Artificial Sequence
  Description of Artificial Sequence: Synthetic oligonucleotide
agcaucuggccgaucuuga

SEQ ID NO: 1625178 - RNA, 19 nt, Artificial Sequence
  Description of Artificial Sequence: Synthetic oligonucleotide
cccagcacgcgucucgugc

SEQ ID NO: 1625179 - RNA, 19 nt, Artificial Sequence
  Description of Artificial Sequence: Synthetic oligonucleotide
auucggcgagccgucucuc

SEQ ID NO: 1625180 - RNA, 19 nt, Artificial Sequence
  Description of Artificial Sequence: Synthetic oligonucleotide
aguugggauccgucugcau

SEQ ID NO: 1625181 - RNA, 19 nt, Artificial Sequence
  Description of Artificial Sequence: Synthetic oligonucleotide
caagcagccucucuuuggu

SEQ ID NO: 1625182 - RNA, 19 nt, Artificial Sequence
  Description of Artificial Sequence: Synthetic oligonucleotide
ugccaguccuugcgaacua

SEQ ID NO: 1625183 - RNA, 19 nt, Artificial Sequence
  Description of Artificial Sequence: Synthetic oligonucleotide
uggcguccccggauggagu

SEQ ID NO: 1625184 - RNA, 19 nt, Artificial Sequence
  Description of Artificial Sequence: Synthetic oligonucleotide
cugcccucgugcugcaguc

SEQ ID NO: 1625185 - RNA, 19 nt, Artificial Sequence
  Description of Artificial Sequence: Synthetic oligonucleotide
ugccuggcgacuggcccag

SEQ ID NO: 1625186 - RNA, 19 nt, Artificial Sequence
  Description of Artificial Sequence: Synthetic oligonucleotide
cggauguccugacucaggc

SEQ ID NO: 1625187 - RNA, 19 nt, Artificial Sequence
  Description of Artificial Sequence: Synthetic oligonucleotide
  modified_base (16)..(16): a, c, u, g, unknown or other
gcgaacuacucagcancug

SEQ ID NO: 1625188 - RNA, 19 nt, Artificial Sequence
  Description of Artificial Sequence: Synthetic oligonucleotide
cggugccgaagcaacaccg

SEQ ID NO: 1625189 - RNA, 19 nt, Artificial Sequence
  Description of Artificial Sequence: Synthetic oligonucleotide
ccaguaacggugguaggug

SEQ ID NO: 1625190 - RNA, 19 nt, Artificial Sequence
  Description of Artificial Sequence: Synthetic oligonucleotide
guagggacccgaggcagca

SEQ ID NO: 1625191 - RNA, 19 nt, Artificial Sequence
  Description of Artificial Sequence: Synthetic oligonucleotide
gcaggcuaagaaagccccg

SEQ ID NO: 1625192 - RNA, 19 nt, Artificial Sequence
  Description of Artificial Sequence: Synthetic oligonucleotide
cacgucacucuggaugcuc

SEQ ID NO: 1625193 - RNA, 19 nt, Artificial Sequence
  Description of Artificial Sequence: Synthetic oligonucleotide
ggccucggaaaggaauggg

SEQ ID NO: 1625194 - RNA, 19 nt, Artificial Sequence
  Description of Artificial Sequence: Synthetic oligonucleotide
guaacggugguaggugucu

SEQ ID NO: 1625195 - RNA, 19 nt, Artificial Sequence
  Description of Artificial Sequence: Synthetic oligonucleotide
gaggcgucguacaggaagu

SEQ ID NO: 1625196 - RNA, 19 nt, Artificial Sequence
  Description of Artificial Sequence: Synthetic oligonucleotide
cacagcuaccucaguccca

SEQ ID NO: 1625197 - RNA, 19 nt, Artificial Sequence
  Description of Artificial Sequence: Synthetic oligonucleotide
ccagccccgaagucguagg

SEQ ID NO: 1625198 - RNA, 19 nt, Artificial Sequence
  Description of Artificial Sequence: Synthetic oligonucleotide
agccccgaagucguaggga

SEQ ID NO: 1625199 - RNA, 19 nt, Artificial Sequence
  Description of Artificial Sequence: Synthetic oligonucleotide
uuggucguaccugcccaau

SEQ ID NO: 1625200 - RNA, 19 nt, Artificial Sequence
  Description of Artificial Sequence: Synthetic oligonucleotide
ggcgucguacaggaaguug

SEQ ID NO: 1625201 - RNA, 19 nt, Artificial Sequence
  Description of Artificial Sequence: Synthetic oligonucleotide
agcagaggaccgccccgcu

SEQ ID NO: 1625202 - RNA, 19 nt, Artificial Sequence
  Description of Artificial Sequence: Synthetic oligonucleotide
ggucccucugaaagucagg

SEQ ID NO: 1625203 - RNA, 19 nt, Artificial Sequence
  Description of Artificial Sequence: Synthetic oligonucleotide
cuuggucguaccugcccaa

SEQ ID NO: 1625204 - RNA, 19 nt, Artificial Sequence
  Description of Artificial Sequence: Synthetic oligonucleotide
guguagggcguaggucucc

SEQ ID NO: 1625205 - RNA, 19 nt, Artificial Sequence
  Description of Artificial Sequence: Synthetic oligonucleotide
ccggcaggcgaugugggcg

SEQ ID NO: 1625206 - RNA, 19 nt, Artificial Sequence
  Description of Artificial Sequence: Synthetic oligonucleotide
ccuugcgaacuacucagca

SEQ ID NO: 1625207 - RNA, 19 nt, Artificial Sequence
  Description of Artificial Sequence: Synthetic oligonucleotide
gcacgcgucucgugcacag

SEQ ID NO: 1625208 - RNA, 19 nt, Artificial Sequence
  Description of Artificial Sequence: Synthetic oligonucleotide
gcaacaccuggguacugga

SEQ ID NO: 1625209 - RNA, 19 nt, Artificial Sequence
  Description of Artificial Sequence: Synthetic oligonucleotide
cggacuguacauaaggucu

SEQ ID NO: 1625210 - RNA, 19 nt, Artificial Sequence
  Description of Artificial Sequence: Synthetic oligonucleotide
gcgagcgcaggcuaagaaa

SEQ ID NO: 1625211 - RNA, 19 nt, Artificial Sequence
  Description of Artificial Sequence: Synthetic oligonucleotide
gcauuggccucggaaagga

SEQ ID NO: 1625212 - RNA, 19 nt, Artificial Sequence
  Description of Artificial Sequence: Synthetic oligonucleotide
aggggucguuggccaagug

SEQ ID NO: 1625213 - RNA, 19 nt, Artificial Sequence
  Description of Artificial Sequence: Synthetic oligonucleotide
ggcuaagaaagccccggcu

SEQ ID NO: 1625214 - RNA, 19 nt, Artificial Sequence
  Description of Artificial Sequence: Synthetic oligonucleotide
caguaacggugguaggugu

SEQ ID NO: 1625215 - RNA, 19 nt, Artificial Sequence
  Description of Artificial Sequence: Synthetic oligonucleotide
ggacccgaucccugucucc

SEQ ID NO: 1625216 - RNA, 19 nt, Artificial Sequence
  Description of Artificial Sequence: Synthetic oligonucleotide
cuggcgacuggcccaguaa

SEQ ID NO: 1625217 - RNA, 19 nt, Artificial Sequence
  Description of Artificial Sequence: Synthetic oligonucleotide
ugcccagcacgcgucucgu

SEQ ID NO: 1625218 - RNA, 19 nt, Artificial Sequence
  Description of Artificial Sequence: Synthetic oligonucleotide
gcggauguccugacucagg

SEQ ID NO: 1625219 - RNA, 19 nt, Artificial Sequence
  Description of Artificial Sequence: Synthetic oligonucleotide
ucggcgacucuggcgggac

SEQ ID NO: 1625220 - RNA, 19 nt, Artificial Sequence
  Description of Artificial Sequence: Synthetic oligonucleotide
  modified_base (4)..(4): a, c, u, g, unknown or other
ccancggggcgaugaaguc

SEQ ID NO: 1625221 - RNA, 19 nt, Artificial Sequence
  Description of Artificial Sequence: Synthetic oligonucleotide
cagcacgcgucucgugcac

SEQ ID NO: 1625222 - RNA, 19 nt, Artificial Sequence
  Description of Artificial Sequence: Synthetic oligonucleotide
ugggauccgucugcaugaa

SEQ ID NO: 1625223 - RNA, 19 nt, Artificial Sequence
  Description of Artificial Sequence: Synthetic oligonucleotide
cccuguauucggcgagccg

SEQ ID NO: 1625224 - RNA, 19 nt, Artificial Sequence
  Description of Artificial Sequence: Synthetic oligonucleotide
uggaggcgucguacaggaa

SEQ ID NO: 1625225 - RNA, 19 nt, Artificial Sequence
  Description of Artificial Sequence: Synthetic oligonucleotide
ccgaucuugagggcagccc

SEQ ID NO: 1625226 - RNA, 19 nt, Artificial Sequence
  Description of Artificial Sequence: Synthetic oligonucleotide
  modified_base (2)..(2): a, c, u, g, unknown or other
  modified_base (9)..(9): a, c, u, g, unknown or other
ancugccancggggcgaug

SEQ ID NO: 1625227 - RNA, 19 nt, Artificial Sequence
  Description of Artificial Sequence: Synthetic oligonucleotide
cauuggccucggaaaggaa

SEQ ID NO: 1625228 - RNA, 19 nt, Artificial Sequence
  Description of Artificial Sequence: Synthetic oligonucleotide
ccuuggucguaccugccca

SEQ ID NO: 1625229 - RNA, 19 nt, Artificial Sequence
  Description of Artificial Sequence: Synthetic oligonucleotide
gcgaugaagucggcgacuc

SEQ ID NO: 1625230 - RNA, 19 nt, Artificial Sequence
  Description of Artificial Sequence: Synthetic oligonucleotide
ugcccucgugcugcagucu

SEQ ID NO: 1625231 - RNA, 19 nt, Artificial Sequence
  Description of Artificial Sequence: Synthetic oligonucleotide
cgggacgucucucaagauc

SEQ ID NO: 1625232 - RNA, 19 nt, Artificial Sequence
  Description of Artificial Sequence: Synthetic oligonucleotide
guagagucaccugguggcu

SEQ ID NO: 1625233 - RNA, 19 nt, Artificial Sequence
  Description of Artificial Sequence: Synthetic oligonucleotide
ggcguccccggauggaguc

SEQ ID NO: 1625234 - RNA, 19 nt, Artificial Sequence
  Description of Artificial Sequence: Synthetic oligonucleotide
agcacgcgucucgugcaca

SEQ ID NO: 1625235 - RNA, 19 nt, Artificial Sequence
  Description of Artificial Sequence: Synthetic oligonucleotide
guagggcguaggucuccuc

SEQ ID NO: 1625236 - RNA, 19 nt, Artificial Sequence
  Description of Artificial Sequence: Synthetic oligonucleotide
cacgcgucucgugcacagc

SEQ ID NO: 1625237 - RNA, 19 nt, Artificial Sequence
  Description of Artificial Sequence: Synthetic oligonucleotide
ggcgagcgcaggcuaagaa

SEQ ID NO: 1625238 - RNA, 19 nt, Artificial Sequence
  Description of Artificial Sequence: Synthetic oligonucleotide
  modified_base (5)..(5): a, c, u, g, unknown or other
gccancggggcgaugaagu

SEQ ID NO: 1625239 - RNA, 19 nt, Artificial Sequence
  Description of Artificial Sequence: Synthetic oligonucleotide
gaggucccggcaggcgaug

SEQ ID NO: 1625240 - RNA, 19 nt, Artificial Sequence
  Description of Artificial Sequence: Synthetic oligonucleotide
caguugggauccgucugca

SEQ ID NO: 1625241 - RNA, 19 nt, Artificial Sequence
  Description of Artificial Sequence: Synthetic oligonucleotide
ccuguauucggcgagccgu

SEQ ID NO: 1625242 - RNA, 19 nt, Artificial Sequence
  Description of Artificial Sequence: Synthetic oligonucleotide
gccgaagcaacaccggaau

SEQ ID NO: 1625243 - RNA, 19 nt, Artificial Sequence
  Description of Artificial Sequence: Synthetic oligonucleotide
gguguagggcguaggucuc

SEQ ID NO: 1625244 - RNA, 19 nt, Artificial Sequence
  Description of Artificial Sequence: Synthetic oligonucleotide
cuccaugcccagcacgcgu

SEQ ID NO: 1625245 - RNA, 19 nt, Artificial Sequence
  Description of Artificial Sequence: Synthetic oligonucleotide
caugcccagcacgcgucuc

SEQ ID NO: 1625246 - RNA, 19 nt, Artificial Sequence
  Description of Artificial Sequence: Synthetic oligonucleotide
acgcccggcuugcaccaaa

SEQ ID NO: 1625247 - RNA, 19 nt, Artificial Sequence
  Description of Artificial Sequence: Synthetic oligonucleotide
cgucucgugcacagcuccg

SEQ ID NO: 1625248 - RNA, 19 nt, Artificial Sequence
  Description of Artificial Sequence: Synthetic oligonucleotide
gccggugccgaagcaacac

SEQ ID NO: 1625249 - RNA, 19 nt, Artificial Sequence
  Description of Artificial Sequence: Synthetic oligonucleotide
cagggaggucccucugaaa

SEQ ID NO: 1625250 - RNA, 19 nt, Artificial Sequence
  Description of Artificial Sequence: Synthetic oligonucleotide
cguggaggcgagcgcaggc

SEQ ID NO: 1625251 - RNA, 19 nt, Artificial Sequence
  Description of Artificial Sequence: Synthetic oligonucleotide
cucugaaagucaggaggcu

SEQ ID NO: 1625252 - RNA, 19 nt, Artificial Sequence
  Description of Artificial Sequence: Synthetic oligonucleotide
ggcccuguauucggcgagc

SEQ ID NO: 1625253 - RNA, 19 nt, Artificial Sequence
  Description of Artificial Sequence: Synthetic oligonucleotide
aggcgagcgcaggcuaaga

SEQ ID NO: 1625254 - RNA, 19 nt, Artificial Sequence
  Description of Artificial Sequence: Synthetic oligonucleotide
cuggcgggacgucucucaa

SEQ ID NO: 1625255 - RNA, 19 nt, Artificial Sequence
  Description of Artificial Sequence: Synthetic oligonucleotide
  modified_base (7)..(7): a, c, u, g, unknown or other
cugccancggggcgaugaa

SEQ ID NO: 1625256 - RNA, 19 nt, Artificial Sequence
  Description of Artificial Sequence: Synthetic oligonucleotide
caacaccuggguacuggau

SEQ ID NO: 1625257 - RNA, 19 nt, Artificial Sequence
  Description of Artificial Sequence: Synthetic oligonucleotide
gcgguguagggcguagguc

SEQ ID NO: 1625258 - RNA, 19 nt, Artificial Sequence
  Description of Artificial Sequence: Synthetic oligonucleotide
cucuggcgggacgucucuc

SEQ ID NO: 1625259 - RNA, 19 nt, Artificial Sequence
  Description of Artificial Sequence: Synthetic oligonucleotide
gccaguccuugcgaacuac

SEQ ID NO: 1625260 - RNA, 19 nt, Artificial Sequence
  Description of Artificial Sequence: Synthetic oligonucleotide
guggaggcgagcgcaggcu

SEQ ID NO: 1625261 - RNA, 19 nt, Artificial Sequence
  Description of Artificial Sequence: Synthetic oligonucleotide
ggcguggaggcgagcgcag

SEQ ID NO: 1625262 - RNA, 19 nt, Artificial Sequence
  Description of Artificial Sequence: Synthetic oligonucleotide
ccagcacgcgucucgugca

SEQ ID NO: 1625263 - RNA, 19 nt, Artificial Sequence
  Description of Artificial Sequence: Synthetic oligonucleotide
aacgcccggcuugcaccaa

SEQ ID NO: 1625264 - RNA, 19 nt, Artificial Sequence
  Description of Artificial Sequence: Synthetic oligonucleotide
cccggcaggcgaugugggc

SEQ ID NO: 1625265 - RNA, 19 nt, Artificial Sequence
  Description of Artificial Sequence: Synthetic oligonucleotide
aggcgucguacaggaaguu

SEQ ID NO: 1625266 - RNA, 19 nt, Artificial Sequence
  Description of Artificial Sequence: Synthetic oligonucleotide
ccgucugcaugaaucugaa

SEQ ID NO: 1625267 - RNA, 19 nt, Artificial Sequence
  Description of Artificial Sequence: Synthetic oligonucleotide
gcguggaggcgagcgcagg

SEQ ID NO: 1625268 - RNA, 19 nt, Artificial Sequence
  Description of Artificial Sequence: Synthetic oligonucleotide
gucggcgacucuggcggga

SEQ ID NO: 1625269 - RNA, 19 nt, Artificial Sequence
  Description of Artificial Sequence: Synthetic oligonucleotide
ccgcuguggagcuggcguc

SEQ ID NO: 1625270 - RNA, 19 nt, Artificial Sequence
  Description of Artificial Sequence: Synthetic oligonucleotide
ggcacuggucuagagggau

SEQ ID NO: 1625271 - RNA, 19 nt, Artificial Sequence
  Description of Artificial Sequence: Synthetic oligonucleotide
gcacaagcagccucucuuu

SEQ ID NO: 1625272 - RNA, 19 nt, Artificial Sequence
  Description of Artificial Sequence: Synthetic oligonucleotide
cccggacuguacauaaggu

SEQ ID NO: 1625273 - RNA, 19 nt, Artificial Sequence
  Description of Artificial Sequence: Synthetic oligonucleotide
ggcguaggucuccucgggu

SEQ ID NO: 1625274 - RNA, 19 nt, Artificial Sequence
  Description of Artificial Sequence: Synthetic oligonucleotide
gccccggcuagcuugcggu

SEQ ID NO: 1625275 - RNA, 19 nt, Artificial Sequence
  Description of Artificial Sequence: Synthetic oligonucleotide
cccaguaacggugguaggu

SEQ ID NO: 1625276 - RNA, 19 nt, Artificial Sequence
  Description of Artificial Sequence: Synthetic oligonucleotide
cacgugggcgucagagaau

SEQ ID NO: 1625277 - RNA, 19 nt, Artificial Sequence
  Description of Artificial Sequence: Synthetic oligonucleotide
cccgcuguggagcuggcgu

SEQ ID NO: 1625278 - RNA, 19 nt, Artificial Sequence
  Description of Artificial Sequence: Synthetic oligonucleotide
gcacaccuuggucguaccu

SEQ ID NO: 1625279 - RNA, 19 nt, Artificial Sequence
  Description of Artificial Sequence: Synthetic oligonucleotide
cgaugugggcguggaggcg

SEQ ID NO: 1625280 - RNA, 19 nt, Artificial Sequence
  Description of Artificial Sequence: Synthetic oligonucleotide
ggccgaucuugagggcagc

SEQ ID NO: 1625281 - RNA, 19 nt, Artificial Sequence
  Description of Artificial Sequence: Synthetic oligonucleotide
caaagccugugaggaauuu

SEQ ID NO: 1625282 - RNA, 19 nt, Artificial Sequence
  Description of Artificial Sequence: Synthetic oligonucleotide
cgugggcgucagagaaugc

SEQ ID NO: 1625283 - RNA, 19 nt, Artificial Sequence
  Description of Artificial Sequence: Synthetic oligonucleotide
cucgugcugcagucuuccu

SEQ ID NO: 1625284 - RNA, 19 nt, Artificial Sequence
  Description of Artificial Sequence: Synthetic oligonucleotide
cggcgagccgucucuccag

SEQ ID NO: 1625285 - RNA, 19 nt, Artificial Sequence
  Description of Artificial Sequence: Synthetic oligonucleotide
ccccggcuagcuugcggug

SEQ ID NO: 1625286 - RNA, 19 nt, Artificial Sequence
  Description of Artificial Sequence: Synthetic oligonucleotide
cgcccggcuugcaccaaag

SEQ ID NO: 1625287 - RNA, 19 nt, Artificial Sequence
  Description of Artificial Sequence: Synthetic oligonucleotide
cgcgucucgugcacagcuc

SEQ ID NO: 1625288 - RNA, 19 nt, Artificial Sequence
  Description of Artificial Sequence: Synthetic oligonucleotide
gcuggcguccccggaugga

SEQ ID NO: 1625289 - RNA, 19 nt, Artificial Sequence
  Description of Artificial Sequence: Synthetic oligonucleotide
ccucaauguaauggucugu

SEQ ID NO: 1625290 - RNA, 19 nt, Artificial Sequence
  Description of Artificial Sequence: Synthetic oligonucleotide
cguccccggauggagucug

SEQ ID NO: 1625291 - RNA, 19 nt, Artificial Sequence
  Description of Artificial Sequence: Synthetic oligonucleotide
gcgacucuggcgggacguc

SEQ ID NO: 1625292 - RNA, 19 nt, Artificial Sequence
  Description of Artificial Sequence: Synthetic oligonucleotide
  modified_base (3)..(3): a, c, u, g, unknown or other
  modified_base (10)..(10): a, c, u, g, unknown or other
cancugccancggggcgau

SEQ ID NO: 1625293 - RNA, 19 nt, Artificial Sequence
  Description of Artificial Sequence: Synthetic oligonucleotide
cuccagccccgaagucgua

SEQ ID NO: 1625294 - RNA, 19 nt, Artificial Sequence
  Description of Artificial Sequence: Synthetic oligonucleotide
cggcgacucuggcgggacg

SEQ ID NO: 1625295 - RNA, 19 nt, Artificial Sequence
  Description of Artificial Sequence: Synthetic oligonucleotide
gcccucgugcugcagucuu

SEQ ID NO: 1625296 - RNA, 19 nt, Artificial Sequence
  Description of Artificial Sequence: Synthetic oligonucleotide
gcccggcuugcaccaaagu

SEQ ID NO: 1625297 - RNA, 19 nt, Artificial Sequence
  Description of Artificial Sequence: Synthetic oligonucleotide
gcuugcgguguagggcgua

SEQ ID NO: 1625298 - RNA, 19 nt, Artificial Sequence
  Description of Artificial Sequence: Synthetic oligonucleotide
gcgggacgucucucaagau

SEQ ID NO: 1625299 - RNA, 19 nt, Artificial Sequence
  Description of Artificial Sequence: Synthetic oligonucleotide
ccaugcccagcacgcgucu

SEQ ID NO: 1625300 - RNA, 19 nt, Artificial Sequence
  Description of Artificial Sequence: Synthetic oligonucleotide
guccccggauggagucugu

SEQ ID NO: 1625301 - RNA, 19 nt, Artificial Sequence
  Description of Artificial Sequence: Synthetic oligonucleotide
caccuggguacuggaucuu

SEQ ID NO: 1625302 - RNA, 19 nt, Artificial Sequence
  Description of Artificial Sequence: Synthetic oligonucleotide
cccggcuagcuugcggugu

SEQ ID NO: 1625303 - RNA, 19 nt, Artificial Sequence
  Description of Artificial Sequence: Synthetic oligonucleotide
ggucagcagggaggucccu

SEQ ID NO: 1625304 - RNA, 19 nt, Artificial Sequence
  Description of Artificial Sequence: Synthetic oligonucleotide
cgaugaagucggcgacucu

SEQ ID NO: 1625305 - RNA, 19 nt, Artificial Sequence
  Description of Artificial Sequence: Synthetic oligonucleotide
cguuggccaagugcuuucu

SEQ ID NO: 1625306 - RNA, 19 nt, Artificial Sequence
  Description of Artificial Sequence: Synthetic oligonucleotide
cagcuaccucagucccauu

SEQ ID NO: 1625307 - RNA, 19 nt, Artificial Sequence
  Description of Artificial Sequence: Synthetic oligonucleotide
gcguccccggauggagucu

SEQ ID NO: 1625308 - RNA, 19 nt, Artificial Sequence
  Description of Artificial Sequence: Synthetic oligonucleotide
ggaccacggcuggcacccu

SEQ ID NO: 1625309 - RNA, 19 nt, Artificial Sequence
  Description of Artificial Sequence: Synthetic oligonucleotide
  modified_base (1)..(1): a, c, u, g, unknown or other
  modified_base (8)..(8): a, c, u, g, unknown or other
ncugccancggggcgauga

SEQ ID NO: 1625310 - RNA, 19 nt, Artificial Sequence
  Description of Artificial Sequence: Synthetic oligonucleotide
  modified_base (1)..(1): a, c, u, g, unknown or other
ncggggcgaugaagucggc

SEQ ID NO: 1625311 - RNA, 19 nt, Artificial Sequence
  Description of Artificial Sequence: Synthetic oligonucleotide
agaggaaggacucauacac

SEQ ID NO: 1625312 - RNA, 19 nt, Artificial Sequence
  Description of Artificial Sequence: Synthetic oligonucleotide
ugauguaccaggaaagugc

SEQ ID NO: 1625313 - RNA, 19 nt, Artificial Sequence
  Description of Artificial Sequence: Synthetic oligonucleotide
ucauacaccaggaagcugc

SEQ ID NO: 1625314 - RNA, 19 nt, Artificial Sequence
  Description of Artificial Sequence: Synthetic oligonucleotide
  modified_base (5)..(5): a, c, u, g, unknown or other
  modified_base (7)..(7): a, c, u, g, unknown or other
ucuununuccucuucuucu

SEQ ID NO: 1625315 - RNA, 19 nt, Artificial Sequence
  Description of Artificial Sequence: Synthetic oligonucleotide
auagaggaaggacucauac

SEQ ID NO: 1625316 - RNA, 19 nt, Artificial Sequence
  Description of Artificial Sequence: Synthetic oligonucleotide
  modified_base (8)..(8): a, c, u, g, unknown or other
  modified_base (10)..(10): a, c, u, g, unknown or other
ucuucuununuccucuucu

SEQ ID NO: 1625317 - RNA, 19 nt, Artificial Sequence
  Description of Artificial Sequence: Synthetic oligonucleotide
uccuaacuaggucaggugg

SEQ ID NO: 1625318 - RNA, 19 nt, Artificial Sequence
  Description of Artificial Sequence: Synthetic oligonucleotide
aacuaggucagguggauga

SEQ ID NO: 1625319 - RNA, 19 nt, Artificial Sequence
  Description of Artificial Sequence: Synthetic oligonucleotide
gauaccguaccacuccugg

SEQ ID NO: 1625320 - RNA, 19 nt, Artificial Sequence
  Description of Artificial Sequence: Synthetic oligonucleotide
aucaccaugacccgccggc

SEQ ID NO: 1625321 - RNA, 19 nt, Artificial Sequence
  Description of Artificial Sequence: Synthetic oligonucleotide
aguccaguacacuuuauug

SEQ ID NO: 1625322 - RNA, 19 nt, Artificial Sequence
  Description of Artificial Sequence: Synthetic oligonucleotide
aacucaaggggccgauacc

SEQ ID NO: 1625323 - RNA, 19 nt, Artificial Sequence
  Description of Artificial Sequence: Synthetic oligonucleotide
cugcgcaucaccaucaccc

SEQ ID NO: 1625324 - RNA, 19 nt, Artificial Sequence
  Description of Artificial Sequence: Synthetic oligonucleotide
uccaguccuaacuagguca

SEQ ID NO: 1625325 - RNA, 19 nt, Artificial Sequence
  Description of Artificial Sequence: Synthetic oligonucleotide
uguaccaggaaagugcccc

SEQ ID NO: 1625326 - RNA, 19 nt, Artificial Sequence
  Description of Artificial Sequence: Synthetic oligonucleotide
aucacugucacgcgcuggc

SEQ ID NO: 1625327 - RNA, 19 nt, Artificial Sequence
  Description of Artificial Sequence: Synthetic oligonucleotide
gacucauacaccaggaagc

SEQ ID NO: 1625328 - RNA, 19 nt, Artificial Sequence
  Description of Artificial Sequence: Synthetic oligonucleotide
aguugguuagguuagggaa

SEQ ID NO: 1625329 - RNA, 19 nt, Artificial Sequence
  Description of Artificial Sequence: Synthetic oligonucleotide
uucuuugcucguuuucugg

SEQ ID NO: 1625330 - RNA, 19 nt, Artificial Sequence
  Description of Artificial Sequence: Synthetic oligonucleotide
gauggcacggcuacgacag

SEQ ID NO: 1625331 - RNA, 19 nt, Artificial Sequence
  Description of Artificial Sequence: Synthetic oligonucleotide
cuucucaccagcuacuuuc

SEQ ID NO: 1625332 - RNA, 19 nt, Artificial Sequence
  Description of Artificial Sequence: Synthetic oligonucleotide
uacuuucucccuccuauag

SEQ ID NO: 1625333 - RNA, 19 nt, Artificial Sequence
  Description of Artificial Sequence: Synthetic oligonucleotide
uacgacagcccauacgugc

SEQ ID NO: 1625334 - RNA, 19 nt, Artificial Sequence
  Description of Artificial Sequence: Synthetic oligonucleotide
ugugugauggcacggcuac

SEQ ID NO: 1625335 - RNA, 19 nt, Artificial Sequence
  Description of Artificial Sequence: Synthetic oligonucleotide
agggaaguucucucgcugc

SEQ ID NO: 1625336 - RNA, 19 nt, Artificial Sequence
  Description of Artificial Sequence: Synthetic oligonucleotide
aggaaggacucauacacca

SEQ ID NO: 1625337 - RNA, 19 nt, Artificial Sequence
  Description of Artificial Sequence: Synthetic oligonucleotide
uuugcucguuuucuggacc

SEQ ID NO: 1625338 - RNA, 19 nt, Artificial Sequence
  Description of Artificial Sequence: Synthetic oligonucleotide
guccaguacacuuuauugc

SEQ ID NO: 1625339 - RNA, 19 nt, Artificial Sequence
  Description of Artificial Sequence: Synthetic oligonucleotide
uucucccuccuauagagga

SEQ ID NO: 1625340 - RNA, 19 nt, Artificial Sequence
  Description of Artificial Sequence: Synthetic oligonucleotide
gacucguacaccaggaacc

SEQ ID NO: 1625341 - RNA, 19 nt, Artificial Sequence
  Description of Artificial Sequence: Synthetic oligonucleotide
agagucuccaguccuaacu

SEQ ID NO: 1625342 - RNA, 19 nt, Artificial Sequence
  Description of Artificial Sequence: Synthetic oligonucleotide
aaggggccgauaccguacc

SEQ ID NO: 1625343 - RNA, 19 nt, Artificial Sequence
  Description of Artificial Sequence: Synthetic oligonucleotide
uaccguaccacuccuggug

SEQ ID NO: 1625344 - RNA, 19 nt, Artificial Sequence
  Description of Artificial Sequence: Synthetic oligonucleotide
uagcaugucuucaggaacu

SEQ ID NO: 1625345 - RNA, 19 nt, Artificial Sequence
  Description of Artificial Sequence: Synthetic oligonucleotide
acccaugucaggugggugg

SEQ ID NO: 1625346 - RNA, 19 nt, Artificial Sequence
  Description of Artificial Sequence: Synthetic oligonucleotide
gauguaccaggaaagugcc

SEQ ID NO: 1625347 - RNA, 19 nt, Artificial Sequence
  Description of Artificial Sequence: Synthetic oligonucleotide
aaguccccagcaccaauuc

SEQ ID NO: 1625348 - RNA, 19 nt, Artificial Sequence
  Description of Artificial Sequence: Synthetic oligonucleotide
  modified_base (6)..(6): a, c, u, g, unknown or other
  modified_base (8)..(8): a, c, u, g, unknown or other
uucuununuccucuucuuc

SEQ ID NO: 1625349 - RNA, 19 nt, Artificial Sequence
  Description of Artificial Sequence: Synthetic oligonucleotide
aauucgccucgccuguauc

SEQ ID NO: 1625350 - RNA, 19 nt, Artificial Sequence
  Description of Artificial Sequence: Synthetic oligonucleotide
cuuccaaguccccagcacc

SEQ ID NO: 1625351 - RNA, 19 nt, Artificial Sequence
  Description of Artificial Sequence: Synthetic oligonucleotide
uuucucccgccuauagagg

SEQ ID NO: 1625352 - RNA, 19 nt, Artificial Sequence
  Description of Artificial Sequence: Synthetic oligonucleotide
gaacucaaggggccgauac

SEQ ID NO: 1625353 - RNA, 19 nt, Artificial Sequence
  Description of Artificial Sequence: Synthetic oligonucleotide
ucccaguugguuagguuag

SEQ ID NO: 1625354 - RNA, 19 nt, Artificial Sequence
  Description of Artificial Sequence: Synthetic oligonucleotide
caaucuuccaaguccccag

SEQ ID NO: 1625355 - RNA, 19 nt, Artificial Sequence
  Description of Artificial Sequence: Synthetic oligonucleotide
aggaaggacucguacacca

SEQ ID NO: 1625356 - RNA, 19 nt, Artificial Sequence
  Description of Artificial Sequence: Synthetic oligonucleotide
ggacucauacaccaggaag

SEQ ID NO: 1625357 - RNA, 19 nt, Artificial Sequence
  Description of Artificial Sequence: Synthetic oligonucleotide
guagcaugucuucaggaac

SEQ ID NO: 1625358 - RNA, 19 nt, Artificial Sequence
  Description of Artificial Sequence: Synthetic oligonucleotide
ucuccaguccuaacuaggu

SEQ ID NO: 1625359 - RNA, 19 nt, Artificial Sequence
  Description of Artificial Sequence: Synthetic oligonucleotide
ccuacugagagucagguuc

SEQ ID NO: 1625360 - RNA, 19 nt, Artificial Sequence
  Description of Artificial Sequence: Synthetic oligonucleotide
cugcgcaucacugucacgc

SEQ ID NO: 1625361 - RNA, 19 nt, Artificial Sequence
  Description of Artificial Sequence: Synthetic oligonucleotide
guugguuagguuagggaag

SEQ ID NO: 1625362 - RNA, 19 nt, Artificial Sequence
  Description of Artificial Sequence: Synthetic oligonucleotide
uagaggaaggacucauaca

SEQ ID NO: 1625363 - RNA, 19 nt, Artificial Sequence
  Description of Artificial Sequence: Synthetic oligonucleotide
uccaguacaccuugcuccc

SEQ ID NO: 1625364 - RNA, 19 nt, Artificial Sequence
  Description of Artificial Sequence: Synthetic oligonucleotide
  modified_base (2)..(2): a, c, u, g, unknown or other
  modified_base (4)..(4): a, c, u, g, unknown or other
ununuccucuucuucuuuu

SEQ ID NO: 1625365 - RNA, 19 nt, Artificial Sequence
  Description of Artificial Sequence: Synthetic oligonucleotide
cugaaaggauuccuugcgc

SEQ ID NO: 1625366 - RNA, 19 nt, Artificial Sequence
  Description of Artificial Sequence: Synthetic oligonucleotide
  modified_base (9)..(9): a, c, u, g, unknown or other
  modified_base (11)..(11): a, c, u, g, unknown or other
uucuucuununuccucuuc

SEQ ID NO: 1625367 - RNA, 19 nt, Artificial Sequence
  Description of Artificial Sequence: Synthetic oligonucleotide
ucaucacaaucuuccaagu

SEQ ID NO: 1625368 - RNA, 19 nt, Artificial Sequence
  Description of Artificial Sequence: Synthetic oligonucleotide
ugcuuucucccgccuauag

SEQ ID NO: 1625369 - RNA, 19 nt, Artificial Sequence
  Description of Artificial Sequence: Synthetic oligonucleotide
uucucccgccuauagagga

SEQ ID NO: 1625370 - RNA, 19 nt, Artificial Sequence
  Description of Artificial Sequence: Synthetic oligonucleotide
uccaggcuacccaugucag

SEQ ID NO: 1625371 - RNA, 19 nt, Artificial Sequence
  Description of Artificial Sequence: Synthetic oligonucleotide
uccccugcgguagagaggc

SEQ ID NO: 1625372 - RNA, 19 nt, Artificial Sequence
  Description of Artificial Sequence: Synthetic oligonucleotide
ucccgacacauccaguaca

SEQ ID NO: 1625373 - RNA, 19 nt, Artificial Sequence
  Description of Artificial Sequence: Synthetic oligonucleotide
agcaccaauucgccucgcc

SEQ ID NO: 1625374 - RNA, 19 nt, Artificial Sequence
  Description of Artificial Sequence: Synthetic oligonucleotide
uuagggaaguucucucgcu

SEQ ID NO: 1625375 - RNA, 19 nt, Artificial Sequence
  Description of Artificial Sequence: Synthetic oligonucleotide
ugcgcaucaccaucacccg

SEQ ID NO: 1625376 - RNA, 19 nt, Artificial Sequence
  Description of Artificial Sequence: Synthetic oligonucleotide
uggaccuacugagagucag

SEQ ID NO: 1625377 - RNA, 19 nt, Artificial Sequence
  Description of Artificial Sequence: Synthetic oligonucleotide
uagagggguccucaggaac

SEQ ID NO: 1625378 - RNA, 19 nt, Artificial Sequence
  Description of Artificial Sequence: Synthetic oligonucleotide
uguggggcguuucuuggga

SEQ ID NO: 1625379 - RNA, 19 nt, Artificial Sequence
  Description of Artificial Sequence: Synthetic oligonucleotide
agucuccaguccuaacuag

SEQ ID NO: 1625380 - RNA, 19 nt, Artificial Sequence
  Description of Artificial Sequence: Synthetic oligonucleotide
ugagagucagguucucuuc

SEQ ID NO: 1625381 - RNA, 19 nt, Artificial Sequence
  Description of Artificial Sequence: Synthetic oligonucleotide
guagagaggcuguccaccc

SEQ ID NO: 1625382 - RNA, 19 nt, Artificial Sequence
  Description of Artificial Sequence: Synthetic oligonucleotide
uccaagggguguccgcagg

SEQ ID NO: 1625383 - RNA, 19 nt, Artificial Sequence
  Description of Artificial Sequence: Synthetic oligonucleotide
gauggcgcggcugcgacag

SEQ ID NO: 1625384 - RNA, 19 nt, Artificial Sequence
  Description of Artificial Sequence: Synthetic oligonucleotide
  modified_base (3)..(3): a, c, u, g, unknown or other
  modified_base (5)..(5): a, c, u, g, unknown or other
uununuccucuucuucuuu

SEQ ID NO: 1625385 - RNA, 19 nt, Artificial Sequence
  Description of Artificial Sequence: Synthetic oligonucleotide
ucucggcaaguccaguaca

SEQ ID NO: 1625386 - RNA, 19 nt, Artificial Sequence
  Description of Artificial Sequence: Synthetic oligonucleotide
uucucccgcuuguagagga

SEQ ID NO: 1625387 - RNA, 19 nt, Artificial Sequence
  Description of Artificial Sequence: Synthetic oligonucleotide
aguccccagcaccaauucg

SEQ ID NO: 1625388 - RNA, 19 nt, Artificial Sequence
  Description of Artificial Sequence: Synthetic oligonucleotide
uggccucucaucacaguca

SEQ ID NO: 1625389 - RNA, 19 nt, Artificial Sequence
  Description of Artificial Sequence: Synthetic oligonucleotide
gcugcgacagcccagacga

SEQ ID NO: 1625390 - RNA, 19 nt, Artificial Sequence
  Description of Artificial Sequence: Synthetic oligonucleotide
auacgugccuggucucggc

SEQ ID NO: 1625391 - RNA, 19 nt, Artificial Sequence
  Description of Artificial Sequence: Synthetic oligonucleotide
uccgcaucaccaugacccg

SEQ ID NO: 1625392 - RNA, 19 nt, Artificial Sequence
  Description of Artificial Sequence: Synthetic oligonucleotide
acucguacaccaggaaccg

SEQ ID NO: 1625393 - RNA, 19 nt, Artificial Sequence
  Description of Artificial Sequence: Synthetic oligonucleotide
cuuugcucguuuucuggac

SEQ ID NO: 1625394 - RNA, 19 nt, Artificial Sequence
  Description of Artificial Sequence: Synthetic oligonucleotide
auucgugccuggucccggc

SEQ ID NO: 1625395 - RNA, 19 nt, Artificial Sequence
  Description of Artificial Sequence: Synthetic oligonucleotide
caccaauucgccucgccug

SEQ ID NO: 1625396 - RNA, 19 nt, Artificial Sequence
  Description of Artificial Sequence: Synthetic oligonucleotide
aguccuaacuaggucaggu

SEQ ID NO: 1625397 - RNA, 19 nt, Artificial Sequence
  Description of Artificial Sequence: Synthetic oligonucleotide
agagaggcuguccaccccu

SEQ ID NO: 1625398 - RNA, 19 nt, Artificial Sequence
  Description of Artificial Sequence: Synthetic oligonucleotide
uguacaggaaggacucgua

SEQ ID NO: 1625399 - RNA, 19 nt, Artificial Sequence
  Description of Artificial Sequence: Synthetic oligonucleotide
acgacagcccauacgugcc

SEQ ID NO: 1625400 - RNA, 19 nt, Artificial Sequence
  Description of Artificial Sequence: Synthetic oligonucleotide
gagaggggucuucaggaac

SEQ ID NO: 1625401 - RNA, 19 nt, Artificial Sequence
  Description of Artificial Sequence: Synthetic oligonucleotide
guacaggaaggacucguac

SEQ ID NO: 1625402 - RNA, 19 nt, Artificial Sequence
  Description of Artificial Sequence: Synthetic oligonucleotide
auucgccucgccuguaucu

SEQ ID NO: 1625403 - RNA, 19 nt, Artificial Sequence
  Description of Artificial Sequence: Synthetic oligonucleotide
gucuccaguccuaacuagg

SEQ ID NO: 1625404 - RNA, 19 nt, Artificial Sequence
  Description of Artificial Sequence: Synthetic oligonucleotide
uugcucguuuucuggaccu

SEQ ID NO: 1625405 - RNA, 19 nt, Artificial Sequence
  Description of Artificial Sequence: Synthetic oligonucleotide
cauacaccaggaagcugcc

SEQ ID NO: 1625406 - RNA, 19 nt, Artificial Sequence
  Description of Artificial Sequence: Synthetic oligonucleotide
agucagguucucuuccccu

SEQ ID NO: 1625407 - RNA, 19 nt, Artificial Sequence
  Description of Artificial Sequence: Synthetic oligonucleotide
agccuucuccuuccuguac

SEQ ID NO: 1625408 - RNA, 19 nt, Artificial Sequence
  Description of Artificial Sequence: Synthetic oligonucleotide
cucggcaaguccaguacac

SEQ ID NO: 1625409 - RNA, 19 nt, Artificial Sequence
  Description of Artificial Sequence: Synthetic oligonucleotide
guuagguuagggaaguucu

SEQ ID NO: 1625410 - RNA, 19 nt, Artificial Sequence
  Description of Artificial Sequence: Synthetic oligonucleotide
agccauggaccgcaugcuc

SEQ ID NO: 1625411 - RNA, 19 nt, Artificial Sequence
  Description of Artificial Sequence: Synthetic oligonucleotide
gaggaaggacucauacacc

SEQ ID NO: 1625412 - RNA, 19 nt, Artificial Sequence
  Description of Artificial Sequence: Synthetic oligonucleotide
acuaggucagguggaugac

SEQ ID NO: 1625413 - RNA, 19 nt, Artificial Sequence
  Description of Artificial Sequence: Synthetic oligonucleotide
gaggaaggacugauguacc

SEQ ID NO: 1625414 - RNA, 19 nt, Artificial Sequence
  Description of Artificial Sequence: Synthetic oligonucleotide
caguacaccuucucaccag

SEQ ID NO: 1625415 - RNA, 19 nt, Artificial Sequence
  Description of Artificial Sequence: Synthetic oligonucleotide
gaccgcaugcucccggcag

SEQ ID NO: 1625416 - RNA, 19 nt, Artificial Sequence
  Description of Artificial Sequence: Synthetic oligonucleotide
acucauacaccaggaagcu

SEQ ID NO: 1625417 - RNA, 19 nt, Artificial Sequence
  Description of Artificial Sequence: Synthetic oligonucleotide
aaggacugauguaccagga

SEQ ID NO: 1625418 - RNA, 19 nt, Artificial Sequence
  Description of Artificial Sequence: Synthetic oligonucleotide
aguacacuuuauugccagu

SEQ ID NO: 1625419 - RNA, 19 nt, Artificial Sequence
  Description of Artificial Sequence: Synthetic oligonucleotide
guccuaacuaggucaggug

SEQ ID NO: 1625420 - RNA, 19 nt, Artificial Sequence
  Description of Artificial Sequence: Synthetic oligonucleotide
accaauucgccucgccugu

SEQ ID NO: 1625421 - RNA, 19 nt, Artificial Sequence
  Description of Artificial Sequence: Synthetic oligonucleotide
caaggggccgauaccguac

SEQ ID NO: 1625422 - RNA, 19 nt, Artificial Sequence
  Description of Artificial Sequence: Synthetic oligonucleotide
aguggcugcgcaucacugu

SEQ ID NO: 1625423 - RNA, 19 nt, Artificial Sequence
  Description of Artificial Sequence: Synthetic oligonucleotide
cuacggcagccauggaccg

SEQ ID NO: 1625424 - RNA, 19 nt, Artificial Sequence
  Description of Artificial Sequence: Synthetic oligonucleotide
cuuccuguacaggaaggac

SEQ ID NO: 1625425 - RNA, 19 nt, Artificial Sequence
  Description of Artificial Sequence: Synthetic oligonucleotide
ugccugcgcaucaccauca

SEQ ID NO: 1625426 - RNA, 19 nt, Artificial Sequence
  Description of Artificial Sequence: Synthetic oligonucleotide
agguucucuuccccugcgg

SEQ ID NO: 1625427 - RNA, 19 nt, Artificial Sequence
  Description of Artificial Sequence: Synthetic oligonucleotide
gcccagacgagccuggucc

SEQ ID NO: 1625428 - RNA, 19 nt, Artificial Sequence
  Description of Artificial Sequence: Synthetic oligonucleotide
acagcccauacgugccugg

SEQ ID NO: 1625429 - RNA, 19 nt, Artificial Sequence
  Description of Artificial Sequence: Synthetic oligonucleotide
ucccgccuauagaggaagg

SEQ ID NO: 1625430 - RNA, 19 nt, Artificial Sequence
  Description of Artificial Sequence: Synthetic oligonucleotide
cacaaucuuccaagucccc

SEQ ID NO: 1625431 - RNA, 19 nt, Artificial Sequence
  Description of Artificial Sequence: Synthetic oligonucleotide
cuggucccgacacauccag

SEQ ID NO: 1625432 - RNA, 19 nt, Artificial Sequence
  Description of Artificial Sequence: Synthetic oligonucleotide
gcuacgacagcccauacgu

SEQ ID NO: 1625433 - RNA, 19 nt, Artificial Sequence
  Description of Artificial Sequence: Synthetic oligonucleotide
aguucucucgcugccgcag

SEQ ID NO: 1625434 - RNA, 19 nt, Artificial Sequence
  Description of Artificial Sequence: Synthetic oligonucleotide
gcuacggcagccauggacc

SEQ ID NO: 1625435 - RNA, 19 nt, Artificial Sequence
  Description of Artificial Sequence: Synthetic oligonucleotide
ucgucccgcugccucagag

SEQ ID NO: 1625436 - RNA, 19 nt, Artificial Sequence
  Description of Artificial Sequence: Synthetic oligonucleotide
gauggucuuuuccugcugu

SEQ ID NO: 1625437 - RNA, 19 nt, Artificial Sequence
  Description of Artificial Sequence: Synthetic oligonucleotide
caccccuuggagcagugug

SEQ ID NO: 1625438 - RNA, 19 nt, Artificial Sequence
  Description of Artificial Sequence: Synthetic oligonucleotide
gucucggcaaguccaguac

SEQ ID NO: 1625439 - RNA, 19 nt, Artificial Sequence
  Description of Artificial Sequence: Synthetic oligonucleotide
ggacucguacaccaggaac

SEQ ID NO: 1625440 - RNA, 19 nt, Artificial Sequence
  Description of Artificial Sequence: Synthetic oligonucleotide
uggcuccgcaucaccauga

SEQ ID NO: 1625441 - RNA, 19 nt, Artificial Sequence
  Description of Artificial Sequence: Synthetic oligonucleotide
ggacugauguaccaggaaa

SEQ ID NO: 1625442 - RNA, 19 nt, Artificial Sequence
  Description of Artificial Sequence: Synthetic oligonucleotide
cuccuauagaggaaggacu

SEQ ID NO: 1625443 - RNA, 19 nt, Artificial Sequence
  Description of Artificial Sequence: Synthetic oligonucleotide
gagucuccaguccuaacua

SEQ ID NO: 1625444 - RNA, 19 nt, Artificial Sequence
  Description of Artificial Sequence: Synthetic oligonucleotide
accguaccacuccuggugu

SEQ ID NO: 1625445 - RNA, 19 nt, Artificial Sequence
  Description of Artificial Sequence: Synthetic oligonucleotide
agcccauacgugccugguc

SEQ ID NO: 1625446 - RNA, 19 nt, Artificial Sequence
  Description of Artificial Sequence: Synthetic oligonucleotide
agaggggucuucaggaacu

SEQ ID NO: 1625447 - RNA, 19 nt, Artificial Sequence
  Description of Artificial Sequence: Synthetic oligonucleotide
uuuucuggaccuggaccug

SEQ ID NO: 1625448 - RNA, 19 nt, Artificial Sequence
  Description of Artificial Sequence: Synthetic oligonucleotide
uacgugccuggucucggca

SEQ ID NO: 1625449 - RNA, 19 nt, Artificial Sequence
  Description of Artificial Sequence: Synthetic oligonucleotide
ggcuacgacagcccauacg

SEQ ID NO: 1625450 - RNA, 19 nt, Artificial Sequence
  Description of Artificial Sequence: Synthetic oligonucleotide
uaacuaggucagguggaug

SEQ ID NO: 1625451 - RNA, 19 nt, Artificial Sequence
  Description of Artificial Sequence: Synthetic oligonucleotide
ugcgguagagaggcugucc

SEQ ID NO: 1625452 - RNA, 19 nt, Artificial Sequence
  Description of Artificial Sequence: Synthetic oligonucleotide
cauacgugccuggucucgg

SEQ ID NO: 1625453 - RNA, 19 nt, Artificial Sequence
  Description of Artificial Sequence: Synthetic oligonucleotide
aggacugauguaccaggaa

SEQ ID NO: 1625454 - RNA, 19 nt, Artificial Sequence
  Description of Artificial Sequence: Synthetic oligonucleotide
auaccguaccacuccuggu

SEQ ID NO: 1625455 - RNA, 19 nt, Artificial Sequence
  Description of Artificial Sequence: Synthetic oligonucleotide
ggccaucccacugaguggg

SEQ ID NO: 1625456 - RNA, 19 nt, Artificial Sequence
  Description of Artificial Sequence: Synthetic oligonucleotide
ucccggcacguccaguaca

SEQ ID NO: 1625457 - RNA, 19 nt, Artificial Sequence
  Description of Artificial Sequence: Synthetic oligonucleotide
auguaccaggaaagugccc

SEQ ID NO: 1625458 - RNA, 19 nt, Artificial Sequence
  Description of Artificial Sequence: Synthetic oligonucleotide
aucccacugaguggggccg

SEQ ID NO: 1625459 - RNA, 19 nt, Artificial Sequence
  Description of Artificial Sequence: Synthetic oligonucleotide
cagguggaugacaguggcc

SEQ ID NO: 1625460 - RNA, 19 nt, Artificial Sequence
  Description of Artificial Sequence: Synthetic oligonucleotide
gacagcccagacgagccug

SEQ ID NO: 1625461 - RNA, 19 nt, Artificial Sequence
  Description of Artificial Sequence: Synthetic oligonucleotide
aguggcuccgcaucaccau

SEQ ID NO: 1625462 - RNA, 19 nt, Artificial Sequence
  Description of Artificial Sequence: Synthetic oligonucleotide
agacgagccuggucccgac

SEQ ID NO: 1625463 - RNA, 19 nt, Artificial Sequence
  Description of Artificial Sequence: Synthetic oligonucleotide
gguuagguuagggaaguuc

SEQ ID NO: 1625464 - RNA, 19 nt, Artificial Sequence
  Description of Artificial Sequence: Synthetic oligonucleotide
guggcugcgcaucacuguc

SEQ ID NO: 1625465 - RNA, 19 nt, Artificial Sequence
  Description of Artificial Sequence: Synthetic oligonucleotide
agugccugcgcaucaccau

SEQ ID NO: 1625466 - RNA, 19 nt, Artificial Sequence
  Description of Artificial Sequence: Synthetic oligonucleotide
ucgccuguaucuucuugau

SEQ ID NO: 1625467 - RNA, 19 nt, Artificial Sequence
  Description of Artificial Sequence: Synthetic oligonucleotide
cuacgacagcccauacgug

SEQ ID NO: 1625468 - RNA, 19 nt, Artificial Sequence
  Description of Artificial Sequence: Synthetic oligonucleotide
uggaccgcaugcucccggc

SEQ ID NO: 1625469 - RNA, 19 nt, Artificial Sequence
  Description of Artificial Sequence: Synthetic oligonucleotide
ggcuacggcagccauggac

SEQ ID NO: 1625470 - RNA, 19 nt, Artificial Sequence
  Description of Artificial Sequence: Synthetic oligonucleotide
agcccagacgagccugguc

SEQ ID NO: 1625471 - RNA, 19 nt, Artificial Sequence
  Description of Artificial Sequence: Synthetic oligonucleotide
cuccaguccuaacuagguc

SEQ ID NO: 1625472 - RNA, 19 nt, Artificial Sequence
  Description of Artificial Sequence: Synthetic oligonucleotide
caccugccggcccugagug

SEQ ID NO: 1625473 - RNA, 19 nt, Artificial Sequence
  Description of Artificial Sequence: Synthetic oligonucleotide
gcggcuacggcagccaugg

SEQ ID NO: 1625474 - RNA, 19 nt, Artificial Sequence
  Description of Artificial Sequence: Synthetic oligonucleotide
gcaugcucccggcaggucc

SEQ ID NO: 1625475 - RNA, 19 nt, Artificial Sequence
  Description of Artificial Sequence: Synthetic oligonucleotide
ggaaguucucucgcugccg

SEQ ID NO: 1625476 - RNA, 19 nt, Artificial Sequence
  Description of Artificial Sequence: Synthetic oligonucleotide
aggcuguccaccccuugga

SEQ ID NO: 1625477 - RNA, 19 nt, Artificial Sequence
  Description of Artificial Sequence: Synthetic oligonucleotide
ggcugcgacagcccagacg

SEQ ID NO: 1625478 - RNA, 19 nt, Artificial Sequence
  Description of Artificial Sequence: Synthetic oligonucleotide
guggcuccgcaucaccaug

SEQ ID NO: 1625479 - RNA, 19 nt, Artificial Sequence
  Description of Artificial Sequence: Synthetic oligonucleotide
caucacugucacgcgcugg

SEQ ID NO: 1625480 - RNA, 19 nt, Artificial Sequence
  Description of Artificial Sequence: Synthetic oligonucleotide
auggcacggcuacgacagc

SEQ ID NO: 1625481 - RNA, 19 nt, Artificial Sequence
  Description of Artificial Sequence: Synthetic oligonucleotide
  modified_base (4)..(4): a, c, u, g, unknown or other
  modified_base (6)..(6): a, c, u, g, unknown or other
cuununuccucuucuucuu

SEQ ID NO: 1625482 - RNA, 19 nt, Artificial Sequence
  Description of Artificial Sequence: Synthetic oligonucleotide
gugauggcucggcugcggc

SEQ ID NO: 1625483 - RNA, 19 nt, Artificial Sequence
  Description of Artificial Sequence: Synthetic oligonucleotide
ccuccuauagaggaaggac

SEQ ID NO: 1625484 - RNA, 19 nt, Artificial Sequence
  Description of Artificial Sequence: Synthetic oligonucleotide
gacccgccggcccugggug

SEQ ID NO: 1625485 - RNA, 19 nt, Artificial Sequence
  Description of Artificial Sequence: Synthetic oligonucleotide
uggcagugccugcgcauca

SEQ ID NO: 1625486 - RNA, 19 nt, Artificial Sequence
  Description of Artificial Sequence: Synthetic oligonucleotide
guuucgucccgcugccuca

SEQ ID NO: 1625487 - RNA, 19 nt, Artificial Sequence
  Description of Artificial Sequence: Synthetic oligonucleotide
caccaugacccgccggccc

SEQ ID NO: 1625488 - RNA, 19 nt, Artificial Sequence
  Description of Artificial Sequence: Synthetic oligonucleotide
ggccuucccaguugguuag

SEQ ID NO: 1625489 - RNA, 19 nt, Artificial Sequence
  Description of Artificial Sequence: Synthetic oligonucleotide
aggacucguacaccaggaa

SEQ ID NO: 1625490 - RNA, 19 nt, Artificial Sequence
  Description of Artificial Sequence: Synthetic oligonucleotide
cucccgccuauagaggaag

SEQ ID NO: 1625491 - RNA, 19 nt, Artificial Sequence
  Description of Artificial Sequence: Synthetic oligonucleotide
cauucgugccuggucccgg

SEQ ID NO: 1625492 - RNA, 19 nt, Artificial Sequence
  Description of Artificial Sequence: Synthetic oligonucleotide
gcagguccaguacaccuug

SEQ ID NO: 1625493 - RNA, 19 nt, Artificial Sequence
  Description of Artificial Sequence: Synthetic oligonucleotide
gggcguuucgucccgcugc

SEQ ID NO: 1625494 - RNA, 19 nt, Artificial Sequence
  Description of Artificial Sequence: Synthetic oligonucleotide
ucgugccuggucccggcac

SEQ ID NO: 1625495 - RNA, 19 nt, Artificial Sequence
  Description of Artificial Sequence: Synthetic oligonucleotide
uacccaugucaggugggug

SEQ ID NO: 1625496 - RNA, 19 nt, Artificial Sequence
  Description of Artificial Sequence: Synthetic oligonucleotide
  modified_base (7)..(7): a, c, u, g, unknown or other
  modified_base (9)..(9): a, c, u, g, unknown or other
cuucuununuccucuucuu

SEQ ID NO: 1625497 - RNA, 19 nt, Artificial Sequence
  Description of Artificial Sequence: Synthetic oligonucleotide
ugacccgccggcccugggu

SEQ ID NO: 1625498 - RNA, 19 nt, Artificial Sequence
  Description of Artificial Sequence: Synthetic oligonucleotide
ccuggaccuacugagaguc

SEQ ID NO: 1625499 - RNA, 19 nt, Artificial Sequence
  Description of Artificial Sequence: Synthetic oligonucleotide
cuccaagggguguccgcag

SEQ ID NO: 1625500 - RNA, 19 nt, Artificial Sequence
  Description of Artificial Sequence: Synthetic oligonucleotide
gagugauggcucggcugcg

SEQ ID NO: 1625501 - RNA, 19 nt, Artificial Sequence
  Description of Artificial Sequence: Synthetic oligonucleotide
acggcagccauggaccgca

SEQ ID NO: 1625502 - RNA, 19 nt, Artificial Sequence
  Description of Artificial Sequence: Synthetic oligonucleotide
cucguuuucuggaccugga

SEQ ID NO: 1625503 - RNA, 19 nt, Artificial Sequence
  Description of Artificial Sequence: Synthetic oligonucleotide
gacagcccauacgugccug

SEQ ID NO: 1625504 - RNA, 19 nt, Artificial Sequence
  Description of Artificial Sequence: Synthetic oligonucleotide
uguccgcaggagcuccagu

SEQ ID NO: 1625505 - RNA, 19 nt, Artificial Sequence
  Description of Artificial Sequence: Synthetic oligonucleotide
gugauggcgcggcuacggc

SEQ ID NO: 1625506 - RNA, 19 nt, Artificial Sequence
  Description of Artificial Sequence: Synthetic oligonucleotide
gcucguuuucuggaccugg

SEQ ID NO: 1625507 - RNA, 19 nt, Artificial Sequence
  Description of Artificial Sequence: Synthetic oligonucleotide
uccuugcgcuucuuugcuc

SEQ ID NO: 1625508 - RNA, 19 nt, Artificial Sequence
  Description of Artificial Sequence: Synthetic oligonucleotide
gugauggcgcggcugcgac

SEQ ID NO: 1625509 - RNA, 19 nt, Artificial Sequence
  Description of Artificial Sequence: Synthetic oligonucleotide
caagggguguccgcaggag

SEQ ID NO: 1625510 - RNA, 19 nt, Artificial Sequence
  Description of Artificial Sequence: Synthetic oligonucleotide
ggcugcggcagcccauucg

SEQ ID NO: 1625511 - RNA, 19 nt, Artificial Sequence
  Description of Artificial Sequence: Synthetic oligonucleotide
gugccugcgcaucaccauc

SEQ ID NO: 1625512 - RNA, 19 nt, Artificial Sequence
  Description of Artificial Sequence: Synthetic oligonucleotide
ucucccgcuuguagaggaa

SEQ ID NO: 1625513 - RNA, 19 nt, Artificial Sequence
  Description of Artificial Sequence: Synthetic oligonucleotide
gugauggcacggcuacgac

SEQ ID NO: 1625514 - RNA, 19 nt, Artificial Sequence
  Description of Artificial Sequence: Synthetic oligonucleotide
cagguccaguacaccuugc

SEQ ID NO: 1625515 - RNA, 19 nt, Artificial Sequence
  Description of Artificial Sequence: Synthetic oligonucleotide
guugcuuucucccgccuau

SEQ ID NO: 1625516 - RNA, 19 nt, Artificial Sequence
  Description of Artificial Sequence: Synthetic oligonucleotide
uggcgcggcugcgacagcc

SEQ ID NO: 1625517 - RNA, 19 nt, Artificial Sequence
  Description of Artificial Sequence: Synthetic oligonucleotide
ugcucguuuucuggaccug

SEQ ID NO: 1625518 - RNA, 19 nt, Artificial Sequence
  Description of Artificial Sequence: Synthetic oligonucleotide
ugauggcgcggcugcgaca

SEQ ID NO: 1625519 - RNA, 19 nt, Artificial Sequence
  Description of Artificial Sequence: Synthetic oligonucleotide
cccgagaggggucuucagg

SEQ ID NO: 1625520 - RNA, 19 nt, Artificial Sequence
  Description of Artificial Sequence: Synthetic oligonucleotide
ucuuccccugcgguagaga

SEQ ID NO: 1625521 - RNA, 19 nt, Artificial Sequence
  Description of Artificial Sequence: Synthetic oligonucleotide
ccaguugguuagguuaggg

SEQ ID NO: 1625522 - RNA, 19 nt, Artificial Sequence
  Description of Artificial Sequence: Synthetic oligonucleotide
caugcucccggcaggucca

SEQ ID NO: 1625523 - RNA, 19 nt, Artificial Sequence
  Description of Artificial Sequence: Synthetic oligonucleotide
ccuaacuaggucaggugga

SEQ ID NO: 1625524 - RNA, 19 nt, Artificial Sequence
  Description of Artificial Sequence: Synthetic oligonucleotide
ucgccgggccugcaggccu

SEQ ID NO: 1625525 - RNA, 19 nt, Artificial Sequence
  Description of Artificial Sequence: Synthetic oligonucleotide
uggacuggaccuggaccug

SEQ ID NO: 1625526 - RNA, 19 nt, Artificial Sequence
  Description of Artificial Sequence: Synthetic oligonucleotide
ggaccuacugagagucagg

SEQ ID NO: 1625527 - RNA, 19 nt, Artificial Sequence
  Description of Artificial Sequence: Synthetic oligonucleotide
ggucccgacacauccagua

SEQ ID NO: 1625528 - RNA, 19 nt, Artificial Sequence
  Description of Artificial Sequence: Synthetic oligonucleotide
uggucccgacacauccagu

SEQ ID NO: 1625529 - RNA, 19 nt, Artificial Sequence
  Description of Artificial Sequence: Synthetic oligonucleotide
accuacugagagucagguu

SEQ ID NO: 1625530 - RNA, 19 nt, Artificial Sequence
  Description of Artificial Sequence: Synthetic oligonucleotide
ugggccuucccaguugguu

SEQ ID NO: 1625531 - RNA, 19 nt, Artificial Sequence
  Description of Artificial Sequence: Synthetic oligonucleotide
cuagagggguccucaggaa

SEQ ID NO: 1625532 - RNA, 19 nt, Artificial Sequence
  Description of Artificial Sequence: Synthetic oligonucleotide
cccguagcaugucuucagg

SEQ ID NO: 1625533 - RNA, 19 nt, Artificial Sequence
  Description of Artificial Sequence: Synthetic oligonucleotide
gacacauccaguacaccuu

SEQ ID NO: 1625534 - RNA, 19 nt, Artificial Sequence
  Description of Artificial Sequence: Synthetic oligonucleotide
caguccuaacuaggucagg

SEQ ID NO: 1625535 - RNA, 19 nt, Artificial Sequence
  Description of Artificial Sequence: Synthetic oligonucleotide
caggcuacccaugucaggu

SEQ ID NO: 1625536 - RNA, 19 nt, Artificial Sequence
  Description of Artificial Sequence: Synthetic oligonucleotide
acgugccuggucucggcaa

SEQ ID NO: 1625537 - RNA, 19 nt, Artificial Sequence
  Description of Artificial Sequence: Synthetic oligonucleotide
gcgguagagaggcugucca

SEQ ID NO: 1625538 - RNA, 19 nt, Artificial Sequence
  Description of Artificial Sequence: Synthetic oligonucleotide
guacacuuuauugccaguu

SEQ ID NO: 1625539 - RNA, 19 nt, Artificial Sequence
  Description of Artificial Sequence: Synthetic oligonucleotide
cuauagaggaaggacucau

SEQ ID NO: 1625540 - RNA, 19 nt, Artificial Sequence
  Description of Artificial Sequence: Synthetic oligonucleotide
ggguccucaggaacucugg

SEQ ID NO: 1625541 - RNA, 19 nt, Artificial Sequence
  Description of Artificial Sequence: Synthetic oligonucleotide
acggcuacgacagcccaua

SEQ ID NO: 1625542 - RNA, 19 nt, Artificial Sequence
  Description of Artificial Sequence: Synthetic oligonucleotide
gugugauggcacggcuacg

SEQ ID NO: 1625543 - RNA, 19 nt, Artificial Sequence
  Description of Artificial Sequence: Synthetic oligonucleotide
ggcguuucgucccgcugcc

SEQ ID NO: 1625544 - RNA, 19 nt, Artificial Sequence
  Description of Artificial Sequence: Synthetic oligonucleotide
uucgccucgccuguaucuu

SEQ ID NO: 1625545 - RNA, 19 nt, Artificial Sequence
  Description of Artificial Sequence: Synthetic oligonucleotide
uguccaccccuuggagcag

SEQ ID NO: 1625546 - RNA, 19 nt, Artificial Sequence
  Description of Artificial Sequence: Synthetic oligonucleotide
uacggcagccauggaccgc

SEQ ID NO: 1625547 - RNA, 19 nt, Artificial Sequence
  Description of Artificial Sequence: Synthetic oligonucleotide
cgcaucaccaugacccgcc

SEQ ID NO: 1625548 - RNA, 19 nt, Artificial Sequence
  Description of Artificial Sequence: Synthetic oligonucleotide
ggacuggaccuggaccugg

SEQ ID NO: 1625549 - RNA, 19 nt, Artificial Sequence
  Description of Artificial Sequence: Synthetic oligonucleotide
gcugcacuggcgcucccgc

SEQ ID NO: 1625550 - RNA, 19 nt, Artificial Sequence
  Description of Artificial Sequence: Synthetic oligonucleotide
ccaggcuacccaugucagg

SEQ ID NO: 1625551 - RNA, 19 nt, Artificial Sequence
  Description of Artificial Sequence: Synthetic oligonucleotide
gcggcagcccauucgugcc

SEQ ID NO: 1625552 - RNA, 19 nt, Artificial Sequence
  Description of Artificial Sequence: Synthetic oligonucleotide
gagggguccucaggaacuc

SEQ ID NO: 1625553 - RNA, 19 nt, Artificial Sequence
  Description of Artificial Sequence: Synthetic oligonucleotide
gcaguggcuccgcaucacc

SEQ ID NO: 1625554 - RNA, 19 nt, Artificial Sequence
  Description of Artificial Sequence: Synthetic oligonucleotide
gcgacagcccagacgagcc

SEQ ID NO: 1625555 - RNA, 19 nt, Artificial Sequence
  Description of Artificial Sequence: Synthetic oligonucleotide
ggggcguuucuugggaggc

SEQ ID NO: 1625556 - RNA, 19 nt, Artificial Sequence
  Description of Artificial Sequence: Synthetic oligonucleotide
gacgagccuggucccgaca

SEQ ID NO: 1625557 - RNA, 19 nt, Artificial Sequence
  Description of Artificial Sequence: Synthetic oligonucleotide
ccgccuauagaggaaggac

SEQ ID NO: 1625558 - RNA, 19 nt, Artificial Sequence
  Description of Artificial Sequence: Synthetic oligonucleotide
gaggggucuucaggaacuc

SEQ ID NO: 1625559 - RNA, 19 nt, Artificial Sequence
  Description of Artificial Sequence: Synthetic oligonucleotide
aggggucuucaggaacucu

SEQ ID NO: 1625560 - RNA, 19 nt, Artificial Sequence
  Description of Artificial Sequence: Synthetic oligonucleotide
ccauacgugccuggucucg

SEQ ID NO: 1625561 - RNA, 19 nt, Artificial Sequence
  Description of Artificial Sequence: Synthetic oligonucleotide
guggcagugccugcgcauc

SEQ ID NO: 1625562 - RNA, 19 nt, Artificial Sequence
  Description of Artificial Sequence: Synthetic oligonucleotide
accaggaaccggccuccaa

SEQ ID NO: 1625563 - RNA, 19 nt, Artificial Sequence
  Description of Artificial Sequence: Synthetic oligonucleotide
gcccauacgugccuggucu

SEQ ID NO: 1625564 - RNA, 19 nt, Artificial Sequence
  Description of Artificial Sequence: Synthetic oligonucleotide
augacccgccggcccuggg

SEQ ID NO: 1625565 - RNA, 19 nt, Artificial Sequence
  Description of Artificial Sequence: Synthetic oligonucleotide
gcgcaucacugucacgcgc

SEQ ID NO: 1625566 - RNA, 19 nt, Artificial Sequence
  Description of Artificial Sequence: Synthetic oligonucleotide
auggcgcggcugcgacagc

SEQ ID NO: 1625567 - RNA, 19 nt, Artificial Sequence
  Description of Artificial Sequence: Synthetic oligonucleotide
gcagugccugcgcaucacc

SEQ ID NO: 1625568 - RNA, 19 nt, Artificial Sequence
  Description of Artificial Sequence: Synthetic oligonucleotide
uggggccaucccacugagu

SEQ ID NO: 1625569 - RNA, 19 nt, Artificial Sequence
  Description of Artificial Sequence: Synthetic oligonucleotide
gguucucuuccccugcggu

SEQ ID NO: 1625570 - RNA, 19 nt, Artificial Sequence
  Description of Artificial Sequence: Synthetic oligonucleotide
gcacguccaguacaccuuc

SEQ ID NO: 1625571 - RNA, 19 nt, Artificial Sequence
  Description of Artificial Sequence: Synthetic oligonucleotide
gguggaugacaguggccuc

SEQ ID NO: 1625572 - RNA, 19 nt, Artificial Sequence
  Description of Artificial Sequence: Synthetic oligonucleotide
cccauucgugccugguccc

SEQ ID NO: 1625573 - RNA, 19 nt, Artificial Sequence
  Description of Artificial Sequence: Synthetic oligonucleotide
ggucucggcaaguccagua

SEQ ID NO: 1625574 - RNA, 19 nt, Artificial Sequence
  Description of Artificial Sequence: Synthetic oligonucleotide
ggcacggcuacgacagccc

SEQ ID NO: 1625575 - RNA, 19 nt, Artificial Sequence
  Description of Artificial Sequence: Synthetic oligonucleotide
cugggguccacauccuggu

SEQ ID NO: 1625576 - RNA, 19 nt, Artificial Sequence
  Description of Artificial Sequence: Synthetic oligonucleotide
cugcggcagcccauucgug

SEQ ID NO: 1625577 - RNA, 19 nt, Artificial Sequence
  Description of Artificial Sequence: Synthetic oligonucleotide
gcgcaucaccaucacccgc

SEQ ID NO: 1625578 - RNA, 19 nt, Artificial Sequence
  Description of Artificial Sequence: Synthetic oligonucleotide
ccugcgcaucaccaucacc

SEQ ID NO: 1625579 - RNA, 19 nt, Artificial Sequence
  Description of Artificial Sequence: Synthetic oligonucleotide
gguuccugaaaggauuccu

SEQ ID NO: 1625580 - RNA, 19 nt, Artificial Sequence
  Description of Artificial Sequence: Synthetic oligonucleotide
gcugcgcaucacugucacg

SEQ ID NO: 1625581 - RNA, 19 nt, Artificial Sequence
  Description of Artificial Sequence: Synthetic oligonucleotide
cccggcacguccaguacac

SEQ ID NO: 1625582 - RNA, 19 nt, Artificial Sequence
  Description of Artificial Sequence: Synthetic oligonucleotide
gggccuucccaguugguua

SEQ ID NO: 1625583 - RNA, 19 nt, Artificial Sequence
  Description of Artificial Sequence: Synthetic oligonucleotide
ggguuccugaaaggauucc

SEQ ID NO: 1625584 - RNA, 19 nt, Artificial Sequence
  Description of Artificial Sequence: Synthetic oligonucleotide
cuggaccuacugagaguca

SEQ ID NO: 1625585 - RNA, 19 nt, Artificial Sequence
  Description of Artificial Sequence: Synthetic oligonucleotide
cugcgacagcccagacgag

SEQ ID NO: 1625586 - RNA, 19 nt, Artificial Sequence
  Description of Artificial Sequence: Synthetic oligonucleotide
cuaacuaggucagguggau

SEQ ID NO: 1625587 - RNA, 19 nt, Artificial Sequence
  Description of Artificial Sequence: Synthetic oligonucleotide
gucacgcgcuggcccuggg

SEQ ID NO: 1625588 - RNA, 19 nt, Artificial Sequence
  Description of Artificial Sequence: Synthetic oligonucleotide
agccuggucccgacacauc

SEQ ID NO: 1625589 - RNA, 19 nt, Artificial Sequence
  Description of Artificial Sequence: Synthetic oligonucleotide
uggcgcggcuacggcagcc

SEQ ID NO: 1625590 - RNA, 19 nt, Artificial Sequence
  Description of Artificial Sequence: Synthetic oligonucleotide
ccuguacaggaaggacucg

SEQ ID NO: 1625591 - RNA, 19 nt, Artificial Sequence
  Description of Artificial Sequence: Synthetic oligonucleotide
ggucccggcacguccagua

SEQ ID NO: 1625592 - RNA, 19 nt, Artificial Sequence
  Description of Artificial Sequence: Synthetic oligonucleotide
ccgcuuguagaggaaggac

SEQ ID NO: 1625593 - RNA, 19 nt, Artificial Sequence
  Description of Artificial Sequence: Synthetic oligonucleotide
uugcgcuucuuugcucguu

SEQ ID NO: 1625594 - RNA, 19 nt, Artificial Sequence
  Description of Artificial Sequence: Synthetic oligonucleotide
ggggcguuucgucccgcug

SEQ ID NO: 1625595 - RNA, 19 nt, Artificial Sequence
  Description of Artificial Sequence: Synthetic oligonucleotide
ccguagcaugucuucagga

SEQ ID NO: 1625596 - RNA, 19 nt, Artificial Sequence
  Description of Artificial Sequence: Synthetic oligonucleotide
ugguuagguuagggaaguu

SEQ ID NO: 1625597 - RNA, 19 nt, Artificial Sequence
  Description of Artificial Sequence: Synthetic oligonucleotide
ggcugcacuggcgcucccg

SEQ ID NO: 1625598 - RNA, 19 nt, Artificial Sequence
  Description of Artificial Sequence: Synthetic oligonucleotide
gcugcggcagcccauucgu

SEQ ID NO: 1625599 - RNA, 19 nt, Artificial Sequence
  Description of Artificial Sequence: Synthetic oligonucleotide
agggguccucaggaacucu

SEQ ID NO: 1625600 - RNA, 19 nt, Artificial Sequence
  Description of Artificial Sequence: Synthetic oligonucleotide
ccauucgugccuggucccg

SEQ ID NO: 1625601 - RNA, 19 nt, Artificial Sequence
  Description of Artificial Sequence: Synthetic oligonucleotide
cucaaggggccgauaccgu

SEQ ID NO: 1625602 - RNA, 19 nt, Artificial Sequence
  Description of Artificial Sequence: Synthetic oligonucleotide
ggguguccgcaggagcucc

SEQ ID NO: 1625603 - RNA, 19 nt, Artificial Sequence
  Description of Artificial Sequence: Synthetic oligonucleotide
gagccuggucccgacacau

SEQ ID NO: 1625604 - RNA, 19 nt, Artificial Sequence
  Description of Artificial Sequence: Synthetic oligonucleotide
ccucgccuguaucuucuug

SEQ ID NO: 1625605 - RNA, 19 nt, Artificial Sequence
  Description of Artificial Sequence: Synthetic oligonucleotide
gcagcccauucgugccugg

SEQ ID NO: 1625606 - RNA, 19 nt, Artificial Sequence
  Description of Artificial Sequence: Synthetic oligonucleotide
cguuucgucccgcugccuc

SEQ ID NO: 1625607 - RNA, 19 nt, Artificial Sequence
  Description of Artificial Sequence: Synthetic oligonucleotide
ggcguuucuugggaggcaa

SEQ ID NO: 1625608 - RNA, 19 nt, Artificial Sequence
  Description of Artificial Sequence: Synthetic oligonucleotide
cccugugugauggcacggc

SEQ ID NO: 1625609 - RNA, 19 nt, Artificial Sequence
  Description of Artificial Sequence: Synthetic oligonucleotide
cugcgguagagaggcuguc

SEQ ID NO: 1625610 - RNA, 19 nt, Artificial Sequence
  Description of Artificial Sequence: Synthetic oligonucleotide
gggccgauaccguaccacu

SEQ ID NO: 1625611 - RNA, 19 nt, Artificial Sequence
  Description of Artificial Sequence: Synthetic oligonucleotide
ccggcccugggugauggcg

SEQ ID NO: 1625612 - RNA, 19 nt, Artificial Sequence
  Description of Artificial Sequence: Synthetic oligonucleotide
gcccugugugauggcacgg

SEQ ID NO: 1625613 - RNA, 19 nt, Artificial Sequence
  Description of Artificial Sequence: Synthetic oligonucleotide
cagacgagccuggucccga

SEQ ID NO: 1625614 - RNA, 19 nt, Artificial Sequence
  Description of Artificial Sequence: Synthetic oligonucleotide
cccaguugguuagguuagg

SEQ ID NO: 1625615 - RNA, 19 nt, Artificial Sequence
  Description of Artificial Sequence: Synthetic oligonucleotide
cccgcugccucagagucuc

SEQ ID NO: 1625616 - RNA, 19 nt, Artificial Sequence
  Description of Artificial Sequence: Synthetic oligonucleotide
ggccgauaccguaccacuc

SEQ ID NO: 1625617 - RNA, 19 nt, Artificial Sequence
  Description of Artificial Sequence: Synthetic oligonucleotide
gcaugucuucaggaacuca

SEQ ID NO: 1625618 - RNA, 19 nt, Artificial Sequence
  Description of Artificial Sequence: Synthetic oligonucleotide
gcacggcuacgacagccca

SEQ ID NO: 1625619 - RNA, 19 nt, Artificial Sequence
  Description of Artificial Sequence: Synthetic oligonucleotide
ggcagcccauucgugccug

SEQ ID NO: 1625620 - RNA, 19 nt, Artificial Sequence
  Description of Artificial Sequence: Synthetic oligonucleotide
cgugccuggucucggcaag

SEQ ID NO: 1625621 - RNA, 19 nt, Artificial Sequence
  Description of Artificial Sequence: Synthetic oligonucleotide
agucaccugccggcccuga

SEQ ID NO: 1625622 - RNA, 19 nt, Artificial Sequence
  Description of Artificial Sequence: Synthetic oligonucleotide
cuugcgcuucuuugcucgu

SEQ ID NO: 1625623 - RNA, 19 nt, Artificial Sequence
  Description of Artificial Sequence: Synthetic oligonucleotide
cugucacgcgcuggcccug

SEQ ID NO: 1625624 - RNA, 19 nt, Artificial Sequence
  Description of Artificial Sequence: Synthetic oligonucleotide
gaccuggacuggaccugga

SEQ ID NO: 1625625 - RNA, 19 nt, Artificial Sequence
  Description of Artificial Sequence: Synthetic oligonucleotide
ggagcaguguguccucaau

SEQ ID NO: 1625626 - RNA, 19 nt, Artificial Sequence
  Description of Artificial Sequence: Synthetic oligonucleotide
caauucgccucgccuguau

SEQ ID NO: 1625627 - RNA, 19 nt, Artificial Sequence
  Description of Artificial Sequence: Synthetic oligonucleotide
cgauaccguaccacuccug

SEQ ID NO: 1625628 - RNA, 19 nt, Artificial Sequence
  Description of Artificial Sequence: Synthetic oligonucleotide
gcucccggcagguccagua

SEQ ID NO: 1625629 - RNA, 19 nt, Artificial Sequence
  Description of Artificial Sequence: Synthetic oligonucleotide
ccgacacauccaguacacc

SEQ ID NO: 1625630 - RNA, 19 nt, Artificial Sequence
  Description of Artificial Sequence: Synthetic oligonucleotide
ggcaguggcuccgcaucac

SEQ ID NO: 1625631 - RNA, 19 nt, Artificial Sequence
  Description of Artificial Sequence: Synthetic oligonucleotide
ccguaccacuccuggugug

SEQ ID NO: 1625632 - RNA, 19 nt, Artificial Sequence
  Description of Artificial Sequence: Synthetic oligonucleotide
ccaagggguguccgcagga

SEQ ID NO: 1625633 - RNA, 19 nt, Artificial Sequence
  Description of Artificial Sequence: Synthetic oligonucleotide
ccuccaagggguguccgca

SEQ ID NO: 1625634 - RNA, 19 nt, Artificial Sequence
  Description of Artificial Sequence: Synthetic oligonucleotide
ggccccucuggggccaucc

SEQ ID NO: 1625635 - RNA, 19 nt, Artificial Sequence
  Description of Artificial Sequence: Synthetic oligonucleotide
ccaguacaccuugcucccc

SEQ ID NO: 1625636 - RNA, 19 nt, Artificial Sequence
  Description of Artificial Sequence: Synthetic oligonucleotide
gccuucccaguugguuagg

SEQ ID NO: 1625637 - RNA, 19 nt, Artificial Sequence
  Description of Artificial Sequence: Synthetic oligonucleotide
cgccuguaucuucuugaug

SEQ ID NO: 1625638 - RNA, 19 nt, Artificial Sequence
  Description of Artificial Sequence: Synthetic oligonucleotide
ccucagagucuccaguccu

SEQ ID NO: 1625639 - RNA, 19 nt, Artificial Sequence
  Description of Artificial Sequence: Synthetic oligonucleotide
ugccuggucccggcacguc

SEQ ID NO: 1625640 - RNA, 19 nt, Artificial Sequence
  Description of Artificial Sequence: Synthetic oligonucleotide
ggaccgcaugcucccggca

SEQ ID NO: 1625641 - RNA, 19 nt, Artificial Sequence
  Description of Artificial Sequence: Synthetic oligonucleotide
gccugcgcaucaccaucac

SEQ ID NO: 1625642 - RNA, 19 nt, Artificial Sequence
  Description of Artificial Sequence: Synthetic oligonucleotide
ccgcaucaccaugacccgc

SEQ ID NO: 1625643 - RNA, 19 nt, Artificial Sequence
  Description of Artificial Sequence: Synthetic oligonucleotide
ggcaguggcugcgcaucac

SEQ ID NO: 1625644 - RNA, 19 nt, Artificial Sequence
  Description of Artificial Sequence: Synthetic oligonucleotide
cugaguggggccggggcgu

SEQ ID NO: 1625645 - RNA, 19 nt, Artificial Sequence
  Description of Artificial Sequence: Synthetic oligonucleotide
cacguccaguacaccuucu

SEQ ID NO: 1625646 - RNA, 19 nt, Artificial Sequence
  Description of Artificial Sequence: Synthetic oligonucleotide
cccuccuauagaggaagga

SEQ ID NO: 1625647 - RNA, 19 nt, Artificial Sequence
  Description of Artificial Sequence: Synthetic oligonucleotide
cgcaucaccaucacccgcu

SEQ ID NO: 1625648 - RNA, 19 nt, Artificial Sequence
  Description of Artificial Sequence: Synthetic oligonucleotide
ggcgcggcugcgacagccc

SEQ ID NO: 1625649 - RNA, 19 nt, Artificial Sequence
  Description of Artificial Sequence: Synthetic oligonucleotide
ccggcagguccaguacacc

SEQ ID NO: 1625650 - RNA, 19 nt, Artificial Sequence
  Description of Artificial Sequence: Synthetic oligonucleotide
cacggcuacgacagcccau

SEQ ID NO: 1625651 - RNA, 19 nt, Artificial Sequence
  Description of Artificial Sequence: Synthetic oligonucleotide
caccagcuacuuucucccu

SEQ ID NO: 1625652 - RNA, 19 nt, Artificial Sequence
  Description of Artificial Sequence: Synthetic oligonucleotide
gcucggcugcggcagccca

SEQ ID NO: 1625653 - RNA, 19 nt, Artificial Sequence
  Description of Artificial Sequence: Synthetic oligonucleotide
cagccauggaccgcaugcu

SEQ ID NO: 1625654 - RNA, 19 nt, Artificial Sequence
  Description of Artificial Sequence: Synthetic oligonucleotide
ccugcgguagagaggcugu

SEQ ID NO: 1625655 - RNA, 19 nt, Artificial Sequence
  Description of Artificial Sequence: Synthetic oligonucleotide
cccgccuauagaggaagga

SEQ ID NO: 1625656 - RNA, 19 nt, Artificial Sequence
  Description of Artificial Sequence: Synthetic oligonucleotide
caguugcuuucucccgccu

SEQ ID NO: 1625657 - RNA, 19 nt, Artificial Sequence
  Description of Artificial Sequence: Synthetic oligonucleotide
ggaacucaaggggccgaua

SEQ ID NO: 1625658 - RNA, 19 nt, Artificial Sequence
  Description of Artificial Sequence: Synthetic oligonucleotide
ggcacguccaguacaccuu

SEQ ID NO: 1625659 - RNA, 19 nt, Artificial Sequence
  Description of Artificial Sequence: Synthetic oligonucleotide
gggcguuucuugggaggca

SEQ ID NO: 1625660 - RNA, 19 nt, Artificial Sequence
  Description of Artificial Sequence: Synthetic oligonucleotide
ccugagugauggcucggcu

SEQ ID NO: 1625661 - RNA, 19 nt, Artificial Sequence
  Description of Artificial Sequence: Synthetic oligonucleotide
cgcggcuacggcagccaug

SEQ ID NO: 1625662 - RNA, 19 nt, Artificial Sequence
  Description of Artificial Sequence: Synthetic oligonucleotide
ggcagguccaguacaccuu

SEQ ID NO: 1625663 - RNA, 19 nt, Artificial Sequence
  Description of Artificial Sequence: Synthetic oligonucleotide
cgcggcugcgacagcccag

SEQ ID NO: 1625664 - RNA, 19 nt, Artificial Sequence
  Description of Artificial Sequence: Synthetic oligonucleotide
gagaggcuguccaccccuu

SEQ ID NO: 1625665 - RNA, 19 nt, Artificial Sequence
  Description of Artificial Sequence: Synthetic oligonucleotide
guccaccccuuggagcagu

SEQ ID NO: 1625666 - RNA, 19 nt, Artificial Sequence
  Description of Artificial Sequence: Synthetic oligonucleotide
ccgauaccguaccacuccu

SEQ ID NO: 1625667 - RNA, 19 nt, Artificial Sequence
  Description of Artificial Sequence: Synthetic oligonucleotide
cucggcugcggcagcccau

SEQ ID NO: 1625668 - RNA, 19 nt, Artificial Sequence
  Description of Artificial Sequence: Synthetic oligonucleotide
cggcacguccaguacaccu

SEQ ID NO: 1625669 - RNA, 19 nt, Artificial Sequence
  Description of Artificial Sequence: Synthetic oligonucleotide
cugggccuucccaguuggu

SEQ ID NO: 1625670 - RNA, 19 nt, Artificial Sequence
  Description of Artificial Sequence: Synthetic oligonucleotide
ccggcacguccaguacacc

SEQ ID NO: 1625671 - RNA, 19 nt, Artificial Sequence
  Description of Artificial Sequence: Synthetic oligonucleotide
gcguuucuugggaggcaaa

SEQ ID NO: 1625672 - RNA, 19 nt, Artificial Sequence
  Description of Artificial Sequence: Synthetic oligonucleotide
ccaugacccgccggcccug

SEQ ID NO: 1625673 - RNA, 19 nt, Artificial Sequence
  Description of Artificial Sequence: Synthetic oligonucleotide
cagcccauucgugccuggu

SEQ ID NO: 1625674 - RNA, 19 nt, Artificial Sequence
  Description of Artificial Sequence: Synthetic oligonucleotide
cgagccuggucccgacaca

SEQ ID NO: 1625675 - RNA, 19 nt, Artificial Sequence
  Description of Artificial Sequence: Synthetic oligonucleotide
cggcuacgacagcccauac

SEQ ID NO: 1625676 - RNA, 19 nt, Artificial Sequence
  Description of Artificial Sequence: Synthetic oligonucleotide
gcgcuucuuugcucguuuu

SEQ ID NO: 1625677 - RNA, 19 nt, Artificial Sequence
  Description of Artificial Sequence: Synthetic oligonucleotide
ccuucccaguugguuaggu

SEQ ID NO: 1625678 - RNA, 19 nt, Artificial Sequence
  Description of Artificial Sequence: Synthetic oligonucleotide
ccugccggcccugagugau

SEQ ID NO: 1625679 - RNA, 19 nt, Artificial Sequence
  Description of Artificial Sequence: Synthetic oligonucleotide
ccaauucgccucgccugua

SEQ ID NO: 1625680 - RNA, 19 nt, Artificial Sequence
  Description of Artificial Sequence: Synthetic oligonucleotide
ccggggcguuucgucccgc

SEQ ID NO: 1625681 - RNA, 19 nt, Artificial Sequence
  Description of Artificial Sequence: Synthetic oligonucleotide
cgacagcccauacgugccu

SEQ ID NO: 1625682 - RNA, 19 nt, Artificial Sequence
  Description of Artificial Sequence: Synthetic oligonucleotide
gcgcggcuacggcagccau

SEQ ID NO: 1625683 - RNA, 19 nt, Artificial Sequence
  Description of Artificial Sequence: Synthetic oligonucleotide
gcguuucgucccgcugccu

SEQ ID NO: 1625684 - RNA, 19 nt, Artificial Sequence
  Description of Artificial Sequence: Synthetic oligonucleotide
cggcugcggcagcccauuc

SEQ ID NO: 1625685 - RNA, 19 nt, Artificial Sequence
  Description of Artificial Sequence: Synthetic oligonucleotide
ccgccggcccugggugaug

SEQ ID NO: 1625686 - RNA, 19 nt, Artificial Sequence
  Description of Artificial Sequence: Synthetic oligonucleotide
ccaccccuuggagcagugu

SEQ ID NO: 1625687 - RNA, 19 nt, Artificial Sequence
  Description of Artificial Sequence: Synthetic oligonucleotide
cccgccggcccugggugau

SEQ ID NO: 1625688 - RNA, 19 nt, Artificial Sequence
  Description of Artificial Sequence: Synthetic oligonucleotide
aaccauucaaucuuuaccc

SEQ ID NO: 1625689 - RNA, 19 nt, Artificial Sequence
  Description of Artificial Sequence: Synthetic oligonucleotide
aaaccauucaaucuuuacc

SEQ ID NO: 1625690 - RNA, 19 nt, Artificial Sequence
  Description of Artificial Sequence: Synthetic oligonucleotide
aaaacuagacacuuccaac

SEQ ID NO: 1625691 - RNA, 19 nt, Artificial Sequence
  Description of Artificial Sequence: Synthetic oligonucleotide
uacuagagcaacuagaaag

SEQ ID NO: 1625692 - RNA, 19 nt, Artificial Sequence
  Description of Artificial Sequence: Synthetic oligonucleotide
aaaacuuucccagaaacag

SEQ ID NO: 1625693 - RNA, 19 nt, Artificial Sequence
  Description of Artificial Sequence: Synthetic oligonucleotide
cuuaauacacacuaagggc

SEQ ID NO: 1625694 - RNA, 19 nt, Artificial Sequence
  Description of Artificial Sequence: Synthetic oligonucleotide
aaaagcuuaauacacacua

SEQ ID NO: 1625695 - RNA, 19 nt, Artificial Sequence
  Description of Artificial Sequence: Synthetic oligonucleotide
uuaauacacacuaagggcu

SEQ ID NO: 1625696 - RNA, 19 nt, Artificial Sequence
  Description of Artificial Sequence: Synthetic oligonucleotide
uaacauaaagcccacuuag

SEQ ID NO: 1625697 - RNA, 19 nt, Artificial Sequence
  Description of Artificial Sequence: Synthetic oligonucleotide
gaggauugcaacuugaccc

SEQ ID NO: 1625698 - RNA, 19 nt, Artificial Sequence
  Description of Artificial Sequence: Synthetic oligonucleotide
aauagguaacauaaagccc

SEQ ID NO: 1625699 - RNA, 19 nt, Artificial Sequence
  Description of Artificial Sequence: Synthetic oligonucleotide
aaccuaaaaccauucaauc

SEQ ID NO: 1625700 - RNA, 19 nt, Artificial Sequence
  Description of Artificial Sequence: Synthetic oligonucleotide
ugagagaugaacaaaacua

SEQ ID NO: 1625701 - RNA, 19 nt, Artificial Sequence
  Description of Artificial Sequence: Synthetic oligonucleotide
auaaagcccacuuagaacu

SEQ ID NO: 1625702 - RNA, 19 nt, Artificial Sequence
  Description of Artificial Sequence: Synthetic oligonucleotide
aaaacgagggcuaagcagg

SEQ ID NO: 1625703 - RNA, 19 nt, Artificial Sequence
  Description of Artificial Sequence: Synthetic oligonucleotide
uuaauguccaaaagaggcg

SEQ ID NO: 1625704 - RNA, 19 nt, Artificial Sequence
  Description of Artificial Sequence: Synthetic oligonucleotide
accacaaacacauuucagg

SEQ ID NO: 1625705 - RNA, 19 nt, Artificial Sequence
  Description of Artificial Sequence: Synthetic oligonucleotide
aaagguuugaacagggaac

SEQ ID NO: 1625706 - RNA, 19 nt, Artificial Sequence
  Description of Artificial Sequence: Synthetic oligonucleotide
aaaucgaguauacagucca

SEQ ID NO: 1625707 - RNA, 19 nt, Artificial Sequence
  Description of Artificial Sequence: Synthetic oligonucleotide
acuuagaacuaacugcccc

SEQ ID NO: 1625708 - RNA, 19 nt, Artificial Sequence
  Description of Artificial Sequence: Synthetic oligonucleotide
auugcuaagaccuaacuaa

SEQ ID NO: 1625709 - RNA, 19 nt, Artificial Sequence
  Description of Artificial Sequence: Synthetic oligonucleotide
ugguugauugcuaagaccu

SEQ ID NO: 1625710 - RNA, 19 nt, Artificial Sequence
  Description of Artificial Sequence: Synthetic oligonucleotide
uaacuaaggaacuacaguc

SEQ ID NO: 1625711 - RNA, 19 nt, Artificial Sequence
  Description of Artificial Sequence: Synthetic oligonucleotide
acaauagguaacauaaagc

SEQ ID NO: 1625712 - RNA, 19 nt, Artificial Sequence
  Description of Artificial Sequence: Synthetic oligonucleotide
aaacagacagccauagggc

SEQ ID NO: 1625713 - RNA, 19 nt, Artificial Sequence
  Description of Artificial Sequence: Synthetic oligonucleotide
cuagauuccacauauccug

SEQ ID NO: 1625714 - RNA, 19 nt, Artificial Sequence
  Description of Artificial Sequence: Synthetic oligonucleotide
aaaauuucggcccacgaua

SEQ ID NO: 1625715 - RNA, 19 nt, Artificial Sequence
  Description of Artificial Sequence: Synthetic oligonucleotide
uaaagucacaguucagugg

SEQ ID NO: 1625716 - RNA, 19 nt, Artificial Sequence
  Description of Artificial Sequence: Synthetic oligonucleotide
gaguauacaguccaugcag

SEQ ID NO: 1625717 - RNA, 19 nt, Artificial Sequence
  Description of Artificial Sequence: Synthetic oligonucleotide
gcuuaauacacacuaaggg

SEQ ID NO: 1625718 - RNA, 19 nt, Artificial Sequence
  Description of Artificial Sequence: Synthetic oligonucleotide
aucaaugaccuuuaauguc

SEQ ID NO: 1625719 - RNA, 19 nt, Artificial Sequence
  Description of Artificial Sequence: Synthetic oligonucleotide
uacuuagagacccugacaa

SEQ ID NO: 1625720 - RNA, 19 nt, Artificial Sequence
  Description of Artificial Sequence: Synthetic oligonucleotide
aggaggguaauccacaaag

SEQ ID NO: 1625721 - RNA, 19 nt, Artificial Sequence
  Description of Artificial Sequence: Synthetic oligonucleotide
ugcucuaagagaacugagg

SEQ ID NO: 1625722 - RNA, 19 nt, Artificial Sequence
  Description of Artificial Sequence: Synthetic oligonucleotide
gauacaaugccagguaggg

SEQ ID NO: 1625723 - RNA, 19 nt, Artificial Sequence
  Description of Artificial Sequence: Synthetic oligonucleotide
uuacuugcgacacacacau

SEQ ID NO: 1625724 - RNA, 19 nt, Artificial Sequence
  Description of Artificial Sequence: Synthetic oligonucleotide
cacacuaagggcuugggag

SEQ ID NO: 1625725 - RNA, 19 nt, Artificial Sequence
  Description of Artificial Sequence: Synthetic oligonucleotide
ucucuuaacgacuguaccc

SEQ ID NO: 1625726 - RNA, 19 nt, Artificial Sequence
  Description of Artificial Sequence: Synthetic oligonucleotide
agaugaacaaaacuagaca

SEQ ID NO: 1625727 - RNA, 19 nt, Artificial Sequence
  Description of Artificial Sequence: Synthetic oligonucleotide
aaugagagaugaacaaaac

SEQ ID NO: 1625728 - RNA, 19 nt, Artificial Sequence
  Description of Artificial Sequence: Synthetic oligonucleotide
acagucaccagaaauuccc

SEQ ID NO: 1625729 - RNA, 19 nt, Artificial Sequence
  Description of Artificial Sequence: Synthetic oligonucleotide
gaugguugaggggagaggg

SEQ ID NO: 1625730 - RNA, 19 nt, Artificial Sequence
  Description of Artificial Sequence: Synthetic oligonucleotide
acuugcgacacacacauga

SEQ ID NO: 1625731 - RNA, 19 nt, Artificial Sequence
  Description of Artificial Sequence: Synthetic oligonucleotide
aguggaauauucucccugg

SEQ ID NO: 1625732 - RNA, 19 nt, Artificial Sequence
  Description of Artificial Sequence: Synthetic oligonucleotide
agagcaacuagaaagaagu

SEQ ID NO: 1625733 - RNA, 19 nt, Artificial Sequence
  Description of Artificial Sequence: Synthetic oligonucleotide
acagccauagggcaaauca

SEQ ID NO: 1625734 - RNA, 19 nt, Artificial Sequence
  Description of Artificial Sequence: Synthetic oligonucleotide
cuuagagacccugacaagg

SEQ ID NO: 1625735 - RNA, 19 nt, Artificial Sequence
  Description of Artificial Sequence: Synthetic oligonucleotide
uuuacuugcgacacacaca

SEQ ID NO: 1625736 - RNA, 19 nt, Artificial Sequence
  Description of Artificial Sequence: Synthetic oligonucleotide
ugcuaagaccuaacuaagg

SEQ ID NO: 1625737 - RNA, 19 nt, Artificial Sequence
  Description of Artificial Sequence: Synthetic oligonucleotide
uugaacagggaacucaguc

SEQ ID NO: 1625738 - RNA, 19 nt, Artificial Sequence
  Description of Artificial Sequence: Synthetic oligonucleotide
ucgaguauacaguccaugc

SEQ ID NO: 1625739 - RNA, 19 nt, Artificial Sequence
  Description of Artificial Sequence: Synthetic oligonucleotide
aaauuucggcccacgauac

SEQ ID NO: 1625740 - RNA, 19 nt, Artificial Sequence
  Description of Artificial Sequence: Synthetic oligonucleotide
uuugguugauugcuaagac

SEQ ID NO: 1625741 - RNA, 19 nt, Artificial Sequence
  Description of Artificial Sequence: Synthetic oligonucleotide
agagcauagauguggcagg

SEQ ID NO: 1625742 - RNA, 19 nt, Artificial Sequence
  Description of Artificial Sequence: Synthetic oligonucleotide
aaaccuaaaaccauucaau

SEQ ID NO: 1625743 - RNA, 19 nt, Artificial Sequence
  Description of Artificial Sequence: Synthetic oligonucleotide
ucucgugugugacauagcu

SEQ ID NO: 1625744 - RNA, 19 nt, Artificial Sequence
  Description of Artificial Sequence: Synthetic oligonucleotide
agcugccaaaauuucggcc

SEQ ID NO: 1625745 - RNA, 19 nt, Artificial Sequence
  Description of Artificial Sequence: Synthetic oligonucleotide
augagagaugaacaaaacu

SEQ ID NO: 1625746 - RNA, 19 nt, Artificial Sequence
  Description of Artificial Sequence: Synthetic oligonucleotide
auaaaggaggguaauccac

SEQ ID NO: 1625747 - RNA, 19 nt, Artificial Sequence
  Description of Artificial Sequence: Synthetic oligonucleotide
gacaucuucaccucggcca

SEQ ID NO: 1625748 - RNA, 19 nt, Artificial Sequence
  Description of Artificial Sequence: Synthetic oligonucleotide
auagcugccaaaauuucgg

SEQ ID NO: 1625749 - RNA, 19 nt, Artificial Sequence
  Description of Artificial Sequence: Synthetic oligonucleotide
ucucccugguacuagagca

SEQ ID NO: 1625750 - RNA, 19 nt, Artificial Sequence
  Description of Artificial Sequence: Synthetic oligonucleotide
gaugguaugacaccaaccu

SEQ ID NO: 1625751 - RNA, 19 nt, Artificial Sequence
  Description of Artificial Sequence: Synthetic oligonucleotide
acuagaaagaaguuugguu

SEQ ID NO: 1625752 - RNA, 19 nt, Artificial Sequence
  Description of Artificial Sequence: Synthetic oligonucleotide
cauaaagcccacuuagaac

SEQ ID NO: 1625753 - RNA, 19 nt, Artificial Sequence
  Description of Artificial Sequence: Synthetic oligonucleotide
uugcuaagaccuaacuaag

SEQ ID NO: 1625754 - RNA, 19 nt, Artificial Sequence
  Description of Artificial Sequence: Synthetic oligonucleotide
agugcaaaacagucccagc

SEQ ID NO: 1625755 - RNA, 19 nt, Artificial Sequence
  Description of Artificial Sequence: Synthetic oligonucleotide
ucccuucuaucccagaccc

SEQ ID NO: 1625756 - RNA, 19 nt, Artificial Sequence
  Description of Artificial Sequence: Synthetic oligonucleotide
uguccaagcuagaugguug

SEQ ID NO: 1625757 - RNA, 19 nt, Artificial Sequence
  Description of Artificial Sequence: Synthetic oligonucleotide
ugguacuagagcaacuaga

SEQ ID NO: 1625758 - RNA, 19 nt, Artificial Sequence
  Description of Artificial Sequence: Synthetic oligonucleotide
accuaaaaccauucaaucu

SEQ ID NO: 1625759 - RNA, 19 nt, Artificial Sequence
  Description of Artificial Sequence: Synthetic oligonucleotide
uaauccuaucccagcaucc

SEQ ID NO: 1625760 - RNA, 19 nt, Artificial Sequence
  Description of Artificial Sequence: Synthetic oligonucleotide
aggacgguaagacaagucu

SEQ ID NO: 1625761 - RNA, 19 nt, Artificial Sequence
  Description of Artificial Sequence: Synthetic oligonucleotide
ggguguccaagcuagaugg

SEQ ID NO: 1625762 - RNA, 19 nt, Artificial Sequence
  Description of Artificial Sequence: Synthetic oligonucleotide
agacacagcccuuacuuag

SEQ ID NO: 1625763 - RNA, 19 nt, Artificial Sequence
  Description of Artificial Sequence: Synthetic oligonucleotide
acgacuguaccccacccac

SEQ ID NO: 1625764 - RNA, 19 nt, Artificial Sequence
  Description of Artificial Sequence: Synthetic oligonucleotide
agcaacuccgccugcuugc

SEQ ID NO: 1625765 - RNA, 19 nt, Artificial Sequence
  Description of Artificial Sequence: Synthetic oligonucleotide
uugguugauugcuaagacc

SEQ ID NO: 1625766 - RNA, 19 nt, Artificial Sequence
  Description of Artificial Sequence: Synthetic oligonucleotide
ugcgacacacacaugaaau

SEQ ID NO: 1625767 - RNA, 19 nt, Artificial Sequence
  Description of Artificial Sequence: Synthetic oligonucleotide
ggaauauucucccugguac

SEQ ID NO: 1625768 - RNA, 19 nt, Artificial Sequence
  Description of Artificial Sequence: Synthetic oligonucleotide
uucaaucuuuacccaauga

SEQ ID NO: 1625769 - RNA, 19 nt, Artificial Sequence
  Description of Artificial Sequence: Synthetic oligonucleotide
uuacuuagagacccugaca

SEQ ID NO: 1625770 - RNA, 19 nt, Artificial Sequence
  Description of Artificial Sequence: Synthetic oligonucleotide
uuaacgacuguaccccacc

SEQ ID NO: 1625771 - RNA, 19 nt, Artificial Sequence
  Description of Artificial Sequence: Synthetic oligonucleotide
acauaaagcccacuuagaa

SEQ ID NO: 1625772 - RNA, 19 nt, Artificial Sequence
  Description of Artificial Sequence: Synthetic oligonucleotide
aaaagaggcguggaugcag

SEQ ID NO: 1625773 - RNA, 19 nt, Artificial Sequence
  Description of Artificial Sequence: Synthetic oligonucleotide
cuuacuuagagacccugac

SEQ ID NO: 1625774 - RNA, 19 nt, Artificial Sequence
  Description of Artificial Sequence: Synthetic oligonucleotide
uacccuagauuccacauau

SEQ ID NO: 1625775 - RNA, 19 nt, Artificial Sequence
  Description of Artificial Sequence: Synthetic oligonucleotide
aagugcuuugucucgugug

SEQ ID NO: 1625776 - RNA, 19 nt, Artificial Sequence
  Description of Artificial Sequence: Synthetic oligonucleotide
agcuuaauacacacuaagg

SEQ ID NO: 1625777 - RNA, 19 nt, Artificial Sequence
  Description of Artificial Sequence: Synthetic oligonucleotide
ucaccagaaauucccuugc

SEQ ID NO: 1625778 - RNA, 19 nt, Artificial Sequence
  Description of Artificial Sequence: Synthetic oligonucleotide
uccuaucccagcauccucc

SEQ ID NO: 1625779 - RNA, 19 nt, Artificial Sequence
  Description of Artificial Sequence: Synthetic oligonucleotide
ugucucgugugugacauag

SEQ ID NO: 1625780 - RNA, 19 nt, Artificial Sequence
  Description of Artificial Sequence: Synthetic oligonucleotide
uucagggucucuuaacgac

SEQ ID NO: 1625781 - RNA, 19 nt, Artificial Sequence
  Description of Artificial Sequence: Synthetic oligonucleotide
aagaaucaaggggacacug

SEQ ID NO: 1625782 - RNA, 19 nt, Artificial Sequence
  Description of Artificial Sequence: Synthetic oligonucleotide
cucuuaacgacuguacccc

SEQ ID NO: 1625783 - RNA, 19 nt, Artificial Sequence
  Description of Artificial Sequence: Synthetic oligonucleotide
gacuugaagaggaggauug

SEQ ID NO: 1625784 - RNA, 19 nt, Artificial Sequence
  Description of Artificial Sequence: Synthetic oligonucleotide
aagcuagaugguugagggg

SEQ ID NO: 1625785 - RNA, 19 nt, Artificial Sequence
  Description of Artificial Sequence: Synthetic oligonucleotide
acgauacaaugccagguag

SEQ ID NO: 1625786 - RNA, 19 nt, Artificial Sequence
  Description of Artificial Sequence: Synthetic oligonucleotide
aggguuauauuucugucaa

SEQ ID NO: 1625787 - RNA, 19 nt, Artificial Sequence
  Description of Artificial Sequence: Synthetic oligonucleotide
gcaacuagaaagaaguuug

SEQ ID NO: 1625788 - RNA, 19 nt, Artificial Sequence
  Description of Artificial Sequence: Synthetic oligonucleotide
cccacuuagaacuaacugc

SEQ ID NO: 1625789 - RNA, 19 nt, Artificial Sequence
  Description of Artificial Sequence: Synthetic oligonucleotide
acaccaaccuguccucacc

SEQ ID NO: 1625790 - RNA, 19 nt, Artificial Sequence
  Description of Artificial Sequence: Synthetic oligonucleotide
gaggcguggaugcagagca

SEQ ID NO: 1625791 - RNA, 19 nt, Artificial Sequence
  Description of Artificial Sequence: Synthetic oligonucleotide
gacaaggacgguaagacaa

SEQ ID NO: 1625792 - RNA, 19 nt, Artificial Sequence
  Description of Artificial Sequence: Synthetic oligonucleotide
ccacuuagaacuaacugcc

SEQ ID NO: 1625793 - RNA, 19 nt, Artificial Sequence
  Description of Artificial Sequence: Synthetic oligonucleotide
gaaaucgaguauacagucc

SEQ ID NO: 1625794 - RNA, 19 nt, Artificial Sequence
  Description of Artificial Sequence: Synthetic oligonucleotide
cuaaggaacuacagucacc

SEQ ID NO: 1625795 - RNA, 19 nt, Artificial Sequence
  Description of Artificial Sequence: Synthetic oligonucleotide
aauggcaguauggccaucu

SEQ ID NO: 1625796 - RNA, 19 nt, Artificial Sequence
  Description of Artificial Sequence: Synthetic oligonucleotide
cugacaaggacgguaagac

SEQ ID NO: 1625797 - RNA, 19 nt, Artificial Sequence
  Description of Artificial Sequence: Synthetic oligonucleotide
gucaagcuaauccuauccc

SEQ ID NO: 1625798 - RNA, 19 nt, Artificial Sequence
  Description of Artificial Sequence: Synthetic oligonucleotide
caaucuuuacccaaugaaa

SEQ ID NO: 1625799 - RNA, 19 nt, Artificial Sequence
  Description of Artificial Sequence: Synthetic oligonucleotide
augaaaucgaguauacagu

SEQ ID NO: 1625800 - RNA, 19 nt, Artificial Sequence
  Description of Artificial Sequence: Synthetic oligonucleotide
ccaaguaaaauagaugaag

SEQ ID NO: 1625801 - RNA, 19 nt, Artificial Sequence
  Description of Artificial Sequence: Synthetic oligonucleotide
acgagggcuaagcagggag

SEQ ID NO: 1625802 - RNA, 19 nt, Artificial Sequence
  Description of Artificial Sequence: Synthetic oligonucleotide
acuagagcaacuagaaaga

SEQ ID NO: 1625803 - RNA, 19 nt, Artificial Sequence
  Description of Artificial Sequence: Synthetic oligonucleotide
ucagggucucuuaacgacu

SEQ ID NO: 1625804 - RNA, 19 nt, Artificial Sequence
  Description of Artificial Sequence: Synthetic oligonucleotide
aggauugcaacuugaccca

SEQ ID NO: 1625805 - RNA, 19 nt, Artificial Sequence
  Description of Artificial Sequence: Synthetic oligonucleotide
uuugucucgugugugacau

SEQ ID NO: 1625806 - RNA, 19 nt, Artificial Sequence
  Description of Artificial Sequence: Synthetic oligonucleotide
cuagaaagaaguuugguuu

SEQ ID NO: 1625807 - RNA, 19 nt, Artificial Sequence
  Description of Artificial Sequence: Synthetic oligonucleotide
cacaugaaaucgaguauac

SEQ ID NO: 1625808 - RNA, 19 nt, Artificial Sequence
  Description of Artificial Sequence: Synthetic oligonucleotide
cacaccacaaacacauuuc

SEQ ID NO: 1625809 - RNA, 19 nt, Artificial Sequence
  Description of Artificial Sequence: Synthetic oligonucleotide
aagaccuaacuaaggaacu

SEQ ID NO: 1625810 - RNA, 19 nt, Artificial Sequence
  Description of Artificial Sequence: Synthetic oligonucleotide
gacccaaguaaaauagaug

SEQ ID NO: 1625811 - RNA, 19 nt, Artificial Sequence
  Description of Artificial Sequence: Synthetic oligonucleotide
accagaaauucccuugcca

SEQ ID NO: 1625812 - RNA, 19 nt, Artificial Sequence
  Description of Artificial Sequence: Synthetic oligonucleotide
agcuaauccuaucccagca

SEQ ID NO: 1625813 - RNA, 19 nt, Artificial Sequence
  Description of Artificial Sequence: Synthetic oligonucleotide
cuaauccuaucccagcauc

SEQ ID NO: 1625814 - RNA, 19 nt, Artificial Sequence
  Description of Artificial Sequence: Synthetic oligonucleotide
caugacgucuggcuggaag

SEQ ID NO: 1625815 - RNA, 19 nt, Artificial Sequence
  Description of Artificial Sequence: Synthetic oligonucleotide
aaaagucaagcuaauccua

SEQ ID NO: 1625816 - RNA, 19 nt, Artificial Sequence
  Description of Artificial Sequence: Synthetic oligonucleotide
agccauagggcaaaucagg

SEQ ID NO: 1625817 - RNA, 19 nt, Artificial Sequence
  Description of Artificial Sequence: Synthetic oligonucleotide
aacauaaagcccacuuaga

SEQ ID NO: 1625818 - RNA, 19 nt, Artificial Sequence
  Description of Artificial Sequence: Synthetic oligonucleotide
gugcaaaacagucccagca

SEQ ID NO: 1625819 - RNA, 19 nt, Artificial Sequence
  Description of Artificial Sequence: Synthetic oligonucleotide
uggaauauucucccuggua

SEQ ID NO: 1625820 - RNA, 19 nt, Artificial Sequence
  Description of Artificial Sequence: Synthetic oligonucleotide
uucucccugguacuagagc

SEQ ID NO: 1625821 - RNA, 19 nt, Artificial Sequence
  Description of Artificial Sequence: Synthetic oligonucleotide
auauacccuagauuccaca

SEQ ID NO: 1625822 - RNA, 19 nt, Artificial Sequence
  Description of Artificial Sequence: Synthetic oligonucleotide
aaggacgguaagacaaguc

SEQ ID NO: 1625823 - RNA, 19 nt, Artificial Sequence
  Description of Artificial Sequence: Synthetic oligonucleotide
aauccuaucccagcauccu

SEQ ID NO: 1625824 - RNA, 19 nt, Artificial Sequence
  Description of Artificial Sequence: Synthetic oligonucleotide
aacgacuguaccccaccca

SEQ ID NO: 1625825 - RNA, 19 nt, Artificial Sequence
  Description of Artificial Sequence: Synthetic oligonucleotide
acagccauuggagaggacu

SEQ ID NO: 1625826 - RNA, 19 nt, Artificial Sequence
  Description of Artificial Sequence: Synthetic oligonucleotide
augacaccaaccuguccuc

SEQ ID NO: 1625827 - RNA, 19 nt, Artificial Sequence
  Description of Artificial Sequence: Synthetic oligonucleotide
aauacacacuaagggcuug

SEQ ID NO: 1625828 - RNA, 19 nt, Artificial Sequence
  Description of Artificial Sequence: Synthetic oligonucleotide
aaacuuucccagaaacaga

SEQ ID NO: 1625829 - RNA, 19 nt, Artificial Sequence
  Description of Artificial Sequence: Synthetic oligonucleotide
gaagaauaaaggaggguaa

SEQ ID NO: 1625830 - RNA, 19 nt, Artificial Sequence
  Description of Artificial Sequence: Synthetic oligonucleotide
ccaaaagaggcguggaugc

SEQ ID NO: 1625831 - RNA, 19 nt, Artificial Sequence
  Description of Artificial Sequence: Synthetic oligonucleotide
aacagggaacucagucacc

SEQ ID NO: 1625832 - RNA, 19 nt, Artificial Sequence
  Description of Artificial Sequence: Synthetic oligonucleotide
agggcaaauggcaguaugg

SEQ ID NO: 1625833 - RNA, 19 nt, Artificial Sequence
  Description of Artificial Sequence: Synthetic oligonucleotide
augguaugacaccaaccug

SEQ ID NO: 1625834 - RNA, 19 nt, Artificial Sequence
  Description of Artificial Sequence: Synthetic oligonucleotide
aaagcuuaauacacacuaa

SEQ ID NO: 1625835 - RNA, 19 nt, Artificial Sequence
  Description of Artificial Sequence: Synthetic oligonucleotide
aaucaggguguccaagcua

SEQ ID NO: 1625836 - RNA, 19 nt, Artificial Sequence
  Description of Artificial Sequence: Synthetic oligonucleotide
acuacagucaccagaaauu

SEQ ID NO: 1625837 - RNA, 19 nt, Artificial Sequence
  Description of Artificial Sequence: Synthetic oligonucleotide
accaaccuguccucacccc

SEQ ID NO: 1625838 - RNA, 19 nt, Artificial Sequence
  Description of Artificial Sequence: Synthetic oligonucleotide
ggaagaaucaaggggacac

SEQ ID NO: 1625839 - RNA, 19 nt, Artificial Sequence
  Description of Artificial Sequence: Synthetic oligonucleotide
cuaagaccuaacuaaggaa

SEQ ID NO: 1625840 - RNA, 19 nt, Artificial Sequence
  Description of Artificial Sequence: Synthetic oligonucleotide
cccuagauuccacauaucc

SEQ ID NO: 1625841 - RNA, 19 nt, Artificial Sequence
  Description of Artificial Sequence: Synthetic oligonucleotide
gcuaagaccuaacuaagga

SEQ ID NO: 1625842 - RNA, 19 nt, Artificial Sequence
  Description of Artificial Sequence: Synthetic oligonucleotide
aauauucucccugguacua

SEQ ID NO: 1625843 - RNA, 19 nt, Artificial Sequence
  Description of Artificial Sequence: Synthetic oligonucleotide
uccugggugaccuuccaaa

SEQ ID NO: 1625844 - RNA, 19 nt, Artificial Sequence
  Description of Artificial Sequence: Synthetic oligonucleotide
uagaugguugaggggagag

SEQ ID NO: 1625845 - RNA, 19 nt, Artificial Sequence
  Description of Artificial Sequence: Synthetic oligonucleotide
accuagccugacuugaaga

SEQ ID NO: 1625846 - RNA, 19 nt, Artificial Sequence
  Description of Artificial Sequence: Synthetic oligonucleotide
agcaacuagaaagaaguuu

SEQ ID NO: 1625847 - RNA, 19 nt, Artificial Sequence
  Description of Artificial Sequence: Synthetic oligonucleotide
cagccauagggcaaaucag

SEQ ID NO: 1625848 - RNA, 19 nt, Artificial Sequence
  Description of Artificial Sequence: Synthetic oligonucleotide
ccuaacuaaggaacuacag

SEQ ID NO: 1625849 - RNA, 19 nt, Artificial Sequence
  Description of Artificial Sequence: Synthetic oligonucleotide
aagcccacuuagaacuaac

SEQ ID NO: 1625850 - RNA, 19 nt, Artificial Sequence
  Description of Artificial Sequence: Synthetic oligonucleotide
aaacgagggcuaagcaggg

SEQ ID NO: 1625851 - RNA, 19 nt, Artificial Sequence
  Description of Artificial Sequence: Synthetic oligonucleotide
cuuaacgacuguaccccac

SEQ ID NO: 1625852 - RNA, 19 nt, Artificial Sequence
  Description of Artificial Sequence: Synthetic oligonucleotide
gaccuaacuaaggaacuac

SEQ ID NO: 1625853 - RNA, 19 nt, Artificial Sequence
  Description of Artificial Sequence: Synthetic oligonucleotide
gagcauagauguggcaggg

SEQ ID NO: 1625854 - RNA, 19 nt, Artificial Sequence
  Description of Artificial Sequence: Synthetic oligonucleotide
aacuccgccugcuugccau

SEQ ID NO: 1625855 - RNA, 19 nt, Artificial Sequence
  Description of Artificial Sequence: Synthetic oligonucleotide
uugcgacacacacaugaaa

SEQ ID NO: 1625856 - RNA, 19 nt, Artificial Sequence
  Description of Artificial Sequence: Synthetic oligonucleotide
guaacauaaagcccacuua

SEQ ID NO: 1625857 - RNA, 19 nt, Artificial Sequence
  Description of Artificial Sequence: Synthetic oligonucleotide
ggaggauugcaacuugacc

SEQ ID NO: 1625858 - RNA, 19 nt, Artificial Sequence
  Description of Artificial Sequence: Synthetic oligonucleotide
auauuucugucaaauuccu

SEQ ID NO: 1625859 - RNA, 19 nt, Artificial Sequence
  Description of Artificial Sequence: Synthetic oligonucleotide
aauuucggcccacgauaca

SEQ ID NO: 1625860 - RNA, 19 nt, Artificial Sequence
  Description of Artificial Sequence: Synthetic oligonucleotide
acacaugaaaucgaguaua

SEQ ID NO: 1625861 - RNA, 19 nt, Artificial Sequence
  Description of Artificial Sequence: Synthetic oligonucleotide
ucggcccacgauacaaugc

SEQ ID NO: 1625862 - RNA, 19 nt, Artificial Sequence
  Description of Artificial Sequence: Synthetic oligonucleotide
gcucuaagagaacugagga

SEQ ID NO: 1625863 - RNA, 19 nt, Artificial Sequence
  Description of Artificial Sequence: Synthetic oligonucleotide
ugcuuugucucguguguga

SEQ ID NO: 1625864 - RNA, 19 nt, Artificial Sequence
  Description of Artificial Sequence: Synthetic oligonucleotide
uucggcccacgauacaaug

SEQ ID NO: 1625865 - RNA, 19 nt, Artificial Sequence
  Description of Artificial Sequence: Synthetic oligonucleotide
ucuuaacgacuguacccca

SEQ ID NO: 1625866 - RNA, 19 nt, Artificial Sequence
  Description of Artificial Sequence: Synthetic oligonucleotide
cugguacuagagcaacuag

SEQ ID NO: 1625867 - RNA, 19 nt, Artificial Sequence
  Description of Artificial Sequence: Synthetic oligonucleotide
cacuuagaacuaacugccc

SEQ ID NO: 1625868 - RNA, 19 nt, Artificial Sequence
  Description of Artificial Sequence: Synthetic oligonucleotide
cugcucuaagagaacugag

SEQ ID NO: 1625869 - RNA, 19 nt, Artificial Sequence
  Description of Artificial Sequence: Synthetic oligonucleotide
caucaaugaccuuuaaugu

SEQ ID NO: 1625870 - RNA, 19 nt, Artificial Sequence
  Description of Artificial Sequence: Synthetic oligonucleotide
cacauauccugccccuucc

SEQ ID NO: 1625871 - RNA, 19 nt, Artificial Sequence
  Description of Artificial Sequence: Synthetic oligonucleotide
aauguccaaaagaggcgug

SEQ ID NO: 1625872 - RNA, 19 nt, Artificial Sequence
  Description of Artificial Sequence: Synthetic oligonucleotide
cauauacccuagauuccac

SEQ ID NO: 1625873 - RNA, 19 nt, Artificial Sequence
  Description of Artificial Sequence: Synthetic oligonucleotide
aucgaguauacaguccaug

SEQ ID NO: 1625874 - RNA, 19 nt, Artificial Sequence
  Description of Artificial Sequence: Synthetic oligonucleotide
aacaacagggcugcucuaa

SEQ ID NO: 1625875 - RNA, 19 nt, Artificial Sequence
  Description of Artificial Sequence: Synthetic oligonucleotide
ggcaaauggcaguauggcc

SEQ ID NO: 1625876 - RNA, 19 nt, Artificial Sequence
  Description of Artificial Sequence: Synthetic oligonucleotide
guaagacaagucugcuccc

SEQ ID NO: 1625877 - RNA, 19 nt, Artificial Sequence
  Description of Artificial Sequence: Synthetic oligonucleotide
ccuaccccaagccauaaag

SEQ ID NO: 1625878 - RNA, 19 nt, Artificial Sequence
  Description of Artificial Sequence: Synthetic oligonucleotide
aaggaggguaauccacaaa

SEQ ID NO: 1625879 - RNA, 19 nt, Artificial Sequence
  Description of Artificial Sequence: Synthetic oligonucleotide
aguauacaguccaugcagu

SEQ ID NO: 1625880 - RNA, 19 nt, Artificial Sequence
  Description of Artificial Sequence: Synthetic oligonucleotide
uaagacaagucugcucccu

SEQ ID NO: 1625881 - RNA, 19 nt, Artificial Sequence
  Description of Artificial Sequence: Synthetic oligonucleotide
gauugcaacuugacccaag

SEQ ID NO: 1625882 - RNA, 19 nt, Artificial Sequence
  Description of Artificial Sequence: Synthetic oligonucleotide
cucgugugugacauagcug

SEQ ID NO: 1625883 - RNA, 19 nt, Artificial Sequence
  Description of Artificial Sequence: Synthetic oligonucleotide
uuccacauauccugccccu

SEQ ID NO: 1625884 - RNA, 19 nt, Artificial Sequence
  Description of Artificial Sequence: Synthetic oligonucleotide
auauucucccugguacuag

SEQ ID NO: 1625885 - RNA, 19 nt, Artificial Sequence
  Description of Artificial Sequence: Synthetic oligonucleotide
agaugguugaggggagagg

SEQ ID NO: 1625886 - RNA, 19 nt, Artificial Sequence
  Description of Artificial Sequence: Synthetic oligonucleotide
acacacuaagggcuuggga

SEQ ID NO: 1625887 - RNA, 19 nt, Artificial Sequence
  Description of Artificial Sequence: Synthetic oligonucleotide
cagggucucuuaacgacug

SEQ ID NO: 1625888 - RNA, 19 nt, Artificial Sequence
  Description of Artificial Sequence: Synthetic oligonucleotide
auuucggcccacgauacaa

SEQ ID NO: 1625889 - RNA, 19 nt, Artificial Sequence
  Description of Artificial Sequence: Synthetic oligonucleotide
gagggaugguaugacacca

SEQ ID NO: 1625890 - RNA, 19 nt, Artificial Sequence
  Description of Artificial Sequence: Synthetic oligonucleotide
cuacucccacaccacaaac

SEQ ID NO: 1625891 - RNA, 19 nt, Artificial Sequence
  Description of Artificial Sequence: Synthetic oligonucleotide
cauccucccaacaugacgu

SEQ ID NO: 1625892 - RNA, 19 nt, Artificial Sequence
  Description of Artificial Sequence: Synthetic oligonucleotide
agggagcagacagaaaagu

SEQ ID NO: 1625893 - RNA, 19 nt, Artificial Sequence
  Description of Artificial Sequence: Synthetic oligonucleotide
ugacuugaagaggaggauu

SEQ ID NO: 1625894 - RNA, 19 nt, Artificial Sequence
  Description of Artificial Sequence: Synthetic oligonucleotide
aacaugacgucuggcugga

SEQ ID NO: 1625895 - RNA, 19 nt, Artificial Sequence
  Description of Artificial Sequence: Synthetic oligonucleotide
gacaccaaccuguccucac

SEQ ID NO: 1625896 - RNA, 19 nt, Artificial Sequence
  Description of Artificial Sequence: Synthetic oligonucleotide
uaaagcccacuuagaacua

SEQ ID NO: 1625897 - RNA, 19 nt, Artificial Sequence
  Description of Artificial Sequence: Synthetic oligonucleotide
gguacuagagcaacuagaa

SEQ ID NO: 1625898 - RNA, 19 nt, Artificial Sequence
  Description of Artificial Sequence: Synthetic oligonucleotide
ggaacuacagucaccagaa

SEQ ID NO: 1625899 - RNA, 19 nt, Artificial Sequence
  Description of Artificial Sequence: Synthetic oligonucleotide
acaaggacgguaagacaag

SEQ ID NO: 1625900 - RNA, 19 nt, Artificial Sequence
  Description of Artificial Sequence: Synthetic oligonucleotide
guaugacaccaaccugucc

SEQ ID NO: 1625901 - RNA, 19 nt, Artificial Sequence
  Description of Artificial Sequence: Synthetic oligonucleotide
gcauagauguggcaggguc

SEQ ID NO: 1625902 - RNA, 19 nt, Artificial Sequence
  Description of Artificial Sequence: Synthetic oligonucleotide
aucuggacauucguaagaa

SEQ ID NO: 1625903 - RNA, 19 nt, Artificial Sequence
  Description of Artificial Sequence: Synthetic oligonucleotide
aaagcccacuuagaacuaa

SEQ ID NO: 1625904 - RNA, 19 nt, Artificial Sequence
  Description of Artificial Sequence: Synthetic oligonucleotide
auacccuagauuccacaua

SEQ ID NO: 1625905 - RNA, 19 nt, Artificial Sequence
  Description of Artificial Sequence: Synthetic oligonucleotide
ccagguaggguuauauuuc

SEQ ID NO: 1625906 - RNA, 19 nt, Artificial Sequence
  Description of Artificial Sequence: Synthetic oligonucleotide
gguuugaacagggaacuca

SEQ ID NO: 1625907 - RNA, 19 nt, Artificial Sequence
  Description of Artificial Sequence: Synthetic oligonucleotide
caccagaaauucccuugcc

SEQ ID NO: 1625908 - RNA, 19 nt, Artificial Sequence
  Description of Artificial Sequence: Synthetic oligonucleotide
cuaucccagacccacccca

SEQ ID NO: 1625909 - RNA, 19 nt, Artificial Sequence
  Description of Artificial Sequence: Synthetic oligonucleotide
ucccagaaacagacagcca

SEQ ID NO: 1625910 - RNA, 19 nt, Artificial Sequence
  Description of Artificial Sequence: Synthetic oligonucleotide
cugcuugccaucgcugccg

SEQ ID NO: 1625911 - RNA, 19 nt, Artificial Sequence
  Description of Artificial Sequence: Synthetic oligonucleotide
uuucggcccacgauacaau

SEQ ID NO: 1625912 - RNA, 19 nt, Artificial Sequence
  Description of Artificial Sequence: Synthetic oligonucleotide
  modified_base (9)..(9): a, c, u, g, unknown or other
ccuucuugnuauaggcagc

SEQ ID NO: 1625913 - RNA, 19 nt, Artificial Sequence
  Description of Artificial Sequence: Synthetic oligonucleotide
auccucccaacaugacguc

SEQ ID NO: 1625914 - RNA, 19 nt, Artificial Sequence
  Description of Artificial Sequence: Synthetic oligonucleotide
caccuagccugacuugaag

SEQ ID NO: 1625915 - RNA, 19 nt, Artificial Sequence
  Description of Artificial Sequence: Synthetic oligonucleotide
uccaagcuagaugguugag

SEQ ID NO: 1625916 - RNA, 19 nt, Artificial Sequence
  Description of Artificial Sequence: Synthetic oligonucleotide
ggaugguaugacaccaacc

SEQ ID NO: 1625917 - RNA, 19 nt, Artificial Sequence
  Description of Artificial Sequence: Synthetic oligonucleotide
auagggcaaaucagggugu

SEQ ID NO: 1625918 - RNA, 19 nt, Artificial Sequence
  Description of Artificial Sequence: Synthetic oligonucleotide
gguaacauaaagcccacuu

SEQ ID NO: 1625919 - RNA, 19 nt, Artificial Sequence
  Description of Artificial Sequence: Synthetic oligonucleotide
ccaacaugacgucuggcug

SEQ ID NO: 1625920 - RNA, 19 nt, Artificial Sequence
  Description of Artificial Sequence: Synthetic oligonucleotide
ggacgguaagacaagucug

SEQ ID NO: 1625921 - RNA, 19 nt, Artificial Sequence
  Description of Artificial Sequence: Synthetic oligonucleotide
guacuagagcaacuagaaa

SEQ ID NO: 1625922 - RNA, 19 nt, Artificial Sequence
  Description of Artificial Sequence: Synthetic oligonucleotide
ccaagcuagaugguugagg

SEQ ID NO: 1625923 - RNA, 19 nt, Artificial Sequence
  Description of Artificial Sequence: Synthetic oligonucleotide
agguuugaacagggaacuc

SEQ ID NO: 1625924 - RNA, 19 nt, Artificial Sequence
  Description of Artificial Sequence: Synthetic oligonucleotide
augaagugcuuugucucgu

SEQ ID NO: 1625925 - RNA, 19 nt, Artificial Sequence
  Description of Artificial Sequence: Synthetic oligonucleotide
ccuucccucccuucuaucc

SEQ ID NO: 1625926 - RNA, 19 nt, Artificial Sequence
  Description of Artificial Sequence: Synthetic oligonucleotide
aaucgaguauacaguccau

SEQ ID NO: 1625927 - RNA, 19 nt, Artificial Sequence
  Description of Artificial Sequence: Synthetic oligonucleotide
cccauauacccuagauucc

SEQ ID NO: 1625928 - RNA, 19 nt, Artificial Sequence
  Description of Artificial Sequence: Synthetic oligonucleotide
gggcaaauggcaguauggc

SEQ ID NO: 1625929 - RNA, 19 nt, Artificial Sequence
  Description of Artificial Sequence: Synthetic oligonucleotide
ccuucuaucccagacccac

SEQ ID NO: 1625930 - RNA, 19 nt, Artificial Sequence
  Description of Artificial Sequence: Synthetic oligonucleotide
cauagauguggcagggucu

SEQ ID NO: 1625931 - RNA, 19 nt, Artificial Sequence
  Description of Artificial Sequence: Synthetic oligonucleotide
auucucccugguacuagag

SEQ ID NO: 1625932 - RNA, 19 nt, Artificial Sequence
  Description of Artificial Sequence: Synthetic oligonucleotide
ucggccaccuagccugacu

SEQ ID NO: 1625933 - RNA, 19 nt, Artificial Sequence
  Description of Artificial Sequence: Synthetic oligonucleotide
caaaauuucggcccacgau

SEQ ID NO: 1625934 - RNA, 19 nt, Artificial Sequence
  Description of Artificial Sequence: Synthetic oligonucleotide
cagcaacuccgccugcuug

SEQ ID NO: 1625935 - RNA, 19 nt, Artificial Sequence
  Description of Artificial Sequence: Synthetic oligonucleotide
ugcucccuacucccacacc

SEQ ID NO: 1625936 - RNA, 19 nt, Artificial Sequence
  Description of Artificial Sequence: Synthetic oligonucleotide
acagaucuggacauucgua

SEQ ID NO: 1625937 - RNA, 19 nt, Artificial Sequence
  Description of Artificial Sequence: Synthetic oligonucleotide
cuugcgacacacacaugaa

SEQ ID NO: 1625938 - RNA, 19 nt, Artificial Sequence
  Description of Artificial Sequence: Synthetic oligonucleotide
cacgauacaaugccaggua

SEQ ID NO: 1625939 - RNA, 19 nt, Artificial Sequence
  Description of Artificial Sequence: Synthetic oligonucleotide
acgguaagacaagucugcu

SEQ ID NO: 1625940 - RNA, 19 nt, Artificial Sequence
  Description of Artificial Sequence: Synthetic oligonucleotide
agaccuaacuaaggaacua

SEQ ID NO: 1625941 - RNA, 19 nt, Artificial Sequence
  Description of Artificial Sequence: Synthetic oligonucleotide
agcauccucccaacaugac

SEQ ID NO: 1625942 - RNA, 19 nt, Artificial Sequence
  Description of Artificial Sequence: Synthetic oligonucleotide
cuaaaaccauucaaucuuu

SEQ ID NO: 1625943 - RNA, 19 nt, Artificial Sequence
  Description of Artificial Sequence: Synthetic oligonucleotide
uccucccaacaugacgucu

SEQ ID NO: 1625944 - RNA, 19 nt, Artificial Sequence
  Description of Artificial Sequence: Synthetic oligonucleotide
ugccagguaggguuauauu

SEQ ID NO: 1625945 - RNA, 19 nt, Artificial Sequence
  Description of Artificial Sequence: Synthetic oligonucleotide
uacuugcgacacacacaug

SEQ ID NO: 1625946 - RNA, 19 nt, Artificial Sequence
  Description of Artificial Sequence: Synthetic oligonucleotide
aacgagggcuaagcaggga

SEQ ID NO: 1625947 - RNA, 19 nt, Artificial Sequence
  Description of Artificial Sequence: Synthetic oligonucleotide
gucucagucccugcaccag

SEQ ID NO: 1625948 - RNA, 19 nt, Artificial Sequence
  Description of Artificial Sequence: Synthetic oligonucleotide
cuagagcaacuagaaagaa

SEQ ID NO: 1625949 - RNA, 19 nt, Artificial Sequence
  Description of Artificial Sequence: Synthetic oligonucleotide
agcccacuuagaacuaacu

SEQ ID NO: 1625950 - RNA, 19 nt, Artificial Sequence
  Description of Artificial Sequence: Synthetic oligonucleotide
ccucccaacaugacgucug

SEQ ID NO: 1625951 - RNA, 19 nt, Artificial Sequence
  Description of Artificial Sequence: Synthetic oligonucleotide
gaagaaucaaggggacacu

SEQ ID NO: 1625952 - RNA, 19 nt, Artificial Sequence
  Description of Artificial Sequence: Synthetic oligonucleotide
gccaaaauuucggcccacg

SEQ ID NO: 1625953 - RNA, 19 nt, Artificial Sequence
  Description of Artificial Sequence: Synthetic oligonucleotide
cugccaaaauuucggccca

SEQ ID NO: 1625954 - RNA, 19 nt, Artificial Sequence
  Description of Artificial Sequence: Synthetic oligonucleotide
ccugaugcuggccccagug

SEQ ID NO: 1625955 - RNA, 19 nt, Artificial Sequence
  Description of Artificial Sequence: Synthetic oligonucleotide
uagggcaaaucaggguguc

SEQ ID NO: 1625956 - RNA, 19 nt, Artificial Sequence
  Description of Artificial Sequence: Synthetic oligonucleotide
uguaccccacccaccccua

SEQ ID NO: 1625957 - RNA, 19 nt, Artificial Sequence
  Description of Artificial Sequence: Synthetic oligonucleotide
agguaggguuauauuucug

SEQ ID NO: 1625958 - RNA, 19 nt, Artificial Sequence
  Description of Artificial Sequence: Synthetic oligonucleotide
cagguaggguuauauuucu

SEQ ID NO: 1625959 - RNA, 19 nt, Artificial Sequence
  Description of Artificial Sequence: Synthetic oligonucleotide
cacacaugaaaucgaguau

SEQ ID NO: 1625960 - RNA, 19 nt, Artificial Sequence
  Description of Artificial Sequence: Synthetic oligonucleotide
agcauagauguggcagggu

SEQ ID NO: 1625961 - RNA, 19 nt, Artificial Sequence
  Description of Artificial Sequence: Synthetic oligonucleotide
cacagaucuggacauucgu

SEQ ID NO: 1625962 - RNA, 19 nt, Artificial Sequence
  Description of Artificial Sequence: Synthetic oligonucleotide
gcuagaugguugaggggag

SEQ ID NO: 1625963 - RNA, 19 nt, Artificial Sequence
  Description of Artificial Sequence: Synthetic oligonucleotide
ggaggguaauccacaaaga

SEQ ID NO: 1625964 - RNA, 19 nt, Artificial Sequence
  Description of Artificial Sequence: Synthetic oligonucleotide
agguaacauaaagcccacu

SEQ ID NO: 1625965 - RNA, 19 nt, Artificial Sequence
  Description of Artificial Sequence: Synthetic oligonucleotide
acccuagauuccacauauc

SEQ ID NO: 1625966 - RNA, 19 nt, Artificial Sequence
  Description of Artificial Sequence: Synthetic oligonucleotide
cacacacaugaaaucgagu

SEQ ID NO: 1625967 - RNA, 19 nt, Artificial Sequence
  Description of Artificial Sequence: Synthetic oligonucleotide
ccuagauuccacauauccu

SEQ ID NO: 1625968 - RNA, 19 nt, Artificial Sequence
  Description of Artificial Sequence: Synthetic oligonucleotide
gcagggagaaacacagauc

SEQ ID NO: 1625969 - RNA, 19 nt, Artificial Sequence
  Description of Artificial Sequence: Synthetic oligonucleotide
cuagaugguugaggggaga

SEQ ID NO: 1625970 - RNA, 19 nt, Artificial Sequence
  Description of Artificial Sequence: Synthetic oligonucleotide
auggcaguauggccaucuu

SEQ ID NO: 1625971 - RNA, 19 nt, Artificial Sequence
  Description of Artificial Sequence: Synthetic oligonucleotide
gcaguauggccaucuuguc

SEQ ID NO: 1625972 - RNA, 19 nt, Artificial Sequence
  Description of Artificial Sequence: Synthetic oligonucleotide
gcguggaugcagagcauag

SEQ ID NO: 1625973 - RNA, 19 nt, Artificial Sequence
  Description of Artificial Sequence: Synthetic oligonucleotide
gaggggagagggaugguau

SEQ ID NO: 1625974 - RNA, 19 nt, Artificial Sequence
  Description of Artificial Sequence: Synthetic oligonucleotide
gucucgugugugacauagc

SEQ ID NO: 1625975 - RNA, 19 nt, Artificial Sequence
  Description of Artificial Sequence: Synthetic oligonucleotide
ccacauauccugccccuuc

SEQ ID NO: 1625976 - RNA, 19 nt, Artificial Sequence
  Description of Artificial Sequence: Synthetic oligonucleotide
cuccccauauacccuagau

SEQ ID NO: 1625977 - RNA, 19 nt, Artificial Sequence
  Description of Artificial Sequence: Synthetic oligonucleotide
agggaugguaugacaccaa

SEQ ID NO: 1625978 - RNA, 19 nt, Artificial Sequence
  Description of Artificial Sequence: Synthetic oligonucleotide
ccugacaaggacgguaaga

SEQ ID NO: 1625979 - RNA, 19 nt, Artificial Sequence
  Description of Artificial Sequence: Synthetic oligonucleotide
cagucaccagaaauucccu

SEQ ID NO: 1625980 - RNA, 19 nt, Artificial Sequence
  Description of Artificial Sequence: Synthetic oligonucleotide
uugucucgugugugacaua

SEQ ID NO: 1625981 - RNA, 19 nt, Artificial Sequence
  Description of Artificial Sequence: Synthetic oligonucleotide
ggccaccuagccugacuug

SEQ ID NO: 1625982 - RNA, 19 nt, Artificial Sequence
  Description of Artificial Sequence: Synthetic oligonucleotide
gucuggcuggaagaauaaa

SEQ ID NO: 1625983 - RNA, 19 nt, Artificial Sequence
  Description of Artificial Sequence: Synthetic oligonucleotide
ggguuauauuucugucaaa

SEQ ID NO: 1625984 - RNA, 19 nt, Artificial Sequence
  Description of Artificial Sequence: Synthetic oligonucleotide
cccuuacuuagagacccug

SEQ ID NO: 1625985 - RNA, 19 nt, Artificial Sequence
  Description of Artificial Sequence: Synthetic oligonucleotide
cacagccauuggagaggac

SEQ ID NO: 1625986 - RNA, 19 nt, Artificial Sequence
  Description of Artificial Sequence: Synthetic oligonucleotide
caaggacgguaagacaagu

SEQ ID NO: 1625987 - RNA, 19 nt, Artificial Sequence
  Description of Artificial Sequence: Synthetic oligonucleotide
gcuaauccuaucccagcau

SEQ ID NO: 1625988 - RNA, 19 nt, Artificial Sequence
  Description of Artificial Sequence: Synthetic oligonucleotide
gagcaacuagaaagaaguu

SEQ ID NO: 1625989 - RNA, 19 nt, Artificial Sequence
  Description of Artificial Sequence: Synthetic oligonucleotide
ccacaauagguaacauaaa

SEQ ID NO: 1625990 - RNA, 19 nt, Artificial Sequence
  Description of Artificial Sequence: Synthetic oligonucleotide
gggucucuuaacgacugua

SEQ ID NO: 1625991 - RNA, 19 nt, Artificial Sequence
  Description of Artificial Sequence: Synthetic oligonucleotide
guguccaagcuagaugguu

SEQ ID NO: 1625992 - RNA, 19 nt, Artificial Sequence
  Description of Artificial Sequence: Synthetic oligonucleotide
caacaacagggcugcucua

SEQ ID NO: 1625993 - RNA, 19 nt, Artificial Sequence
  Description of Artificial Sequence: Synthetic oligonucleotide
gguugauugcuaagaccua

SEQ ID NO: 1625994 - RNA, 19 nt, Artificial Sequence
  Description of Artificial Sequence: Synthetic oligonucleotide
ccccacaauagguaacaua

SEQ ID NO: 1625995 - RNA, 19 nt, Artificial Sequence
  Description of Artificial Sequence: Synthetic oligonucleotide
ggauugcaacuugacccaa

SEQ ID NO: 1625996 - RNA, 19 nt, Artificial Sequence
  Description of Artificial Sequence: Synthetic oligonucleotide
ggcguggaugcagagcaua

SEQ ID NO: 1625997 - RNA, 19 nt, Artificial Sequence
  Description of Artificial Sequence: Synthetic oligonucleotide
gccagccaacaacagggcu

SEQ ID NO: 1625998 - RNA, 19 nt, Artificial Sequence
  Description of Artificial Sequence: Synthetic oligonucleotide
caggguguccaagcuagau

SEQ ID NO: 1625999 - RNA, 19 nt, Artificial Sequence
  Description of Artificial Sequence: Synthetic oligonucleotide
ggcccacgauacaaugcca

SEQ ID NO: 1626000 - RNA, 19 nt, Artificial Sequence
  Description of Artificial Sequence: Synthetic oligonucleotide
cucggccaccuagccugac

SEQ ID NO: 1626001 - RNA, 19 nt, Artificial Sequence
  Description of Artificial Sequence: Synthetic oligonucleotide
aggcguggaugcagagcau

SEQ ID NO: 1626002 - RNA, 19 nt, Artificial Sequence
  Description of Artificial Sequence: Synthetic oligonucleotide
ccaccuagccugacuugaa

SEQ ID NO: 1626003 - RNA, 19 nt, Artificial Sequence
  Description of Artificial Sequence: Synthetic oligonucleotide
gguguccaagcuagauggu

SEQ ID NO: 1626004 - RNA, 19 nt, Artificial Sequence
  Description of Artificial Sequence: Synthetic oligonucleotide
ccaccuccccauauacccu

SEQ ID NO: 1626005 - RNA, 19 nt, Artificial Sequence
  Description of Artificial Sequence: Synthetic oligonucleotide
caucgcugccgccgccacu

SEQ ID NO: 1626006 - RNA, 19 nt, Artificial Sequence
  Description of Artificial Sequence: Synthetic oligonucleotide
cccugguacuagagcaacu

SEQ ID NO: 1626007 - RNA, 19 nt, Artificial Sequence
  Description of Artificial Sequence: Synthetic oligonucleotide
cccuaccccaagccauaaa

SEQ ID NO: 1626008 - RNA, 19 nt, Artificial Sequence
  Description of Artificial Sequence: Synthetic oligonucleotide
ccucggccaccuagccuga

SEQ ID NO: 1626009 - RNA, 19 nt, Artificial Sequence
  Description of Artificial Sequence: Synthetic oligonucleotide
ccgccugcuugccaucgcu

SEQ ID NO: 1626010 - RNA, 19 nt, Artificial Sequence
  Description of Artificial Sequence: Synthetic oligonucleotide
ccccuaccccaagccauaa

SEQ ID NO: 1626011 - RNA, 19 nt, Artificial Sequence
  Description of Artificial Sequence: Synthetic oligonucleotide
aauucuuccaucuucccgc

SEQ ID NO: 1626012 - RNA, 19 nt, Artificial Sequence
  Description of Artificial Sequence: Synthetic oligonucleotide
uuuaaaaggauuaaucuug

SEQ ID NO: 1626013 - RNA, 19 nt, Artificial Sequence
  Description of Artificial Sequence: Synthetic oligonucleotide
uuuaugguagaaaagaagu

SEQ ID NO: 1626014 - RNA, 19 nt, Artificial Sequence
  Description of Artificial Sequence: Synthetic oligonucleotide
aauccaaucgcuuugauuu

SEQ ID NO: 1626015 - RNA, 19 nt, Artificial Sequence
  Description of Artificial Sequence: Synthetic oligonucleotide
gaauuuauccuucaugucc

SEQ ID NO: 1626016 - RNA, 19 nt, Artificial Sequence
  Description of Artificial Sequence: Synthetic oligonucleotide
aaaggauuaaucuugguuu

SEQ ID NO: 1626017 - RNA, 19 nt, Artificial Sequence
  Description of Artificial Sequence: Synthetic oligonucleotide
auauauuuacauuguagac

SEQ ID NO: 1626018 - RNA, 19 nt, Artificial Sequence
  Description of Artificial Sequence: Synthetic oligonucleotide
ucaauugauuagcauagcg

SEQ ID NO: 1626019 - RNA, 19 nt, Artificial Sequence
  Description of Artificial Sequence: Synthetic oligonucleotide
aaucuaucuggauucuacc

SEQ ID NO: 1626020 - RNA, 19 nt, Artificial Sequence
  Description of Artificial Sequence: Synthetic oligonucleotide
ucggaaaucggucugacag

SEQ ID NO: 1626021 - RNA, 19 nt, Artificial Sequence
  Description of Artificial Sequence: Synthetic oligonucleotide
aguaaucgcauauauuuac

SEQ ID NO: 1626022 - RNA, 19 nt, Artificial Sequence
  Description of Artificial Sequence: Synthetic oligonucleotide
auauuuacauuguagaccu

SEQ ID NO: 1626023 - RNA, 19 nt, Artificial Sequence
  Description of Artificial Sequence: Synthetic oligonucleotide
aucgcauauauuuacauug

SEQ ID NO: 1626024 - RNA, 19 nt, Artificial Sequence
  Description of Artificial Sequence: Synthetic oligonucleotide
agucccacaaauuuaaaag

SEQ ID NO: 1626025 - RNA, 19 nt, Artificial Sequence
  Description of Artificial Sequence: Synthetic oligonucleotide
aauugauuagcauagcguu

SEQ ID NO: 1626026 - RNA, 19 nt, Artificial Sequence
  Description of Artificial Sequence: Synthetic oligonucleotide
uuuaccucacuguaaaugc

SEQ ID NO: 1626027 - RNA, 19 nt, Artificial Sequence
  Description of Artificial Sequence: Synthetic oligonucleotide
aaaauaucaccacuguccu

SEQ ID NO: 1626028 - RNA, 19 nt, Artificial Sequence
  Description of Artificial Sequence: Synthetic oligonucleotide
aaaaggauuaaucuugguu

SEQ ID NO: 1626029 - RNA, 19 nt, Artificial Sequence
  Description of Artificial Sequence: Synthetic oligonucleotide
ugagaauuuauccuucaug

SEQ ID NO: 1626030 - RNA, 19 nt, Artificial Sequence
  Description of Artificial Sequence: Synthetic oligonucleotide
aaaucuaucuggauucuac

SEQ ID NO: 1626031 - RNA, 19 nt, Artificial Sequence
  Description of Artificial Sequence: Synthetic oligonucleotide
aauaaucuguuggagcugg

SEQ ID NO: 1626032 - RNA, 19 nt, Artificial Sequence
  Description of Artificial Sequence: Synthetic oligonucleotide
caucacauccaaaacauag

SEQ ID NO: 1626033 - RNA, 19 nt, Artificial Sequence
  Description of Artificial Sequence: Synthetic oligonucleotide
aaucaaaucuaucuggauu

SEQ ID NO: 1626034 - RNA, 19 nt, Artificial Sequence
  Description of Artificial Sequence: Synthetic oligonucleotide
acggguaauucuuuagucc

SEQ ID NO: 1626035 - RNA, 19 nt, Artificial Sequence
  Description of Artificial Sequence: Synthetic oligonucleotide
aaaggaguacuuccaggac

SEQ ID NO: 1626036 - RNA, 19 nt, Artificial Sequence
  Description of Artificial Sequence: Synthetic oligonucleotide
agggacgucaauuaaccac

SEQ ID NO: 1626037 - RNA, 19 nt, Artificial Sequence
  Description of Artificial Sequence: Synthetic oligonucleotide
aucgcuuugauuucuguag

SEQ ID NO: 1626038 - RNA, 19 nt, Artificial Sequence
  Description of Artificial Sequence: Synthetic oligonucleotide
ugauccaacaucccauggg

SEQ ID NO: 1626039 - RNA, 19 nt, Artificial Sequence
  Description of Artificial Sequence: Synthetic oligonucleotide
agugcccauucucagaagc

SEQ ID NO: 1626040 - RNA, 19 nt, Artificial Sequence
  Description of Artificial Sequence: Synthetic oligonucleotide
cuugccccaaaucugaagg

SEQ ID NO: 1626041 - RNA, 19 nt, Artificial Sequence
  Description of Artificial Sequence: Synthetic oligonucleotide
acgucaauuaaccacucag

SEQ ID NO: 1626042 - RNA, 19 nt, Artificial Sequence
  Description of Artificial Sequence: Synthetic oligonucleotide
aaucuugguuuucucuccg

SEQ ID NO: 1626043 - RNA, 19 nt, Artificial Sequence
  Description of Artificial Sequence: Synthetic oligonucleotide
aaagagauaaucaaaucua

SEQ ID NO: 1626044 - RNA, 19 nt, Artificial Sequence
  Description of Artificial Sequence: Synthetic oligonucleotide
ucuuuagucccacaaauuu

SEQ ID NO: 1626045 - RNA, 19 nt, Artificial Sequence
  Description of Artificial Sequence: Synthetic oligonucleotide
ucuaccuccauccguuggg

SEQ ID NO: 1626046 - RNA, 19 nt, Artificial Sequence
  Description of Artificial Sequence: Synthetic oligonucleotide
uucacauaauccaaucgcu

SEQ ID NO: 1626047 - RNA, 19 nt, Artificial Sequence
  Description of Artificial Sequence: Synthetic oligonucleotide
aaaaccuauugacacagua

SEQ ID NO: 1626048 - RNA, 19 nt, Artificial Sequence
  Description of Artificial Sequence: Synthetic oligonucleotide
aaggaguacuuccaggacu

SEQ ID NO: 1626049 - RNA, 19 nt, Artificial Sequence
  Description of Artificial Sequence: Synthetic oligonucleotide
accagcuagggcuugacuc

SEQ ID NO: 1626050 - RNA, 19 nt, Artificial Sequence
  Description of Artificial Sequence: Synthetic oligonucleotide
gagaauuuauccuucaugu

SEQ ID NO: 1626051 - RNA, 19 nt, Artificial Sequence
  Description of Artificial Sequence: Synthetic oligonucleotide
aguccaucuaccucaaaag

SEQ ID NO: 1626052 - RNA, 19 nt, Artificial Sequence
  Description of Artificial Sequence: Synthetic oligonucleotide
acaguaaagagauaaucaa

SEQ ID NO: 1626053 - RNA, 19 nt, Artificial Sequence
  Description of Artificial Sequence: Synthetic oligonucleotide
aaguccaucuaccucaaaa

SEQ ID NO: 1626054 - RNA, 19 nt, Artificial Sequence
  Description of Artificial Sequence: Synthetic oligonucleotide
ucccacaaauuuaaaagga

SEQ ID NO: 1626055 - RNA, 19 nt, Artificial Sequence
  Description of Artificial Sequence: Synthetic oligonucleotide
auagcguuuugguagcuuc

SEQ ID NO: 1626056 - RNA, 19 nt, Artificial Sequence
  Description of Artificial Sequence: Synthetic oligonucleotide
gaaaagaaguccaucuacc

SEQ ID NO: 1626057 - RNA, 19 nt, Artificial Sequence
  Description of Artificial Sequence: Synthetic oligonucleotide
aauucuuuagucccacaaa

SEQ ID NO: 1626058 - RNA, 19 nt, Artificial Sequence
  Description of Artificial Sequence: Synthetic oligonucleotide
accuagaauaucugacacc

SEQ ID NO: 1626059 - RNA, 19 nt, Artificial Sequence
  Description of Artificial Sequence: Synthetic oligonucleotide
agaauuuauccuucauguc

SEQ ID NO: 1626060 - RNA, 19 nt, Artificial Sequence
  Description of Artificial Sequence: Synthetic oligonucleotide
cagaaaagcuaccagcuag

SEQ ID NO: 1626061 - RNA, 19 nt, Artificial Sequence
  Description of Artificial Sequence: Synthetic oligonucleotide
cuuguauugggauaggcga

SEQ ID NO: 1626062 - RNA, 19 nt, Artificial Sequence
  Description of Artificial Sequence: Synthetic oligonucleotide
acgauaagggcucguuucc

SEQ ID NO: 1626063 - RNA, 19 nt, Artificial Sequence
  Description of Artificial Sequence: Synthetic oligonucleotide
ucuucugguaacuuugagu

SEQ ID NO: 1626064 - RNA, 19 nt, Artificial Sequence
  Description of Artificial Sequence: Synthetic oligonucleotide
aguaaagagauaaucaaau

SEQ ID NO: 1626065 - RNA, 19 nt, Artificial Sequence
  Description of Artificial Sequence: Synthetic oligonucleotide
ucugguaacuuugagugca

SEQ ID NO: 1626066 - RNA, 19 nt, Artificial Sequence
  Description of Artificial Sequence: Synthetic oligonucleotide
uacauaccacaguaaagag

SEQ ID NO: 1626067 - RNA, 19 nt, Artificial Sequence
  Description of Artificial Sequence: Synthetic oligonucleotide
aaaucggucugacagucau

SEQ ID NO: 1626068 - RNA, 19 nt, Artificial Sequence
  Description of Artificial Sequence: Synthetic oligonucleotide
gaagggacgucaauuaacc

SEQ ID NO: 1626069 - RNA, 19 nt, Artificial Sequence
  Description of Artificial Sequence: Synthetic oligonucleotide
agcauagcguuuugguagc

SEQ ID NO: 1626070 - RNA, 19 nt, Artificial Sequence
  Description of Artificial Sequence: Synthetic oligonucleotide
uuguauugggauaggcgag

SEQ ID NO: 1626071 - RNA, 19 nt, Artificial Sequence
  Description of Artificial Sequence: Synthetic oligonucleotide
ugaagggacgucaauuaac

SEQ ID NO: 1626072 - RNA, 19 nt, Artificial Sequence
  Description of Artificial Sequence: Synthetic oligonucleotide
ugcucaauaaucuguugga

SEQ ID NO: 1626073 - RNA, 19 nt, Artificial Sequence
  Description of Artificial Sequence: Synthetic oligonucleotide
ugugugagaauuuauccuu

SEQ ID NO: 1626074 - RNA, 19 nt, Artificial Sequence
  Description of Artificial Sequence: Synthetic oligonucleotide
cacaguaaagagauaauca

SEQ ID NO: 1626075 - RNA, 19 nt, Artificial Sequence
  Description of Artificial Sequence: Synthetic oligonucleotide
aguaggucugguuuaccuc

SEQ ID NO: 1626076 - RNA, 19 nt, Artificial Sequence
  Description of Artificial Sequence: Synthetic oligonucleotide
aaauaucaccacuguccuc

SEQ ID NO: 1626077 - RNA, 19 nt, Artificial Sequence
  Description of Artificial Sequence: Synthetic oligonucleotide
uuucuguaguuccagcaac

SEQ ID NO: 1626078 - RNA, 19 nt, Artificial Sequence
  Description of Artificial Sequence: Synthetic oligonucleotide
aaucgcauauauuuacauu

SEQ ID NO: 1626079 - RNA, 19 nt, Artificial Sequence
  Description of Artificial Sequence: Synthetic oligonucleotide
guccaucuaccucaaaagg

SEQ ID NO: 1626080 - RNA, 19 nt, Artificial Sequence
  Description of Artificial Sequence: Synthetic oligonucleotide
uacuuccaggacuauagug

SEQ ID NO: 1626081 - RNA, 19 nt, Artificial Sequence
  Description of Artificial Sequence: Synthetic oligonucleotide
acuuguauugggauaggcg

SEQ ID NO: 1626082 - RNA, 19 nt, Artificial Sequence
  Description of Artificial Sequence: Synthetic oligonucleotide
uguauugggauaggcgagg

SEQ ID NO: 1626083 - RNA, 19 nt, Artificial Sequence
  Description of Artificial Sequence: Synthetic oligonucleotide
aguagaaucggaaaucggu

SEQ ID NO: 1626084 - RNA, 19 nt, Artificial Sequence
  Description of Artificial Sequence: Synthetic oligonucleotide
guuuaccucacuguaaaug

SEQ ID NO: 1626085 - RNA, 19 nt, Artificial Sequence
  Description of Artificial Sequence: Synthetic oligonucleotide
uaccacaguaaagagauaa

SEQ ID NO: 1626086 - RNA, 19 nt, Artificial Sequence
  Description of Artificial Sequence: Synthetic oligonucleotide
cucacuguaaaugcagucc

SEQ ID NO: 1626087 - RNA, 19 nt, Artificial Sequence
  Description of Artificial Sequence: Synthetic oligonucleotide
uacgauaagggcucguuuc

SEQ ID NO: 1626088 - RNA, 19 nt, Artificial Sequence
  Description of Artificial Sequence: Synthetic oligonucleotide
uagaaucggaaaucggucu

SEQ ID NO: 1626089 - RNA, 19 nt, Artificial Sequence
  Description of Artificial Sequence: Synthetic oligonucleotide
aaggauuaaucuugguuuu

SEQ ID NO: 1626090 - RNA, 19 nt, Artificial Sequence
  Description of Artificial Sequence: Synthetic oligonucleotide
gcauauucuggcuugguag

SEQ ID NO: 1626091 - RNA, 19 nt, Artificial Sequence
  Description of Artificial Sequence: Synthetic oligonucleotide
caaaacauaguaggucugg

SEQ ID NO: 1626092 - RNA, 19 nt, Artificial Sequence
  Description of Artificial Sequence: Synthetic oligonucleotide
ucauagugcccauucucag

SEQ ID NO: 1626093 - RNA, 19 nt, Artificial Sequence
  Description of Artificial Sequence: Synthetic oligonucleotide
ugacucaauucuuccaucu

SEQ ID NO: 1626094 - RNA, 19 nt, Artificial Sequence
  Description of Artificial Sequence: Synthetic oligonucleotide
uaaucgcauauauuuacau

SEQ ID NO: 1626095 - RNA, 19 nt, Artificial Sequence
  Description of Artificial Sequence: Synthetic oligonucleotide
uuaaccacucagaaagcau

SEQ ID NO: 1626096 - RNA, 19 nt, Artificial Sequence
  Description of Artificial Sequence: Synthetic oligonucleotide
agagauaaucaaaucuauc

SEQ ID NO: 1626097 - RNA, 19 nt, Artificial Sequence
  Description of Artificial Sequence: Synthetic oligonucleotide
uccauagacagcaccuuac

SEQ ID NO: 1626098 - RNA, 19 nt, Artificial Sequence
  Description of Artificial Sequence: Synthetic oligonucleotide
uacacggguaauucuuuag

SEQ ID NO: 1626099 - RNA, 19 nt, Artificial Sequence
  Description of Artificial Sequence: Synthetic oligonucleotide
gggaugaaaaccuauugac

SEQ ID NO: 1626100 - RNA, 19 nt, Artificial Sequence
  Description of Artificial Sequence: Synthetic oligonucleotide
gguucacauaauccaaucg

SEQ ID NO: 1626101 - RNA, 19 nt, Artificial Sequence
  Description of Artificial Sequence: Synthetic oligonucleotide
gauuagcauagcguuuugg

SEQ ID NO: 1626102 - RNA, 19 nt, Artificial Sequence
  Description of Artificial Sequence: Synthetic oligonucleotide
auaggcgaggguguggggc

SEQ ID NO: 1626103 - RNA, 19 nt, Artificial Sequence
  Description of Artificial Sequence: Synthetic oligonucleotide
cugguugaaccccuggagg

SEQ ID NO: 1626104 - RNA, 19 nt, Artificial Sequence
  Description of Artificial Sequence: Synthetic oligonucleotide
aaucgcuuugauuucugua

SEQ ID NO: 1626105 - RNA, 19 nt, Artificial Sequence
  Description of Artificial Sequence: Synthetic oligonucleotide
ucagcuagucuucuggcau

SEQ ID NO: 1626106 - RNA, 19 nt, Artificial Sequence
  Description of Artificial Sequence: Synthetic oligonucleotide
guuccagcaacugucggcg

SEQ ID NO: 1626107 - RNA, 19 nt, Artificial Sequence
  Description of Artificial Sequence: Synthetic oligonucleotide
uucuaccuccauccguugg

SEQ ID NO: 1626108 - RNA, 19 nt, Artificial Sequence
  Description of Artificial Sequence: Synthetic oligonucleotide
aaucggaaaucggucugac

SEQ ID NO: 1626109 - RNA, 19 nt, Artificial Sequence
  Description of Artificial Sequence: Synthetic oligonucleotide
ucugauccaacaucccaug

SEQ ID NO: 1626110 - RNA, 19 nt, Artificial Sequence
  Description of Artificial Sequence: Synthetic oligonucleotide
agaaucggaaaucggucug

SEQ ID NO: 1626111 - RNA, 19 nt, Artificial Sequence
  Description of Artificial Sequence: Synthetic oligonucleotide
uuagcauagcguuuuggua

SEQ ID NO: 1626112 - RNA, 19 nt, Artificial Sequence
  Description of Artificial Sequence: Synthetic oligonucleotide
auaaucaaaucuaucugga

SEQ ID NO: 1626113 - RNA, 19 nt, Artificial Sequence
  Description of Artificial Sequence: Synthetic oligonucleotide
gaaaagcuaccagcuaggg

SEQ ID NO: 1626114 - RNA, 19 nt, Artificial Sequence
  Description of Artificial Sequence: Synthetic oligonucleotide
cacaauccauucuugcccc

SEQ ID NO: 1626115 - RNA, 19 nt, Artificial Sequence
  Description of Artificial Sequence: Synthetic oligonucleotide
aaaacauaguaggucuggu

SEQ ID NO: 1626116 - RNA, 19 nt, Artificial Sequence
  Description of Artificial Sequence: Synthetic oligonucleotide
uggauucuaccuccauccg

SEQ ID NO: 1626117 - RNA, 19 nt, Artificial Sequence
  Description of Artificial Sequence: Synthetic oligonucleotide
cuguuuaugguagaaaaga

SEQ ID NO: 1626118 - RNA, 19 nt, Artificial Sequence
  Description of Artificial Sequence: Synthetic oligonucleotide
gguaacuuugagugcaucc

SEQ ID NO: 1626119 - RNA, 19 nt, Artificial Sequence
  Description of Artificial Sequence: Synthetic oligonucleotide
gugccagucgcgcacaccg

SEQ ID NO: 1626120 - RNA, 19 nt, Artificial Sequence
  Description of Artificial Sequence: Synthetic oligonucleotide
ucgcauauauuuacauugu

SEQ ID NO: 1626121 - RNA, 19 nt, Artificial Sequence
  Description of Artificial Sequence: Synthetic oligonucleotide
ucguuucccaacaggacac

SEQ ID NO: 1626122 - RNA, 19 nt, Artificial Sequence
  Description of Artificial Sequence: Synthetic oligonucleotide
uggcuugguagucagugga

SEQ ID NO: 1626123 - RNA, 19 nt, Artificial Sequence
  Description of Artificial Sequence: Synthetic oligonucleotide
gucuguuuaugguagaaaa

SEQ ID NO: 1626124 - RNA, 19 nt, Artificial Sequence
  Description of Artificial Sequence: Synthetic oligonucleotide
agaaaagcuaccagcuagg

SEQ ID NO: 1626125 - RNA, 19 nt, Artificial Sequence
  Description of Artificial Sequence: Synthetic oligonucleotide
uuaccucacuguaaaugca

SEQ ID NO: 1626126 - RNA, 19 nt, Artificial Sequence
  Description of Artificial Sequence: Synthetic oligonucleotide
uggaaagugcacuccaaaa

SEQ ID NO: 1626127 - RNA, 19 nt, Artificial Sequence
  Description of Artificial Sequence: Synthetic oligonucleotide
uaguaggucugguuuaccu

SEQ ID NO: 1626128 - RNA, 19 nt, Artificial Sequence
  Description of Artificial Sequence: Synthetic oligonucleotide
agucugauccaacauccca

SEQ ID NO: 1626129 - RNA, 19 nt, Artificial Sequence
  Description of Artificial Sequence: Synthetic oligonucleotide
aagugcacuccaaaauauc

SEQ ID NO: 1626130 - RNA, 19 nt, Artificial Sequence
  Description of Artificial Sequence: Synthetic oligonucleotide
aucaauugauuagcauagc

SEQ ID NO: 1626131 - RNA, 19 nt, Artificial Sequence
  Description of Artificial Sequence: Synthetic oligonucleotide
aaagugcacuccaaaauau

SEQ ID NO: 1626132 - RNA, 19 nt, Artificial Sequence
  Description of Artificial Sequence: Synthetic oligonucleotide
aggaguacacggguaauuc

SEQ ID NO: 1626133 - RNA, 19 nt, Artificial Sequence
  Description of Artificial Sequence: Synthetic oligonucleotide
uaguaaucgcauauauuua

SEQ ID NO: 1626134 - RNA, 19 nt, Artificial Sequence
  Description of Artificial Sequence: Synthetic oligonucleotide
auuaaccacucagaaagca

SEQ ID NO: 1626135 - RNA, 19 nt, Artificial Sequence
  Description of Artificial Sequence: Synthetic oligonucleotide
agaauaucugacaccaugu

SEQ ID NO: 1626136 - RNA, 19 nt, Artificial Sequence
  Description of Artificial Sequence: Synthetic oligonucleotide
accuauugacacaguagcc

SEQ ID NO: 1626137 - RNA, 19 nt, Artificial Sequence
  Description of Artificial Sequence: Synthetic oligonucleotide
aagucugauccaacauccc

SEQ ID NO: 1626138 - RNA, 19 nt, Artificial Sequence
  Description of Artificial Sequence: Synthetic oligonucleotide
cuuugagugcauccaguag

SEQ ID NO: 1626139 - RNA, 19 nt, Artificial Sequence
  Description of Artificial Sequence: Synthetic oligonucleotide
uugguaagcuguuuccagu

SEQ ID NO: 1626140 - RNA, 19 nt, Artificial Sequence
  Description of Artificial Sequence: Synthetic oligonucleotide
cuuccaggacuauagugug

SEQ ID NO: 1626141 - RNA, 19 nt, Artificial Sequence
  Description of Artificial Sequence: Synthetic oligonucleotide
uuguagaccugggauauac

SEQ ID NO: 1626142 - RNA, 19 nt, Artificial Sequence
  Description of Artificial Sequence: Synthetic oligonucleotide
caccuagaauaucugacac

SEQ ID NO: 1626143 - RNA, 19 nt, Artificial Sequence
  Description of Artificial Sequence: Synthetic oligonucleotide
agacaggugcuccagcuca

SEQ ID NO: 1626144 - RNA, 19 nt, Artificial Sequence
  Description of Artificial Sequence: Synthetic oligonucleotide
uugagugcauccaguagaa

SEQ ID NO: 1626145 - RNA, 19 nt, Artificial Sequence
  Description of Artificial Sequence: Synthetic oligonucleotide
agugugucuguuuauggua

SEQ ID NO: 1626146 - RNA, 19 nt, Artificial Sequence
  Description of Artificial Sequence: Synthetic oligonucleotide
ucacauaauccaaucgcuu

SEQ ID NO: 1626147 - RNA, 19 nt, Artificial Sequence
  Description of Artificial Sequence: Synthetic oligonucleotide
agugcacuccaaaauauca

SEQ ID NO: 1626148 - RNA, 19 nt, Artificial Sequence
  Description of Artificial Sequence: Synthetic oligonucleotide
cauagacagcaccuuacac

SEQ ID NO: 1626149 - RNA, 19 nt, Artificial Sequence
  Description of Artificial Sequence: Synthetic oligonucleotide
cacggcuacaccuagaaua

SEQ ID NO: 1626150 - RNA, 19 nt, Artificial Sequence
  Description of Artificial Sequence: Synthetic oligonucleotide
uaaaaggauuaaucuuggu

SEQ ID NO: 1626151 - RNA, 19 nt, Artificial Sequence
  Description of Artificial Sequence: Synthetic oligonucleotide
ugugcucaauaaucuguug

SEQ ID NO: 1626152 - RNA, 19 nt, Artificial Sequence
  Description of Artificial Sequence: Synthetic oligonucleotide
acacaaccacaauccauuc

SEQ ID NO: 1626153 - RNA, 19 nt, Artificial Sequence
  Description of Artificial Sequence: Synthetic oligonucleotide
cauguaggggcgcagccag

SEQ ID NO: 1626154 - RNA, 19 nt, Artificial Sequence
  Description of Artificial Sequence: Synthetic oligonucleotide
uugauuagcauagcguuuu

SEQ ID NO: 1626155 - RNA, 19 nt, Artificial Sequence
  Description of Artificial Sequence: Synthetic oligonucleotide
aagggcucguuucccaaca

SEQ ID NO: 1626156 - RNA, 19 nt, Artificial Sequence
  Description of Artificial Sequence: Synthetic oligonucleotide
cucagaaagcaucaauuga

SEQ ID NO: 1626157 - RNA, 19 nt, Artificial Sequence
  Description of Artificial Sequence: Synthetic oligonucleotide
caguagaaucggaaaucgg

SEQ ID NO: 1626158 - RNA, 19 nt, Artificial Sequence
  Description of Artificial Sequence: Synthetic oligonucleotide
uccaguagaaucggaaauc

SEQ ID NO: 1626159 - RNA, 19 nt, Artificial Sequence
  Description of Artificial Sequence: Synthetic oligonucleotide
uauugacacaguagccacu

SEQ ID NO: 1626160 - RNA, 19 nt, Artificial Sequence
  Description of Artificial Sequence: Synthetic oligonucleotide
uucuuuagucccacaaauu

SEQ ID NO: 1626161 - RNA, 19 nt, Artificial Sequence
  Description of Artificial Sequence: Synthetic oligonucleotide
auucuggcuugguagucag

SEQ ID NO: 1626162 - RNA, 19 nt, Artificial Sequence
  Description of Artificial Sequence: Synthetic oligonucleotide
aagggacgucaauuaacca

SEQ ID NO: 1626163 - RNA, 19 nt, Artificial Sequence
  Description of Artificial Sequence: Synthetic oligonucleotide
aguccagaaugguguaguc

SEQ ID NO: 1626164 - RNA, 19 nt, Artificial Sequence
  Description of Artificial Sequence: Synthetic oligonucleotide
uaauccaaucgcuuugauu

SEQ ID NO: 1626165 - RNA, 19 nt, Artificial Sequence
  Description of Artificial Sequence: Synthetic oligonucleotide
ucgcuuugauuucuguagu

SEQ ID NO: 1626166 - RNA, 19 nt, Artificial Sequence
  Description of Artificial Sequence: Synthetic oligonucleotide
guaacuuugagugcaucca

SEQ ID NO: 1626167 - RNA, 19 nt, Artificial Sequence
  Description of Artificial Sequence: Synthetic oligonucleotide
ugguucacauaauccaauc

SEQ ID NO: 1626168 - RNA, 19 nt, Artificial Sequence
  Description of Artificial Sequence: Synthetic oligonucleotide
cacggguaauucuuuaguc

SEQ ID NO: 1626169 - RNA, 19 nt, Artificial Sequence
  Description of Artificial Sequence: Synthetic oligonucleotide
auccaaucgcuuugauuuc

SEQ ID NO: 1626170 - RNA, 19 nt, Artificial Sequence
  Description of Artificial Sequence: Synthetic oligonucleotide
gauaagggcucguuuccca

SEQ ID NO: 1626171 - RNA, 19 nt, Artificial Sequence
  Description of Artificial Sequence: Synthetic oligonucleotide
guaguuccagcaacugucg

SEQ ID NO: 1626172 - RNA, 19 nt, Artificial Sequence
  Description of Artificial Sequence: Synthetic oligonucleotide
guuuggaaagugcacucca

SEQ ID NO: 1626173 - RNA, 19 nt, Artificial Sequence
  Description of Artificial Sequence: Synthetic oligonucleotide
guagaaucggaaaucgguc

SEQ ID NO: 1626174 - RNA, 19 nt, Artificial Sequence
  Description of Artificial Sequence: Synthetic oligonucleotide
caauugauuagcauagcgu

SEQ ID NO: 1626175 - RNA, 19 nt, Artificial Sequence
  Description of Artificial Sequence: Synthetic oligonucleotide
uugggauaggcgagggugu

SEQ ID NO: 1626176 - RNA, 19 nt, Artificial Sequence
  Description of Artificial Sequence: Synthetic oligonucleotide
uguagaccugggauauaca

SEQ ID NO: 1626177 - RNA, 19 nt, Artificial Sequence
  Description of Artificial Sequence: Synthetic oligonucleotide
ugauuagcauagcguuuug

SEQ ID NO: 1626178 - RNA, 19 nt, Artificial Sequence
  Description of Artificial Sequence: Synthetic oligonucleotide
uauucuggcuugguaguca

SEQ ID NO: 1626179 - RNA, 19 nt, Artificial Sequence
  Description of Artificial Sequence: Synthetic oligonucleotide
agucuucuggcaugguuca

SEQ ID NO: 1626180 - RNA, 19 nt, Artificial Sequence
  Description of Artificial Sequence: Synthetic oligonucleotide
auaguaggucugguuuacc

SEQ ID NO: 1626181 - RNA, 19 nt, Artificial Sequence
  Description of Artificial Sequence: Synthetic oligonucleotide
uggggaggacucuucagcu

SEQ ID NO: 1626182 - RNA, 19 nt, Artificial Sequence
  Description of Artificial Sequence: Synthetic oligonucleotide
gcuguuguugaguuucucc

SEQ ID NO: 1626183 - RNA, 19 nt, Artificial Sequence
  Description of Artificial Sequence: Synthetic oligonucleotide
cugauccaacaucccaugg

SEQ ID NO: 1626184 - RNA, 19 nt, Artificial Sequence
  Description of Artificial Sequence: Synthetic oligonucleotide
gaggcuacgauaagggcuc

SEQ ID NO: 1626185 - RNA, 19 nt, Artificial Sequence
  Description of Artificial Sequence: Synthetic oligonucleotide
uggaggcuacgauaagggc

SEQ ID NO: 1626186 - RNA, 19 nt, Artificial Sequence
  Description of Artificial Sequence: Synthetic oligonucleotide
cucguuucccaacaggaca

SEQ ID NO: 1626187 - RNA, 19 nt, Artificial Sequence
  Description of Artificial Sequence: Synthetic oligonucleotide
gacuuguauugggauaggc

SEQ ID NO: 1626188 - RNA, 19 nt, Artificial Sequence
  Description of Artificial Sequence: Synthetic oligonucleotide
aacuuugagugcauccagu

SEQ ID NO: 1626189 - RNA, 19 nt, Artificial Sequence
  Description of Artificial Sequence: Synthetic oligonucleotide
uugacucaauucuuccauc

SEQ ID NO: 1626190 - RNA, 19 nt, Artificial Sequence
  Description of Artificial Sequence: Synthetic oligonucleotide
ccacaauccauucuugccc

SEQ ID NO: 1626191 - RNA, 19 nt, Artificial Sequence
  Description of Artificial Sequence: Synthetic oligonucleotide
uuggacuuguauugggaua

SEQ ID NO: 1626192 - RNA, 19 nt, Artificial Sequence
  Description of Artificial Sequence: Synthetic oligonucleotide
aggauuaaucuugguuuuc

SEQ ID NO: 1626193 - RNA, 19 nt, Artificial Sequence
  Description of Artificial Sequence: Synthetic oligonucleotide
acauaguaggucugguuua

SEQ ID NO: 1626194 - RNA, 19 nt, Artificial Sequence
  Description of Artificial Sequence: Synthetic oligonucleotide
aucggucugacagucauaa

SEQ ID NO: 1626195 - RNA, 19 nt, Artificial Sequence
  Description of Artificial Sequence: Synthetic oligonucleotide
ugugucuguuuaugguaga

SEQ ID NO: 1626196 - RNA, 19 nt, Artificial Sequence
  Description of Artificial Sequence: Synthetic oligonucleotide
cuuuagucccacaaauuua

SEQ ID NO: 1626197 - RNA, 19 nt, Artificial Sequence
  Description of Artificial Sequence: Synthetic oligonucleotide
uagcguuuugguagcuucu

SEQ ID NO: 1626198 - RNA, 19 nt, Artificial Sequence
  Description of Artificial Sequence: Synthetic oligonucleotide
cuagggcuugacucaauuc

SEQ ID NO: 1626199 - RNA, 19 nt, Artificial Sequence
  Description of Artificial Sequence: Synthetic oligonucleotide
acaguacuuggacuuguau

SEQ ID NO: 1626200 - RNA, 19 nt, Artificial Sequence
  Description of Artificial Sequence: Synthetic oligonucleotide
ccaccaaaggaguacuucc

SEQ ID NO: 1626201 - RNA, 19 nt, Artificial Sequence
  Description of Artificial Sequence: Synthetic oligonucleotide
ugucuguuuaugguagaaa

SEQ ID NO: 1626202 - RNA, 19 nt, Artificial Sequence
  Description of Artificial Sequence: Synthetic oligonucleotide
aagcaucaauugauuagca

SEQ ID NO: 1626203 - RNA, 19 nt, Artificial Sequence
  Description of Artificial Sequence: Synthetic oligonucleotide
cuugguagucaguggacca

SEQ ID NO: 1626204 - RNA, 19 nt, Artificial Sequence
  Description of Artificial Sequence: Synthetic oligonucleotide
ggcaugguucacauaaucc

SEQ ID NO: 1626205 - RNA, 19 nt, Artificial Sequence
  Description of Artificial Sequence: Synthetic oligonucleotide
uguccucuaguuguccaug

SEQ ID NO: 1626206 - RNA, 19 nt, Artificial Sequence
  Description of Artificial Sequence: Synthetic oligonucleotide
uauugggauaggcgagggu

SEQ ID NO: 1626207 - RNA, 19 nt, Artificial Sequence
  Description of Artificial Sequence: Synthetic oligonucleotide
guaaucgcauauauuuaca

SEQ ID NO: 1626208 - RNA, 19 nt, Artificial Sequence
  Description of Artificial Sequence: Synthetic oligonucleotide
agcauauucuggcuuggua

SEQ ID NO: 1626209 - RNA, 19 nt, Artificial Sequence
  Description of Artificial Sequence: Synthetic oligonucleotide
accuuacacaggcucucag

SEQ ID NO: 1626210 - RNA, 19 nt, Artificial Sequence
  Description of Artificial Sequence: Synthetic oligonucleotide
cauaguaggucugguuuac

SEQ ID NO: 1626211 - RNA, 19 nt, Artificial Sequence
  Description of Artificial Sequence: Synthetic oligonucleotide
guauugggauaggcgaggg

SEQ ID NO: 1626212 - RNA, 19 nt, Artificial Sequence
  Description of Artificial Sequence: Synthetic oligonucleotide
gauaggcgagggugugggg

SEQ ID NO: 1626213 - RNA, 19 nt, Artificial Sequence
  Description of Artificial Sequence: Synthetic oligonucleotide
ccaguagaaucggaaaucg

SEQ ID NO: 1626214 - RNA, 19 nt, Artificial Sequence
  Description of Artificial Sequence: Synthetic oligonucleotide
uuuccagugggguggguuu

SEQ ID NO: 1626215 - RNA, 19 nt, Artificial Sequence
  Description of Artificial Sequence: Synthetic oligonucleotide
uaggggcgcagccagccca

SEQ ID NO: 1626216 - RNA, 19 nt, Artificial Sequence
  Description of Artificial Sequence: Synthetic oligonucleotide
ugcauccaguagaaucgga

SEQ ID NO: 1626217 - RNA, 19 nt, Artificial Sequence
  Description of Artificial Sequence: Synthetic oligonucleotide
ugccccaaaucugaaggga

SEQ ID NO: 1626218 - RNA, 19 nt, Artificial Sequence
  Description of Artificial Sequence: Synthetic oligonucleotide
uagacaggugcuccagcuc

SEQ ID NO: 1626219 - RNA, 19 nt, Artificial Sequence
  Description of Artificial Sequence: Synthetic oligonucleotide
cggguaauucuuuaguccc

SEQ ID NO: 1626220 - RNA, 19 nt, Artificial Sequence
  Description of Artificial Sequence: Synthetic oligonucleotide
uccaucccuguccagucau

SEQ ID NO: 1626221 - RNA, 19 nt, Artificial Sequence
  Description of Artificial Sequence: Synthetic oligonucleotide
auaagggcucguuucccaa

SEQ ID NO: 1626222 - RNA, 19 nt, Artificial Sequence
  Description of Artificial Sequence: Synthetic oligonucleotide
guagucaguggaccagcug

SEQ ID NO: 1626223 - RNA, 19 nt, Artificial Sequence
  Description of Artificial Sequence: Synthetic oligonucleotide
ccuuacacaggcucucagg

SEQ ID NO: 1626224 - RNA, 19 nt, Artificial Sequence
  Description of Artificial Sequence: Synthetic oligonucleotide
ucuaguuguccaugagguu

SEQ ID NO: 1626225 - RNA, 19 nt, Artificial Sequence
  Description of Artificial Sequence: Synthetic oligonucleotide
cguuuugguagcuucuugc

SEQ ID NO: 1626226 - RNA, 19 nt, Artificial Sequence
  Description of Artificial Sequence: Synthetic oligonucleotide
cauagugcccauucucaga

SEQ ID NO: 1626227 - RNA, 19 nt, Artificial Sequence
  Description of Artificial Sequence: Synthetic oligonucleotide
cuccaaggaacaguacuug

SEQ ID NO: 1626228 - RNA, 19 nt, Artificial Sequence
  Description of Artificial Sequence: Synthetic oligonucleotide
cagaaugguguagucuuug

SEQ ID NO: 1626229 - RNA, 19 nt, Artificial Sequence
  Description of Artificial Sequence: Synthetic oligonucleotide
gacgucaauuaaccacuca

SEQ ID NO: 1626230 - RNA, 19 nt, Artificial Sequence
  Description of Artificial Sequence: Synthetic oligonucleotide
ggauaggcgaggguguggg

SEQ ID NO: 1626231 - RNA, 19 nt, Artificial Sequence
  Description of Artificial Sequence: Synthetic oligonucleotide
aaccccuggaggcuacgau

SEQ ID NO: 1626232 - RNA, 19 nt, Artificial Sequence
  Description of Artificial Sequence: Synthetic oligonucleotide
auaauccaaucgcuuugau

SEQ ID NO: 1626233 - RNA, 19 nt, Artificial Sequence
  Description of Artificial Sequence: Synthetic oligonucleotide
agaagggaugaaaaccuau

SEQ ID NO: 1626234 - RNA, 19 nt, Artificial Sequence
  Description of Artificial Sequence: Synthetic oligonucleotide
ggguugguaagcuguuucc

SEQ ID NO: 1626235 - RNA, 19 nt, Artificial Sequence
  Description of Artificial Sequence: Synthetic oligonucleotide
gaaucggaaaucggucuga

SEQ ID NO: 1626236 - RNA, 19 nt, Artificial Sequence
  Description of Artificial Sequence: Synthetic oligonucleotide
auugauuagcauagcguuu

SEQ ID NO: 1626237 - RNA, 19 nt, Artificial Sequence
  Description of Artificial Sequence: Synthetic oligonucleotide
caggugcuccagcucauag

SEQ ID NO: 1626238 - RNA, 19 nt, Artificial Sequence
  Description of Artificial Sequence: Synthetic oligonucleotide
cauaauccaaucgcuuuga

SEQ ID NO: 1626239 - RNA, 19 nt, Artificial Sequence
  Description of Artificial Sequence: Synthetic oligonucleotide
uccccacucuccaucccug

SEQ ID NO: 1626240 - RNA, 19 nt, Artificial Sequence
  Description of Artificial Sequence: Synthetic oligonucleotide
aucggaaaucggucugaca

SEQ ID NO: 1626241 - RNA, 19 nt, Artificial Sequence
  Description of Artificial Sequence: Synthetic oligonucleotide
gcucaauaaucuguuggag

SEQ ID NO: 1626242 - RNA, 19 nt, Artificial Sequence
  Description of Artificial Sequence: Synthetic oligonucleotide
cuaccuccauccguugggg

SEQ ID NO: 1626243 - RNA, 19 nt, Artificial Sequence
  Description of Artificial Sequence: Synthetic oligonucleotide
caccaaaggaguacuucca

SEQ ID NO: 1626244 - RNA, 19 nt, Artificial Sequence
  Description of Artificial Sequence: Synthetic oligonucleotide
gucggcgccgcucacucug

SEQ ID NO: 1626245 - RNA, 19 nt, Artificial Sequence
  Description of Artificial Sequence: Synthetic oligonucleotide
uaccagcuagggcuugacu

SEQ ID NO: 1626246 - RNA, 19 nt, Artificial Sequence
  Description of Artificial Sequence: Synthetic oligonucleotide
gaggguguggggcagcugu

SEQ ID NO: 1626247 - RNA, 19 nt, Artificial Sequence
  Description of Artificial Sequence: Synthetic oligonucleotide
gguaauucuuuagucccac

SEQ ID NO: 1626248 - RNA, 19 nt, Artificial Sequence
  Description of Artificial Sequence: Synthetic oligonucleotide
cacacaaccacaauccauu

SEQ ID NO: 1626249 - RNA, 19 nt, Artificial Sequence
  Description of Artificial Sequence: Synthetic oligonucleotide
cauccaaaacauaguaggu

SEQ ID NO: 1626250 - RNA, 19 nt, Artificial Sequence
  Description of Artificial Sequence: Synthetic oligonucleotide
cagcuagucuucuggcaug

SEQ ID NO: 1626251 - RNA, 19 nt, Artificial Sequence
  Description of Artificial Sequence: Synthetic oligonucleotide
guagacaggugcuccagcu

SEQ ID NO: 1626252 - RNA, 19 nt, Artificial Sequence
  Description of Artificial Sequence: Synthetic oligonucleotide
ucucuccgaguccuucuuc

SEQ ID NO: 1626253 - RNA, 19 nt, Artificial Sequence
  Description of Artificial Sequence: Synthetic oligonucleotide
agccagcccaccaaaggag

SEQ ID NO: 1626254 - RNA, 19 nt, Artificial Sequence
  Description of Artificial Sequence: Synthetic oligonucleotide
ccccaaaucugaagggacg

SEQ ID NO: 1626255 - RNA, 19 nt, Artificial Sequence
  Description of Artificial Sequence: Synthetic oligonucleotide
gguuuggaaagugcacucc

SEQ ID NO: 1626256 - RNA, 19 nt, Artificial Sequence
  Description of Artificial Sequence: Synthetic oligonucleotide
ggaaaucggucugacaguc

SEQ ID NO: 1626257 - RNA, 19 nt, Artificial Sequence
  Description of Artificial Sequence: Synthetic oligonucleotide
uccagugggguggguuugg

SEQ ID NO: 1626258 - RNA, 19 nt, Artificial Sequence
  Description of Artificial Sequence: Synthetic oligonucleotide
cacucagaaagcaucaauu

SEQ ID NO: 1626259 - RNA, 19 nt, Artificial Sequence
  Description of Artificial Sequence: Synthetic oligonucleotide
acggcuacaccuagaauau

SEQ ID NO: 1626260 - RNA, 19 nt, Artificial Sequence
  Description of Artificial Sequence: Synthetic oligonucleotide
aggcucucaggaguacacg

SEQ ID NO: 1626261 - RNA, 19 nt, Artificial Sequence
  Description of Artificial Sequence: Synthetic oligonucleotide
caccaaggugccagucgcg

SEQ ID NO: 1626262 - RNA, 19 nt, Artificial Sequence
  Description of Artificial Sequence: Synthetic oligonucleotide
ccacaguaaagagauaauc

SEQ ID NO: 1626263 - RNA, 19 nt, Artificial Sequence
  Description of Artificial Sequence: Synthetic oligonucleotide
aggguguccccgccagcac

SEQ ID NO: 1626264 - RNA, 19 nt, Artificial Sequence
  Description of Artificial Sequence: Synthetic oligonucleotide
ugggauaggcgagggugug

SEQ ID NO: 1626265 - RNA, 19 nt, Artificial Sequence
  Description of Artificial Sequence: Synthetic oligonucleotide
gugcccauucucagaagcc

SEQ ID NO: 1626266 - RNA, 19 nt, Artificial Sequence
  Description of Artificial Sequence: Synthetic oligonucleotide
cucacucugcuccaaggaa

SEQ ID NO: 1626267 - RNA, 19 nt, Artificial Sequence
  Description of Artificial Sequence: Synthetic oligonucleotide
ccuauugacacaguagcca

SEQ ID NO: 1626268 - RNA, 19 nt, Artificial Sequence
  Description of Artificial Sequence: Synthetic oligonucleotide
agggcucguuucccaacag

SEQ ID NO: 1626269 - RNA, 19 nt, Artificial Sequence
  Description of Artificial Sequence: Synthetic oligonucleotide
acaauccauucuugcccca

SEQ ID NO: 1626270 - RNA, 19 nt, Artificial Sequence
  Description of Artificial Sequence: Synthetic oligonucleotide
cuuccaucuucccgcacca

SEQ ID NO: 1626271 - RNA, 19 nt, Artificial Sequence
  Description of Artificial Sequence: Synthetic oligonucleotide
cacauaauccaaucgcuuu

SEQ ID NO: 1626272 - RNA, 19 nt, Artificial Sequence
  Description of Artificial Sequence: Synthetic oligonucleotide
cuccucuugugcucaauaa

SEQ ID NO: 1626273 - RNA, 19 nt, Artificial Sequence
  Description of Artificial Sequence: Synthetic oligonucleotide
uuuugugggcuguccucua

SEQ ID NO: 1626274 - RNA, 19 nt, Artificial Sequence
  Description of Artificial Sequence: Synthetic oligonucleotide
ucccaacaggacacacaac

SEQ ID NO: 1626275 - RNA, 19 nt, Artificial Sequence
  Description of Artificial Sequence: Synthetic oligonucleotide
gggcucguuucccaacagg

SEQ ID NO: 1626276 - RNA, 19 nt, Artificial Sequence
  Description of Artificial Sequence: Synthetic oligonucleotide
cagccagcccaccaaagga

SEQ ID NO: 1626277 - RNA, 19 nt, Artificial Sequence
  Description of Artificial Sequence: Synthetic oligonucleotide
aguagccacucuuggugua

SEQ ID NO: 1626278 - RNA, 19 nt, Artificial Sequence
  Description of Artificial Sequence: Synthetic oligonucleotide
cuuggacuuguauugggau

SEQ ID NO: 1626279 - RNA, 19 nt, Artificial Sequence
  Description of Artificial Sequence: Synthetic oligonucleotide
ccgccagcacaucacaucc

SEQ ID NO: 1626280 - RNA, 19 nt, Artificial Sequence
  Description of Artificial Sequence: Synthetic oligonucleotide
ucaggaguacacggguaau

SEQ ID NO: 1626281 - RNA, 19 nt, Artificial Sequence
  Description of Artificial Sequence: Synthetic oligonucleotide
uuguugaguuucuccuguu

SEQ ID NO: 1626282 - RNA, 19 nt, Artificial Sequence
  Description of Artificial Sequence: Synthetic oligonucleotide
cugaagggacgucaauuaa

SEQ ID NO: 1626283 - RNA, 19 nt, Artificial Sequence
  Description of Artificial Sequence: Synthetic oligonucleotide
gacaccauguaggggcgca

SEQ ID NO: 1626284 - RNA, 19 nt, Artificial Sequence
  Description of Artificial Sequence: Synthetic oligonucleotide
augagguucccagggcugu

SEQ ID NO: 1626285 - RNA, 19 nt, Artificial Sequence
  Description of Artificial Sequence: Synthetic oligonucleotide
gaaaucggucugacaguca

SEQ ID NO: 1626286 - RNA, 19 nt, Artificial Sequence
  Description of Artificial Sequence: Synthetic oligonucleotide
ccaaggaacaguacuugga

SEQ ID NO: 1626287 - RNA, 19 nt, Artificial Sequence
  Description of Artificial Sequence: Synthetic oligonucleotide
ugguaacuuugagugcauc

SEQ ID NO: 1626288 - RNA, 19 nt, Artificial Sequence
  Description of Artificial Sequence: Synthetic oligonucleotide
aguacacggguaauucuuu

SEQ ID NO: 1626289 - RNA, 19 nt, Artificial Sequence
  Description of Artificial Sequence: Synthetic oligonucleotide
ggcucguuucccaacagga

SEQ ID NO: 1626290 - RNA, 19 nt, Artificial Sequence
  Description of Artificial Sequence: Synthetic oligonucleotide
aagccuugugugagaauuu

SEQ ID NO: 1626291 - RNA, 19 nt, Artificial Sequence
  Description of Artificial Sequence: Synthetic oligonucleotide
accccaagucugauccaac

SEQ ID NO: 1626292 - RNA, 19 nt, Artificial Sequence
  Description of Artificial Sequence: Synthetic oligonucleotide
ggaggcuacgauaagggcu

SEQ ID NO: 1626293 - RNA, 19 nt, Artificial Sequence
  Description of Artificial Sequence: Synthetic oligonucleotide
aggugccagucgcgcacac

SEQ ID NO: 1626294 - RNA, 19 nt, Artificial Sequence
  Description of Artificial Sequence: Synthetic oligonucleotide
guacacggguaauucuuua

SEQ ID NO: 1626295 - RNA, 19 nt, Artificial Sequence
  Description of Artificial Sequence: Synthetic oligonucleotide
gaguacacggguaauucuu

SEQ ID NO: 1626296 - RNA, 19 nt, Artificial Sequence
  Description of Artificial Sequence: Synthetic oligonucleotide
gcgccgcucacucugcucc

SEQ ID NO: 1626297 - RNA, 19 nt, Artificial Sequence
  Description of Artificial Sequence: Synthetic oligonucleotide
cauuguagaccugggauau

SEQ ID NO: 1626298 - RNA, 19 nt, Artificial Sequence
  Description of Artificial Sequence: Synthetic oligonucleotide
ggcuacaccuagaauaucu

SEQ ID NO: 1626299 - RNA, 19 nt, Artificial Sequence
  Description of Artificial Sequence: Synthetic oligonucleotide
auguaggggcgcagccagc

SEQ ID NO: 1626300 - RNA, 19 nt, Artificial Sequence
  Description of Artificial Sequence: Synthetic oligonucleotide
ugacaccauguaggggcgc

SEQ ID NO: 1626301 - RNA, 19 nt, Artificial Sequence
  Description of Artificial Sequence: Synthetic oligonucleotide
agccuugugugagaauuua

SEQ ID NO: 1626302 - RNA, 19 nt, Artificial Sequence
  Description of Artificial Sequence: Synthetic oligonucleotide
cugcuccaaggaacaguac

SEQ ID NO: 1626303 - RNA, 19 nt, Artificial Sequence
  Description of Artificial Sequence: Synthetic oligonucleotide
ggauuaaucuugguuuucu

SEQ ID NO: 1626304 - RNA, 19 nt, Artificial Sequence
  Description of Artificial Sequence: Synthetic oligonucleotide
ggcacggcuacaccuagaa

SEQ ID NO: 1626305 - RNA, 19 nt, Artificial Sequence
  Description of Artificial Sequence: Synthetic oligonucleotide
cagaagggaugaaaaccua

SEQ ID NO: 1626306 - RNA, 19 nt, Artificial Sequence
  Description of Artificial Sequence: Synthetic oligonucleotide
cucucaggaguacacgggu

SEQ ID NO: 1626307 - RNA, 19 nt, Artificial Sequence
  Description of Artificial Sequence: Synthetic oligonucleotide
gggacgucaauuaaccacu

SEQ ID NO: 1626308 - RNA, 19 nt, Artificial Sequence
  Description of Artificial Sequence: Synthetic oligonucleotide
gagcuggugaccagcauau

SEQ ID NO: 1626309 - RNA, 19 nt, Artificial Sequence
  Description of Artificial Sequence: Synthetic oligonucleotide
caacugucggcgccgcuca

SEQ ID NO: 1626310 - RNA, 19 nt, Artificial Sequence
  Description of Artificial Sequence: Synthetic oligonucleotide
aaucggucugacagucaua

SEQ ID NO: 1626311 - RNA, 19 nt, Artificial Sequence
  Description of Artificial Sequence: Synthetic oligonucleotide
acaccauguaggggcgcag

SEQ ID NO: 1626312 - RNA, 19 nt, Artificial Sequence
  Description of Artificial Sequence: Synthetic oligonucleotide
gucugauccaacaucccau

SEQ ID NO: 1626313 - RNA, 19 nt, Artificial Sequence
  Description of Artificial Sequence: Synthetic oligonucleotide
cuaccagcuagggcuugac

SEQ ID NO: 1626314 - RNA, 19 nt, Artificial Sequence
  Description of Artificial Sequence: Synthetic oligonucleotide
ggacuuguauugggauagg

SEQ ID NO: 1626315 - RNA, 19 nt, Artificial Sequence
  Description of Artificial Sequence: Synthetic oligonucleotide
accacucagaaagcaucaa

SEQ ID NO: 1626316 - RNA, 19 nt, Artificial Sequence
  Description of Artificial Sequence: Synthetic oligonucleotide
ggauucuaccuccauccgu

SEQ ID NO: 1626317 - RNA, 19 nt, Artificial Sequence
  Description of Artificial Sequence: Synthetic oligonucleotide
guacuuccaggacuauagu

SEQ ID NO: 1626318 - RNA, 19 nt, Artificial Sequence
  Description of Artificial Sequence: Synthetic oligonucleotide
gcuguccucuaguugucca

SEQ ID NO: 1626319 - RNA, 19 nt, Artificial Sequence
  Description of Artificial Sequence: Synthetic oligonucleotide
gcauccaguagaaucggaa

SEQ ID NO: 1626320 - RNA, 19 nt, Artificial Sequence
  Description of Artificial Sequence: Synthetic oligonucleotide
cacaaccacaauccauucu

SEQ ID NO: 1626321 - RNA, 19 nt, Artificial Sequence
  Description of Artificial Sequence: Synthetic oligonucleotide
gaccagcauauucuggcuu

SEQ ID NO: 1626322 - RNA, 19 nt, Artificial Sequence
  Description of Artificial Sequence: Synthetic oligonucleotide
ggaguacacggguaauucu

SEQ ID NO: 1626323 - RNA, 19 nt, Artificial Sequence
  Description of Artificial Sequence: Synthetic oligonucleotide
cuagucuucuggcaugguu

SEQ ID NO: 1626324 - RNA, 19 nt, Artificial Sequence
  Description of Artificial Sequence: Synthetic oligonucleotide
acugucggcgccgcucacu

SEQ ID NO: 1626325 - RNA, 19 nt, Artificial Sequence
  Description of Artificial Sequence: Synthetic oligonucleotide
cagcuggcacggcuacacc

SEQ ID NO: 1626326 - RNA, 19 nt, Artificial Sequence
  Description of Artificial Sequence: Synthetic oligonucleotide
gggauaggcgagggugugg

SEQ ID NO: 1626327 - RNA, 19 nt, Artificial Sequence
  Description of Artificial Sequence: Synthetic oligonucleotide
cgcaccaaggugccagucg

SEQ ID NO: 1626328 - RNA, 19 nt, Artificial Sequence
  Description of Artificial Sequence: Synthetic oligonucleotide
cuccuggcagaagggauga

SEQ ID NO: 1626329 - RNA, 19 nt, Artificial Sequence
  Description of Artificial Sequence: Synthetic oligonucleotide
caaucgcuuugauuucugu

SEQ ID NO: 1626330 - RNA, 19 nt, Artificial Sequence
  Description of Artificial Sequence: Synthetic oligonucleotide
ccagcaacugucggcgccg

SEQ ID NO: 1626331 - RNA, 19 nt, Artificial Sequence
  Description of Artificial Sequence: Synthetic oligonucleotide
ggguaauucuuuaguccca

SEQ ID NO: 1626332 - RNA, 19 nt, Artificial Sequence
  Description of Artificial Sequence: Synthetic oligonucleotide
caguagccacucuuggugu

SEQ ID NO: 1626333 - RNA, 19 nt, Artificial Sequence
  Description of Artificial Sequence: Synthetic oligonucleotide
cagaagccuugugugagaa

SEQ ID NO: 1626334 - RNA, 19 nt, Artificial Sequence
  Description of Artificial Sequence: Synthetic oligonucleotide
aggcuacgauaagggcucg

SEQ ID NO: 1626335 - RNA, 19 nt, Artificial Sequence
  Description of Artificial Sequence: Synthetic oligonucleotide
gaaccccuggaggcuacga

SEQ ID NO: 1626336 - RNA, 19 nt, Artificial Sequence
  Description of Artificial Sequence: Synthetic oligonucleotide
gaaguccaucuaccucaaa

SEQ ID NO: 1626337 - RNA, 19 nt, Artificial Sequence
  Description of Artificial Sequence: Synthetic oligonucleotide
gcucguuucccaacaggac

SEQ ID NO: 1626338 - RNA, 19 nt, Artificial Sequence
  Description of Artificial Sequence: Synthetic oligonucleotide
gccccaaaucugaagggac

SEQ ID NO: 1626339 - RNA, 19 nt, Artificial Sequence
  Description of Artificial Sequence: Synthetic oligonucleotide
cgcucacucugcuccaagg

SEQ ID NO: 1626340 - RNA, 19 nt, Artificial Sequence
  Description of Artificial Sequence: Synthetic oligonucleotide
ggcuugguagucaguggac

SEQ ID NO: 1626341 - RNA, 19 nt, Artificial Sequence
  Description of Artificial Sequence: Synthetic oligonucleotide
gggcuugacucaauucuuc

SEQ ID NO: 1626342 - RNA, 19 nt, Artificial Sequence
  Description of Artificial Sequence: Synthetic oligonucleotide
caauccauucuugccccaa

SEQ ID NO: 1626343 - RNA, 19 nt, Artificial Sequence
  Description of Artificial Sequence: Synthetic oligonucleotide
gggguagacaggugcucca

SEQ ID NO: 1626344 - RNA, 19 nt, Artificial Sequence
  Description of Artificial Sequence: Synthetic oligonucleotide
ugucggcgccgcucacucu

SEQ ID NO: 1626345 - RNA, 19 nt, Artificial Sequence
  Description of Artificial Sequence: Synthetic oligonucleotide
auuguagaccugggauaua

SEQ ID NO: 1626346 - RNA, 19 nt, Artificial Sequence
  Description of Artificial Sequence: Synthetic oligonucleotide
caggcuuuugugggcuguc

SEQ ID NO: 1626347 - RNA, 19 nt, Artificial Sequence
  Description of Artificial Sequence: Synthetic oligonucleotide
cuccaucccuguccaguca

SEQ ID NO: 1626348 - RNA, 19 nt, Artificial Sequence
  Description of Artificial Sequence: Synthetic oligonucleotide
ccuguugccuccuggcaga

SEQ ID NO: 1626349 - RNA, 19 nt, Artificial Sequence
  Description of Artificial Sequence: Synthetic oligonucleotide
cuacgauaagggcucguuu

SEQ ID NO: 1626350 - RNA, 19 nt, Artificial Sequence
  Description of Artificial Sequence: Synthetic oligonucleotide
cuagaauaucugacaccau

SEQ ID NO: 1626351 - RNA, 19 nt, Artificial Sequence
  Description of Artificial Sequence: Synthetic oligonucleotide
agcuaccagcuagggcuug

SEQ ID NO: 1626352 - RNA, 19 nt, Artificial Sequence
  Description of Artificial Sequence: Synthetic oligonucleotide
ccccaagucugauccaaca

SEQ ID NO: 1626353 - RNA, 19 nt, Artificial Sequence
  Description of Artificial Sequence: Synthetic oligonucleotide
ggcuguccucuaguugucc

SEQ ID NO: 1626354 - RNA, 19 nt, Artificial Sequence
  Description of Artificial Sequence: Synthetic oligonucleotide
ggcuuuugugggcuguccu

SEQ ID NO: 1626355 - RNA, 19 nt, Artificial Sequence
  Description of Artificial Sequence: Synthetic oligonucleotide
cgauaagggcucguuuccc

SEQ ID NO: 1626356 - RNA, 19 nt, Artificial Sequence
  Description of Artificial Sequence: Synthetic oligonucleotide
ggacgucaauuaaccacuc

SEQ ID NO: 1626357 - RNA, 19 nt, Artificial Sequence
  Description of Artificial Sequence: Synthetic oligonucleotide
cagcaacugucggcgccgc

SEQ ID NO: 1626358 - RNA, 19 nt, Artificial Sequence
  Description of Artificial Sequence: Synthetic oligonucleotide
cuguccucuaguuguccau

SEQ ID NO: 1626359 - RNA, 19 nt, Artificial Sequence
  Description of Artificial Sequence: Synthetic oligonucleotide
cccuguccagucaucuuca

SEQ ID NO: 1626360 - RNA, 19 nt, Artificial Sequence
  Description of Artificial Sequence: Synthetic oligonucleotide
ccccuggaggcuacgauaa

SEQ ID NO: 1626361 - RNA, 19 nt, Artificial Sequence
  Description of Artificial Sequence: Synthetic oligonucleotide
ggugccagucgcgcacacc

SEQ ID NO: 1626362 - RNA, 19 nt, Artificial Sequence
  Description of Artificial Sequence: Synthetic oligonucleotide
ggcgcagccagcccaccaa

SEQ ID NO: 1626363 - RNA, 19 nt, Artificial Sequence
  Description of Artificial Sequence: Synthetic oligonucleotide
gguuuaccucacuguaaau

SEQ ID NO: 1626364 - RNA, 19 nt, Artificial Sequence
  Description of Artificial Sequence: Synthetic oligonucleotide
uggcuccucuugugcucaa

SEQ ID NO: 1626365 - RNA, 19 nt, Artificial Sequence
  Description of Artificial Sequence: Synthetic oligonucleotide
gcuagggcuugacucaauu

SEQ ID NO: 1626366 - RNA, 19 nt, Artificial Sequence
  Description of Artificial Sequence: Synthetic oligonucleotide
ccacaccccaagucugauc

SEQ ID NO: 1626367 - RNA, 19 nt, Artificial Sequence
  Description of Artificial Sequence: Synthetic oligonucleotide
cuggcaugguucacauaau

SEQ ID NO: 1626368 - RNA, 19 nt, Artificial Sequence
  Description of Artificial Sequence: Synthetic oligonucleotide
cgcauauauuuacauugua

SEQ ID NO: 1626369 - RNA, 19 nt, Artificial Sequence
  Description of Artificial Sequence: Synthetic oligonucleotide
cagcuagggcuugacucaa

SEQ ID NO: 1626370 - RNA, 19 nt, Artificial Sequence
  Description of Artificial Sequence: Synthetic oligonucleotide
gcuaccagcuagggcuuga

SEQ ID NO: 1626371 - RNA, 19 nt, Artificial Sequence
  Description of Artificial Sequence: Synthetic oligonucleotide
cauagcguuuugguagcuu

SEQ ID NO: 1626372 - RNA, 19 nt, Artificial Sequence
  Description of Artificial Sequence: Synthetic oligonucleotide
ccgcucacucugcuccaag

SEQ ID NO: 1626373 - RNA, 19 nt, Artificial Sequence
  Description of Artificial Sequence: Synthetic oligonucleotide
gcuggcacggcuacaccua

SEQ ID NO: 1626374 - RNA, 19 nt, Artificial Sequence
  Description of Artificial Sequence: Synthetic oligonucleotide
ccacucagaaagcaucaau

SEQ ID NO: 1626375 - RNA, 19 nt, Artificial Sequence
  Description of Artificial Sequence: Synthetic oligonucleotide
gcuacgauaagggcucguu

SEQ ID NO: 1626376 - RNA, 19 nt, Artificial Sequence
  Description of Artificial Sequence: Synthetic oligonucleotide
gccagggucaauguccauu

SEQ ID NO: 1626377 - RNA, 19 nt, Artificial Sequence
  Description of Artificial Sequence: Synthetic oligonucleotide
ggacuauagugugucuguu

SEQ ID NO: 1626378 - RNA, 19 nt, Artificial Sequence
  Description of Artificial Sequence: Synthetic oligonucleotide
cuguugccuccuggcagaa

SEQ ID NO: 1626379 - RNA, 19 nt, Artificial Sequence
  Description of Artificial Sequence: Synthetic oligonucleotide
gccagcccaccaaaggagu

SEQ ID NO: 1626380 - RNA, 19 nt, Artificial Sequence
  Description of Artificial Sequence: Synthetic oligonucleotide
gcgcagccagcccaccaaa

SEQ ID NO: 1626381 - RNA, 19 nt, Artificial Sequence
  Description of Artificial Sequence: Synthetic oligonucleotide
gccuugugugagaauuuau

SEQ ID NO: 1626382 - RNA, 19 nt, Artificial Sequence
  Description of Artificial Sequence: Synthetic oligonucleotide
cggaaaucggucugacagu

SEQ ID NO: 1626383 - RNA, 19 nt, Artificial Sequence
  Description of Artificial Sequence: Synthetic oligonucleotide
guguccccgccagcacauc

SEQ ID NO: 1626384 - RNA, 19 nt, Artificial Sequence
  Description of Artificial Sequence: Synthetic oligonucleotide
ccaggacuauagugugucu

SEQ ID NO: 1626385 - RNA, 19 nt, Artificial Sequence
  Description of Artificial Sequence: Synthetic oligonucleotide
gcacggcuacaccuagaau

SEQ ID NO: 1626386 - RNA, 19 nt, Artificial Sequence
  Description of Artificial Sequence: Synthetic oligonucleotide
ggcuacgauaagggcucgu

SEQ ID NO: 1626387 - RNA, 19 nt, Artificial Sequence
  Description of Artificial Sequence: Synthetic oligonucleotide
cggcuacaccuagaauauc

SEQ ID NO: 1626388 - RNA, 19 nt, Artificial Sequence
  Description of Artificial Sequence: Synthetic oligonucleotide
gcgaggguguggggcagcu

SEQ ID NO: 1626389 - RNA, 19 nt, Artificial Sequence
  Description of Artificial Sequence: Synthetic oligonucleotide
ggcuccucuugugcucaau

SEQ ID NO: 1626390 - RNA, 19 nt, Artificial Sequence
  Description of Artificial Sequence: Synthetic oligonucleotide
cccgcaccaaggugccagu

SEQ ID NO: 1626391 - RNA, 19 nt, Artificial Sequence
  Description of Artificial Sequence: Synthetic oligonucleotide
ccccgccagcacaucacau

SEQ ID NO: 1626392 - RNA, 19 nt, Artificial Sequence
  Description of Artificial Sequence: Synthetic oligonucleotide
cccacaccccaagucugau

SEQ ID NO: 1626393 - RNA, 19 nt, Artificial Sequence
  Description of Artificial Sequence: Synthetic oligonucleotide
auacauacaaguuaauugc

SEQ ID NO: 1626394 - RNA, 19 nt, Artificial Sequence
  Description of Artificial Sequence: Synthetic oligonucleotide
agcaguaguacucagaauc

SEQ ID NO: 1626395 - RNA, 19 nt, Artificial Sequence
  Description of Artificial Sequence: Synthetic oligonucleotide
aaacuguccauucacagcu

SEQ ID NO: 1626396 - RNA, 19 nt, Artificial Sequence
  Description of Artificial Sequence: Synthetic oligonucleotide
agcagaagaagaaagauac

SEQ ID NO: 1626397 - RNA, 19 nt, Artificial Sequence
  Description of Artificial Sequence: Synthetic oligonucleotide
aacgauguagccauacucc

SEQ ID NO: 1626398 - RNA, 19 nt, Artificial Sequence
  Description of Artificial Sequence: Synthetic oligonucleotide
uccucuaucauccacuuga

SEQ ID NO: 1626399 - RNA, 19 nt, Artificial Sequence
  Description of Artificial Sequence: Synthetic oligonucleotide
aaauaagacuucuuuaaaa

SEQ ID NO: 1626400 - RNA, 19 nt, Artificial Sequence
  Description of Artificial Sequence: Synthetic oligonucleotide
auacaaguuaauugcacac

SEQ ID NO: 1626401 - RNA, 19 nt, Artificial Sequence
  Description of Artificial Sequence: Synthetic oligonucleotide
  modified_base (19)..(19): a, c, u, g, unknown or other
uaauugauacugcagagan

SEQ ID NO: 1626402 - RNA, 19 nt, Artificial Sequence
  Description of Artificial Sequence: Synthetic oligonucleotide
  modified_base (15)..(15): a, c, u, g, unknown or other
ugauacugcagaganaagg

SEQ ID NO: 1626403 - RNA, 19 nt, Artificial Sequence
  Description of Artificial Sequence: Synthetic oligonucleotide
aaaagguuagccuuauuaa

SEQ ID NO: 1626404 - RNA, 19 nt, Artificial Sequence
  Description of Artificial Sequence: Synthetic oligonucleotide
uauuacaccacacagcaua

SEQ ID NO: 1626405 - RNA, 19 nt, Artificial Sequence
  Description of Artificial Sequence: Synthetic oligonucleotide
aaguuaauugcacaccagu

SEQ ID NO: 1626406 - RNA, 19 nt, Artificial Sequence
  Description of Artificial Sequence: Synthetic oligonucleotide
aaagauacauacaaguuaa

SEQ ID NO: 1626407 - RNA, 19 nt, Artificial Sequence
  Description of Artificial Sequence: Synthetic oligonucleotide
gaaagaaguggcuccgucg

SEQ ID NO: 1626408 - RNA, 19 nt, Artificial Sequence
  Description of Artificial Sequence: Synthetic oligonucleotide
aguaacuggcgcaugagcc

SEQ ID NO: 1626409 - RNA, 19 nt, Artificial Sequence
  Description of Artificial Sequence: Synthetic oligonucleotide
aaugaaagaaguggcuccg

SEQ ID NO: 1626410 - RNA, 19 nt, Artificial Sequence
  Description of Artificial Sequence: Synthetic oligonucleotide
ucuaugauggagcugucac

SEQ ID NO: 1626411 - RNA, 19 nt, Artificial Sequence
  Description of Artificial Sequence: Synthetic oligonucleotide
aaagguuagccuuauuaaa

SEQ ID NO: 1626412 - RNA, 19 nt, Artificial Sequence
  Description of Artificial Sequence: Synthetic oligonucleotide
cacagcauaacgauguagc

SEQ ID NO: 1626413 - RNA, 19 nt, Artificial Sequence
  Description of Artificial Sequence: Synthetic oligonucleotide
  modified_base (5)..(5): a, c, u, g, unknown or other
agganagggcaauggaacc

SEQ ID NO: 1626414 - RNA, 19 nt, Artificial Sequence
  Description of Artificial Sequence: Synthetic oligonucleotide
agcaagauuagcgggaucg

SEQ ID NO: 1626415 - RNA, 19 nt, Artificial Sequence
  Description of Artificial Sequence: Synthetic oligonucleotide
ugaguuaauugauacugca

SEQ ID NO: 1626416 - RNA, 19 nt, Artificial Sequence
  Description of Artificial Sequence: Synthetic oligonucleotide
ucugguauuacaccacaca

SEQ ID NO: 1626417 - RNA, 19 nt, Artificial Sequence
  Description of Artificial Sequence: Synthetic oligonucleotide
uugcacaccagucccauag

SEQ ID NO: 1626418 - RNA, 19 nt, Artificial Sequence
  Description of Artificial Sequence: Synthetic oligonucleotide
ucuagaugagaaacauuag

SEQ ID NO: 1626419 - RNA, 19 nt, Artificial Sequence
  Description of Artificial Sequence: Synthetic oligonucleotide
acgauguagccauacuccc

SEQ ID NO: 1626420 - RNA, 19 nt, Artificial Sequence
  Description of Artificial Sequence: Synthetic oligonucleotide
uuugugcagagccugugag

SEQ ID NO: 1626421 - RNA, 19 nt, Artificial Sequence
  Description of Artificial Sequence: Synthetic oligonucleotide
cacuugauggacucuaugc

SEQ ID NO: 1626422 - RNA, 19 nt, Artificial Sequence
  Description of Artificial Sequence: Synthetic oligonucleotide
  modified_base (7)..(7): a, c, u, g, unknown or other
cagaganaagggcacaagc

SEQ ID NO: 1626423 - RNA, 19 nt, Artificial Sequence
  Description of Artificial Sequence: Synthetic oligonucleotide
acaagcuagugcguuaugc

SEQ ID NO: 1626424 - RNA, 19 nt, Artificial Sequence
  Description of Artificial Sequence: Synthetic oligonucleotide
ugguauuacaccacacagc

SEQ ID NO: 1626425 - RNA, 19 nt, Artificial Sequence
  Description of Artificial Sequence: Synthetic oligonucleotide
uugaguuaauugauacugc

SEQ ID NO: 1626426 - RNA, 19 nt, Artificial Sequence
  Description of Artificial Sequence: Synthetic oligonucleotide
aaacuuggaucauuagcca

SEQ ID NO: 1626427 - RNA, 19 nt, Artificial Sequence
  Description of Artificial Sequence: Synthetic oligonucleotide
agcauaacgauguagccau

SEQ ID NO: 1626428 - RNA, 19 nt, Artificial Sequence
  Description of Artificial Sequence: Synthetic oligonucleotide
cugguauuacaccacacag

SEQ ID NO: 1626429 - RNA, 19 nt, Artificial Sequence
  Description of Artificial Sequence: Synthetic oligonucleotide
uccgcagcuagcaagauua

SEQ ID NO: 1626430 - RNA, 19 nt, Artificial Sequence
  Description of Artificial Sequence: Synthetic oligonucleotide
ugagccucacaucaguggc

SEQ ID NO: 1626431 - RNA, 19 nt, Artificial Sequence
  Description of Artificial Sequence: Synthetic oligonucleotide
ucguccgaaaagaagaaaa

SEQ ID NO: 1626432 - RNA, 19 nt, Artificial Sequence
  Description of Artificial Sequence: Synthetic oligonucleotide
agcucgaugucucugaggu

SEQ ID NO: 1626433 - RNA, 19 nt, Artificial Sequence
  Description of Artificial Sequence: Synthetic oligonucleotide
gccuuauuaaaauaaauca

SEQ ID NO: 1626434 - RNA, 19 nt, Artificial Sequence
  Description of Artificial Sequence: Synthetic oligonucleotide
cauguaaggagguauccug

SEQ ID NO: 1626435 - RNA, 19 nt, Artificial Sequence
  Description of Artificial Sequence: Synthetic oligonucleotide
gguauuacaccacacagca

SEQ ID NO: 1626436 - RNA, 19 nt, Artificial Sequence
  Description of Artificial Sequence: Synthetic oligonucleotide
aagcuagugcguuaugcca

SEQ ID NO: 1626437 - RNA, 19 nt, Artificial Sequence
  Description of Artificial Sequence: Synthetic oligonucleotide
  modified_base (6)..(6): a, c, u, g, unknown or other
cagganagggcaauggaac

SEQ ID NO: 1626438 - RNA, 19 nt, Artificial Sequence
  Description of Artificial Sequence: Synthetic oligonucleotide
ggaaauugccauuucaaac

SEQ ID NO: 1626439 - RNA, 19 nt, Artificial Sequence
  Description of Artificial Sequence: Synthetic oligonucleotide
aguuaauugcacaccaguc

SEQ ID NO: 1626440 - RNA, 19 nt, Artificial Sequence
  Description of Artificial Sequence: Synthetic oligonucleotide
agauuagcgggaucgcuuc

SEQ ID NO: 1626441 - RNA, 19 nt, Artificial Sequence
  Description of Artificial Sequence: Synthetic oligonucleotide
  modified_base (4)..(4): a, c, u, g, unknown or other
aganaagggcacaagcuag

SEQ ID NO: 1626442 - RNA, 19 nt, Artificial Sequence
  Description of Artificial Sequence: Synthetic oligonucleotide
ucaaugaaagaaguggcuc

SEQ ID NO: 1626443 - RNA, 19 nt, Artificial Sequence
  Description of Artificial Sequence: Synthetic oligonucleotide
auugccauuucaaacuguc

SEQ ID NO: 1626444 - RNA, 19 nt, Artificial Sequence
  Description of Artificial Sequence: Synthetic oligonucleotide
caagcuagugcguuaugcc

SEQ ID NO: 1626445 - RNA, 19 nt, Artificial Sequence
  Description of Artificial Sequence: Synthetic oligonucleotide
ucauuagccaaagcaguag

SEQ ID NO: 1626446 - RNA, 19 nt, Artificial Sequence
  Description of Artificial Sequence: Synthetic oligonucleotide
gcagcuagcaagauuagcg

SEQ ID NO: 1626447 - RNA, 19 nt, Artificial Sequence
  Description of Artificial Sequence: Synthetic oligonucleotide
cucuggucaaugaaagaag

SEQ ID NO: 1626448 - RNA, 19 nt, Artificial Sequence
  Description of Artificial Sequence: Synthetic oligonucleotide
aagguuagccuuauuaaaa

SEQ ID NO: 1626449 - RNA, 19 nt, Artificial Sequence
  Description of Artificial Sequence: Synthetic oligonucleotide
augacucuuugagaggggc

SEQ ID NO: 1626450 - RNA, 19 nt, Artificial Sequence
  Description of Artificial Sequence: Synthetic oligonucleotide
cuugauggacucuaugcuc

SEQ ID NO: 1626451 - RNA, 19 nt, Artificial Sequence
  Description of Artificial Sequence: Synthetic oligonucleotide
aguggcucugagguuaacc

SEQ ID NO: 1626452 - RNA, 19 nt, Artificial Sequence
  Description of Artificial Sequence: Synthetic oligonucleotide
aacuuggaucauuagccaa

SEQ ID NO: 1626453 - RNA, 19 nt, Artificial Sequence
  Description of Artificial Sequence: Synthetic oligonucleotide
uagugcguuaugccaagag

SEQ ID NO: 1626454 - RNA, 19 nt, Artificial Sequence
  Description of Artificial Sequence: Synthetic oligonucleotide
ugguacaucaucugccaga

SEQ ID NO: 1626455 - RNA, 19 nt, Artificial Sequence
  Description of Artificial Sequence: Synthetic oligonucleotide
cagcuagcaagauuagcgg

SEQ ID NO: 1626456 - RNA, 19 nt, Artificial Sequence
  Description of Artificial Sequence: Synthetic oligonucleotide
agugcguuaugccaagaga

SEQ ID NO: 1626457 - RNA, 19 nt, Artificial Sequence
  Description of Artificial Sequence: Synthetic oligonucleotide
ucugucgcuccgcagcuag

SEQ ID NO: 1626458 - RNA, 19 nt, Artificial Sequence
  Description of Artificial Sequence: Synthetic oligonucleotide
ggaucauuagccaaagcag

SEQ ID NO: 1626459 - RNA, 19 nt, Artificial Sequence
  Description of Artificial Sequence: Synthetic oligonucleotide
ugcguuaugccaagagaca

SEQ ID NO: 1626460 - RNA, 19 nt, Artificial Sequence
  Description of Artificial Sequence: Synthetic oligonucleotide
agccauaugucuccaagga

SEQ ID NO: 1626461 - RNA, 19 nt, Artificial Sequence
  Description of Artificial Sequence: Synthetic oligonucleotide
  modified_base (6)..(6): a, c, u, g, unknown or other
agaganaagggcacaagcu

SEQ ID NO: 1626462 - RNA, 19 nt, Artificial Sequence
  Description of Artificial Sequence: Synthetic oligonucleotide
aggaucagacuucagugga

SEQ ID NO: 1626463 - RNA, 19 nt, Artificial Sequence
  Description of Artificial Sequence: Synthetic oligonucleotide
  modified_base (5)..(5): a, c, u, g, unknown or other
gaganaagggcacaagcua

SEQ ID NO: 1626464 - RNA, 19 nt, Artificial Sequence
  Description of Artificial Sequence: Synthetic oligonucleotide
  modified_base (2)..(2): a, c, u, g, unknown or other
anagggcaauggaaccugc

SEQ ID NO: 1626465 - RNA, 19 nt, Artificial Sequence
  Description of Artificial Sequence: Synthetic oligonucleotide
guuagccuuauuaaaauaa

SEQ ID NO: 1626466 - RNA, 19 nt, Artificial Sequence
  Description of Artificial Sequence: Synthetic oligonucleotide
acucgugcgcuccaugccg

SEQ ID NO: 1626467 - RNA, 19 nt, Artificial Sequence
  Description of Artificial Sequence: Synthetic oligonucleotide
cacuuuacgccccagcuuc

SEQ ID NO: 1626468 - RNA, 19 nt, Artificial Sequence
  Description of Artificial Sequence: Synthetic oligonucleotide
cucucgggcacuuuacgcc

SEQ ID NO: 1626469 - RNA, 19 nt, Artificial Sequence
  Description of Artificial Sequence: Synthetic oligonucleotide
gagucgggagcucaguagc

SEQ ID NO: 1626470 - RNA, 19 nt, Artificial Sequence
  Description of Artificial Sequence: Synthetic oligonucleotide
  modified_base (2)..(2): a, c, u, g, unknown or other
anaagggcacaagcuagug

SEQ ID NO: 1626471 - RNA, 19 nt, Artificial Sequence
  Description of Artificial Sequence: Synthetic oligonucleotide
uccauucacagcucugcgc

SEQ ID NO: 1626472 - RNA, 19 nt, Artificial Sequence
  Description of Artificial Sequence: Synthetic oligonucleotide
ucaguagccggcuccccgg

SEQ ID NO: 1626473 - RNA, 19 nt, Artificial Sequence
  Description of Artificial Sequence: Synthetic oligonucleotide
caacuugggguguuugugc

SEQ ID NO: 1626474 - RNA, 19 nt, Artificial Sequence
  Description of Artificial Sequence: Synthetic oligonucleotide
uggcgcaugagccucacau

SEQ ID NO: 1626475 - RNA, 19 nt, Artificial Sequence
  Description of Artificial Sequence: Synthetic oligonucleotide
aaggagguauccugacucu

SEQ ID NO: 1626476 - RNA, 19 nt, Artificial Sequence
  Description of Artificial Sequence: Synthetic oligonucleotide
gacucuaugcucucauuga

SEQ ID NO: 1626477 - RNA, 19 nt, Artificial Sequence
  Description of Artificial Sequence: Synthetic oligonucleotide
uagcuccccacagagaugc

SEQ ID NO: 1626478 - RNA, 19 nt, Artificial Sequence
  Description of Artificial Sequence: Synthetic oligonucleotide
  modified_base (3)..(3): a, c, u, g, unknown or other
ganagggcaauggaaccug

SEQ ID NO: 1626479 - RNA, 19 nt, Artificial Sequence
  Description of Artificial Sequence: Synthetic oligonucleotide
gacaguaaaggcagagggc

SEQ ID NO: 1626480 - RNA, 19 nt, Artificial Sequence
  Description of Artificial Sequence: Synthetic oligonucleotide
agcucugcgccguucacag

SEQ ID NO: 1626481 - RNA, 19 nt, Artificial Sequence
  Description of Artificial Sequence: Synthetic oligonucleotide
ugagguuaaccaucuccug

SEQ ID NO: 1626482 - RNA, 19 nt, Artificial Sequence
  Description of Artificial Sequence: Synthetic oligonucleotide
cauaugucuccaaggauca

SEQ ID NO: 1626483 - RNA, 19 nt, Artificial Sequence
  Description of Artificial Sequence: Synthetic oligonucleotide
aguggaucguccgaaaaga

SEQ ID NO: 1626484 - RNA, 19 nt, Artificial Sequence
  Description of Artificial Sequence: Synthetic oligonucleotide
agguuagccuuauuaaaau

SEQ ID NO: 1626485 - RNA, 19 nt, Artificial Sequence
  Description of Artificial Sequence: Synthetic oligonucleotide
cuaucauccacuugaugga

SEQ ID NO: 1626486 - RNA, 19 nt, Artificial Sequence
  Description of Artificial Sequence: Synthetic oligonucleotide
uucagcucgaugucucuga

SEQ ID NO: 1626487 - RNA, 19 nt, Artificial Sequence
  Description of Artificial Sequence: Synthetic oligonucleotide
  modified_base (9)..(9): a, c, u, g, unknown or other
agacagganagggcaaugg

SEQ ID NO: 1626488 - RNA, 19 nt, Artificial Sequence
  Description of Artificial Sequence: Synthetic oligonucleotide
gugcguuaugccaagagac

SEQ ID NO: 1626489 - RNA, 19 nt, Artificial Sequence
  Description of Artificial Sequence: Synthetic oligonucleotide
  modified_base (8)..(8): a, c, u, g, unknown or other
gacagganagggcaaugga

SEQ ID NO: 1626490 - RNA, 19 nt, Artificial Sequence
  Description of Artificial Sequence: Synthetic oligonucleotide
uaauugcacaccaguccca

SEQ ID NO: 1626491 - RNA, 19 nt, Artificial Sequence
  Description of Artificial Sequence: Synthetic oligonucleotide
caguggaucguccgaaaag

SEQ ID NO: 1626492 - RNA, 19 nt, Artificial Sequence
  Description of Artificial Sequence: Synthetic oligonucleotide
cucuaugcucucauugaug

SEQ ID NO: 1626493 - RNA, 19 nt, Artificial Sequence
  Description of Artificial Sequence: Synthetic oligonucleotide
cucugcgccguucacagug

SEQ ID NO: 1626494 - RNA, 19 nt, Artificial Sequence
  Description of Artificial Sequence: Synthetic oligonucleotide
gguauccugacucuccagc

SEQ ID NO: 1626495 - RNA, 19 nt, Artificial Sequence
  Description of Artificial Sequence: Synthetic oligonucleotide
cauaacgauguagccauac

SEQ ID NO: 1626496 - RNA, 19 nt, Artificial Sequence
  Description of Artificial Sequence: Synthetic oligonucleotide
ucaguggaucguccgaaaa

SEQ ID NO: 1626497 - RNA, 19 nt, Artificial Sequence
  Description of Artificial Sequence: Synthetic oligonucleotide
uccgucguguuuguaugcg

SEQ ID NO: 1626498 - RNA, 19 nt, Artificial Sequence
  Description of Artificial Sequence: Synthetic oligonucleotide
uggaaccugcucgaugggg

SEQ ID NO: 1626499 - RNA, 19 nt, Artificial Sequence
  Description of Artificial Sequence: Synthetic oligonucleotide
uuuacgccccagcuucagc

SEQ ID NO: 1626500 - RNA, 19 nt, Artificial Sequence
  Description of Artificial Sequence: Synthetic oligonucleotide
  modified_base (7)..(7): a, c, u, g, unknown or other
acagganagggcaauggaa

SEQ ID NO: 1626501 - RNA, 19 nt, Artificial Sequence
  Description of Artificial Sequence: Synthetic oligonucleotide
acucuaugcucucauugau

SEQ ID NO: 1626502 - RNA, 19 nt, Artificial Sequence
  Description of Artificial Sequence: Synthetic oligonucleotide
guaguacucagaauccaac

SEQ ID NO: 1626503 - RNA, 19 nt, Artificial Sequence
  Description of Artificial Sequence: Synthetic oligonucleotide
caugagccucacaucagug

SEQ ID NO: 1626504 - RNA, 19 nt, Artificial Sequence
  Description of Artificial Sequence: Synthetic oligonucleotide
cugaggacgugcaguuugg

SEQ ID NO: 1626505 - RNA, 19 nt, Artificial Sequence
  Description of Artificial Sequence: Synthetic oligonucleotide
cagcagacugcacaggcug

SEQ ID NO: 1626506 - RNA, 19 nt, Artificial Sequence
  Description of Artificial Sequence: Synthetic oligonucleotide
ugccauguaaggagguauc

SEQ ID NO: 1626507 - RNA, 19 nt, Artificial Sequence
  Description of Artificial Sequence: Synthetic oligonucleotide
acuucaguggaucguccga

SEQ ID NO: 1626508 - RNA, 19 nt, Artificial Sequence
  Description of Artificial Sequence: Synthetic oligonucleotide
cucaguagccggcuccccg

SEQ ID NO: 1626509 - RNA, 19 nt, Artificial Sequence
  Description of Artificial Sequence: Synthetic oligonucleotide
aagauuagcgggaucgcuu

SEQ ID NO: 1626510 - RNA, 19 nt, Artificial Sequence
  Description of Artificial Sequence: Synthetic oligonucleotide
gaucauuagccaaagcagu

SEQ ID NO: 1626511 - RNA, 19 nt, Artificial Sequence
  Description of Artificial Sequence: Synthetic oligonucleotide
auauagcagcagaagaaga

SEQ ID NO: 1626512 - RNA, 19 nt, Artificial Sequence
  Description of Artificial Sequence: Synthetic oligonucleotide
caugacucuuugagagggg

SEQ ID NO: 1626513 - RNA, 19 nt, Artificial Sequence
  Description of Artificial Sequence: Synthetic oligonucleotide
gaaggggucugauggccug

SEQ ID NO: 1626514 - RNA, 19 nt, Artificial Sequence
  Description of Artificial Sequence: Synthetic oligonucleotide
aacgggccgucuuccauga

SEQ ID NO: 1626515 - RNA, 19 nt, Artificial Sequence
  Description of Artificial Sequence: Synthetic oligonucleotide
  modified_base (10)..(10): a, c, u, g, unknown or other
gagacagganagggcaaug

SEQ ID NO: 1626516 - RNA, 19 nt, Artificial Sequence
  Description of Artificial Sequence: Synthetic oligonucleotide
aguaaaggcagagggcgca

SEQ ID NO: 1626517 - RNA, 19 nt, Artificial Sequence
  Description of Artificial Sequence: Synthetic oligonucleotide
acacagcauaacgauguag

SEQ ID NO: 1626518 - RNA, 19 nt, Artificial Sequence
  Description of Artificial Sequence: Synthetic oligonucleotide
  modified_base (18)..(18): a, c, u, g, unknown or other
aauugauacugcagagana

SEQ ID NO: 1626519 - RNA, 19 nt, Artificial Sequence
  Description of Artificial Sequence: Synthetic oligonucleotide
aauugccauuucaaacugu

SEQ ID NO: 1626520 - RNA, 19 nt, Artificial Sequence
  Description of Artificial Sequence: Synthetic oligonucleotide
gcgacacugacaguaaagg

SEQ ID NO: 1626521 - RNA, 19 nt, Artificial Sequence
  Description of Artificial Sequence: Synthetic oligonucleotide
gagcucaguagccggcucc

SEQ ID NO: 1626522 - RNA, 19 nt, Artificial Sequence
  Description of Artificial Sequence: Synthetic oligonucleotide
uuuccucuaucauccacuu

SEQ ID NO: 1626523 - RNA, 19 nt, Artificial Sequence
  Description of Artificial Sequence: Synthetic oligonucleotide
ugaacugguccaaguccga

SEQ ID NO: 1626524 - RNA, 19 nt, Artificial Sequence
  Description of Artificial Sequence: Synthetic oligonucleotide
ucacaucaguggcucugag

SEQ ID NO: 1626525 - RNA, 19 nt, Artificial Sequence
  Description of Artificial Sequence: Synthetic oligonucleotide
gacucuuugagaggggcga

SEQ ID NO: 1626526 - RNA, 19 nt, Artificial Sequence
  Description of Artificial Sequence: Synthetic oligonucleotide
aagcaguaguacucagaau

SEQ ID NO: 1626527 - RNA, 19 nt, Artificial Sequence
  Description of Artificial Sequence: Synthetic oligonucleotide
caauggaaccugcucgaug

SEQ ID NO: 1626528 - RNA, 19 nt, Artificial Sequence
  Description of Artificial Sequence: Synthetic oligonucleotide
agacuucaguggaucgucc

SEQ ID NO: 1626529 - RNA, 19 nt, Artificial Sequence
  Description of Artificial Sequence: Synthetic oligonucleotide
aucugguauuacaccacac

SEQ ID NO: 1626530 - RNA, 19 nt, Artificial Sequence
  Description of Artificial Sequence: Synthetic oligonucleotide
cacugaacugguccaaguc

SEQ ID NO: 1626531 - RNA, 19 nt, Artificial Sequence
  Description of Artificial Sequence: Synthetic oligonucleotide
guauccugacucuccagca

SEQ ID NO: 1626532 - RNA, 19 nt, Artificial Sequence
  Description of Artificial Sequence: Synthetic oligonucleotide
cuaugcucucauugaugag

SEQ ID NO: 1626533 - RNA, 19 nt, Artificial Sequence
  Description of Artificial Sequence: Synthetic oligonucleotide
aguccgaaggggucugaug

SEQ ID NO: 1626534 - RNA, 19 nt, Artificial Sequence
  Description of Artificial Sequence: Synthetic oligonucleotide
cauacucccgggucguuuc

SEQ ID NO: 1626535 - RNA, 19 nt, Artificial Sequence
  Description of Artificial Sequence: Synthetic oligonucleotide
ucguggagagccagaggca

SEQ ID NO: 1626536 - RNA, 19 nt, Artificial Sequence
  Description of Artificial Sequence: Synthetic oligonucleotide
gaggacgugcaguuugguc

SEQ ID NO: 1626537 - RNA, 19 nt, Artificial Sequence
  Description of Artificial Sequence: Synthetic oligonucleotide
uuccucuaucauccacuug

SEQ ID NO: 1626538 - RNA, 19 nt, Artificial Sequence
  Description of Artificial Sequence: Synthetic oligonucleotide
auggaaccugcucgauggg

SEQ ID NO: 1626539 - RNA, 19 nt, Artificial Sequence
  Description of Artificial Sequence: Synthetic oligonucleotide
ucugcgccguucacagugc

SEQ ID NO: 1626540 - RNA, 19 nt, Artificial Sequence
  Description of Artificial Sequence: Synthetic oligonucleotide
ggagucgggagcucaguag

SEQ ID NO: 1626541 - RNA, 19 nt, Artificial Sequence
  Description of Artificial Sequence: Synthetic oligonucleotide
  modified_base (9)..(9): a, c, u, g, unknown or other
ugcagaganaagggcacaa

SEQ ID NO: 1626542 - RNA, 19 nt, Artificial Sequence
  Description of Artificial Sequence: Synthetic oligonucleotide
ggcgcaaagagaccgcggc

SEQ ID NO: 1626543 - RNA, 19 nt, Artificial Sequence
  Description of Artificial Sequence: Synthetic oligonucleotide
aguagccggcuccccgggc

SEQ ID NO: 1626544 - RNA, 19 nt, Artificial Sequence
  Description of Artificial Sequence: Synthetic oligonucleotide
auggacucuaugcucucau

SEQ ID NO: 1626545 - RNA, 19 nt, Artificial Sequence
  Description of Artificial Sequence: Synthetic oligonucleotide
aggagguauccugacucuc

SEQ ID NO: 1626546 - RNA, 19 nt, Artificial Sequence
  Description of Artificial Sequence: Synthetic oligonucleotide
acuuggaucauuagccaaa

SEQ ID NO: 1626547 - RNA, 19 nt, Artificial Sequence
  Description of Artificial Sequence: Synthetic oligonucleotide
gcagagggcgcaaagagac

SEQ ID NO: 1626548 - RNA, 19 nt, Artificial Sequence
  Description of Artificial Sequence: Synthetic oligonucleotide
ucgcuucauucucucuggc

SEQ ID NO: 1626549 - RNA, 19 nt, Artificial Sequence
  Description of Artificial Sequence: Synthetic oligonucleotide
guuugugcagagccuguga

SEQ ID NO: 1626550 - RNA, 19 nt, Artificial Sequence
  Description of Artificial Sequence: Synthetic oligonucleotide
agguauccugacucuccag

SEQ ID NO: 1626551 - RNA, 19 nt, Artificial Sequence
  Description of Artificial Sequence: Synthetic oligonucleotide
gcaguaguacucagaaucc

SEQ ID NO: 1626552 - RNA, 19 nt, Artificial Sequence
  Description of Artificial Sequence: Synthetic oligonucleotide
uucaguggaucguccgaaa

SEQ ID NO: 1626553 - RNA, 19 nt, Artificial Sequence
  Description of Artificial Sequence: Synthetic oligonucleotide
caacgggccgucuuccaug

SEQ ID NO: 1626554 - RNA, 19 nt, Artificial Sequence
  Description of Artificial Sequence: Synthetic oligonucleotide
aagauacauacaaguuaau

SEQ ID NO: 1626555 - RNA, 19 nt, Artificial Sequence
  Description of Artificial Sequence: Synthetic oligonucleotide
uagcgggaucgcuucauuc

SEQ ID NO: 1626556 - RNA, 19 nt, Artificial Sequence
  Description of Artificial Sequence: Synthetic oligonucleotide
gggaaauugccauuucaaa

SEQ ID NO: 1626557 - RNA, 19 nt, Artificial Sequence
  Description of Artificial Sequence: Synthetic oligonucleotide
cuccgucguguuuguaugc

SEQ ID NO: 1626558 - RNA, 19 nt, Artificial Sequence
  Description of Artificial Sequence: Synthetic oligonucleotide
cagcucgaugucucugagg

SEQ ID NO: 1626559 - RNA, 19 nt, Artificial Sequence
  Description of Artificial Sequence: Synthetic oligonucleotide
gggucugauggccugguac

SEQ ID NO: 1626560 - RNA, 19 nt, Artificial Sequence
  Description of Artificial Sequence: Synthetic oligonucleotide
aggggcgacacugacagua

SEQ ID NO: 1626561 - RNA, 19 nt, Artificial Sequence
  Description of Artificial Sequence: Synthetic oligonucleotide
cucgaugucucugaggucu

SEQ ID NO: 1626562 - RNA, 19 nt, Artificial Sequence
  Description of Artificial Sequence: Synthetic oligonucleotide
cagcauaacgauguagcca

SEQ ID NO: 1626563 - RNA, 19 nt, Artificial Sequence
  Description of Artificial Sequence: Synthetic oligonucleotide
agggcgcaaagagaccgcg

SEQ ID NO: 1626564 - RNA, 19 nt, Artificial Sequence
  Description of Artificial Sequence: Synthetic oligonucleotide
uaacuggcgcaugagccuc

SEQ ID NO: 1626565 - RNA, 19 nt, Artificial Sequence
  Description of Artificial Sequence: Synthetic oligonucleotide
cuguccauucacagcucug

SEQ ID NO: 1626566 - RNA, 19 nt, Artificial Sequence
  Description of Artificial Sequence: Synthetic oligonucleotide
cacucgugcgcuccaugcc

SEQ ID NO: 1626567 - RNA, 19 nt, Artificial Sequence
  Description of Artificial Sequence: Synthetic oligonucleotide
caaagagaccgcggccugg

SEQ ID NO: 1626568 - RNA, 19 nt, Artificial Sequence
  Description of Artificial Sequence: Synthetic oligonucleotide
gagaccgcggccuggcgga

SEQ ID NO: 1626569 - RNA, 19 nt, Artificial Sequence
  Description of Artificial Sequence: Synthetic oligonucleotide
gauuagcgggaucgcuuca

SEQ ID NO: 1626570 - RNA, 19 nt, Artificial Sequence
  Description of Artificial Sequence: Synthetic oligonucleotide
gaucguccgaaaagaagaa

SEQ ID NO: 1626571 - RNA, 19 nt, Artificial Sequence
  Description of Artificial Sequence: Synthetic oligonucleotide
ggcugcgucguggagagcc

SEQ ID NO: 1626572 - RNA, 19 nt, Artificial Sequence
  Description of Artificial Sequence: Synthetic oligonucleotide
cucgugcgcuccaugccgc

SEQ ID NO: 1626573 - RNA, 19 nt, Artificial Sequence
  Description of Artificial Sequence: Synthetic oligonucleotide
uuagcgggaucgcuucauu

SEQ ID NO: 1626574 - RNA, 19 nt, Artificial Sequence
  Description of Artificial Sequence: Synthetic oligonucleotide
guaacuggcgcaugagccu

SEQ ID NO: 1626575 - RNA, 19 nt, Artificial Sequence
  Description of Artificial Sequence: Synthetic oligonucleotide
  modified_base (3)..(3): a, c, u, g, unknown or other
ganaagggcacaagcuagu

SEQ ID NO: 1626576 - RNA, 19 nt, Artificial Sequence
  Description of Artificial Sequence: Synthetic oligonucleotide
ggcgacacugacaguaaag

SEQ ID NO: 1626577 - RNA, 19 nt, Artificial Sequence
  Description of Artificial Sequence: Synthetic oligonucleotide
cagagggcgcaaagagacc

SEQ ID NO: 1626578 - RNA, 19 nt, Artificial Sequence
  Description of Artificial Sequence: Synthetic oligonucleotide
gcgcaugagccucacauca

SEQ ID NO: 1626579 - RNA, 19 nt, Artificial Sequence
  Description of Artificial Sequence: Synthetic oligonucleotide
agcuagugcguuaugccaa

SEQ ID NO: 1626580 - RNA, 19 nt, Artificial Sequence
  Description of Artificial Sequence: Synthetic oligonucleotide
gcuagugcguuaugccaag

SEQ ID NO: 1626581 - RNA, 19 nt, Artificial Sequence
  Description of Artificial Sequence: Synthetic oligonucleotide
gcucucgggcacuuuacgc

SEQ ID NO: 1626582 - RNA, 19 nt, Artificial Sequence
  Description of Artificial Sequence: Synthetic oligonucleotide
gcuccgucguguuuguaug

SEQ ID NO: 1626583 - RNA, 19 nt, Artificial Sequence
  Description of Artificial Sequence: Synthetic oligonucleotide
accgcggccuggcggaguc

SEQ ID NO: 1626584 - RNA, 19 nt, Artificial Sequence
  Description of Artificial Sequence: Synthetic oligonucleotide
acagugcccaucugguauu

SEQ ID NO: 1626585 - RNA, 19 nt, Artificial Sequence
  Description of Artificial Sequence: Synthetic oligonucleotide
gguuagccuuauuaaaaua

SEQ ID NO: 1626586 - RNA, 19 nt, Artificial Sequence
  Description of Artificial Sequence: Synthetic oligonucleotide
ucgugcgcuccaugccgcg

SEQ ID NO: 1626587 - RNA, 19 nt, Artificial Sequence
  Description of Artificial Sequence: Synthetic oligonucleotide
uagcaagauuagcgggauc

SEQ ID NO: 1626588 - RNA, 19 nt, Artificial Sequence
  Description of Artificial Sequence: Synthetic oligonucleotide
agcgagcgcgcuaagcucu

SEQ ID NO: 1626589 - RNA, 19 nt, Artificial Sequence
  Description of Artificial Sequence: Synthetic oligonucleotide
auuagcgggaucgcuucau

SEQ ID NO: 1626590 - RNA, 19 nt, Artificial Sequence
  Description of Artificial Sequence: Synthetic oligonucleotide
guaaggagguauccugacu

SEQ ID NO: 1626591 - RNA, 19 nt, Artificial Sequence
  Description of Artificial Sequence: Synthetic oligonucleotide
caugccgcgggcgcagucc

SEQ ID NO: 1626592 - RNA, 19 nt, Artificial Sequence
  Description of Artificial Sequence: Synthetic oligonucleotide
gcacucgugcgcuccaugc

SEQ ID NO: 1626593 - RNA, 19 nt, Artificial Sequence
  Description of Artificial Sequence: Synthetic oligonucleotide
augaaagaaguggcuccgu

SEQ ID NO: 1626594 - RNA, 19 nt, Artificial Sequence
  Description of Artificial Sequence: Synthetic oligonucleotide
cucgggcacuuuacgcccc

SEQ ID NO: 1626595 - RNA, 19 nt, Artificial Sequence
  Description of Artificial Sequence: Synthetic oligonucleotide
ggaguaacuggcgcaugag

SEQ ID NO: 1626596 - RNA, 19 nt, Artificial Sequence
  Description of Artificial Sequence: Synthetic oligonucleotide
aaguccgaaggggucugau

SEQ ID NO: 1626597 - RNA, 19 nt, Artificial Sequence
  Description of Artificial Sequence: Synthetic oligonucleotide
  modified_base (8)..(8): a, c, u, g, unknown or other
gcagaganaagggcacaag

SEQ ID NO: 1626598 - RNA, 19 nt, Artificial Sequence
  Description of Artificial Sequence: Synthetic oligonucleotide
aucguccgaaaagaagaaa

SEQ ID NO: 1626599 - RNA, 19 nt, Artificial Sequence
  Description of Artificial Sequence: Synthetic oligonucleotide
aauccaacuugggguguuu

SEQ ID NO: 1626600 - RNA, 19 nt, Artificial Sequence
  Description of Artificial Sequence: Synthetic oligonucleotide
ggggaaauugccauuucaa

SEQ ID NO: 1626601 - RNA, 19 nt, Artificial Sequence
  Description of Artificial Sequence: Synthetic oligonucleotide
caguaguacucagaaucca

SEQ ID NO: 1626602 - RNA, 19 nt, Artificial Sequence
  Description of Artificial Sequence: Synthetic oligonucleotide
uacgccccagcuucagcuc

SEQ ID NO: 1626603 - RNA, 19 nt, Artificial Sequence
  Description of Artificial Sequence: Synthetic oligonucleotide
ucgggcacuuuacgcccca

SEQ ID NO: 1626604 - RNA, 19 nt, Artificial Sequence
  Description of Artificial Sequence: Synthetic oligonucleotide
gaggaguaacuggcgcaug

SEQ ID NO: 1626605 - RNA, 19 nt, Artificial Sequence
  Description of Artificial Sequence: Synthetic oligonucleotide
ugaggacgugcaguuuggu

SEQ ID NO: 1626606 - RNA, 19 nt, Artificial Sequence
  Description of Artificial Sequence: Synthetic oligonucleotide
agccccuucucggggcgcc

SEQ ID NO: 1626607 - RNA, 19 nt, Artificial Sequence
  Description of Artificial Sequence: Synthetic oligonucleotide
uggcaacgggccgucuucc

SEQ ID NO: 1626608 - RNA, 19 nt, Artificial Sequence
  Description of Artificial Sequence: Synthetic oligonucleotide
auacucccgggucguuuca

SEQ ID NO: 1626609 - RNA, 19 nt, Artificial Sequence
  Description of Artificial Sequence: Synthetic oligonucleotide
gccugugaguccucuauga

SEQ ID NO: 1626610 - RNA, 19 nt, Artificial Sequence
  Description of Artificial Sequence: Synthetic oligonucleotide
ggcuguuguagcugccaug

SEQ ID NO: 1626611 - RNA, 19 nt, Artificial Sequence
  Description of Artificial Sequence: Synthetic oligonucleotide
gguccgcagccccuucucg

SEQ ID NO: 1626612 - RNA, 19 nt, Artificial Sequence
  Description of Artificial Sequence: Synthetic oligonucleotide
cacaagcuagugcguuaug

SEQ ID NO: 1626613 - RNA, 19 nt, Artificial Sequence
  Description of Artificial Sequence: Synthetic oligonucleotide
caguagccggcuccccggg

SEQ ID NO: 1626614 - RNA, 19 nt, Artificial Sequence
  Description of Artificial Sequence: Synthetic oligonucleotide
cuucaguggaucguccgaa

SEQ ID NO: 1626615 - RNA, 19 nt, Artificial Sequence
  Description of Artificial Sequence: Synthetic oligonucleotide
gagggcgcaaagagaccgc

SEQ ID NO: 1626616 - RNA, 19 nt, Artificial Sequence
  Description of Artificial Sequence: Synthetic oligonucleotide
gagaggggcgacacugaca

SEQ ID NO: 1626617 - RNA, 19 nt, Artificial Sequence
  Description of Artificial Sequence: Synthetic oligonucleotide
gaacugguccaaguccgaa

SEQ ID NO: 1626618 - RNA, 19 nt, Artificial Sequence
  Description of Artificial Sequence: Synthetic oligonucleotide
ggacgugcaguuuggucuc

SEQ ID NO: 1626619 - RNA, 19 nt, Artificial Sequence
  Description of Artificial Sequence: Synthetic oligonucleotide
ggcacuuuacgccccagcu

SEQ ID NO: 1626620 - RNA, 19 nt, Artificial Sequence
  Description of Artificial Sequence: Synthetic oligonucleotide
cacagcucugcgccguuca

SEQ ID NO: 1626621 - RNA, 19 nt, Artificial Sequence
  Description of Artificial Sequence: Synthetic oligonucleotide
gcaagauuagcgggaucgc

SEQ ID NO: 1626622 - RNA, 19 nt, Artificial Sequence
  Description of Artificial Sequence: Synthetic oligonucleotide
  modified_base (10)..(10): a, c, u, g, unknown or other
cugcagaganaagggcaca

SEQ ID NO: 1626623 - RNA, 19 nt, Artificial Sequence
  Description of Artificial Sequence: Synthetic oligonucleotide
cugcgccguucacagugcc

SEQ ID NO: 1626624 - RNA, 19 nt, Artificial Sequence
  Description of Artificial Sequence: Synthetic oligonucleotide
gcuguuguagcugccaugu

SEQ ID NO: 1626625 - RNA, 19 nt, Artificial Sequence
  Description of Artificial Sequence: Synthetic oligonucleotide
auugcacaccagucccaua

SEQ ID NO: 1626626 - RNA, 19 nt, Artificial Sequence
  Description of Artificial Sequence: Synthetic oligonucleotide
ccaaggaucagacuucagu

SEQ ID NO: 1626627 - RNA, 19 nt, Artificial Sequence
  Description of Artificial Sequence: Synthetic oligonucleotide
  modified_base (4)..(4): a, c, u, g, unknown or other
gganagggcaauggaaccu

SEQ ID NO: 1626628 - RNA, 19 nt, Artificial Sequence
  Description of Artificial Sequence: Synthetic oligonucleotide
gggaucgcuucauucucuc

SEQ ID NO: 1626629 - RNA, 19 nt, Artificial Sequence
  Description of Artificial Sequence: Synthetic oligonucleotide
ccgucguguuuguaugcgg

SEQ ID NO: 1626630 - RNA, 19 nt, Artificial Sequence
  Description of Artificial Sequence: Synthetic oligonucleotide
cugucgcuccgcagcuagc

SEQ ID NO: 1626631 - RNA, 19 nt, Artificial Sequence
  Description of Artificial Sequence: Synthetic oligonucleotide
gcgcgcuaagcucucgggc

SEQ ID NO: 1626632 - RNA, 19 nt, Artificial Sequence
  Description of Artificial Sequence: Synthetic oligonucleotide
agccauacucccgggucgu

SEQ ID NO: 1626633 - RNA, 19 nt, Artificial Sequence
  Description of Artificial Sequence: Synthetic oligonucleotide
uggcggagucgggagcuca

SEQ ID NO: 1626634 - RNA, 19 nt, Artificial Sequence
  Description of Artificial Sequence: Synthetic oligonucleotide
gcgcaaagagaccgcggcc

SEQ ID NO: 1626635 - RNA, 19 nt, Artificial Sequence
  Description of Artificial Sequence: Synthetic oligonucleotide
ggcgcaugagccucacauc

SEQ ID NO: 1626636 - RNA, 19 nt, Artificial Sequence
  Description of Artificial Sequence: Synthetic oligonucleotide
guggaucguccgaaaagaa

SEQ ID NO: 1626637 - RNA, 19 nt, Artificial Sequence
  Description of Artificial Sequence: Synthetic oligonucleotide
caagauuagcgggaucgcu

SEQ ID NO: 1626638 - RNA, 19 nt, Artificial Sequence
  Description of Artificial Sequence: Synthetic oligonucleotide
cucugagguuaaccaucuc

SEQ ID NO: 1626639 - RNA, 19 nt, Artificial Sequence
  Description of Artificial Sequence: Synthetic oligonucleotide
agcugccauguaaggaggu

SEQ ID NO: 1626640 - RNA, 19 nt, Artificial Sequence
  Description of Artificial Sequence: Synthetic oligonucleotide
uccuccccgcgcagcgagc

SEQ ID NO: 1626641 - RNA, 19 nt, Artificial Sequence
  Description of Artificial Sequence: Synthetic oligonucleotide
gcgggaucgcuucauucuc

SEQ ID NO: 1626642 - RNA, 19 nt, Artificial Sequence
  Description of Artificial Sequence: Synthetic oligonucleotide
cgcaguccaggcucugucg

SEQ ID NO: 1626643 - RNA, 19 nt, Artificial Sequence
  Description of Artificial Sequence: Synthetic oligonucleotide
acgggccgucuuccaugac

SEQ ID NO: 1626644 - RNA, 19 nt, Artificial Sequence
  Description of Artificial Sequence: Synthetic oligonucleotide
guaaaggcagagggcgcaa

SEQ ID NO: 1626645 - RNA, 19 nt, Artificial Sequence
  Description of Artificial Sequence: Synthetic oligonucleotide
gggccgucuuccaugacuc

SEQ ID NO: 1626646 - RNA, 19 nt, Artificial Sequence
  Description of Artificial Sequence: Synthetic oligonucleotide
ggcacucgugcgcuccaug

SEQ ID NO: 1626647 - RNA, 19 nt, Artificial Sequence
  Description of Artificial Sequence: Synthetic oligonucleotide
cuagcaagauuagcgggau

SEQ ID NO: 1626648 - RNA, 19 nt, Artificial Sequence
  Description of Artificial Sequence: Synthetic oligonucleotide
gcgcuaagcucucgggcac

SEQ ID NO: 1626649 - RNA, 19 nt, Artificial Sequence
  Description of Artificial Sequence: Synthetic oligonucleotide
gcgccguucacagugccca

SEQ ID NO: 1626650 - RNA, 19 nt, Artificial Sequence
  Description of Artificial Sequence: Synthetic oligonucleotide
gggcgcaaagagaccgcgg

SEQ ID NO: 1626651 - RNA, 19 nt, Artificial Sequence
  Description of Artificial Sequence: Synthetic oligonucleotide
ccgggucguuucauuuucc

SEQ ID NO: 1626652 - RNA, 19 nt, Artificial Sequence
  Description of Artificial Sequence: Synthetic oligonucleotide
cugccauguaaggagguau

SEQ ID NO: 1626653 - RNA, 19 nt, Artificial Sequence
  Description of Artificial Sequence: Synthetic oligonucleotide
ggcuccgucguguuuguau

SEQ ID NO: 1626654 - RNA, 19 nt, Artificial Sequence
  Description of Artificial Sequence: Synthetic oligonucleotide
cuagugcguuaugccaaga

SEQ ID NO: 1626655 - RNA, 19 nt, Artificial Sequence
  Description of Artificial Sequence: Synthetic oligonucleotide
gucgcuccgcagcuagcaa

SEQ ID NO: 1626656 - RNA, 19 nt, Artificial Sequence
  Description of Artificial Sequence: Synthetic oligonucleotide
gaauccaacuugggguguu

SEQ ID NO: 1626657 - RNA, 19 nt, Artificial Sequence
  Description of Artificial Sequence: Synthetic oligonucleotide
cagcucugcgccguucaca

SEQ ID NO: 1626658 - RNA, 19 nt, Artificial Sequence
  Description of Artificial Sequence: Synthetic oligonucleotide
gccauaugucuccaaggau

SEQ ID NO: 1626659 - RNA, 19 nt, Artificial Sequence
  Description of Artificial Sequence: Synthetic oligonucleotide
gcgcaguccaggcucuguc

SEQ ID NO: 1626660 - RNA, 19 nt, Artificial Sequence
  Description of Artificial Sequence: Synthetic oligonucleotide
cgcgcuaagcucucgggca

SEQ ID NO: 1626661 - RNA, 19 nt, Artificial Sequence
  Description of Artificial Sequence: Synthetic oligonucleotide
cgcagcuagcaagauuagc

SEQ ID NO: 1626662 - RNA, 19 nt, Artificial Sequence
  Description of Artificial Sequence: Synthetic oligonucleotide
cuggccacuccaccuccaa

SEQ ID NO: 1626663 - RNA, 19 nt, Artificial Sequence
  Description of Artificial Sequence: Synthetic oligonucleotide
ggcggagucgggagcucag

SEQ ID NO: 1626664 - RNA, 19 nt, Artificial Sequence
  Description of Artificial Sequence: Synthetic oligonucleotide
ccgcagcuagcaagauuag

SEQ ID NO: 1626665 - RNA, 19 nt, Artificial Sequence
  Description of Artificial Sequence: Synthetic oligonucleotide
cuccccgcgcagcgagcgc

SEQ ID NO: 1626666 - RNA, 19 nt, Artificial Sequence
  Description of Artificial Sequence: Synthetic oligonucleotide
ccaaguccgaaggggucug

SEQ ID NO: 1626667 - RNA, 19 nt, Artificial Sequence
  Description of Artificial Sequence: Synthetic oligonucleotide
ggcaacgggccgucuucca

SEQ ID NO: 1626668 - RNA, 19 nt, Artificial Sequence
  Description of Artificial Sequence: Synthetic oligonucleotide
ccuccccgcgcagcgagcg

SEQ ID NO: 1626669 - RNA, 19 nt, Artificial Sequence
  Description of Artificial Sequence: Synthetic oligonucleotide
ggaucgcuucauucucucu

SEQ ID NO: 1626670 - RNA, 19 nt, Artificial Sequence
  Description of Artificial Sequence: Synthetic oligonucleotide
cugccagaguguccaggua

SEQ ID NO: 1626671 - RNA, 19 nt, Artificial Sequence
  Description of Artificial Sequence: Synthetic oligonucleotide
gggcgacacugacaguaaa

SEQ ID NO: 1626672 - RNA, 19 nt, Artificial Sequence
  Description of Artificial Sequence: Synthetic oligonucleotide
cgcuccaugccgcgggcgc

SEQ ID NO: 1626673 - RNA, 19 nt, Artificial Sequence
  Description of Artificial Sequence: Synthetic oligonucleotide
agaccgcggccuggcggag

SEQ ID NO: 1626674 - RNA, 19 nt, Artificial Sequence
  Description of Artificial Sequence: Synthetic oligonucleotide
caaguccgaaggggucuga

SEQ ID NO: 1626675 - RNA, 19 nt, Artificial Sequence
  Description of Artificial Sequence: Synthetic oligonucleotide
gcacuuuacgccccagcuu

SEQ ID NO: 1626676 - RNA, 19 nt, Artificial Sequence
  Description of Artificial Sequence: Synthetic oligonucleotide
gcgggcacucgugcgcucc

SEQ ID NO: 1626677 - RNA, 19 nt, Artificial Sequence
  Description of Artificial Sequence: Synthetic oligonucleotide
ccccgcgggcacucgugcg

SEQ ID NO: 1626678 - RNA, 19 nt, Artificial Sequence
  Description of Artificial Sequence: Synthetic oligonucleotide
cgcuccgcagcuagcaaga

SEQ ID NO: 1626679 - RNA, 19 nt, Artificial Sequence
  Description of Artificial Sequence: Synthetic oligonucleotide
gcacaagcuagugcguuau

SEQ ID NO: 1626680 - RNA, 19 nt, Artificial Sequence
  Description of Artificial Sequence: Synthetic oligonucleotide
cuggcggagucgggagcuc

SEQ ID NO: 1626681 - RNA, 19 nt, Artificial Sequence
  Description of Artificial Sequence: Synthetic oligonucleotide
cgucguguuuguaugcggu

SEQ ID NO: 1626682 - RNA, 19 nt, Artificial Sequence
  Description of Artificial Sequence: Synthetic oligonucleotide
cuccgcagcuagcaagauu

SEQ ID NO: 1626683 - RNA, 19 nt, Artificial Sequence
  Description of Artificial Sequence: Synthetic oligonucleotide
ggggcgacacugacaguaa

SEQ ID NO: 1626684 - RNA, 19 nt, Artificial Sequence
  Description of Artificial Sequence: Synthetic oligonucleotide
gggcgccggcuccuccccg

SEQ ID NO: 1626685 - RNA, 19 nt, Artificial Sequence
  Description of Artificial Sequence: Synthetic oligonucleotide
ccgcgggcgcaguccaggc

SEQ ID NO: 1626686 - RNA, 19 nt, Artificial Sequence
  Description of Artificial Sequence: Synthetic oligonucleotide
gaggggcgacacugacagu

SEQ ID NO: 1626687 - RNA, 19 nt, Artificial Sequence
  Description of Artificial Sequence: Synthetic oligonucleotide
cagugcccaucugguauua

SEQ ID NO: 1626688 - RNA, 19 nt, Artificial Sequence
  Description of Artificial Sequence: Synthetic oligonucleotide
uggcuccgucguguuugua

SEQ ID NO: 1626689 - RNA, 19 nt, Artificial Sequence
  Description of Artificial Sequence: Synthetic oligonucleotide
gcugcgucguggagagcca

SEQ ID NO: 1626690 - RNA, 19 nt, Artificial Sequence
  Description of Artificial Sequence: Synthetic oligonucleotide
cgcggccuggcggagucgg

SEQ ID NO: 1626691 - RNA, 19 nt, Artificial Sequence
  Description of Artificial Sequence: Synthetic oligonucleotide
cgugcgcuccaugccgcgg

SEQ ID NO: 1626692 - RNA, 19 nt, Artificial Sequence
  Description of Artificial Sequence: Synthetic oligonucleotide
cucggggcgccggcuccuc

SEQ ID NO: 1626693 - RNA, 19 nt, Artificial Sequence
  Description of Artificial Sequence: Synthetic oligonucleotide
gccgucuuccaugacucuu

SEQ ID NO: 1626694 - RNA, 19 nt, Artificial Sequence
  Description of Artificial Sequence: Synthetic oligonucleotide
gcgcugggguggcugcguc

SEQ ID NO: 1626695 - RNA, 19 nt, Artificial Sequence
  Description of Artificial Sequence: Synthetic oligonucleotide
gggcacaagcuagugcguu

SEQ ID NO: 1626696 - RNA, 19 nt, Artificial Sequence
  Description of Artificial Sequence: Synthetic oligonucleotide
cucugucgcuccgcagcua

SEQ ID NO: 1626697 - RNA, 19 nt, Artificial Sequence
  Description of Artificial Sequence: Synthetic oligonucleotide
ccaugccgcgggcgcaguc

SEQ ID NO: 1626698 - RNA, 19 nt, Artificial Sequence
  Description of Artificial Sequence: Synthetic oligonucleotide
ggccgucuuccaugacucu

SEQ ID NO: 1626699 - RNA, 19 nt, Artificial Sequence
  Description of Artificial Sequence: Synthetic oligonucleotide
gcauaacgauguagccaua

SEQ ID NO: 1626700 - RNA, 19 nt, Artificial Sequence
  Description of Artificial Sequence: Synthetic oligonucleotide
cgagcgcgcuaagcucucg

SEQ ID NO: 1626701 - RNA, 19 nt, Artificial Sequence
  Description of Artificial Sequence: Synthetic oligonucleotide
gcgcagcgagcgcgcuaag

SEQ ID NO: 1626702 - RNA, 19 nt, Artificial Sequence
  Description of Artificial Sequence: Synthetic oligonucleotide
gccucacaucaguggcucu

SEQ ID NO: 1626703 - RNA, 19 nt, Artificial Sequence
  Description of Artificial Sequence: Synthetic oligonucleotide
cggagucgggagcucagua

SEQ ID NO: 1626704 - RNA, 19 nt, Artificial Sequence
  Description of Artificial Sequence: Synthetic oligonucleotide
gaccgcggccuggcggagu

SEQ ID NO: 1626705 - RNA, 19 nt, Artificial Sequence
  Description of Artificial Sequence: Synthetic oligonucleotide
cgggaucgcuucauucucu

SEQ ID NO: 1626706 - RNA, 19 nt, Artificial Sequence
  Description of Artificial Sequence: Synthetic oligonucleotide
gcuaagcucucgggcacuu

SEQ ID NO: 1626707 - RNA, 19 nt, Artificial Sequence
  Description of Artificial Sequence: Synthetic oligonucleotide
cgccagcccgcuggguccg

SEQ ID NO: 1626708 - RNA, 19 nt, Artificial Sequence
  Description of Artificial Sequence: Synthetic oligonucleotide
gcucugcgccguucacagu

SEQ ID NO: 1626709 - RNA, 19 nt, Artificial Sequence
  Description of Artificial Sequence: Synthetic oligonucleotide
gcggagucgggagcucagu

SEQ ID NO: 1626710 - RNA, 19 nt, Artificial Sequence
  Description of Artificial Sequence: Synthetic oligonucleotide
ccauacucccgggucguuu

SEQ ID NO: 1626711 - RNA, 19 nt, Artificial Sequence
  Description of Artificial Sequence: Synthetic oligonucleotide
gccugaggacgugcaguuu

SEQ ID NO: 1626712 - RNA, 19 nt, Artificial Sequence
  Description of Artificial Sequence: Synthetic oligonucleotide
cgcgggcacucgugcgcuc

SEQ ID NO: 1626713 - RNA, 19 nt, Artificial Sequence
  Description of Artificial Sequence: Synthetic oligonucleotide
gggcacucgugcgcuccau

SEQ ID NO: 1626714 - RNA, 19 nt, Artificial Sequence
  Description of Artificial Sequence: Synthetic oligonucleotide
ccgcgcagcgagcgcgcua

SEQ ID NO: 1626715 - RNA, 19 nt, Artificial Sequence
  Description of Artificial Sequence: Synthetic oligonucleotide
cgcuaagcucucgggcacu

SEQ ID NO: 1626716 - RNA, 19 nt, Artificial Sequence
  Description of Artificial Sequence: Synthetic oligonucleotide
gccauacucccgggucguu

SEQ ID NO: 1626717 - RNA, 19 nt, Artificial Sequence
  Description of Artificial Sequence: Synthetic oligonucleotide
ccgcgggcacucgugcgcu

SEQ ID NO: 1626718 - RNA, 19 nt, Artificial Sequence
  Description of Artificial Sequence: Synthetic oligonucleotide
cgccguucacagugcccau

SEQ ID NO: 1626719 - RNA, 19 nt, Artificial Sequence
  Description of Artificial Sequence: Synthetic oligonucleotide
cccgcgcagcgagcgcgcu

SEQ ID NO: 1626720 - RNA, 19 nt, Artificial Sequence
  Description of Artificial Sequence: Synthetic oligonucleotide
auagaugugccuucgaguc

SEQ ID NO: 1626721 - RNA, 19 nt, Artificial Sequence
  Description of Artificial Sequence: Synthetic oligonucleotide
uucaaauaggucauuggcc

SEQ ID NO: 1626722 - RNA, 19 nt, Artificial Sequence
  Description of Artificial Sequence: Synthetic oligonucleotide
ucuaaccccaucaaggacc

SEQ ID NO: 1626723 - RNA, 19 nt, Artificial Sequence
  Description of Artificial Sequence: Synthetic oligonucleotide
ucaaauaggucauuggccu

SEQ ID NO: 1626724 - RNA, 19 nt, Artificial Sequence
  Description of Artificial Sequence: Synthetic oligonucleotide
aaaccggcaacucuuuggg

SEQ ID NO: 1626725 - RNA, 19 nt, Artificial Sequence
  Description of Artificial Sequence: Synthetic oligonucleotide
ucguauuuggacaggagcc

SEQ ID NO: 1626726 - RNA, 19 nt, Artificial Sequence
  Description of Artificial Sequence: Synthetic oligonucleotide
agagaugccgucugguacc

SEQ ID NO: 1626727 - RNA, 19 nt, Artificial Sequence
  Description of Artificial Sequence: Synthetic oligonucleotide
ugaguauuugacuccaaug

SEQ ID NO: 1626728 - RNA, 19 nt, Artificial Sequence
  Description of Artificial Sequence: Synthetic oligonucleotide
auugcagugaguuccagga

SEQ ID NO: 1626729 - RNA, 19 nt, Artificial Sequence
  Description of Artificial Sequence: Synthetic oligonucleotide
gaaaccggcaacucuuugg

SEQ ID NO: 1626730 - RNA, 19 nt, Artificial Sequence
  Description of Artificial Sequence: Synthetic oligonucleotide
ucauagaugugccuucgag

SEQ ID NO: 1626731 - RNA, 19 nt, Artificial Sequence
  Description of Artificial Sequence: Synthetic oligonucleotide
agguuuucuagcuggugcc

SEQ ID NO: 1626732 - RNA, 19 nt, Artificial Sequence
  Description of Artificial Sequence: Synthetic oligonucleotide
ucuguagggacauggaaga

SEQ ID NO: 1626733 - RNA, 19 nt, Artificial Sequence
  Description of Artificial Sequence: Synthetic oligonucleotide
aaagguuugucugcccagc

SEQ ID NO: 1626734 - RNA, 19 nt, Artificial Sequence
  Description of Artificial Sequence: Synthetic oligonucleotide
aagccgucaugccagauug

SEQ ID NO: 1626735 - RNA, 19 nt, Artificial Sequence
  Description of Artificial Sequence: Synthetic oligonucleotide
auaucugccgccccagccc

SEQ ID NO: 1626736 - RNA, 19 nt, Artificial Sequence
  Description of Artificial Sequence: Synthetic oligonucleotide
ucugcuaggaaacccucag

SEQ ID NO: 1626737 - RNA, 19 nt, Artificial Sequence
  Description of Artificial Sequence: Synthetic oligonucleotide
aagguuugucugcccagcc

SEQ ID NO: 1626738 - RNA, 19 nt, Artificial Sequence
  Description of Artificial Sequence: Synthetic oligonucleotide
ucaguaaccugccuccucc

SEQ ID NO: 1626739 - RNA, 19 nt, Artificial Sequence
  Description of Artificial Sequence: Synthetic oligonucleotide
aauguucccuacccguggg

SEQ ID NO: 1626740 - RNA, 19 nt, Artificial Sequence
  Description of Artificial Sequence: Synthetic oligonucleotide
ucuuucauugaaacugucu

SEQ ID NO: 1626741 - RNA, 19 nt, Artificial Sequence
  Description of Artificial Sequence: Synthetic oligonucleotide
ugugagucccucaauccag

SEQ ID NO: 1626742 - RNA, 19 nt, Artificial Sequence
  Description of Artificial Sequence: Synthetic oligonucleotide
aguuggagagguuuucuag

SEQ ID NO: 1626743 - RNA, 19 nt, Artificial Sequence
  Description of Artificial Sequence: Synthetic oligonucleotide
uguucccgcuuucaaauag

SEQ ID NO: 1626744 - RNA, 19 nt, Artificial Sequence
  Description of Artificial Sequence: Synthetic oligonucleotide
ucugcaauuuccauggguu

SEQ ID NO: 1626745 - RNA, 19 nt, Artificial Sequence
  Description of Artificial Sequence: Synthetic oligonucleotide
cuagcaaagguuugucugc

SEQ ID NO: 1626746 - RNA, 19 nt, Artificial Sequence
  Description of Artificial Sequence: Synthetic oligonucleotide
ugcuaggaaacccucaguc

SEQ ID NO: 1626747 - RNA, 19 nt, Artificial Sequence
  Description of Artificial Sequence: Synthetic oligonucleotide
agagcgguugaucuugggg

SEQ ID NO: 1626748 - RNA, 19 nt, Artificial Sequence
  Description of Artificial Sequence: Synthetic oligonucleotide
gaggagggaguauagcuag

SEQ ID NO: 1626749 - RNA, 19 nt, Artificial Sequence
  Description of Artificial Sequence: Synthetic oligonucleotide
guauuugacuccaaugucc

SEQ ID NO: 1626750 - RNA, 19 nt, Artificial Sequence
  Description of Artificial Sequence: Synthetic oligonucleotide
acugucugcaauuuccaug

SEQ ID NO: 1626751 - RNA, 19 nt, Artificial Sequence
  Description of Artificial Sequence: Synthetic oligonucleotide
augacgccaucuuucagac

SEQ ID NO: 1626752 - RNA, 19 nt, Artificial Sequence
  Description of Artificial Sequence: Synthetic oligonucleotide
gauugcagugaguuccagg

SEQ ID NO: 1626753 - RNA, 19 nt, Artificial Sequence
  Description of Artificial Sequence: Synthetic oligonucleotide
aucugcagcccaaugacgc

SEQ ID NO: 1626754 - RNA, 19 nt, Artificial Sequence
  Description of Artificial Sequence: Synthetic oligonucleotide
uguuucucugaguauuuga

SEQ ID NO: 1626755 - RNA, 19 nt, Artificial Sequence
  Description of Artificial Sequence: Synthetic oligonucleotide
ugucuaaccccaucaagga

SEQ ID NO: 1626756 - RNA, 19 nt, Artificial Sequence
  Description of Artificial Sequence: Synthetic oligonucleotide
uuagguuuucuuucauuga

SEQ ID NO: 1626757 - RNA, 19 nt, Artificial Sequence
  Description of Artificial Sequence: Synthetic oligonucleotide
uacuuggggucauauaucu

SEQ ID NO: 1626758 - RNA, 19 nt, Artificial Sequence
  Description of Artificial Sequence: Synthetic oligonucleotide
agugugcauaggaugacgc

SEQ ID NO: 1626759 - RNA, 19 nt, Artificial Sequence
  Description of Artificial Sequence: Synthetic oligonucleotide
uuggacaggagccgguucc

SEQ ID NO: 1626760 - RNA, 19 nt, Artificial Sequence
  Description of Artificial Sequence: Synthetic oligonucleotide
ugugcauaggaugacgcca

SEQ ID NO: 1626761 - RNA, 19 nt, Artificial Sequence
  Description of Artificial Sequence: Synthetic oligonucleotide
aaauaggucauuggccuca

SEQ ID NO: 1626762 - RNA, 19 nt, Artificial Sequence
  Description of Artificial Sequence: Synthetic oligonucleotide
uuucucugaguauuugacu

SEQ ID NO: 1626763 - RNA, 19 nt, Artificial Sequence
  Description of Artificial Sequence: Synthetic oligonucleotide
acugacuggugccccaucg

SEQ ID NO: 1626764 - RNA, 19 nt, Artificial Sequence
  Description of Artificial Sequence: Synthetic oligonucleotide
auugaaacugucugcaauu

SEQ ID NO: 1626765 - RNA, 19 nt, Artificial Sequence
  Description of Artificial Sequence: Synthetic oligonucleotide
ugggugcucaguaaccugc

SEQ ID NO: 1626766 - RNA, 19 nt, Artificial Sequence
  Description of Artificial Sequence: Synthetic oligonucleotide
aacacaaugaaaaccccaa

SEQ ID NO: 1626767 - RNA, 19 nt, Artificial Sequence
  Description of Artificial Sequence: Synthetic oligonucleotide
gaagcaaggcaugaugggc

SEQ ID NO: 1626768 - RNA, 19 nt, Artificial Sequence
  Description of Artificial Sequence: Synthetic oligonucleotide
ucucugaguauuugacucc

SEQ ID NO: 1626769 - RNA, 19 nt, Artificial Sequence
  Description of Artificial Sequence: Synthetic oligonucleotide
guaaccugccuccuccugg

SEQ ID NO: 1626770 - RNA, 19 nt, Artificial Sequence
  Description of Artificial Sequence: Synthetic oligonucleotide
caucaaaguuccuuucuug

SEQ ID NO: 1626771 - RNA, 19 nt, Artificial Sequence
  Description of Artificial Sequence: Synthetic oligonucleotide
aucuguagggacauggaag

SEQ ID NO: 1626772 - RNA, 19 nt, Artificial Sequence
  Description of Artificial Sequence: Synthetic oligonucleotide
aguucggcuuccuucuggg

SEQ ID NO: 1626773 - RNA, 19 nt, Artificial Sequence
  Description of Artificial Sequence: Synthetic oligonucleotide
gacauggaagaguugucac

SEQ ID NO: 1626774 - RNA, 19 nt, Artificial Sequence
  Description of Artificial Sequence: Synthetic oligonucleotide
acaacacaaugaaaacccc

SEQ ID NO: 1626775 - RNA, 19 nt, Artificial Sequence
  Description of Artificial Sequence: Synthetic oligonucleotide
agugaggcccaauuucaag

SEQ ID NO: 1626776 - RNA, 19 nt, Artificial Sequence
  Description of Artificial Sequence: Synthetic oligonucleotide
uuggagagguuuucuagcu

SEQ ID NO: 1626777 - RNA, 19 nt, Artificial Sequence
  Description of Artificial Sequence: Synthetic oligonucleotide
agcgguugaucuuggggac

SEQ ID NO: 1626778 - RNA, 19 nt, Artificial Sequence
  Description of Artificial Sequence: Synthetic oligonucleotide
auauaucugccgccccagc

SEQ ID NO: 1626779 - RNA, 19 nt, Artificial Sequence
  Description of Artificial Sequence: Synthetic oligonucleotide
agcgcaagcagugacaccu

SEQ ID NO: 1626780 - RNA, 19 nt, Artificial Sequence
  Description of Artificial Sequence: Synthetic oligonucleotide
agggaguauagcuagcaaa

SEQ ID NO: 1626781 - RNA, 19 nt, Artificial Sequence
  Description of Artificial Sequence: Synthetic oligonucleotide
agcccgaagaccuggccac

SEQ ID NO: 1626782 - RNA, 19 nt, Artificial Sequence
  Description of Artificial Sequence: Synthetic oligonucleotide
uggucuuggccuuuccugc

SEQ ID NO: 1626783 - RNA, 19 nt, Artificial Sequence
  Description of Artificial Sequence: Synthetic oligonucleotide
gcugauugcagugaguucc

SEQ ID NO: 1626784 - RNA, 19 nt, Artificial Sequence
  Description of Artificial Sequence: Synthetic oligonucleotide
cuaaccccaucaaggaccc

SEQ ID NO: 1626785 - RNA, 19 nt, Artificial Sequence
  Description of Artificial Sequence: Synthetic oligonucleotide
agcaaagguuugucugccc

SEQ ID NO: 1626786 - RNA, 19 nt, Artificial Sequence
  Description of Artificial Sequence: Synthetic oligonucleotide
uggccggccuucauggugg

SEQ ID NO: 1626787 - RNA, 19 nt, Artificial Sequence
  Description of Artificial Sequence: Synthetic oligonucleotide
uugucgguacccagcuugg

SEQ ID NO: 1626788 - RNA, 19 nt, Artificial Sequence
  Description of Artificial Sequence: Synthetic oligonucleotide
uguagggacauggaagagu

SEQ ID NO: 1626789 - RNA, 19 nt, Artificial Sequence
  Description of Artificial Sequence: Synthetic oligonucleotide
aaugacgcacuggccggcc

SEQ ID NO: 1626790 - RNA, 19 nt, Artificial Sequence
  Description of Artificial Sequence: Synthetic oligonucleotide
ugaaacugucugcaauuuc

SEQ ID NO: 1626791 - RNA, 19 nt, Artificial Sequence
  Description of Artificial Sequence: Synthetic oligonucleotide
acaggagccgguuccugac

SEQ ID NO: 1626792 - RNA, 19 nt, Artificial Sequence
  Description of Artificial Sequence: Synthetic oligonucleotide
caauguucccuacccgugg

SEQ ID NO: 1626793 - RNA, 19 nt, Artificial Sequence
  Description of Artificial Sequence: Synthetic oligonucleotide
accggcaacucuuugggga

SEQ ID NO: 1626794 - RNA, 19 nt, Artificial Sequence
  Description of Artificial Sequence: Synthetic oligonucleotide
acgggguucaugccauagc

SEQ ID NO: 1626795 - RNA, 19 nt, Artificial Sequence
  Description of Artificial Sequence: Synthetic oligonucleotide
ugugucauguucccgcuuu

SEQ ID NO: 1626796 - RNA, 19 nt, Artificial Sequence
  Description of Artificial Sequence: Synthetic oligonucleotide
gaguucggcuuccuucugg

SEQ ID NO: 1626797 - RNA, 19 nt, Artificial Sequence
  Description of Artificial Sequence: Synthetic oligonucleotide
ucauguucccgcuuucaaa

SEQ ID NO: 1626798 - RNA, 19 nt, Artificial Sequence
  Description of Artificial Sequence: Synthetic oligonucleotide
gaaacccucagucugucua

SEQ ID NO: 1626799 - RNA, 19 nt, Artificial Sequence
  Description of Artificial Sequence: Synthetic oligonucleotide
aaccggcaacucuuugggg

SEQ ID NO: 1626800 - RNA, 19 nt, Artificial Sequence
  Description of Artificial Sequence: Synthetic oligonucleotide
gaagaguugucacacuugu

SEQ ID NO: 1626801 - RNA, 19 nt, Artificial Sequence
  Description of Artificial Sequence: Synthetic oligonucleotide
guaccguaagccgucaugc

SEQ ID NO: 1626802 - RNA, 19 nt, Artificial Sequence
  Description of Artificial Sequence: Synthetic oligonucleotide
gggaguauagcuagcaaag

SEQ ID NO: 1626803 - RNA, 19 nt, Artificial Sequence
  Description of Artificial Sequence: Synthetic oligonucleotide
gaguauagcuagcaaaggu

SEQ ID NO: 1626804 - RNA, 19 nt, Artificial Sequence
  Description of Artificial Sequence: Synthetic oligonucleotide
guauuuggacaggagccgg

SEQ ID NO: 1626805 - RNA, 19 nt, Artificial Sequence
  Description of Artificial Sequence: Synthetic oligonucleotide
cccgcuuucaaauagguca

SEQ ID NO: 1626806 - RNA, 19 nt, Artificial Sequence
  Description of Artificial Sequence: Synthetic oligonucleotide
gccucaaacagguccacgg

SEQ ID NO: 1626807 - RNA, 19 nt, Artificial Sequence
  Description of Artificial Sequence: Synthetic oligonucleotide
acaaagugaggcccaauuu

SEQ ID NO: 1626808 - RNA, 19 nt, Artificial Sequence
  Description of Artificial Sequence: Synthetic oligonucleotide
gagugugcauaggaugacg

SEQ ID NO: 1626809 - RNA, 19 nt, Artificial Sequence
  Description of Artificial Sequence: Synthetic oligonucleotide
aaacccucagucugucuaa

SEQ ID NO: 1626810 - RNA, 19 nt, Artificial Sequence
  Description of Artificial Sequence: Synthetic oligonucleotide
acacuugucgguacccagc

SEQ ID NO: 1626811 - RNA, 19 nt, Artificial Sequence
  Description of Artificial Sequence: Synthetic oligonucleotide
aaacugucugcaauuucca

SEQ ID NO: 1626812 - RNA, 19 nt, Artificial Sequence
  Description of Artificial Sequence: Synthetic oligonucleotide
auacuuggggucauauauc

SEQ ID NO: 1626813 - RNA, 19 nt, Artificial Sequence
  Description of Artificial Sequence: Synthetic oligonucleotide
aacugucugcaauuuccau

SEQ ID NO: 1626814 - RNA, 19 nt, Artificial Sequence
  Description of Artificial Sequence: Synthetic oligonucleotide
accguaagccgucaugcca

SEQ ID NO: 1626815 - RNA, 19 nt, Artificial Sequence
  Description of Artificial Sequence: Synthetic oligonucleotide
acccucagucugucuaacc

SEQ ID NO: 1626816 - RNA, 19 nt, Artificial Sequence
  Description of Artificial Sequence: Synthetic oligonucleotide
uucccgcuuucaaauaggu

SEQ ID NO: 1626817 - RNA, 19 nt, Artificial Sequence
  Description of Artificial Sequence: Synthetic oligonucleotide
aucuuggggacggagcccg

SEQ ID NO: 1626818 - RNA, 19 nt, Artificial Sequence
  Description of Artificial Sequence: Synthetic oligonucleotide
acuggugccccaucggcug

SEQ ID NO: 1626819 - RNA, 19 nt, Artificial Sequence
  Description of Artificial Sequence: Synthetic oligonucleotide
cacaccacucugcagcccc

SEQ ID NO: 1626820 - RNA, 19 nt, Artificial Sequence
  Description of Artificial Sequence: Synthetic oligonucleotide
agcuagcaaagguuugucu

SEQ ID NO: 1626821 - RNA, 19 nt, Artificial Sequence
  Description of Artificial Sequence: Synthetic oligonucleotide
uuuucuagcuggugccagu

SEQ ID NO: 1626822 - RNA, 19 nt, Artificial Sequence
  Description of Artificial Sequence: Synthetic oligonucleotide
aggaugacgccaucuuuca

SEQ ID NO: 1626823 - RNA, 19 nt, Artificial Sequence
  Description of Artificial Sequence: Synthetic oligonucleotide
aacccucagucugucuaac

SEQ ID NO: 1626824 - RNA, 19 nt, Artificial Sequence
  Description of Artificial Sequence: Synthetic oligonucleotide
ugucugcccagcccucagg

SEQ ID NO: 1626825 - RNA, 19 nt, Artificial Sequence
  Description of Artificial Sequence: Synthetic oligonucleotide
uagcaaagguuugucugcc

SEQ ID NO: 1626826 - RNA, 19 nt, Artificial Sequence
  Description of Artificial Sequence: Synthetic oligonucleotide
uccacaccacucugcagcc

SEQ ID NO: 1626827 - RNA, 19 nt, Artificial Sequence
  Description of Artificial Sequence: Synthetic oligonucleotide
uaagccgucaugccagauu

SEQ ID NO: 1626828 - RNA, 19 nt, Artificial Sequence
  Description of Artificial Sequence: Synthetic oligonucleotide
gugggcaauacuugggguc

SEQ ID NO: 1626829 - RNA, 19 nt, Artificial Sequence
  Description of Artificial Sequence: Synthetic oligonucleotide
caaggcaugaugggcgagg

SEQ ID NO: 1626830 - RNA, 19 nt, Artificial Sequence
  Description of Artificial Sequence: Synthetic oligonucleotide
uugggugcucaguaaccug

SEQ ID NO: 1626831 - RNA, 19 nt, Artificial Sequence
  Description of Artificial Sequence: Synthetic oligonucleotide
agaaaccggcaacucuuug

SEQ ID NO: 1626832 - RNA, 19 nt, Artificial Sequence
  Description of Artificial Sequence: Synthetic oligonucleotide
ggguucaugccauagcuga

SEQ ID NO: 1626833 - RNA, 19 nt, Artificial Sequence
  Description of Artificial Sequence: Synthetic oligonucleotide
ugaugggcgaggagggagu

SEQ ID NO: 1626834 - RNA, 19 nt, Artificial Sequence
  Description of Artificial Sequence: Synthetic oligonucleotide
gugugcauaggaugacgcc

SEQ ID NO: 1626835 - RNA, 19 nt, Artificial Sequence
  Description of Artificial Sequence: Synthetic oligonucleotide
cuggcacauuuguuggugc

SEQ ID NO: 1626836 - RNA, 19 nt, Artificial Sequence
  Description of Artificial Sequence: Synthetic oligonucleotide
ugccauagcugaccauggc

SEQ ID NO: 1626837 - RNA, 19 nt, Artificial Sequence
  Description of Artificial Sequence: Synthetic oligonucleotide
agagaugaagaaaccggca

SEQ ID NO: 1626838 - RNA, 19 nt, Artificial Sequence
  Description of Artificial Sequence: Synthetic oligonucleotide
uggaugccuauguggggag

SEQ ID NO: 1626839 - RNA, 19 nt, Artificial Sequence
  Description of Artificial Sequence: Synthetic oligonucleotide
ggaguauagcuagcaaagg

SEQ ID NO: 1626840 - RNA, 19 nt, Artificial Sequence
  Description of Artificial Sequence: Synthetic oligonucleotide
aaggaccccaauguucccu

SEQ ID NO: 1626841 - RNA, 19 nt, Artificial Sequence
  Description of Artificial Sequence: Synthetic oligonucleotide
gucccuggagcugucaugc

SEQ ID NO: 1626842 - RNA, 19 nt, Artificial Sequence
  Description of Artificial Sequence: Synthetic oligonucleotide
aguaaccugccuccuccug

SEQ ID NO: 1626843 - RNA, 19 nt, Artificial Sequence
  Description of Artificial Sequence: Synthetic oligonucleotide
acacaaugaaaaccccaaa

SEQ ID NO: 1626844 - RNA, 19 nt, Artificial Sequence
  Description of Artificial Sequence: Synthetic oligonucleotide
gucauauaucugccgcccc

SEQ ID NO: 1626845 - RNA, 19 nt, Artificial Sequence
  Description of Artificial Sequence: Synthetic oligonucleotide
ugccgucugguaccguaag

SEQ ID NO: 1626846 - RNA, 19 nt, Artificial Sequence
  Description of Artificial Sequence: Synthetic oligonucleotide
gucuaaccccaucaaggac

SEQ ID NO: 1626847 - RNA, 19 nt, Artificial Sequence
  Description of Artificial Sequence: Synthetic oligonucleotide
cuggaagucagggccaaug

SEQ ID NO: 1626848 - RNA, 19 nt, Artificial Sequence
  Description of Artificial Sequence: Synthetic oligonucleotide
gccauagcugaccauggcc

SEQ ID NO: 1626849 - RNA, 19 nt, Artificial Sequence
  Description of Artificial Sequence: Synthetic oligonucleotide
aacccacacauggaugccu

SEQ ID NO: 1626850 - RNA, 19 nt, Artificial Sequence
  Description of Artificial Sequence: Synthetic oligonucleotide
gagagcgguugaucuuggg

SEQ ID NO: 1626851 - RNA, 19 nt, Artificial Sequence
  Description of Artificial Sequence: Synthetic oligonucleotide
ugucauguucccgcuuuca

SEQ ID NO: 1626852 - RNA, 19 nt, Artificial Sequence
  Description of Artificial Sequence: Synthetic oligonucleotide
gguaccguaagccgucaug

SEQ ID NO: 1626853 - RNA, 19 nt, Artificial Sequence
  Description of Artificial Sequence: Synthetic oligonucleotide
uugucacacuugucgguac

SEQ ID NO: 1626854 - RNA, 19 nt, Artificial Sequence
  Description of Artificial Sequence: Synthetic oligonucleotide
agcugcggaguucggcuuc

SEQ ID NO: 1626855 - RNA, 19 nt, Artificial Sequence
  Description of Artificial Sequence: Synthetic oligonucleotide
cauagaugugccuucgagu

SEQ ID NO: 1626856 - RNA, 19 nt, Artificial Sequence
  Description of Artificial Sequence: Synthetic oligonucleotide
guuggcacccugcguguag

SEQ ID NO: 1626857 - RNA, 19 nt, Artificial Sequence
  Description of Artificial Sequence: Synthetic oligonucleotide
ggucauauaucugccgccc

SEQ ID NO: 1626858 - RNA, 19 nt, Artificial Sequence
  Description of Artificial Sequence: Synthetic oligonucleotide
cucgccauggccgucacca

SEQ ID NO: 1626859 - RNA, 19 nt, Artificial Sequence
  Description of Artificial Sequence: Synthetic oligonucleotide
uguagcccaucuguaggga

SEQ ID NO: 1626860 - RNA, 19 nt, Artificial Sequence
  Description of Artificial Sequence: Synthetic oligonucleotide
augccauagcugaccaugg

SEQ ID NO: 1626861 - RNA, 19 nt, Artificial Sequence
  Description of Artificial Sequence: Synthetic oligonucleotide
ugcguguagcccaucugua

SEQ ID NO: 1626862 - RNA, 19 nt, Artificial Sequence
  Description of Artificial Sequence: Synthetic oligonucleotide
ucugaguauuugacuccaa

SEQ ID NO: 1626863 - RNA, 19 nt, Artificial Sequence
  Description of Artificial Sequence: Synthetic oligonucleotide
ugagucccucaauccagcu

SEQ ID NO: 1626864 - RNA, 19 nt, Artificial Sequence
  Description of Artificial Sequence: Synthetic oligonucleotide
agucugcuaggaaacccuc

SEQ ID NO: 1626865 - RNA, 19 nt, Artificial Sequence
  Description of Artificial Sequence: Synthetic oligonucleotide
gagaugccgucugguaccg

SEQ ID NO: 1626866 - RNA, 19 nt, Artificial Sequence
  Description of Artificial Sequence: Synthetic oligonucleotide
agggcccucgccauggccg

SEQ ID NO: 1626867 - RNA, 19 nt, Artificial Sequence
  Description of Artificial Sequence: Synthetic oligonucleotide
cugugagucccucaaucca

SEQ ID NO: 1626868 - RNA, 19 nt, Artificial Sequence
  Description of Artificial Sequence: Synthetic oligonucleotide
gaugccgucugguaccgua

SEQ ID NO: 1626869 - RNA, 19 nt, Artificial Sequence
  Description of Artificial Sequence: Synthetic oligonucleotide
ugagugugcauaggaugac

SEQ ID NO: 1626870 - RNA, 19 nt, Artificial Sequence
  Description of Artificial Sequence: Synthetic oligonucleotide
ugaacugaguggagcucau

SEQ ID NO: 1626871 - RNA, 19 nt, Artificial Sequence
  Description of Artificial Sequence: Synthetic oligonucleotide
cccucagucugucuaaccc

SEQ ID NO: 1626872 - RNA, 19 nt, Artificial Sequence
  Description of Artificial Sequence: Synthetic oligonucleotide
cuuucagacccuucuggaa

SEQ ID NO: 1626873 - RNA, 19 nt, Artificial Sequence
  Description of Artificial Sequence: Synthetic oligonucleotide
agagguuuucuagcuggug

SEQ ID NO: 1626874 - RNA, 19 nt, Artificial Sequence
  Description of Artificial Sequence: Synthetic oligonucleotide
ucccgcuuucaaauagguc

SEQ ID NO: 1626875 - RNA, 19 nt, Artificial Sequence
  Description of Artificial Sequence: Synthetic oligonucleotide
gacggagcccggcugcagc

SEQ ID NO: 1626876 - RNA, 19 nt, Artificial Sequence
  Description of Artificial Sequence: Synthetic oligonucleotide
ggaggcugauugcagugag

SEQ ID NO: 1626877 - RNA, 19 nt, Artificial Sequence
  Description of Artificial Sequence: Synthetic oligonucleotide
uucccuacccgugggucag

SEQ ID NO: 1626878 - RNA, 19 nt, Artificial Sequence
  Description of Artificial Sequence: Synthetic oligonucleotide
ccaaugacgcacuggccgg

SEQ ID NO: 1626879 - RNA, 19 nt, Artificial Sequence
  Description of Artificial Sequence: Synthetic oligonucleotide
gggucauauaucugccgcc

SEQ ID NO: 1626880 - RNA, 19 nt, Artificial Sequence
  Description of Artificial Sequence: Synthetic oligonucleotide
uguucccuacccguggguc

SEQ ID NO: 1626881 - RNA, 19 nt, Artificial Sequence
  Description of Artificial Sequence: Synthetic oligonucleotide
aggaaacccucagucuguc

SEQ ID NO: 1626882 - RNA, 19 nt, Artificial Sequence
  Description of Artificial Sequence: Synthetic oligonucleotide
guucggcuuccuucugggg

SEQ ID NO: 1626883 - RNA, 19 nt, Artificial Sequence
  Description of Artificial Sequence: Synthetic oligonucleotide
gacccuucuggaagucagg

SEQ ID NO: 1626884 - RNA, 19 nt, Artificial Sequence
  Description of Artificial Sequence: Synthetic oligonucleotide
uggugucauagaugugccu

SEQ ID NO: 1626885 - RNA, 19 nt, Artificial Sequence
  Description of Artificial Sequence: Synthetic oligonucleotide
ugccuauguggggagccag

SEQ ID NO: 1626886 - RNA, 19 nt, Artificial Sequence
  Description of Artificial Sequence: Synthetic oligonucleotide
ugccuucgagucccuggag

SEQ ID NO: 1626887 - RNA, 19 nt, Artificial Sequence
  Description of Artificial Sequence: Synthetic oligonucleotide
agugacaccugcaccugug

SEQ ID NO: 1626888 - RNA, 19 nt, Artificial Sequence
  Description of Artificial Sequence: Synthetic oligonucleotide
caucuguagggacauggaa

SEQ ID NO: 1626889 - RNA, 19 nt, Artificial Sequence
  Description of Artificial Sequence: Synthetic oligonucleotide
uucuagcuggugccaguuc

SEQ ID NO: 1626890 - RNA, 19 nt, Artificial Sequence
  Description of Artificial Sequence: Synthetic oligonucleotide
uccagcugcggaguucggc

SEQ ID NO: 1626891 - RNA, 19 nt, Artificial Sequence
  Description of Artificial Sequence: Synthetic oligonucleotide
ugauugcagugaguuccag

SEQ ID NO: 1626892 - RNA, 19 nt, Artificial Sequence
  Description of Artificial Sequence: Synthetic oligonucleotide
ggaagaguugucacacuug

SEQ ID NO: 1626893 - RNA, 19 nt, Artificial Sequence
  Description of Artificial Sequence: Synthetic oligonucleotide
gagggaguauagcuagcaa

SEQ ID NO: 1626894 - RNA, 19 nt, Artificial Sequence
  Description of Artificial Sequence: Synthetic oligonucleotide
uagcuggugccaguucugc

SEQ ID NO: 1626895 - RNA, 19 nt, Artificial Sequence
  Description of Artificial Sequence: Synthetic oligonucleotide
uggggacggagcccggcug

SEQ ID NO: 1626896 - RNA, 19 nt, Artificial Sequence
  Description of Artificial Sequence: Synthetic oligonucleotide
uagcuagcaaagguuuguc

SEQ ID NO: 1626897 - RNA, 19 nt, Artificial Sequence
  Description of Artificial Sequence: Synthetic oligonucleotide
aauaggucauuggccucaa

SEQ ID NO: 1626898 - RNA, 19 nt, Artificial Sequence
  Description of Artificial Sequence: Synthetic oligonucleotide
uuucuagcuggugccaguu

SEQ ID NO: 1626899 - RNA, 19 nt, Artificial Sequence
  Description of Artificial Sequence: Synthetic oligonucleotide
cucaguaaccugccuccuc

SEQ ID NO: 1626900 - RNA, 19 nt, Artificial Sequence
  Description of Artificial Sequence: Synthetic oligonucleotide
guugaacugaguggagcuc

SEQ ID NO: 1626901 - RNA, 19 nt, Artificial Sequence
  Description of Artificial Sequence: Synthetic oligonucleotide
caaggaccccaauguuccc

SEQ ID NO: 1626902 - RNA, 19 nt, Artificial Sequence
  Description of Artificial Sequence: Synthetic oligonucleotide
aagaaaccggcaacucuuu

SEQ ID NO: 1626903 - RNA, 19 nt, Artificial Sequence
  Description of Artificial Sequence: Synthetic oligonucleotide
ccuugggugcucaguaacc

SEQ ID NO: 1626904 - RNA, 19 nt, Artificial Sequence
  Description of Artificial Sequence: Synthetic oligonucleotide
cucugaguauuugacucca

SEQ ID NO: 1626905 - RNA, 19 nt, Artificial Sequence
  Description of Artificial Sequence: Synthetic oligonucleotide
guauagcuagcaaagguuu

SEQ ID NO: 1626906 - RNA, 19 nt, Artificial Sequence
  Description of Artificial Sequence: Synthetic oligonucleotide
ugcauaggaugacgccauc

SEQ ID NO: 1626907 - RNA, 19 nt, Artificial Sequence
  Description of Artificial Sequence: Synthetic oligonucleotide
cuuuggggacagccacucc

SEQ ID NO: 1626908 - RNA, 19 nt, Artificial Sequence
  Description of Artificial Sequence: Synthetic oligonucleotide
cugcaccugugucauguuc

SEQ ID NO: 1626909 - RNA, 19 nt, Artificial Sequence
  Description of Artificial Sequence: Synthetic oligonucleotide
agagagcgguugaucuugg

SEQ ID NO: 1626910 - RNA, 19 nt, Artificial Sequence
  Description of Artificial Sequence: Synthetic oligonucleotide
aggacagagagggcuacaa

SEQ ID NO: 1626911 - RNA, 19 nt, Artificial Sequence
  Description of Artificial Sequence: Synthetic oligonucleotide
uacccgugggucaguccug

SEQ ID NO: 1626912 - RNA, 19 nt, Artificial Sequence
  Description of Artificial Sequence: Synthetic oligonucleotide
cagucugucuaaccccauc

SEQ ID NO: 1626913 - RNA, 19 nt, Artificial Sequence
  Description of Artificial Sequence: Synthetic oligonucleotide
gguacucagggcccucgcc

SEQ ID NO: 1626914 - RNA, 19 nt, Artificial Sequence
  Description of Artificial Sequence: Synthetic oligonucleotide
gucugcaauuuccaugggu

SEQ ID NO: 1626915 - RNA, 19 nt, Artificial Sequence
  Description of Artificial Sequence: Synthetic oligonucleotide
cuguagggacauggaagag

SEQ ID NO: 1626916 - RNA, 19 nt, Artificial Sequence
  Description of Artificial Sequence: Synthetic oligonucleotide
ccauggguucacaaagcac

SEQ ID NO: 1626917 - RNA, 19 nt, Artificial Sequence
  Description of Artificial Sequence: Synthetic oligonucleotide
cacgggguucaugccauag

SEQ ID NO: 1626918 - RNA, 19 nt, Artificial Sequence
  Description of Artificial Sequence: Synthetic oligonucleotide
gaacugaguggagcucaug

SEQ ID NO: 1626919 - RNA, 19 nt, Artificial Sequence
  Description of Artificial Sequence: Synthetic oligonucleotide
ugcuggacccugugggcaa

SEQ ID NO: 1626920 - RNA, 19 nt, Artificial Sequence
  Description of Artificial Sequence: Synthetic oligonucleotide
gugccuucgagucccugga

SEQ ID NO: 1626921 - RNA, 19 nt, Artificial Sequence
  Description of Artificial Sequence: Synthetic oligonucleotide
auguucccuacccgugggu

SEQ ID NO: 1626922 - RNA, 19 nt, Artificial Sequence
  Description of Artificial Sequence: Synthetic oligonucleotide
cuacccgugggucaguccu

SEQ ID NO: 1626923 - RNA, 19 nt, Artificial Sequence
  Description of Artificial Sequence: Synthetic oligonucleotide
caauacuuggggucauaua

SEQ ID NO: 1626924 - RNA, 19 nt, Artificial Sequence
  Description of Artificial Sequence: Synthetic oligonucleotide
gccugugagucccucaauc

SEQ ID NO: 1626925 - RNA, 19 nt, Artificial Sequence
  Description of Artificial Sequence: Synthetic oligonucleotide
guagggacauggaagaguu

SEQ ID NO: 1626926 - RNA, 19 nt, Artificial Sequence
  Description of Artificial Sequence: Synthetic oligonucleotide
gcggaguucggcuuccuuc

SEQ ID NO: 1626927 - RNA, 19 nt, Artificial Sequence
  Description of Artificial Sequence: Synthetic oligonucleotide
aggaccccaauguucccua

SEQ ID NO: 1626928 - RNA, 19 nt, Artificial Sequence
  Description of Artificial Sequence: Synthetic oligonucleotide
caaugacgcacuggccggc

SEQ ID NO: 1626929 - RNA, 19 nt, Artificial Sequence
  Description of Artificial Sequence: Synthetic oligonucleotide
caggagccgguuccugacc

SEQ ID NO: 1626930 - RNA, 19 nt, Artificial Sequence
  Description of Artificial Sequence: Synthetic oligonucleotide
auguucccgcuuucaaaua

SEQ ID NO: 1626931 - RNA, 19 nt, Artificial Sequence
  Description of Artificial Sequence: Synthetic oligonucleotide
acccugugggcaauacuug

SEQ ID NO: 1626932 - RNA, 19 nt, Artificial Sequence
  Description of Artificial Sequence: Synthetic oligonucleotide
acggagcccggcugcagcu

SEQ ID NO: 1626933 - RNA, 19 nt, Artificial Sequence
  Description of Artificial Sequence: Synthetic oligonucleotide
gacgggcccuuguugaacu

SEQ ID NO: 1626934 - RNA, 19 nt, Artificial Sequence
  Description of Artificial Sequence: Synthetic oligonucleotide
uggacaggagccgguuccu

SEQ ID NO: 1626935 - RNA, 19 nt, Artificial Sequence
  Description of Artificial Sequence: Synthetic oligonucleotide
gggucauagagaugccguc

SEQ ID NO: 1626936 - RNA, 19 nt, Artificial Sequence
  Description of Artificial Sequence: Synthetic oligonucleotide
cugcguguagcccaucugu

SEQ ID NO: 1626937 - RNA, 19 nt, Artificial Sequence
  Description of Artificial Sequence: Synthetic oligonucleotide
cagucugcuaggaaacccu

SEQ ID NO: 1626938 - RNA, 19 nt, Artificial Sequence
  Description of Artificial Sequence: Synthetic oligonucleotide
ugacgcacuggccggccuu

SEQ ID NO: 1626939 - RNA, 19 nt, Artificial Sequence
  Description of Artificial Sequence: Synthetic oligonucleotide
cauggccgucaccacugac

SEQ ID NO: 1626940 - RNA, 19 nt, Artificial Sequence
  Description of Artificial Sequence: Synthetic oligonucleotide
gcuuguucaugagugugca

SEQ ID NO: 1626941 - RNA, 19 nt, Artificial Sequence
  Description of Artificial Sequence: Synthetic oligonucleotide
cuuggggacggagcccggc

SEQ ID NO: 1626942 - RNA, 19 nt, Artificial Sequence
  Description of Artificial Sequence: Synthetic oligonucleotide
caauccagcugcggaguuc

SEQ ID NO: 1626943 - RNA, 19 nt, Artificial Sequence
  Description of Artificial Sequence: Synthetic oligonucleotide
ucagacccuucuggaaguc

SEQ ID NO: 1626944 - RNA, 19 nt, Artificial Sequence
  Description of Artificial Sequence: Synthetic oligonucleotide
cagcgcaagcagugacacc

SEQ ID NO: 1626945 - RNA, 19 nt, Artificial Sequence
  Description of Artificial Sequence: Synthetic oligonucleotide
ugcggaguucggcuuccuu

SEQ ID NO: 1626946 - RNA, 19 nt, Artificial Sequence
  Description of Artificial Sequence: Synthetic oligonucleotide
uggacccugugggcaauac

SEQ ID NO: 1626947 - RNA, 19 nt, Artificial Sequence
  Description of Artificial Sequence: Synthetic oligonucleotide
ggcaacucuuuggggacag

SEQ ID NO: 1626948 - RNA, 19 nt, Artificial Sequence
  Description of Artificial Sequence: Synthetic oligonucleotide
ugguaccguaagccgucau

SEQ ID NO: 1626949 - RNA, 19 nt, Artificial Sequence
  Description of Artificial Sequence: Synthetic oligonucleotide
cauaggaugacgccaucuu

SEQ ID NO: 1626950 - RNA, 19 nt, Artificial Sequence
  Description of Artificial Sequence: Synthetic oligonucleotide
cuuguuucucugaguauuu

SEQ ID NO: 1626951 - RNA, 19 nt, Artificial Sequence
  Description of Artificial Sequence: Synthetic oligonucleotide
cuggugccccaucggcugc

SEQ ID NO: 1626952 - RNA, 19 nt, Artificial Sequence
  Description of Artificial Sequence: Synthetic oligonucleotide
augacgcacuggccggccu

SEQ ID NO: 1626953 - RNA, 19 nt, Artificial Sequence
  Description of Artificial Sequence: Synthetic oligonucleotide
gugucauguucccgcuuuc

SEQ ID NO: 1626954 - RNA, 19 nt, Artificial Sequence
  Description of Artificial Sequence: Synthetic oligonucleotide
ugucgguacccagcuuggu

SEQ ID NO: 1626955 - RNA, 19 nt, Artificial Sequence
  Description of Artificial Sequence: Synthetic oligonucleotide
agcccaucuguagggacau

SEQ ID NO: 1626956 - RNA, 19 nt, Artificial Sequence
  Description of Artificial Sequence: Synthetic oligonucleotide
ugcccaccuggcuggcaca

SEQ ID NO: 1626957 - RNA, 19 nt, Artificial Sequence
  Description of Artificial Sequence: Synthetic oligonucleotide
cuugggugcucaguaaccu

SEQ ID NO: 1626958 - RNA, 19 nt, Artificial Sequence
  Description of Artificial Sequence: Synthetic oligonucleotide
ggcccaauuucaagaaaca

SEQ ID NO: 1626959 - RNA, 19 nt, Artificial Sequence
  Description of Artificial Sequence: Synthetic oligonucleotide
gguucacaaagcacaaacu

SEQ ID NO: 1626960 - RNA, 19 nt, Artificial Sequence
  Description of Artificial Sequence: Synthetic oligonucleotide
agcugaggcaggaggcuga

SEQ ID NO: 1626961 - RNA, 19 nt, Artificial Sequence
  Description of Artificial Sequence: Synthetic oligonucleotide
cuuuacuauuagguuuucu

SEQ ID NO: 1626962 - RNA, 19 nt, Artificial Sequence
  Description of Artificial Sequence: Synthetic oligonucleotide
gcacccugcguguagccca

SEQ ID NO: 1626963 - RNA, 19 nt, Artificial Sequence
  Description of Artificial Sequence: Synthetic oligonucleotide
gggguucaugccauagcug

SEQ ID NO: 1626964 - RNA, 19 nt, Artificial Sequence
  Description of Artificial Sequence: Synthetic oligonucleotide
ggcugauugcagugaguuc

SEQ ID NO: 1626965 - RNA, 19 nt, Artificial Sequence
  Description of Artificial Sequence: Synthetic oligonucleotide
acuggccggccuucauggu

SEQ ID NO: 1626966 - RNA, 19 nt, Artificial Sequence
  Description of Artificial Sequence: Synthetic oligonucleotide
ccggcaacucuuuggggac

SEQ ID NO: 1626967 - RNA, 19 nt, Artificial Sequence
  Description of Artificial Sequence: Synthetic oligonucleotide
augccuauguggggagcca

SEQ ID NO: 1626968 - RNA, 19 nt, Artificial Sequence
  Description of Artificial Sequence: Synthetic oligonucleotide
aggcaggaugugguucuug

SEQ ID NO: 1626969 - RNA, 19 nt, Artificial Sequence
  Description of Artificial Sequence: Synthetic oligonucleotide
agccgucaugccagauugg

SEQ ID NO: 1626970 - RNA, 19 nt, Artificial Sequence
  Description of Artificial Sequence: Synthetic oligonucleotide
ccagcgcaagcagugacac

SEQ ID NO: 1626971 - RNA, 19 nt, Artificial Sequence
  Description of Artificial Sequence: Synthetic oligonucleotide
ggugucauagaugugccuu

SEQ ID NO: 1626972 - RNA, 19 nt, Artificial Sequence
  Description of Artificial Sequence: Synthetic oligonucleotide
ccccaauguucccuacccg

SEQ ID NO: 1626973 - RNA, 19 nt, Artificial Sequence
  Description of Artificial Sequence: Synthetic oligonucleotide
gccgucugguaccguaagc

SEQ ID NO: 1626974 - RNA, 19 nt, Artificial Sequence
  Description of Artificial Sequence: Synthetic oligonucleotide
gguccacgggguucaugcc

SEQ ID NO: 1626975 - RNA, 19 nt, Artificial Sequence
  Description of Artificial Sequence: Synthetic oligonucleotide
gcgguugaucuuggggacg

SEQ ID NO: 1626976 - RNA, 19 nt, Artificial Sequence
  Description of Artificial Sequence: Synthetic oligonucleotide
ggggacggagcccggcugc

SEQ ID NO: 1626977 - RNA, 19 nt, Artificial Sequence
  Description of Artificial Sequence: Synthetic oligonucleotide
ggcgaggagggaguauagc

SEQ ID NO: 1626978 - RNA, 19 nt, Artificial Sequence
  Description of Artificial Sequence: Synthetic oligonucleotide
gagagguuuucuagcuggu

SEQ ID NO: 1626979 - RNA, 19 nt, Artificial Sequence
  Description of Artificial Sequence: Synthetic oligonucleotide
gcccaauuucaagaaacaa

SEQ ID NO: 1626980 - RNA, 19 nt, Artificial Sequence
  Description of Artificial Sequence: Synthetic oligonucleotide
ggaguucggcuuccuucug

SEQ ID NO: 1626981 - RNA, 19 nt, Artificial Sequence
  Description of Artificial Sequence: Synthetic oligonucleotide
ucgagucccuggagcuguc

SEQ ID NO: 1626982 - RNA, 19 nt, Artificial Sequence
  Description of Artificial Sequence: Synthetic oligonucleotide
ggucauagagaugccgucu

SEQ ID NO: 1626983 - RNA, 19 nt, Artificial Sequence
  Description of Artificial Sequence: Synthetic oligonucleotide
ggggucguauuuggacagg

SEQ ID NO: 1626984 - RNA, 19 nt, Artificial Sequence
  Description of Artificial Sequence: Synthetic oligonucleotide
cccucaauccagcugcgga

SEQ ID NO: 1626985 - RNA, 19 nt, Artificial Sequence
  Description of Artificial Sequence: Synthetic oligonucleotide
gacgcacuggccggccuuc

SEQ ID NO: 1626986 - RNA, 19 nt, Artificial Sequence
  Description of Artificial Sequence: Synthetic oligonucleotide
ggccgucaccacugacugg

SEQ ID NO: 1626987 - RNA, 19 nt, Artificial Sequence
  Description of Artificial Sequence: Synthetic oligonucleotide
gggucguauuuggacagga

SEQ ID NO: 1626988 - RNA, 19 nt, Artificial Sequence
  Description of Artificial Sequence: Synthetic oligonucleotide
ggagcucauggcggggacc

SEQ ID NO: 1626989 - RNA, 19 nt, Artificial Sequence
  Description of Artificial Sequence: Synthetic oligonucleotide
cacugacuggugccccauc

SEQ ID NO: 1626990 - RNA, 19 nt, Artificial Sequence
  Description of Artificial Sequence: Synthetic oligonucleotide
ccugcguguagcccaucug

SEQ ID NO: 1626991 - RNA, 19 nt, Artificial Sequence
  Description of Artificial Sequence: Synthetic oligonucleotide
ggggucauagagaugccgu

SEQ ID NO: 1626992 - RNA, 19 nt, Artificial Sequence
  Description of Artificial Sequence: Synthetic oligonucleotide
cagacccuucuggaaguca

SEQ ID NO: 1626993 - RNA, 19 nt, Artificial Sequence
  Description of Artificial Sequence: Synthetic oligonucleotide
gcaagcagugacaccugca

SEQ ID NO: 1626994 - RNA, 19 nt, Artificial Sequence
  Description of Artificial Sequence: Synthetic oligonucleotide
uaaccccaucaaggacccc

SEQ ID NO: 1626995 - RNA, 19 nt, Artificial Sequence
  Description of Artificial Sequence: Synthetic oligonucleotide
uacccaucuggaggcugau

SEQ ID NO: 1626996 - RNA, 19 nt, Artificial Sequence
  Description of Artificial Sequence: Synthetic oligonucleotide
ccuacccgugggucagucc

SEQ ID NO: 1626997 - RNA, 19 nt, Artificial Sequence
  Description of Artificial Sequence: Synthetic oligonucleotide
ccagcuuggugucauagau

SEQ ID NO: 1626998 - RNA, 19 nt, Artificial Sequence
  Description of Artificial Sequence: Synthetic oligonucleotide
gccgucaccacugacuggu

SEQ ID NO: 1626999 - RNA, 19 nt, Artificial Sequence
  Description of Artificial Sequence: Synthetic oligonucleotide
augccgucugguaccguaa

SEQ ID NO: 1627000 - RNA, 19 nt, Artificial Sequence
  Description of Artificial Sequence: Synthetic oligonucleotide
cacucugcagccccuuggu

SEQ ID NO: 1627001 - RNA, 19 nt, Artificial Sequence
  Description of Artificial Sequence: Synthetic oligonucleotide
uggugccccaucggcugcu

SEQ ID NO: 1627002 - RNA, 19 nt, Artificial Sequence
  Description of Artificial Sequence: Synthetic oligonucleotide
gccuauguggggagccagc

SEQ ID NO: 1627003 - RNA, 19 nt, Artificial Sequence
  Description of Artificial Sequence: Synthetic oligonucleotide
gaggcugauugcagugagu

SEQ ID NO: 1627004 - RNA, 19 nt, Artificial Sequence
  Description of Artificial Sequence: Synthetic oligonucleotide
cugcuaggaaacccucagu

SEQ ID NO: 1627005 - RNA, 19 nt, Artificial Sequence
  Description of Artificial Sequence: Synthetic oligonucleotide
gcaaggcaugaugggcgag

SEQ ID NO: 1627006 - RNA, 19 nt, Artificial Sequence
  Description of Artificial Sequence: Synthetic oligonucleotide
ccuauguggggagccagca

SEQ ID NO: 1627007 - RNA, 19 nt, Artificial Sequence
  Description of Artificial Sequence: Synthetic oligonucleotide
ccuucgagucccuggagcu

SEQ ID NO: 1627008 - RNA, 19 nt, Artificial Sequence
  Description of Artificial Sequence: Synthetic oligonucleotide
gcauaggaugacgccaucu

SEQ ID NO: 1627009 - RNA, 19 nt, Artificial Sequence
  Description of Artificial Sequence: Synthetic oligonucleotide
cgugggucaguccugggaa

SEQ ID NO: 1627010 - RNA, 19 nt, Artificial Sequence
  Description of Artificial Sequence: Synthetic oligonucleotide
augggcgaggagggaguau

SEQ ID NO: 1627011 - RNA, 19 nt, Artificial Sequence
  Description of Artificial Sequence: Synthetic oligonucleotide
cgaggagggaguauagcua

SEQ ID NO: 1627012 - RNA, 19 nt, Artificial Sequence
  Description of Artificial Sequence: Synthetic oligonucleotide
gccagcgcaagcagugaca

SEQ ID NO: 1627013 - RNA, 19 nt, Artificial Sequence
  Description of Artificial Sequence: Synthetic oligonucleotide
cccaaacccacacauggau

SEQ ID NO: 1627014 - RNA, 19 nt, Artificial Sequence
  Description of Artificial Sequence: Synthetic oligonucleotide
aucggcugcuggacccugu

SEQ ID NO: 1627015 - RNA, 19 nt, Artificial Sequence
  Description of Artificial Sequence: Synthetic oligonucleotide
cugguaccguaagccguca

SEQ ID NO: 1627016 - RNA, 19 nt, Artificial Sequence
  Description of Artificial Sequence: Synthetic oligonucleotide
ggugcucaguaaccugccu

SEQ ID NO: 1627017 - RNA, 19 nt, Artificial Sequence
  Description of Artificial Sequence: Synthetic oligonucleotide
ccuuuccugccagcgcaag

SEQ ID NO: 1627018 - RNA, 19 nt, Artificial Sequence
  Description of Artificial Sequence: Synthetic oligonucleotide
ccccaaacccacacaugga

SEQ ID NO: 1627019 - RNA, 19 nt, Artificial Sequence
  Description of Artificial Sequence: Synthetic oligonucleotide
guacccagcuuggugucau

SEQ ID NO: 1627020 - RNA, 19 nt, Artificial Sequence
  Description of Artificial Sequence: Synthetic oligonucleotide
ggaaacccucagucugucu

SEQ ID NO: 1627021 - RNA, 19 nt, Artificial Sequence
  Description of Artificial Sequence: Synthetic oligonucleotide
ccgugggucaguccuggga

SEQ ID NO: 1627022 - RNA, 19 nt, Artificial Sequence
  Description of Artificial Sequence: Synthetic oligonucleotide
agaugccgucugguaccgu

SEQ ID NO: 1627023 - RNA, 19 nt, Artificial Sequence
  Description of Artificial Sequence: Synthetic oligonucleotide
gcaacucuuuggggacagc

SEQ ID NO: 1627024 - RNA, 19 nt, Artificial Sequence
  Description of Artificial Sequence: Synthetic oligonucleotide
cagugacaccugcaccugu

SEQ ID NO: 1627025 - RNA, 19 nt, Artificial Sequence
  Description of Artificial Sequence: Synthetic oligonucleotide
ggacggagcccggcugcag

SEQ ID NO: 1627026 - RNA, 19 nt, Artificial Sequence
  Description of Artificial Sequence: Synthetic oligonucleotide
gccccaucggcugcuggac

SEQ ID NO: 1627027 - RNA, 19 nt, Artificial Sequence
  Description of Artificial Sequence: Synthetic oligonucleotide
ucccuacccgugggucagu

SEQ ID NO: 1627028 - RNA, 19 nt, Artificial Sequence
  Description of Artificial Sequence: Synthetic oligonucleotide
acccugcguguagcccauc

SEQ ID NO: 1627029 - RNA, 19 nt, Artificial Sequence
  Description of Artificial Sequence: Synthetic oligonucleotide
ccgcuuucaaauaggucau

SEQ ID NO: 1627030 - RNA, 19 nt, Artificial Sequence
  Description of Artificial Sequence: Synthetic oligonucleotide
gaugugccuucgagucccu

SEQ ID NO: 1627031 - RNA, 19 nt, Artificial Sequence
  Description of Artificial Sequence: Synthetic oligonucleotide
cggaguucggcuuccuucu

SEQ ID NO: 1627032 - RNA, 19 nt, Artificial Sequence
  Description of Artificial Sequence: Synthetic oligonucleotide
ggccggccuucaugguggc

SEQ ID NO: 1627033 - RNA, 19 nt, Artificial Sequence
  Description of Artificial Sequence: Synthetic oligonucleotide
ccgucaccacugacuggug

SEQ ID NO: 1627034 - RNA, 19 nt, Artificial Sequence
  Description of Artificial Sequence: Synthetic oligonucleotide
ggugccccaucggcugcug

SEQ ID NO: 1627035 - RNA, 19 nt, Artificial Sequence
  Description of Artificial Sequence: Synthetic oligonucleotide
cagcacccuugggugcuca

SEQ ID NO: 1627036 - RNA, 19 nt, Artificial Sequence
  Description of Artificial Sequence: Synthetic oligonucleotide
agcccggcugcagcuuguu

SEQ ID NO: 1627037 - RNA, 19 nt, Artificial Sequence
  Description of Artificial Sequence: Synthetic oligonucleotide
cugugucauguucccgcuu

SEQ ID NO: 1627038 - RNA, 19 nt, Artificial Sequence
  Description of Artificial Sequence: Synthetic oligonucleotide
ccuggccacucugguuggc

SEQ ID NO: 1627039 - RNA, 19 nt, Artificial Sequence
  Description of Artificial Sequence: Synthetic oligonucleotide
gcccggcugcagcuuguuc

SEQ ID NO: 1627040 - RNA, 19 nt, Artificial Sequence
  Description of Artificial Sequence: Synthetic oligonucleotide
ggccaauggagaggccugu

SEQ ID NO: 1627041 - RNA, 19 nt, Artificial Sequence
  Description of Artificial Sequence: Synthetic oligonucleotide
gggacggagcccggcugca

SEQ ID NO: 1627042 - RNA, 19 nt, Artificial Sequence
  Description of Artificial Sequence: Synthetic oligonucleotide
cacccugcguguagcccau

SEQ ID NO: 1627043 - RNA, 19 nt, Artificial Sequence
  Description of Artificial Sequence: Synthetic oligonucleotide
cccuacccgugggucaguc

SEQ ID NO: 1627044 - RNA, 19 nt, Artificial Sequence
  Description of Artificial Sequence: Synthetic oligonucleotide
cuggacccugugggcaaua

SEQ ID NO: 1627045 - RNA, 19 nt, Artificial Sequence
  Description of Artificial Sequence: Synthetic oligonucleotide
cccugcguguagcccaucu

SEQ ID NO: 1627046 - RNA, 19 nt, Artificial Sequence
  Description of Artificial Sequence: Synthetic oligonucleotide
ggccugugagucccucaau

SEQ ID NO: 1627047 - RNA, 19 nt, Artificial Sequence
  Description of Artificial Sequence: Synthetic oligonucleotide
gccggccuucaugguggca

SEQ ID NO: 1627048 - RNA, 19 nt, Artificial Sequence
  Description of Artificial Sequence: Synthetic oligonucleotide
cggcaacucuuuggggaca

SEQ ID NO: 1627049 - RNA, 19 nt, Artificial Sequence
  Description of Artificial Sequence: Synthetic oligonucleotide
ccacucccacagucugcua

SEQ ID NO: 1627050 - RNA, 19 nt, Artificial Sequence
  Description of Artificial Sequence: Synthetic oligonucleotide
ccacgggguucaugccaua

SEQ ID NO: 1627051 - RNA, 19 nt, Artificial Sequence
  Description of Artificial Sequence: Synthetic oligonucleotide
ccaucggcugcuggacccu

SEQ ID NO: 1627052 - RNA, 19 nt, Artificial Sequence
  Description of Artificial Sequence: Synthetic oligonucleotide
ccccaucaaggaccccaau

SEQ ID NO: 1627053 - RNA, 19 nt, Artificial Sequence
  Description of Artificial Sequence: Synthetic oligonucleotide
aauaauuaucaccacguac

SEQ ID NO: 1627054 - RNA, 19 nt, Artificial Sequence
  Description of Artificial Sequence: Synthetic oligonucleotide
uuuaucaucauagaguucg

SEQ ID NO: 1627055 - RNA, 19 nt, Artificial Sequence
  Description of Artificial Sequence: Synthetic oligonucleotide
aagaaggaacauuucaacc

SEQ ID NO: 1627056 - RNA, 19 nt, Artificial Sequence
  Description of Artificial Sequence: Synthetic oligonucleotide
auuaucaccacguacucgc

SEQ ID NO: 1627057 - RNA, 19 nt, Artificial Sequence
  Description of Artificial Sequence: Synthetic oligonucleotide
ugcacaauaauuaucacca

SEQ ID NO: 1627058 - RNA, 19 nt, Artificial Sequence
  Description of Artificial Sequence: Synthetic oligonucleotide
aacagcauaggcaagaagg

SEQ ID NO: 1627059 - RNA, 19 nt, Artificial Sequence
  Description of Artificial Sequence: Synthetic oligonucleotide
acauuagaaauuuuacagc

SEQ ID NO: 1627060 - RNA, 19 nt, Artificial Sequence
  Description of Artificial Sequence: Synthetic oligonucleotide
auuucaaccuguucaaggc

SEQ ID NO: 1627061 - RNA, 19 nt, Artificial Sequence
  Description of Artificial Sequence: Synthetic oligonucleotide
auagaugugaauuucugag

SEQ ID NO: 1627062 - RNA, 19 nt, Artificial Sequence
  Description of Artificial Sequence: Synthetic oligonucleotide
uguuuaucagcuuuucugg

SEQ ID NO: 1627063 - RNA, 19 nt, Artificial Sequence
  Description of Artificial Sequence: Synthetic oligonucleotide
ucaguuuaccaucagaacu

SEQ ID NO: 1627064 - RNA, 19 nt, Artificial Sequence
  Description of Artificial Sequence: Synthetic oligonucleotide
aacauguguccucacagac

SEQ ID NO: 1627065 - RNA, 19 nt, Artificial Sequence
  Description of Artificial Sequence: Synthetic oligonucleotide
ucucgagcaaacaagagca

SEQ ID NO: 1627066 - RNA, 19 nt, Artificial Sequence
  Description of Artificial Sequence: Synthetic oligonucleotide
uuagaaauuuuacagcuuc

SEQ ID NO: 1627067 - RNA, 19 nt, Artificial Sequence
  Description of Artificial Sequence: Synthetic oligonucleotide
cauaauauccauuucagga

SEQ ID NO: 1627068 - RNA, 19 nt, Artificial Sequence
  Description of Artificial Sequence: Synthetic oligonucleotide
ucucuuuaucaucauagag

SEQ ID NO: 1627069 - RNA, 19 nt, Artificial Sequence
  Description of Artificial Sequence: Synthetic oligonucleotide
uguuauuggacauauuccu

SEQ ID NO: 1627070 - RNA, 19 nt, Artificial Sequence
  Description of Artificial Sequence: Synthetic oligonucleotide
uuaaccugaguucugauau

SEQ ID NO: 1627071 - RNA, 19 nt, Artificial Sequence
  Description of Artificial Sequence: Synthetic oligonucleotide
uccauaauauccauuucag

SEQ ID NO: 1627072 - RNA, 19 nt, Artificial Sequence
  Description of Artificial Sequence: Synthetic oligonucleotide
aaaaugggacuuccuuucc

SEQ ID NO: 1627073 - RNA, 19 nt, Artificial Sequence
  Description of Artificial Sequence: Synthetic oligonucleotide
ucaacauguguccucacag

SEQ ID NO: 1627074 - RNA, 19 nt, Artificial Sequence
  Description of Artificial Sequence: Synthetic oligonucleotide
uaacauuagaaauuuuaca

SEQ ID NO: 1627075 - RNA, 19 nt, Artificial Sequence
  Description of Artificial Sequence: Synthetic oligonucleotide
auuucagccaggcuugccc

SEQ ID NO: 1627076 - RNA, 19 nt, Artificial Sequence
  Description of Artificial Sequence: Synthetic oligonucleotide
ugugucucgagcaaacaag

SEQ ID NO: 1627077 - RNA, 19 nt, Artificial Sequence
  Description of Artificial Sequence: Synthetic oligonucleotide
agaaggaacauuucaaccu

SEQ ID NO: 1627078 - RNA, 19 nt, Artificial Sequence
  Description of Artificial Sequence: Synthetic oligonucleotide
aacaucgcaguccagcuug

SEQ ID NO: 1627079 - RNA, 19 nt, Artificial Sequence
  Description of Artificial Sequence: Synthetic oligonucleotide
uaauauccauuucaggagc

SEQ ID NO: 1627080 - RNA, 19 nt, Artificial Sequence
  Description of Artificial Sequence: Synthetic oligonucleotide
uauagugucgaucauccuc

SEQ ID NO: 1627081 - RNA, 19 nt, Artificial Sequence
  Description of Artificial Sequence: Synthetic oligonucleotide
uccucacacacucugacag

SEQ ID NO: 1627082 - RNA, 19 nt, Artificial Sequence
  Description of Artificial Sequence: Synthetic oligonucleotide
uuauagaugugaauuucug

SEQ ID NO: 1627083 - RNA, 19 nt, Artificial Sequence
  Description of Artificial Sequence: Synthetic oligonucleotide
auaauuaucaccacguacu

SEQ ID NO: 1627084 - RNA, 19 nt, Artificial Sequence
  Description of Artificial Sequence: Synthetic oligonucleotide
cacagauacaugcugaagc

SEQ ID NO: 1627085 - RNA, 19 nt, Artificial Sequence
  Description of Artificial Sequence: Synthetic oligonucleotide
uuuaccaucagaacuguua

SEQ ID NO: 1627086 - RNA, 19 nt, Artificial Sequence
  Description of Artificial Sequence: Synthetic oligonucleotide
cacaauaauuaucaccacg

SEQ ID NO: 1627087 - RNA, 19 nt, Artificial Sequence
  Description of Artificial Sequence: Synthetic oligonucleotide
aaagcaucugccuuaugga

SEQ ID NO: 1627088 - RNA, 19 nt, Artificial Sequence
  Description of Artificial Sequence: Synthetic oligonucleotide
aacagcuagucuucagaac

SEQ ID NO: 1627089 - RNA, 19 nt, Artificial Sequence
  Description of Artificial Sequence: Synthetic oligonucleotide
ucugacagggauguuauag

SEQ ID NO: 1627090 - RNA, 19 nt, Artificial Sequence
  Description of Artificial Sequence: Synthetic oligonucleotide
acagcuagucuucagaaca

SEQ ID NO: 1627091 - RNA, 19 nt, Artificial Sequence
  Description of Artificial Sequence: Synthetic oligonucleotide
aauauccauuucaggagcc

SEQ ID NO: 1627092 - RNA, 19 nt, Artificial Sequence
  Description of Artificial Sequence: Synthetic oligonucleotide
ucauguauuagcaauucuu

SEQ ID NO: 1627093 - RNA, 19 nt, Artificial Sequence
  Description of Artificial Sequence: Synthetic oligonucleotide
uguuguacuuggacaaccg

SEQ ID NO: 1627094 - RNA, 19 nt, Artificial Sequence
  Description of Artificial Sequence: Synthetic oligonucleotide
cuguuauuggacauauucc

SEQ ID NO: 1627095 - RNA, 19 nt, Artificial Sequence
  Description of Artificial Sequence: Synthetic oligonucleotide
guuauagugucgaucaucc

SEQ ID NO: 1627096 - RNA, 19 nt, Artificial Sequence
  Description of Artificial Sequence: Synthetic oligonucleotide
auaguuuguaccuuccaca

SEQ ID NO: 1627097 - RNA, 19 nt, Artificial Sequence
  Description of Artificial Sequence: Synthetic oligonucleotide
auuggacauauuccuuucc

SEQ ID NO: 1627098 - RNA, 19 nt, Artificial Sequence
  Description of Artificial Sequence: Synthetic oligonucleotide
uaguuuguaccuuccacag

SEQ ID NO: 1627099 - RNA, 19 nt, Artificial Sequence
  Description of Artificial Sequence: Synthetic oligonucleotide
aauuaucaccacguacucg

SEQ ID NO: 1627100 - RNA, 19 nt, Artificial Sequence
  Description of Artificial Sequence: Synthetic oligonucleotide
ugauaucccucuuucaugu

SEQ ID NO: 1627101 - RNA, 19 nt, Artificial Sequence
  Description of Artificial Sequence: Synthetic oligonucleotide
auggagacauaguuuguac

SEQ ID NO: 1627102 - RNA, 19 nt, Artificial Sequence
  Description of Artificial Sequence: Synthetic oligonucleotide
ugaacaguucaucgcaagc

SEQ ID NO: 1627103 - RNA, 19 nt, Artificial Sequence
  Description of Artificial Sequence: Synthetic oligonucleotide
uccaaguuuccauugcuug

SEQ ID NO: 1627104 - RNA, 19 nt, Artificial Sequence
  Description of Artificial Sequence: Synthetic oligonucleotide
acaauaauuaucaccacgu

SEQ ID NO: 1627105 - RNA, 19 nt, Artificial Sequence
  Description of Artificial Sequence: Synthetic oligonucleotide
gagaccugcagaccuaagg

SEQ ID NO: 1627106 - RNA, 19 nt, Artificial Sequence
  Description of Artificial Sequence: Synthetic oligonucleotide
uuaucagcuuuucugguaa

SEQ ID NO: 1627107 - RNA, 19 nt, Artificial Sequence
  Description of Artificial Sequence: Synthetic oligonucleotide
caagaaggaacauuucaac

SEQ ID NO: 1627108 - RNA, 19 nt, Artificial Sequence
  Description of Artificial Sequence: Synthetic oligonucleotide
aacagaucaugagugaaga

SEQ ID NO: 1627109 - RNA, 19 nt, Artificial Sequence
  Description of Artificial Sequence: Synthetic oligonucleotide
uuguacuuggacaaccggu

SEQ ID NO: 1627110 - RNA, 19 nt, Artificial Sequence
  Description of Artificial Sequence: Synthetic oligonucleotide
aucagaacuguuauuggac

SEQ ID NO: 1627111 - RNA, 19 nt, Artificial Sequence
  Description of Artificial Sequence: Synthetic oligonucleotide
uggugaacaguucaucgca

SEQ ID NO: 1627112 - RNA, 19 nt, Artificial Sequence
  Description of Artificial Sequence: Synthetic oligonucleotide
agacauaguuuguaccuuc

SEQ ID NO: 1627113 - RNA, 19 nt, Artificial Sequence
  Description of Artificial Sequence: Synthetic oligonucleotide
uaguccauaauauccauuu

SEQ ID NO: 1627114 - RNA, 19 nt, Artificial Sequence
  Description of Artificial Sequence: Synthetic oligonucleotide
gaguauuuccccuccauuc

SEQ ID NO: 1627115 - RNA, 19 nt, Artificial Sequence
  Description of Artificial Sequence: Synthetic oligonucleotide
uuuccaaacaguguccucu

SEQ ID NO: 1627116 - RNA, 19 nt, Artificial Sequence
  Description of Artificial Sequence: Synthetic oligonucleotide
uuaccaucagaacuguuau

SEQ ID NO: 1627117 - RNA, 19 nt, Artificial Sequence
  Description of Artificial Sequence: Synthetic oligonucleotide
aguucgauggcucuguuua

SEQ ID NO: 1627118 - RNA, 19 nt, Artificial Sequence
  Description of Artificial Sequence: Synthetic oligonucleotide
uggagacauaguuuguacc

SEQ ID NO: 1627119 - RNA, 19 nt, Artificial Sequence
  Description of Artificial Sequence: Synthetic oligonucleotide
gcgucaguaggauagacgg

SEQ ID NO: 1627120 - RNA, 19 nt, Artificial Sequence
  Description of Artificial Sequence: Synthetic oligonucleotide
uguggcgaacagcauaggc

SEQ ID NO: 1627121 - RNA, 19 nt, Artificial Sequence
  Description of Artificial Sequence: Synthetic oligonucleotide
ucccagauuguccuuggag

SEQ ID NO: 1627122 - RNA, 19 nt, Artificial Sequence
  Description of Artificial Sequence: Synthetic oligonucleotide
uuggugaacaguucaucgc

SEQ ID NO: 1627123 - RNA, 19 nt, Artificial Sequence
  Description of Artificial Sequence: Synthetic oligonucleotide
uuauuggacauauuccuuu

SEQ ID NO: 1627124 - RNA, 19 nt, Artificial Sequence
  Description of Artificial Sequence: Synthetic oligonucleotide
gaugguguggcgaacagca

SEQ ID NO: 1627125 - RNA, 19 nt, Artificial Sequence
  Description of Artificial Sequence: Synthetic oligonucleotide
ccaaaguucucccagauug

SEQ ID NO: 1627126 - RNA, 19 nt, Artificial Sequence
  Description of Artificial Sequence: Synthetic oligonucleotide
aguucucccagauuguccu

SEQ ID NO: 1627127 - RNA, 19 nt, Artificial Sequence
  Description of Artificial Sequence: Synthetic oligonucleotide
uagaugugaauuucugaga

SEQ ID NO: 1627128 - RNA, 19 nt, Artificial Sequence
  Description of Artificial Sequence: Synthetic oligonucleotide
gucucgagcaaacaagagc

SEQ ID NO: 1627129 - RNA, 19 nt, Artificial Sequence
  Description of Artificial Sequence: Synthetic oligonucleotide
aaguaacagucaguuuacc

SEQ ID NO: 1627130 - RNA, 19 nt, Artificial Sequence
  Description of Artificial Sequence: Synthetic oligonucleotide
cagugcacaauaauuauca

SEQ ID NO: 1627131 - RNA, 19 nt, Artificial Sequence
  Description of Artificial Sequence: Synthetic oligonucleotide
guccauaauauccauuuca

SEQ ID NO: 1627132 - RNA, 19 nt, Artificial Sequence
  Description of Artificial Sequence: Synthetic oligonucleotide
cuguguaacagaucaugag

SEQ ID NO: 1627133 - RNA, 19 nt, Artificial Sequence
  Description of Artificial Sequence: Synthetic oligonucleotide
cauuagaaauuuuacagcu

SEQ ID NO: 1627134 - RNA, 19 nt, Artificial Sequence
  Description of Artificial Sequence: Synthetic oligonucleotide
aguauuuccccuccauucu

SEQ ID NO: 1627135 - RNA, 19 nt, Artificial Sequence
  Description of Artificial Sequence: Synthetic oligonucleotide
uaauuaucaccacguacuc

SEQ ID NO: 1627136 - RNA, 19 nt, Artificial Sequence
  Description of Artificial Sequence: Synthetic oligonucleotide
ucauuaucaacagcuaguc

SEQ ID NO: 1627137 - RNA, 19 nt, Artificial Sequence
  Description of Artificial Sequence: Synthetic oligonucleotide
uuggcuacuucucauuauc

SEQ ID NO: 1627138 - RNA, 19 nt, Artificial Sequence
  Description of Artificial Sequence: Synthetic oligonucleotide
uuugaugugucucgagcaa

SEQ ID NO: 1627139 - RNA, 19 nt, Artificial Sequence
  Description of Artificial Sequence: Synthetic oligonucleotide
uguccucacagacuugucu

SEQ ID NO: 1627140 - RNA, 19 nt, Artificial Sequence
  Description of Artificial Sequence: Synthetic oligonucleotide
uucauguauuagcaauucu

SEQ ID NO: 1627141 - RNA, 19 nt, Artificial Sequence
  Description of Artificial Sequence: Synthetic oligonucleotide
guacauguccuccucgugc

SEQ ID NO: 1627142 - RNA, 19 nt, Artificial Sequence
  Description of Artificial Sequence: Synthetic oligonucleotide
uucucuuuaucaucauaga

SEQ ID NO: 1627143 - RNA, 19 nt, Artificial Sequence
  Description of Artificial Sequence: Synthetic oligonucleotide
aguaggauagacggugagg

SEQ ID NO: 1627144 - RNA, 19 nt, Artificial Sequence
  Description of Artificial Sequence: Synthetic oligonucleotide
cucuguuuaacauuagaaa

SEQ ID NO: 1627145 - RNA, 19 nt, Artificial Sequence
  Description of Artificial Sequence: Synthetic oligonucleotide
cuucauagaggcuguacuc

SEQ ID NO: 1627146 - RNA, 19 nt, Artificial Sequence
  Description of Artificial Sequence: Synthetic oligonucleotide
uuaggugguuccucaguag

SEQ ID NO: 1627147 - RNA, 19 nt, Artificial Sequence
  Description of Artificial Sequence: Synthetic oligonucleotide
uccgccaguuggcucaugg

SEQ ID NO: 1627148 - RNA, 19 nt, Artificial Sequence
  Description of Artificial Sequence: Synthetic oligonucleotide
gucaguaggauagacggug

SEQ ID NO: 1627149 - RNA, 19 nt, Artificial Sequence
  Description of Artificial Sequence: Synthetic oligonucleotide
ucaucgcaagcuaucugcc

SEQ ID NO: 1627150 - RNA, 19 nt, Artificial Sequence
  Description of Artificial Sequence: Synthetic oligonucleotide
uuuaucagcuuuucuggua

SEQ ID NO: 1627151 - RNA, 19 nt, Artificial Sequence
  Description of Artificial Sequence: Synthetic oligonucleotide
ugucucgagcaaacaagag

SEQ ID NO: 1627152 - RNA, 19 nt, Artificial Sequence
  Description of Artificial Sequence: Synthetic oligonucleotide
uccucaguagcuguccagg

SEQ ID NO: 1627153 - RNA, 19 nt, Artificial Sequence
  Description of Artificial Sequence: Synthetic oligonucleotide
uggcgaacagcauaggcaa

SEQ ID NO: 1627154 - RNA, 19 nt, Artificial Sequence
  Description of Artificial Sequence: Synthetic oligonucleotide
cugacacaaaagcaucugc

SEQ ID NO: 1627155 - RNA, 19 nt, Artificial Sequence
  Description of Artificial Sequence: Synthetic oligonucleotide
uggacaaccgguacaccug

SEQ ID NO: 1627156 - RNA, 19 nt, Artificial Sequence
  Description of Artificial Sequence: Synthetic oligonucleotide
aaugggacuuccuuuccuu

SEQ ID NO: 1627157 - RNA, 19 nt, Artificial Sequence
  Description of Artificial Sequence: Synthetic oligonucleotide
agaacaucgcaguccagcu

SEQ ID NO: 1627158 - RNA, 19 nt, Artificial Sequence
  Description of Artificial Sequence: Synthetic oligonucleotide
auagacggugaggaacucc

SEQ ID NO: 1627159 - RNA, 19 nt, Artificial Sequence
  Description of Artificial Sequence: Synthetic oligonucleotide
uguucaaggccaccagugu

SEQ ID NO: 1627160 - RNA, 19 nt, Artificial Sequence
  Description of Artificial Sequence: Synthetic oligonucleotide
cugauaucccucuuucaug

SEQ ID NO: 1627161 - RNA, 19 nt, Artificial Sequence
  Description of Artificial Sequence: Synthetic oligonucleotide
guaggauagacggugagga

SEQ ID NO: 1627162 - RNA, 19 nt, Artificial Sequence
  Description of Artificial Sequence: Synthetic oligonucleotide
cuguucaaggccaccagug

SEQ ID NO: 1627163 - RNA, 19 nt, Artificial Sequence
  Description of Artificial Sequence: Synthetic oligonucleotide
ugcaguaguccauaauauc

SEQ ID NO: 1627164 - RNA, 19 nt, Artificial Sequence
  Description of Artificial Sequence: Synthetic oligonucleotide
ucacagacuugucuccuca

SEQ ID NO: 1627165 - RNA, 19 nt, Artificial Sequence
  Description of Artificial Sequence: Synthetic oligonucleotide
uauuggacauauuccuuuc

SEQ ID NO: 1627166 - RNA, 19 nt, Artificial Sequence
  Description of Artificial Sequence: Synthetic oligonucleotide
acguacucgccuuauagau

SEQ ID NO: 1627167 - RNA, 19 nt, Artificial Sequence
  Description of Artificial Sequence: Synthetic oligonucleotide
uuucugguaacagcaugag

SEQ ID NO: 1627168 - RNA, 19 nt, Artificial Sequence
  Description of Artificial Sequence: Synthetic oligonucleotide
agcuuuucugguaacagca

SEQ ID NO: 1627169 - RNA, 19 nt, Artificial Sequence
  Description of Artificial Sequence: Synthetic oligonucleotide
uuucaggagccacacuuaa

SEQ ID NO: 1627170 - RNA, 19 nt, Artificial Sequence
  Description of Artificial Sequence: Synthetic oligonucleotide
ucauagaggcuguacuccu

SEQ ID NO: 1627171 - RNA, 19 nt, Artificial Sequence
  Description of Artificial Sequence: Synthetic oligonucleotide
auagugucgaucauccuca

SEQ ID NO: 1627172 - RNA, 19 nt, Artificial Sequence
  Description of Artificial Sequence: Synthetic oligonucleotide
ugcgccaccucacauggcu

SEQ ID NO: 1627173 - RNA, 19 nt, Artificial Sequence
  Description of Artificial Sequence: Synthetic oligonucleotide
cagaacaucgcaguccagc

SEQ ID NO: 1627174 - RNA, 19 nt, Artificial Sequence
  Description of Artificial Sequence: Synthetic oligonucleotide
ucgaucauccucagcuaug

SEQ ID NO: 1627175 - RNA, 19 nt, Artificial Sequence
  Description of Artificial Sequence: Synthetic oligonucleotide
uguccggccguccggagcc

SEQ ID NO: 1627176 - RNA, 19 nt, Artificial Sequence
  Description of Artificial Sequence: Synthetic oligonucleotide
guucaaggccaccagugug

SEQ ID NO: 1627177 - RNA, 19 nt, Artificial Sequence
  Description of Artificial Sequence: Synthetic oligonucleotide
gcuauacuuguuuaucagc

SEQ ID NO: 1627178 - RNA, 19 nt, Artificial Sequence
  Description of Artificial Sequence: Synthetic oligonucleotide
ggucguuugaugugucucg

SEQ ID NO: 1627179 - RNA, 19 nt, Artificial Sequence
  Description of Artificial Sequence: Synthetic oligonucleotide
guaacagucaguuuaccau

SEQ ID NO: 1627180 - RNA, 19 nt, Artificial Sequence
  Description of Artificial Sequence: Synthetic oligonucleotide
ugcaugugcaccugcgcca

SEQ ID NO: 1627181 - RNA, 19 nt, Artificial Sequence
  Description of Artificial Sequence: Synthetic oligonucleotide
cagcuuuucugguaacagc

SEQ ID NO: 1627182 - RNA, 19 nt, Artificial Sequence
  Description of Artificial Sequence: Synthetic oligonucleotide
auaucccucuuucauguau

SEQ ID NO: 1627183 - RNA, 19 nt, Artificial Sequence
  Description of Artificial Sequence: Synthetic oligonucleotide
uuccauugcuugauccagc

SEQ ID NO: 1627184 - RNA, 19 nt, Artificial Sequence
  Description of Artificial Sequence: Synthetic oligonucleotide
uggacauauuccuuuccaa

SEQ ID NO: 1627185 - RNA, 19 nt, Artificial Sequence
  Description of Artificial Sequence: Synthetic oligonucleotide
cugaguucugauaucccuc

SEQ ID NO: 1627186 - RNA, 19 nt, Artificial Sequence
  Description of Artificial Sequence: Synthetic oligonucleotide
guuuguaccuuccacagau

SEQ ID NO: 1627187 - RNA, 19 nt, Artificial Sequence
  Description of Artificial Sequence: Synthetic oligonucleotide
gugaacaguucaucgcaag

SEQ ID NO: 1627188 - RNA, 19 nt, Artificial Sequence
  Description of Artificial Sequence: Synthetic oligonucleotide
caucagaacuguuauugga

SEQ ID NO: 1627189 - RNA, 19 nt, Artificial Sequence
  Description of Artificial Sequence: Synthetic oligonucleotide
cugccuuauggagacauag

SEQ ID NO: 1627190 - RNA, 19 nt, Artificial Sequence
  Description of Artificial Sequence: Synthetic oligonucleotide
gacauaguuuguaccuucc

SEQ ID NO: 1627191 - RNA, 19 nt, Artificial Sequence
  Description of Artificial Sequence: Synthetic oligonucleotide
cagacuugucuccucacac

SEQ ID NO: 1627192 - RNA, 19 nt, Artificial Sequence
  Description of Artificial Sequence: Synthetic oligonucleotide
uaacagcaugagcucuggg

SEQ ID NO: 1627193 - RNA, 19 nt, Artificial Sequence
  Description of Artificial Sequence: Synthetic oligonucleotide
uucugauaucccucuuuca

SEQ ID NO: 1627194 - RNA, 19 nt, Artificial Sequence
  Description of Artificial Sequence: Synthetic oligonucleotide
agggauguuauagugucga

SEQ ID NO: 1627195 - RNA, 19 nt, Artificial Sequence
  Description of Artificial Sequence: Synthetic oligonucleotide
aguguuguacuuggacaac

SEQ ID NO: 1627196 - RNA, 19 nt, Artificial Sequence
  Description of Artificial Sequence: Synthetic oligonucleotide
aguguccucugacacaaaa

SEQ ID NO: 1627197 - RNA, 19 nt, Artificial Sequence
  Description of Artificial Sequence: Synthetic oligonucleotide
uugauccagcuauacuugu

SEQ ID NO: 1627198 - RNA, 19 nt, Artificial Sequence
  Description of Artificial Sequence: Synthetic oligonucleotide
gcuacuucucauuaucaac

SEQ ID NO: 1627199 - RNA, 19 nt, Artificial Sequence
  Description of Artificial Sequence: Synthetic oligonucleotide
accucacauggcuuucaac

SEQ ID NO: 1627200 - RNA, 19 nt, Artificial Sequence
  Description of Artificial Sequence: Synthetic oligonucleotide
agaucaugagugaagacuu

SEQ ID NO: 1627201 - RNA, 19 nt, Artificial Sequence
  Description of Artificial Sequence: Synthetic oligonucleotide
acggugaggaacuccucag

SEQ ID NO: 1627202 - RNA, 19 nt, Artificial Sequence
  Description of Artificial Sequence: Synthetic oligonucleotide
uucaguccaaguuuccauu

SEQ ID NO: 1627203 - RNA, 19 nt, Artificial Sequence
  Description of Artificial Sequence: Synthetic oligonucleotide
uuaucaccacguacucgcc

SEQ ID NO: 1627204 - RNA, 19 nt, Artificial Sequence
  Description of Artificial Sequence: Synthetic oligonucleotide
uggaugguguggcgaacag

SEQ ID NO: 1627205 - RNA, 19 nt, Artificial Sequence
  Description of Artificial Sequence: Synthetic oligonucleotide
caaacaguguccucugaca

SEQ ID NO: 1627206 - RNA, 19 nt, Artificial Sequence
  Description of Artificial Sequence: Synthetic oligonucleotide
gaccuaagggccccaggag

SEQ ID NO: 1627207 - RNA, 19 nt, Artificial Sequence
  Description of Artificial Sequence: Synthetic oligonucleotide
uaucaccacguacucgccu

SEQ ID NO: 1627208 - RNA, 19 nt, Artificial Sequence
  Description of Artificial Sequence: Synthetic oligonucleotide
ugccuuauggagacauagu

SEQ ID NO: 1627209 - RNA, 19 nt, Artificial Sequence
  Description of Artificial Sequence: Synthetic oligonucleotide
augugucucgagcaaacaa

SEQ ID NO: 1627210 - RNA, 19 nt, Artificial Sequence
  Description of Artificial Sequence: Synthetic oligonucleotide
aguucugauaucccucuuu

SEQ ID NO: 1627211 - RNA, 19 nt, Artificial Sequence
  Description of Artificial Sequence: Synthetic oligonucleotide
uccagcuauacuuguuuau

SEQ ID NO: 1627212 - RNA, 19 nt, Artificial Sequence
  Description of Artificial Sequence: Synthetic oligonucleotide
guacucgccuuauagaugu

SEQ ID NO: 1627213 - RNA, 19 nt, Artificial Sequence
  Description of Artificial Sequence: Synthetic oligonucleotide
uccagggucguuugaugug

SEQ ID NO: 1627214 - RNA, 19 nt, Artificial Sequence
  Description of Artificial Sequence: Synthetic oligonucleotide
cucauuaucaacagcuagu

SEQ ID NO: 1627215 - RNA, 19 nt, Artificial Sequence
  Description of Artificial Sequence: Synthetic oligonucleotide
uguccagggucguuugaug

SEQ ID NO: 1627216 - RNA, 19 nt, Artificial Sequence
  Description of Artificial Sequence: Synthetic oligonucleotide
ugguguggcgaacagcaua

SEQ ID NO: 1627217 - RNA, 19 nt, Artificial Sequence
  Description of Artificial Sequence: Synthetic oligonucleotide
acuguguaacagaucauga

SEQ ID NO: 1627218 - RNA, 19 nt, Artificial Sequence
  Description of Artificial Sequence: Synthetic oligonucleotide
aguucaucgcaagcuaucu

SEQ ID NO: 1627219 - RNA, 19 nt, Artificial Sequence
  Description of Artificial Sequence: Synthetic oligonucleotide
gggucccgaagccagaggg

SEQ ID NO: 1627220 - RNA, 19 nt, Artificial Sequence
  Description of Artificial Sequence: Synthetic oligonucleotide
uucaggagccacacuuaac

SEQ ID NO: 1627221 - RNA, 19 nt, Artificial Sequence
  Description of Artificial Sequence: Synthetic oligonucleotide
ucguuugaugugucucgag

SEQ ID NO: 1627222 - RNA, 19 nt, Artificial Sequence
  Description of Artificial Sequence: Synthetic oligonucleotide
caaccgguacaccuggaug

SEQ ID NO: 1627223 - RNA, 19 nt, Artificial Sequence
  Description of Artificial Sequence: Synthetic oligonucleotide
cagcuauacuuguuuauca

SEQ ID NO: 1627224 - RNA, 19 nt, Artificial Sequence
  Description of Artificial Sequence: Synthetic oligonucleotide
aucgcaagcuaucugccuu

SEQ ID NO: 1627225 - RNA, 19 nt, Artificial Sequence
  Description of Artificial Sequence: Synthetic oligonucleotide
cagggauguuauagugucg

SEQ ID NO: 1627226 - RNA, 19 nt, Artificial Sequence
  Description of Artificial Sequence: Synthetic oligonucleotide
uuauagugucgaucauccu

SEQ ID NO: 1627227 - RNA, 19 nt, Artificial Sequence
  Description of Artificial Sequence: Synthetic oligonucleotide
guucaucgcaagcuaucug

SEQ ID NO: 1627228 - RNA, 19 nt, Artificial Sequence
  Description of Artificial Sequence: Synthetic oligonucleotide
uagggcaagggacuccuua

SEQ ID NO: 1627229 - RNA, 19 nt, Artificial Sequence
  Description of Artificial Sequence: Synthetic oligonucleotide
acuuggcuacuucucauua

SEQ ID NO: 1627230 - RNA, 19 nt, Artificial Sequence
  Description of Artificial Sequence: Synthetic oligonucleotide
ucgcaagcuaucugccuug

SEQ ID NO: 1627231 - RNA, 19 nt, Artificial Sequence
  Description of Artificial Sequence: Synthetic oligonucleotide
auagaguucgauggcucug

SEQ ID NO: 1627232 - RNA, 19 nt, Artificial Sequence
  Description of Artificial Sequence: Synthetic oligonucleotide
gguguggcgaacagcauag

SEQ ID NO: 1627233 - RNA, 19 nt, Artificial Sequence
  Description of Artificial Sequence: Synthetic oligonucleotide
cauucuuucuugcaguagu

SEQ ID NO: 1627234 - RNA, 19 nt, Artificial Sequence
  Description of Artificial Sequence: Synthetic oligonucleotide
guggcgaacagcauaggca

SEQ ID NO: 1627235 - RNA, 19 nt, Artificial Sequence
  Description of Artificial Sequence: Synthetic oligonucleotide
ucgucaccuuguccggccg

SEQ ID NO: 1627236 - RNA, 19 nt, Artificial Sequence
  Description of Artificial Sequence: Synthetic oligonucleotide
cagugaaauacacugugua

SEQ ID NO: 1627237 - RNA, 19 nt, Artificial Sequence
  Description of Artificial Sequence: Synthetic oligonucleotide
uagaguucgauggcucugu

SEQ ID NO: 1627238 - RNA, 19 nt, Artificial Sequence
  Description of Artificial Sequence: Synthetic oligonucleotide
agcuagucuucagaacauc

SEQ ID NO: 1627239 - RNA, 19 nt, Artificial Sequence
  Description of Artificial Sequence: Synthetic oligonucleotide
ugguaacagcaugagcucu

SEQ ID NO: 1627240 - RNA, 19 nt, Artificial Sequence
  Description of Artificial Sequence: Synthetic oligonucleotide
caguucaucgcaagcuauc

SEQ ID NO: 1627241 - RNA, 19 nt, Artificial Sequence
  Description of Artificial Sequence: Synthetic oligonucleotide
guaacagaucaugagugaa

SEQ ID NO: 1627242 - RNA, 19 nt, Artificial Sequence
  Description of Artificial Sequence: Synthetic oligonucleotide
ggacaaccgguacaccugg

SEQ ID NO: 1627243 - RNA, 19 nt, Artificial Sequence
  Description of Artificial Sequence: Synthetic oligonucleotide
ugauccagcuauacuuguu

SEQ ID NO: 1627244 - RNA, 19 nt, Artificial Sequence
  Description of Artificial Sequence: Synthetic oligonucleotide
guacuuggacaaccgguac

SEQ ID NO: 1627245 - RNA, 19 nt, Artificial Sequence
  Description of Artificial Sequence: Synthetic oligonucleotide
ggagacauaguuuguaccu

SEQ ID NO: 1627246 - RNA, 19 nt, Artificial Sequence
  Description of Artificial Sequence: Synthetic oligonucleotide
cucgucaccuuguccggcc

SEQ ID NO: 1627247 - RNA, 19 nt, Artificial Sequence
  Description of Artificial Sequence: Synthetic oligonucleotide
aguagggcaagggacuccu

SEQ ID NO: 1627248 - RNA, 19 nt, Artificial Sequence
  Description of Artificial Sequence: Synthetic oligonucleotide
caguaggauagacggugag

SEQ ID NO: 1627249 - RNA, 19 nt, Artificial Sequence
  Description of Artificial Sequence: Synthetic oligonucleotide
caacagcuagucuucagaa

SEQ ID NO: 1627250 - RNA, 19 nt, Artificial Sequence
  Description of Artificial Sequence: Synthetic oligonucleotide
acaaccgguacaccuggau

SEQ ID NO: 1627251 - RNA, 19 nt, Artificial Sequence
  Description of Artificial Sequence: Synthetic oligonucleotide
guaccuuccacagauacau

SEQ ID NO: 1627252 - RNA, 19 nt, Artificial Sequence
  Description of Artificial Sequence: Synthetic oligonucleotide
ugcaccugcgccaccucac

SEQ ID NO: 1627253 - RNA, 19 nt, Artificial Sequence
  Description of Artificial Sequence: Synthetic oligonucleotide
ggacauauuccuuuccaaa

SEQ ID NO: 1627254 - RNA, 19 nt, Artificial Sequence
  Description of Artificial Sequence: Synthetic oligonucleotide
ccgcucgucaccuuguccg

SEQ ID NO: 1627255 - RNA, 19 nt, Artificial Sequence
  Description of Artificial Sequence: Synthetic oligonucleotide
agcaucugccuuauggaga

SEQ ID NO: 1627256 - RNA, 19 nt, Artificial Sequence
  Description of Artificial Sequence: Synthetic oligonucleotide
cagaucaugagugaagacu

SEQ ID NO: 1627257 - RNA, 19 nt, Artificial Sequence
  Description of Artificial Sequence: Synthetic oligonucleotide
aucaccacguacucgccuu

SEQ ID NO: 1627258 - RNA, 19 nt, Artificial Sequence
  Description of Artificial Sequence: Synthetic oligonucleotide
uaucaucauagaguucgau

SEQ ID NO: 1627259 - RNA, 19 nt, Artificial Sequence
  Description of Artificial Sequence: Synthetic oligonucleotide
ccucaguagggcaagggac

SEQ ID NO: 1627260 - RNA, 19 nt, Artificial Sequence
  Description of Artificial Sequence: Synthetic oligonucleotide
cuuucugaguauuuccccu

SEQ ID NO: 1627261 - RNA, 19 nt, Artificial Sequence
  Description of Artificial Sequence: Synthetic oligonucleotide
ccagauuguccuuggagac

SEQ ID NO: 1627262 - RNA, 19 nt, Artificial Sequence
  Description of Artificial Sequence: Synthetic oligonucleotide
uuacagcuucauagaggcu

SEQ ID NO: 1627263 - RNA, 19 nt, Artificial Sequence
  Description of Artificial Sequence: Synthetic oligonucleotide
uuguccggccguccggagc

SEQ ID NO: 1627264 - RNA, 19 nt, Artificial Sequence
  Description of Artificial Sequence: Synthetic oligonucleotide
uuuguaccuuccacagaua

SEQ ID NO: 1627265 - RNA, 19 nt, Artificial Sequence
  Description of Artificial Sequence: Synthetic oligonucleotide
acuuaaccugaguucugau

SEQ ID NO: 1627266 - RNA, 19 nt, Artificial Sequence
  Description of Artificial Sequence: Synthetic oligonucleotide
accugcgccaccucacaug

SEQ ID NO: 1627267 - RNA, 19 nt, Artificial Sequence
  Description of Artificial Sequence: Synthetic oligonucleotide
cauagaggcuguacuccuc

SEQ ID NO: 1627268 - RNA, 19 nt, Artificial Sequence
  Description of Artificial Sequence: Synthetic oligonucleotide
agggcaagggacuccuuaa

SEQ ID NO: 1627269 - RNA, 19 nt, Artificial Sequence
  Description of Artificial Sequence: Synthetic oligonucleotide
ucgccuuauagaugugaau

SEQ ID NO: 1627270 - RNA, 19 nt, Artificial Sequence
  Description of Artificial Sequence: Synthetic oligonucleotide
agcuaucugccuugccuca

SEQ ID NO: 1627271 - RNA, 19 nt, Artificial Sequence
  Description of Artificial Sequence: Synthetic oligonucleotide
ugucgaucauccucagcua

SEQ ID NO: 1627272 - RNA, 19 nt, Artificial Sequence
  Description of Artificial Sequence: Synthetic oligonucleotide
cucgagcaaacaagagcac

SEQ ID NO: 1627273 - RNA, 19 nt, Artificial Sequence
  Description of Artificial Sequence: Synthetic oligonucleotide
ggcuuucugaguauuuccc

SEQ ID NO: 1627274 - RNA, 19 nt, Artificial Sequence
  Description of Artificial Sequence: Synthetic oligonucleotide
gauccagcuauacuuguuu

SEQ ID NO: 1627275 - RNA, 19 nt, Artificial Sequence
  Description of Artificial Sequence: Synthetic oligonucleotide
caacauguguccucacaga

SEQ ID NO: 1627276 - RNA, 19 nt, Artificial Sequence
  Description of Artificial Sequence: Synthetic oligonucleotide
uggcucuguuuaacauuag

SEQ ID NO: 1627277 - RNA, 19 nt, Artificial Sequence
  Description of Artificial Sequence: Synthetic oligonucleotide
ccacguacucgccuuauag

SEQ ID NO: 1627278 - RNA, 19 nt, Artificial Sequence
  Description of Artificial Sequence: Synthetic oligonucleotide
ggauguuauagugucgauc

SEQ ID NO: 1627279 - RNA, 19 nt, Artificial Sequence
  Description of Artificial Sequence: Synthetic oligonucleotide
uugcuugauccagcuauac

SEQ ID NO: 1627280 - RNA, 19 nt, Artificial Sequence
  Description of Artificial Sequence: Synthetic oligonucleotide
accuuguccggccguccgg

SEQ ID NO: 1627281 - RNA, 19 nt, Artificial Sequence
  Description of Artificial Sequence: Synthetic oligonucleotide
cacguacucgccuuauaga

SEQ ID NO: 1627282 - RNA, 19 nt, Artificial Sequence
  Description of Artificial Sequence: Synthetic oligonucleotide
cacauggcuuucaacaugu

SEQ ID NO: 1627283 - RNA, 19 nt, Artificial Sequence
  Description of Artificial Sequence: Synthetic oligonucleotide
ggcgucaguaggauagacg

SEQ ID NO: 1627284 - RNA, 19 nt, Artificial Sequence
  Description of Artificial Sequence: Synthetic oligonucleotide
gugucucgagcaaacaaga

SEQ ID NO: 1627285 - RNA, 19 nt, Artificial Sequence
  Description of Artificial Sequence: Synthetic oligonucleotide
auccagcuauacuuguuua

SEQ ID NO: 1627286 - RNA, 19 nt, Artificial Sequence
  Description of Artificial Sequence: Synthetic oligonucleotide
guuuaucagcuuuucuggu

SEQ ID NO: 1627287 - RNA, 19 nt, Artificial Sequence
  Description of Artificial Sequence: Synthetic oligonucleotide
uagugucgaucauccucag

SEQ ID NO: 1627288 - RNA, 19 nt, Artificial Sequence
  Description of Artificial Sequence: Synthetic oligonucleotide
acucgccuuauagauguga

SEQ ID NO: 1627289 - RNA, 19 nt, Artificial Sequence
  Description of Artificial Sequence: Synthetic oligonucleotide
cagaccuaagggccccagg

SEQ ID NO: 1627290 - RNA, 19 nt, Artificial Sequence
  Description of Artificial Sequence: Synthetic oligonucleotide
caauaauuaucaccacgua

SEQ ID NO: 1627291 - RNA, 19 nt, Artificial Sequence
  Description of Artificial Sequence: Synthetic oligonucleotide
ccacacuuaaccugaguuc

SEQ ID NO: 1627292 - RNA, 19 nt, Artificial Sequence
  Description of Artificial Sequence: Synthetic oligonucleotide
gaacuguuauuggacauau

SEQ ID NO: 1627293 - RNA, 19 nt, Artificial Sequence
  Description of Artificial Sequence: Synthetic oligonucleotide
cucgccuuauagaugugaa

SEQ ID NO: 1627294 - RNA, 19 nt, Artificial Sequence
  Description of Artificial Sequence: Synthetic oligonucleotide
ccuuauagaugugaauuuc

SEQ ID NO: 1627295 - RNA, 19 nt, Artificial Sequence
  Description of Artificial Sequence: Synthetic oligonucleotide
agcuguccagggucguuug

SEQ ID NO: 1627296 - RNA, 19 nt, Artificial Sequence
  Description of Artificial Sequence: Synthetic oligonucleotide
agggucguuugaugugucu

SEQ ID NO: 1627297 - RNA, 19 nt, Artificial Sequence
  Description of Artificial Sequence: Synthetic oligonucleotide
gguacauguccuccucgug

SEQ ID NO: 1627298 - RNA, 19 nt, Artificial Sequence
  Description of Artificial Sequence: Synthetic oligonucleotide
ucauuucagccaggcuugc

SEQ ID NO: 1627299 - RNA, 19 nt, Artificial Sequence
  Description of Artificial Sequence: Synthetic oligonucleotide
caccuuguccggccguccg

SEQ ID NO: 1627300 - RNA, 19 nt, Artificial Sequence
  Description of Artificial Sequence: Synthetic oligonucleotide
accuggaugguguggcgaa

SEQ ID NO: 1627301 - RNA, 19 nt, Artificial Sequence
  Description of Artificial Sequence: Synthetic oligonucleotide
uggaacagcguggcccuca

SEQ ID NO: 1627302 - RNA, 19 nt, Artificial Sequence
  Description of Artificial Sequence: Synthetic oligonucleotide
gcauaggcaagaaggaaca

SEQ ID NO: 1627303 - RNA, 19 nt, Artificial Sequence
  Description of Artificial Sequence: Synthetic oligonucleotide
acaguucaucgcaagcuau

SEQ ID NO: 1627304 - RNA, 19 nt, Artificial Sequence
  Description of Artificial Sequence: Synthetic oligonucleotide
gccuggaacagcguggccc

SEQ ID NO: 1627305 - RNA, 19 nt, Artificial Sequence
  Description of Artificial Sequence: Synthetic oligonucleotide
acacacucugacagggaug

SEQ ID NO: 1627306 - RNA, 19 nt, Artificial Sequence
  Description of Artificial Sequence: Synthetic oligonucleotide
uucagccaggcuugcccac

SEQ ID NO: 1627307 - RNA, 19 nt, Artificial Sequence
  Description of Artificial Sequence: Synthetic oligonucleotide
cauagaguucgauggcucu

SEQ ID NO: 1627308 - RNA, 19 nt, Artificial Sequence
  Description of Artificial Sequence: Synthetic oligonucleotide
cacgguacauguccuccuc

SEQ ID NO: 1627309 - RNA, 19 nt, Artificial Sequence
  Description of Artificial Sequence: Synthetic oligonucleotide
accgcaucgcggcccgggg

SEQ ID NO: 1627310 - RNA, 19 nt, Artificial Sequence
  Description of Artificial Sequence: Synthetic oligonucleotide
gcuucauagaggcuguacu

SEQ ID NO: 1627311 - RNA, 19 nt, Artificial Sequence
  Description of Artificial Sequence: Synthetic oligonucleotide
ggcuacuucucauuaucaa

SEQ ID NO: 1627312 - RNA, 19 nt, Artificial Sequence
  Description of Artificial Sequence: Synthetic oligonucleotide
ugugucccaccugguuuag

SEQ ID NO: 1627313 - RNA, 19 nt, Artificial Sequence
  Description of Artificial Sequence: Synthetic oligonucleotide
auuucaggagccacacuua

SEQ ID NO: 1627314 - RNA, 19 nt, Artificial Sequence
  Description of Artificial Sequence: Synthetic oligonucleotide
uacucgccuuauagaugug

SEQ ID NO: 1627315 - RNA, 19 nt, Artificial Sequence
  Description of Artificial Sequence: Synthetic oligonucleotide
ccagcuauacuuguuuauc

SEQ ID NO: 1627316 - RNA, 19 nt, Artificial Sequence
  Description of Artificial Sequence: Synthetic oligonucleotide
cccaucaaacuucagucca

SEQ ID NO: 1627317 - RNA, 19 nt, Artificial Sequence
  Description of Artificial Sequence: Synthetic oligonucleotide
uucauacauguggcuuucu

SEQ ID NO: 1627318 - RNA, 19 nt, Artificial Sequence
  Description of Artificial Sequence: Synthetic oligonucleotide
gauaucccucuuucaugua

SEQ ID NO: 1627319 - RNA, 19 nt, Artificial Sequence
  Description of Artificial Sequence: Synthetic oligonucleotide
gcacaauaauuaucaccac

SEQ ID NO: 1627320 - RNA, 19 nt, Artificial Sequence
  Description of Artificial Sequence: Synthetic oligonucleotide
cuaagggccccaggaggag

SEQ ID NO: 1627321 - RNA, 19 nt, Artificial Sequence
  Description of Artificial Sequence: Synthetic oligonucleotide
guccagggucguuugaugu

SEQ ID NO: 1627322 - RNA, 19 nt, Artificial Sequence
  Description of Artificial Sequence: Synthetic oligonucleotide
ucaccacguacucgccuua

SEQ ID NO: 1627323 - RNA, 19 nt, Artificial Sequence
  Description of Artificial Sequence: Synthetic oligonucleotide
cauuaucaacagcuagucu

SEQ ID NO: 1627324 - RNA, 19 nt, Artificial Sequence
  Description of Artificial Sequence: Synthetic oligonucleotide
gauagacggugaggaacuc

SEQ ID NO: 1627325 - RNA, 19 nt, Artificial Sequence
  Description of Artificial Sequence: Synthetic oligonucleotide
caaaguucucccagauugu

SEQ ID NO: 1627326 - RNA, 19 nt, Artificial Sequence
  Description of Artificial Sequence: Synthetic oligonucleotide
gugugucccaccugguuua

SEQ ID NO: 1627327 - RNA, 19 nt, Artificial Sequence
  Description of Artificial Sequence: Synthetic oligonucleotide
cacucugacagggauguua

SEQ ID NO: 1627328 - RNA, 19 nt, Artificial Sequence
  Description of Artificial Sequence: Synthetic oligonucleotide
ucgugcucggccgggcacc

SEQ ID NO: 1627329 - RNA, 19 nt, Artificial Sequence
  Description of Artificial Sequence: Synthetic oligonucleotide
acaucgcaguccagcuugg

SEQ ID NO: 1627330 - RNA, 19 nt, Artificial Sequence
  Description of Artificial Sequence: Synthetic oligonucleotide
gucguuugaugugucucga

SEQ ID NO: 1627331 - RNA, 19 nt, Artificial Sequence
  Description of Artificial Sequence: Synthetic oligonucleotide
uagcuguccagggucguuu

SEQ ID NO: 1627332 - RNA, 19 nt, Artificial Sequence
  Description of Artificial Sequence: Synthetic oligonucleotide
cagcguggcccucagugca

SEQ ID NO: 1627333 - RNA, 19 nt, Artificial Sequence
  Description of Artificial Sequence: Synthetic oligonucleotide
acuugucuccucacacacu

SEQ ID NO: 1627334 - RNA, 19 nt, Artificial Sequence
  Description of Artificial Sequence: Synthetic oligonucleotide
cuuguccggccguccggag

SEQ ID NO: 1627335 - RNA, 19 nt, Artificial Sequence
  Description of Artificial Sequence: Synthetic oligonucleotide
caguagggcaagggacucc

SEQ ID NO: 1627336 - RNA, 19 nt, Artificial Sequence
  Description of Artificial Sequence: Synthetic oligonucleotide
gucgaucauccucagcuau

SEQ ID NO: 1627337 - RNA, 19 nt, Artificial Sequence
  Description of Artificial Sequence: Synthetic oligonucleotide
agacggugaggaacuccuc

SEQ ID NO: 1627338 - RNA, 19 nt, Artificial Sequence
  Description of Artificial Sequence: Synthetic oligonucleotide
ggucccgaagccagagggg

SEQ ID NO: 1627339 - RNA, 19 nt, Artificial Sequence
  Description of Artificial Sequence: Synthetic oligonucleotide
cucgugcucggccgggcac

SEQ ID NO: 1627340 - RNA, 19 nt, Artificial Sequence
  Description of Artificial Sequence: Synthetic oligonucleotide
agcguggcccucagugcac

SEQ ID NO: 1627341 - RNA, 19 nt, Artificial Sequence
  Description of Artificial Sequence: Synthetic oligonucleotide
agaguucgauggcucuguu

SEQ ID NO: 1627342 - RNA, 19 nt, Artificial Sequence
  Description of Artificial Sequence: Synthetic oligonucleotide
gacuuggcuacuucucauu

SEQ ID NO: 1627343 - RNA, 19 nt, Artificial Sequence
  Description of Artificial Sequence: Synthetic oligonucleotide
gccuuauggagacauaguu

SEQ ID NO: 1627344 - RNA, 19 nt, Artificial Sequence
  Description of Artificial Sequence: Synthetic oligonucleotide
gccacacuuaaccugaguu

SEQ ID NO: 1627345 - RNA, 19 nt, Artificial Sequence
  Description of Artificial Sequence: Synthetic oligonucleotide
cguacucgccuuauagaug

SEQ ID NO: 1627346 - RNA, 19 nt, Artificial Sequence
  Description of Artificial Sequence: Synthetic oligonucleotide
guguggcgaacagcauagg

SEQ ID NO: 1627347 - RNA, 19 nt, Artificial Sequence
  Description of Artificial Sequence: Synthetic oligonucleotide
ggauagacggugaggaacu

SEQ ID NO: 1627348 - RNA, 19 nt, Artificial Sequence
  Description of Artificial Sequence: Synthetic oligonucleotide
gggucguuugaugugucuc

SEQ ID NO: 1627349 - RNA, 19 nt, Artificial Sequence
  Description of Artificial Sequence: Synthetic oligonucleotide
cacacacucugacagggau

SEQ ID NO: 1627350 - RNA, 19 nt, Artificial Sequence
  Description of Artificial Sequence: Synthetic oligonucleotide
gagacauaguuuguaccuu

SEQ ID NO: 1627351 - RNA, 19 nt, Artificial Sequence
  Description of Artificial Sequence: Synthetic oligonucleotide
accacguacucgccuuaua

SEQ ID NO: 1627352 - RNA, 19 nt, Artificial Sequence
  Description of Artificial Sequence: Synthetic oligonucleotide
caucgcaguccagcuuggc

SEQ ID NO: 1627353 - RNA, 19 nt, Artificial Sequence
  Description of Artificial Sequence: Synthetic oligonucleotide
caugugcaccugcgccacc

SEQ ID NO: 1627354 - RNA, 19 nt, Artificial Sequence
  Description of Artificial Sequence: Synthetic oligonucleotide
gcaagcuaucugccuugcc

SEQ ID NO: 1627355 - RNA, 19 nt, Artificial Sequence
  Description of Artificial Sequence: Synthetic oligonucleotide
cugcgcgccgcucgucacc

SEQ ID NO: 1627356 - RNA, 19 nt, Artificial Sequence
  Description of Artificial Sequence: Synthetic oligonucleotide
ccgggcaccgcaucgcggc

SEQ ID NO: 1627357 - RNA, 19 nt, Artificial Sequence
  Description of Artificial Sequence: Synthetic oligonucleotide
caccgcaucgcggcccggg

SEQ ID NO: 1627358 - RNA, 19 nt, Artificial Sequence
  Description of Artificial Sequence: Synthetic oligonucleotide
acauggcuuucaacaugug

SEQ ID NO: 1627359 - RNA, 19 nt, Artificial Sequence
  Description of Artificial Sequence: Synthetic oligonucleotide
ggaggcgcugcaugugcac

SEQ ID NO: 1627360 - RNA, 19 nt, Artificial Sequence
  Description of Artificial Sequence: Synthetic oligonucleotide
gcuaucugccuugccucag

SEQ ID NO: 1627361 - RNA, 19 nt, Artificial Sequence
  Description of Artificial Sequence: Synthetic oligonucleotide
caucgcaagcuaucugccu

SEQ ID NO: 1627362 - RNA, 19 nt, Artificial Sequence
  Description of Artificial Sequence: Synthetic oligonucleotide
gaguucgauggcucuguuu

SEQ ID NO: 1627363 - RNA, 19 nt, Artificial Sequence
  Description of Artificial Sequence: Synthetic oligonucleotide
ugcagaccuaagggcccca

SEQ ID NO: 1627364 - RNA, 19 nt, Artificial Sequence
  Description of Artificial Sequence: Synthetic oligonucleotide
gccuuauagaugugaauuu

SEQ ID NO: 1627365 - RNA, 19 nt, Artificial Sequence
  Description of Artificial Sequence: Synthetic oligonucleotide
ugccuugccucagcaguuu

SEQ ID NO: 1627366 - RNA, 19 nt, Artificial Sequence
  Description of Artificial Sequence: Synthetic oligonucleotide
gacaaccgguacaccugga

SEQ ID NO: 1627367 - RNA, 19 nt, Artificial Sequence
  Description of Artificial Sequence: Synthetic oligonucleotide
gccgcucgucaccuugucc

SEQ ID NO: 1627368 - RNA, 19 nt, Artificial Sequence
  Description of Artificial Sequence: Synthetic oligonucleotide
gguccucacucuucccauc

SEQ ID NO: 1627369 - RNA, 19 nt, Artificial Sequence
  Description of Artificial Sequence: Synthetic oligonucleotide
gagccguggcugcgcggcc

SEQ ID NO: 1627370 - RNA, 19 nt, Artificial Sequence
  Description of Artificial Sequence: Synthetic oligonucleotide
caccuggaugguguggcga

SEQ ID NO: 1627371 - RNA, 19 nt, Artificial Sequence
  Description of Artificial Sequence: Synthetic oligonucleotide
guaguccauaauauccauu

SEQ ID NO: 1627372 - RNA, 19 nt, Artificial Sequence
  Description of Artificial Sequence: Synthetic oligonucleotide
cagcuagucuucagaacau

SEQ ID NO: 1627373 - RNA, 19 nt, Artificial Sequence
  Description of Artificial Sequence: Synthetic oligonucleotide
ggucaccacuggccagucc

SEQ ID NO: 1627374 - RNA, 19 nt, Artificial Sequence
  Description of Artificial Sequence: Synthetic oligonucleotide
guccggagccguggcugcg

SEQ ID NO: 1627375 - RNA, 19 nt, Artificial Sequence
  Description of Artificial Sequence: Synthetic oligonucleotide
ggcaagggacuccuuaauu

SEQ ID NO: 1627376 - RNA, 19 nt, Artificial Sequence
  Description of Artificial Sequence: Synthetic oligonucleotide
ccagugaaauacacugugu

SEQ ID NO: 1627377 - RNA, 19 nt, Artificial Sequence
  Description of Artificial Sequence: Synthetic oligonucleotide
ccagaggggcagcuccgcc

SEQ ID NO: 1627378 - RNA, 19 nt, Artificial Sequence
  Description of Artificial Sequence: Synthetic oligonucleotide
augguguggcgaacagcau

SEQ ID NO: 1627379 - RNA, 19 nt, Artificial Sequence
  Description of Artificial Sequence: Synthetic oligonucleotide
gcagaccuaagggccccag

SEQ ID NO: 1627380 - RNA, 19 nt, Artificial Sequence
  Description of Artificial Sequence: Synthetic oligonucleotide
cccucagugcacaauaauu

SEQ ID NO: 1627381 - RNA, 19 nt, Artificial Sequence
  Description of Artificial Sequence: Synthetic oligonucleotide
cucggccgggcaccgcauc

SEQ ID NO: 1627382 - RNA, 19 nt, Artificial Sequence
  Description of Artificial Sequence: Synthetic oligonucleotide
cccgcgccucgcgagaucc

SEQ ID NO: 1627383 - RNA, 19 nt, Artificial Sequence
  Description of Artificial Sequence: Synthetic oligonucleotide
cgcucgucaccuuguccgg

SEQ ID NO: 1627384 - RNA, 19 nt, Artificial Sequence
  Description of Artificial Sequence: Synthetic oligonucleotide
gggcgucaguaggauagac

SEQ ID NO: 1627385 - RNA, 19 nt, Artificial Sequence
  Description of Artificial Sequence: Synthetic oligonucleotide
cauccucagcuaugagggu

SEQ ID NO: 1627386 - RNA, 19 nt, Artificial Sequence
  Description of Artificial Sequence: Synthetic oligonucleotide
gcucgucaccuuguccggc

SEQ ID NO: 1627387 - RNA, 19 nt, Artificial Sequence
  Description of Artificial Sequence: Synthetic oligonucleotide
cgaucauccucagcuauga

SEQ ID NO: 1627388 - RNA, 19 nt, Artificial Sequence
  Description of Artificial Sequence: Synthetic oligonucleotide
ccucacucuucccaucaaa

SEQ ID NO: 1627389 - RNA, 19 nt, Artificial Sequence
  Description of Artificial Sequence: Synthetic oligonucleotide
ggcugcgcgccgcucguca

SEQ ID NO: 1627390 - RNA, 19 nt, Artificial Sequence
  Description of Artificial Sequence: Synthetic oligonucleotide
gcaccugcgccaccucaca

SEQ ID NO: 1627391 - RNA, 19 nt, Artificial Sequence
  Description of Artificial Sequence: Synthetic oligonucleotide
cauaggcaagaaggaacau

SEQ ID NO: 1627392 - RNA, 19 nt, Artificial Sequence
  Description of Artificial Sequence: Synthetic oligonucleotide
ggcuuucaacauguguccu

SEQ ID NO: 1627393 - RNA, 19 nt, Artificial Sequence
  Description of Artificial Sequence: Synthetic oligonucleotide
gcaugagcucugggucccg

SEQ ID NO: 1627394 - RNA, 19 nt, Artificial Sequence
  Description of Artificial Sequence: Synthetic oligonucleotide
ccguccggagccguggcug

SEQ ID NO: 1627395 - RNA, 19 nt, Artificial Sequence
  Description of Artificial Sequence: Synthetic oligonucleotide
guuuaccaucagaacuguu

SEQ ID NO: 1627396 - RNA, 19 nt, Artificial Sequence
  Description of Artificial Sequence: Synthetic oligonucleotide
gggauguuauagugucgau

SEQ ID NO: 1627397 - RNA, 19 nt, Artificial Sequence
  Description of Artificial Sequence: Synthetic oligonucleotide
cagugugucccaccugguu

SEQ ID NO: 1627398 - RNA, 19 nt, Artificial Sequence
  Description of Artificial Sequence: Synthetic oligonucleotide
gcugcgcgccgcucgucac

SEQ ID NO: 1627399 - RNA, 19 nt, Artificial Sequence
  Description of Artificial Sequence: Synthetic oligonucleotide
gcucugggucccgaagcca

SEQ ID NO: 1627400 - RNA, 19 nt, Artificial Sequence
  Description of Artificial Sequence: Synthetic oligonucleotide
cgcaagcuaucugccuugc

SEQ ID NO: 1627401 - RNA, 19 nt, Artificial Sequence
  Description of Artificial Sequence: Synthetic oligonucleotide
caucugccuuauggagaca

SEQ ID NO: 1627402 - RNA, 19 nt, Artificial Sequence
  Description of Artificial Sequence: Synthetic oligonucleotide
gcccucagugcacaauaau

SEQ ID NO: 1627403 - RNA, 19 nt, Artificial Sequence
  Description of Artificial Sequence: Synthetic oligonucleotide
ccgcaucgcggcccggggc

SEQ ID NO: 1627404 - RNA, 19 nt, Artificial Sequence
  Description of Artificial Sequence: Synthetic oligonucleotide
ggcccucagugcacaauaa

SEQ ID NO: 1627405 - RNA, 19 nt, Artificial Sequence
  Description of Artificial Sequence: Synthetic oligonucleotide
ggggcgucaguaggauaga

SEQ ID NO: 1627406 - RNA, 19 nt, Artificial Sequence
  Description of Artificial Sequence: Synthetic oligonucleotide
ccagggucguuugaugugu

SEQ ID NO: 1627407 - RNA, 19 nt, Artificial Sequence
  Description of Artificial Sequence: Synthetic oligonucleotide
cgcgccgcucgucaccuug

SEQ ID NO: 1627408 - RNA, 19 nt, Artificial Sequence
  Description of Artificial Sequence: Synthetic oligonucleotide
ccgguacaccuggauggug

SEQ ID NO: 1627409 - RNA, 19 nt, Artificial Sequence
  Description of Artificial Sequence: Synthetic oligonucleotide
guagcuguccagggucguu

SEQ ID NO: 1627410 - RNA, 19 nt, Artificial Sequence
  Description of Artificial Sequence: Synthetic oligonucleotide
ccuuguccggccguccgga

SEQ ID NO: 1627411 - RNA, 19 nt, Artificial Sequence
  Description of Artificial Sequence: Synthetic oligonucleotide
ccauugcuugauccagcua

SEQ ID NO: 1627412 - RNA, 19 nt, Artificial Sequence
  Description of Artificial Sequence: Synthetic oligonucleotide
caccugcgccaccucacau

SEQ ID NO: 1627413 - RNA, 19 nt, Artificial Sequence
  Description of Artificial Sequence: Synthetic oligonucleotide
cgugcucggccgggcaccg

SEQ ID NO: 1627414 - RNA, 19 nt, Artificial Sequence
  Description of Artificial Sequence: Synthetic oligonucleotide
ccccaaaguucucccagau

SEQ ID NO: 1627415 - RNA, 19 nt, Artificial Sequence
  Description of Artificial Sequence: Synthetic oligonucleotide
cgcggcccggggcugcgcg

SEQ ID NO: 1627416 - RNA, 19 nt, Artificial Sequence
  Description of Artificial Sequence: Synthetic oligonucleotide
gcguggcccucagugcaca

SEQ ID NO: 1627417 - RNA, 19 nt, Artificial Sequence
  Description of Artificial Sequence: Synthetic oligonucleotide
gcaucgcggcccggggcug

SEQ ID NO: 1627418 - RNA, 19 nt, Artificial Sequence
  Description of Artificial Sequence: Synthetic oligonucleotide
cgucaguaggauagacggu

SEQ ID NO: 1627419 - RNA, 19 nt, Artificial Sequence
  Description of Artificial Sequence: Synthetic oligonucleotide
ccggccguccggagccgug

SEQ ID NO: 1627420 - RNA, 19 nt, Artificial Sequence
  Description of Artificial Sequence: Synthetic oligonucleotide
caccacguacucgccuuau

SEQ ID NO: 1627421 - RNA, 19 nt, Artificial Sequence
  Description of Artificial Sequence: Synthetic oligonucleotide
cccaaaguucucccagauu

SEQ ID NO: 1627422 - RNA, 19 nt, Artificial Sequence
  Description of Artificial Sequence: Synthetic oligonucleotide
ggggcugcgcgccgcucgu

SEQ ID NO: 1627423 - RNA, 19 nt, Artificial Sequence
  Description of Artificial Sequence: Synthetic oligonucleotide
gccuugccucagcaguuuu

SEQ ID NO: 1627424 - RNA, 19 nt, Artificial Sequence
  Description of Artificial Sequence: Synthetic oligonucleotide
guagggcaagggacuccuu

SEQ ID NO: 1627425 - RNA, 19 nt, Artificial Sequence
  Description of Artificial Sequence: Synthetic oligonucleotide
gccguccggagccguggcu

SEQ ID NO: 1627426 - RNA, 19 nt, Artificial Sequence
  Description of Artificial Sequence: Synthetic oligonucleotide
gcccgcgccucgcgagauc

SEQ ID NO: 1627427 - RNA, 19 nt, Artificial Sequence
  Description of Artificial Sequence: Synthetic oligonucleotide
cgcaucgcggcccggggcu

SEQ ID NO: 1627428 - RNA, 19 nt, Artificial Sequence
  Description of Artificial Sequence: Synthetic oligonucleotide
gggcugcgcgccgcucguc

SEQ ID NO: 1627429 - RNA, 19 nt, Artificial Sequence
  Description of Artificial Sequence: Synthetic oligonucleotide
ggcccgcgccucgcgagau

SEQ ID NO: 1627430 - RNA, 19 nt, Artificial Sequence
  Description of Artificial Sequence: Synthetic oligonucleotide
ccggggcugcgcgccgcuc

SEQ ID NO: 1627431 - RNA, 19 nt, Artificial Sequence
  Description of Artificial Sequence: Synthetic oligonucleotide
cgcggcccgcgccucgcga

SEQ ID NO: 1627432 - RNA, 19 nt, Artificial Sequence
  Description of Artificial Sequence: Synthetic oligonucleotide
gcucggccgggcaccgcau

SEQ ID NO: 1627433 - RNA, 19 nt, Artificial Sequence
  Description of Artificial Sequence: Synthetic oligonucleotide
gcgcgccgcucgucaccuu

SEQ ID NO: 1627434 - RNA, 19 nt, Artificial Sequence
  Description of Artificial Sequence: Synthetic oligonucleotide
aaugcuuagagucuuagag

SEQ ID NO: 1627435 - RNA, 19 nt, Artificial Sequence
  Description of Artificial Sequence: Synthetic oligonucleotide
uacaaaagcacaaagagac

SEQ ID NO: 1627436 - RNA, 19 nt, Artificial Sequence
  Description of Artificial Sequence: Synthetic oligonucleotide
auaauaauguccucuagac

SEQ ID NO: 1627437 - RNA, 19 nt, Artificial Sequence
  Description of Artificial Sequence: Synthetic oligonucleotide
gacaaauaauguaagaucg

SEQ ID NO: 1627438 - RNA, 19 nt, Artificial Sequence
  Description of Artificial Sequence: Synthetic oligonucleotide
aaaucugugaaugugagca

SEQ ID NO: 1627439 - RNA, 19 nt, Artificial Sequence
  Description of Artificial Sequence: Synthetic oligonucleotide
agaauagucacauggaaag

SEQ ID NO: 1627440 - RNA, 19 nt, Artificial Sequence
  Description of Artificial Sequence: Synthetic oligonucleotide
ugugaaagcagccauguug

SEQ ID NO: 1627441 - RNA, 19 nt, Artificial Sequence
  Description of Artificial Sequence: Synthetic oligonucleotide
uacauuaagaauugaacug

SEQ ID NO: 1627442 - RNA, 19 nt, Artificial Sequence
  Description of Artificial Sequence: Synthetic oligonucleotide
aaaguauacauuaagaauu

SEQ ID NO: 1627443 - RNA, 19 nt, Artificial Sequence
  Description of Artificial Sequence: Synthetic oligonucleotide
aaagcagauuuacacucgc

SEQ ID NO: 1627444 - RNA, 19 nt, Artificial Sequence
  Description of Artificial Sequence: Synthetic oligonucleotide
uuuaagugguugaucaagg

SEQ ID NO: 1627445 - RNA, 19 nt, Artificial Sequence
  Description of Artificial Sequence: Synthetic oligonucleotide
aauugaacuguuuucuucu

SEQ ID NO: 1627446 - RNA, 19 nt, Artificial Sequence
  Description of Artificial Sequence: Synthetic oligonucleotide
uguaaacucagaauaguca

SEQ ID NO: 1627447 - RNA, 19 nt, Artificial Sequence
  Description of Artificial Sequence: Synthetic oligonucleotide
aagugguugaucaagggcg

SEQ ID NO: 1627448 - RNA, 19 nt, Artificial Sequence
  Description of Artificial Sequence: Synthetic oligonucleotide
aauucugcaucagaggcgg

SEQ ID NO: 1627449 - RNA, 19 nt, Artificial Sequence
  Description of Artificial Sequence: Synthetic oligonucleotide
ucaaauucugcaucagagg

SEQ ID NO: 1627450 - RNA, 19 nt, Artificial Sequence
  Description of Artificial Sequence: Synthetic oligonucleotide
uagaagacgacuugcacag

SEQ ID NO: 1627451 - RNA, 19 nt, Artificial Sequence
  Description of Artificial Sequence: Synthetic oligonucleotide
caaauucugcaucagaggc

SEQ ID NO: 1627452 - RNA, 19 nt, Artificial Sequence
  Description of Artificial Sequence: Synthetic oligonucleotide
ugcacaaacacacuuagua

SEQ ID NO: 1627453 - RNA, 19 nt, Artificial Sequence
  Description of Artificial Sequence: Synthetic oligonucleotide
uugaaagccagaaaaucug

SEQ ID NO: 1627454 - RNA, 19 nt, Artificial Sequence
  Description of Artificial Sequence: Synthetic oligonucleotide
uuaagaauugaacuguuuu

SEQ ID NO: 1627455 - RNA, 19 nt, Artificial Sequence
  Description of Artificial Sequence: Synthetic oligonucleotide
acucauuuuacaaaagcac

SEQ ID NO: 1627456 - RNA, 19 nt, Artificial Sequence
  Description of Artificial Sequence: Synthetic oligonucleotide
uucaauguacuucucuacc

SEQ ID NO: 1627457 - RNA, 19 nt, Artificial Sequence
  Description of Artificial Sequence: Synthetic oligonucleotide
agucuguuugcacugguac

SEQ ID NO: 1627458 - RNA, 19 nt, Artificial Sequence
  Description of Artificial Sequence: Synthetic oligonucleotide
uuuuaagugguugaucaag

SEQ ID NO: 1627459 - RNA, 19 nt, Artificial Sequence
  Description of Artificial Sequence: Synthetic oligonucleotide
gaacaguggaacuaagacc

SEQ ID NO: 1627460 - RNA, 19 nt, Artificial Sequence
  Description of Artificial Sequence: Synthetic oligonucleotide
uucgcuguugaaaaggaca

SEQ ID NO: 1627461 - RNA, 19 nt, Artificial Sequence
  Description of Artificial Sequence: Synthetic oligonucleotide
aagaauugaacuguuuucu

SEQ ID NO: 1627462 - RNA, 19 nt, Artificial Sequence
  Description of Artificial Sequence: Synthetic oligonucleotide
uuagccugaguuuucaucu

SEQ ID NO: 1627463 - RNA, 19 nt, Artificial Sequence
  Description of Artificial Sequence: Synthetic oligonucleotide
uaagugguugaucaagggc

SEQ ID NO: 1627464 - RNA, 19 nt, Artificial Sequence
  Description of Artificial Sequence: Synthetic oligonucleotide
ugacaguccaccaaagaug

SEQ ID NO: 1627465 - RNA, 19 nt, Artificial Sequence
  Description of Artificial Sequence: Synthetic oligonucleotide
cuuaguaugcuguugugac

SEQ ID NO: 1627466 - RNA, 19 nt, Artificial Sequence
  Description of Artificial Sequence: Synthetic oligonucleotide
ugcacugguacccaagaag

SEQ ID NO: 1627467 - RNA, 19 nt, Artificial Sequence
  Description of Artificial Sequence: Synthetic oligonucleotide
cagcucuuagcuuacaucc

SEQ ID NO: 1627468 - RNA, 19 nt, Artificial Sequence
  Description of Artificial Sequence: Synthetic oligonucleotide
caaauaauguaagaucggg

SEQ ID NO: 1627469 - RNA, 19 nt, Artificial Sequence
  Description of Artificial Sequence: Synthetic oligonucleotide
uuaagugguugaucaaggg

SEQ ID NO: 1627470 - RNA, 19 nt, Artificial Sequence
  Description of Artificial Sequence: Synthetic oligonucleotide
aagaggggcacuaaauugg

SEQ ID NO: 1627471 - RNA, 19 nt, Artificial Sequence
  Description of Artificial Sequence: Synthetic oligonucleotide
cuuucuagagaugugacac

SEQ ID NO: 1627472 - RNA, 19 nt, Artificial Sequence
  Description of Artificial Sequence: Synthetic oligonucleotide
agcagauuuacacucgcag

SEQ ID NO: 1627473 - RNA, 19 nt, Artificial Sequence
  Description of Artificial Sequence: Synthetic oligonucleotide
ugcaguguuguugugaaag

SEQ ID NO: 1627474 - RNA, 19 nt, Artificial Sequence
  Description of Artificial Sequence: Synthetic oligonucleotide
aaaauaaugcuuagagucu

SEQ ID NO: 1627475 - RNA, 19 nt, Artificial Sequence
  Description of Artificial Sequence: Synthetic oligonucleotide
gaauucgcuguugaaaagg

SEQ ID NO: 1627476 - RNA, 19 nt, Artificial Sequence
  Description of Artificial Sequence: Synthetic oligonucleotide
acuaagaccagcagaauuc

SEQ ID NO: 1627477 - RNA, 19 nt, Artificial Sequence
  Description of Artificial Sequence: Synthetic oligonucleotide
cacaaacacacuuaguaug

SEQ ID NO: 1627478 - RNA, 19 nt, Artificial Sequence
  Description of Artificial Sequence: Synthetic oligonucleotide
aaacaccucaaauuuuacu

SEQ ID NO: 1627479 - RNA, 19 nt, Artificial Sequence
  Description of Artificial Sequence: Synthetic oligonucleotide
uggaacuaagaccagcaga

SEQ ID NO: 1627480 - RNA, 19 nt, Artificial Sequence
  Description of Artificial Sequence: Synthetic oligonucleotide
acagugaucacaccauguc

SEQ ID NO: 1627481 - RNA, 19 nt, Artificial Sequence
  Description of Artificial Sequence: Synthetic oligonucleotide
auaugugaguuuauucucc

SEQ ID NO: 1627482 - RNA, 19 nt, Artificial Sequence
  Description of Artificial Sequence: Synthetic oligonucleotide
uaauaauguccucuagaca

SEQ ID NO: 1627483 - RNA, 19 nt, Artificial Sequence
  Description of Artificial Sequence: Synthetic oligonucleotide
uagucacauggaaaguugg

SEQ ID NO: 1627484 - RNA, 19 nt, Artificial Sequence
  Description of Artificial Sequence: Synthetic oligonucleotide
ugggauacgcuccagcagc

SEQ ID NO: 1627485 - RNA, 19 nt, Artificial Sequence
  Description of Artificial Sequence: Synthetic oligonucleotide
gguuucuugaaaauaaugc

SEQ ID NO: 1627486 - RNA, 19 nt, Artificial Sequence
  Description of Artificial Sequence: Synthetic oligonucleotide
aaggacaaauaauguaaga

SEQ ID NO: 1627487 - RNA, 19 nt, Artificial Sequence
  Description of Artificial Sequence: Synthetic oligonucleotide
ucacauggaaaguuggugu

SEQ ID NO: 1627488 - RNA, 19 nt, Artificial Sequence
  Description of Artificial Sequence: Synthetic oligonucleotide
ugucaaagaugucaccagc

SEQ ID NO: 1627489 - RNA, 19 nt, Artificial Sequence
  Description of Artificial Sequence: Synthetic oligonucleotide
gagucuuagaggaacagug

SEQ ID NO: 1627490 - RNA, 19 nt, Artificial Sequence
  Description of Artificial Sequence: Synthetic oligonucleotide
ucagaauagucacauggaa

SEQ ID NO: 1627491 - RNA, 19 nt, Artificial Sequence
  Description of Artificial Sequence: Synthetic oligonucleotide
cauacucacuagauuagcc

SEQ ID NO: 1627492 - RNA, 19 nt, Artificial Sequence
  Description of Artificial Sequence: Synthetic oligonucleotide
gcauauaauacuuugaucu

SEQ ID NO: 1627493 - RNA, 19 nt, Artificial Sequence
  Description of Artificial Sequence: Synthetic oligonucleotide
aacuaagaccagcagaauu

SEQ ID NO: 1627494 - RNA, 19 nt, Artificial Sequence
  Description of Artificial Sequence: Synthetic oligonucleotide
uguuguugugaaagcagcc

SEQ ID NO: 1627495 - RNA, 19 nt, Artificial Sequence
  Description of Artificial Sequence: Synthetic oligonucleotide
uacucacuagauuagccug

SEQ ID NO: 1627496 - RNA, 19 nt, Artificial Sequence
  Description of Artificial Sequence: Synthetic oligonucleotide
gaucacaccaugucugaag

SEQ ID NO: 1627497 - RNA, 19 nt, Artificial Sequence
  Description of Artificial Sequence: Synthetic oligonucleotide
ugaucaagggcguuccaag

SEQ ID NO: 1627498 - RNA, 19 nt, Artificial Sequence
  Description of Artificial Sequence: Synthetic oligonucleotide
aaauaauguaagaucggga

SEQ ID NO: 1627499 - RNA, 19 nt, Artificial Sequence
  Description of Artificial Sequence: Synthetic oligonucleotide
auccuguaaacucagaaua

SEQ ID NO: 1627500 - RNA, 19 nt, Artificial Sequence
  Description of Artificial Sequence: Synthetic oligonucleotide
ucaaacuccugguaguacu

SEQ ID NO: 1627501 - RNA, 19 nt, Artificial Sequence
  Description of Artificial Sequence: Synthetic oligonucleotide
acagcucuuagcuuacauc

SEQ ID NO: 1627502 - RNA, 19 nt, Artificial Sequence
  Description of Artificial Sequence: Synthetic oligonucleotide
aauagguuucuugaaaaua

SEQ ID NO: 1627503 - RNA, 19 nt, Artificial Sequence
  Description of Artificial Sequence: Synthetic oligonucleotide
aaucugugaaugugagcag

SEQ ID NO: 1627504 - RNA, 19 nt, Artificial Sequence
  Description of Artificial Sequence: Synthetic oligonucleotide
uacaggaacaucuccuuga

SEQ ID NO: 1627505 - RNA, 19 nt, Artificial Sequence
  Description of Artificial Sequence: Synthetic oligonucleotide
caagccgcugcuuaagucc

SEQ ID NO: 1627506 - RNA, 19 nt, Artificial Sequence
  Description of Artificial Sequence: Synthetic oligonucleotide
caugcacaaacacacuuag

SEQ ID NO: 1627507 - RNA, 19 nt, Artificial Sequence
  Description of Artificial Sequence: Synthetic oligonucleotide
aauagucacauggaaaguu

SEQ ID NO: 1627508 - RNA, 19 nt, Artificial Sequence
  Description of Artificial Sequence: Synthetic oligonucleotide
uuuugauuguggguagagg

SEQ ID NO: 1627509 - RNA, 19 nt, Artificial Sequence
  Description of Artificial Sequence: Synthetic oligonucleotide
gaccuagugccgcagauug

SEQ ID NO: 1627510 - RNA, 19 nt, Artificial Sequence
  Description of Artificial Sequence: Synthetic oligonucleotide
auacucacuagauuagccu

SEQ ID NO: 1627511 - RNA, 19 nt, Artificial Sequence
  Description of Artificial Sequence: Synthetic oligonucleotide
uggauucuuaguuuuacua

SEQ ID NO: 1627512 - RNA, 19 nt, Artificial Sequence
  Description of Artificial Sequence: Synthetic oligonucleotide
cuuaaguccaguccucggc

SEQ ID NO: 1627513 - RNA, 19 nt, Artificial Sequence
  Description of Artificial Sequence: Synthetic oligonucleotide
guauaugugaguuuauucu

SEQ ID NO: 1627514 - RNA, 19 nt, Artificial Sequence
  Description of Artificial Sequence: Synthetic oligonucleotide
uggaaagcagauuuacacu

SEQ ID NO: 1627515 - RNA, 19 nt, Artificial Sequence
  Description of Artificial Sequence: Synthetic oligonucleotide
aacacacuuaguaugcugu

SEQ ID NO: 1627516 - RNA, 19 nt, Artificial Sequence
  Description of Artificial Sequence: Synthetic oligonucleotide
ugaaagccagaaaaucugu

SEQ ID NO: 1627517 - RNA, 19 nt, Artificial Sequence
  Description of Artificial Sequence: Synthetic oligonucleotide
gaguuuauucuccucugug

SEQ ID NO: 1627518 - RNA, 19 nt, Artificial Sequence
  Description of Artificial Sequence: Synthetic oligonucleotide
caccucauccuuauggugc

SEQ ID NO: 1627519 - RNA, 19 nt, Artificial Sequence
  Description of Artificial Sequence: Synthetic oligonucleotide
cuuacauccuguaaacuca

SEQ ID NO: 1627520 - RNA, 19 nt, Artificial Sequence
  Description of Artificial Sequence: Synthetic oligonucleotide
gaaagcagauuuacacucg

SEQ ID NO: 1627521 - RNA, 19 nt, Artificial Sequence
  Description of Artificial Sequence: Synthetic oligonucleotide
uaugcuguugugacagagc

SEQ ID NO: 1627522 - RNA, 19 nt, Artificial Sequence
  Description of Artificial Sequence: Synthetic oligonucleotide
aaguuaaaguuaaaaguau

SEQ ID NO: 1627523 - RNA, 19 nt, Artificial Sequence
  Description of Artificial Sequence: Synthetic oligonucleotide
gaacaucuccuugaaagcc

SEQ ID NO: 1627524 - RNA, 19 nt, Artificial Sequence
  Description of Artificial Sequence: Synthetic oligonucleotide
uaauguaagaucgggaguu

SEQ ID NO: 1627525 - RNA, 19 nt, Artificial Sequence
  Description of Artificial Sequence: Synthetic oligonucleotide
cauaauaauguccucuaga

SEQ ID NO: 1627526 - RNA, 19 nt, Artificial Sequence
  Description of Artificial Sequence: Synthetic oligonucleotide
uuagagucuuagaggaaca

SEQ ID NO: 1627527 - RNA, 19 nt, Artificial Sequence
  Description of Artificial Sequence: Synthetic oligonucleotide
acacuuaguaugcuguugu

SEQ ID NO: 1627528 - RNA, 19 nt, Artificial Sequence
  Description of Artificial Sequence: Synthetic oligonucleotide
uugaucuuuuaagugguug

SEQ ID NO: 1627529 - RNA, 19 nt, Artificial Sequence
  Description of Artificial Sequence: Synthetic oligonucleotide
ucugucaucauuagcccau

SEQ ID NO: 1627530 - RNA, 19 nt, Artificial Sequence
  Description of Artificial Sequence: Synthetic oligonucleotide
uugauuguggguagaggac

SEQ ID NO: 1627531 - RNA, 19 nt, Artificial Sequence
  Description of Artificial Sequence: Synthetic oligonucleotide
ucuuagaggaacaguggaa

SEQ ID NO: 1627532 - RNA, 19 nt, Artificial Sequence
  Description of Artificial Sequence: Synthetic oligonucleotide
agcaugucaaagaugucac

SEQ ID NO: 1627533 - RNA, 19 nt, Artificial Sequence
  Description of Artificial Sequence: Synthetic oligonucleotide
uguaagaucgggaguuccu

SEQ ID NO: 1627534 - RNA, 19 nt, Artificial Sequence
  Description of Artificial Sequence: Synthetic oligonucleotide
cuguaaacucagaauaguc

SEQ ID NO: 1627535 - RNA, 19 nt, Artificial Sequence
  Description of Artificial Sequence: Synthetic oligonucleotide
cacuaaauuggaaagcaga

SEQ ID NO: 1627536 - RNA, 19 nt, Artificial Sequence
  Description of Artificial Sequence: Synthetic oligonucleotide
agaugugacacacaugcuu

SEQ ID NO: 1627537 - RNA, 19 nt, Artificial Sequence
  Description of Artificial Sequence: Synthetic oligonucleotide
aauguaagaucgggaguuc

SEQ ID NO: 1627538 - RNA, 19 nt, Artificial Sequence
  Description of Artificial Sequence: Synthetic oligonucleotide
ucugugaaugugagcagca

SEQ ID NO: 1627539 - RNA, 19 nt, Artificial Sequence
  Description of Artificial Sequence: Synthetic oligonucleotide
gauacgcuccagcagcugc

SEQ ID NO: 1627540 - RNA, 19 nt, Artificial Sequence
  Description of Artificial Sequence: Synthetic oligonucleotide
uguuucuagcauacagucu

SEQ ID NO: 1627541 - RNA, 19 nt, Artificial Sequence
  Description of Artificial Sequence: Synthetic oligonucleotide
gacaagcaugcacaaacac

SEQ ID NO: 1627542 - RNA, 19 nt, Artificial Sequence
  Description of Artificial Sequence: Synthetic oligonucleotide
auaauguccucuagacacc

SEQ ID NO: 1627543 - RNA, 19 nt, Artificial Sequence
  Description of Artificial Sequence: Synthetic oligonucleotide
acaucuuucucuugacaug

SEQ ID NO: 1627544 - RNA, 19 nt, Artificial Sequence
  Description of Artificial Sequence: Synthetic oligonucleotide
uugccaaacaccucaaauu

SEQ ID NO: 1627545 - RNA, 19 nt, Artificial Sequence
  Description of Artificial Sequence: Synthetic oligonucleotide
agaauucgcuguugaaaag

SEQ ID NO: 1627546 - RNA, 19 nt, Artificial Sequence
  Description of Artificial Sequence: Synthetic oligonucleotide
acaccucaaauuuuacuca

SEQ ID NO: 1627547 - RNA, 19 nt, Artificial Sequence
  Description of Artificial Sequence: Synthetic oligonucleotide
uuagaggaacaguggaacu

SEQ ID NO: 1627548 - RNA, 19 nt, Artificial Sequence
  Description of Artificial Sequence: Synthetic oligonucleotide
ggaaagcagauuuacacuc

SEQ ID NO: 1627549 - RNA, 19 nt, Artificial Sequence
  Description of Artificial Sequence: Synthetic oligonucleotide
augacaggagugcagacaa

SEQ ID NO: 1627550 - RNA, 19 nt, Artificial Sequence
  Description of Artificial Sequence: Synthetic oligonucleotide
caucugucaucauuagccc

SEQ ID NO: 1627551 - RNA, 19 nt, Artificial Sequence
  Description of Artificial Sequence: Synthetic oligonucleotide
ugacaugaugcaucuguca

SEQ ID NO: 1627552 - RNA, 19 nt, Artificial Sequence
  Description of Artificial Sequence: Synthetic oligonucleotide
aaauaaugcuuagagucuu

SEQ ID NO: 1627553 - RNA, 19 nt, Artificial Sequence
  Description of Artificial Sequence: Synthetic oligonucleotide
ugcaucugucaucauuagc

SEQ ID NO: 1627554 - RNA, 19 nt, Artificial Sequence
  Description of Artificial Sequence: Synthetic oligonucleotide
cuaagaccagcagaauucg

SEQ ID NO: 1627555 - RNA, 19 nt, Artificial Sequence
  Description of Artificial Sequence: Synthetic oligonucleotide
aguugguguggauucuuag

SEQ ID NO: 1627556 - RNA, 19 nt, Artificial Sequence
  Description of Artificial Sequence: Synthetic oligonucleotide
ugauuguggguagaggaca

SEQ ID NO: 1627557 - RNA, 19 nt, Artificial Sequence
  Description of Artificial Sequence: Synthetic oligonucleotide
aagaucauacucacuagau

SEQ ID NO: 1627558 - RNA, 19 nt, Artificial Sequence
  Description of Artificial Sequence: Synthetic oligonucleotide
uagcuuacauccuguaaac

SEQ ID NO: 1627559 - RNA, 19 nt, Artificial Sequence
  Description of Artificial Sequence: Synthetic oligonucleotide
acacaugcuuucugguugg

SEQ ID NO: 1627560 - RNA, 19 nt, Artificial Sequence
  Description of Artificial Sequence: Synthetic oligonucleotide
acuagauuagccugaguuu

SEQ ID NO: 1627561 - RNA, 19 nt, Artificial Sequence
  Description of Artificial Sequence: Synthetic oligonucleotide
uuaguaugcuguugugaca

SEQ ID NO: 1627562 - RNA, 19 nt, Artificial Sequence
  Description of Artificial Sequence: Synthetic oligonucleotide
caugucugaaggugggacc

SEQ ID NO: 1627563 - RNA, 19 nt, Artificial Sequence
  Description of Artificial Sequence: Synthetic oligonucleotide
caucauuagcccauacuuc

SEQ ID NO: 1627564 - RNA, 19 nt, Artificial Sequence
  Description of Artificial Sequence: Synthetic oligonucleotide
gguauaugugaguuuauuc

SEQ ID NO: 1627565 - RNA, 19 nt, Artificial Sequence
  Description of Artificial Sequence: Synthetic oligonucleotide
ugaugcaucugucaucauu

SEQ ID NO: 1627566 - RNA, 19 nt, Artificial Sequence
  Description of Artificial Sequence: Synthetic oligonucleotide
agauuuacacucgcaguuc

SEQ ID NO: 1627567 - RNA, 19 nt, Artificial Sequence
  Description of Artificial Sequence: Synthetic oligonucleotide
aauucgcuguugaaaagga

SEQ ID NO: 1627568 - RNA, 19 nt, Artificial Sequence
  Description of Artificial Sequence: Synthetic oligonucleotide
auaaugcuuagagucuuag

SEQ ID NO: 1627569 - RNA, 19 nt, Artificial Sequence
  Description of Artificial Sequence: Synthetic oligonucleotide
agaagaggggcacuaaauu

SEQ ID NO: 1627570 - RNA, 19 nt, Artificial Sequence
  Description of Artificial Sequence: Synthetic oligonucleotide
uaaugcuuagagucuuaga

SEQ ID NO: 1627571 - RNA, 19 nt, Artificial Sequence
  Description of Artificial Sequence: Synthetic oligonucleotide
ucauacucacuagauuagc

SEQ ID NO: 1627572 - RNA, 19 nt, Artificial Sequence
  Description of Artificial Sequence: Synthetic oligonucleotide
uucuuaguuuuacuauaaa

SEQ ID NO: 1627573 - RNA, 19 nt, Artificial Sequence
  Description of Artificial Sequence: Synthetic oligonucleotide
agucuuagaggaacagugg

SEQ ID NO: 1627574 - RNA, 19 nt, Artificial Sequence
  Description of Artificial Sequence: Synthetic oligonucleotide
agggaaauauauucauuaa

SEQ ID NO: 1627575 - RNA, 19 nt, Artificial Sequence
  Description of Artificial Sequence: Synthetic oligonucleotide
gaaagccagaaaaucugug

SEQ ID NO: 1627576 - RNA, 19 nt, Artificial Sequence
  Description of Artificial Sequence: Synthetic oligonucleotide
gcucucuucuuccagggcg

SEQ ID NO: 1627577 - RNA, 19 nt, Artificial Sequence
  Description of Artificial Sequence: Synthetic oligonucleotide
ucaagggcguuccaagauc

SEQ ID NO: 1627578 - RNA, 19 nt, Artificial Sequence
  Description of Artificial Sequence: Synthetic oligonucleotide
guauacauuaagaauugaa

SEQ ID NO: 1627579 - RNA, 19 nt, Artificial Sequence
  Description of Artificial Sequence: Synthetic oligonucleotide
agacgacuugcacagagaa

SEQ ID NO: 1627580 - RNA, 19 nt, Artificial Sequence
  Description of Artificial Sequence: Synthetic oligonucleotide
ggaaaguugguguggauuc

SEQ ID NO: 1627581 - RNA, 19 nt, Artificial Sequence
  Description of Artificial Sequence: Synthetic oligonucleotide
uggguagaggacaucuuuc

SEQ ID NO: 1627582 - RNA, 19 nt, Artificial Sequence
  Description of Artificial Sequence: Synthetic oligonucleotide
uaauguccucuagacaccc

SEQ ID NO: 1627583 - RNA, 19 nt, Artificial Sequence
  Description of Artificial Sequence: Synthetic oligonucleotide
auagucacauggaaaguug

SEQ ID NO: 1627584 - RNA, 19 nt, Artificial Sequence
  Description of Artificial Sequence: Synthetic oligonucleotide
uuagcccauacuucucuga

SEQ ID NO: 1627585 - RNA, 19 nt, Artificial Sequence
  Description of Artificial Sequence: Synthetic oligonucleotide
ucuagagaugugacacaca

SEQ ID NO: 1627586 - RNA, 19 nt, Artificial Sequence
  Description of Artificial Sequence: Synthetic oligonucleotide
uaagaccagcagaauucgc

SEQ ID NO: 1627587 - RNA, 19 nt, Artificial Sequence
  Description of Artificial Sequence: Synthetic oligonucleotide
gcuuacauccuguaaacuc

SEQ ID NO: 1627588 - RNA, 19 nt, Artificial Sequence
  Description of Artificial Sequence: Synthetic oligonucleotide
aucauacucacuagauuag

SEQ ID NO: 1627589 - RNA, 19 nt, Artificial Sequence
  Description of Artificial Sequence: Synthetic oligonucleotide
acaagcaugcacaaacaca

SEQ ID NO: 1627590 - RNA, 19 nt, Artificial Sequence
  Description of Artificial Sequence: Synthetic oligonucleotide
augugacacacaugcuuuc

SEQ ID NO: 1627591 - RNA, 19 nt, Artificial Sequence
  Description of Artificial Sequence: Synthetic oligonucleotide
gucuuagaggaacagugga

SEQ ID NO: 1627592 - RNA, 19 nt, Artificial Sequence
  Description of Artificial Sequence: Synthetic oligonucleotide
uuuucuugccaaacaccuc

SEQ ID NO: 1627593 - RNA, 19 nt, Artificial Sequence
  Description of Artificial Sequence: Synthetic oligonucleotide
gucacauggaaaguuggug

SEQ ID NO: 1627594 - RNA, 19 nt, Artificial Sequence
  Description of Artificial Sequence: Synthetic oligonucleotide
gaagccugggauacgcucc

SEQ ID NO: 1627595 - RNA, 19 nt, Artificial Sequence
  Description of Artificial Sequence: Synthetic oligonucleotide
ggggcacuaaauuggaaag

SEQ ID NO: 1627596 - RNA, 19 nt, Artificial Sequence
  Description of Artificial Sequence: Synthetic oligonucleotide
acuuaguaugcuguuguga

SEQ ID NO: 1627597 - RNA, 19 nt, Artificial Sequence
  Description of Artificial Sequence: Synthetic oligonucleotide
aaagcacacagcauauaau

SEQ ID NO: 1627598 - RNA, 19 nt, Artificial Sequence
  Description of Artificial Sequence: Synthetic oligonucleotide
aagaagaggggcacuaaau

SEQ ID NO: 1627599 - RNA, 19 nt, Artificial Sequence
  Description of Artificial Sequence: Synthetic oligonucleotide
uuauggugcugcaguguug

SEQ ID NO: 1627600 - RNA, 19 nt, Artificial Sequence
  Description of Artificial Sequence: Synthetic oligonucleotide
aguggaacuaagaccagca

SEQ ID NO: 1627601 - RNA, 19 nt, Artificial Sequence
  Description of Artificial Sequence: Synthetic oligonucleotide
ugguuggugacaguccacc

SEQ ID NO: 1627602 - RNA, 19 nt, Artificial Sequence
  Description of Artificial Sequence: Synthetic oligonucleotide
ugguacccaagaagagggg

SEQ ID NO: 1627603 - RNA, 19 nt, Artificial Sequence
  Description of Artificial Sequence: Synthetic oligonucleotide
caagaucauacucacuaga

SEQ ID NO: 1627604 - RNA, 19 nt, Artificial Sequence
  Description of Artificial Sequence: Synthetic oligonucleotide
cucagaauagucacaugga

SEQ ID NO: 1627605 - RNA, 19 nt, Artificial Sequence
  Description of Artificial Sequence: Synthetic oligonucleotide
ucgcaguucucacaacuaa

SEQ ID NO: 1627606 - RNA, 19 nt, Artificial Sequence
  Description of Artificial Sequence: Synthetic oligonucleotide
cagaauagucacauggaaa

SEQ ID NO: 1627607 - RNA, 19 nt, Artificial Sequence
  Description of Artificial Sequence: Synthetic oligonucleotide
guaugcuguugugacagag

SEQ ID NO: 1627608 - RNA, 19 nt, Artificial Sequence
  Description of Artificial Sequence: Synthetic oligonucleotide
augaaguuccucugcaaua

SEQ ID NO: 1627609 - RNA, 19 nt, Artificial Sequence
  Description of Artificial Sequence: Synthetic oligonucleotide
gagacacauugcuacagaa

SEQ ID NO: 1627610 - RNA, 19 nt, Artificial Sequence
  Description of Artificial Sequence: Synthetic oligonucleotide
gccuguuucuagcauacag

SEQ ID NO: 1627611 - RNA, 19 nt, Artificial Sequence
  Description of Artificial Sequence: Synthetic oligonucleotide
gaugacaggagugcagaca

SEQ ID NO: 1627612 - RNA, 19 nt, Artificial Sequence
  Description of Artificial Sequence: Synthetic oligonucleotide
gccagaaaaucugugaaug

SEQ ID NO: 1627613 - RNA, 19 nt, Artificial Sequence
  Description of Artificial Sequence: Synthetic oligonucleotide
gaucaagggcguuccaaga

SEQ ID NO: 1627614 - RNA, 19 nt, Artificial Sequence
  Description of Artificial Sequence: Synthetic oligonucleotide
ggaacuaagaccagcagaa

SEQ ID NO: 1627615 - RNA, 19 nt, Artificial Sequence
  Description of Artificial Sequence: Synthetic oligonucleotide
uuacacucgcaguucucac

SEQ ID NO: 1627616 - RNA, 19 nt, Artificial Sequence
  Description of Artificial Sequence: Synthetic oligonucleotide
uggaaaguugguguggauu

SEQ ID NO: 1627617 - RNA, 19 nt, Artificial Sequence
  Description of Artificial Sequence: Synthetic oligonucleotide
ggugaccucacagugauca

SEQ ID NO: 1627618 - RNA, 19 nt, Artificial Sequence
  Description of Artificial Sequence: Synthetic oligonucleotide
uagaggaacaguggaacua

SEQ ID NO: 1627619 - RNA, 19 nt, Artificial Sequence
  Description of Artificial Sequence: Synthetic oligonucleotide
auucgcuguugaaaaggac

SEQ ID NO: 1627620 - RNA, 19 nt, Artificial Sequence
  Description of Artificial Sequence: Synthetic oligonucleotide
ugucaucauuagcccauac

SEQ ID NO: 1627621 - RNA, 19 nt, Artificial Sequence
  Description of Artificial Sequence: Synthetic oligonucleotide
augcaucugucaucauuag

SEQ ID NO: 1627622 - RNA, 19 nt, Artificial Sequence
  Description of Artificial Sequence: Synthetic oligonucleotide
ugcuguugugacagagcug

SEQ ID NO: 1627623 - RNA, 19 nt, Artificial Sequence
  Description of Artificial Sequence: Synthetic oligonucleotide
uugaucaagggcguuccaa

SEQ ID NO: 1627624 - RNA, 19 nt, Artificial Sequence
  Description of Artificial Sequence: Synthetic oligonucleotide
agauuguucugggaagcug

SEQ ID NO: 1627625 - RNA, 19 nt, Artificial Sequence
  Description of Artificial Sequence: Synthetic oligonucleotide
agagucuuagaggaacagu

SEQ ID NO: 1627626 - RNA, 19 nt, Artificial Sequence
  Description of Artificial Sequence: Synthetic oligonucleotide
agccagaaaaucugugaau

SEQ ID NO: 1627627 - RNA, 19 nt, Artificial Sequence
  Description of Artificial Sequence: Synthetic oligonucleotide
uguccucuagacacccaac

SEQ ID NO: 1627628 - RNA, 19 nt, Artificial Sequence
  Description of Artificial Sequence: Synthetic oligonucleotide
ugccgcagauuguucuggg

SEQ ID NO: 1627629 - RNA, 19 nt, Artificial Sequence
  Description of Artificial Sequence: Synthetic oligonucleotide
aguauacauuaagaauuga

SEQ ID NO: 1627630 - RNA, 19 nt, Artificial Sequence
  Description of Artificial Sequence: Synthetic oligonucleotide
ucuuagcuuacauccugua

SEQ ID NO: 1627631 - RNA, 19 nt, Artificial Sequence
  Description of Artificial Sequence: Synthetic oligonucleotide
cugggauacgcuccagcag

SEQ ID NO: 1627632 - RNA, 19 nt, Artificial Sequence
  Description of Artificial Sequence: Synthetic oligonucleotide
aagccugggauacgcucca

SEQ ID NO: 1627633 - RNA, 19 nt, Artificial Sequence
  Description of Artificial Sequence: Synthetic oligonucleotide
uucaaacuccugguaguac

SEQ ID NO: 1627634 - RNA, 19 nt, Artificial Sequence
  Description of Artificial Sequence: Synthetic oligonucleotide
uguugaagccugggauacg

SEQ ID NO: 1627635 - RNA, 19 nt, Artificial Sequence
  Description of Artificial Sequence: Synthetic oligonucleotide
augucugaaggugggaccu

SEQ ID NO: 1627636 - RNA, 19 nt, Artificial Sequence
  Description of Artificial Sequence: Synthetic oligonucleotide
uacauccuguaaacucaga

SEQ ID NO: 1627637 - RNA, 19 nt, Artificial Sequence
  Description of Artificial Sequence: Synthetic oligonucleotide
cacuagauuagccugaguu

SEQ ID NO: 1627638 - RNA, 19 nt, Artificial Sequence
  Description of Artificial Sequence: Synthetic oligonucleotide
gagucagcugggcugguga

SEQ ID NO: 1627639 - RNA, 19 nt, Artificial Sequence
  Description of Artificial Sequence: Synthetic oligonucleotide
caagggcguuccaagauca

SEQ ID NO: 1627640 - RNA, 19 nt, Artificial Sequence
  Description of Artificial Sequence: Synthetic oligonucleotide
agauuagccugaguuuuca

SEQ ID NO: 1627641 - RNA, 19 nt, Artificial Sequence
  Description of Artificial Sequence: Synthetic oligonucleotide
aaaguugguguggauucuu

SEQ ID NO: 1627642 - RNA, 19 nt, Artificial Sequence
  Description of Artificial Sequence: Synthetic oligonucleotide
uaagaucgggaguuccuuu

SEQ ID NO: 1627643 - RNA, 19 nt, Artificial Sequence
  Description of Artificial Sequence: Synthetic oligonucleotide
cacacuuaguaugcuguug

SEQ ID NO: 1627644 - RNA, 19 nt, Artificial Sequence
  Description of Artificial Sequence: Synthetic oligonucleotide
ggcacuaaauuggaaagca

SEQ ID NO: 1627645 - RNA, 19 nt, Artificial Sequence
  Description of Artificial Sequence: Synthetic oligonucleotide
cacuuaguaugcuguugug

SEQ ID NO: 1627646 - RNA, 19 nt, Artificial Sequence
  Description of Artificial Sequence: Synthetic oligonucleotide
acucaucauccauaauaau

SEQ ID NO: 1627647 - RNA, 19 nt, Artificial Sequence
  Description of Artificial Sequence: Synthetic oligonucleotide
ugguguggauucuuaguuu

SEQ ID NO: 1627648 - RNA, 19 nt, Artificial Sequence
  Description of Artificial Sequence: Synthetic oligonucleotide
gacuugcacagagaaguca

SEQ ID NO: 1627649 - RNA, 19 nt, Artificial Sequence
  Description of Artificial Sequence: Synthetic oligonucleotide
aagacgacuugcacagaga

SEQ ID NO: 1627650 - RNA, 19 nt, Artificial Sequence
  Description of Artificial Sequence: Synthetic oligonucleotide
auuaagaauugaacuguuu

SEQ ID NO: 1627651 - RNA, 19 nt, Artificial Sequence
  Description of Artificial Sequence: Synthetic oligonucleotide
aaggugggaccuagugccg

SEQ ID NO: 1627652 - RNA, 19 nt, Artificial Sequence
  Description of Artificial Sequence: Synthetic oligonucleotide
uccgcgcugccucaaccgc

SEQ ID NO: 1627653 - RNA, 19 nt, Artificial Sequence
  Description of Artificial Sequence: Synthetic oligonucleotide
guccgcgcugccucaaccg

SEQ ID NO: 1627654 - RNA, 19 nt, Artificial Sequence
  Description of Artificial Sequence: Synthetic oligonucleotide
gcccauacuucucugaguc

SEQ ID NO: 1627655 - RNA, 19 nt, Artificial Sequence
  Description of Artificial Sequence: Synthetic oligonucleotide
uugcacugguacccaagaa

SEQ ID NO: 1627656 - RNA, 19 nt, Artificial Sequence
  Description of Artificial Sequence: Synthetic oligonucleotide
cucacuagauuagccugag

SEQ ID NO: 1627657 - RNA, 19 nt, Artificial Sequence
  Description of Artificial Sequence: Synthetic oligonucleotide
aggugggaccuagugccgc

SEQ ID NO: 1627658 - RNA, 19 nt, Artificial Sequence
  Description of Artificial Sequence: Synthetic oligonucleotide
agcagaauucgcuguugaa

SEQ ID NO: 1627659 - RNA, 19 nt, Artificial Sequence
  Description of Artificial Sequence: Synthetic oligonucleotide
caguggaacuaagaccagc

SEQ ID NO: 1627660 - RNA, 19 nt, Artificial Sequence
  Description of Artificial Sequence: Synthetic oligonucleotide
gcuuaaguccaguccucgg

SEQ ID NO: 1627661 - RNA, 19 nt, Artificial Sequence
  Description of Artificial Sequence: Synthetic oligonucleotide
ugacagagcugcagccugu

SEQ ID NO: 1627662 - RNA, 19 nt, Artificial Sequence
  Description of Artificial Sequence: Synthetic oligonucleotide
cauccauaauaauguccuc

SEQ ID NO: 1627663 - RNA, 19 nt, Artificial Sequence
  Description of Artificial Sequence: Synthetic oligonucleotide
gguacccaagaagaggggc

SEQ ID NO: 1627664 - RNA, 19 nt, Artificial Sequence
  Description of Artificial Sequence: Synthetic oligonucleotide
accaccaagccgcugcuua

SEQ ID NO: 1627665 - RNA, 19 nt, Artificial Sequence
  Description of Artificial Sequence: Synthetic oligonucleotide
ugguugaucaagggcguuc

SEQ ID NO: 1627666 - RNA, 19 nt, Artificial Sequence
  Description of Artificial Sequence: Synthetic oligonucleotide
ccaagaucauacucacuag

SEQ ID NO: 1627667 - RNA, 19 nt, Artificial Sequence
  Description of Artificial Sequence: Synthetic oligonucleotide
gugaucacaccaugucuga

SEQ ID NO: 1627668 - RNA, 19 nt, Artificial Sequence
  Description of Artificial Sequence: Synthetic oligonucleotide
gaggcggaggagaaggaca

SEQ ID NO: 1627669 - RNA, 19 nt, Artificial Sequence
  Description of Artificial Sequence: Synthetic oligonucleotide
gucaucauuagcccauacu

SEQ ID NO: 1627670 - RNA, 19 nt, Artificial Sequence
  Description of Artificial Sequence: Synthetic oligonucleotide
acucacuagauuagccuga

SEQ ID NO: 1627671 - RNA, 19 nt, Artificial Sequence
  Description of Artificial Sequence: Synthetic oligonucleotide
ccucuagacacccaaccac

SEQ ID NO: 1627672 - RNA, 19 nt, Artificial Sequence
  Description of Artificial Sequence: Synthetic oligonucleotide
ggcuggugaccucacagug

SEQ ID NO: 1627673 - RNA, 19 nt, Artificial Sequence
  Description of Artificial Sequence: Synthetic oligonucleotide
uguuugcacugguacccaa

SEQ ID NO: 1627674 - RNA, 19 nt, Artificial Sequence
  Description of Artificial Sequence: Synthetic oligonucleotide
gcaguguuguugugaaagc

SEQ ID NO: 1627675 - RNA, 19 nt, Artificial Sequence
  Description of Artificial Sequence: Synthetic oligonucleotide
ucacuagauuagccugagu

SEQ ID NO: 1627676 - RNA, 19 nt, Artificial Sequence
  Description of Artificial Sequence: Synthetic oligonucleotide
cagcauauaauacuuugau

SEQ ID NO: 1627677 - RNA, 19 nt, Artificial Sequence
  Description of Artificial Sequence: Synthetic oligonucleotide
gguugaucaagggcguucc

SEQ ID NO: 1627678 - RNA, 19 nt, Artificial Sequence
  Description of Artificial Sequence: Synthetic oligonucleotide
gacacacaugcuuucuggu

SEQ ID NO: 1627679 - RNA, 19 nt, Artificial Sequence
  Description of Artificial Sequence: Synthetic oligonucleotide
agccugaguuuucaucuau

SEQ ID NO: 1627680 - RNA, 19 nt, Artificial Sequence
  Description of Artificial Sequence: Synthetic oligonucleotide
gaugugacacacaugcuuu

SEQ ID NO: 1627681 - RNA, 19 nt, Artificial Sequence
  Description of Artificial Sequence: Synthetic oligonucleotide
aagccgcugcuuaagucca

SEQ ID NO: 1627682 - RNA, 19 nt, Artificial Sequence
  Description of Artificial Sequence: Synthetic oligonucleotide
acacacuuaguaugcuguu

SEQ ID NO: 1627683 - RNA, 19 nt, Artificial Sequence
  Description of Artificial Sequence: Synthetic oligonucleotide
ccaccaaagaugacaggag

SEQ ID NO: 1627684 - RNA, 19 nt, Artificial Sequence
  Description of Artificial Sequence: Synthetic oligonucleotide
aggcggaggagaaggacag

SEQ ID NO: 1627685 - RNA, 19 nt, Artificial Sequence
  Description of Artificial Sequence: Synthetic oligonucleotide
uccgcucugguccgcgcug

SEQ ID NO: 1627686 - RNA, 19 nt, Artificial Sequence
  Description of Artificial Sequence: Synthetic oligonucleotide
accaagccgcugcuuaagu

SEQ ID NO: 1627687 - RNA, 19 nt, Artificial Sequence
  Description of Artificial Sequence: Synthetic oligonucleotide
guacccaagaagaggggca

SEQ ID NO: 1627688 - RNA, 19 nt, Artificial Sequence
  Description of Artificial Sequence: Synthetic oligonucleotide
cacacagcauauaauacuu

SEQ ID NO: 1627689 - RNA, 19 nt, Artificial Sequence
  Description of Artificial Sequence: Synthetic oligonucleotide
ggauucuuaguuuuacuau

SEQ ID NO: 1627690 - RNA, 19 nt, Artificial Sequence
  Description of Artificial Sequence: Synthetic oligonucleotide
agugguugaucaagggcgu

SEQ ID NO: 1627691 - RNA, 19 nt, Artificial Sequence
  Description of Artificial Sequence: Synthetic oligonucleotide
gggcguuccaagaucauac

SEQ ID NO: 1627692 - RNA, 19 nt, Artificial Sequence
  Description of Artificial Sequence: Synthetic oligonucleotide
aaguccaguccucggccuu

SEQ ID NO: 1627693 - RNA, 19 nt, Artificial Sequence
  Description of Artificial Sequence: Synthetic oligonucleotide
uccuaucgcgcccgccgcc

SEQ ID NO: 1627694 - RNA, 19 nt, Artificial Sequence
  Description of Artificial Sequence: Synthetic oligonucleotide
cauccuguaaacucagaau

SEQ ID NO: 1627695 - RNA, 19 nt, Artificial Sequence
  Description of Artificial Sequence: Synthetic oligonucleotide
gcagauuguucugggaagc

SEQ ID NO: 1627696 - RNA, 19 nt, Artificial Sequence
  Description of Artificial Sequence: Synthetic oligonucleotide
gcuuucugguuggugacag

SEQ ID NO: 1627697 - RNA, 19 nt, Artificial Sequence
  Description of Artificial Sequence: Synthetic oligonucleotide
caguguuguugugaaagca

SEQ ID NO: 1627698 - RNA, 19 nt, Artificial Sequence
  Description of Artificial Sequence: Synthetic oligonucleotide
ugggaccuagugccgcaga

SEQ ID NO: 1627699 - RNA, 19 nt, Artificial Sequence
  Description of Artificial Sequence: Synthetic oligonucleotide
gugccgcagauuguucugg

SEQ ID NO: 1627700 - RNA, 19 nt, Artificial Sequence
  Description of Artificial Sequence: Synthetic oligonucleotide
aauguccucuagacaccca

SEQ ID NO: 1627701 - RNA, 19 nt, Artificial Sequence
  Description of Artificial Sequence: Synthetic oligonucleotide
aguccaguccucggccuuc

SEQ ID NO: 1627702 - RNA, 19 nt, Artificial Sequence
  Description of Artificial Sequence: Synthetic oligonucleotide
gcacuaaauuggaaagcag

SEQ ID NO: 1627703 - RNA, 19 nt, Artificial Sequence
  Description of Artificial Sequence: Synthetic oligonucleotide
agaggggcacuaaauugga

SEQ ID NO: 1627704 - RNA, 19 nt, Artificial Sequence
  Description of Artificial Sequence: Synthetic oligonucleotide
cugguuggugacaguccac

SEQ ID NO: 1627705 - RNA, 19 nt, Artificial Sequence
  Description of Artificial Sequence: Synthetic oligonucleotide
ccuccuaucgcgcccgccg

SEQ ID NO: 1627706 - RNA, 19 nt, Artificial Sequence
  Description of Artificial Sequence: Synthetic oligonucleotide
gcagaauucgcuguugaaa

SEQ ID NO: 1627707 - RNA, 19 nt, Artificial Sequence
  Description of Artificial Sequence: Synthetic oligonucleotide
ucugguccgcgcugccuca

SEQ ID NO: 1627708 - RNA, 19 nt, Artificial Sequence
  Description of Artificial Sequence: Synthetic oligonucleotide
cagggcguccaucgugggg

SEQ ID NO: 1627709 - RNA, 19 nt, Artificial Sequence
  Description of Artificial Sequence: Synthetic oligonucleotide
gcacaaagagacacauugc

SEQ ID NO: 1627710 - RNA, 19 nt, Artificial Sequence
  Description of Artificial Sequence: Synthetic oligonucleotide
cauuagcccauacuucucu

SEQ ID NO: 1627711 - RNA, 19 nt, Artificial Sequence
  Description of Artificial Sequence: Synthetic oligonucleotide
ugagucagcugggcuggug

SEQ ID NO: 1627712 - RNA, 19 nt, Artificial Sequence
  Description of Artificial Sequence: Synthetic oligonucleotide
gcagucaccggcccgcgcc

SEQ ID NO: 1627713 - RNA, 19 nt, Artificial Sequence
  Description of Artificial Sequence: Synthetic oligonucleotide
gggcacuaaauuggaaagc

SEQ ID NO: 1627714 - RNA, 19 nt, Artificial Sequence
  Description of Artificial Sequence: Synthetic oligonucleotide
cuccuaucgcgcccgccgc

SEQ ID NO: 1627715 - RNA, 19 nt, Artificial Sequence
  Description of Artificial Sequence: Synthetic oligonucleotide
guggauucuuaguuuuacu

SEQ ID NO: 1627716 - RNA, 19 nt, Artificial Sequence
  Description of Artificial Sequence: Synthetic oligonucleotide
cagccauguugaagccugg

SEQ ID NO: 1627717 - RNA, 19 nt, Artificial Sequence
  Description of Artificial Sequence: Synthetic oligonucleotide
cucuaccagggaaauauau

SEQ ID NO: 1627718 - RNA, 19 nt, Artificial Sequence
  Description of Artificial Sequence: Synthetic oligonucleotide
cagcagaauucgcuguuga

SEQ ID NO: 1627719 - RNA, 19 nt, Artificial Sequence
  Description of Artificial Sequence: Synthetic oligonucleotide
uucuagcauacagucuguu

SEQ ID NO: 1627720 - RNA, 19 nt, Artificial Sequence
  Description of Artificial Sequence: Synthetic oligonucleotide
caccaaagaugacaggagu

SEQ ID NO: 1627721 - RNA, 19 nt, Artificial Sequence
  Description of Artificial Sequence: Synthetic oligonucleotide
cagugaucacaccaugucu

SEQ ID NO: 1627722 - RNA, 19 nt, Artificial Sequence
  Description of Artificial Sequence: Synthetic oligonucleotide
cugccucaaccgcaucaag

SEQ ID NO: 1627723 - RNA, 19 nt, Artificial Sequence
  Description of Artificial Sequence: Synthetic oligonucleotide
gcguuccaagaucauacuc

SEQ ID NO: 1627724 - RNA, 19 nt, Artificial Sequence
  Description of Artificial Sequence: Synthetic oligonucleotide
cuuauggugcugcaguguu

SEQ ID NO: 1627725 - RNA, 19 nt, Artificial Sequence
  Description of Artificial Sequence: Synthetic oligonucleotide
acaguccaccaaagaugac

SEQ ID NO: 1627726 - RNA, 19 nt, Artificial Sequence
  Description of Artificial Sequence: Synthetic oligonucleotide
cuaaauuggaaagcagauu

SEQ ID NO: 1627727 - RNA, 19 nt, Artificial Sequence
  Description of Artificial Sequence: Synthetic oligonucleotide
gcuguugaaaaggacaaau

SEQ ID NO: 1627728 - RNA, 19 nt, Artificial Sequence
  Description of Artificial Sequence: Synthetic oligonucleotide
cgcugcuuaaguccagucc

SEQ ID NO: 1627729 - RNA, 19 nt, Artificial Sequence
  Description of Artificial Sequence: Synthetic oligonucleotide
ccaugucugaaggugggac

SEQ ID NO: 1627730 - RNA, 19 nt, Artificial Sequence
  Description of Artificial Sequence: Synthetic oligonucleotide
cuucaaacuccugguagua

SEQ ID NO: 1627731 - RNA, 19 nt, Artificial Sequence
  Description of Artificial Sequence: Synthetic oligonucleotide
gcacaaacacacuuaguau

SEQ ID NO: 1627732 - RNA, 19 nt, Artificial Sequence
  Description of Artificial Sequence: Synthetic oligonucleotide
cuggugaccucacagugau

SEQ ID NO: 1627733 - RNA, 19 nt, Artificial Sequence
  Description of Artificial Sequence: Synthetic oligonucleotide
ggguagaggacaucuuucu

SEQ ID NO: 1627734 - RNA, 19 nt, Artificial Sequence
  Description of Artificial Sequence: Synthetic oligonucleotide
accaugucugaagguggga

SEQ ID NO: 1627735 - RNA, 19 nt, Artificial Sequence
  Description of Artificial Sequence: Synthetic oligonucleotide
caccucaaauuuuacucau

SEQ ID NO: 1627736 - RNA, 19 nt, Artificial Sequence
  Description of Artificial Sequence: Synthetic oligonucleotide
caccgccuccuaucgcgcc

SEQ ID NO: 1627737 - RNA, 19 nt, Artificial Sequence
  Description of Artificial Sequence: Synthetic oligonucleotide
cagucaccggcccgcgccc

SEQ ID NO: 1627738 - RNA, 19 nt, Artificial Sequence
  Description of Artificial Sequence: Synthetic oligonucleotide
agggcguuccaagaucaua

SEQ ID NO: 1627739 - RNA, 19 nt, Artificial Sequence
  Description of Artificial Sequence: Synthetic oligonucleotide
cuaucgcgcccgccgccgg

SEQ ID NO: 1627740 - RNA, 19 nt, Artificial Sequence
  Description of Artificial Sequence: Synthetic oligonucleotide
gguccgcgcugccucaacc

SEQ ID NO: 1627741 - RNA, 19 nt, Artificial Sequence
  Description of Artificial Sequence: Synthetic oligonucleotide
caggagugcagacaagcau

SEQ ID NO: 1627742 - RNA, 19 nt, Artificial Sequence
  Description of Artificial Sequence: Synthetic oligonucleotide
accggcccgcgcccgcggc

SEQ ID NO: 1627743 - RNA, 19 nt, Artificial Sequence
  Description of Artificial Sequence: Synthetic oligonucleotide
cgcgaagcucucuucuucc

SEQ ID NO: 1627744 - RNA, 19 nt, Artificial Sequence
  Description of Artificial Sequence: Synthetic oligonucleotide
ccaagccgcugcuuaaguc

SEQ ID NO: 1627745 - RNA, 19 nt, Artificial Sequence
  Description of Artificial Sequence: Synthetic oligonucleotide
accucaaauuuuacucauu

SEQ ID NO: 1627746 - RNA, 19 nt, Artificial Sequence
  Description of Artificial Sequence: Synthetic oligonucleotide
aguccucggccuuccuuuu

SEQ ID NO: 1627747 - RNA, 19 nt, Artificial Sequence
  Description of Artificial Sequence: Synthetic oligonucleotide
gccugggauacgcuccagc

SEQ ID NO: 1627748 - RNA, 19 nt, Artificial Sequence
  Description of Artificial Sequence: Synthetic oligonucleotide
uggugaccucacagugauc

SEQ ID NO: 1627749 - RNA, 19 nt, Artificial Sequence
  Description of Artificial Sequence: Synthetic oligonucleotide
agacacccaaccacagcau

SEQ ID NO: 1627750 - RNA, 19 nt, Artificial Sequence
  Description of Artificial Sequence: Synthetic oligonucleotide
agaagacgacuugcacaga

SEQ ID NO: 1627751 - RNA, 19 nt, Artificial Sequence
  Description of Artificial Sequence: Synthetic oligonucleotide
ugguccgcgcugccucaac

SEQ ID NO: 1627752 - RNA, 19 nt, Artificial Sequence
  Description of Artificial Sequence: Synthetic oligonucleotide
aagggcguuccaagaucau

SEQ ID NO: 1627753 - RNA, 19 nt, Artificial Sequence
  Description of Artificial Sequence: Synthetic oligonucleotide
gugggaccuagugccgcag

SEQ ID NO: 1627754 - RNA, 19 nt, Artificial Sequence
  Description of Artificial Sequence: Synthetic oligonucleotide
guaagaucgggaguuccuu

SEQ ID NO: 1627755 - RNA, 19 nt, Artificial Sequence
  Description of Artificial Sequence: Synthetic oligonucleotide
gaacuaagaccagcagaau

SEQ ID NO: 1627756 - RNA, 19 nt, Artificial Sequence
  Description of Artificial Sequence: Synthetic oligonucleotide
caaacacacuuaguaugcu

SEQ ID NO: 1627757 - RNA, 19 nt, Artificial Sequence
  Description of Artificial Sequence: Synthetic oligonucleotide
gcgcgaagcucucuucuuc

SEQ ID NO: 1627758 - RNA, 19 nt, Artificial Sequence
  Description of Artificial Sequence: Synthetic oligonucleotide
ccgcagauuguucugggaa

SEQ ID NO: 1627759 - RNA, 19 nt, Artificial Sequence
  Description of Artificial Sequence: Synthetic oligonucleotide
ggugggaccuagugccgca

SEQ ID NO: 1627760 - RNA, 19 nt, Artificial Sequence
  Description of Artificial Sequence: Synthetic oligonucleotide
gcuggugaccucacaguga

SEQ ID NO: 1627761 - RNA, 19 nt, Artificial Sequence
  Description of Artificial Sequence: Synthetic oligonucleotide
accuagugccgcagauugu

SEQ ID NO: 1627762 - RNA, 19 nt, Artificial Sequence
  Description of Artificial Sequence: Synthetic oligonucleotide
ccagcagaauucgcuguug

SEQ ID NO: 1627763 - RNA, 19 nt, Artificial Sequence
  Description of Artificial Sequence: Synthetic oligonucleotide
gcgaagcucucuucuucca

SEQ ID NO: 1627764 - RNA, 19 nt, Artificial Sequence
  Description of Artificial Sequence: Synthetic oligonucleotide
ccuaucgcgcccgccgccg

SEQ ID NO: 1627765 - RNA, 19 nt, Artificial Sequence
  Description of Artificial Sequence: Synthetic oligonucleotide
ccuguaaacucagaauagu

SEQ ID NO: 1627766 - RNA, 19 nt, Artificial Sequence
  Description of Artificial Sequence: Synthetic oligonucleotide
ccucugcaauagcuggaac

SEQ ID NO: 1627767 - RNA, 19 nt, Artificial Sequence
  Description of Artificial Sequence: Synthetic oligonucleotide
gucaccggcccgcgcccgc

SEQ ID NO: 1627768 - RNA, 19 nt, Artificial Sequence
  Description of Artificial Sequence: Synthetic oligonucleotide
cagauuguucugggaagcu

SEQ ID NO: 1627769 - RNA, 19 nt, Artificial Sequence
  Description of Artificial Sequence: Synthetic oligonucleotide
gccgcagauuguucuggga

SEQ ID NO: 1627770 - RNA, 19 nt, Artificial Sequence
  Description of Artificial Sequence: Synthetic oligonucleotide
agccugggauacgcuccag

SEQ ID NO: 1627771 - RNA, 19 nt, Artificial Sequence
  Description of Artificial Sequence: Synthetic oligonucleotide
agccgcugcuuaaguccag

SEQ ID NO: 1627772 - RNA, 19 nt, Artificial Sequence
  Description of Artificial Sequence: Synthetic oligonucleotide
ggguauaugugaguuuauu

SEQ ID NO: 1627773 - RNA, 19 nt, Artificial Sequence
  Description of Artificial Sequence: Synthetic oligonucleotide
cgcaguucucacaacuaaa

SEQ ID NO: 1627774 - RNA, 19 nt, Artificial Sequence
  Description of Artificial Sequence: Synthetic oligonucleotide
cccauacuucucugaguca

SEQ ID NO: 1627775 - RNA, 19 nt, Artificial Sequence
  Description of Artificial Sequence: Synthetic oligonucleotide
ggcuccgcucugguccgcg

SEQ ID NO: 1627776 - RNA, 19 nt, Artificial Sequence
  Description of Artificial Sequence: Synthetic oligonucleotide
ccgcugcuuaaguccaguc

SEQ ID NO: 1627777 - RNA, 19 nt, Artificial Sequence
  Description of Artificial Sequence: Synthetic oligonucleotide
cugucaucauuagcccaua

SEQ ID NO: 1627778 - RNA, 19 nt, Artificial Sequence
  Description of Artificial Sequence: Synthetic oligonucleotide
cugugaaugugagcagcau

SEQ ID NO: 1627779 - RNA, 19 nt, Artificial Sequence
  Description of Artificial Sequence: Synthetic oligonucleotide
caccggcccgcgcccgcgg

SEQ ID NO: 1627780 - RNA, 19 nt, Artificial Sequence
  Description of Artificial Sequence: Synthetic oligonucleotide
ggaacucaucauccauaau

SEQ ID NO: 1627781 - RNA, 19 nt, Artificial Sequence
  Description of Artificial Sequence: Synthetic oligonucleotide
gggaccuagugccgcagau

SEQ ID NO: 1627782 - RNA, 19 nt, Artificial Sequence
  Description of Artificial Sequence: Synthetic oligonucleotide
gccugaguuuucaucuaua

SEQ ID NO: 1627783 - RNA, 19 nt, Artificial Sequence
  Description of Artificial Sequence: Synthetic oligonucleotide
cccaagaagaggggcacua

SEQ ID NO: 1627784 - RNA, 19 nt, Artificial Sequence
  Description of Artificial Sequence: Synthetic oligonucleotide
cuccgcucugguccgcgcu

SEQ ID NO: 1627785 - RNA, 19 nt, Artificial Sequence
  Description of Artificial Sequence: Synthetic oligonucleotide
ccgccuccuaucgcgcccg

SEQ ID NO: 1627786 - RNA, 19 nt, Artificial Sequence
  Description of Artificial Sequence: Synthetic oligonucleotide
ccaccaagccgcugcuuaa

SEQ ID NO: 1627787 - RNA, 19 nt, Artificial Sequence
  Description of Artificial Sequence: Synthetic oligonucleotide
gccuccuaucgcgcccgcc

SEQ ID NO: 1627788 - RNA, 19 nt, Artificial Sequence
  Description of Artificial Sequence: Synthetic oligonucleotide
ccgcgcugccucaaccgca

SEQ ID NO: 1627789 - RNA, 19 nt, Artificial Sequence
  Description of Artificial Sequence: Synthetic oligonucleotide
gugguugaucaagggcguu

SEQ ID NO: 1627790 - RNA, 19 nt, Artificial Sequence
  Description of Artificial Sequence: Synthetic oligonucleotide
ggaccuagugccgcagauu

SEQ ID NO: 1627791 - RNA, 19 nt, Artificial Sequence
  Description of Artificial Sequence: Synthetic oligonucleotide
gggguauaugugaguuuau

SEQ ID NO: 1627792 - RNA, 19 nt, Artificial Sequence
  Description of Artificial Sequence: Synthetic oligonucleotide
cugguccgcgcugccucaa

SEQ ID NO: 1627793 - RNA, 19 nt, Artificial Sequence
  Description of Artificial Sequence: Synthetic oligonucleotide
gccgcugcuuaaguccagu

SEQ ID NO: 1627794 - RNA, 19 nt, Artificial Sequence
  Description of Artificial Sequence: Synthetic oligonucleotide
ccgcagucaccggcccgcg

SEQ ID NO: 1627795 - RNA, 19 nt, Artificial Sequence
  Description of Artificial Sequence: Synthetic oligonucleotide
cugagucagcugggcuggu

SEQ ID NO: 1627796 - RNA, 19 nt, Artificial Sequence
  Description of Artificial Sequence: Synthetic oligonucleotide
caccaccaagccgcugcuu

SEQ ID NO: 1627797 - RNA, 19 nt, Artificial Sequence
  Description of Artificial Sequence: Synthetic oligonucleotide
cgccuccuaucgcgcccgc

SEQ ID NO: 1627798 - RNA, 19 nt, Artificial Sequence
  Description of Artificial Sequence: Synthetic oligonucleotide
cccgcgcccgcggccucac

SEQ ID NO: 1627799 - RNA, 19 nt, Artificial Sequence
  Description of Artificial Sequence: Synthetic oligonucleotide
aagaucaucaaucacaaca

SEQ ID NO: 1627800 - RNA, 19 nt, Artificial Sequence
  Description of Artificial Sequence: Synthetic oligonucleotide
aauuucuuuacuuucagga

SEQ ID NO: 1627801 - RNA, 19 nt, Artificial Sequence
  Description of Artificial Sequence: Synthetic oligonucleotide
auaaauucgcuuuucaaac

SEQ ID NO: 1627802 - RNA, 19 nt, Artificial Sequence
  Description of Artificial Sequence: Synthetic oligonucleotide
ucuguuuugauccugcggg

SEQ ID NO: 1627803 - RNA, 19 nt, Artificial Sequence
  Description of Artificial Sequence: Synthetic oligonucleotide
aaaggagcaguauaccucg

SEQ ID NO: 1627804 - RNA, 19 nt, Artificial Sequence
  Description of Artificial Sequence: Synthetic oligonucleotide
aaccgaaacaucugggccc

SEQ ID NO: 1627805 - RNA, 19 nt, Artificial Sequence
  Description of Artificial Sequence: Synthetic oligonucleotide
uuagacaucagauccgagg

SEQ ID NO: 1627806 - RNA, 19 nt, Artificial Sequence
  Description of Artificial Sequence: Synthetic oligonucleotide
ucaacaugaagcuuuaacu

SEQ ID NO: 1627807 - RNA, 19 nt, Artificial Sequence
  Description of Artificial Sequence: Synthetic oligonucleotide
ucguaaauaaucuuucagc

SEQ ID NO: 1627808 - RNA, 19 nt, Artificial Sequence
  Description of Artificial Sequence: Synthetic oligonucleotide
aguggcuaaagaccgaagc

SEQ ID NO: 1627809 - RNA, 19 nt, Artificial Sequence
  Description of Artificial Sequence: Synthetic oligonucleotide
aucaacaugaagcuuuaac

SEQ ID NO: 1627810 - RNA, 19 nt, Artificial Sequence
  Description of Artificial Sequence: Synthetic oligonucleotide
uucguaaauaaucuuucag

SEQ ID NO: 1627811 - RNA, 19 nt, Artificial Sequence
  Description of Artificial Sequence: Synthetic oligonucleotide
uuuauuagacaucuccuga

SEQ ID NO: 1627812 - RNA, 19 nt, Artificial Sequence
  Description of Artificial Sequence: Synthetic oligonucleotide
aauaaaagaccugccugcc

SEQ ID NO: 1627813 - RNA, 19 nt, Artificial Sequence
  Description of Artificial Sequence: Synthetic oligonucleotide
auucuagugacuucaggac

SEQ ID NO: 1627814 - RNA, 19 nt, Artificial Sequence
  Description of Artificial Sequence: Synthetic oligonucleotide
gauguuagcauccgugagg

SEQ ID NO: 1627815 - RNA, 19 nt, Artificial Sequence
  Description of Artificial Sequence: Synthetic oligonucleotide
uccgugaccccacagaggg

SEQ ID NO: 1627816 - RNA, 19 nt, Artificial Sequence
  Description of Artificial Sequence: Synthetic oligonucleotide
ugaaguguguugcugacug

SEQ ID NO: 1627817 - RNA, 19 nt, Artificial Sequence
  Description of Artificial Sequence: Synthetic oligonucleotide
gaauccaacacccagggga

SEQ ID NO: 1627818 - RNA, 19 nt, Artificial Sequence
  Description of Artificial Sequence: Synthetic oligonucleotide
ucaaaucccaauuucauua

SEQ ID NO: 1627819 - RNA, 19 nt, Artificial Sequence
  Description of Artificial Sequence: Synthetic oligonucleotide
uuucauuaucaacaugaag

SEQ ID NO: 1627820 - RNA, 19 nt, Artificial Sequence
  Description of Artificial Sequence: Synthetic oligonucleotide
gacuguacuuuucuaacgg

SEQ ID NO: 1627821 - RNA, 19 nt, Artificial Sequence
  Description of Artificial Sequence: Synthetic oligonucleotide
agucccaucauuguuauuc

SEQ ID NO: 1627822 - RNA, 19 nt, Artificial Sequence
  Description of Artificial Sequence: Synthetic oligonucleotide
uuuacuuucaggagguccu

SEQ ID NO: 1627823 - RNA, 19 nt, Artificial Sequence
  Description of Artificial Sequence: Synthetic oligonucleotide
guguuuauuagacaucucc

SEQ ID NO: 1627824 - RNA, 19 nt, Artificial Sequence
  Description of Artificial Sequence: Synthetic oligonucleotide
uguaaccgaaacaucuggg

SEQ ID NO: 1627825 - RNA, 19 nt, Artificial Sequence
  Description of Artificial Sequence: Synthetic oligonucleotide
aguaugcagaaccaguguc

SEQ ID NO: 1627826 - RNA, 19 nt, Artificial Sequence
  Description of Artificial Sequence: Synthetic oligonucleotide
uuuucguaaauaaucuuuc

SEQ ID NO: 1627827 - RNA, 19 nt, Artificial Sequence
  Description of Artificial Sequence: Synthetic oligonucleotide
caauaaaagaccugccugc

SEQ ID NO: 1627828 - RNA, 19 nt, Artificial Sequence
  Description of Artificial Sequence: Synthetic oligonucleotide
ucaagaaaggaaaaguguu

SEQ ID NO: 1627829 - RNA, 19 nt, Artificial Sequence
  Description of Artificial Sequence: Synthetic oligonucleotide
uaaagaccgaagcaugucc

SEQ ID NO: 1627830 - RNA, 19 nt, Artificial Sequence
  Description of Artificial Sequence: Synthetic oligonucleotide
gguaaugggauauaaauuc

SEQ ID NO: 1627831 - RNA, 19 nt, Artificial Sequence
  Description of Artificial Sequence: Synthetic oligonucleotide
acugcacgcacuuugcucg

SEQ ID NO: 1627832 - RNA, 19 nt, Artificial Sequence
  Description of Artificial Sequence: Synthetic oligonucleotide
uagacaucagauccgagga

SEQ ID NO: 1627833 - RNA, 19 nt, Artificial Sequence
  Description of Artificial Sequence: Synthetic oligonucleotide
uaaugggauauaaauucgc

SEQ ID NO: 1627834 - RNA, 19 nt, Artificial Sequence
  Description of Artificial Sequence: Synthetic oligonucleotide
cuaacgggcugcaugaggg

SEQ ID NO: 1627835 - RNA, 19 nt, Artificial Sequence
  Description of Artificial Sequence: Synthetic oligonucleotide
uaaccgaaacaucugggcc

SEQ ID NO: 1627836 - RNA, 19 nt, Artificial Sequence
  Description of Artificial Sequence: Synthetic oligonucleotide
ucaguucucagucagugaa

SEQ ID NO: 1627837 - RNA, 19 nt, Artificial Sequence
  Description of Artificial Sequence: Synthetic oligonucleotide
accacuuagacaucagauc

SEQ ID NO: 1627838 - RNA, 19 nt, Artificial Sequence
  Description of Artificial Sequence: Synthetic oligonucleotide
aaaucccaauuucauuauc

SEQ ID NO: 1627839 - RNA, 19 nt, Artificial Sequence
  Description of Artificial Sequence: Synthetic oligonucleotide
ugaagcuuuaacucucuug

SEQ ID NO: 1627840 - RNA, 19 nt, Artificial Sequence
  Description of Artificial Sequence: Synthetic oligonucleotide
auggcugaauccaacaccc

SEQ ID NO: 1627841 - RNA, 19 nt, Artificial Sequence
  Description of Artificial Sequence: Synthetic oligonucleotide
auguaaccgaaacaucugg

SEQ ID NO: 1627842 - RNA, 19 nt, Artificial Sequence
  Description of Artificial Sequence: Synthetic oligonucleotide
aauuugcuccagucaaauc

SEQ ID NO: 1627843 - RNA, 19 nt, Artificial Sequence
  Description of Artificial Sequence: Synthetic oligonucleotide
aaacagguucuugacuagc

SEQ ID NO: 1627844 - RNA, 19 nt, Artificial Sequence
  Description of Artificial Sequence: Synthetic oligonucleotide
uuucuaacgggcugcauga

SEQ ID NO: 1627845 - RNA, 19 nt, Artificial Sequence
  Description of Artificial Sequence: Synthetic oligonucleotide
uuaacucucuuguccaaag

SEQ ID NO: 1627846 - RNA, 19 nt, Artificial Sequence
  Description of Artificial Sequence: Synthetic oligonucleotide
uaaauucgcuuuucaaacc

SEQ ID NO: 1627847 - RNA, 19 nt, Artificial Sequence
  Description of Artificial Sequence: Synthetic oligonucleotide
gaagacuggaagcuccagg

SEQ ID NO: 1627848 - RNA, 19 nt, Artificial Sequence
  Description of Artificial Sequence: Synthetic oligonucleotide
aacaucugggcccgggccg

SEQ ID NO: 1627849 - RNA, 19 nt, Artificial Sequence
  Description of Artificial Sequence: Synthetic oligonucleotide
gaagcuuuaacucucuugu

SEQ ID NO: 1627850 - RNA, 19 nt, Artificial Sequence
  Description of Artificial Sequence: Synthetic oligonucleotide
uguuauucccuacucccug

SEQ ID NO: 1627851 - RNA, 19 nt, Artificial Sequence
  Description of Artificial Sequence: Synthetic oligonucleotide
cagaagaucaucaaucaca

SEQ ID NO: 1627852 - RNA, 19 nt, Artificial Sequence
  Description of Artificial Sequence: Synthetic oligonucleotide
caaaccuccuccuaauggc

SEQ ID NO: 1627853 - RNA, 19 nt, Artificial Sequence
  Description of Artificial Sequence: Synthetic oligonucleotide
ucuaacgggcugcaugagg

SEQ ID NO: 1627854 - RNA, 19 nt, Artificial Sequence
  Description of Artificial Sequence: Synthetic oligonucleotide
aaagaccgaagcauguccg

SEQ ID NO: 1627855 - RNA, 19 nt, Artificial Sequence
  Description of Artificial Sequence: Synthetic oligonucleotide
agcaauaaaagaccugccu

SEQ ID NO: 1627856 - RNA, 19 nt, Artificial Sequence
  Description of Artificial Sequence: Synthetic oligonucleotide
acucaaaacagguucuuga

SEQ ID NO: 1627857 - RNA, 19 nt, Artificial Sequence
  Description of Artificial Sequence: Synthetic oligonucleotide
accacaaaccuucuugaag

SEQ ID NO: 1627858 - RNA, 19 nt, Artificial Sequence
  Description of Artificial Sequence: Synthetic oligonucleotide
aaucccaauuucauuauca

SEQ ID NO: 1627859 - RNA, 19 nt, Artificial Sequence
  Description of Artificial Sequence: Synthetic oligonucleotide
augaauuugcuccagucaa

SEQ ID NO: 1627860 - RNA, 19 nt, Artificial Sequence
  Description of Artificial Sequence: Synthetic oligonucleotide
ucuugaaguguguugcuga

SEQ ID NO: 1627861 - RNA, 19 nt, Artificial Sequence
  Description of Artificial Sequence: Synthetic oligonucleotide
guaaugggauauaaauucg

SEQ ID NO: 1627862 - RNA, 19 nt, Artificial Sequence
  Description of Artificial Sequence: Synthetic oligonucleotide
uauuagacaucuccugaac

SEQ ID NO: 1627863 - RNA, 19 nt, Artificial Sequence
  Description of Artificial Sequence: Synthetic oligonucleotide
uccgacaugcaaaccacag

SEQ ID NO: 1627864 - RNA, 19 nt, Artificial Sequence
  Description of Artificial Sequence: Synthetic oligonucleotide
agaaccaguguccaagugu

SEQ ID NO: 1627865 - RNA, 19 nt, Artificial Sequence
  Description of Artificial Sequence: Synthetic oligonucleotide
guuagcauccgugagguug

SEQ ID NO: 1627866 - RNA, 19 nt, Artificial Sequence
  Description of Artificial Sequence: Synthetic oligonucleotide
uucucagucagugaaggca

SEQ ID NO: 1627867 - RNA, 19 nt, Artificial Sequence
  Description of Artificial Sequence: Synthetic oligonucleotide
agauguaaccgaaacaucu

SEQ ID NO: 1627868 - RNA, 19 nt, Artificial Sequence
  Description of Artificial Sequence: Synthetic oligonucleotide
uucuagugacuucaggacu

SEQ ID NO: 1627869 - RNA, 19 nt, Artificial Sequence
  Description of Artificial Sequence: Synthetic oligonucleotide
uuucguaaauaaucuuuca

SEQ ID NO: 1627870 - RNA, 19 nt, Artificial Sequence
  Description of Artificial Sequence: Synthetic oligonucleotide
guaaccgaaacaucugggc

SEQ ID NO: 1627871 - RNA, 19 nt, Artificial Sequence
  Description of Artificial Sequence: Synthetic oligonucleotide
cugaauccaacacccaggg

SEQ ID NO: 1627872 - RNA, 19 nt, Artificial Sequence
  Description of Artificial Sequence: Synthetic oligonucleotide
aaugggauauaaauucgcu

SEQ ID NO: 1627873 - RNA, 19 nt, Artificial Sequence
  Description of Artificial Sequence: Synthetic oligonucleotide
acgcacuuugcucgaaugc

SEQ ID NO: 1627874 - RNA, 19 nt, Artificial Sequence
  Description of Artificial Sequence: Synthetic oligonucleotide
uccuacauggugaagcauc

SEQ ID NO: 1627875 - RNA, 19 nt, Artificial Sequence
  Description of Artificial Sequence: Synthetic oligonucleotide
cauuguuauucccuacucc

SEQ ID NO: 1627876 - RNA, 19 nt, Artificial Sequence
  Description of Artificial Sequence: Synthetic oligonucleotide
auuccgugaccccacagag

SEQ ID NO: 1627877 - RNA, 19 nt, Artificial Sequence
  Description of Artificial Sequence: Synthetic oligonucleotide
ugauggaaggcuuguguug

SEQ ID NO: 1627878 - RNA, 19 nt, Artificial Sequence
  Description of Artificial Sequence: Synthetic oligonucleotide
uaauggcugaauccaacac

SEQ ID NO: 1627879 - RNA, 19 nt, Artificial Sequence
  Description of Artificial Sequence: Synthetic oligonucleotide
ucagagaauuucuuuacuu

SEQ ID NO: 1627880 - RNA, 19 nt, Artificial Sequence
  Description of Artificial Sequence: Synthetic oligonucleotide
aguauaccucgccaagggg

SEQ ID NO: 1627881 - RNA, 19 nt, Artificial Sequence
  Description of Artificial Sequence: Synthetic oligonucleotide
ugugaggugugcuucccag

SEQ ID NO: 1627882 - RNA, 19 nt, Artificial Sequence
  Description of Artificial Sequence: Synthetic oligonucleotide
caaaggagcaguauaccuc

SEQ ID NO: 1627883 - RNA, 19 nt, Artificial Sequence
  Description of Artificial Sequence: Synthetic oligonucleotide
aggagcaguauaccucgcc

SEQ ID NO: 1627884 - RNA, 19 nt, Artificial Sequence
  Description of Artificial Sequence: Synthetic oligonucleotide
uuuucauuccgugacccca

SEQ ID NO: 1627885 - RNA, 19 nt, Artificial Sequence
  Description of Artificial Sequence: Synthetic oligonucleotide
ugguaaugggauauaaauu

SEQ ID NO: 1627886 - RNA, 19 nt, Artificial Sequence
  Description of Artificial Sequence: Synthetic oligonucleotide
auguccgacaugcaaacca

SEQ ID NO: 1627887 - RNA, 19 nt, Artificial Sequence
  Description of Artificial Sequence: Synthetic oligonucleotide
cugacuguacuuuucuaac

SEQ ID NO: 1627888 - RNA, 19 nt, Artificial Sequence
  Description of Artificial Sequence: Synthetic oligonucleotide
ucauuguuauucccuacuc

SEQ ID NO: 1627889 - RNA, 19 nt, Artificial Sequence
  Description of Artificial Sequence: Synthetic oligonucleotide
agggcaaggacugugagca

SEQ ID NO: 1627890 - RNA, 19 nt, Artificial Sequence
  Description of Artificial Sequence: Synthetic oligonucleotide
ugcucgaaugcucuccuug

SEQ ID NO: 1627891 - RNA, 19 nt, Artificial Sequence
  Description of Artificial Sequence: Synthetic oligonucleotide
cucugcucggucuagguac

SEQ ID NO: 1627892 - RNA, 19 nt, Artificial Sequence
  Description of Artificial Sequence: Synthetic oligonucleotide
aagggguacgcguugccug

SEQ ID NO: 1627893 - RNA, 19 nt, Artificial Sequence
  Description of Artificial Sequence: Synthetic oligonucleotide
uagacaucuccugaacagg

SEQ ID NO: 1627894 - RNA, 19 nt, Artificial Sequence
  Description of Artificial Sequence: Synthetic oligonucleotide
uggauguuagcauccguga

SEQ ID NO: 1627895 - RNA, 19 nt, Artificial Sequence
  Description of Artificial Sequence: Synthetic oligonucleotide
aggugugcuucccagaugu

SEQ ID NO: 1627896 - RNA, 19 nt, Artificial Sequence
  Description of Artificial Sequence: Synthetic oligonucleotide
uguuuguggcaccaagaac

SEQ ID NO: 1627897 - RNA, 19 nt, Artificial Sequence
  Description of Artificial Sequence: Synthetic oligonucleotide
ccacuuagacaucagaucc

SEQ ID NO: 1627898 - RNA, 19 nt, Artificial Sequence
  Description of Artificial Sequence: Synthetic oligonucleotide
ucuagugacuucaggacuu

SEQ ID NO: 1627899 - RNA, 19 nt, Artificial Sequence
  Description of Artificial Sequence: Synthetic oligonucleotide
aaggacugugagcauccag

SEQ ID NO: 1627900 - RNA, 19 nt, Artificial Sequence
  Description of Artificial Sequence: Synthetic oligonucleotide
agugaaggcagcaauaaaa

SEQ ID NO: 1627901 - RNA, 19 nt, Artificial Sequence
  Description of Artificial Sequence: Synthetic oligonucleotide
uggccaacucaaaacaggu

SEQ ID NO: 1627902 - RNA, 19 nt, Artificial Sequence
  Description of Artificial Sequence: Synthetic oligonucleotide
cacuuagacaucagauccg

SEQ ID NO: 1627903 - RNA, 19 nt, Artificial Sequence
  Description of Artificial Sequence: Synthetic oligonucleotide
uuagcauccgugagguugu

SEQ ID NO: 1627904 - RNA, 19 nt, Artificial Sequence
  Description of Artificial Sequence: Synthetic oligonucleotide
gauguaaccgaaacaucug

SEQ ID NO: 1627905 - RNA, 19 nt, Artificial Sequence
  Description of Artificial Sequence: Synthetic oligonucleotide
uugacuagcuucucacucu

SEQ ID NO: 1627906 - RNA, 19 nt, Artificial Sequence
  Description of Artificial Sequence: Synthetic oligonucleotide
ucagauccgaggaggacac

SEQ ID NO: 1627907 - RNA, 19 nt, Artificial Sequence
  Description of Artificial Sequence: Synthetic oligonucleotide
acaugaagcuuuaacucuc

SEQ ID NO: 1627908 - RNA, 19 nt, Artificial Sequence
  Description of Artificial Sequence: Synthetic oligonucleotide
aacucaaaacagguucuug

SEQ ID NO: 1627909 - RNA, 19 nt, Artificial Sequence
  Description of Artificial Sequence: Synthetic oligonucleotide
uuguuauucccuacucccu

SEQ ID NO: 1627910 - RNA, 19 nt, Artificial Sequence
  Description of Artificial Sequence: Synthetic oligonucleotide
uucaaaccuccuccuaaug

SEQ ID NO: 1627911 - RNA, 19 nt, Artificial Sequence
  Description of Artificial Sequence: Synthetic oligonucleotide
ugaauccaacacccagggg

SEQ ID NO: 1627912 - RNA, 19 nt, Artificial Sequence
  Description of Artificial Sequence: Synthetic oligonucleotide
uuugcucgaaugcucuccu

SEQ ID NO: 1627913 - RNA, 19 nt, Artificial Sequence
  Description of Artificial Sequence: Synthetic oligonucleotide
uguccgacaugcaaaccac

SEQ ID NO: 1627914 - RNA, 19 nt, Artificial Sequence
  Description of Artificial Sequence: Synthetic oligonucleotide
ucuagguacugcacgcacu

SEQ ID NO: 1627915 - RNA, 19 nt, Artificial Sequence
  Description of Artificial Sequence: Synthetic oligonucleotide
uuggccuugucgcugugug

SEQ ID NO: 1627916 - RNA, 19 nt, Artificial Sequence
  Description of Artificial Sequence: Synthetic oligonucleotide
uaugcagaaccagugucca

SEQ ID NO: 1627917 - RNA, 19 nt, Artificial Sequence
  Description of Artificial Sequence: Synthetic oligonucleotide
ggcucuaagaguuuaucac

SEQ ID NO: 1627918 - RNA, 19 nt, Artificial Sequence
  Description of Artificial Sequence: Synthetic oligonucleotide
guguccuacauggugaagc

SEQ ID NO: 1627919 - RNA, 19 nt, Artificial Sequence
  Description of Artificial Sequence: Synthetic oligonucleotide
acaagagucccaucauugu

SEQ ID NO: 1627920 - RNA, 19 nt, Artificial Sequence
  Description of Artificial Sequence: Synthetic oligonucleotide
ugaggugugcuucccagau

SEQ ID NO: 1627921 - RNA, 19 nt, Artificial Sequence
  Description of Artificial Sequence: Synthetic oligonucleotide
ugaauuugcuccagucaaa

SEQ ID NO: 1627922 - RNA, 19 nt, Artificial Sequence
  Description of Artificial Sequence: Synthetic oligonucleotide
caacacucggguuggugcg

SEQ ID NO: 1627923 - RNA, 19 nt, Artificial Sequence
  Description of Artificial Sequence: Synthetic oligonucleotide
cucguggauguuagcaucc

SEQ ID NO: 1627924 - RNA, 19 nt, Artificial Sequence
  Description of Artificial Sequence: Synthetic oligonucleotide
uuucaaaccuccuccuaau

SEQ ID NO: 1627925 - RNA, 19 nt, Artificial Sequence
  Description of Artificial Sequence: Synthetic oligonucleotide
augaugcugaugucagcuc

SEQ ID NO: 1627926 - RNA, 19 nt, Artificial Sequence
  Description of Artificial Sequence: Synthetic oligonucleotide
uccagucaaaucccaauuu

SEQ ID NO: 1627927 - RNA, 19 nt, Artificial Sequence
  Description of Artificial Sequence: Synthetic oligonucleotide
gaaccaguguccaaguguc

SEQ ID NO: 1627928 - RNA, 19 nt, Artificial Sequence
  Description of Artificial Sequence: Synthetic oligonucleotide
cuugaaguguguugcugac

SEQ ID NO: 1627929 - RNA, 19 nt, Artificial Sequence
  Description of Artificial Sequence: Synthetic oligonucleotide
uuucauuccgugaccccac

SEQ ID NO: 1627930 - RNA, 19 nt, Artificial Sequence
  Description of Artificial Sequence: Synthetic oligonucleotide
gaugauggaaggcuugugu

SEQ ID NO: 1627931 - RNA, 19 nt, Artificial Sequence
  Description of Artificial Sequence: Synthetic oligonucleotide
aagaccgaagcauguccga

SEQ ID NO: 1627932 - RNA, 19 nt, Artificial Sequence
  Description of Artificial Sequence: Synthetic oligonucleotide
uuccgugaccccacagagg

SEQ ID NO: 1627933 - RNA, 19 nt, Artificial Sequence
  Description of Artificial Sequence: Synthetic oligonucleotide
uuauucccuacucccugca

SEQ ID NO: 1627934 - RNA, 19 nt, Artificial Sequence
  Description of Artificial Sequence: Synthetic oligonucleotide
guuauucccuacucccugc

SEQ ID NO: 1627935 - RNA, 19 nt, Artificial Sequence
  Description of Artificial Sequence: Synthetic oligonucleotide
acucuguuuugauccugcg

SEQ ID NO: 1627936 - RNA, 19 nt, Artificial Sequence
  Description of Artificial Sequence: Synthetic oligonucleotide
augggauauaaauucgcuu

SEQ ID NO: 1627937 - RNA, 19 nt, Artificial Sequence
  Description of Artificial Sequence: Synthetic oligonucleotide
auaaaagaccugccugccu

SEQ ID NO: 1627938 - RNA, 19 nt, Artificial Sequence
  Description of Artificial Sequence: Synthetic oligonucleotide
uauaccucgccaaggggua

SEQ ID NO: 1627939 - RNA, 19 nt, Artificial Sequence
  Description of Artificial Sequence: Synthetic oligonucleotide
agauccgaggaggacacag

SEQ ID NO: 1627940 - RNA, 19 nt, Artificial Sequence
  Description of Artificial Sequence: Synthetic oligonucleotide
auguuagcauccgugaggu

SEQ ID NO: 1627941 - RNA, 19 nt, Artificial Sequence
  Description of Artificial Sequence: Synthetic oligonucleotide
cuccugcaaaggaagacug

SEQ ID NO: 1627942 - RNA, 19 nt, Artificial Sequence
  Description of Artificial Sequence: Synthetic oligonucleotide
cuaauggcugaauccaaca

SEQ ID NO: 1627943 - RNA, 19 nt, Artificial Sequence
  Description of Artificial Sequence: Synthetic oligonucleotide
cuuugcucgaaugcucucc

SEQ ID NO: 1627944 - RNA, 19 nt, Artificial Sequence
  Description of Artificial Sequence: Synthetic oligonucleotide
cagcaauaaaagaccugcc

SEQ ID NO: 1627945 - RNA, 19 nt, Artificial Sequence
  Description of Artificial Sequence: Synthetic oligonucleotide
uguguugcugacuguacuu

SEQ ID NO: 1627946 - RNA, 19 nt, Artificial Sequence
  Description of Artificial Sequence: Synthetic oligonucleotide
guggcuaaagaccgaagca

SEQ ID NO: 1627947 - RNA, 19 nt, Artificial Sequence
  Description of Artificial Sequence: Synthetic oligonucleotide
aucagauccgaggaggaca

SEQ ID NO: 1627948 - RNA, 19 nt, Artificial Sequence
  Description of Artificial Sequence: Synthetic oligonucleotide
auggugaagcaucucugca

SEQ ID NO: 1627949 - RNA, 19 nt, Artificial Sequence
  Description of Artificial Sequence: Synthetic oligonucleotide
uggcuaaagaccgaagcau

SEQ ID NO: 1627950 - RNA, 19 nt, Artificial Sequence
  Description of Artificial Sequence: Synthetic oligonucleotide
aagagucccaucauuguua

SEQ ID NO: 1627951 - RNA, 19 nt, Artificial Sequence
  Description of Artificial Sequence: Synthetic oligonucleotide
aacgggcugcaugagggag

SEQ ID NO: 1627952 - RNA, 19 nt, Artificial Sequence
  Description of Artificial Sequence: Synthetic oligonucleotide
ugacuagcuucucacucuc

SEQ ID NO: 1627953 - RNA, 19 nt, Artificial Sequence
  Description of Artificial Sequence: Synthetic oligonucleotide
ggguaguggcuaaagaccg

SEQ ID NO: 1627954 - RNA, 19 nt, Artificial Sequence
  Description of Artificial Sequence: Synthetic oligonucleotide
agcuccugcaaaggaagac

SEQ ID NO: 1627955 - RNA, 19 nt, Artificial Sequence
  Description of Artificial Sequence: Synthetic oligonucleotide
gcauccgugagguugugag

SEQ ID NO: 1627956 - RNA, 19 nt, Artificial Sequence
  Description of Artificial Sequence: Synthetic oligonucleotide
acuuagacaucagauccga

SEQ ID NO: 1627957 - RNA, 19 nt, Artificial Sequence
  Description of Artificial Sequence: Synthetic oligonucleotide
ucauuccgugaccccacag

SEQ ID NO: 1627958 - RNA, 19 nt, Artificial Sequence
  Description of Artificial Sequence: Synthetic oligonucleotide
acuuugcucgaaugcucuc

SEQ ID NO: 1627959 - RNA, 19 nt, Artificial Sequence
  Description of Artificial Sequence: Synthetic oligonucleotide
cucacagaagucaucagcu

SEQ ID NO: 1627960 - RNA, 19 nt, Artificial Sequence
  Description of Artificial Sequence: Synthetic oligonucleotide
aguguguugcugacuguac

SEQ ID NO: 1627961 - RNA, 19 nt, Artificial Sequence
  Description of Artificial Sequence: Synthetic oligonucleotide
aaguguguugcugacugua

SEQ ID NO: 1627962 - RNA, 19 nt, Artificial Sequence
  Description of Artificial Sequence: Synthetic oligonucleotide
aauccaacacccaggggau

SEQ ID NO: 1627963 - RNA, 19 nt, Artificial Sequence
  Description of Artificial Sequence: Synthetic oligonucleotide
cugggcucaguucucaguc

SEQ ID NO: 1627964 - RNA, 19 nt, Artificial Sequence
  Description of Artificial Sequence: Synthetic oligonucleotide
aucuggaccaagaacucug

SEQ ID NO: 1627965 - RNA, 19 nt, Artificial Sequence
  Description of Artificial Sequence: Synthetic oligonucleotide
cauccgugagguugugagg

SEQ ID NO: 1627966 - RNA, 19 nt, Artificial Sequence
  Description of Artificial Sequence: Synthetic oligonucleotide
agguugugaggugugcuuc

SEQ ID NO: 1627967 - RNA, 19 nt, Artificial Sequence
  Description of Artificial Sequence: Synthetic oligonucleotide
cuuagacaucagauccgag

SEQ ID NO: 1627968 - RNA, 19 nt, Artificial Sequence
  Description of Artificial Sequence: Synthetic oligonucleotide
agaccgaagcauguccgac

SEQ ID NO: 1627969 - RNA, 19 nt, Artificial Sequence
  Description of Artificial Sequence: Synthetic oligonucleotide
acggcuuuggccagguagg

SEQ ID NO: 1627970 - RNA, 19 nt, Artificial Sequence
  Description of Artificial Sequence: Synthetic oligonucleotide
ccuccuaauggcugaaucc

SEQ ID NO: 1627971 - RNA, 19 nt, Artificial Sequence
  Description of Artificial Sequence: Synthetic oligonucleotide
accgaaacaucugggcccg

SEQ ID NO: 1627972 - RNA, 19 nt, Artificial Sequence
  Description of Artificial Sequence: Synthetic oligonucleotide
uccuaauggcugaauccaa

SEQ ID NO: 1627973 - RNA, 19 nt, Artificial Sequence
  Description of Artificial Sequence: Synthetic oligonucleotide
agucaaaucccaauuucau

SEQ ID NO: 1627974 - RNA, 19 nt, Artificial Sequence
  Description of Artificial Sequence: Synthetic oligonucleotide
gagagauucuagugacuuc

SEQ ID NO: 1627975 - RNA, 19 nt, Artificial Sequence
  Description of Artificial Sequence: Synthetic oligonucleotide
cagauguaaccgaaacauc

SEQ ID NO: 1627976 - RNA, 19 nt, Artificial Sequence
  Description of Artificial Sequence: Synthetic oligonucleotide
cacaaaccuucuugaagug

SEQ ID NO: 1627977 - RNA, 19 nt, Artificial Sequence
  Description of Artificial Sequence: Synthetic oligonucleotide
ggauguuagcauccgugag

SEQ ID NO: 1627978 - RNA, 19 nt, Artificial Sequence
  Description of Artificial Sequence: Synthetic oligonucleotide
gaucagggcaaggacugug

SEQ ID NO: 1627979 - RNA, 19 nt, Artificial Sequence
  Description of Artificial Sequence: Synthetic oligonucleotide
ggaguaugcagaaccagug

SEQ ID NO: 1627980 - RNA, 19 nt, Artificial Sequence
  Description of Artificial Sequence: Synthetic oligonucleotide
ugaguagccuucugucuuc

SEQ ID NO: 1627981 - RNA, 19 nt, Artificial Sequence
  Description of Artificial Sequence: Synthetic oligonucleotide
auggggucagaagaucauc

SEQ ID NO: 1627982 - RNA, 19 nt, Artificial Sequence
  Description of Artificial Sequence: Synthetic oligonucleotide
ggaagucccaugaauuugc

SEQ ID NO: 1627983 - RNA, 19 nt, Artificial Sequence
  Description of Artificial Sequence: Synthetic oligonucleotide
cuaaagaccgaagcauguc

SEQ ID NO: 1627984 - RNA, 19 nt, Artificial Sequence
  Description of Artificial Sequence: Synthetic oligonucleotide
agguggaguuguuggcuuc

SEQ ID NO: 1627985 - RNA, 19 nt, Artificial Sequence
  Description of Artificial Sequence: Synthetic oligonucleotide
cagggcaaggacugugagc

SEQ ID NO: 1627986 - RNA, 19 nt, Artificial Sequence
  Description of Artificial Sequence: Synthetic oligonucleotide
cucgaaugcucuccuuggc

SEQ ID NO: 1627987 - RNA, 19 nt, Artificial Sequence
  Description of Artificial Sequence: Synthetic oligonucleotide
acaaaccuucuugaagugu

SEQ ID NO: 1627988 - RNA, 19 nt, Artificial Sequence
  Description of Artificial Sequence: Synthetic oligonucleotide
aggaguaugcagaaccagu

SEQ ID NO: 1627989 - RNA, 19 nt, Artificial Sequence
  Description of Artificial Sequence: Synthetic oligonucleotide
ucguggauguuagcauccg

SEQ ID NO: 1627990 - RNA, 19 nt, Artificial Sequence
  Description of Artificial Sequence: Synthetic oligonucleotide
accgaagcauguccgacau

SEQ ID NO: 1627991 - RNA, 19 nt, Artificial Sequence
  Description of Artificial Sequence: Synthetic oligonucleotide
uucucugcucggucuaggu

SEQ ID NO: 1627992 - RNA, 19 nt, Artificial Sequence
  Description of Artificial Sequence: Synthetic oligonucleotide
aguguuuauuagacaucuc

SEQ ID NO: 1627993 - RNA, 19 nt, Artificial Sequence
  Description of Artificial Sequence: Synthetic oligonucleotide
ucuauggccccuggguccc

SEQ ID NO: 1627994 - RNA, 19 nt, Artificial Sequence
  Description of Artificial Sequence: Synthetic oligonucleotide
uguugcugacuguacuuuu

SEQ ID NO: 1627995 - RNA, 19 nt, Artificial Sequence
  Description of Artificial Sequence: Synthetic oligonucleotide
cacgcacuuugcucgaaug

SEQ ID NO: 1627996 - RNA, 19 nt, Artificial Sequence
  Description of Artificial Sequence: Synthetic oligonucleotide
uugugaggugugcuuccca

SEQ ID NO: 1627997 - RNA, 19 nt, Artificial Sequence
  Description of Artificial Sequence: Synthetic oligonucleotide
uccaaguguccuacauggu

SEQ ID NO: 1627998 - RNA, 19 nt, Artificial Sequence
  Description of Artificial Sequence: Synthetic oligonucleotide
agcucguggauguuagcau

SEQ ID NO: 1627999 - RNA, 19 nt, Artificial Sequence
  Description of Artificial Sequence: Synthetic oligonucleotide
gaccgaagcauguccgaca

SEQ ID NO: 1628000 - RNA, 19 nt, Artificial Sequence
  Description of Artificial Sequence: Synthetic oligonucleotide
cuccuaauggcugaaucca

SEQ ID NO: 1628001 - RNA, 19 nt, Artificial Sequence
  Description of Artificial Sequence: Synthetic oligonucleotide
gucuagguacugcacgcac

SEQ ID NO: 1628002 - RNA, 19 nt, Artificial Sequence
  Description of Artificial Sequence: Synthetic oligonucleotide
ucaggagguccucugcauu

SEQ ID NO: 1628003 - RNA, 19 nt, Artificial Sequence
  Description of Artificial Sequence: Synthetic oligonucleotide
uggugcgugaaggaccaca

SEQ ID NO: 1628004 - RNA, 19 nt, Artificial Sequence
  Description of Artificial Sequence: Synthetic oligonucleotide
uucauuccgugaccccaca

SEQ ID NO: 1628005 - RNA, 19 nt, Artificial Sequence
  Description of Artificial Sequence: Synthetic oligonucleotide
guaaauaaucuuucagcuu

SEQ ID NO: 1628006 - RNA, 19 nt, Artificial Sequence
  Description of Artificial Sequence: Synthetic oligonucleotide
gaacucuguuuugauccug

SEQ ID NO: 1628007 - RNA, 19 nt, Artificial Sequence
  Description of Artificial Sequence: Synthetic oligonucleotide
ggaaacagcuuugugcuca

SEQ ID NO: 1628008 - RNA, 19 nt, Artificial Sequence
  Description of Artificial Sequence: Synthetic oligonucleotide
gugaagcaucucugcagag

SEQ ID NO: 1628009 - RNA, 19 nt, Artificial Sequence
  Description of Artificial Sequence: Synthetic oligonucleotide
ugcugaugucagcuccuga

SEQ ID NO: 1628010 - RNA, 19 nt, Artificial Sequence
  Description of Artificial Sequence: Synthetic oligonucleotide
ccggguaguggcuaaagac

SEQ ID NO: 1628011 - RNA, 19 nt, Artificial Sequence
  Description of Artificial Sequence: Synthetic oligonucleotide
ugcauucacugugggccgg

SEQ ID NO: 1628012 - RNA, 19 nt, Artificial Sequence
  Description of Artificial Sequence: Synthetic oligonucleotide
ugcuccagucaaaucccaa

SEQ ID NO: 1628013 - RNA, 19 nt, Artificial Sequence
  Description of Artificial Sequence: Synthetic oligonucleotide
cauuccgugaccccacaga

SEQ ID NO: 1628014 - RNA, 19 nt, Artificial Sequence
  Description of Artificial Sequence: Synthetic oligonucleotide
aaggaccacaaaccuucuu

SEQ ID NO: 1628015 - RNA, 19 nt, Artificial Sequence
  Description of Artificial Sequence: Synthetic oligonucleotide
cagcuuugugcucacagaa

SEQ ID NO: 1628016 - RNA, 19 nt, Artificial Sequence
  Description of Artificial Sequence: Synthetic oligonucleotide
cggguaguggcuaaagacc

SEQ ID NO: 1628017 - RNA, 19 nt, Artificial Sequence
  Description of Artificial Sequence: Synthetic oligonucleotide
cuuccgggccagcucgugg

SEQ ID NO: 1628018 - RNA, 19 nt, Artificial Sequence
  Description of Artificial Sequence: Synthetic oligonucleotide
uuugauccugcgggcagcu

SEQ ID NO: 1628019 - RNA, 19 nt, Artificial Sequence
  Description of Artificial Sequence: Synthetic oligonucleotide
ggagcaguauaccucgcca

SEQ ID NO: 1628020 - RNA, 19 nt, Artificial Sequence
  Description of Artificial Sequence: Synthetic oligonucleotide
uaccucgccaagggguacg

SEQ ID NO: 1628021 - RNA, 19 nt, Artificial Sequence
  Description of Artificial Sequence: Synthetic oligonucleotide
uucucuccugauggaaaca

SEQ ID NO: 1628022 - RNA, 19 nt, Artificial Sequence
  Description of Artificial Sequence: Synthetic oligonucleotide
gccagguaggacuugccug

SEQ ID NO: 1628023 - RNA, 19 nt, Artificial Sequence
  Description of Artificial Sequence: Synthetic oligonucleotide
caaaggaagacuggaagcu

SEQ ID NO: 1628024 - RNA, 19 nt, Artificial Sequence
  Description of Artificial Sequence: Synthetic oligonucleotide
ccuaauggcugaauccaac

SEQ ID NO: 1628025 - RNA, 19 nt, Artificial Sequence
  Description of Artificial Sequence: Synthetic oligonucleotide
gcgugaaggaccacaaacc

SEQ ID NO: 1628026 - RNA, 19 nt, Artificial Sequence
  Description of Artificial Sequence: Synthetic oligonucleotide
ccagucaaaucccaauuuc

SEQ ID NO: 1628027 - RNA, 19 nt, Artificial Sequence
  Description of Artificial Sequence: Synthetic oligonucleotide
guuggugcgugaaggacca

SEQ ID NO: 1628028 - RNA, 19 nt, Artificial Sequence
  Description of Artificial Sequence: Synthetic oligonucleotide
caaccacuuagacaucaga

SEQ ID NO: 1628029 - RNA, 19 nt, Artificial Sequence
  Description of Artificial Sequence: Synthetic oligonucleotide
gguugugaggugugcuucc

SEQ ID NO: 1628030 - RNA, 19 nt, Artificial Sequence
  Description of Artificial Sequence: Synthetic oligonucleotide
uaacgggcugcaugaggga

SEQ ID NO: 1628031 - RNA, 19 nt, Artificial Sequence
  Description of Artificial Sequence: Synthetic oligonucleotide
guauaccucgccaaggggu

SEQ ID NO: 1628032 - RNA, 19 nt, Artificial Sequence
  Description of Artificial Sequence: Synthetic oligonucleotide
gaccacaaaccuucuugaa

SEQ ID NO: 1628033 - RNA, 19 nt, Artificial Sequence
  Description of Artificial Sequence: Synthetic oligonucleotide
cacagagggaauccaccuc

SEQ ID NO: 1628034 - RNA, 19 nt, Artificial Sequence
  Description of Artificial Sequence: Synthetic oligonucleotide
ggcuaaagaccgaagcaug

SEQ ID NO: 1628035 - RNA, 19 nt, Artificial Sequence
  Description of Artificial Sequence: Synthetic oligonucleotide
cuucccagauguaaccgaa

SEQ ID NO: 1628036 - RNA, 19 nt, Artificial Sequence
  Description of Artificial Sequence: Synthetic oligonucleotide
guugcugacuguacuuuuc

SEQ ID NO: 1628037 - RNA, 19 nt, Artificial Sequence
  Description of Artificial Sequence: Synthetic oligonucleotide
agggguacgcguugccugu

SEQ ID NO: 1628038 - RNA, 19 nt, Artificial Sequence
  Description of Artificial Sequence: Synthetic oligonucleotide
acacccaggggauguuugu

SEQ ID NO: 1628039 - RNA, 19 nt, Artificial Sequence
  Description of Artificial Sequence: Synthetic oligonucleotide
ugcugacuguacuuuucua

SEQ ID NO: 1628040 - RNA, 19 nt, Artificial Sequence
  Description of Artificial Sequence: Synthetic oligonucleotide
gcucaguucucagucagug

SEQ ID NO: 1628041 - RNA, 19 nt, Artificial Sequence
  Description of Artificial Sequence: Synthetic oligonucleotide
uccgugagguugugaggug

SEQ ID NO: 1628042 - RNA, 19 nt, Artificial Sequence
  Description of Artificial Sequence: Synthetic oligonucleotide
gaauuugcuccagucaaau

SEQ ID NO: 1628043 - RNA, 19 nt, Artificial Sequence
  Description of Artificial Sequence: Synthetic oligonucleotide
gcauguccgacaugcaaac

SEQ ID NO: 1628044 - RNA, 19 nt, Artificial Sequence
  Description of Artificial Sequence: Synthetic oligonucleotide
gggcucaguucucagucag

SEQ ID NO: 1628045 - RNA, 19 nt, Artificial Sequence
  Description of Artificial Sequence: Synthetic oligonucleotide
cccacagagggaauccacc

SEQ ID NO: 1628046 - RNA, 19 nt, Artificial Sequence
  Description of Artificial Sequence: Synthetic oligonucleotide
auaccucgccaagggguac

SEQ ID NO: 1628047 - RNA, 19 nt, Artificial Sequence
  Description of Artificial Sequence: Synthetic oligonucleotide
augagggagucccgcacaa

SEQ ID NO: 1628048 - RNA, 19 nt, Artificial Sequence
  Description of Artificial Sequence: Synthetic oligonucleotide
aguguccaaguguccuaca

SEQ ID NO: 1628049 - RNA, 19 nt, Artificial Sequence
  Description of Artificial Sequence: Synthetic oligonucleotide
guugugaggugugcuuccc

SEQ ID NO: 1628050 - RNA, 19 nt, Artificial Sequence
  Description of Artificial Sequence: Synthetic oligonucleotide
gguacugcacgcacuuugc

SEQ ID NO: 1628051 - RNA, 19 nt, Artificial Sequence
  Description of Artificial Sequence: Synthetic oligonucleotide
uuguggcaccaagaacaag

SEQ ID NO: 1628052 - RNA, 19 nt, Artificial Sequence
  Description of Artificial Sequence: Synthetic oligonucleotide
caguguccaaguguccuac

SEQ ID NO: 1628053 - RNA, 19 nt, Artificial Sequence
  Description of Artificial Sequence: Synthetic oligonucleotide
ccgaggaggacacagagaa

SEQ ID NO: 1628054 - RNA, 19 nt, Artificial Sequence
  Description of Artificial Sequence: Synthetic oligonucleotide
caggcucuaagaguuuauc

SEQ ID NO: 1628055 - RNA, 19 nt, Artificial Sequence
  Description of Artificial Sequence: Synthetic oligonucleotide
aacacucggguuggugcgu

SEQ ID NO: 1628056 - RNA, 19 nt, Artificial Sequence
  Description of Artificial Sequence: Synthetic oligonucleotide
gaguagccuucugucuucc

SEQ ID NO: 1628057 - RNA, 19 nt, Artificial Sequence
  Description of Artificial Sequence: Synthetic oligonucleotide
ccgacaugcaaaccacagg

SEQ ID NO: 1628058 - RNA, 19 nt, Artificial Sequence
  Description of Artificial Sequence: Synthetic oligonucleotide
uuguguugccuggccaacu

SEQ ID NO: 1628059 - RNA, 19 nt, Artificial Sequence
  Description of Artificial Sequence: Synthetic oligonucleotide
cauguccgacaugcaaacc

SEQ ID NO: 1628060 - RNA, 19 nt, Artificial Sequence
  Description of Artificial Sequence: Synthetic oligonucleotide
cugcaugagggagucccgc

SEQ ID NO: 1628061 - RNA, 19 nt, Artificial Sequence
  Description of Artificial Sequence: Synthetic oligonucleotide
cucggguuggugcgugaag

SEQ ID NO: 1628062 - RNA, 19 nt, Artificial Sequence
  Description of Artificial Sequence: Synthetic oligonucleotide
ucgccaagggguacgcguu

SEQ ID NO: 1628063 - RNA, 19 nt, Artificial Sequence
  Description of Artificial Sequence: Synthetic oligonucleotide
caucagauccgaggaggac

SEQ ID NO: 1628064 - RNA, 19 nt, Artificial Sequence
  Description of Artificial Sequence: Synthetic oligonucleotide
cacaacacucggguuggug

SEQ ID NO: 1628065 - RNA, 19 nt, Artificial Sequence
  Description of Artificial Sequence: Synthetic oligonucleotide
accucgccaagggguacgc

SEQ ID NO: 1628066 - RNA, 19 nt, Artificial Sequence
  Description of Artificial Sequence: Synthetic oligonucleotide
aguguccuacauggugaag

SEQ ID NO: 1628067 - RNA, 19 nt, Artificial Sequence
  Description of Artificial Sequence: Synthetic oligonucleotide
aucagggcaaggacuguga

SEQ ID NO: 1628068 - RNA, 19 nt, Artificial Sequence
  Description of Artificial Sequence: Synthetic oligonucleotide
cuacucccugcaucuggac

SEQ ID NO: 1628069 - RNA, 19 nt, Artificial Sequence
  Description of Artificial Sequence: Synthetic oligonucleotide
uaucaacaugaagcuuuaa

SEQ ID NO: 1628070 - RNA, 19 nt, Artificial Sequence
  Description of Artificial Sequence: Synthetic oligonucleotide
uuccucugguaaugggaua

SEQ ID NO: 1628071 - RNA, 19 nt, Artificial Sequence
  Description of Artificial Sequence: Synthetic oligonucleotide
gauccgaggaggacacaga

SEQ ID NO: 1628072 - RNA, 19 nt, Artificial Sequence
  Description of Artificial Sequence: Synthetic oligonucleotide
gugagguugugaggugugc

SEQ ID NO: 1628073 - RNA, 19 nt, Artificial Sequence
  Description of Artificial Sequence: Synthetic oligonucleotide
agggagucccgcacaauga

SEQ ID NO: 1628074 - RNA, 19 nt, Artificial Sequence
  Description of Artificial Sequence: Synthetic oligonucleotide
guguguugcugacuguacu

SEQ ID NO: 1628075 - RNA, 19 nt, Artificial Sequence
  Description of Artificial Sequence: Synthetic oligonucleotide
ggcagcaauaaaagaccug

SEQ ID NO: 1628076 - RNA, 19 nt, Artificial Sequence
  Description of Artificial Sequence: Synthetic oligonucleotide
cacuuugcucgaaugcucu

SEQ ID NO: 1628077 - RNA, 19 nt, Artificial Sequence
  Description of Artificial Sequence: Synthetic oligonucleotide
gucagugaaggcagcaaua

SEQ ID NO: 1628078 - RNA, 19 nt, Artificial Sequence
  Description of Artificial Sequence: Synthetic oligonucleotide
gaagcauguccgacaugca

SEQ ID NO: 1628079 - RNA, 19 nt, Artificial Sequence
  Description of Artificial Sequence: Synthetic oligonucleotide
augcugaugucagcuccug

SEQ ID NO: 1628080 - RNA, 19 nt, Artificial Sequence
  Description of Artificial Sequence: Synthetic oligonucleotide
gaacauggggucagaagau

SEQ ID NO: 1628081 - RNA, 19 nt, Artificial Sequence
  Description of Artificial Sequence: Synthetic oligonucleotide
ccagauguaaccgaaacau

SEQ ID NO: 1628082 - RNA, 19 nt, Artificial Sequence
  Description of Artificial Sequence: Synthetic oligonucleotide
cccaaaggagcaguauacc

SEQ ID NO: 1628083 - RNA, 19 nt, Artificial Sequence
  Description of Artificial Sequence: Synthetic oligonucleotide
uccugcgggcagcuucgcu

SEQ ID NO: 1628084 - RNA, 19 nt, Artificial Sequence
  Description of Artificial Sequence: Synthetic oligonucleotide
gaaguguguugcugacugu

SEQ ID NO: 1628085 - RNA, 19 nt, Artificial Sequence
  Description of Artificial Sequence: Synthetic oligonucleotide
gagguugugaggugugcuu

SEQ ID NO: 1628086 - RNA, 19 nt, Artificial Sequence
  Description of Artificial Sequence: Synthetic oligonucleotide
cucgccaagggguacgcgu

SEQ ID NO: 1628087 - RNA, 19 nt, Artificial Sequence
  Description of Artificial Sequence: Synthetic oligonucleotide
gcaugagggagucccgcac

SEQ ID NO: 1628088 - RNA, 19 nt, Artificial Sequence
  Description of Artificial Sequence: Synthetic oligonucleotide
ucuuccgggccagcucgug

SEQ ID NO: 1628089 - RNA, 19 nt, Artificial Sequence
  Description of Artificial Sequence: Synthetic oligonucleotide
gcuuguguugccuggccaa

SEQ ID NO: 1628090 - RNA, 19 nt, Artificial Sequence
  Description of Artificial Sequence: Synthetic oligonucleotide
ggaagacuggaagcuccag

SEQ ID NO: 1628091 - RNA, 19 nt, Artificial Sequence
  Description of Artificial Sequence: Synthetic oligonucleotide
cugaguagccuucugucuu

SEQ ID NO: 1628092 - RNA, 19 nt, Artificial Sequence
  Description of Artificial Sequence: Synthetic oligonucleotide
cuagguacugcacgcacuu

SEQ ID NO: 1628093 - RNA, 19 nt, Artificial Sequence
  Description of Artificial Sequence: Synthetic oligonucleotide
cuguugccacggcuuuggc

SEQ ID NO: 1628094 - RNA, 19 nt, Artificial Sequence
  Description of Artificial Sequence: Synthetic oligonucleotide
agucaucucuauggccccu

SEQ ID NO: 1628095 - RNA, 19 nt, Artificial Sequence
  Description of Artificial Sequence: Synthetic oligonucleotide
ggcccaaaggagcaguaua

SEQ ID NO: 1628096 - RNA, 19 nt, Artificial Sequence
  Description of Artificial Sequence: Synthetic oligonucleotide
caagagucccaucauuguu

SEQ ID NO: 1628097 - RNA, 19 nt, Artificial Sequence
  Description of Artificial Sequence: Synthetic oligonucleotide
ggagucccgcacaaugaug

SEQ ID NO: 1628098 - RNA, 19 nt, Artificial Sequence
  Description of Artificial Sequence: Synthetic oligonucleotide
ccaaaggagcaguauaccu

SEQ ID NO: 1628099 - RNA, 19 nt, Artificial Sequence
  Description of Artificial Sequence: Synthetic oligonucleotide
acaggcucuaagaguuuau

SEQ ID NO: 1628100 - RNA, 19 nt, Artificial Sequence
  Description of Artificial Sequence: Synthetic oligonucleotide
cuccugaguagccuucugu

SEQ ID NO: 1628101 - RNA, 19 nt, Artificial Sequence
  Description of Artificial Sequence: Synthetic oligonucleotide
gcuuuucaaaccuccuccu

SEQ ID NO: 1628102 - RNA, 19 nt, Artificial Sequence
  Description of Artificial Sequence: Synthetic oligonucleotide
ggcuuguguugccuggcca

SEQ ID NO: 1628103 - RNA, 19 nt, Artificial Sequence
  Description of Artificial Sequence: Synthetic oligonucleotide
uguuagcauccgugagguu

SEQ ID NO: 1628104 - RNA, 19 nt, Artificial Sequence
  Description of Artificial Sequence: Synthetic oligonucleotide
ugccacggcuuuggccagg

SEQ ID NO: 1628105 - RNA, 19 nt, Artificial Sequence
  Description of Artificial Sequence: Synthetic oligonucleotide
gggauauaaauucgcuuuu

SEQ ID NO: 1628106 - RNA, 19 nt, Artificial Sequence
  Description of Artificial Sequence: Synthetic oligonucleotide
ugggccggguaguggcuaa

SEQ ID NO: 1628107 - RNA, 19 nt, Artificial Sequence
  Description of Artificial Sequence: Synthetic oligonucleotide
guacugcacgcacuuugcu

SEQ ID NO: 1628108 - RNA, 19 nt, Artificial Sequence
  Description of Artificial Sequence: Synthetic oligonucleotide
ggguuggugcgugaaggac

SEQ ID NO: 1628109 - RNA, 19 nt, Artificial Sequence
  Description of Artificial Sequence: Synthetic oligonucleotide
ucccuacucccugcaucug

SEQ ID NO: 1628110 - RNA, 19 nt, Artificial Sequence
  Description of Artificial Sequence: Synthetic oligonucleotide
cauggggucagaagaucau

SEQ ID NO: 1628111 - RNA, 19 nt, Artificial Sequence
  Description of Artificial Sequence: Synthetic oligonucleotide
auccugcgggcagcuucgc

SEQ ID NO: 1628112 - RNA, 19 nt, Artificial Sequence
  Description of Artificial Sequence: Synthetic oligonucleotide
agcauccgugagguuguga

SEQ ID NO: 1628113 - RNA, 19 nt, Artificial Sequence
  Description of Artificial Sequence: Synthetic oligonucleotide
gcuaaagaccgaagcaugu

SEQ ID NO: 1628114 - RNA, 19 nt, Artificial Sequence
  Description of Artificial Sequence: Synthetic oligonucleotide
uccgggccagcucguggau

SEQ ID NO: 1628115 - RNA, 19 nt, Artificial Sequence
  Description of Artificial Sequence: Synthetic oligonucleotide
ggugcgugaaggaccacaa

SEQ ID NO: 1628116 - RNA, 19 nt, Artificial Sequence
  Description of Artificial Sequence: Synthetic oligonucleotide
guccgacaugcaaaccaca

SEQ ID NO: 1628117 - RNA, 19 nt, Artificial Sequence
  Description of Artificial Sequence: Synthetic oligonucleotide
gaccugccugccugucuuc

SEQ ID NO: 1628118 - RNA, 19 nt, Artificial Sequence
  Description of Artificial Sequence: Synthetic oligonucleotide
acucggguuggugcgugaa

SEQ ID NO: 1628119 - RNA, 19 nt, Artificial Sequence
  Description of Artificial Sequence: Synthetic oligonucleotide
cagguaggacuugccugug

SEQ ID NO: 1628120 - RNA, 19 nt, Artificial Sequence
  Description of Artificial Sequence: Synthetic oligonucleotide
gcauucacugugggccggg

SEQ ID NO: 1628121 - RNA, 19 nt, Artificial Sequence
  Description of Artificial Sequence: Synthetic oligonucleotide
ccccacagagggaauccac

SEQ ID NO: 1628122 - RNA, 19 nt, Artificial Sequence
  Description of Artificial Sequence: Synthetic oligonucleotide
ccuacucccugcaucugga

SEQ ID NO: 1628123 - RNA, 19 nt, Artificial Sequence
  Description of Artificial Sequence: Synthetic oligonucleotide
cagucagugaaggcagcaa

SEQ ID NO: 1628124 - RNA, 19 nt, Artificial Sequence
  Description of Artificial Sequence: Synthetic oligonucleotide
cacugugggccggguagug

SEQ ID NO: 1628125 - RNA, 19 nt, Artificial Sequence
  Description of Artificial Sequence: Synthetic oligonucleotide
ccaagggguacgcguugcc

SEQ ID NO: 1628126 - RNA, 19 nt, Artificial Sequence
  Description of Artificial Sequence: Synthetic oligonucleotide
gaaggaccacaaaccuucu

SEQ ID NO: 1628127 - RNA, 19 nt, Artificial Sequence
  Description of Artificial Sequence: Synthetic oligonucleotide
ccuacauggugaagcaucu

SEQ ID NO: 1628128 - RNA, 19 nt, Artificial Sequence
  Description of Artificial Sequence: Synthetic oligonucleotide
guugccuggccaacucaaa

SEQ ID NO: 1628129 - RNA, 19 nt, Artificial Sequence
  Description of Artificial Sequence: Synthetic oligonucleotide
ucccugcaucuggaccaag

SEQ ID NO: 1628130 - RNA, 19 nt, Artificial Sequence
  Description of Artificial Sequence: Synthetic oligonucleotide
ccagguaggacuugccugu

SEQ ID NO: 1628131 - RNA, 19 nt, Artificial Sequence
  Description of Artificial Sequence: Synthetic oligonucleotide
gccggguaguggcuaaaga

SEQ ID NO: 1628132 - RNA, 19 nt, Artificial Sequence
  Description of Artificial Sequence: Synthetic oligonucleotide
uagcauccgugagguugug

SEQ ID NO: 1628133 - RNA, 19 nt, Artificial Sequence
  Description of Artificial Sequence: Synthetic oligonucleotide
ugcacgcacuuugcucgaa

SEQ ID NO: 1628134 - RNA, 19 nt, Artificial Sequence
  Description of Artificial Sequence: Synthetic oligonucleotide
cgaaacaucugggcccggg

SEQ ID NO: 1628135 - RNA, 19 nt, Artificial Sequence
  Description of Artificial Sequence: Synthetic oligonucleotide
ggucuagguacugcacgca

SEQ ID NO: 1628136 - RNA, 19 nt, Artificial Sequence
  Description of Artificial Sequence: Synthetic oligonucleotide
gcuccagucaaaucccaau

SEQ ID NO: 1628137 - RNA, 19 nt, Artificial Sequence
  Description of Artificial Sequence: Synthetic oligonucleotide
gugaaggaccacaaaccuu

SEQ ID NO: 1628138 - RNA, 19 nt, Artificial Sequence
  Description of Artificial Sequence: Synthetic oligonucleotide
cgcuuccucugguaauggg

SEQ ID NO: 1628139 - RNA, 19 nt, Artificial Sequence
  Description of Artificial Sequence: Synthetic oligonucleotide
cugggcccgggccgcuucc

SEQ ID NO: 1628140 - RNA, 19 nt, Artificial Sequence
  Description of Artificial Sequence: Synthetic oligonucleotide
cugcacgcacuuugcucga

SEQ ID NO: 1628141 - RNA, 19 nt, Artificial Sequence
  Description of Artificial Sequence: Synthetic oligonucleotide
ggccggguaguggcuaaag

SEQ ID NO: 1628142 - RNA, 19 nt, Artificial Sequence
  Description of Artificial Sequence: Synthetic oligonucleotide
cgugaaggaccacaaaccu

SEQ ID NO: 1628143 - RNA, 19 nt, Artificial Sequence
  Description of Artificial Sequence: Synthetic oligonucleotide
cccugcaucuggaccaaga

SEQ ID NO: 1628144 - RNA, 19 nt, Artificial Sequence
  Description of Artificial Sequence: Synthetic oligonucleotide
ugcgggcagcuucgcucuc

SEQ ID NO: 1628145 - RNA, 19 nt, Artificial Sequence
  Description of Artificial Sequence: Synthetic oligonucleotide
caagggguacgcguugccu

SEQ ID NO: 1628146 - RNA, 19 nt, Artificial Sequence
  Description of Artificial Sequence: Synthetic oligonucleotide
ccaggggauguuuguggca

SEQ ID NO: 1628147 - RNA, 19 nt, Artificial Sequence
  Description of Artificial Sequence: Synthetic oligonucleotide
uuggugcgugaaggaccac

SEQ ID NO: 1628148 - RNA, 19 nt, Artificial Sequence
  Description of Artificial Sequence: Synthetic oligonucleotide
uugauccugcgggcagcuu

SEQ ID NO: 1628149 - RNA, 19 nt, Artificial Sequence
  Description of Artificial Sequence: Synthetic oligonucleotide
gggccgcuuccucugguaa

SEQ ID NO: 1628150 - RNA, 19 nt, Artificial Sequence
  Description of Artificial Sequence: Synthetic oligonucleotide
ccaguguccaaguguccua

SEQ ID NO: 1628151 - RNA, 19 nt, Artificial Sequence
  Description of Artificial Sequence: Synthetic oligonucleotide
gguacgcguugccuguuuu

SEQ ID NO: 1628152 - RNA, 19 nt, Artificial Sequence
  Description of Artificial Sequence: Synthetic oligonucleotide
ccgaagcauguccgacaug

SEQ ID NO: 1628153 - RNA, 19 nt, Artificial Sequence
  Description of Artificial Sequence: Synthetic oligonucleotide
gagucccaucauuguuauu

SEQ ID NO: 1628154 - RNA, 19 nt, Artificial Sequence
  Description of Artificial Sequence: Synthetic oligonucleotide
ccucgccaagggguacgcg

SEQ ID NO: 1628155 - RNA, 19 nt, Artificial Sequence
  Description of Artificial Sequence: Synthetic oligonucleotide
gugggccggguaguggcua

SEQ ID NO: 1628156 - RNA, 19 nt, Artificial Sequence
  Description of Artificial Sequence: Synthetic oligonucleotide
cagauccgaggaggacaca

SEQ ID NO: 1628157 - RNA, 19 nt, Artificial Sequence
  Description of Artificial Sequence: Synthetic oligonucleotide
cccaugaauuugcuccagu

SEQ ID NO: 1628158 - RNA, 19 nt, Artificial Sequence
  Description of Artificial Sequence: Synthetic oligonucleotide
cgccaagggguacgcguug

SEQ ID NO: 1628159 - RNA, 19 nt, Artificial Sequence
  Description of Artificial Sequence: Synthetic oligonucleotide
gcacgcacuuugcucgaau

SEQ ID NO: 1628160 - RNA, 19 nt, Artificial Sequence
  Description of Artificial Sequence: Synthetic oligonucleotide
ggccaacucaaaacagguu

SEQ ID NO: 1628161 - RNA, 19 nt, Artificial Sequence
  Description of Artificial Sequence: Synthetic oligonucleotide
ccccaaccacuuagacauc

SEQ ID NO: 1628162 - RNA, 19 nt, Artificial Sequence
  Description of Artificial Sequence: Synthetic oligonucleotide
ggaucagggcaaggacugu

SEQ ID NO: 1628163 - RNA, 19 nt, Artificial Sequence
  Description of Artificial Sequence: Synthetic oligonucleotide
ggugugcuucccagaugua

SEQ ID NO: 1628164 - RNA, 19 nt, Artificial Sequence
  Description of Artificial Sequence: Synthetic oligonucleotide
ggggcccaaaggagcagua

SEQ ID NO: 1628165 - RNA, 19 nt, Artificial Sequence
  Description of Artificial Sequence: Synthetic oligonucleotide
ccgaaacaucugggcccgg

SEQ ID NO: 1628166 - RNA, 19 nt, Artificial Sequence
  Description of Artificial Sequence: Synthetic oligonucleotide
cguggauguuagcauccgu

SEQ ID NO: 1628167 - RNA, 19 nt, Artificial Sequence
  Description of Artificial Sequence: Synthetic oligonucleotide
ccucugguaaugggauaua

SEQ ID NO: 1628168 - RNA, 19 nt, Artificial Sequence
  Description of Artificial Sequence: Synthetic oligonucleotide
ggguacgcguugccuguuu

SEQ ID NO: 1628169 - RNA, 19 nt, Artificial Sequence
  Description of Artificial Sequence: Synthetic oligonucleotide
ccgugaccccacagaggga

SEQ ID NO: 1628170 - RNA, 19 nt, Artificial Sequence
  Description of Artificial Sequence: Synthetic oligonucleotide
gggccggguaguggcuaaa

SEQ ID NO: 1628171 - RNA, 19 nt, Artificial Sequence
  Description of Artificial Sequence: Synthetic oligonucleotide
gccuugucgcugugugcuu

SEQ ID NO: 1628172 - RNA, 19 nt, Artificial Sequence
  Description of Artificial Sequence: Synthetic oligonucleotide
gggguacgcguugccuguu

SEQ ID NO: 1628173 - RNA, 19 nt, Artificial Sequence
  Description of Artificial Sequence: Synthetic oligonucleotide
ccgggccgcuuccucuggu

SEQ ID NO: 1628174 - RNA, 19 nt, Artificial Sequence
  Description of Artificial Sequence: Synthetic oligonucleotide
aaacuugggaaacuugucc

SEQ ID NO: 1628175 - RNA, 19 nt, Artificial Sequence
  Description of Artificial Sequence: Synthetic oligonucleotide
auugauagugaucucuucc

SEQ ID NO: 1628176 - RNA, 19 nt, Artificial Sequence
  Description of Artificial Sequence: Synthetic oligonucleotide
ucuaccaccacacugggag

SEQ ID NO: 1628177 - RNA, 19 nt, Artificial Sequence
  Description of Artificial Sequence: Synthetic oligonucleotide
ucaacaucaaccuggcugg

SEQ ID NO: 1628178 - RNA, 19 nt, Artificial Sequence
  Description of Artificial Sequence: Synthetic oligonucleotide
auuaauaagcccaugucac

SEQ ID NO: 1628179 - RNA, 19 nt, Artificial Sequence
  Description of Artificial Sequence: Synthetic oligonucleotide
acugugacgacuuugagaa

SEQ ID NO: 1628180 - RNA, 19 nt, Artificial Sequence
  Description of Artificial Sequence: Synthetic oligonucleotide
aaggaguauacacggcgcc

SEQ ID NO: 1628181 - RNA, 19 nt, Artificial Sequence
  Description of Artificial Sequence: Synthetic oligonucleotide
ugaggugucugccuggugg

SEQ ID NO: 1628182 - RNA, 19 nt, Artificial Sequence
  Description of Artificial Sequence: Synthetic oligonucleotide
uguacuuccuuccuaacac

SEQ ID NO: 1628183 - RNA, 19 nt, Artificial Sequence
  Description of Artificial Sequence: Synthetic oligonucleotide
ugugacgacuuugagaagg

SEQ ID NO: 1628184 - RNA, 19 nt, Artificial Sequence
  Description of Artificial Sequence: Synthetic oligonucleotide
cuuagcagguauaaagagg

SEQ ID NO: 1628185 - RNA, 19 nt, Artificial Sequence
  Description of Artificial Sequence: Synthetic oligonucleotide
caaaggaguauacacggcg

SEQ ID NO: 1628186 - RNA, 19 nt, Artificial Sequence
  Description of Artificial Sequence: Synthetic oligonucleotide
aagaaggugcgucucauga

SEQ ID NO: 1628187 - RNA, 19 nt, Artificial Sequence
  Description of Artificial Sequence: Synthetic oligonucleotide
ugaacccacuuccacaggg

SEQ ID NO: 1628188 - RNA, 19 nt, Artificial Sequence
  Description of Artificial Sequence: Synthetic oligonucleotide
gacugagaagcucaggucc

SEQ ID NO: 1628189 - RNA, 19 nt, Artificial Sequence
  Description of Artificial Sequence: Synthetic oligonucleotide
uauaaagagggucucuccu

SEQ ID NO: 1628190 - RNA, 19 nt, Artificial Sequence
  Description of Artificial Sequence: Synthetic oligonucleotide
gaaggugcgucucaugagg

SEQ ID NO: 1628191 - RNA, 19 nt, Artificial Sequence
  Description of Artificial Sequence: Synthetic oligonucleotide
uuggaaucuagcagcaucc

SEQ ID NO: 1628192 - RNA, 19 nt, Artificial Sequence
  Description of Artificial Sequence: Synthetic oligonucleotide
gguguuaugaagaaggugc

SEQ ID NO: 1628193 - RNA, 19 nt, Artificial Sequence
  Description of Artificial Sequence: Synthetic oligonucleotide
aacucauugauggucauga

SEQ ID NO: 1628194 - RNA, 19 nt, Artificial Sequence
  Description of Artificial Sequence: Synthetic oligonucleotide
aagaucacaggccucccag

SEQ ID NO: 1628195 - RNA, 19 nt, Artificial Sequence
  Description of Artificial Sequence: Synthetic oligonucleotide
gaagcucagguccaaggcg

SEQ ID NO: 1628196 - RNA, 19 nt, Artificial Sequence
  Description of Artificial Sequence: Synthetic oligonucleotide
agaaagugcuuccugaagu

SEQ ID NO: 1628197 - RNA, 19 nt, Artificial Sequence
  Description of Artificial Sequence: Synthetic oligonucleotide
agaauagccccacagcuug

SEQ ID NO: 1628198 - RNA, 19 nt, Artificial Sequence
  Description of Artificial Sequence: Synthetic oligonucleotide
auaagcccaugucacacac

SEQ ID NO: 1628199 - RNA, 19 nt, Artificial Sequence
  Description of Artificial Sequence: Synthetic oligonucleotide
aaggcgcgcacguaaugcc

SEQ ID NO: 1628200 - RNA, 19 nt, Artificial Sequence
  Description of Artificial Sequence: Synthetic oligonucleotide
ugaugcaguggggagaugg

SEQ ID NO: 1628201 - RNA, 19 nt, Artificial Sequence
  Description of Artificial Sequence: Synthetic oligonucleotide
cuugaacccacuuccacag

SEQ ID NO: 1628202 - RNA, 19 nt, Artificial Sequence
  Description of Artificial Sequence: Synthetic oligonucleotide
agcaagguacccaacgucc

SEQ ID NO: 1628203 - RNA, 19 nt, Artificial Sequence
  Description of Artificial Sequence: Synthetic oligonucleotide
aacccacuuccacagggac

SEQ ID NO: 1628204 - RNA, 19 nt, Artificial Sequence
  Description of Artificial Sequence: Synthetic oligonucleotide
ugaaguacugcaggguugg

SEQ ID NO: 1628205 - RNA, 19 nt, Artificial Sequence
  Description of Artificial Sequence: Synthetic oligonucleotide
aauacagccggauguacuu

SEQ ID NO: 1628206 - RNA, 19 nt, Artificial Sequence
  Description of Artificial Sequence: Synthetic oligonucleotide
aguacccugagguccuucc

SEQ ID NO: 1628207 - RNA, 19 nt, Artificial Sequence
  Description of Artificial Sequence: Synthetic oligonucleotide
gagaagcucagguccaagg

SEQ ID NO: 1628208 - RNA, 19 nt, Artificial Sequence
  Description of Artificial Sequence: Synthetic oligonucleotide
gcugguguuaugaagaagg

SEQ ID NO: 1628209 - RNA, 19 nt, Artificial Sequence
  Description of Artificial Sequence: Synthetic oligonucleotide
acuccugccaauguccugc

SEQ ID NO: 1628210 - RNA, 19 nt, Artificial Sequence
  Description of Artificial Sequence: Synthetic oligonucleotide
agcagcauagucacgcucc

SEQ ID NO: 1628211 - RNA, 19 nt, Artificial Sequence
  Description of Artificial Sequence: Synthetic oligonucleotide
guugggagcaggcuggucc

SEQ ID NO: 1628212 - RNA, 19 nt, Artificial Sequence
  Description of Artificial Sequence: Synthetic oligonucleotide
uuaugaagaaggugcgucu

SEQ ID NO: 1628213 - RNA, 19 nt, Artificial Sequence
  Description of Artificial Sequence: Synthetic oligonucleotide
aaguacugcaggguuggac

SEQ ID NO: 1628214 - RNA, 19 nt, Artificial Sequence
  Description of Artificial Sequence: Synthetic oligonucleotide
augaggauacacugccucg

SEQ ID NO: 1628215 - RNA, 19 nt, Artificial Sequence
  Description of Artificial Sequence: Synthetic oligonucleotide
uugcggggaauacagccgg

SEQ ID NO: 1628216 - RNA, 19 nt, Artificial Sequence
  Description of Artificial Sequence: Synthetic oligonucleotide
agcagguauaaagaggguc

SEQ ID NO: 1628217 - RNA, 19 nt, Artificial Sequence
  Description of Artificial Sequence: Synthetic oligonucleotide
auaaagagggucucuccug

SEQ ID NO: 1628218 - RNA, 19 nt, Artificial Sequence
  Description of Artificial Sequence: Synthetic oligonucleotide
gccaaaggaguauacacgg

SEQ ID NO: 1628219 - RNA, 19 nt, Artificial Sequence
  Description of Artificial Sequence: Synthetic oligonucleotide
acguaaugccaauacuuag

SEQ ID NO: 1628220 - RNA, 19 nt, Artificial Sequence
  Description of Artificial Sequence: Synthetic oligonucleotide
cugagcaagguacccaacg

SEQ ID NO: 1628221 - RNA, 19 nt, Artificial Sequence
  Description of Artificial Sequence: Synthetic oligonucleotide
gacagugaagccuggguac

SEQ ID NO: 1628222 - RNA, 19 nt, Artificial Sequence
  Description of Artificial Sequence: Synthetic oligonucleotide
agcauagucacgcuccugu

SEQ ID NO: 1628223 - RNA, 19 nt, Artificial Sequence
  Description of Artificial Sequence: Synthetic oligonucleotide
uaauaagcccaugucacac

SEQ ID NO: 1628224 - RNA, 19 nt, Artificial Sequence
  Description of Artificial Sequence: Synthetic oligonucleotide
guaaugccaauacuuagca

SEQ ID NO: 1628225 - RNA, 19 nt, Artificial Sequence
  Description of Artificial Sequence: Synthetic oligonucleotide
ugaggauacacugccucgg

SEQ ID NO: 1628226 - RNA, 19 nt, Artificial Sequence
  Description of Artificial Sequence: Synthetic oligonucleotide
aacaccuggaccaggaagu

SEQ ID NO: 1628227 - RNA, 19 nt, Artificial Sequence
  Description of Artificial Sequence: Synthetic oligonucleotide
aguguugagcuucucccag

SEQ ID NO: 1628228 - RNA, 19 nt, Artificial Sequence
  Description of Artificial Sequence: Synthetic oligonucleotide
uucucaacaucaaccuggc

SEQ ID NO: 1628229 - RNA, 19 nt, Artificial Sequence
  Description of Artificial Sequence: Synthetic oligonucleotide
uugauggucaugagggccu

SEQ ID NO: 1628230 - RNA, 19 nt, Artificial Sequence
  Description of Artificial Sequence: Synthetic oligonucleotide
uguacugcagacuccacuu

SEQ ID NO: 1628231 - RNA, 19 nt, Artificial Sequence
  Description of Artificial Sequence: Synthetic oligonucleotide
cuugcggggaauacagccg

SEQ ID NO: 1628232 - RNA, 19 nt, Artificial Sequence
  Description of Artificial Sequence: Synthetic oligonucleotide
acacucguagugcuucggc

SEQ ID NO: 1628233 - RNA, 19 nt, Artificial Sequence
  Description of Artificial Sequence: Synthetic oligonucleotide
guuggaaucuagcagcauc

SEQ ID NO: 1628234 - RNA, 19 nt, Artificial Sequence
  Description of Artificial Sequence: Synthetic oligonucleotide
caggguuggacagugaagc

SEQ ID NO: 1628235 - RNA, 19 nt, Artificial Sequence
  Description of Artificial Sequence: Synthetic oligonucleotide
aggacuguuggaaucuagc

SEQ ID NO: 1628236 - RNA, 19 nt, Artificial Sequence
  Description of Artificial Sequence: Synthetic oligonucleotide
guauaaagagggucucucc

SEQ ID NO: 1628237 - RNA, 19 nt, Artificial Sequence
  Description of Artificial Sequence: Synthetic oligonucleotide
uccaagaucacaggccucc

SEQ ID NO: 1628238 - RNA, 19 nt, Artificial Sequence
  Description of Artificial Sequence: Synthetic oligonucleotide
guuggagucacaccucgcc

SEQ ID NO: 1628239 - RNA, 19 nt, Artificial Sequence
  Description of Artificial Sequence: Synthetic oligonucleotide
ggcuaugaccaccagaagc

SEQ ID NO: 1628240 - RNA, 19 nt, Artificial Sequence
  Description of Artificial Sequence: Synthetic oligonucleotide
aauguccugcauagaauag

SEQ ID NO: 1628241 - RNA, 19 nt, Artificial Sequence
  Description of Artificial Sequence: Synthetic oligonucleotide
ugaucucuuccucuucccc

SEQ ID NO: 1628242 - RNA, 19 nt, Artificial Sequence
  Description of Artificial Sequence: Synthetic oligonucleotide
accuugaacccacuuccac

SEQ ID NO: 1628243 - RNA, 19 nt, Artificial Sequence
  Description of Artificial Sequence: Synthetic oligonucleotide
uaaugccaauacuuagcag

SEQ ID NO: 1628244 - RNA, 19 nt, Artificial Sequence
  Description of Artificial Sequence: Synthetic oligonucleotide
acugccucggacucuugcg

SEQ ID NO: 1628245 - RNA, 19 nt, Artificial Sequence
  Description of Artificial Sequence: Synthetic oligonucleotide
uguccugcuucaacucugg

SEQ ID NO: 1628246 - RNA, 19 nt, Artificial Sequence
  Description of Artificial Sequence: Synthetic oligonucleotide
gauacacugccucggacuc

SEQ ID NO: 1628247 - RNA, 19 nt, Artificial Sequence
  Description of Artificial Sequence: Synthetic oligonucleotide
uguugagcuucucccagga

SEQ ID NO: 1628248 - RNA, 19 nt, Artificial Sequence
  Description of Artificial Sequence: Synthetic oligonucleotide
agccaaaggaguauacacg

SEQ ID NO: 1628249 - RNA, 19 nt, Artificial Sequence
  Description of Artificial Sequence: Synthetic oligonucleotide
ucgucuguguaccuugaac

SEQ ID NO: 1628250 - RNA, 19 nt, Artificial Sequence
  Description of Artificial Sequence: Synthetic oligonucleotide
guuaugaagaaggugcguc

SEQ ID NO: 1628251 - RNA, 19 nt, Artificial Sequence
  Description of Artificial Sequence: Synthetic oligonucleotide
cuggcuaugaccaccagaa

SEQ ID NO: 1628252 - RNA, 19 nt, Artificial Sequence
  Description of Artificial Sequence: Synthetic oligonucleotide
gacuggaggacugugacga

SEQ ID NO: 1628253 - RNA, 19 nt, Artificial Sequence
  Description of Artificial Sequence: Synthetic oligonucleotide
gacugugacgacuuugaga

SEQ ID NO: 1628254 - RNA, 19 nt, Artificial Sequence
  Description of Artificial Sequence: Synthetic oligonucleotide
caugaggauacacugccuc

SEQ ID NO: 1628255 - RNA, 19 nt, Artificial Sequence
  Description of Artificial Sequence: Synthetic oligonucleotide
aauacuuagcagguauaaa

SEQ ID NO: 1628256 - RNA, 19 nt, Artificial Sequence
  Description of Artificial Sequence: Synthetic oligonucleotide
ucacaccucgccuucguug

SEQ ID NO: 1628257 - RNA, 19 nt, Artificial Sequence
  Description of Artificial Sequence: Synthetic oligonucleotide
uacccugagguccuuccag

SEQ ID NO: 1628258 - RNA, 19 nt, Artificial Sequence
  Description of Artificial Sequence: Synthetic oligonucleotide
ugacuggaggacugugacg

SEQ ID NO: 1628259 - RNA, 19 nt, Artificial Sequence
  Description of Artificial Sequence: Synthetic oligonucleotide
ugagcuucucccaggagua

SEQ ID NO: 1628260 - RNA, 19 nt, Artificial Sequence
  Description of Artificial Sequence: Synthetic oligonucleotide
augucacacacucguagug

SEQ ID NO: 1628261 - RNA, 19 nt, Artificial Sequence
  Description of Artificial Sequence: Synthetic oligonucleotide
ucaugcauggccagugguc

SEQ ID NO: 1628262 - RNA, 19 nt, Artificial Sequence
  Description of Artificial Sequence: Synthetic oligonucleotide
guaaucaggaaugcugaug

SEQ ID NO: 1628263 - RNA, 19 nt, Artificial Sequence
  Description of Artificial Sequence: Synthetic oligonucleotide
uacccaacguccuuugccu

SEQ ID NO: 1628264 - RNA, 19 nt, Artificial Sequence
  Description of Artificial Sequence: Synthetic oligonucleotide
aguauacacggcgccauuc

SEQ ID NO: 1628265 - RNA, 19 nt, Artificial Sequence
  Description of Artificial Sequence: Synthetic oligonucleotide
aggauacacugccucggac

SEQ ID NO: 1628266 - RNA, 19 nt, Artificial Sequence
  Description of Artificial Sequence: Synthetic oligonucleotide
uacagccggauguacuucc

SEQ ID NO: 1628267 - RNA, 19 nt, Artificial Sequence
  Description of Artificial Sequence: Synthetic oligonucleotide
gucaugaugcaguggggag

SEQ ID NO: 1628268 - RNA, 19 nt, Artificial Sequence
  Description of Artificial Sequence: Synthetic oligonucleotide
aacguccuuugccucgcuc

SEQ ID NO: 1628269 - RNA, 19 nt, Artificial Sequence
  Description of Artificial Sequence: Synthetic oligonucleotide
guguuaugaagaaggugcg

SEQ ID NO: 1628270 - RNA, 19 nt, Artificial Sequence
  Description of Artificial Sequence: Synthetic oligonucleotide
uucaugcauggccaguggu

SEQ ID NO: 1628271 - RNA, 19 nt, Artificial Sequence
  Description of Artificial Sequence: Synthetic oligonucleotide
acucguagugcuucggcca

SEQ ID NO: 1628272 - RNA, 19 nt, Artificial Sequence
  Description of Artificial Sequence: Synthetic oligonucleotide
uauacacggcgccauuccu

SEQ ID NO: 1628273 - RNA, 19 nt, Artificial Sequence
  Description of Artificial Sequence: Synthetic oligonucleotide
ugguguuaugaagaaggug

SEQ ID NO: 1628274 - RNA, 19 nt, Artificial Sequence
  Description of Artificial Sequence: Synthetic oligonucleotide
uacacggcgccauuccuug

SEQ ID NO: 1628275 - RNA, 19 nt, Artificial Sequence
  Description of Artificial Sequence: Synthetic oligonucleotide
ugcacucuggcccuggcua

SEQ ID NO: 1628276 - RNA, 19 nt, Artificial Sequence
  Description of Artificial Sequence: Synthetic oligonucleotide
uccagagggugcuggaccc

SEQ ID NO: 1628277 - RNA, 19 nt, Artificial Sequence
  Description of Artificial Sequence: Synthetic oligonucleotide
agcggaguuggagucacac

SEQ ID NO: 1628278 - RNA, 19 nt, Artificial Sequence
  Description of Artificial Sequence: Synthetic oligonucleotide
uggucgaauagcuggugcu

SEQ ID NO: 1628279 - RNA, 19 nt, Artificial Sequence
  Description of Artificial Sequence: Synthetic oligonucleotide
agaucacaggccucccagg

SEQ ID NO: 1628280 - RNA, 19 nt, Artificial Sequence
  Description of Artificial Sequence: Synthetic oligonucleotide
acucuugcggggaauacag

SEQ ID NO: 1628281 - RNA, 19 nt, Artificial Sequence
  Description of Artificial Sequence: Synthetic oligonucleotide
gauagugaucucuuccucu

SEQ ID NO: 1628282 - RNA, 19 nt, Artificial Sequence
  Description of Artificial Sequence: Synthetic oligonucleotide
cuucguugggagcaggcug

SEQ ID NO: 1628283 - RNA, 19 nt, Artificial Sequence
  Description of Artificial Sequence: Synthetic oligonucleotide
cugggaguaggugugacug

SEQ ID NO: 1628284 - RNA, 19 nt, Artificial Sequence
  Description of Artificial Sequence: Synthetic oligonucleotide
cugaaguacugcaggguug

SEQ ID NO: 1628285 - RNA, 19 nt, Artificial Sequence
  Description of Artificial Sequence: Synthetic oligonucleotide
gagaugguuccuuggggac

SEQ ID NO: 1628286 - RNA, 19 nt, Artificial Sequence
  Description of Artificial Sequence: Synthetic oligonucleotide
uagaauagccccacagcuu

SEQ ID NO: 1628287 - RNA, 19 nt, Artificial Sequence
  Description of Artificial Sequence: Synthetic oligonucleotide
cacucguagugcuucggcc

SEQ ID NO: 1628288 - RNA, 19 nt, Artificial Sequence
  Description of Artificial Sequence: Synthetic oligonucleotide
ugggaguaggugugacugg

SEQ ID NO: 1628289 - RNA, 19 nt, Artificial Sequence
  Description of Artificial Sequence: Synthetic oligonucleotide
ucacccaggcaacaguaau

SEQ ID NO: 1628290 - RNA, 19 nt, Artificial Sequence
  Description of Artificial Sequence: Synthetic oligonucleotide
gaaagugcuuccugaagua

SEQ ID NO: 1628291 - RNA, 19 nt, Artificial Sequence
  Description of Artificial Sequence: Synthetic oligonucleotide
cacagggccuucaggaggc

SEQ ID NO: 1628292 - RNA, 19 nt, Artificial Sequence
  Description of Artificial Sequence: Synthetic oligonucleotide
gaagaaggugcgucucaug

SEQ ID NO: 1628293 - RNA, 19 nt, Artificial Sequence
  Description of Artificial Sequence: Synthetic oligonucleotide
ugccucggacucuugcggg

SEQ ID NO: 1628294 - RNA, 19 nt, Artificial Sequence
  Description of Artificial Sequence: Synthetic oligonucleotide
uaugaagaaggugcgucuc

SEQ ID NO: 1628295 - RNA, 19 nt, Artificial Sequence
  Description of Artificial Sequence: Synthetic oligonucleotide
caauguccugcauagaaua

SEQ ID NO: 1628296 - RNA, 19 nt, Artificial Sequence
  Description of Artificial Sequence: Synthetic oligonucleotide
cuggucgaauagcuggugc

SEQ ID NO: 1628297 - RNA, 19 nt, Artificial Sequence
  Description of Artificial Sequence: Synthetic oligonucleotide
uguuaugaagaaggugcgu

SEQ ID NO: 1628298 - RNA, 19 nt, Artificial Sequence
  Description of Artificial Sequence: Synthetic oligonucleotide
ggugcuggaccccaucagg

SEQ ID NO: 1628299 - RNA, 19 nt, Artificial Sequence
  Description of Artificial Sequence: Synthetic oligonucleotide
ccuuccaagaucacaggcc

SEQ ID NO: 1628300 - RNA, 19 nt, Artificial Sequence
  Description of Artificial Sequence: Synthetic oligonucleotide
cugggaucuggucgaauag

SEQ ID NO: 1628301 - RNA, 19 nt, Artificial Sequence
  Description of Artificial Sequence: Synthetic oligonucleotide
cuucaugcauggccagugg

SEQ ID NO: 1628302 - RNA, 19 nt, Artificial Sequence
  Description of Artificial Sequence: Synthetic oligonucleotide
cauugauagugaucucuuc

SEQ ID NO: 1628303 - RNA, 19 nt, Artificial Sequence
  Description of Artificial Sequence: Synthetic oligonucleotide
gagcaagguacccaacguc

SEQ ID NO: 1628304 - RNA, 19 nt, Artificial Sequence
  Description of Artificial Sequence: Synthetic oligonucleotide
cgucuguguaccuugaacc

SEQ ID NO: 1628305 - RNA, 19 nt, Artificial Sequence
  Description of Artificial Sequence: Synthetic oligonucleotide
acguccuuugccucgcuca

SEQ ID NO: 1628306 - RNA, 19 nt, Artificial Sequence
  Description of Artificial Sequence: Synthetic oligonucleotide
cguaaugccaauacuuagc

SEQ ID NO: 1628307 - RNA, 19 nt, Artificial Sequence
  Description of Artificial Sequence: Synthetic oligonucleotide
aauagccccacagcuugcu

SEQ ID NO: 1628308 - RNA, 19 nt, Artificial Sequence
  Description of Artificial Sequence: Synthetic oligonucleotide
uggugcugagcaagguacc

SEQ ID NO: 1628309 - RNA, 19 nt, Artificial Sequence
  Description of Artificial Sequence: Synthetic oligonucleotide
guacugcaggguuggacag

SEQ ID NO: 1628310 - RNA, 19 nt, Artificial Sequence
  Description of Artificial Sequence: Synthetic oligonucleotide
cucuguuccaggcagaagu

SEQ ID NO: 1628311 - RNA, 19 nt, Artificial Sequence
  Description of Artificial Sequence: Synthetic oligonucleotide
cucagcaaacuugggaaac

SEQ ID NO: 1628312 - RNA, 19 nt, Artificial Sequence
  Description of Artificial Sequence: Synthetic oligonucleotide
caacaguaaucaggaaugc

SEQ ID NO: 1628313 - RNA, 19 nt, Artificial Sequence
  Description of Artificial Sequence: Synthetic oligonucleotide
caaggcgcgcacguaaugc

SEQ ID NO: 1628314 - RNA, 19 nt, Artificial Sequence
  Description of Artificial Sequence: Synthetic oligonucleotide
ugcauagaauagccccaca

SEQ ID NO: 1628315 - RNA, 19 nt, Artificial Sequence
  Description of Artificial Sequence: Synthetic oligonucleotide
agugcggcagccagcaauc

SEQ ID NO: 1628316 - RNA, 19 nt, Artificial Sequence
  Description of Artificial Sequence: Synthetic oligonucleotide
gggaaacuuguccagguca

SEQ ID NO: 1628317 - RNA, 19 nt, Artificial Sequence
  Description of Artificial Sequence: Synthetic oligonucleotide
ggggagaugguuccuuggg

SEQ ID NO: 1628318 - RNA, 19 nt, Artificial Sequence
  Description of Artificial Sequence: Synthetic oligonucleotide
ugggaaacuuguccagguc

SEQ ID NO: 1628319 - RNA, 19 nt, Artificial Sequence
  Description of Artificial Sequence: Synthetic oligonucleotide
gaggacugugacgacuuug

SEQ ID NO: 1628320 - RNA, 19 nt, Artificial Sequence
  Description of Artificial Sequence: Synthetic oligonucleotide
uggcuaugaccaccagaag

SEQ ID NO: 1628321 - RNA, 19 nt, Artificial Sequence
  Description of Artificial Sequence: Synthetic oligonucleotide
ggaaacuuguccaggucag

SEQ ID NO: 1628322 - RNA, 19 nt, Artificial Sequence
  Description of Artificial Sequence: Synthetic oligonucleotide
cuggggacaagaugcagga

SEQ ID NO: 1628323 - RNA, 19 nt, Artificial Sequence
  Description of Artificial Sequence: Synthetic oligonucleotide
aggaauggggccucagcaa

SEQ ID NO: 1628324 - RNA, 19 nt, Artificial Sequence
  Description of Artificial Sequence: Synthetic oligonucleotide
ugagaagcucagguccaag

SEQ ID NO: 1628325 - RNA, 19 nt, Artificial Sequence
  Description of Artificial Sequence: Synthetic oligonucleotide
ugccugguggguccuuugc

SEQ ID NO: 1628326 - RNA, 19 nt, Artificial Sequence
  Description of Artificial Sequence: Synthetic oligonucleotide
ucaugagggccugggacca

SEQ ID NO: 1628327 - RNA, 19 nt, Artificial Sequence
  Description of Artificial Sequence: Synthetic oligonucleotide
aguuggagucacaccucgc

SEQ ID NO: 1628328 - RNA, 19 nt, Artificial Sequence
  Description of Artificial Sequence: Synthetic oligonucleotide
cacguaaugccaauacuua

SEQ ID NO: 1628329 - RNA, 19 nt, Artificial Sequence
  Description of Artificial Sequence: Synthetic oligonucleotide
ugaagaaggugcgucucau

SEQ ID NO: 1628330 - RNA, 19 nt, Artificial Sequence
  Description of Artificial Sequence: Synthetic oligonucleotide
acuggaggacugugacgac

SEQ ID NO: 1628331 - RNA, 19 nt, Artificial Sequence
  Description of Artificial Sequence: Synthetic oligonucleotide
aggaguaguccaggauggc

SEQ ID NO: 1628332 - RNA, 19 nt, Artificial Sequence
  Description of Artificial Sequence: Synthetic oligonucleotide
aggacugugacgacuuuga

SEQ ID NO: 1628333 - RNA, 19 nt, Artificial Sequence
  Description of Artificial Sequence: Synthetic oligonucleotide
ccuuccuaacaccuggacc

SEQ ID NO: 1628334 - RNA, 19 nt, Artificial Sequence
  Description of Artificial Sequence: Synthetic oligonucleotide
aggcugguccuggugaggg

SEQ ID NO: 1628335 - RNA, 19 nt, Artificial Sequence
  Description of Artificial Sequence: Synthetic oligonucleotide
caggguucucaacaucaac

SEQ ID NO: 1628336 - RNA, 19 nt, Artificial Sequence
  Description of Artificial Sequence: Synthetic oligonucleotide
ggacuguuggaaucuagca

SEQ ID NO: 1628337 - RNA, 19 nt, Artificial Sequence
  Description of Artificial Sequence: Synthetic oligonucleotide
uguccacaucuugccaggg

SEQ ID NO: 1628338 - RNA, 19 nt, Artificial Sequence
  Description of Artificial Sequence: Synthetic oligonucleotide
agcaggacuguuggaaucu

SEQ ID NO: 1628339 - RNA, 19 nt, Artificial Sequence
  Description of Artificial Sequence: Synthetic oligonucleotide
caauacuuagcagguauaa

SEQ ID NO: 1628340 - RNA, 19 nt, Artificial Sequence
  Description of Artificial Sequence: Synthetic oligonucleotide
gguacugcccgcucuacca

SEQ ID NO: 1628341 - RNA, 19 nt, Artificial Sequence
  Description of Artificial Sequence: Synthetic oligonucleotide
cuuccaagaucacaggccu

SEQ ID NO: 1628342 - RNA, 19 nt, Artificial Sequence
  Description of Artificial Sequence: Synthetic oligonucleotide
uagcagguauaaagagggu

SEQ ID NO: 1628343 - RNA, 19 nt, Artificial Sequence
  Description of Artificial Sequence: Synthetic oligonucleotide
uggaaucuagcagcaucca

SEQ ID NO: 1628344 - RNA, 19 nt, Artificial Sequence
  Description of Artificial Sequence: Synthetic oligonucleotide
aaguacccugagguccuuc

SEQ ID NO: 1628345 - RNA, 19 nt, Artificial Sequence
  Description of Artificial Sequence: Synthetic oligonucleotide
ggauguacuuccuuccuaa

SEQ ID NO: 1628346 - RNA, 19 nt, Artificial Sequence
  Description of Artificial Sequence: Synthetic oligonucleotide
uccuaacaccuggaccagg

SEQ ID NO: 1628347 - RNA, 19 nt, Artificial Sequence
  Description of Artificial Sequence: Synthetic oligonucleotide
cacacacucguagugcuuc

SEQ ID NO: 1628348 - RNA, 19 nt, Artificial Sequence
  Description of Artificial Sequence: Synthetic oligonucleotide
aaggugcgucucaugagga

SEQ ID NO: 1628349 - RNA, 19 nt, Artificial Sequence
  Description of Artificial Sequence: Synthetic oligonucleotide
caagaugcaggacaggaau

SEQ ID NO: 1628350 - RNA, 19 nt, Artificial Sequence
  Description of Artificial Sequence: Synthetic oligonucleotide
agggugcuggaccccauca

SEQ ID NO: 1628351 - RNA, 19 nt, Artificial Sequence
  Description of Artificial Sequence: Synthetic oligonucleotide
agaaguacccugagguccu

SEQ ID NO: 1628352 - RNA, 19 nt, Artificial Sequence
  Description of Artificial Sequence: Synthetic oligonucleotide
agccccacagcuugcuuca

SEQ ID NO: 1628353 - RNA, 19 nt, Artificial Sequence
  Description of Artificial Sequence: Synthetic oligonucleotide
gaggauacacugccucgga

SEQ ID NO: 1628354 - RNA, 19 nt, Artificial Sequence
  Description of Artificial Sequence: Synthetic oligonucleotide
cucguagugcuucggccac

SEQ ID NO: 1628355 - RNA, 19 nt, Artificial Sequence
  Description of Artificial Sequence: Synthetic oligonucleotide
ucucaacaucaaccuggcu

SEQ ID NO: 1628356 - RNA, 19 nt, Artificial Sequence
  Description of Artificial Sequence: Synthetic oligonucleotide
gugagggccacaggcaagc

SEQ ID NO: 1628357 - RNA, 19 nt, Artificial Sequence
  Description of Artificial Sequence: Synthetic oligonucleotide
ucaaccuggcugguguuau

SEQ ID NO: 1628358 - RNA, 19 nt, Artificial Sequence
  Description of Artificial Sequence: Synthetic oligonucleotide
cuguuggaaucuagcagca

SEQ ID NO: 1628359 - RNA, 19 nt, Artificial Sequence
  Description of Artificial Sequence: Synthetic oligonucleotide
gaguaguccaggauggccu

SEQ ID NO: 1628360 - RNA, 19 nt, Artificial Sequence
  Description of Artificial Sequence: Synthetic oligonucleotide
uucgucuguguaccuugaa

SEQ ID NO: 1628361 - RNA, 19 nt, Artificial Sequence
  Description of Artificial Sequence: Synthetic oligonucleotide
uggcugguguuaugaagaa

SEQ ID NO: 1628362 - RNA, 19 nt, Artificial Sequence
  Description of Artificial Sequence: Synthetic oligonucleotide
agguauaaagagggucucu

SEQ ID NO: 1628363 - RNA, 19 nt, Artificial Sequence
  Description of Artificial Sequence: Synthetic oligonucleotide
ugggaccagucuucgucug

SEQ ID NO: 1628364 - RNA, 19 nt, Artificial Sequence
  Description of Artificial Sequence: Synthetic oligonucleotide
gccucagcaaacuugggaa

SEQ ID NO: 1628365 - RNA, 19 nt, Artificial Sequence
  Description of Artificial Sequence: Synthetic oligonucleotide
aggaguauacacggcgcca

SEQ ID NO: 1628366 - RNA, 19 nt, Artificial Sequence
  Description of Artificial Sequence: Synthetic oligonucleotide
ucggccacugcaguagccu

SEQ ID NO: 1628367 - RNA, 19 nt, Artificial Sequence
  Description of Artificial Sequence: Synthetic oligonucleotide
uccaaggcgcgcacguaau

SEQ ID NO: 1628368 - RNA, 19 nt, Artificial Sequence
  Description of Artificial Sequence: Synthetic oligonucleotide
cucuugcggggaauacagc

SEQ ID NO: 1628369 - RNA, 19 nt, Artificial Sequence
  Description of Artificial Sequence: Synthetic oligonucleotide
cuaugaccaccagaagcug

SEQ ID NO: 1628370 - RNA, 19 nt, Artificial Sequence
  Description of Artificial Sequence: Synthetic oligonucleotide
acagugaagccuggguacu

SEQ ID NO: 1628371 - RNA, 19 nt, Artificial Sequence
  Description of Artificial Sequence: Synthetic oligonucleotide
gaauggggccucagcaaac

SEQ ID NO: 1628372 - RNA, 19 nt, Artificial Sequence
  Description of Artificial Sequence: Synthetic oligonucleotide
accucgccuucguugggag

SEQ ID NO: 1628373 - RNA, 19 nt, Artificial Sequence
  Description of Artificial Sequence: Synthetic oligonucleotide
agucacaccucgccuucgu

SEQ ID NO: 1628374 - RNA, 19 nt, Artificial Sequence
  Description of Artificial Sequence: Synthetic oligonucleotide
ccagucuucgucuguguac

SEQ ID NO: 1628375 - RNA, 19 nt, Artificial Sequence
  Description of Artificial Sequence: Synthetic oligonucleotide
cagguauaaagagggucuc

SEQ ID NO: 1628376 - RNA, 19 nt, Artificial Sequence
  Description of Artificial Sequence: Synthetic oligonucleotide
ugcggcagccagcaaucuc

SEQ ID NO: 1628377 - RNA, 19 nt, Artificial Sequence
  Description of Artificial Sequence: Synthetic oligonucleotide
gugcgucucaugaggauac

SEQ ID NO: 1628378 - RNA, 19 nt, Artificial Sequence
  Description of Artificial Sequence: Synthetic oligonucleotide
cacacugggagcggaguug

SEQ ID NO: 1628379 - RNA, 19 nt, Artificial Sequence
  Description of Artificial Sequence: Synthetic oligonucleotide
cucgccuucguugggagca

SEQ ID NO: 1628380 - RNA, 19 nt, Artificial Sequence
  Description of Artificial Sequence: Synthetic oligonucleotide
ccaaaggaguauacacggc

SEQ ID NO: 1628381 - RNA, 19 nt, Artificial Sequence
  Description of Artificial Sequence: Synthetic oligonucleotide
gccggauguacuuccuucc

SEQ ID NO: 1628382 - RNA, 19 nt, Artificial Sequence
  Description of Artificial Sequence: Synthetic oligonucleotide
acaagaugcaggacaggaa

SEQ ID NO: 1628383 - RNA, 19 nt, Artificial Sequence
  Description of Artificial Sequence: Synthetic oligonucleotide
cagcauccagggccuaugc

SEQ ID NO: 1628384 - RNA, 19 nt, Artificial Sequence
  Description of Artificial Sequence: Synthetic oligonucleotide
accagucuucgucugugua

SEQ ID NO: 1628385 - RNA, 19 nt, Artificial Sequence
  Description of Artificial Sequence: Synthetic oligonucleotide
gaauagccccacagcuugc

SEQ ID NO: 1628386 - RNA, 19 nt, Artificial Sequence
  Description of Artificial Sequence: Synthetic oligonucleotide
cacaccuuccaagaucaca

SEQ ID NO: 1628387 - RNA, 19 nt, Artificial Sequence
  Description of Artificial Sequence: Synthetic oligonucleotide
gagucacaccucgccuucg

SEQ ID NO: 1628388 - RNA, 19 nt, Artificial Sequence
  Description of Artificial Sequence: Synthetic oligonucleotide
ggcaagcugcuuuccuggg

SEQ ID NO: 1628389 - RNA, 19 nt, Artificial Sequence
  Description of Artificial Sequence: Synthetic oligonucleotide
gcuaugaccaccagaagcu

SEQ ID NO: 1628390 - RNA, 19 nt, Artificial Sequence
  Description of Artificial Sequence: Synthetic oligonucleotide
cacgcuccuguccaccuuc

SEQ ID NO: 1628391 - RNA, 19 nt, Artificial Sequence
  Description of Artificial Sequence: Synthetic oligonucleotide
gucgaauagcuggugcuga

SEQ ID NO: 1628392 - RNA, 19 nt, Artificial Sequence
  Description of Artificial Sequence: Synthetic oligonucleotide
cacacucguagugcuucgg

SEQ ID NO: 1628393 - RNA, 19 nt, Artificial Sequence
  Description of Artificial Sequence: Synthetic oligonucleotide
ccuuggggaccaaaccagg

SEQ ID NO: 1628394 - RNA, 19 nt, Artificial Sequence
  Description of Artificial Sequence: Synthetic oligonucleotide
ccugggaccagucuucguc

SEQ ID NO: 1628395 - RNA, 19 nt, Artificial Sequence
  Description of Artificial Sequence: Synthetic oligonucleotide
ggauacacugccucggacu

SEQ ID NO: 1628396 - RNA, 19 nt, Artificial Sequence
  Description of Artificial Sequence: Synthetic oligonucleotide
cccaacguccuuugccucg

SEQ ID NO: 1628397 - RNA, 19 nt, Artificial Sequence
  Description of Artificial Sequence: Synthetic oligonucleotide
agcuucucccaggaguagu

SEQ ID NO: 1628398 - RNA, 19 nt, Artificial Sequence
  Description of Artificial Sequence: Synthetic oligonucleotide
gaacccacuuccacaggga

SEQ ID NO: 1628399 - RNA, 19 nt, Artificial Sequence
  Description of Artificial Sequence: Synthetic oligonucleotide
ggucgaauagcuggugcug

SEQ ID NO: 1628400 - RNA, 19 nt, Artificial Sequence
  Description of Artificial Sequence: Synthetic oligonucleotide
aucuggucgaauagcuggu

SEQ ID NO: 1628401 - RNA, 19 nt, Artificial Sequence
  Description of Artificial Sequence: Synthetic oligonucleotide
ggucaugaugcagugggga

SEQ ID NO: 1628402 - RNA, 19 nt, Artificial Sequence
  Description of Artificial Sequence: Synthetic oligonucleotide
uguuggaaucuagcagcau

SEQ ID NO: 1628403 - RNA, 19 nt, Artificial Sequence
  Description of Artificial Sequence: Synthetic oligonucleotide
ggacugugacgacuuugag

SEQ ID NO: 1628404 - RNA, 19 nt, Artificial Sequence
  Description of Artificial Sequence: Synthetic oligonucleotide
ugcggggaauacagccgga

SEQ ID NO: 1628405 - RNA, 19 nt, Artificial Sequence
  Description of Artificial Sequence: Synthetic oligonucleotide
ggugcugagcaagguaccc

SEQ ID NO: 1628406 - RNA, 19 nt, Artificial Sequence
  Description of Artificial Sequence: Synthetic oligonucleotide
guccugcauagaauagccc

SEQ ID NO: 1628407 - RNA, 19 nt, Artificial Sequence
  Description of Artificial Sequence: Synthetic oligonucleotide
uccccgucacccaggcaac

SEQ ID NO: 1628408 - RNA, 19 nt, Artificial Sequence
  Description of Artificial Sequence: Synthetic oligonucleotide
aggugugacuggaggacug

SEQ ID NO: 1628409 - RNA, 19 nt, Artificial Sequence
  Description of Artificial Sequence: Synthetic oligonucleotide
cugugacgacuuugagaag

SEQ ID NO: 1628410 - RNA, 19 nt, Artificial Sequence
  Description of Artificial Sequence: Synthetic oligonucleotide
cacggcgccauuccuuguc

SEQ ID NO: 1628411 - RNA, 19 nt, Artificial Sequence
  Description of Artificial Sequence: Synthetic oligonucleotide
ccuugaacccacuuccaca

SEQ ID NO: 1628412 - RNA, 19 nt, Artificial Sequence
  Description of Artificial Sequence: Synthetic oligonucleotide
caagaucacaggccuccca

SEQ ID NO: 1628413 - RNA, 19 nt, Artificial Sequence
  Description of Artificial Sequence: Synthetic oligonucleotide
gggaccaaaccaggcauug

SEQ ID NO: 1628414 - RNA, 19 nt, Artificial Sequence
  Description of Artificial Sequence: Synthetic oligonucleotide
gcgcacguaaugccaauac

SEQ ID NO: 1628415 - RNA, 19 nt, Artificial Sequence
  Description of Artificial Sequence: Synthetic oligonucleotide
ggcauugauagugaucucu

SEQ ID NO: 1628416 - RNA, 19 nt, Artificial Sequence
  Description of Artificial Sequence: Synthetic oligonucleotide
agcucagguccaaggcgcg

SEQ ID NO: 1628417 - RNA, 19 nt, Artificial Sequence
  Description of Artificial Sequence: Synthetic oligonucleotide
cuucgucuguguaccuuga

SEQ ID NO: 1628418 - RNA, 19 nt, Artificial Sequence
  Description of Artificial Sequence: Synthetic oligonucleotide
gaccccaucaggggcucug

SEQ ID NO: 1628419 - RNA, 19 nt, Artificial Sequence
  Description of Artificial Sequence: Synthetic oligonucleotide
ggaauacagccggauguac

SEQ ID NO: 1628420 - RNA, 19 nt, Artificial Sequence
  Description of Artificial Sequence: Synthetic oligonucleotide
gccaauacuuagcagguau

SEQ ID NO: 1628421 - RNA, 19 nt, Artificial Sequence
  Description of Artificial Sequence: Synthetic oligonucleotide
cagggccuaugccuucccc

SEQ ID NO: 1628422 - RNA, 19 nt, Artificial Sequence
  Description of Artificial Sequence: Synthetic oligonucleotide
uacugcaggguuggacagu

SEQ ID NO: 1628423 - RNA, 19 nt, Artificial Sequence
  Description of Artificial Sequence: Synthetic oligonucleotide
ugagggccugggaccaguc

SEQ ID NO: 1628424 - RNA, 19 nt, Artificial Sequence
  Description of Artificial Sequence: Synthetic oligonucleotide
uccugggaguaggugugac

SEQ ID NO: 1628425 - RNA, 19 nt, Artificial Sequence
  Description of Artificial Sequence: Synthetic oligonucleotide
agcccaugucacacacucg

SEQ ID NO: 1628426 - RNA, 19 nt, Artificial Sequence
  Description of Artificial Sequence: Synthetic oligonucleotide
ccugcauagaauagcccca

SEQ ID NO: 1628427 - RNA, 19 nt, Artificial Sequence
  Description of Artificial Sequence: Synthetic oligonucleotide
cugguguuaugaagaaggu

SEQ ID NO: 1628428 - RNA, 19 nt, Artificial Sequence
  Description of Artificial Sequence: Synthetic oligonucleotide
guacccugagguccuucca

SEQ ID NO: 1628429 - RNA, 19 nt, Artificial Sequence
  Description of Artificial Sequence: Synthetic oligonucleotide
caaccuggcugguguuaug

SEQ ID NO: 1628430 - RNA, 19 nt, Artificial Sequence
  Description of Artificial Sequence: Synthetic oligonucleotide
gagggugcuggaccccauc

SEQ ID NO: 1628431 - RNA, 19 nt, Artificial Sequence
  Description of Artificial Sequence: Synthetic oligonucleotide
gggugcuggaccccaucag

SEQ ID NO: 1628432 - RNA, 19 nt, Artificial Sequence
  Description of Artificial Sequence: Synthetic oligonucleotide
ccaguggucagccacaccu

SEQ ID NO: 1628433 - RNA, 19 nt, Artificial Sequence
  Description of Artificial Sequence: Synthetic oligonucleotide
caaaccaggcauugauagu

SEQ ID NO: 1628434 - RNA, 19 nt, Artificial Sequence
  Description of Artificial Sequence: Synthetic oligonucleotide
ggaccagucuucgucugug

SEQ ID NO: 1628435 - RNA, 19 nt, Artificial Sequence
  Description of Artificial Sequence: Synthetic oligonucleotide
ccaccagaagcugacugag

SEQ ID NO: 1628436 - RNA, 19 nt, Artificial Sequence
  Description of Artificial Sequence: Synthetic oligonucleotide
ggagucacaccucgccuuc

SEQ ID NO: 1628437 - RNA, 19 nt, Artificial Sequence
  Description of Artificial Sequence: Synthetic oligonucleotide
aguggggagaugguuccuu

SEQ ID NO: 1628438 - RNA, 19 nt, Artificial Sequence
  Description of Artificial Sequence: Synthetic oligonucleotide
gcggaguuggagucacacc

SEQ ID NO: 1628439 - RNA, 19 nt, Artificial Sequence
  Description of Artificial Sequence: Synthetic oligonucleotide
ucgcuggccugcaggcacu

SEQ ID NO: 1628440 - RNA, 19 nt, Artificial Sequence
  Description of Artificial Sequence: Synthetic oligonucleotide
gugcuuccugaaguacugc

SEQ ID NO: 1628441 - RNA, 19 nt, Artificial Sequence
  Description of Artificial Sequence: Synthetic oligonucleotide
ugccaauacuuagcaggua

SEQ ID NO: 1628442 - RNA, 19 nt, Artificial Sequence
  Description of Artificial Sequence: Synthetic oligonucleotide
uuccugggaguagguguga

SEQ ID NO: 1628443 - RNA, 19 nt, Artificial Sequence
  Description of Artificial Sequence: Synthetic oligonucleotide
auacacggcgccauuccuu

SEQ ID NO: 1628444 - RNA, 19 nt, Artificial Sequence
  Description of Artificial Sequence: Synthetic oligonucleotide
gcccaugucacacacucgu

SEQ ID NO: 1628445 - RNA, 19 nt, Artificial Sequence
  Description of Artificial Sequence: Synthetic oligonucleotide
ugcgucucaugaggauaca

SEQ ID NO: 1628446 - RNA, 19 nt, Artificial Sequence
  Description of Artificial Sequence: Synthetic oligonucleotide
auagccccacagcuugcuu

SEQ ID NO: 1628447 - RNA, 19 nt, Artificial Sequence
  Description of Artificial Sequence: Synthetic oligonucleotide
cacugcaguagccuucugu

SEQ ID NO: 1628448 - RNA, 19 nt, Artificial Sequence
  Description of Artificial Sequence: Synthetic oligonucleotide
aggcaacaguaaucaggaa

SEQ ID NO: 1628449 - RNA, 19 nt, Artificial Sequence
  Description of Artificial Sequence: Synthetic oligonucleotide
cuaacaccuggaccaggaa

SEQ ID NO: 1628450 - RNA, 19 nt, Artificial Sequence
  Description of Artificial Sequence: Synthetic oligonucleotide
cccauuaauaagcccaugu

SEQ ID NO: 1628451 - RNA, 19 nt, Artificial Sequence
  Description of Artificial Sequence: Synthetic oligonucleotide
gggucaugaugcagugggg

SEQ ID NO: 1628452 - RNA, 19 nt, Artificial Sequence
  Description of Artificial Sequence: Synthetic oligonucleotide
ucacgcuccuguccaccuu

SEQ ID NO: 1628453 - RNA, 19 nt, Artificial Sequence
  Description of Artificial Sequence: Synthetic oligonucleotide
cugccugguggguccuuug

SEQ ID NO: 1628454 - RNA, 19 nt, Artificial Sequence
  Description of Artificial Sequence: Synthetic oligonucleotide
ccgcucuaccaccacacug

SEQ ID NO: 1628455 - RNA, 19 nt, Artificial Sequence
  Description of Artificial Sequence: Synthetic oligonucleotide
cugggaccagucuucgucu

SEQ ID NO: 1628456 - RNA, 19 nt, Artificial Sequence
  Description of Artificial Sequence: Synthetic oligonucleotide
ucgccuucguugggagcag

SEQ ID NO: 1628457 - RNA, 19 nt, Artificial Sequence
  Description of Artificial Sequence: Synthetic oligonucleotide
gggagcaggcugguccugg

SEQ ID NO: 1628458 - RNA, 19 nt, Artificial Sequence
  Description of Artificial Sequence: Synthetic oligonucleotide
cacaucuugccagggccca

SEQ ID NO: 1628459 - RNA, 19 nt, Artificial Sequence
  Description of Artificial Sequence: Synthetic oligonucleotide
cccugagguccuuccagag

SEQ ID NO: 1628460 - RNA, 19 nt, Artificial Sequence
  Description of Artificial Sequence: Synthetic oligonucleotide
caugaugcaguggggagau

SEQ ID NO: 1628461 - RNA, 19 nt, Artificial Sequence
  Description of Artificial Sequence: Synthetic oligonucleotide
gcacguaaugccaauacuu

SEQ ID NO: 1628462 - RNA, 19 nt, Artificial Sequence
  Description of Artificial Sequence: Synthetic oligonucleotide
ucguagugcuucggccacu

SEQ ID NO: 1628463 - RNA, 19 nt, Artificial Sequence
  Description of Artificial Sequence: Synthetic oligonucleotide
gaaguacugcaggguugga

SEQ ID NO: 1628464 - RNA, 19 nt, Artificial Sequence
  Description of Artificial Sequence: Synthetic oligonucleotide
acagccggauguacuuccu

SEQ ID NO: 1628465 - RNA, 19 nt, Artificial Sequence
  Description of Artificial Sequence: Synthetic oligonucleotide
ggaaugcugauguccugcu

SEQ ID NO: 1628466 - RNA, 19 nt, Artificial Sequence
  Description of Artificial Sequence: Synthetic oligonucleotide
cagggcccaguguugagcu

SEQ ID NO: 1628467 - RNA, 19 nt, Artificial Sequence
  Description of Artificial Sequence: Synthetic oligonucleotide
ggugcgucucaugaggaua

SEQ ID NO: 1628468 - RNA, 19 nt, Artificial Sequence
  Description of Artificial Sequence: Synthetic oligonucleotide
aggcgcgcacguaaugcca

SEQ ID NO: 1628469 - RNA, 19 nt, Artificial Sequence
  Description of Artificial Sequence: Synthetic oligonucleotide
cagcauagucacgcuccug

SEQ ID NO: 1628470 - RNA, 19 nt, Artificial Sequence
  Description of Artificial Sequence: Synthetic oligonucleotide
ucggacucuugcggggaau

SEQ ID NO: 1628471 - RNA, 19 nt, Artificial Sequence
  Description of Artificial Sequence: Synthetic oligonucleotide
acacggcgccauuccuugu

SEQ ID NO: 1628472 - RNA, 19 nt, Artificial Sequence
  Description of Artificial Sequence: Synthetic oligonucleotide
ccuggcuaugaccaccaga

SEQ ID NO: 1628473 - RNA, 19 nt, Artificial Sequence
  Description of Artificial Sequence: Synthetic oligonucleotide
ucguugggagcaggcuggu

SEQ ID NO: 1628474 - RNA, 19 nt, Artificial Sequence
  Description of Artificial Sequence: Synthetic oligonucleotide
cuggaccccaucaggggcu

SEQ ID NO: 1628475 - RNA, 19 nt, Artificial Sequence
  Description of Artificial Sequence: Synthetic oligonucleotide
acaccuggaccaggaaguu

SEQ ID NO: 1628476 - RNA, 19 nt, Artificial Sequence
  Description of Artificial Sequence: Synthetic oligonucleotide
ccaauacuuagcagguaua

SEQ ID NO: 1628477 - RNA, 19 nt, Artificial Sequence
  Description of Artificial Sequence: Synthetic oligonucleotide
ccugccaauguccugcaua

SEQ ID NO: 1628478 - RNA, 19 nt, Artificial Sequence
  Description of Artificial Sequence: Synthetic oligonucleotide
gggcccaguguugagcuuc

SEQ ID NO: 1628479 - RNA, 19 nt, Artificial Sequence
  Description of Artificial Sequence: Synthetic oligonucleotide
gucacccaggcaacaguaa

SEQ ID NO: 1628480 - RNA, 19 nt, Artificial Sequence
  Description of Artificial Sequence: Synthetic oligonucleotide
caggacaggaauggggccu

SEQ ID NO: 1628481 - RNA, 19 nt, Artificial Sequence
  Description of Artificial Sequence: Synthetic oligonucleotide
cagugcggcagccagcaau

SEQ ID NO: 1628482 - RNA, 19 nt, Artificial Sequence
  Description of Artificial Sequence: Synthetic oligonucleotide
ggccugggaccagucuucg

SEQ ID NO: 1628483 - RNA, 19 nt, Artificial Sequence
  Description of Artificial Sequence: Synthetic oligonucleotide
gcgucucaugaggauacac

SEQ ID NO: 1628484 - RNA, 19 nt, Artificial Sequence
  Description of Artificial Sequence: Synthetic oligonucleotide
cugccucugggugaggugu

SEQ ID NO: 1628485 - RNA, 19 nt, Artificial Sequence
  Description of Artificial Sequence: Synthetic oligonucleotide
ccaacguccuuugccucgc

SEQ ID NO: 1628486 - RNA, 19 nt, Artificial Sequence
  Description of Artificial Sequence: Synthetic oligonucleotide
cuggguacugcccgcucua

SEQ ID NO: 1628487 - RNA, 19 nt, Artificial Sequence
  Description of Artificial Sequence: Synthetic oligonucleotide
ggaggcagccaaaggagua

SEQ ID NO: 1628488 - RNA, 19 nt, Artificial Sequence
  Description of Artificial Sequence: Synthetic oligonucleotide
cgcucaggauguauuugug

SEQ ID NO: 1628489 - RNA, 19 nt, Artificial Sequence
  Description of Artificial Sequence: Synthetic oligonucleotide
ccaaggcgcgcacguaaug

SEQ ID NO: 1628490 - RNA, 19 nt, Artificial Sequence
  Description of Artificial Sequence: Synthetic oligonucleotide
agccuggguacugcccgcu

SEQ ID NO: 1628491 - RNA, 19 nt, Artificial Sequence
  Description of Artificial Sequence: Synthetic oligonucleotide
ggaugucuccaaggaucgc

SEQ ID NO: 1628492 - RNA, 19 nt, Artificial Sequence
  Description of Artificial Sequence: Synthetic oligonucleotide
cuggaggacugugacgacu

SEQ ID NO: 1628493 - RNA, 19 nt, Artificial Sequence
  Description of Artificial Sequence: Synthetic oligonucleotide
gccuucguugggagcaggc

SEQ ID NO: 1628494 - RNA, 19 nt, Artificial Sequence
  Description of Artificial Sequence: Synthetic oligonucleotide
augaugcaguggggagaug

SEQ ID NO: 1628495 - RNA, 19 nt, Artificial Sequence
  Description of Artificial Sequence: Synthetic oligonucleotide
ggaccaaaccaggcauuga

SEQ ID NO: 1628496 - RNA, 19 nt, Artificial Sequence
  Description of Artificial Sequence: Synthetic oligonucleotide
ggaguauacacggcgccau

SEQ ID NO: 1628497 - RNA, 19 nt, Artificial Sequence
  Description of Artificial Sequence: Synthetic oligonucleotide
cggggaauacagccggaug

SEQ ID NO: 1628498 - RNA, 19 nt, Artificial Sequence
  Description of Artificial Sequence: Synthetic oligonucleotide
ccaauguccugcauagaau

SEQ ID NO: 1628499 - RNA, 19 nt, Artificial Sequence
  Description of Artificial Sequence: Synthetic oligonucleotide
cugcccgcucuaccaccac

SEQ ID NO: 1628500 - RNA, 19 nt, Artificial Sequence
  Description of Artificial Sequence: Synthetic oligonucleotide
acagugcggcagccagcaa

SEQ ID NO: 1628501 - RNA, 19 nt, Artificial Sequence
  Description of Artificial Sequence: Synthetic oligonucleotide
cgucucaugaggauacacu

SEQ ID NO: 1628502 - RNA, 19 nt, Artificial Sequence
  Description of Artificial Sequence: Synthetic oligonucleotide
ccucgccuucguugggagc

SEQ ID NO: 1628503 - RNA, 19 nt, Artificial Sequence
  Description of Artificial Sequence: Synthetic oligonucleotide
caagguacccaacguccuu

SEQ ID NO: 1628504 - RNA, 19 nt, Artificial Sequence
  Description of Artificial Sequence: Synthetic oligonucleotide
gccaguggucagccacacc

SEQ ID NO: 1628505 - RNA, 19 nt, Artificial Sequence
  Description of Artificial Sequence: Synthetic oligonucleotide
agggcccaguguugagcuu

SEQ ID NO: 1628506 - RNA, 19 nt, Artificial Sequence
  Description of Artificial Sequence: Synthetic oligonucleotide
cucggacucuugcggggaa

SEQ ID NO: 1628507 - RNA, 19 nt, Artificial Sequence
  Description of Artificial Sequence: Synthetic oligonucleotide
ccucuguuccaggcagaag

SEQ ID NO: 1628508 - RNA, 19 nt, Artificial Sequence
  Description of Artificial Sequence: Synthetic oligonucleotide
gcaagguacccaacguccu

SEQ ID NO: 1628509 - RNA, 19 nt, Artificial Sequence
  Description of Artificial Sequence: Synthetic oligonucleotide
gcagcauagucacgcuccu

SEQ ID NO: 1628510 - RNA, 19 nt, Artificial Sequence
  Description of Artificial Sequence: Synthetic oligonucleotide
cacugggagcggaguugga

SEQ ID NO: 1628511 - RNA, 19 nt, Artificial Sequence
  Description of Artificial Sequence: Synthetic oligonucleotide
cuuccccgucacccaggca

SEQ ID NO: 1628512 - RNA, 19 nt, Artificial Sequence
  Description of Artificial Sequence: Synthetic oligonucleotide
agagggugcuggaccccau

SEQ ID NO: 1628513 - RNA, 19 nt, Artificial Sequence
  Description of Artificial Sequence: Synthetic oligonucleotide
ccccauuaauaagcccaug

SEQ ID NO: 1628514 - RNA, 19 nt, Artificial Sequence
  Description of Artificial Sequence: Synthetic oligonucleotide
cacugccucugggugaggu

SEQ ID NO: 1628515 - RNA, 19 nt, Artificial Sequence
  Description of Artificial Sequence: Synthetic oligonucleotide
ggugaggugucugccuggu

SEQ ID NO: 1628516 - RNA, 19 nt, Artificial Sequence
  Description of Artificial Sequence: Synthetic oligonucleotide
gagcggaguuggagucaca

SEQ ID NO: 1628517 - RNA, 19 nt, Artificial Sequence
  Description of Artificial Sequence: Synthetic oligonucleotide
ggcgcgcacguaaugccaa

SEQ ID NO: 1628518 - RNA, 19 nt, Artificial Sequence
  Description of Artificial Sequence: Synthetic oligonucleotide
ccacaccuuccaagaucac

SEQ ID NO: 1628519 - RNA, 19 nt, Artificial Sequence
  Description of Artificial Sequence: Synthetic oligonucleotide
gucacaccucgccuucguu

SEQ ID NO: 1628520 - RNA, 19 nt, Artificial Sequence
  Description of Artificial Sequence: Synthetic oligonucleotide
gggaccagucuucgucugu

SEQ ID NO: 1628521 - RNA, 19 nt, Artificial Sequence
  Description of Artificial Sequence: Synthetic oligonucleotide
ggugugacuggaggacugu

SEQ ID NO: 1628522 - RNA, 19 nt, Artificial Sequence
  Description of Artificial Sequence: Synthetic oligonucleotide
caguggucagccacaccuu

SEQ ID NO: 1628523 - RNA, 19 nt, Artificial Sequence
  Description of Artificial Sequence: Synthetic oligonucleotide
gccacugcaguagccuucu

SEQ ID NO: 1628524 - RNA, 19 nt, Artificial Sequence
  Description of Artificial Sequence: Synthetic oligonucleotide
ccugggaguaggugugacu

SEQ ID NO: 1628525 - RNA, 19 nt, Artificial Sequence
  Description of Artificial Sequence: Synthetic oligonucleotide
cccaugucacacacucgua

SEQ ID NO: 1628526 - RNA, 19 nt, Artificial Sequence
  Description of Artificial Sequence: Synthetic oligonucleotide
caacaucaaccuggcuggu

SEQ ID NO: 1628527 - RNA, 19 nt, Artificial Sequence
  Description of Artificial Sequence: Synthetic oligonucleotide
cgcacguaaugccaauacu

SEQ ID NO: 1628528 - RNA, 19 nt, Artificial Sequence
  Description of Artificial Sequence: Synthetic oligonucleotide
ccggauguacuuccuuccu

SEQ ID NO: 1628529 - RNA, 19 nt, Artificial Sequence
  Description of Artificial Sequence: Synthetic oligonucleotide
gaaguacccugagguccuu

SEQ ID NO: 1628530 - RNA, 19 nt, Artificial Sequence
  Description of Artificial Sequence: Synthetic oligonucleotide
ggccucccaggaacuagaa

SEQ ID NO: 1628531 - RNA, 19 nt, Artificial Sequence
  Description of Artificial Sequence: Synthetic oligonucleotide
cagccggauguacuuccuu

SEQ ID NO: 1628532 - RNA, 19 nt, Artificial Sequence
  Description of Artificial Sequence: Synthetic oligonucleotide
gguccaaggcgcgcacgua

SEQ ID NO: 1628533 - RNA, 19 nt, Artificial Sequence
  Description of Artificial Sequence: Synthetic oligonucleotide
gugcggcagccagcaaucu

SEQ ID NO: 1628534 - RNA, 19 nt, Artificial Sequence
  Description of Artificial Sequence: Synthetic oligonucleotide
caacguccuuugccucgcu

SEQ ID NO: 1628535 - RNA, 19 nt, Artificial Sequence
  Description of Artificial Sequence: Synthetic oligonucleotide
gcggggaauacagccggau

SEQ ID NO: 1628536 - RNA, 19 nt, Artificial Sequence
  Description of Artificial Sequence: Synthetic oligonucleotide
ggggaccaaaccaggcauu

SEQ ID NO: 1628537 - RNA, 19 nt, Artificial Sequence
  Description of Artificial Sequence: Synthetic oligonucleotide
gcgcgcacguaaugccaau

SEQ ID NO: 1628538 - RNA, 19 nt, Artificial Sequence
  Description of Artificial Sequence: Synthetic oligonucleotide
cggacucuugcggggaaua

SEQ ID NO: 1628539 - RNA, 19 nt, Artificial Sequence
  Description of Artificial Sequence: Synthetic oligonucleotide
cccgcucuaccaccacacu

SEQ ID NO: 1628540 - RNA, 19 nt, Artificial Sequence
  Description of Artificial Sequence: Synthetic oligonucleotide
cgcgcacguaaugccaaua

SEQ ID NO: 1628541 - RNA, 19 nt, Artificial Sequence
  Description of Artificial Sequence: Synthetic oligonucleotide
aauaguuacugaugggccc

SEQ ID NO: 1628542 - RNA, 19 nt, Artificial Sequence
  Description of Artificial Sequence: Synthetic oligonucleotide
aacucuaaacaccaauuuc

SEQ ID NO: 1628543 - RNA, 19 nt, Artificial Sequence
  Description of Artificial Sequence: Synthetic oligonucleotide
gauagaacuaacucuaaac

SEQ ID NO: 1628544 - RNA, 19 nt, Artificial Sequence
  Description of Artificial Sequence: Synthetic oligonucleotide
uuaggauugcuccuugucg

SEQ ID NO: 1628545 - RNA, 19 nt, Artificial Sequence
  Description of Artificial Sequence: Synthetic oligonucleotide
uauuguaugaacuguauau

SEQ ID NO: 1628546 - RNA, 19 nt, Artificial Sequence
  Description of Artificial Sequence: Synthetic oligonucleotide
aagagaacgcgguuucucc

SEQ ID NO: 1628547 - RNA, 19 nt, Artificial Sequence
  Description of Artificial Sequence: Synthetic oligonucleotide
ucguauuuacccaaaauac

SEQ ID NO: 1628548 - RNA, 19 nt, Artificial Sequence
  Description of Artificial Sequence: Synthetic oligonucleotide
auuuacccaaaauacggcg

SEQ ID NO: 1628549 - RNA, 19 nt, Artificial Sequence
  Description of Artificial Sequence: Synthetic oligonucleotide
guauuuacccaaaauacgg

SEQ ID NO: 1628550 - RNA, 19 nt, Artificial Sequence
  Description of Artificial Sequence: Synthetic oligonucleotide
acguaauaguuacugaugg

SEQ ID NO: 1628551 - RNA, 19 nt, Artificial Sequence
  Description of Artificial Sequence: Synthetic oligonucleotide
aaaccuggacgcuaggagg

SEQ ID NO: 1628552 - RNA, 19 nt, Artificial Sequence
  Description of Artificial Sequence: Synthetic oligonucleotide
aaaaucgcuacaguccggc

SEQ ID NO: 1628553 - RNA, 19 nt, Artificial Sequence
  Description of Artificial Sequence: Synthetic oligonucleotide
uuucucaacacuuaacccu

SEQ ID NO: 1628554 - RNA, 19 nt, Artificial Sequence
  Description of Artificial Sequence: Synthetic oligonucleotide
acauacauaagauuauugu

SEQ ID NO: 1628555 - RNA, 19 nt, Artificial Sequence
  Description of Artificial Sequence: Synthetic oligonucleotide
aaucgcuacaguccggcac

SEQ ID NO: 1628556 - RNA, 19 nt, Artificial Sequence
  Description of Artificial Sequence: Synthetic oligonucleotide
ugagauugagaacacgggc

SEQ ID NO: 1628557 - RNA, 19 nt, Artificial Sequence
  Description of Artificial Sequence: Synthetic oligonucleotide
uugucgugagagaugagcg

SEQ ID NO: 1628558 - RNA, 19 nt, Artificial Sequence
  Description of Artificial Sequence: Synthetic oligonucleotide
acuuaacccucccacaucg

SEQ ID NO: 1628559 - RNA, 19 nt, Artificial Sequence
  Description of Artificial Sequence: Synthetic oligonucleotide
auugucgugagagaugagc

SEQ ID NO: 1628560 - RNA, 19 nt, Artificial Sequence
  Description of Artificial Sequence: Synthetic oligonucleotide
cacgugaucguauuuaccc

SEQ ID NO: 1628561 - RNA, 19 nt, Artificial Sequence
  Description of Artificial Sequence: Synthetic oligonucleotide
gagaacacgggccaccucg

SEQ ID NO: 1628562 - RNA, 19 nt, Artificial Sequence
  Description of Artificial Sequence: Synthetic oligonucleotide
uagaacuaacucuaaacac

SEQ ID NO: 1628563 - RNA, 19 nt, Artificial Sequence
  Description of Artificial Sequence: Synthetic oligonucleotide
guaauaguuacugaugggc

SEQ ID NO: 1628564 - RNA, 19 nt, Artificial Sequence
  Description of Artificial Sequence: Synthetic oligonucleotide
uaggcgucgggcuugaggg

SEQ ID NO: 1628565 - RNA, 19 nt, Artificial Sequence
  Description of Artificial Sequence: Synthetic oligonucleotide
acggaaaaucgcuacaguc

SEQ ID NO: 1628566 - RNA, 19 nt, Artificial Sequence
  Description of Artificial Sequence: Synthetic oligonucleotide
uaggauugcuccuugucgg

SEQ ID NO: 1628567 - RNA, 19 nt, Artificial Sequence
  Description of Artificial Sequence: Synthetic oligonucleotide
agugagauugagaacacgg

SEQ ID NO: 1628568 - RNA, 19 nt, Artificial Sequence
  Description of Artificial Sequence: Synthetic oligonucleotide
uuacugaugggccccgucg

SEQ ID NO: 1628569 - RNA, 19 nt, Artificial Sequence
  Description of Artificial Sequence: Synthetic oligonucleotide
agcggcucgagccaagucc

SEQ ID NO: 1628570 - RNA, 19 nt, Artificial Sequence
  Description of Artificial Sequence: Synthetic oligonucleotide
uuguaugaacuguauaugu

SEQ ID NO: 1628571 - RNA, 19 nt, Artificial Sequence
  Description of Artificial Sequence: Synthetic oligonucleotide
aucguauuuacccaaaaua

SEQ ID NO: 1628572 - RNA, 19 nt, Artificial Sequence
  Description of Artificial Sequence: Synthetic oligonucleotide
guaugaacuguauauguac

SEQ ID NO: 1628573 - RNA, 19 nt, Artificial Sequence
  Description of Artificial Sequence: Synthetic oligonucleotide
uaugaacuguauauguacu

SEQ ID NO: 1628574 - RNA, 19 nt, Artificial Sequence
  Description of Artificial Sequence: Synthetic oligonucleotide
gaaaccuggacgcuaggag

SEQ ID NO: 1628575 - RNA, 19 nt, Artificial Sequence
  Description of Artificial Sequence: Synthetic oligonucleotide
aucgcuacaguccggcacc

SEQ ID NO: 1628576 - RNA, 19 nt, Artificial Sequence
  Description of Artificial Sequence: Synthetic oligonucleotide
uuuccugacgaucugcaac

SEQ ID NO: 1628577 - RNA, 19 nt, Artificial Sequence
  Description of Artificial Sequence: Synthetic oligonucleotide
ggaaaaucgcuacaguccg

SEQ ID NO: 1628578 - RNA, 19 nt, Artificial Sequence
  Description of Artificial Sequence: Synthetic oligonucleotide
auaguuacugaugggcccc

SEQ ID NO: 1628579 - RNA, 19 nt, Artificial Sequence
  Description of Artificial Sequence: Synthetic oligonucleotide
gagauugagaacacgggcc

SEQ ID NO: 1628580 - RNA, 19 nt, Artificial Sequence
  Description of Artificial Sequence: Synthetic oligonucleotide
uacaggacggaaaaucgcu

SEQ ID NO: 1628581 - RNA, 19 nt, Artificial Sequence
  Description of Artificial Sequence: Synthetic oligonucleotide
auacauaagauuauuguau

SEQ ID NO: 1628582 - RNA, 19 nt, Artificial Sequence
  Description of Artificial Sequence: Synthetic oligonucleotide
acucuaaacaccaauuucu

SEQ ID NO: 1628583 - RNA, 19 nt, Artificial Sequence
  Description of Artificial Sequence: Synthetic oligonucleotide
uguaugaacuguauaugua

SEQ ID NO: 1628584 - RNA, 19 nt, Artificial Sequence
  Description of Artificial Sequence: Synthetic oligonucleotide
aacacuuaacccucccaca

SEQ ID NO: 1628585 - RNA, 19 nt, Artificial Sequence
  Description of Artificial Sequence: Synthetic oligonucleotide
ucauugucgugagagauga

SEQ ID NO: 1628586 - RNA, 19 nt, Artificial Sequence
  Description of Artificial Sequence: Synthetic oligonucleotide
caggguuuuacauacauaa

SEQ ID NO: 1628587 - RNA, 19 nt, Artificial Sequence
  Description of Artificial Sequence: Synthetic oligonucleotide
agcucauugguuccccagc

SEQ ID NO: 1628588 - RNA, 19 nt, Artificial Sequence
  Description of Artificial Sequence: Synthetic oligonucleotide
auuguaugaacuguauaug

SEQ ID NO: 1628589 - RNA, 19 nt, Artificial Sequence
  Description of Artificial Sequence: Synthetic oligonucleotide
uagaccacggacgacugcg

SEQ ID NO: 1628590 - RNA, 19 nt, Artificial Sequence
  Description of Artificial Sequence: Synthetic oligonucleotide
uacggcgcggaucaaugcg

SEQ ID NO: 1628591 - RNA, 19 nt, Artificial Sequence
  Description of Artificial Sequence: Synthetic oligonucleotide
caaaauacggcgcggauca

SEQ ID NO: 1628592 - RNA, 19 nt, Artificial Sequence
  Description of Artificial Sequence: Synthetic oligonucleotide
uuauuguaugaacuguaua

SEQ ID NO: 1628593 - RNA, 19 nt, Artificial Sequence
  Description of Artificial Sequence: Synthetic oligonucleotide
uaacucuaaacaccaauuu

SEQ ID NO: 1628594 - RNA, 19 nt, Artificial Sequence
  Description of Artificial Sequence: Synthetic oligonucleotide
ucccugguuaaauacauau

SEQ ID NO: 1628595 - RNA, 19 nt, Artificial Sequence
  Description of Artificial Sequence: Synthetic oligonucleotide
uucucaacacuuaacccuc

SEQ ID NO: 1628596 - RNA, 19 nt, Artificial Sequence
  Description of Artificial Sequence: Synthetic oligonucleotide
ugauagaccacggacgacu

SEQ ID NO: 1628597 - RNA, 19 nt, Artificial Sequence
  Description of Artificial Sequence: Synthetic oligonucleotide
uuuucgugcuuucucccgc

SEQ ID NO: 1628598 - RNA, 19 nt, Artificial Sequence
  Description of Artificial Sequence: Synthetic oligonucleotide
acauaagauuauuguauga

SEQ ID NO: 1628599 - RNA, 19 nt, Artificial Sequence
  Description of Artificial Sequence: Synthetic oligonucleotide
uuuguguuucccugggcug

SEQ ID NO: 1628600 - RNA, 19 nt, Artificial Sequence
  Description of Artificial Sequence: Synthetic oligonucleotide
gaagcuacaggacggaaaa

SEQ ID NO: 1628601 - RNA, 19 nt, Artificial Sequence
  Description of Artificial Sequence: Synthetic oligonucleotide
cacguaauaguuacugaug

SEQ ID NO: 1628602 - RNA, 19 nt, Artificial Sequence
  Description of Artificial Sequence: Synthetic oligonucleotide
uuucccggcagcucauugg

SEQ ID NO: 1628603 - RNA, 19 nt, Artificial Sequence
  Description of Artificial Sequence: Synthetic oligonucleotide
agauugagaacacgggcca

SEQ ID NO: 1628604 - RNA, 19 nt, Artificial Sequence
  Description of Artificial Sequence: Synthetic oligonucleotide
cauacauaagauuauugua

SEQ ID NO: 1628605 - RNA, 19 nt, Artificial Sequence
  Description of Artificial Sequence: Synthetic oligonucleotide
caaguccgcauguagcgcg

SEQ ID NO: 1628606 - RNA, 19 nt, Artificial Sequence
  Description of Artificial Sequence: Synthetic oligonucleotide
ggguuuuacauacauaaga

SEQ ID NO: 1628607 - RNA, 19 nt, Artificial Sequence
  Description of Artificial Sequence: Synthetic oligonucleotide
cacgacgugcugaacacgg

SEQ ID NO: 1628608 - RNA, 19 nt, Artificial Sequence
  Description of Artificial Sequence: Synthetic oligonucleotide
caacacuuaacccucccac

SEQ ID NO: 1628609 - RNA, 19 nt, Artificial Sequence
  Description of Artificial Sequence: Synthetic oligonucleotide
ucuuuucgugcuuucuccc

SEQ ID NO: 1628610 - RNA, 19 nt, Artificial Sequence
  Description of Artificial Sequence: Synthetic oligonucleotide
guggccggaaaccuggacg

SEQ ID NO: 1628611 - RNA, 19 nt, Artificial Sequence
  Description of Artificial Sequence: Synthetic oligonucleotide
cuuuucgugcuuucucccg

SEQ ID NO: 1628612 - RNA, 19 nt, Artificial Sequence
  Description of Artificial Sequence: Synthetic oligonucleotide
agaacgcgguuucuccugc

SEQ ID NO: 1628613 - RNA, 19 nt, Artificial Sequence
  Description of Artificial Sequence: Synthetic oligonucleotide
aauacggcgcggaucaaug

SEQ ID NO: 1628614 - RNA, 19 nt, Artificial Sequence
  Description of Artificial Sequence: Synthetic oligonucleotide
cuacaggacggaaaaucgc

SEQ ID NO: 1628615 - RNA, 19 nt, Artificial Sequence
  Description of Artificial Sequence: Synthetic oligonucleotide
aucguaacaggguuuuaca

SEQ ID NO: 1628616 - RNA, 19 nt, Artificial Sequence
  Description of Artificial Sequence: Synthetic oligonucleotide
uacaguccggcaccaagcc

SEQ ID NO: 1628617 - RNA, 19 nt, Artificial Sequence
  Description of Artificial Sequence: Synthetic oligonucleotide
uugggcgcgaagcuacagg

SEQ ID NO: 1628618 - RNA, 19 nt, Artificial Sequence
  Description of Artificial Sequence: Synthetic oligonucleotide
gugagauugagaacacggg

SEQ ID NO: 1628619 - RNA, 19 nt, Artificial Sequence
  Description of Artificial Sequence: Synthetic oligonucleotide
cuacaguccggcaccaagc

SEQ ID NO: 1628620 - RNA, 19 nt, Artificial Sequence
  Description of Artificial Sequence: Synthetic oligonucleotide
uuaucugcucacagaacaa

SEQ ID NO: 1628621 - RNA, 19 nt, Artificial Sequence
  Description of Artificial Sequence: Synthetic oligonucleotide
agacgaugggcuuuucucu

SEQ ID NO: 1628622 - RNA, 19 nt, Artificial Sequence
  Description of Artificial Sequence: Synthetic oligonucleotide
auacggcgcggaucaaugc

SEQ ID NO: 1628623 - RNA, 19 nt, Artificial Sequence
  Description of Artificial Sequence: Synthetic oligonucleotide
cuggauagaacuaacucua

SEQ ID NO: 1628624 - RNA, 19 nt, Artificial Sequence
  Description of Artificial Sequence: Synthetic oligonucleotide
uggccggaaaccuggacgc

SEQ ID NO: 1628625 - RNA, 19 nt, Artificial Sequence
  Description of Artificial Sequence: Synthetic oligonucleotide
auagaccacggacgacugc

SEQ ID NO: 1628626 - RNA, 19 nt, Artificial Sequence
  Description of Artificial Sequence: Synthetic oligonucleotide
aguuccagcgucugguacu

SEQ ID NO: 1628627 - RNA, 19 nt, Artificial Sequence
  Description of Artificial Sequence: Synthetic oligonucleotide
guacgggugauagaccacg

SEQ ID NO: 1628628 - RNA, 19 nt, Artificial Sequence
  Description of Artificial Sequence: Synthetic oligonucleotide
ucgccgacaucguaacagg

SEQ ID NO: 1628629 - RNA, 19 nt, Artificial Sequence
  Description of Artificial Sequence: Synthetic oligonucleotide
agcgcguccgccucgggcg

SEQ ID NO: 1628630 - RNA, 19 nt, Artificial Sequence
  Description of Artificial Sequence: Synthetic oligonucleotide
guaggcgucgggcuugagg

SEQ ID NO: 1628631 - RNA, 19 nt, Artificial Sequence
  Description of Artificial Sequence: Synthetic oligonucleotide
acacgggccaccucguauc

SEQ ID NO: 1628632 - RNA, 19 nt, Artificial Sequence
  Description of Artificial Sequence: Synthetic oligonucleotide
agccaaguccgcauguagc

SEQ ID NO: 1628633 - RNA, 19 nt, Artificial Sequence
  Description of Artificial Sequence: Synthetic oligonucleotide
aucgcaagaguuugcauuu

SEQ ID NO: 1628634 - RNA, 19 nt, Artificial Sequence
  Description of Artificial Sequence: Synthetic oligonucleotide
gauuauuguaugaacugua

SEQ ID NO: 1628635 - RNA, 19 nt, Artificial Sequence
  Description of Artificial Sequence: Synthetic oligonucleotide
gacgugcugaacacggccg

SEQ ID NO: 1628636 - RNA, 19 nt, Artificial Sequence
  Description of Artificial Sequence: Synthetic oligonucleotide
ucguaacaggguuuuacau

SEQ ID NO: 1628637 - RNA, 19 nt, Artificial Sequence
  Description of Artificial Sequence: Synthetic oligonucleotide
uacgggugauagaccacgg

SEQ ID NO: 1628638 - RNA, 19 nt, Artificial Sequence
  Description of Artificial Sequence: Synthetic oligonucleotide
agggcauagugacggcccc

SEQ ID NO: 1628639 - RNA, 19 nt, Artificial Sequence
  Description of Artificial Sequence: Synthetic oligonucleotide
ugucgugagagaugagcga

SEQ ID NO: 1628640 - RNA, 19 nt, Artificial Sequence
  Description of Artificial Sequence: Synthetic oligonucleotide
uacugaugggccccgucgc

SEQ ID NO: 1628641 - RNA, 19 nt, Artificial Sequence
  Description of Artificial Sequence: Synthetic oligonucleotide
ucggucccugguuaaauac

SEQ ID NO: 1628642 - RNA, 19 nt, Artificial Sequence
  Description of Artificial Sequence: Synthetic oligonucleotide
gucgccgacaucguaacag

SEQ ID NO: 1628643 - RNA, 19 nt, Artificial Sequence
  Description of Artificial Sequence: Synthetic oligonucleotide
gucgugagagaugagcgag

SEQ ID NO: 1628644 - RNA, 19 nt, Artificial Sequence
  Description of Artificial Sequence: Synthetic oligonucleotide
caucguaacaggguuuuac

SEQ ID NO: 1628645 - RNA, 19 nt, Artificial Sequence
  Description of Artificial Sequence: Synthetic oligonucleotide
gcuacaggacggaaaaucg

SEQ ID NO: 1628646 - RNA, 19 nt, Artificial Sequence
  Description of Artificial Sequence: Synthetic oligonucleotide
augaacuguauauguacuu

SEQ ID NO: 1628647 - RNA, 19 nt, Artificial Sequence
  Description of Artificial Sequence: Synthetic oligonucleotide
ggcgcgaagcuacaggacg

SEQ ID NO: 1628648 - RNA, 19 nt, Artificial Sequence
  Description of Artificial Sequence: Synthetic oligonucleotide
aacacgggccaccucguau

SEQ ID NO: 1628649 - RNA, 19 nt, Artificial Sequence
  Description of Artificial Sequence: Synthetic oligonucleotide
gagaacgcgguuucuccug

SEQ ID NO: 1628650 - RNA, 19 nt, Artificial Sequence
  Description of Artificial Sequence: Synthetic oligonucleotide
auuauuguaugaacuguau

SEQ ID NO: 1628651 - RNA, 19 nt, Artificial Sequence
  Description of Artificial Sequence: Synthetic oligonucleotide
ucugcugauccccgcgacc

SEQ ID NO: 1628652 - RNA, 19 nt, Artificial Sequence
  Description of Artificial Sequence: Synthetic oligonucleotide
accugcguuuuccugacga

SEQ ID NO: 1628653 - RNA, 19 nt, Artificial Sequence
  Description of Artificial Sequence: Synthetic oligonucleotide
gagacggcgccggacagcg

SEQ ID NO: 1628654 - RNA, 19 nt, Artificial Sequence
  Description of Artificial Sequence: Synthetic oligonucleotide
accacggacgacugcgagg

SEQ ID NO: 1628655 - RNA, 19 nt, Artificial Sequence
  Description of Artificial Sequence: Synthetic oligonucleotide
gccaaguccgcauguagcg

SEQ ID NO: 1628656 - RNA, 19 nt, Artificial Sequence
  Description of Artificial Sequence: Synthetic oligonucleotide
caggacggaaaaucgcuac

SEQ ID NO: 1628657 - RNA, 19 nt, Artificial Sequence
  Description of Artificial Sequence: Synthetic oligonucleotide
aaaucgcuacaguccggca

SEQ ID NO: 1628658 - RNA, 19 nt, Artificial Sequence
  Description of Artificial Sequence: Synthetic oligonucleotide
uucccggcagcucauuggu

SEQ ID NO: 1628659 - RNA, 19 nt, Artificial Sequence
  Description of Artificial Sequence: Synthetic oligonucleotide
agaacaaucaaggcaggua

SEQ ID NO: 1628660 - RNA, 19 nt, Artificial Sequence
  Description of Artificial Sequence: Synthetic oligonucleotide
aacgcgguuucuccugccu

SEQ ID NO: 1628661 - RNA, 19 nt, Artificial Sequence
  Description of Artificial Sequence: Synthetic oligonucleotide
cauguagcgcgugucggcg

SEQ ID NO: 1628662 - RNA, 19 nt, Artificial Sequence
  Description of Artificial Sequence: Synthetic oligonucleotide
uggauagaacuaacucuaa

SEQ ID NO: 1628663 - RNA, 19 nt, Artificial Sequence
  Description of Artificial Sequence: Synthetic oligonucleotide
agagaacgcgguuucuccu

SEQ ID NO: 1628664 - RNA, 19 nt, Artificial Sequence
  Description of Artificial Sequence: Synthetic oligonucleotide
uuucgugcuuucucccgcc

SEQ ID NO: 1628665 - RNA, 19 nt, Artificial Sequence
  Description of Artificial Sequence: Synthetic oligonucleotide
acgugaucguauuuaccca

SEQ ID NO: 1628666 - RNA, 19 nt, Artificial Sequence
  Description of Artificial Sequence: Synthetic oligonucleotide
cacgggguugcuagggucc

SEQ ID NO: 1628667 - RNA, 19 nt, Artificial Sequence
  Description of Artificial Sequence: Synthetic oligonucleotide
acaguccggcaccaagccg

SEQ ID NO: 1628668 - RNA, 19 nt, Artificial Sequence
  Description of Artificial Sequence: Synthetic oligonucleotide
uuuaagacgaugggcuuuu

SEQ ID NO: 1628669 - RNA, 19 nt, Artificial Sequence
  Description of Artificial Sequence: Synthetic oligonucleotide
gggugauagaccacggacg

SEQ ID NO: 1628670 - RNA, 19 nt, Artificial Sequence
  Description of Artificial Sequence: Synthetic oligonucleotide
auguagcgcgugucggcgc

SEQ ID NO: 1628671 - RNA, 19 nt, Artificial Sequence
  Description of Artificial Sequence: Synthetic oligonucleotide
gaagagaacgcgguuucuc

SEQ ID NO: 1628672 - RNA, 19 nt, Artificial Sequence
  Description of Artificial Sequence: Synthetic oligonucleotide
aaauacggcgcggaucaau

SEQ ID NO: 1628673 - RNA, 19 nt, Artificial Sequence
  Description of Artificial Sequence: Synthetic oligonucleotide
aggacggaaaaucgcuaca

SEQ ID NO: 1628674 - RNA, 19 nt, Artificial Sequence
  Description of Artificial Sequence: Synthetic oligonucleotide
ggugauagaccacggacga

SEQ ID NO: 1628675 - RNA, 19 nt, Artificial Sequence
  Description of Artificial Sequence: Synthetic oligonucleotide
gauagaccacggacgacug

SEQ ID NO: 1628676 - RNA, 19 nt, Artificial Sequence
  Description of Artificial Sequence: Synthetic oligonucleotide
cucuuugugcuugcugccg

SEQ ID NO: 1628677 - RNA, 19 nt, Artificial Sequence
  Description of Artificial Sequence: Synthetic oligonucleotide
agggcuuaggauugcuccu

SEQ ID NO: 1628678 - RNA, 19 nt, Artificial Sequence
  Description of Artificial Sequence: Synthetic oligonucleotide
uacauguaguccggguagc

SEQ ID NO: 1628679 - RNA, 19 nt, Artificial Sequence
  Description of Artificial Sequence: Synthetic oligonucleotide
gaucguauuuacccaaaau

SEQ ID NO: 1628680 - RNA, 19 nt, Artificial Sequence
  Description of Artificial Sequence: Synthetic oligonucleotide
uaucgucggucccugguua

SEQ ID NO: 1628681 - RNA, 19 nt, Artificial Sequence
  Description of Artificial Sequence: Synthetic oligonucleotide
uaacaggguuuuacauaca

SEQ ID NO: 1628682 - RNA, 19 nt, Artificial Sequence
  Description of Artificial Sequence: Synthetic oligonucleotide
ucccacaucgcaagaguuu

SEQ ID NO: 1628683 - RNA, 19 nt, Artificial Sequence
  Description of Artificial Sequence: Synthetic oligonucleotide
acacggccggcuugggcgc

SEQ ID NO: 1628684 - RNA, 19 nt, Artificial Sequence
  Description of Artificial Sequence: Synthetic oligonucleotide
aguugcgcuggggagaaga

SEQ ID NO: 1628685 - RNA, 19 nt, Artificial Sequence
  Description of Artificial Sequence: Synthetic oligonucleotide
guggaacgggcguggaucc

SEQ ID NO: 1628686 - RNA, 19 nt, Artificial Sequence
  Description of Artificial Sequence: Synthetic oligonucleotide
aacaaucaaggcagguaau

SEQ ID NO: 1628687 - RNA, 19 nt, Artificial Sequence
  Description of Artificial Sequence: Synthetic oligonucleotide
cuuaacccucccacaucgc

SEQ ID NO: 1628688 - RNA, 19 nt, Artificial Sequence
  Description of Artificial Sequence: Synthetic oligonucleotide
ucgugagagaugagcgagu

SEQ ID NO: 1628689 - RNA, 19 nt, Artificial Sequence
  Description of Artificial Sequence: Synthetic oligonucleotide
uccuccuugcuggauagaa

SEQ ID NO: 1628690 - RNA, 19 nt, Artificial Sequence
  Description of Artificial Sequence: Synthetic oligonucleotide
acggcgcggaucaaugcgc

SEQ ID NO: 1628691 - RNA, 19 nt, Artificial Sequence
  Description of Artificial Sequence: Synthetic oligonucleotide
ggcacgggcgcccacgacg

SEQ ID NO: 1628692 - RNA, 19 nt, Artificial Sequence
  Description of Artificial Sequence: Synthetic oligonucleotide
uccgccucgggcgagggca

SEQ ID NO: 1628693 - RNA, 19 nt, Artificial Sequence
  Description of Artificial Sequence: Synthetic oligonucleotide
gaccacggacgacugcgag

SEQ ID NO: 1628694 - RNA, 19 nt, Artificial Sequence
  Description of Artificial Sequence: Synthetic oligonucleotide
acgcgguuucuccugccuc

SEQ ID NO: 1628695 - RNA, 19 nt, Artificial Sequence
  Description of Artificial Sequence: Synthetic oligonucleotide
ggacggaaaaucgcuacag

SEQ ID NO: 1628696 - RNA, 19 nt, Artificial Sequence
  Description of Artificial Sequence: Synthetic oligonucleotide
uugagaacacgggccaccu

SEQ ID NO: 1628697 - RNA, 19 nt, Artificial Sequence
  Description of Artificial Sequence: Synthetic oligonucleotide
ucgugcuuucucccgccug

SEQ ID NO: 1628698 - RNA, 19 nt, Artificial Sequence
  Description of Artificial Sequence: Synthetic oligonucleotide
uaguuacugaugggccccg

SEQ ID NO: 1628699 - RNA, 19 nt, Artificial Sequence
  Description of Artificial Sequence: Synthetic oligonucleotide
ggccccgucgccgacaucg

SEQ ID NO: 1628700 - RNA, 19 nt, Artificial Sequence
  Description of Artificial Sequence: Synthetic oligonucleotide
gacgacugcgagggcacgg

SEQ ID NO: 1628701 - RNA, 19 nt, Artificial Sequence
  Description of Artificial Sequence: Synthetic oligonucleotide
aggauugcuccuugucggu

SEQ ID NO: 1628702 - RNA, 19 nt, Artificial Sequence
  Description of Artificial Sequence: Synthetic oligonucleotide
cagugagauugagaacacg

SEQ ID NO: 1628703 - RNA, 19 nt, Artificial Sequence
  Description of Artificial Sequence: Synthetic oligonucleotide
acgggcgcccacgacgugc

SEQ ID NO: 1628704 - RNA, 19 nt, Artificial Sequence
  Description of Artificial Sequence: Synthetic oligonucleotide
uugucgguuuucucuuuau

SEQ ID NO: 1628705 - RNA, 19 nt, Artificial Sequence
  Description of Artificial Sequence: Synthetic oligonucleotide
gacgaugggcuuuucucua

SEQ ID NO: 1628706 - RNA, 19 nt, Artificial Sequence
  Description of Artificial Sequence: Synthetic oligonucleotide
gcugugccgaggcagcagg

SEQ ID NO: 1628707 - RNA, 19 nt, Artificial Sequence
  Description of Artificial Sequence: Synthetic oligonucleotide
gcucauugguuccccagcc

SEQ ID NO: 1628708 - RNA, 19 nt, Artificial Sequence
  Description of Artificial Sequence: Synthetic oligonucleotide
uuucucccgccuggguugg

SEQ ID NO: 1628709 - RNA, 19 nt, Artificial Sequence
  Description of Artificial Sequence: Synthetic oligonucleotide
ggauagaacuaacucuaaa

SEQ ID NO: 1628710 - RNA, 19 nt, Artificial Sequence
  Description of Artificial Sequence: Synthetic oligonucleotide
gggcgagccguacauguag

SEQ ID NO: 1628711 - RNA, 19 nt, Artificial Sequence
  Description of Artificial Sequence: Synthetic oligonucleotide
guuacugaugggccccguc

SEQ ID NO: 1628712 - RNA, 19 nt, Artificial Sequence
  Description of Artificial Sequence: Synthetic oligonucleotide
ccacggacgacugcgaggg

SEQ ID NO: 1628713 - RNA, 19 nt, Artificial Sequence
  Description of Artificial Sequence: Synthetic oligonucleotide
ucucccgccuggguugggg

SEQ ID NO: 1628714 - RNA, 19 nt, Artificial Sequence
  Description of Artificial Sequence: Synthetic oligonucleotide
acgggugauagaccacgga

SEQ ID NO: 1628715 - RNA, 19 nt, Artificial Sequence
  Description of Artificial Sequence: Synthetic oligonucleotide
gacggaaaaucgcuacagu

SEQ ID NO: 1628716 - RNA, 19 nt, Artificial Sequence
  Description of Artificial Sequence: Synthetic oligonucleotide
uucgugcuuucucccgccu

SEQ ID NO: 1628717 - RNA, 19 nt, Artificial Sequence
  Description of Artificial Sequence: Synthetic oligonucleotide
cucgagccaaguccgcaug

SEQ ID NO: 1628718 - RNA, 19 nt, Artificial Sequence
  Description of Artificial Sequence: Synthetic oligonucleotide
gaacgcgguuucuccugcc

SEQ ID NO: 1628719 - RNA, 19 nt, Artificial Sequence
  Description of Artificial Sequence: Synthetic oligonucleotide
cugauccccgcgaccugcg

SEQ ID NO: 1628720 - RNA, 19 nt, Artificial Sequence
  Description of Artificial Sequence: Synthetic oligonucleotide
ggccguacgggugauagac

SEQ ID NO: 1628721 - RNA, 19 nt, Artificial Sequence
  Description of Artificial Sequence: Synthetic oligonucleotide
uuguggaacgggcguggau

SEQ ID NO: 1628722 - RNA, 19 nt, Artificial Sequence
  Description of Artificial Sequence: Synthetic oligonucleotide
cugcguuuuccugacgauc

SEQ ID NO: 1628723 - RNA, 19 nt, Artificial Sequence
  Description of Artificial Sequence: Synthetic oligonucleotide
cacgggccaccucguaucg

SEQ ID NO: 1628724 - RNA, 19 nt, Artificial Sequence
  Description of Artificial Sequence: Synthetic oligonucleotide
cuaucuugcucuuuccuuu

SEQ ID NO: 1628725 - RNA, 19 nt, Artificial Sequence
  Description of Artificial Sequence: Synthetic oligonucleotide
acggacgacugcgagggca

SEQ ID NO: 1628726 - RNA, 19 nt, Artificial Sequence
  Description of Artificial Sequence: Synthetic oligonucleotide
cacaucgcaagaguuugca

SEQ ID NO: 1628727 - RNA, 19 nt, Artificial Sequence
  Description of Artificial Sequence: Synthetic oligonucleotide
agaagagaacgcgguuucu

SEQ ID NO: 1628728 - RNA, 19 nt, Artificial Sequence
  Description of Artificial Sequence: Synthetic oligonucleotide
ucguaucgucggucccugg

SEQ ID NO: 1628729 - RNA, 19 nt, Artificial Sequence
  Description of Artificial Sequence: Synthetic oligonucleotide
ugagaacacgggccaccuc

SEQ ID NO: 1628730 - RNA, 19 nt, Artificial Sequence
  Description of Artificial Sequence: Synthetic oligonucleotide
cauugucgugagagaugag

SEQ ID NO: 1628731 - RNA, 19 nt, Artificial Sequence
  Description of Artificial Sequence: Synthetic oligonucleotide
gucgccugggccgcagucg

SEQ ID NO: 1628732 - RNA, 19 nt, Artificial Sequence
  Description of Artificial Sequence: Synthetic oligonucleotide
cggaucaaugcgcaggggc

SEQ ID NO: 1628733 - RNA, 19 nt, Artificial Sequence
  Description of Artificial Sequence: Synthetic oligonucleotide
acgaugggcuuuucucuau

SEQ ID NO: 1628734 - RNA, 19 nt, Artificial Sequence
  Description of Artificial Sequence: Synthetic oligonucleotide
ugcugauccccgcgaccug

SEQ ID NO: 1628735 - RNA, 19 nt, Artificial Sequence
  Description of Artificial Sequence: Synthetic oligonucleotide
uccgcauguagcgcguguc

SEQ ID NO: 1628736 - RNA, 19 nt, Artificial Sequence
  Description of Artificial Sequence: Synthetic oligonucleotide
ugccgcucagugagauuga

SEQ ID NO: 1628737 - RNA, 19 nt, Artificial Sequence
  Description of Artificial Sequence: Synthetic oligonucleotide
cucugcugauccccgcgac

SEQ ID NO: 1628738 - RNA, 19 nt, Artificial Sequence
  Description of Artificial Sequence: Synthetic oligonucleotide
gaccugcguuuuccugacg

SEQ ID NO: 1628739 - RNA, 19 nt, Artificial Sequence
  Description of Artificial Sequence: Synthetic oligonucleotide
caccaauuucucaacacuu

SEQ ID NO: 1628740 - RNA, 19 nt, Artificial Sequence
  Description of Artificial Sequence: Synthetic oligonucleotide
cugugccgaggcagcaggc

SEQ ID NO: 1628741 - RNA, 19 nt, Artificial Sequence
  Description of Artificial Sequence: Synthetic oligonucleotide
guggauccaguuggccacg

SEQ ID NO: 1628742 - RNA, 19 nt, Artificial Sequence
  Description of Artificial Sequence: Synthetic oligonucleotide
aacgggcguggauccaguu

SEQ ID NO: 1628743 - RNA, 19 nt, Artificial Sequence
  Description of Artificial Sequence: Synthetic oligonucleotide
gacgcuaggaggucuucau

SEQ ID NO: 1628744 - RNA, 19 nt, Artificial Sequence
  Description of Artificial Sequence: Synthetic oligonucleotide
gauugcuccuugucgguuu

SEQ ID NO: 1628745 - RNA, 19 nt, Artificial Sequence
  Description of Artificial Sequence: Synthetic oligonucleotide
ccacgugaucguauuuacc

SEQ ID NO: 1628746 - RNA, 19 nt, Artificial Sequence
  Description of Artificial Sequence: Synthetic oligonucleotide
ggggccguacgggugauag

SEQ ID NO: 1628747 - RNA, 19 nt, Artificial Sequence
  Description of Artificial Sequence: Synthetic oligonucleotide
cuugggcgcgaagcuacag

SEQ ID NO: 1628748 - RNA, 19 nt, Artificial Sequence
  Description of Artificial Sequence: Synthetic oligonucleotide
auccccgcgaccugcguuu

SEQ ID NO: 1628749 - RNA, 19 nt, Artificial Sequence
  Description of Artificial Sequence: Synthetic oligonucleotide
gacaucguaacaggguuuu

SEQ ID NO: 1628750 - RNA, 19 nt, Artificial Sequence
  Description of Artificial Sequence: Synthetic oligonucleotide
cgggugauagaccacggac

SEQ ID NO: 1628751 - RNA, 19 nt, Artificial Sequence
  Description of Artificial Sequence: Synthetic oligonucleotide
aaguccgcauguagcgcgu

SEQ ID NO: 1628752 - RNA, 19 nt, Artificial Sequence
  Description of Artificial Sequence: Synthetic oligonucleotide
gcgcggaucaaugcgcagg

SEQ ID NO: 1628753 - RNA, 19 nt, Artificial Sequence
  Description of Artificial Sequence: Synthetic oligonucleotide
ccaaaauacggcgcggauc

SEQ ID NO: 1628754 - RNA, 19 nt, Artificial Sequence
  Description of Artificial Sequence: Synthetic oligonucleotide
cccacgugaucguauuuac

SEQ ID NO: 1628755 - RNA, 19 nt, Artificial Sequence
  Description of Artificial Sequence: Synthetic oligonucleotide
aucgucggucccugguuaa

SEQ ID NO: 1628756 - RNA, 19 nt, Artificial Sequence
  Description of Artificial Sequence: Synthetic oligonucleotide
gcggcucgagccaaguccg

SEQ ID NO: 1628757 - RNA, 19 nt, Artificial Sequence
  Description of Artificial Sequence: Synthetic oligonucleotide
cugggccgcagucggcgcg

SEQ ID NO: 1628758 - RNA, 19 nt, Artificial Sequence
  Description of Artificial Sequence: Synthetic oligonucleotide
gcgaccugcguuuuccuga

SEQ ID NO: 1628759 - RNA, 19 nt, Artificial Sequence
  Description of Artificial Sequence: Synthetic oligonucleotide
cucguaucgucggucccug

SEQ ID NO: 1628760 - RNA, 19 nt, Artificial Sequence
  Description of Artificial Sequence: Synthetic oligonucleotide
cccacaucgcaagaguuug

SEQ ID NO: 1628761 - RNA, 19 nt, Artificial Sequence
  Description of Artificial Sequence: Synthetic oligonucleotide
ucccgccuggguuggggca

SEQ ID NO: 1628762 - RNA, 19 nt, Artificial Sequence
  Description of Artificial Sequence: Synthetic oligonucleotide
cucccgccuggguuggggc

SEQ ID NO: 1628763 - RNA, 19 nt, Artificial Sequence
  Description of Artificial Sequence: Synthetic oligonucleotide
aaaauacggcgcggaucaa

SEQ ID NO: 1628764 - RNA, 19 nt, Artificial Sequence
  Description of Artificial Sequence: Synthetic oligonucleotide
ggaacgggcguggauccag

SEQ ID NO: 1628765 - RNA, 19 nt, Artificial Sequence
  Description of Artificial Sequence: Synthetic oligonucleotide
cagcgcguccgccucgggc

SEQ ID NO: 1628766 - RNA, 19 nt, Artificial Sequence
  Description of Artificial Sequence: Synthetic oligonucleotide
ugauccccgcgaccugcgu

SEQ ID NO: 1628767 - RNA, 19 nt, Artificial Sequence
  Description of Artificial Sequence: Synthetic oligonucleotide
guaguccggguagcugcgg

SEQ ID NO: 1628768 - RNA, 19 nt, Artificial Sequence
  Description of Artificial Sequence: Synthetic oligonucleotide
gcugaacacggccggcuug

SEQ ID NO: 1628769 - RNA, 19 nt, Artificial Sequence
  Description of Artificial Sequence: Synthetic oligonucleotide
ucgggcuugagggcauagu

SEQ ID NO: 1628770 - RNA, 19 nt, Artificial Sequence
  Description of Artificial Sequence: Synthetic oligonucleotide
acgcuaggaggucuucauu

SEQ ID NO: 1628771 - RNA, 19 nt, Artificial Sequence
  Description of Artificial Sequence: Synthetic oligonucleotide
cccacgacgugcugaacac

SEQ ID NO: 1628772 - RNA, 19 nt, Artificial Sequence
  Description of Artificial Sequence: Synthetic oligonucleotide
ucugcggggcgcggucgcg

SEQ ID NO: 1628773 - RNA, 19 nt, Artificial Sequence
  Description of Artificial Sequence: Synthetic oligonucleotide
gcgcgaagcuacaggacgg

SEQ ID NO: 1628774 - RNA, 19 nt, Artificial Sequence
  Description of Artificial Sequence: Synthetic oligonucleotide
acaggacggaaaaucgcua

SEQ ID NO: 1628775 - RNA, 19 nt, Artificial Sequence
  Description of Artificial Sequence: Synthetic oligonucleotide
guagcugcggccgucgccu

SEQ ID NO: 1628776 - RNA, 19 nt, Artificial Sequence
  Description of Artificial Sequence: Synthetic oligonucleotide
gucggcgcggcgcccgggg

SEQ ID NO: 1628777 - RNA, 19 nt, Artificial Sequence
  Description of Artificial Sequence: Synthetic oligonucleotide
uccccgggcgagccguaca

SEQ ID NO: 1628778 - RNA, 19 nt, Artificial Sequence
  Description of Artificial Sequence: Synthetic oligonucleotide
ccguacgggugauagacca

SEQ ID NO: 1628779 - RNA, 19 nt, Artificial Sequence
  Description of Artificial Sequence: Synthetic oligonucleotide
agaacacgggccaccucgu

SEQ ID NO: 1628780 - RNA, 19 nt, Artificial Sequence
  Description of Artificial Sequence: Synthetic oligonucleotide
gugauagaccacggacgac

SEQ ID NO: 1628781 - RNA, 19 nt, Artificial Sequence
  Description of Artificial Sequence: Synthetic oligonucleotide
gugaucguauuuacccaaa

SEQ ID NO: 1628782 - RNA, 19 nt, Artificial Sequence
  Description of Artificial Sequence: Synthetic oligonucleotide
uccggguagcugcggccgu

SEQ ID NO: 1628783 - RNA, 19 nt, Artificial Sequence
  Description of Artificial Sequence: Synthetic oligonucleotide
uuaagacgaugggcuuuuc

SEQ ID NO: 1628784 - RNA, 19 nt, Artificial Sequence
  Description of Artificial Sequence: Synthetic oligonucleotide
ccgcauguagcgcgugucg

SEQ ID NO: 1628785 - RNA, 19 nt, Artificial Sequence
  Description of Artificial Sequence: Synthetic oligonucleotide
cgacgugcugaacacggcc

SEQ ID NO: 1628786 - RNA, 19 nt, Artificial Sequence
  Description of Artificial Sequence: Synthetic oligonucleotide
cgcggaucaaugcgcaggg

SEQ ID NO: 1628787 - RNA, 19 nt, Artificial Sequence
  Description of Artificial Sequence: Synthetic oligonucleotide
gcgagggcagcgucugcgg

SEQ ID NO: 1628788 - RNA, 19 nt, Artificial Sequence
  Description of Artificial Sequence: Synthetic oligonucleotide
gaguuugcauuuuccccuu

SEQ ID NO: 1628789 - RNA, 19 nt, Artificial Sequence
  Description of Artificial Sequence: Synthetic oligonucleotide
gggugagccccgguggccg

SEQ ID NO: 1628790 - RNA, 19 nt, Artificial Sequence
  Description of Artificial Sequence: Synthetic oligonucleotide
uugcugccggccagcgcgu

SEQ ID NO: 1628791 - RNA, 19 nt, Artificial Sequence
  Description of Artificial Sequence: Synthetic oligonucleotide
ccacaucgcaagaguuugc

SEQ ID NO: 1628792 - RNA, 19 nt, Artificial Sequence
  Description of Artificial Sequence: Synthetic oligonucleotide
cguaacaggguuuuacaua

SEQ ID NO: 1628793 - RNA, 19 nt, Artificial Sequence
  Description of Artificial Sequence: Synthetic oligonucleotide
ccacguaauaguuacugau

SEQ ID NO: 1628794 - RNA, 19 nt, Artificial Sequence
  Description of Artificial Sequence: Synthetic oligonucleotide
gcugauccccgcgaccugc

SEQ ID NO: 1628795 - RNA, 19 nt, Artificial Sequence
  Description of Artificial Sequence: Synthetic oligonucleotide
ggaucaaugcgcaggggcu

SEQ ID NO: 1628796 - RNA, 19 nt, Artificial Sequence
  Description of Artificial Sequence: Synthetic oligonucleotide
gccggcuugggcgcgaagc

SEQ ID NO: 1628797 - RNA, 19 nt, Artificial Sequence
  Description of Artificial Sequence: Synthetic oligonucleotide
uggaacgggcguggaucca

SEQ ID NO: 1628798 - RNA, 19 nt, Artificial Sequence
  Description of Artificial Sequence: Synthetic oligonucleotide
ucgcuacaguccggcacca

SEQ ID NO: 1628799 - RNA, 19 nt, Artificial Sequence
  Description of Artificial Sequence: Synthetic oligonucleotide
aguuacugaugggccccgu

SEQ ID NO: 1628800 - RNA, 19 nt, Artificial Sequence
  Description of Artificial Sequence: Synthetic oligonucleotide
ccaaguccgcauguagcgc

SEQ ID NO: 1628801 - RNA, 19 nt, Artificial Sequence
  Description of Artificial Sequence: Synthetic oligonucleotide
ucgucggucccugguuaaa

SEQ ID NO: 1628802 - RNA, 19 nt, Artificial Sequence
  Description of Artificial Sequence: Synthetic oligonucleotide
accugccgcucagugagau

SEQ ID NO: 1628803 - RNA, 19 nt, Artificial Sequence
  Description of Artificial Sequence: Synthetic oligonucleotide
ucgcaagaguuugcauuuu

SEQ ID NO: 1628804 - RNA, 19 nt, Artificial Sequence
  Description of Artificial Sequence: Synthetic oligonucleotide
ggugagccccgguggccgg

SEQ ID NO: 1628805 - RNA, 19 nt, Artificial Sequence
  Description of Artificial Sequence: Synthetic oligonucleotide
gaucaaugcgcaggggcuu

SEQ ID NO: 1628806 - RNA, 19 nt, Artificial Sequence
  Description of Artificial Sequence: Synthetic oligonucleotide
guagcgcgugucggcgccg

SEQ ID NO: 1628807 - RNA, 19 nt, Artificial Sequence
  Description of Artificial Sequence: Synthetic oligonucleotide
guaucgucggucccugguu

SEQ ID NO: 1628808 - RNA, 19 nt, Artificial Sequence
  Description of Artificial Sequence: Synthetic oligonucleotide
cucgggcgagggcagcguc

SEQ ID NO: 1628809 - RNA, 19 nt, Artificial Sequence
  Description of Artificial Sequence: Synthetic oligonucleotide
aguccgcauguagcgcgug

SEQ ID NO: 1628810 - RNA, 19 nt, Artificial Sequence
  Description of Artificial Sequence: Synthetic oligonucleotide
ucccggcagcucauugguu

SEQ ID NO: 1628811 - RNA, 19 nt, Artificial Sequence
  Description of Artificial Sequence: Synthetic oligonucleotide
gaacacgggccaccucgua

SEQ ID NO: 1628812 - RNA, 19 nt, Artificial Sequence
  Description of Artificial Sequence: Synthetic oligonucleotide
acgggguugcuagggucca

SEQ ID NO: 1628813 - RNA, 19 nt, Artificial Sequence
  Description of Artificial Sequence: Synthetic oligonucleotide
cgccgacaucguaacaggg

SEQ ID NO: 1628814 - RNA, 19 nt, Artificial Sequence
  Description of Artificial Sequence: Synthetic oligonucleotide
agaccacggacgacugcga

SEQ ID NO: 1628815 - RNA, 19 nt, Artificial Sequence
  Description of Artificial Sequence: Synthetic oligonucleotide
cgugaucguauuuacccaa

SEQ ID NO: 1628816 - RNA, 19 nt, Artificial Sequence
  Description of Artificial Sequence: Synthetic oligonucleotide
ggcgcggaucaaugcgcag

SEQ ID NO: 1628817 - RNA, 19 nt, Artificial Sequence
  Description of Artificial Sequence: Synthetic oligonucleotide
cccgcgaccugcguuuucc

SEQ ID NO: 1628818 - RNA, 19 nt, Artificial Sequence
  Description of Artificial Sequence: Synthetic oligonucleotide
accaagccgcugggucugg

SEQ ID NO: 1628819 - RNA, 19 nt, Artificial Sequence
  Description of Artificial Sequence: Synthetic oligonucleotide
cgcauguagcgcgugucgg

SEQ ID NO: 1628820 - RNA, 19 nt, Artificial Sequence
  Description of Artificial Sequence: Synthetic oligonucleotide
gcgagccguacauguaguc

SEQ ID NO: 1628821 - RNA, 19 nt, Artificial Sequence
  Description of Artificial Sequence: Synthetic oligonucleotide
cagcggcucgagccaaguc

SEQ ID NO: 1628822 - RNA, 19 nt, Artificial Sequence
  Description of Artificial Sequence: Synthetic oligonucleotide
ggcgccggacagcggcucg

SEQ ID NO: 1628823 - RNA, 19 nt, Artificial Sequence
  Description of Artificial Sequence: Synthetic oligonucleotide
ccacgggguugcuaggguc

SEQ ID NO: 1628824 - RNA, 19 nt, Artificial Sequence
  Description of Artificial Sequence: Synthetic oligonucleotide
cgugagagaugagcgaguc

SEQ ID NO: 1628825 - RNA, 19 nt, Artificial Sequence
  Description of Artificial Sequence: Synthetic oligonucleotide
uucucccgccuggguuggg

SEQ ID NO: 1628826 - RNA, 19 nt, Artificial Sequence
  Description of Artificial Sequence: Synthetic oligonucleotide
ccgucgccgacaucguaac

SEQ ID NO: 1628827 - RNA, 19 nt, Artificial Sequence
  Description of Artificial Sequence: Synthetic oligonucleotide
gcggucgcgcagcuccccg

SEQ ID NO: 1628828 - RNA, 19 nt, Artificial Sequence
  Description of Artificial Sequence: Synthetic oligonucleotide
cgaagcuacaggacggaaa

SEQ ID NO: 1628829 - RNA, 19 nt, Artificial Sequence
  Description of Artificial Sequence: Synthetic oligonucleotide
gauccccgcgaccugcguu

SEQ ID NO: 1628830 - RNA, 19 nt, Artificial Sequence
  Description of Artificial Sequence: Synthetic oligonucleotide
gggguaggcgucgggcuug

SEQ ID NO: 1628831 - RNA, 19 nt, Artificial Sequence
  Description of Artificial Sequence: Synthetic oligonucleotide
ggacgcuaggaggucuuca

SEQ ID NO: 1628832 - RNA, 19 nt, Artificial Sequence
  Description of Artificial Sequence: Synthetic oligonucleotide
ccacgacgugcugaacacg

SEQ ID NO: 1628833 - RNA, 19 nt, Artificial Sequence
  Description of Artificial Sequence: Synthetic oligonucleotide
ccaguuggccacgggguug

SEQ ID NO: 1628834 - RNA, 19 nt, Artificial Sequence
  Description of Artificial Sequence: Synthetic oligonucleotide
cacggacgacugcgagggc

SEQ ID NO: 1628835 - RNA, 19 nt, Artificial Sequence
  Description of Artificial Sequence: Synthetic oligonucleotide
agcgucugcggggcgcggu

SEQ ID NO: 1628836 - RNA, 19 nt, Artificial Sequence
  Description of Artificial Sequence: Synthetic oligonucleotide
gcagucggcgcggcgcccg

SEQ ID NO: 1628837 - RNA, 19 nt, Artificial Sequence
  Description of Artificial Sequence: Synthetic oligonucleotide
ggacgacugcgagggcacg

SEQ ID NO: 1628838 - RNA, 19 nt, Artificial Sequence
  Description of Artificial Sequence: Synthetic oligonucleotide
cguacgggugauagaccac

SEQ ID NO: 1628839 - RNA, 19 nt, Artificial Sequence
  Description of Artificial Sequence: Synthetic oligonucleotide
gcggaucaaugcgcagggg

SEQ ID NO: 1628840 - RNA, 19 nt, Artificial Sequence
  Description of Artificial Sequence: Synthetic oligonucleotide
gccguacgggugauagacc

SEQ ID NO: 1628841 - RNA, 19 nt, Artificial Sequence
  Description of Artificial Sequence: Synthetic oligonucleotide
cugcggggcgcggucgcgc

SEQ ID NO: 1628842 - RNA, 19 nt, Artificial Sequence
  Description of Artificial Sequence: Synthetic oligonucleotide
cagucggcgcggcgcccgg

SEQ ID NO: 1628843 - RNA, 19 nt, Artificial Sequence
  Description of Artificial Sequence: Synthetic oligonucleotide
gucccugguuaaauacaua

SEQ ID NO: 1628844 - RNA, 19 nt, Artificial Sequence
  Description of Artificial Sequence: Synthetic oligonucleotide
cccgucgccgacaucguaa

SEQ ID NO: 1628845 - RNA, 19 nt, Artificial Sequence
  Description of Artificial Sequence: Synthetic oligonucleotide
cgagggcagcgucugcggg

SEQ ID NO: 1628846 - RNA, 19 nt, Artificial Sequence
  Description of Artificial Sequence: Synthetic oligonucleotide
cccgggguaggcgucgggc

SEQ ID NO: 1628847 - RNA, 19 nt, Artificial Sequence
  Description of Artificial Sequence: Synthetic oligonucleotide
gccgacaucguaacagggu

SEQ ID NO: 1628848 - RNA, 19 nt, Artificial Sequence
  Description of Artificial Sequence: Synthetic oligonucleotide
guccgcauguagcgcgugu

SEQ ID NO: 1628849 - RNA, 19 nt, Artificial Sequence
  Description of Artificial Sequence: Synthetic oligonucleotide
cccgguggccggaaaccug

SEQ ID NO: 1628850 - RNA, 19 nt, Artificial Sequence
  Description of Artificial Sequence: Synthetic oligonucleotide
gaacgggcguggauccagu

SEQ ID NO: 1628851 - RNA, 19 nt, Artificial Sequence
  Description of Artificial Sequence: Synthetic oligonucleotide
cacggccggcuugggcgcg

SEQ ID NO: 1628852 - RNA, 19 nt, Artificial Sequence
  Description of Artificial Sequence: Synthetic oligonucleotide
gggcgcgaagcuacaggac

SEQ ID NO: 1628853 - RNA, 19 nt, Artificial Sequence
  Description of Artificial Sequence: Synthetic oligonucleotide
ccgacaucguaacaggguu

SEQ ID NO: 1628854 - RNA, 19 nt, Artificial Sequence
  Description of Artificial Sequence: Synthetic oligonucleotide
guuggccacgggguugcua

SEQ ID NO: 1628855 - RNA, 19 nt, Artificial Sequence
  Description of Artificial Sequence: Synthetic oligonucleotide
cgcgaccugcguuuuccug

SEQ ID NO: 1628856 - RNA, 19 nt, Artificial Sequence
  Description of Artificial Sequence: Synthetic oligonucleotide
cugcggccgucgccugggc

SEQ ID NO: 1628857 - RNA, 19 nt, Artificial Sequence
  Description of Artificial Sequence: Synthetic oligonucleotide
gaccugccgcucagugaga

SEQ ID NO: 1628858 - RNA, 19 nt, Artificial Sequence
  Description of Artificial Sequence: Synthetic oligonucleotide
cuggacgcuaggaggucuu

SEQ ID NO: 1628859 - RNA, 19 nt, Artificial Sequence
  Description of Artificial Sequence: Synthetic oligonucleotide
cuccccgggcgagccguac

SEQ ID NO: 1628860 - RNA, 19 nt, Artificial Sequence
  Description of Artificial Sequence: Synthetic oligonucleotide
aguuggccacgggguugcu

SEQ ID NO: 1628861 - RNA, 19 nt, Artificial Sequence
  Description of Artificial Sequence: Synthetic oligonucleotide
gcucgagccaaguccgcau

SEQ ID NO: 1628862 - RNA, 19 nt, Artificial Sequence
  Description of Artificial Sequence: Synthetic oligonucleotide
gggccguacgggugauaga

SEQ ID NO: 1628863 - RNA, 19 nt, Artificial Sequence
  Description of Artificial Sequence: Synthetic oligonucleotide
gcgcccacgacgugcugaa

SEQ ID NO: 1628864 - RNA, 19 nt, Artificial Sequence
  Description of Artificial Sequence: Synthetic oligonucleotide
gccggaaaccuggacgcua

SEQ ID NO: 1628865 - RNA, 19 nt, Artificial Sequence
  Description of Artificial Sequence: Synthetic oligonucleotide
cacgggcgcccacgacgug

SEQ ID NO: 1628866 - RNA, 19 nt, Artificial Sequence
  Description of Artificial Sequence: Synthetic oligonucleotide
caguugcgcuggggagaag

SEQ ID NO: 1628867 - RNA, 19 nt, Artificial Sequence
  Description of Artificial Sequence: Synthetic oligonucleotide
ccccacgugaucguauuua

SEQ ID NO: 1628868 - RNA, 19 nt, Artificial Sequence
  Description of Artificial Sequence: Synthetic oligonucleotide
gggcagggcuuaggauugc

SEQ ID NO: 1628869 - RNA, 19 nt, Artificial Sequence
  Description of Artificial Sequence: Synthetic oligonucleotide
gcgcuggggagaagagaac

SEQ ID NO: 1628870 - RNA, 19 nt, Artificial Sequence
  Description of Artificial Sequence: Synthetic oligonucleotide
gcgucugcggggcgcgguc

SEQ ID NO: 1628871 - RNA, 19 nt, Artificial Sequence
  Description of Artificial Sequence: Synthetic oligonucleotide
uccccgcgaccugcguuuu

SEQ ID NO: 1628872 - RNA, 19 nt, Artificial Sequence
  Description of Artificial Sequence: Synthetic oligonucleotide
ggcgagccguacauguagu

SEQ ID NO: 1628873 - RNA, 19 nt, Artificial Sequence
  Description of Artificial Sequence: Synthetic oligonucleotide
gcgcccgggguaggcgucg

SEQ ID NO: 1628874 - RNA, 19 nt, Artificial Sequence
  Description of Artificial Sequence: Synthetic oligonucleotide
gugagccccgguggccgga

SEQ ID NO: 1628875 - RNA, 19 nt, Artificial Sequence
  Description of Artificial Sequence: Synthetic oligonucleotide
gagccccgguggccggaaa

SEQ ID NO: 1628876 - RNA, 19 nt, Artificial Sequence
  Description of Artificial Sequence: Synthetic oligonucleotide
ggacagcggcucgagccaa

SEQ ID NO: 1628877 - RNA, 19 nt, Artificial Sequence
  Description of Artificial Sequence: Synthetic oligonucleotide
cguaucgucggucccuggu

SEQ ID NO: 1628878 - RNA, 19 nt, Artificial Sequence
  Description of Artificial Sequence: Synthetic oligonucleotide
gcuugggcgcgaagcuaca

SEQ ID NO: 1628879 - RNA, 19 nt, Artificial Sequence
  Description of Artificial Sequence: Synthetic oligonucleotide
ggauugcuccuugucgguu

SEQ ID NO: 1628880 - RNA, 19 nt, Artificial Sequence
  Description of Artificial Sequence: Synthetic oligonucleotide
gguaggcgucgggcuugag

SEQ ID NO: 1628881 - RNA, 19 nt, Artificial Sequence
  Description of Artificial Sequence: Synthetic oligonucleotide
ccgccucgggcgagggcag

SEQ ID NO: 1628882 - RNA, 19 nt, Artificial Sequence
  Description of Artificial Sequence: Synthetic oligonucleotide
cccaaaauacggcgcggau

SEQ ID NO: 1628883 - RNA, 19 nt, Artificial Sequence
  Description of Artificial Sequence: Synthetic oligonucleotide
ggccggcuugggcgcgaag

SEQ ID NO: 1628884 - RNA, 19 nt, Artificial Sequence
  Description of Artificial Sequence: Synthetic oligonucleotide
acggccggcuugggcgcga

SEQ ID NO: 1628885 - RNA, 19 nt, Artificial Sequence
  Description of Artificial Sequence: Synthetic oligonucleotide
cgucugcggggcgcggucg

SEQ ID NO: 1628886 - RNA, 19 nt, Artificial Sequence
  Description of Artificial Sequence: Synthetic oligonucleotide
ccucguaucgucggucccu

SEQ ID NO: 1628887 - RNA, 19 nt, Artificial Sequence
  Description of Artificial Sequence: Synthetic oligonucleotide
gcacgggcgcccacgacgu

SEQ ID NO: 1628888 - RNA, 19 nt, Artificial Sequence
  Description of Artificial Sequence: Synthetic oligonucleotide
cggcucgagccaaguccgc

SEQ ID NO: 1628889 - RNA, 19 nt, Artificial Sequence
  Description of Artificial Sequence: Synthetic oligonucleotide
cggccggaaagcuggggaa

SEQ ID NO: 1628890 - RNA, 19 nt, Artificial Sequence
  Description of Artificial Sequence: Synthetic oligonucleotide
ggguaggcgucgggcuuga

SEQ ID NO: 1628891 - RNA, 19 nt, Artificial Sequence
  Description of Artificial Sequence: Synthetic oligonucleotide
ccggcuugggcgcgaagcu

SEQ ID NO: 1628892 - RNA, 19 nt, Artificial Sequence
  Description of Artificial Sequence: Synthetic oligonucleotide
cggcgcggaucaaugcgca

SEQ ID NO: 1628893 - RNA, 19 nt, Artificial Sequence
  Description of Artificial Sequence: Synthetic oligonucleotide
ccgggguaggcgucgggcu

SEQ ID NO: 1628894 - RNA, 19 nt, Artificial Sequence
  Description of Artificial Sequence: Synthetic oligonucleotide
ccuggacgcuaggaggucu

SEQ ID NO: 1628895 - RNA, 19 nt, Artificial Sequence
  Description of Artificial Sequence: Synthetic oligonucleotide
gcgcguccgccucgggcga

SEQ ID NO: 1628896 - RNA, 19 nt, Artificial Sequence
  Description of Artificial Sequence: Synthetic oligonucleotide
cccgggcgagccguacaug

SEQ ID NO: 1628897 - RNA, 19 nt, Artificial Sequence
  Description of Artificial Sequence: Synthetic oligonucleotide
cgacaucguaacaggguuu

SEQ ID NO: 1628898 - RNA, 19 nt, Artificial Sequence
  Description of Artificial Sequence: Synthetic oligonucleotide
gcgcggucgcgcagcuccc

SEQ ID NO: 1628899 - RNA, 19 nt, Artificial Sequence
  Description of Artificial Sequence: Synthetic oligonucleotide
cggggcgcggucgcgcagc

SEQ ID NO: 1628900 - RNA, 19 nt, Artificial Sequence
  Description of Artificial Sequence: Synthetic oligonucleotide
cgcgugucggcgccgaggu

SEQ ID NO: 1628901 - RNA, 19 nt, Artificial Sequence
  Description of Artificial Sequence: Synthetic oligonucleotide
ggucuggcggcggcagggu

SEQ ID NO: 1628902 - RNA, 19 nt, Artificial Sequence
  Description of Artificial Sequence: Synthetic oligonucleotide
cguccgccucgggcgaggg

SEQ ID NO: 1628903 - RNA, 19 nt, Artificial Sequence
  Description of Artificial Sequence: Synthetic oligonucleotide
ccuugucgguuuucucuuu

SEQ ID NO: 1628904 - RNA, 19 nt, Artificial Sequence
  Description of Artificial Sequence: Synthetic oligonucleotide
gcgccggacagcggcucga

SEQ ID NO: 1628905 - RNA, 19 nt, Artificial Sequence
  Description of Artificial Sequence: Synthetic oligonucleotide
cgucgccgacaucguaaca

SEQ ID NO: 1628906 - RNA, 19 nt, Artificial Sequence
  Description of Artificial Sequence: Synthetic oligonucleotide
cgccggacagcggcucgag

SEQ ID NO: 1628907 - RNA, 19 nt, Artificial Sequence
  Description of Artificial Sequence: Synthetic oligonucleotide
gggccgcagucggcgcggc

SEQ ID NO: 1628908 - RNA, 19 nt, Artificial Sequence
  Description of Artificial Sequence: Synthetic oligonucleotide
ccccgcgaccugcguuuuc

SEQ ID NO: 1628909 - RNA, 19 nt, Artificial Sequence
  Description of Artificial Sequence: Synthetic oligonucleotide
cgcggucgcgcagcucccc

SEQ ID NO: 1628910 - RNA, 19 nt, Artificial Sequence
  Description of Artificial Sequence: Synthetic oligonucleotide
cgcggcgcccgggguaggc

SEQ ID NO: 1628911 - RNA, 19 nt, Artificial Sequence
  Description of Artificial Sequence: Synthetic oligonucleotide
cgcagucggcgcggcgccc

SEQ ID NO: 1628912 - RNA, 19 nt, Artificial Sequence
  Description of Artificial Sequence: Synthetic oligonucleotide
ccccgggcgagccguacau

SEQ ID NO: 1628913 - RNA, 19 nt, Artificial Sequence
  Description of Artificial Sequence: Synthetic oligonucleotide
ccgcgaccugcguuuuccu

SEQ ID NO: 1628914 - RNA, 19 nt, Artificial Sequence
  Description of Artificial Sequence: Synthetic oligonucleotide
ccccgucgccgacaucgua

SEQ ID NO: 1628915 - RNA, 19 nt, Artificial Sequence
  Description of Artificial Sequence: Synthetic oligonucleotide
ccccgguggccggaaaccu

SEQ ID NO: 1628916 - RNA, 19 nt, Artificial Sequence
  Description of Artificial Sequence: Synthetic oligonucleotide
gggccccgucgccgacauc

SEQ ID NO: 1628917 - RNA, 19 nt, Artificial Sequence
  Description of Artificial Sequence: Synthetic oligonucleotide
gggcgcggucgcgcagcuc

SEQ ID NO: 1628918 - RNA, 19 nt, Artificial Sequence
  Description of Artificial Sequence: Synthetic oligonucleotide
gcgucgggcuugagggcau

SEQ ID NO: 1628919 - RNA, 19 nt, Artificial Sequence
  Description of Artificial Sequence: Synthetic oligonucleotide
cgcccacgacgugcugaac

SEQ ID NO: 1628920 - RNA, 19 nt, Artificial Sequence
  Description of Artificial Sequence: Synthetic oligonucleotide
ccucgggcgagggcagcgu

SEQ ID NO: 1628921 - RNA, 19 nt, Artificial Sequence
  Description of Artificial Sequence: Synthetic oligonucleotide
gccccgucgccgacaucgu

SEQ ID NO: 1628922 - RNA, 19 nt, Artificial Sequence
  Description of Artificial Sequence: Synthetic oligonucleotide
cgggguaggcgucgggcuu

SEQ ID NO: 1628923 - RNA, 19 nt, Artificial Sequence
  Description of Artificial Sequence: Synthetic oligonucleotide
aauuauagaaacaagcucc

SEQ ID NO: 1628924 - RNA, 19 nt, Artificial Sequence
  Description of Artificial Sequence: Synthetic oligonucleotide
auauucacugacuuguucc

SEQ ID NO: 1628925 - RNA, 19 nt, Artificial Sequence
  Description of Artificial Sequence: Synthetic oligonucleotide
uguuuaauggcaaguaccg

SEQ ID NO: 1628926 - RNA, 19 nt, Artificial Sequence
  Description of Artificial Sequence: Synthetic oligonucleotide
aaaguguaaauaaaauggc

SEQ ID NO: 1628927 - RNA, 19 nt, Artificial Sequence
  Description of Artificial Sequence: Synthetic oligonucleotide
acuuggacaguacagaacg

SEQ ID NO: 1628928 - RNA, 19 nt, Artificial Sequence
  Description of Artificial Sequence: Synthetic oligonucleotide
aaucucgucgcucuaaauc

SEQ ID NO: 1628929 - RNA, 19 nt, Artificial Sequence
  Description of Artificial Sequence: Synthetic oligonucleotide
aguacagaacguuuggagc

SEQ ID NO: 1628930 - RNA, 19 nt, Artificial Sequence
  Description of Artificial Sequence: Synthetic oligonucleotide
agaauaacagaauauucag

SEQ ID NO: 1628931 - RNA, 19 nt, Artificial Sequence
  Description of Artificial Sequence: Synthetic oligonucleotide
uguaaugacguuuaauucu

SEQ ID NO: 1628932 - RNA, 19 nt, Artificial Sequence
  Description of Artificial Sequence: Synthetic oligonucleotide
accgucacuaucuagugcc

SEQ ID NO: 1628933 - RNA, 19 nt, Artificial Sequence
  Description of Artificial Sequence: Synthetic oligonucleotide
uauccaagcaagaagggug

SEQ ID NO: 1628934 - RNA, 19 nt, Artificial Sequence
  Description of Artificial Sequence: Synthetic oligonucleotide
uaauuauagaaacaagcuc

SEQ ID NO: 1628935 - RNA, 19 nt, Artificial Sequence
  Description of Artificial Sequence: Synthetic oligonucleotide
augaccuuuggcuuguacc

SEQ ID NO: 1628936 - RNA, 19 nt, Artificial Sequence
  Description of Artificial Sequence: Synthetic oligonucleotide
cuuauaauacuccuggaac

SEQ ID NO: 1628937 - RNA, 19 nt, Artificial Sequence
  Description of Artificial Sequence: Synthetic oligonucleotide
ugcuguuaaaccuagugug

SEQ ID NO: 1628938 - RNA, 19 nt, Artificial Sequence
  Description of Artificial Sequence: Synthetic oligonucleotide
uuacccuucagacaaauuc

SEQ ID NO: 1628939 - RNA, 19 nt, Artificial Sequence
  Description of Artificial Sequence: Synthetic oligonucleotide
aaugacguuuaauucucuc

SEQ ID NO: 1628940 - RNA, 19 nt, Artificial Sequence
  Description of Artificial Sequence: Synthetic oligonucleotide
ugacguuuaauucucucag

SEQ ID NO: 1628941 - RNA, 19 nt, Artificial Sequence
  Description of Artificial Sequence: Synthetic oligonucleotide
ugucuuacauuccauacac

SEQ ID NO: 1628942 - RNA, 19 nt, Artificial Sequence
  Description of Artificial Sequence: Synthetic oligonucleotide
agaaacaagcuccaugguc

SEQ ID NO: 1628943 - RNA, 19 nt, Artificial Sequence
  Description of Artificial Sequence: Synthetic oligonucleotide
uuauaaugaucuguaaucc

SEQ ID NO: 1628944 - RNA, 19 nt, Artificial Sequence
  Description of Artificial Sequence: Synthetic oligonucleotide
aaaccuagugugcacugcg

SEQ ID NO: 1628945 - RNA, 19 nt, Artificial Sequence
  Description of Artificial Sequence: Synthetic oligonucleotide
aagcauauaguauucuccu

SEQ ID NO: 1628946 - RNA, 19 nt, Artificial Sequence
  Description of Artificial Sequence: Synthetic oligonucleotide
uuauaauacuccuggaacu

SEQ ID NO: 1628947 - RNA, 19 nt, Artificial Sequence
  Description of Artificial Sequence: Synthetic oligonucleotide
acauagagcauuuggaaug

SEQ ID NO: 1628948 - RNA, 19 nt, Artificial Sequence
  Description of Artificial Sequence: Synthetic oligonucleotide
uuuaauggcaaguaccgaa

SEQ ID NO: 1628949 - RNA, 19 nt, Artificial Sequence
  Description of Artificial Sequence: Synthetic oligonucleotide
uucgccaucaucugaauca

SEQ ID NO: 1628950 - RNA, 19 nt, Artificial Sequence
  Description of Artificial Sequence: Synthetic oligonucleotide
ucuuauaauacuccuggaa

SEQ ID NO: 1628951 - RNA, 19 nt, Artificial Sequence
  Description of Artificial Sequence: Synthetic oligonucleotide
aagugauucagccuuuccu

SEQ ID NO: 1628952 - RNA, 19 nt, Artificial Sequence
  Description of Artificial Sequence: Synthetic oligonucleotide
aguaccgaagcucauccgg

SEQ ID NO: 1628953 - RNA, 19 nt, Artificial Sequence
  Description of Artificial Sequence: Synthetic oligonucleotide
guguauaagugauucagcc

SEQ ID NO: 1628954 - RNA, 19 nt, Artificial Sequence
  Description of Artificial Sequence: Synthetic oligonucleotide
uuccuuacccuucagacaa

SEQ ID NO: 1628955 - RNA, 19 nt, Artificial Sequence
  Description of Artificial Sequence: Synthetic oligonucleotide
gaccugauggaauagcacc

SEQ ID NO: 1628956 - RNA, 19 nt, Artificial Sequence
  Description of Artificial Sequence: Synthetic oligonucleotide
ugcguuucuguaaugacgu

SEQ ID NO: 1628957 - RNA, 19 nt, Artificial Sequence
  Description of Artificial Sequence: Synthetic oligonucleotide
ucuuguaguggccacuuug

SEQ ID NO: 1628958 - RNA, 19 nt, Artificial Sequence
  Description of Artificial Sequence: Synthetic oligonucleotide
ugacaacagucacaaaucc

SEQ ID NO: 1628959 - RNA, 19 nt, Artificial Sequence
  Description of Artificial Sequence: Synthetic oligonucleotide
ggguauuuccgcuugaagg

SEQ ID NO: 1628960 - RNA, 19 nt, Artificial Sequence
  Description of Artificial Sequence: Synthetic oligonucleotide
ugcaagucaaaauaugcuc

SEQ ID NO: 1628961 - RNA, 19 nt, Artificial Sequence
  Description of Artificial Sequence: Synthetic oligonucleotide
uuuaauucucucagguaga

SEQ ID NO: 1628962 - RNA, 19 nt, Artificial Sequence
  Description of Artificial Sequence: Synthetic oligonucleotide
cuuuguacuuuccuugagg

SEQ ID NO: 1628963 - RNA, 19 nt, Artificial Sequence
  Description of Artificial Sequence: Synthetic oligonucleotide
uguagaauaacagaauauu

SEQ ID NO: 1628964 - RNA, 19 nt, Artificial Sequence
  Description of Artificial Sequence: Synthetic oligonucleotide
uguguuuaauggcaaguac

SEQ ID NO: 1628965 - RNA, 19 nt, Artificial Sequence
  Description of Artificial Sequence: Synthetic oligonucleotide
aaaccuauuuuaucccucu

SEQ ID NO: 1628966 - RNA, 19 nt, Artificial Sequence
  Description of Artificial Sequence: Synthetic oligonucleotide
uaaaucuggguauuuccgc

SEQ ID NO: 1628967 - RNA, 19 nt, Artificial Sequence
  Description of Artificial Sequence: Synthetic oligonucleotide
gacaguacagaacguuugg

SEQ ID NO: 1628968 - RNA, 19 nt, Artificial Sequence
  Description of Artificial Sequence: Synthetic oligonucleotide
cuuguuggauuccuuaccc

SEQ ID NO: 1628969 - RNA, 19 nt, Artificial Sequence
  Description of Artificial Sequence: Synthetic oligonucleotide
uuggauaacaugugucugc

SEQ ID NO: 1628970 - RNA, 19 nt, Artificial Sequence
  Description of Artificial Sequence: Synthetic oligonucleotide
acuuggauaacaugugucu

SEQ ID NO: 1628971 - RNA, 19 nt, Artificial Sequence
  Description of Artificial Sequence: Synthetic oligonucleotide
aaugcaugucuuacauucc

SEQ ID NO: 1628972 - RNA, 19 nt, Artificial Sequence
  Description of Artificial Sequence: Synthetic oligonucleotide
uauaauacuccuggaacug

SEQ ID NO: 1628973 - RNA, 19 nt, Artificial Sequence
  Description of Artificial Sequence: Synthetic oligonucleotide
uguauaagugauucagccu

SEQ ID NO: 1628974 - RNA, 19 nt, Artificial Sequence
  Description of Artificial Sequence: Synthetic oligonucleotide
aguaccucuuauaauacuc

SEQ ID NO: 1628975 - RNA, 19 nt, Artificial Sequence
  Description of Artificial Sequence: Synthetic oligonucleotide
uuguagaauaacagaauau

SEQ ID NO: 1628976 - RNA, 19 nt, Artificial Sequence
  Description of Artificial Sequence: Synthetic oligonucleotide
agauaaaucucgucgcucu

SEQ ID NO: 1628977 - RNA, 19 nt, Artificial Sequence
  Description of Artificial Sequence: Synthetic oligonucleotide
caugucuuacauuccauac

SEQ ID NO: 1628978 - RNA, 19 nt, Artificial Sequence
  Description of Artificial Sequence: Synthetic oligonucleotide
aacagaauauucagcaugu

SEQ ID NO: 1628979 - RNA, 19 nt, Artificial Sequence
  Description of Artificial Sequence: Synthetic oligonucleotide
aaggaggucacaccaagau

SEQ ID NO: 1628980 - RNA, 19 nt, Artificial Sequence
  Description of Artificial Sequence: Synthetic oligonucleotide
aacguuuggagccaucuuu

SEQ ID NO: 1628981 - RNA, 19 nt, Artificial Sequence
  Description of Artificial Sequence: Synthetic oligonucleotide
uagagcauuuggaaugacc

SEQ ID NO: 1628982 - RNA, 19 nt, Artificial Sequence
  Description of Artificial Sequence: Synthetic oligonucleotide
aguguauaagugauucagc

SEQ ID NO: 1628983 - RNA, 19 nt, Artificial Sequence
  Description of Artificial Sequence: Synthetic oligonucleotide
ucuuguagaauaacagaau

SEQ ID NO: 1628984 - RNA, 19 nt, Artificial Sequence
  Description of Artificial Sequence: Synthetic oligonucleotide
uguuccugaagcauauagu

SEQ ID NO: 1628985 - RNA, 19 nt, Artificial Sequence
  Description of Artificial Sequence: Synthetic oligonucleotide
uguaguggccacuuugucu

SEQ ID NO: 1628986 - RNA, 19 nt, Artificial Sequence
  Description of Artificial Sequence: Synthetic oligonucleotide
cugcguuucuguaaugacg

SEQ ID NO: 1628987 - RNA, 19 nt, Artificial Sequence
  Description of Artificial Sequence: Synthetic oligonucleotide
acugcguuucuguaaugac

SEQ ID NO: 1628988 - RNA, 19 nt, Artificial Sequence
  Description of Artificial Sequence: Synthetic oligonucleotide
gacguuuaauucucucagg

SEQ ID NO: 1628989 - RNA, 19 nt, Artificial Sequence
  Description of Artificial Sequence: Synthetic oligonucleotide
ugaagcauauaguauucuc

SEQ ID NO: 1628990 - RNA, 19 nt, Artificial Sequence
  Description of Artificial Sequence: Synthetic oligonucleotide
aucucgucgcucuaaaucu

SEQ ID NO: 1628991 - RNA, 19 nt, Artificial Sequence
  Description of Artificial Sequence: Synthetic oligonucleotide
ugagaauacucuuuauaau

SEQ ID NO: 1628992 - RNA, 19 nt, Artificial Sequence
  Description of Artificial Sequence: Synthetic oligonucleotide
ugagauaaaucucgucgcu

SEQ ID NO: 1628993 - RNA, 19 nt, Artificial Sequence
  Description of Artificial Sequence: Synthetic oligonucleotide
caguguauaagugauucag

SEQ ID NO: 1628994 - RNA, 19 nt, Artificial Sequence
  Description of Artificial Sequence: Synthetic oligonucleotide
aucacuucaucacugcgca

SEQ ID NO: 1628995 - RNA, 19 nt, Artificial Sequence
  Description of Artificial Sequence: Synthetic oligonucleotide
ugcuguugaauucggcugc

SEQ ID NO: 1628996 - RNA, 19 nt, Artificial Sequence
  Description of Artificial Sequence: Synthetic oligonucleotide
augacguuuaauucucuca

SEQ ID NO: 1628997 - RNA, 19 nt, Artificial Sequence
  Description of Artificial Sequence: Synthetic oligonucleotide
guguuuaauggcaaguacc

SEQ ID NO: 1628998 - RNA, 19 nt, Artificial Sequence
  Description of Artificial Sequence: Synthetic oligonucleotide
caguacagaacguuuggag

SEQ ID NO: 1628999 - RNA, 19 nt, Artificial Sequence
  Description of Artificial Sequence: Synthetic oligonucleotide
ugaguaccucuuauaauac

SEQ ID NO: 1629000 - RNA, 19 nt, Artificial Sequence
  Description of Artificial Sequence: Synthetic oligonucleotide
aauccagcgaccugaugga

SEQ ID NO: 1629001 - RNA, 19 nt, Artificial Sequence
  Description of Artificial Sequence: Synthetic oligonucleotide
auauaaugcaugucuuaca

SEQ ID NO: 1629002 - RNA, 19 nt, Artificial Sequence
  Description of Artificial Sequence: Synthetic oligonucleotide
uuaaaccuagugugcacug

SEQ ID NO: 1629003 - RNA, 19 nt, Artificial Sequence
  Description of Artificial Sequence: Synthetic oligonucleotide
augcuguuaaaccuagugu

SEQ ID NO: 1629004 - RNA, 19 nt, Artificial Sequence
  Description of Artificial Sequence: Synthetic oligonucleotide
ucgacuaucuucgccauca

SEQ ID NO: 1629005 - RNA, 19 nt, Artificial Sequence
  Description of Artificial Sequence: Synthetic oligonucleotide
gugaguaccucuuauaaua

SEQ ID NO: 1629006 - RNA, 19 nt, Artificial Sequence
  Description of Artificial Sequence: Synthetic oligonucleotide
uccgcuuuucauccccucg

SEQ ID NO: 1629007 - RNA, 19 nt, Artificial Sequence
  Description of Artificial Sequence: Synthetic oligonucleotide
auacuccuggaacuguccg

SEQ ID NO: 1629008 - RNA, 19 nt, Artificial Sequence
  Description of Artificial Sequence: Synthetic oligonucleotide
aaucaccgucacuaucuag

SEQ ID NO: 1629009 - RNA, 19 nt, Artificial Sequence
  Description of Artificial Sequence: Synthetic oligonucleotide
aaguaccgaagcucauccg

SEQ ID NO: 1629010 - RNA, 19 nt, Artificial Sequence
  Description of Artificial Sequence: Synthetic oligonucleotide
uaagugauucagccuuucc

SEQ ID NO: 1629011 - RNA, 19 nt, Artificial Sequence
  Description of Artificial Sequence: Synthetic oligonucleotide
gcuuucuuaauguacucag

SEQ ID NO: 1629012 - RNA, 19 nt, Artificial Sequence
  Description of Artificial Sequence: Synthetic oligonucleotide
ugaguauucuguuguugca

SEQ ID NO: 1629013 - RNA, 19 nt, Artificial Sequence
  Description of Artificial Sequence: Synthetic oligonucleotide
augucuuacauuccauaca

SEQ ID NO: 1629014 - RNA, 19 nt, Artificial Sequence
  Description of Artificial Sequence: Synthetic oligonucleotide
uguuguugcauuugagaau

SEQ ID NO: 1629015 - RNA, 19 nt, Artificial Sequence
  Description of Artificial Sequence: Synthetic oligonucleotide
gucacuaucuagugccggg

SEQ ID NO: 1629016 - RNA, 19 nt, Artificial Sequence
  Description of Artificial Sequence: Synthetic oligonucleotide
cauacacugccauggguag

SEQ ID NO: 1629017 - RNA, 19 nt, Artificial Sequence
  Description of Artificial Sequence: Synthetic oligonucleotide
caaucacuucaucacugcg

SEQ ID NO: 1629018 - RNA, 19 nt, Artificial Sequence
  Description of Artificial Sequence: Synthetic oligonucleotide
cuuguagaauaacagaaua

SEQ ID NO: 1629019 - RNA, 19 nt, Artificial Sequence
  Description of Artificial Sequence: Synthetic oligonucleotide
uguuaaaccuagugugcac

SEQ ID NO: 1629020 - RNA, 19 nt, Artificial Sequence
  Description of Artificial Sequence: Synthetic oligonucleotide
agcauguuuagcuggguau

SEQ ID NO: 1629021 - RNA, 19 nt, Artificial Sequence
  Description of Artificial Sequence: Synthetic oligonucleotide
uaauacuccuggaacuguc

SEQ ID NO: 1629022 - RNA, 19 nt, Artificial Sequence
  Description of Artificial Sequence: Synthetic oligonucleotide
uuggauuccuuacccuuca

SEQ ID NO: 1629023 - RNA, 19 nt, Artificial Sequence
  Description of Artificial Sequence: Synthetic oligonucleotide
auuccuuacccuucagaca

SEQ ID NO: 1629024 - RNA, 19 nt, Artificial Sequence
  Description of Artificial Sequence: Synthetic oligonucleotide
uguugaauucggcugcuuu

SEQ ID NO: 1629025 - RNA, 19 nt, Artificial Sequence
  Description of Artificial Sequence: Synthetic oligonucleotide
uaccucuuauaauacuccu

SEQ ID NO: 1629026 - RNA, 19 nt, Artificial Sequence
  Description of Artificial Sequence: Synthetic oligonucleotide
uaaaucucgucgcucuaaa

SEQ ID NO: 1629027 - RNA, 19 nt, Artificial Sequence
  Description of Artificial Sequence: Synthetic oligonucleotide
uuccgcuugaaggagguca

SEQ ID NO: 1629028 - RNA, 19 nt, Artificial Sequence
  Description of Artificial Sequence: Synthetic oligonucleotide
ugcacugcguuucuguaau

SEQ ID NO: 1629029 - RNA, 19 nt, Artificial Sequence
  Description of Artificial Sequence: Synthetic oligonucleotide
uguuggauuccuuacccuu

SEQ ID NO: 1629030 - RNA, 19 nt, Artificial Sequence
  Description of Artificial Sequence: Synthetic oligonucleotide
uggcuuguacccaggaacu

SEQ ID NO: 1629031 - RNA, 19 nt, Artificial Sequence
  Description of Artificial Sequence: Synthetic oligonucleotide
agcauauaguauucuccug

SEQ ID NO: 1629032 - RNA, 19 nt, Artificial Sequence
  Description of Artificial Sequence: Synthetic oligonucleotide
uggguauucuuuuaucauu

SEQ ID NO: 1629033 - RNA, 19 nt, Artificial Sequence
  Description of Artificial Sequence: Synthetic oligonucleotide
ccuuuguucggucuguugg

SEQ ID NO: 1629034 - RNA, 19 nt, Artificial Sequence
  Description of Artificial Sequence: Synthetic oligonucleotide
cacuuggauaacauguguc

SEQ ID NO: 1629035 - RNA, 19 nt, Artificial Sequence
  Description of Artificial Sequence: Synthetic oligonucleotide
aacugaccuuuguucgguc

SEQ ID NO: 1629036 - RNA, 19 nt, Artificial Sequence
  Description of Artificial Sequence: Synthetic oligonucleotide
aaauuccacauagagcauu

SEQ ID NO: 1629037 - RNA, 19 nt, Artificial Sequence
  Description of Artificial Sequence: Synthetic oligonucleotide
auccccucgacuaucuucg

SEQ ID NO: 1629038 - RNA, 19 nt, Artificial Sequence
  Description of Artificial Sequence: Synthetic oligonucleotide
agucacaaauccagcgacc

SEQ ID NO: 1629039 - RNA, 19 nt, Artificial Sequence
  Description of Artificial Sequence: Synthetic oligonucleotide
guauaagugauucagccuu

SEQ ID NO: 1629040 - RNA, 19 nt, Artificial Sequence
  Description of Artificial Sequence: Synthetic oligonucleotide
gacguuccuuuucuuguag

SEQ ID NO: 1629041 - RNA, 19 nt, Artificial Sequence
  Description of Artificial Sequence: Synthetic oligonucleotide
gggcuguccacauauaaug

SEQ ID NO: 1629042 - RNA, 19 nt, Artificial Sequence
  Description of Artificial Sequence: Synthetic oligonucleotide
caccaagauauucacugac

SEQ ID NO: 1629043 - RNA, 19 nt, Artificial Sequence
  Description of Artificial Sequence: Synthetic oligonucleotide
uggauaacaugugucugca

SEQ ID NO: 1629044 - RNA, 19 nt, Artificial Sequence
  Description of Artificial Sequence: Synthetic oligonucleotide
aggcacuuggauaacaugu

SEQ ID NO: 1629045 - RNA, 19 nt, Artificial Sequence
  Description of Artificial Sequence: Synthetic oligonucleotide
uggacaguacagaacguuu

SEQ ID NO: 1629046 - RNA, 19 nt, Artificial Sequence
  Description of Artificial Sequence: Synthetic oligonucleotide
aucaccgucacuaucuagu

SEQ ID NO: 1629047 - RNA, 19 nt, Artificial Sequence
  Description of Artificial Sequence: Synthetic oligonucleotide
cacuggguaagaacugacc

SEQ ID NO: 1629048 - RNA, 19 nt, Artificial Sequence
  Description of Artificial Sequence: Synthetic oligonucleotide
guaccucuuauaauacucc

SEQ ID NO: 1629049 - RNA, 19 nt, Artificial Sequence
  Description of Artificial Sequence: Synthetic oligonucleotide
cucgucgcucuaaaucugg

SEQ ID NO: 1629050 - RNA, 19 nt, Artificial Sequence
  Description of Artificial Sequence: Synthetic oligonucleotide
ucaccgucacuaucuagug

SEQ ID NO: 1629051 - RNA, 19 nt, Artificial Sequence
  Description of Artificial Sequence: Synthetic oligonucleotide
ucccgguuuaaguugcugu

SEQ ID NO: 1629052 - RNA, 19 nt, Artificial Sequence
  Description of Artificial Sequence: Synthetic oligonucleotide
ucgucgcucuaaaucuggg

SEQ ID NO: 1629053 - RNA, 19 nt, Artificial Sequence
  Description of Artificial Sequence: Synthetic oligonucleotide
guacucagguacuuugcug

SEQ ID NO: 1629054 - RNA, 19 nt, Artificial Sequence
  Description of Artificial Sequence: Synthetic oligonucleotide
auccaagcaagaagggugg

SEQ ID NO: 1629055 - RNA, 19 nt, Artificial Sequence
  Description of Artificial Sequence: Synthetic oligonucleotide
cuuggauaacaugugucug

SEQ ID NO: 1629056 - RNA, 19 nt, Artificial Sequence
  Description of Artificial Sequence: Synthetic oligonucleotide
gaggcacuuggauaacaug

SEQ ID NO: 1629057 - RNA, 19 nt, Artificial Sequence
  Description of Artificial Sequence: Synthetic oligonucleotide
acagaacaucauuucuucu

SEQ ID NO: 1629058 - RNA, 19 nt, Artificial Sequence
  Description of Artificial Sequence: Synthetic oligonucleotide
aaaucucgucgcucuaaau

SEQ ID NO: 1629059 - RNA, 19 nt, Artificial Sequence
  Description of Artificial Sequence: Synthetic oligonucleotide
uggguaagaacugaccuuu

SEQ ID NO: 1629060 - RNA, 19 nt, Artificial Sequence
  Description of Artificial Sequence: Synthetic oligonucleotide
uccgaagugccuuuauuuu

SEQ ID NO: 1629061 - RNA, 19 nt, Artificial Sequence
  Description of Artificial Sequence: Synthetic oligonucleotide
uguucggucuguuggcaac

SEQ ID NO: 1629062 - RNA, 19 nt, Artificial Sequence
  Description of Artificial Sequence: Synthetic oligonucleotide
uguuggcaacacuuuguac

SEQ ID NO: 1629063 - RNA, 19 nt, Artificial Sequence
  Description of Artificial Sequence: Synthetic oligonucleotide
uaaaccuagugugcacugc

SEQ ID NO: 1629064 - RNA, 19 nt, Artificial Sequence
  Description of Artificial Sequence: Synthetic oligonucleotide
ucucgucgcucuaaaucug

SEQ ID NO: 1629065 - RNA, 19 nt, Artificial Sequence
  Description of Artificial Sequence: Synthetic oligonucleotide
ucauccggugaguaccucu

SEQ ID NO: 1629066 - RNA, 19 nt, Artificial Sequence
  Description of Artificial Sequence: Synthetic oligonucleotide
gucuguuggcaacacuuug

SEQ ID NO: 1629067 - RNA, 19 nt, Artificial Sequence
  Description of Artificial Sequence: Synthetic oligonucleotide
ucgcugacaacagucacaa

SEQ ID NO: 1629068 - RNA, 19 nt, Artificial Sequence
  Description of Artificial Sequence: Synthetic oligonucleotide
aagaaggguggccacuguu

SEQ ID NO: 1629069 - RNA, 19 nt, Artificial Sequence
  Description of Artificial Sequence: Synthetic oligonucleotide
ucuagugccgggagcucug

SEQ ID NO: 1629070 - RNA, 19 nt, Artificial Sequence
  Description of Artificial Sequence: Synthetic oligonucleotide
uccuggaacuguccgggga

SEQ ID NO: 1629071 - RNA, 19 nt, Artificial Sequence
  Description of Artificial Sequence: Synthetic oligonucleotide
uuuguucggucuguuggca

SEQ ID NO: 1629072 - RNA, 19 nt, Artificial Sequence
  Description of Artificial Sequence: Synthetic oligonucleotide
uuagcuggguauucuuuua

SEQ ID NO: 1629073 - RNA, 19 nt, Artificial Sequence
  Description of Artificial Sequence: Synthetic oligonucleotide
ucgcucuaaaucuggguau

SEQ ID NO: 1629074 - RNA, 19 nt, Artificial Sequence
  Description of Artificial Sequence: Synthetic oligonucleotide
uugaaggaggucacaccaa

SEQ ID NO: 1629075 - RNA, 19 nt, Artificial Sequence
  Description of Artificial Sequence: Synthetic oligonucleotide
guauuuccgcuugaaggag

SEQ ID NO: 1629076 - RNA, 19 nt, Artificial Sequence
  Description of Artificial Sequence: Synthetic oligonucleotide
acugaccuuuguucggucu

SEQ ID NO: 1629077 - RNA, 19 nt, Artificial Sequence
  Description of Artificial Sequence: Synthetic oligonucleotide
ucugaaucaccgucacuau

SEQ ID NO: 1629078 - RNA, 19 nt, Artificial Sequence
  Description of Artificial Sequence: Synthetic oligonucleotide
uccgcuugaaggaggucac

SEQ ID NO: 1629079 - RNA, 19 nt, Artificial Sequence
  Description of Artificial Sequence: Synthetic oligonucleotide
gagauaaaucucgucgcuc

SEQ ID NO: 1629080 - RNA, 19 nt, Artificial Sequence
  Description of Artificial Sequence: Synthetic oligonucleotide
ugcaugucuuacauuccau

SEQ ID NO: 1629081 - RNA, 19 nt, Artificial Sequence
  Description of Artificial Sequence: Synthetic oligonucleotide
cauccccucgacuaucuuc

SEQ ID NO: 1629082 - RNA, 19 nt, Artificial Sequence
  Description of Artificial Sequence: Synthetic oligonucleotide
acuguccggggaugagagc

SEQ ID NO: 1629083 - RNA, 19 nt, Artificial Sequence
  Description of Artificial Sequence: Synthetic oligonucleotide
gucgcucuaaaucugggua

SEQ ID NO: 1629084 - RNA, 19 nt, Artificial Sequence
  Description of Artificial Sequence: Synthetic oligonucleotide
auaauacuccuggaacugu

SEQ ID NO: 1629085 - RNA, 19 nt, Artificial Sequence
  Description of Artificial Sequence: Synthetic oligonucleotide
uuaauguacucagguacuu

SEQ ID NO: 1629086 - RNA, 19 nt, Artificial Sequence
  Description of Artificial Sequence: Synthetic oligonucleotide
cuagugugcacugcguuuc

SEQ ID NO: 1629087 - RNA, 19 nt, Artificial Sequence
  Description of Artificial Sequence: Synthetic oligonucleotide
auaaugcaugucuuacauu

SEQ ID NO: 1629088 - RNA, 19 nt, Artificial Sequence
  Description of Artificial Sequence: Synthetic oligonucleotide
cuucagacaaauuccacau

SEQ ID NO: 1629089 - RNA, 19 nt, Artificial Sequence
  Description of Artificial Sequence: Synthetic oligonucleotide
uccggugaguaccucuuau

SEQ ID NO: 1629090 - RNA, 19 nt, Artificial Sequence
  Description of Artificial Sequence: Synthetic oligonucleotide
caagcaagaaggguggcca

SEQ ID NO: 1629091 - RNA, 19 nt, Artificial Sequence
  Description of Artificial Sequence: Synthetic oligonucleotide
agugccgggagcucugggu

SEQ ID NO: 1629092 - RNA, 19 nt, Artificial Sequence
  Description of Artificial Sequence: Synthetic oligonucleotide
uacagaacguuuggagcca

SEQ ID NO: 1629093 - RNA, 19 nt, Artificial Sequence
  Description of Artificial Sequence: Synthetic oligonucleotide
cacuaucuagugccgggag

SEQ ID NO: 1629094 - RNA, 19 nt, Artificial Sequence
  Description of Artificial Sequence: Synthetic oligonucleotide
ucacuaucuagugccggga

SEQ ID NO: 1629095 - RNA, 19 nt, Artificial Sequence
  Description of Artificial Sequence: Synthetic oligonucleotide
accaagauauucacugacu

SEQ ID NO: 1629096 - RNA, 19 nt, Artificial Sequence
  Description of Artificial Sequence: Synthetic oligonucleotide
uuuccgcuuuucauccccu

SEQ ID NO: 1629097 - RNA, 19 nt, Artificial Sequence
  Description of Artificial Sequence: Synthetic oligonucleotide
cugaaucaccgucacuauc

SEQ ID NO: 1629098 - RNA, 19 nt, Artificial Sequence
  Description of Artificial Sequence: Synthetic oligonucleotide
ugugcacugcguuucugua

SEQ ID NO: 1629099 - RNA, 19 nt, Artificial Sequence
  Description of Artificial Sequence: Synthetic oligonucleotide
gccacuguuaucacacugg

SEQ ID NO: 1629100 - RNA, 19 nt, Artificial Sequence
  Description of Artificial Sequence: Synthetic oligonucleotide
uguccgaagugccuuuauu

SEQ ID NO: 1629101 - RNA, 19 nt, Artificial Sequence
  Description of Artificial Sequence: Synthetic oligonucleotide
aaccuauuuuaucccucuu

SEQ ID NO: 1629102 - RNA, 19 nt, Artificial Sequence
  Description of Artificial Sequence: Synthetic oligonucleotide
auaaaucucgucgcucuaa

SEQ ID NO: 1629103 - RNA, 19 nt, Artificial Sequence
  Description of Artificial Sequence: Synthetic oligonucleotide
auagagcauuuggaaugac

SEQ ID NO: 1629104 - RNA, 19 nt, Artificial Sequence
  Description of Artificial Sequence: Synthetic oligonucleotide
cugcgcaaugcuguuaaac

SEQ ID NO: 1629105 - RNA, 19 nt, Artificial Sequence
  Description of Artificial Sequence: Synthetic oligonucleotide
cuuuuaucauuaaaucaau

SEQ ID NO: 1629106 - RNA, 19 nt, Artificial Sequence
  Description of Artificial Sequence: Synthetic oligonucleotide
gcuguuaaaccuagugugc

SEQ ID NO: 1629107 - RNA, 19 nt, Artificial Sequence
  Description of Artificial Sequence: Synthetic oligonucleotide
uuaucacacugggagcagu

SEQ ID NO: 1629108 - RNA, 19 nt, Artificial Sequence
  Description of Artificial Sequence: Synthetic oligonucleotide
cauggucauauccaagcaa

SEQ ID NO: 1629109 - RNA, 19 nt, Artificial Sequence
  Description of Artificial Sequence: Synthetic oligonucleotide
uuccaugcguucccgguuu

SEQ ID NO: 1629110 - RNA, 19 nt, Artificial Sequence
  Description of Artificial Sequence: Synthetic oligonucleotide
cugcaagucaaaauaugcu

SEQ ID NO: 1629111 - RNA, 19 nt, Artificial Sequence
  Description of Artificial Sequence: Synthetic oligonucleotide
ugacguuccuuuucuugua

SEQ ID NO: 1629112 - RNA, 19 nt, Artificial Sequence
  Description of Artificial Sequence: Synthetic oligonucleotide
auacacugccauggguagg

SEQ ID NO: 1629113 - RNA, 19 nt, Artificial Sequence
  Description of Artificial Sequence: Synthetic oligonucleotide
cuucgccaucaucugaauc

SEQ ID NO: 1629114 - RNA, 19 nt, Artificial Sequence
  Description of Artificial Sequence: Synthetic oligonucleotide
aaacugagggucaggucaa

SEQ ID NO: 1629115 - RNA, 19 nt, Artificial Sequence
  Description of Artificial Sequence: Synthetic oligonucleotide
gauaaaucucgucgcucua

SEQ ID NO: 1629116 - RNA, 19 nt, Artificial Sequence
  Description of Artificial Sequence: Synthetic oligonucleotide
cucuuauaauacuccugga

SEQ ID NO: 1629117 - RNA, 19 nt, Artificial Sequence
  Description of Artificial Sequence: Synthetic oligonucleotide
aggaggucacaccaagaua

SEQ ID NO: 1629118 - RNA, 19 nt, Artificial Sequence
  Description of Artificial Sequence: Synthetic oligonucleotide
ccacuguuaucacacuggg

SEQ ID NO: 1629119 - RNA, 19 nt, Artificial Sequence
  Description of Artificial Sequence: Synthetic oligonucleotide
auguuuagcuggguauucu

SEQ ID NO: 1629120 - RNA, 19 nt, Artificial Sequence
  Description of Artificial Sequence: Synthetic oligonucleotide
caccgucacuaucuagugc

SEQ ID NO: 1629121 - RNA, 19 nt, Artificial Sequence
  Description of Artificial Sequence: Synthetic oligonucleotide
cucagguagaguuucuccu

SEQ ID NO: 1629122 - RNA, 19 nt, Artificial Sequence
  Description of Artificial Sequence: Synthetic oligonucleotide
cuuguaguggccacuuugu

SEQ ID NO: 1629123 - RNA, 19 nt, Artificial Sequence
  Description of Artificial Sequence: Synthetic oligonucleotide
ggacaguacagaacguuug

SEQ ID NO: 1629124 - RNA, 19 nt, Artificial Sequence
  Description of Artificial Sequence: Synthetic oligonucleotide
ggcaacacuuuguacuuuc

SEQ ID NO: 1629125 - RNA, 19 nt, Artificial Sequence
  Description of Artificial Sequence: Synthetic oligonucleotide
uuguucggucuguuggcaa

SEQ ID NO: 1629126 - RNA, 19 nt, Artificial Sequence
  Description of Artificial Sequence: Synthetic oligonucleotide
uuguugcauuugagaauac

SEQ ID NO: 1629127 - RNA, 19 nt, Artificial Sequence
  Description of Artificial Sequence: Synthetic oligonucleotide
guuaaaccuagugugcacu

SEQ ID NO: 1629128 - RNA, 19 nt, Artificial Sequence
  Description of Artificial Sequence: Synthetic oligonucleotide
ugccugaggagcuguccga

SEQ ID NO: 1629129 - RNA, 19 nt, Artificial Sequence
  Description of Artificial Sequence: Synthetic oligonucleotide
gaguaccucuuauaauacu

SEQ ID NO: 1629130 - RNA, 19 nt, Artificial Sequence
  Description of Artificial Sequence: Synthetic oligonucleotide
accuagugugcacugcguu

SEQ ID NO: 1629131 - RNA, 19 nt, Artificial Sequence
  Description of Artificial Sequence: Synthetic oligonucleotide
aaccuagugugcacugcgu

SEQ ID NO: 1629132 - RNA, 19 nt, Artificial Sequence
  Description of Artificial Sequence: Synthetic oligonucleotide
cacugacuuguuccugaag

SEQ ID NO: 1629133 - RNA, 19 nt, Artificial Sequence
  Description of Artificial Sequence: Synthetic oligonucleotide
ggucuuaauuauagaaaca

SEQ ID NO: 1629134 - RNA, 19 nt, Artificial Sequence
  Description of Artificial Sequence: Synthetic oligonucleotide
ggaggucacaccaagauau

SEQ ID NO: 1629135 - RNA, 19 nt, Artificial Sequence
  Description of Artificial Sequence: Synthetic oligonucleotide
uaauccucugacguuccuu

SEQ ID NO: 1629136 - RNA, 19 nt, Artificial Sequence
  Description of Artificial Sequence: Synthetic oligonucleotide
uagugugcacugcguuucu

SEQ ID NO: 1629137 - RNA, 19 nt, Artificial Sequence
  Description of Artificial Sequence: Synthetic oligonucleotide
uccaggggcggcucauaca

SEQ ID NO: 1629138 - RNA, 19 nt, Artificial Sequence
  Description of Artificial Sequence: Synthetic oligonucleotide
cuugugagauaaaucucgu

SEQ ID NO: 1629139 - RNA, 19 nt, Artificial Sequence
  Description of Artificial Sequence: Synthetic oligonucleotide
ggcuguguuuaauggcaag

SEQ ID NO: 1629140 - RNA, 19 nt, Artificial Sequence
  Description of Artificial Sequence: Synthetic oligonucleotide
ucggucuguuggcaacacu

SEQ ID NO: 1629141 - RNA, 19 nt, Artificial Sequence
  Description of Artificial Sequence: Synthetic oligonucleotide
ggccacuguuaucacacug

SEQ ID NO: 1629142 - RNA, 19 nt, Artificial Sequence
  Description of Artificial Sequence: Synthetic oligonucleotide
ggcacuuggauaacaugug

SEQ ID NO: 1629143 - RNA, 19 nt, Artificial Sequence
  Description of Artificial Sequence: Synthetic oligonucleotide
gaacuguccggggaugaga

SEQ ID NO: 1629144 - RNA, 19 nt, Artificial Sequence
  Description of Artificial Sequence: Synthetic oligonucleotide
uucccgguuuaaguugcug

SEQ ID NO: 1629145 - RNA, 19 nt, Artificial Sequence
  Description of Artificial Sequence: Synthetic oligonucleotide
cugggagcaguguauaagu

SEQ ID NO: 1629146 - RNA, 19 nt, Artificial Sequence
  Description of Artificial Sequence: Synthetic oligonucleotide
uccaagcaagaaggguggc

SEQ ID NO: 1629147 - RNA, 19 nt, Artificial Sequence
  Description of Artificial Sequence: Synthetic oligonucleotide
aucuagugccgggagcucu

SEQ ID NO: 1629148 - RNA, 19 nt, Artificial Sequence
  Description of Artificial Sequence: Synthetic oligonucleotide
agcaagaaggguggccacu

SEQ ID NO: 1629149 - RNA, 19 nt, Artificial Sequence
  Description of Artificial Sequence: Synthetic oligonucleotide
cacugcguuucuguaauga

SEQ ID NO: 1629150 - RNA, 19 nt, Artificial Sequence
  Description of Artificial Sequence: Synthetic oligonucleotide
cuaucuagugccgggagcu

SEQ ID NO: 1629151 - RNA, 19 nt, Artificial Sequence
  Description of Artificial Sequence: Synthetic oligonucleotide
uggcuucaacuuucugagu

SEQ ID NO: 1629152 - RNA, 19 nt, Artificial Sequence
  Description of Artificial Sequence: Synthetic oligonucleotide
gucacaaauccagcgaccu

SEQ ID NO: 1629153 - RNA, 19 nt, Artificial Sequence
  Description of Artificial Sequence: Synthetic oligonucleotide
gcaagucaaaauaugcucu

SEQ ID NO: 1629154 - RNA, 19 nt, Artificial Sequence
  Description of Artificial Sequence: Synthetic oligonucleotide
guccgaagugccuuuauuu

SEQ ID NO: 1629155 - RNA, 19 nt, Artificial Sequence
  Description of Artificial Sequence: Synthetic oligonucleotide
cacuuuccuggguguuggg

SEQ ID NO: 1629156 - RNA, 19 nt, Artificial Sequence
  Description of Artificial Sequence: Synthetic oligonucleotide
cuguuggcaacacuuugua

SEQ ID NO: 1629157 - RNA, 19 nt, Artificial Sequence
  Description of Artificial Sequence: Synthetic oligonucleotide
cacuguuaucacacuggga

SEQ ID NO: 1629158 - RNA, 19 nt, Artificial Sequence
  Description of Artificial Sequence: Synthetic oligonucleotide
ggguauucuuuuaucauua

SEQ ID NO: 1629159 - RNA, 19 nt, Artificial Sequence
  Description of Artificial Sequence: Synthetic oligonucleotide
caccaaggcccacacaaaa

SEQ ID NO: 1629160 - RNA, 19 nt, Artificial Sequence
  Description of Artificial Sequence: Synthetic oligonucleotide
agcucgcugacaacaguca

SEQ ID NO: 1629161 - RNA, 19 nt, Artificial Sequence
  Description of Artificial Sequence: Synthetic oligonucleotide
acauugccugaggagcugu

SEQ ID NO: 1629162 - RNA, 19 nt, Artificial Sequence
  Description of Artificial Sequence: Synthetic oligonucleotide
gcauuuggaaugaccuuug

SEQ ID NO: 1629163 - RNA, 19 nt, Artificial Sequence
  Description of Artificial Sequence: Synthetic oligonucleotide
cauauaguauucuccuguu

SEQ ID NO: 1629164 - RNA, 19 nt, Artificial Sequence
  Description of Artificial Sequence: Synthetic oligonucleotide
gugccgggagcucuggguc

SEQ ID NO: 1629165 - RNA, 19 nt, Artificial Sequence
  Description of Artificial Sequence: Synthetic oligonucleotide
ggaacugacuuggacagua

SEQ ID NO: 1629166 - RNA, 19 nt, Artificial Sequence
  Description of Artificial Sequence: Synthetic oligonucleotide
uucggucuguuggcaacac

SEQ ID NO: 1629167 - RNA, 19 nt, Artificial Sequence
  Description of Artificial Sequence: Synthetic oligonucleotide
gaacugaccuuuguucggu

SEQ ID NO: 1629168 - RNA, 19 nt, Artificial Sequence
  Description of Artificial Sequence: Synthetic oligonucleotide
acguuuggagccaucuuuu

SEQ ID NO: 1629169 - RNA, 19 nt, Artificial Sequence
  Description of Artificial Sequence: Synthetic oligonucleotide
ucacuucaucacugcgcaa

SEQ ID NO: 1629170 - RNA, 19 nt, Artificial Sequence
  Description of Artificial Sequence: Synthetic oligonucleotide
ccauacacugccaugggua

SEQ ID NO: 1629171 - RNA, 19 nt, Artificial Sequence
  Description of Artificial Sequence: Synthetic oligonucleotide
caugugucugcaagucaaa

SEQ ID NO: 1629172 - RNA, 19 nt, Artificial Sequence
  Description of Artificial Sequence: Synthetic oligonucleotide
aggguucuuuauuggcaua

SEQ ID NO: 1629173 - RNA, 19 nt, Artificial Sequence
  Description of Artificial Sequence: Synthetic oligonucleotide
agugugcacugcguuucug

SEQ ID NO: 1629174 - RNA, 19 nt, Artificial Sequence
  Description of Artificial Sequence: Synthetic oligonucleotide
uccuuacccuucagacaaa

SEQ ID NO: 1629175 - RNA, 19 nt, Artificial Sequence
  Description of Artificial Sequence: Synthetic oligonucleotide
gugcacugcguuucuguaa

SEQ ID NO: 1629176 - RNA, 19 nt, Artificial Sequence
  Description of Artificial Sequence: Synthetic oligonucleotide
guccaggggcggcucauac

SEQ ID NO: 1629177 - RNA, 19 nt, Artificial Sequence
  Description of Artificial Sequence: Synthetic oligonucleotide
cuagugccgggagcucugg

SEQ ID NO: 1629178 - RNA, 19 nt, Artificial Sequence
  Description of Artificial Sequence: Synthetic oligonucleotide
uggccacuguuaucacacu

SEQ ID NO: 1629179 - RNA, 19 nt, Artificial Sequence
  Description of Artificial Sequence: Synthetic oligonucleotide
auucucucagguagaguuu

SEQ ID NO: 1629180 - RNA, 19 nt, Artificial Sequence
  Description of Artificial Sequence: Synthetic oligonucleotide
caggggcggcucauacagg

SEQ ID NO: 1629181 - RNA, 19 nt, Artificial Sequence
  Description of Artificial Sequence: Synthetic oligonucleotide
ccaagcaagaaggguggcc

SEQ ID NO: 1629182 - RNA, 19 nt, Artificial Sequence
  Description of Artificial Sequence: Synthetic oligonucleotide
cauacagggcuguguuuaa

SEQ ID NO: 1629183 - RNA, 19 nt, Artificial Sequence
  Description of Artificial Sequence: Synthetic oligonucleotide
cacauugccugaggagcug

SEQ ID NO: 1629184 - RNA, 19 nt, Artificial Sequence
  Description of Artificial Sequence: Synthetic oligonucleotide
gugugcacugcguuucugu

SEQ ID NO: 1629185 - RNA, 19 nt, Artificial Sequence
  Description of Artificial Sequence: Synthetic oligonucleotide
uaucuagugccgggagcuc

SEQ ID NO: 1629186 - RNA, 19 nt, Artificial Sequence
  Description of Artificial Sequence: Synthetic oligonucleotide
cccucgacuaucuucgcca

SEQ ID NO: 1629187 - RNA, 19 nt, Artificial Sequence
  Description of Artificial Sequence: Synthetic oligonucleotide
cguucccgguuuaaguugc

SEQ ID NO: 1629188 - RNA, 19 nt, Artificial Sequence
  Description of Artificial Sequence: Synthetic oligonucleotide
acagaauauucagcauguu

SEQ ID NO: 1629189 - RNA, 19 nt, Artificial Sequence
  Description of Artificial Sequence: Synthetic oligonucleotide
gcaacacuuuguacuuucc

SEQ ID NO: 1629190 - RNA, 19 nt, Artificial Sequence
  Description of Artificial Sequence: Synthetic oligonucleotide
ggagcaguguauaagugau

SEQ ID NO: 1629191 - RNA, 19 nt, Artificial Sequence
  Description of Artificial Sequence: Synthetic oligonucleotide
ggguucuuuauuggcauaa

SEQ ID NO: 1629192 - RNA, 19 nt, Artificial Sequence
  Description of Artificial Sequence: Synthetic oligonucleotide
gcuuguacccaggaacuga

SEQ ID NO: 1629193 - RNA, 19 nt, Artificial Sequence
  Description of Artificial Sequence: Synthetic oligonucleotide
uccccucgacuaucuucgc

SEQ ID NO: 1629194 - RNA, 19 nt, Artificial Sequence
  Description of Artificial Sequence: Synthetic oligonucleotide
ucauccccucgacuaucuu

SEQ ID NO: 1629195 - RNA, 19 nt, Artificial Sequence
  Description of Artificial Sequence: Synthetic oligonucleotide
ccacuggguaagaacugac

SEQ ID NO: 1629196 - RNA, 19 nt, Artificial Sequence
  Description of Artificial Sequence: Synthetic oligonucleotide
ggugaguaccucuuauaau

SEQ ID NO: 1629197 - RNA, 19 nt, Artificial Sequence
  Description of Artificial Sequence: Synthetic oligonucleotide
cagcauguuuagcugggua

SEQ ID NO: 1629198 - RNA, 19 nt, Artificial Sequence
  Description of Artificial Sequence: Synthetic oligonucleotide
uccggggaugagagccacu

SEQ ID NO: 1629199 - RNA, 19 nt, Artificial Sequence
  Description of Artificial Sequence: Synthetic oligonucleotide
ggaacuguccggggaugag

SEQ ID NO: 1629200 - RNA, 19 nt, Artificial Sequence
  Description of Artificial Sequence: Synthetic oligonucleotide
gcgcaaugcuguuaaaccu

SEQ ID NO: 1629201 - RNA, 19 nt, Artificial Sequence
  Description of Artificial Sequence: Synthetic oligonucleotide
gugauucagccuuuccuuu

SEQ ID NO: 1629202 - RNA, 19 nt, Artificial Sequence
  Description of Artificial Sequence: Synthetic oligonucleotide
uccaugcguucccgguuua

SEQ ID NO: 1629203 - RNA, 19 nt, Artificial Sequence
  Description of Artificial Sequence: Synthetic oligonucleotide
ccgucacuaucuagugccg

SEQ ID NO: 1629204 - RNA, 19 nt, Artificial Sequence
  Description of Artificial Sequence: Synthetic oligonucleotide
acugcgcaaugcuguuaaa

SEQ ID NO: 1629205 - RNA, 19 nt, Artificial Sequence
  Description of Artificial Sequence: Synthetic oligonucleotide
acagaacguuuggagccau

SEQ ID NO: 1629206 - RNA, 19 nt, Artificial Sequence
  Description of Artificial Sequence: Synthetic oligonucleotide
cagcgaccugauggaauag

SEQ ID NO: 1629207 - RNA, 19 nt, Artificial Sequence
  Description of Artificial Sequence: Synthetic oligonucleotide
gggagcucgcugacaacag

SEQ ID NO: 1629208 - RNA, 19 nt, Artificial Sequence
  Description of Artificial Sequence: Synthetic oligonucleotide
gcacuuggauaacaugugu

SEQ ID NO: 1629209 - RNA, 19 nt, Artificial Sequence
  Description of Artificial Sequence: Synthetic oligonucleotide
gcgaccugauggaauagca

SEQ ID NO: 1629210 - RNA, 19 nt, Artificial Sequence
  Description of Artificial Sequence: Synthetic oligonucleotide
gcuguguuuaauggcaagu

SEQ ID NO: 1629211 - RNA, 19 nt, Artificial Sequence
  Description of Artificial Sequence: Synthetic oligonucleotide
auccggugaguaccucuua

SEQ ID NO: 1629212 - RNA, 19 nt, Artificial Sequence
  Description of Artificial Sequence: Synthetic oligonucleotide
ccgguuuaaguugcuguug

SEQ ID NO: 1629213 - RNA, 19 nt, Artificial Sequence
  Description of Artificial Sequence: Synthetic oligonucleotide
guaccgaagcucauccggu

SEQ ID NO: 1629214 - RNA, 19 nt, Artificial Sequence
  Description of Artificial Sequence: Synthetic oligonucleotide
cacugggagcaguguauaa

SEQ ID NO: 1629215 - RNA, 19 nt, Artificial Sequence
  Description of Artificial Sequence: Synthetic oligonucleotide
ggcuuguacccaggaacug

SEQ ID NO: 1629216 - RNA, 19 nt, Artificial Sequence
  Description of Artificial Sequence: Synthetic oligonucleotide
guaauccucugacguuccu

SEQ ID NO: 1629217 - RNA, 19 nt, Artificial Sequence
  Description of Artificial Sequence: Synthetic oligonucleotide
ggguaagaacugaccuuug

SEQ ID NO: 1629218 - RNA, 19 nt, Artificial Sequence
  Description of Artificial Sequence: Synthetic oligonucleotide
cucuggguccaggggcggc

SEQ ID NO: 1629219 - RNA, 19 nt, Artificial Sequence
  Description of Artificial Sequence: Synthetic oligonucleotide
gguucuuuauuggcauaaa

SEQ ID NO: 1629220 - RNA, 19 nt, Artificial Sequence
  Description of Artificial Sequence: Synthetic oligonucleotide
ccccucgacuaucuucgcc

SEQ ID NO: 1629221 - RNA, 19 nt, Artificial Sequence
  Description of Artificial Sequence: Synthetic oligonucleotide
guacuuuccuugaggcacu

SEQ ID NO: 1629222 - RNA, 19 nt, Artificial Sequence
  Description of Artificial Sequence: Synthetic oligonucleotide
ccagcgaccugauggaaua

SEQ ID NO: 1629223 - RNA, 19 nt, Artificial Sequence
  Description of Artificial Sequence: Synthetic oligonucleotide
cgucacuaucuagugccgg

SEQ ID NO: 1629224 - RNA, 19 nt, Artificial Sequence
  Description of Artificial Sequence: Synthetic oligonucleotide
auccagcgaccugauggaa

SEQ ID NO: 1629225 - RNA, 19 nt, Artificial Sequence
  Description of Artificial Sequence: Synthetic oligonucleotide
cggugaguaccucuuauaa

SEQ ID NO: 1629226 - RNA, 19 nt, Artificial Sequence
  Description of Artificial Sequence: Synthetic oligonucleotide
cauccggugaguaccucuu

SEQ ID NO: 1629227 - RNA, 19 nt, Artificial Sequence
  Description of Artificial Sequence: Synthetic oligonucleotide
ccgcuuuucauccccucga

SEQ ID NO: 1629228 - RNA, 19 nt, Artificial Sequence
  Description of Artificial Sequence: Synthetic oligonucleotide
ggaaugaccuuuggcuugu

SEQ ID NO: 1629229 - RNA, 19 nt, Artificial Sequence
  Description of Artificial Sequence: Synthetic oligonucleotide
gcacugcguuucuguaaug

SEQ ID NO: 1629230 - RNA, 19 nt, Artificial Sequence
  Description of Artificial Sequence: Synthetic oligonucleotide
gagcuguccgaagugccuu

SEQ ID NO: 1629231 - RNA, 19 nt, Artificial Sequence
  Description of Artificial Sequence: Synthetic oligonucleotide
ccauggguaggucuuaauu

SEQ ID NO: 1629232 - RNA, 19 nt, Artificial Sequence
  Description of Artificial Sequence: Synthetic oligonucleotide
gagcaguguauaagugauu

SEQ ID NO: 1629233 - RNA, 19 nt, Artificial Sequence
  Description of Artificial Sequence: Synthetic oligonucleotide
gcauguuuagcuggguauu

SEQ ID NO: 1629234 - RNA, 19 nt, Artificial Sequence
  Description of Artificial Sequence: Synthetic oligonucleotide
ggagcuguccgaagugccu

SEQ ID NO: 1629235 - RNA, 19 nt, Artificial Sequence
  Description of Artificial Sequence: Synthetic oligonucleotide
ccggugaguaccucuuaua

SEQ ID NO: 1629236 - RNA, 19 nt, Artificial Sequence
  Description of Artificial Sequence: Synthetic oligonucleotide
ccuagugugcacugcguuu

SEQ ID NO: 1629237 - RNA, 19 nt, Artificial Sequence
  Description of Artificial Sequence: Synthetic oligonucleotide
cuguccgaagugccuuuau

SEQ ID NO: 1629238 - RNA, 19 nt, Artificial Sequence
  Description of Artificial Sequence: Synthetic oligonucleotide
gaccuuuguucggucuguu

SEQ ID NO: 1629239 - RNA, 19 nt, Artificial Sequence
  Description of Artificial Sequence: Synthetic oligonucleotide
cccgguuuaaguugcuguu

SEQ ID NO: 1629240 - RNA, 19 nt, Artificial Sequence
  Description of Artificial Sequence: Synthetic oligonucleotide
guucccgguuuaaguugcu

SEQ ID NO: 1629241 - RNA, 19 nt, Artificial Sequence
  Description of Artificial Sequence: Synthetic oligonucleotide
gccgggagcucugggucca

SEQ ID NO: 1629242 - RNA, 19 nt, Artificial Sequence
  Description of Artificial Sequence: Synthetic oligonucleotide
cgucgcucuaaaucugggu

SEQ ID NO: 1629243 - RNA, 19 nt, Artificial Sequence
  Description of Artificial Sequence: Synthetic oligonucleotide
ccuuacccuucagacaaau

SEQ ID NO: 1629244 - RNA, 19 nt, Artificial Sequence
  Description of Artificial Sequence: Synthetic oligonucleotide
ccucgacuaucuucgccau

SEQ ID NO: 1629245 - RNA, 19 nt, Artificial Sequence
  Description of Artificial Sequence: Synthetic oligonucleotide
gcggcucauacagggcugu

SEQ ID NO: 1629246 - RNA, 19 nt, Artificial Sequence
  Description of Artificial Sequence: Synthetic oligonucleotide
gcguuucuguaaugacguu

SEQ ID NO: 1629247 - RNA, 19 nt, Artificial Sequence
  Description of Artificial Sequence: Synthetic oligonucleotide
ccaugcguucccgguuuaa

SEQ ID NO: 1629248 - RNA, 19 nt, Artificial Sequence
  Description of Artificial Sequence: Synthetic oligonucleotide
ccgcuugaaggaggucaca

SEQ ID NO: 1629249 - RNA, 19 nt, Artificial Sequence
  Description of Artificial Sequence: Synthetic oligonucleotide
cggcucauacagggcugug

SEQ ID NO: 1629250 - RNA, 19 nt, Artificial Sequence
  Description of Artificial Sequence: Synthetic oligonucleotide
ccgggagcucuggguccag

SEQ ID NO: 1629251 - RNA, 19 nt, Artificial Sequence
  Description of Artificial Sequence: Synthetic oligonucleotide
cgcucuaaaucuggguauu

SEQ ID NO: 1629252 - RNA, 19 nt, Artificial Sequence
  Description of Artificial Sequence: Synthetic oligonucleotide
aguaguaaagcuuggacgc

SEQ ID NO: 1629253 - RNA, 19 nt, Artificial Sequence
  Description of Artificial Sequence: Synthetic oligonucleotide
uucucuagugaacagaugg

SEQ ID NO: 1629254 - RNA, 19 nt, Artificial Sequence
  Description of Artificial Sequence: Synthetic oligonucleotide
aguugaauggccuuggcgc

SEQ ID NO: 1629255 - RNA, 19 nt, Artificial Sequence
  Description of Artificial Sequence: Synthetic oligonucleotide
cuuuaauccacacagacag

SEQ ID NO: 1629256 - RNA, 19 nt, Artificial Sequence
  Description of Artificial Sequence: Synthetic oligonucleotide
gaacagaugguguugaucg

SEQ ID NO: 1629257 - RNA, 19 nt, Artificial Sequence
  Description of Artificial Sequence: Synthetic oligonucleotide
gucuggauuacauucaucg

SEQ ID NO: 1629258 - RNA, 19 nt, Artificial Sequence
  Description of Artificial Sequence: Synthetic oligonucleotide
gaguaguaaagcuuggacg

SEQ ID NO: 1629259 - RNA, 19 nt, Artificial Sequence
  Description of Artificial Sequence: Synthetic oligonucleotide
cauucaucgucauugaugc

SEQ ID NO: 1629260 - RNA, 19 nt, Artificial Sequence
  Description of Artificial Sequence: Synthetic oligonucleotide
uugcuauucaguugaaugg

SEQ ID NO: 1629261 - RNA, 19 nt, Artificial Sequence
  Description of Artificial Sequence: Synthetic oligonucleotide
uguauuauagcuuccugga

SEQ ID NO: 1629262 - RNA, 19 nt, Artificial Sequence
  Description of Artificial Sequence: Synthetic oligonucleotide
gaagcuauggcacccagag

SEQ ID NO: 1629263 - RNA, 19 nt, Artificial Sequence
  Description of Artificial Sequence: Synthetic oligonucleotide
auugaugccaccucugcac

SEQ ID NO: 1629264 - RNA, 19 nt, Artificial Sequence
  Description of Artificial Sequence: Synthetic oligonucleotide
uuaucuaacaaagcuuugg

SEQ ID NO: 1629265 - RNA, 19 nt, Artificial Sequence
  Description of Artificial Sequence: Synthetic oligonucleotide
cuaaguagcacucuaugag

SEQ ID NO: 1629266 - RNA, 19 nt, Artificial Sequence
  Description of Artificial Sequence: Synthetic oligonucleotide
ugcgauacuguacuggucc

SEQ ID NO: 1629267 - RNA, 19 nt, Artificial Sequence
  Description of Artificial Sequence: Synthetic oligonucleotide
agucuaagcgacaaggugc

SEQ ID NO: 1629268 - RNA, 19 nt, Artificial Sequence
  Description of Artificial Sequence: Synthetic oligonucleotide
acggccuugacauaguccg

SEQ ID NO: 1629269 - RNA, 19 nt, Artificial Sequence
  Description of Artificial Sequence: Synthetic oligonucleotide
uccuuuaucagauaaggau

SEQ ID NO: 1629270 - RNA, 19 nt, Artificial Sequence
  Description of Artificial Sequence: Synthetic oligonucleotide
cuuugaguaguaaagcuug

SEQ ID NO: 1629271 - RNA, 19 nt, Artificial Sequence
  Description of Artificial Sequence: Synthetic oligonucleotide
ucuaacaaagcuuuggcuu

SEQ ID NO: 1629272 - RNA, 19 nt, Artificial Sequence
  Description of Artificial Sequence: Synthetic oligonucleotide
uggauuacauucaucguca

SEQ ID NO: 1629273 - RNA, 19 nt, Artificial Sequence
  Description of Artificial Sequence: Synthetic oligonucleotide
caaggugcaagccuuauag

SEQ ID NO: 1629274 - RNA, 19 nt, Artificial Sequence
  Description of Artificial Sequence: Synthetic oligonucleotide
cucgaaugcugcuagaagc

SEQ ID NO: 1629275 - RNA, 19 nt, Artificial Sequence
  Description of Artificial Sequence: Synthetic oligonucleotide
ucccgaaaauguauuauag

SEQ ID NO: 1629276 - RNA, 19 nt, Artificial Sequence
  Description of Artificial Sequence: Synthetic oligonucleotide
ugaguaguaaagcuuggac

SEQ ID NO: 1629277 - RNA, 19 nt, Artificial Sequence
  Description of Artificial Sequence: Synthetic oligonucleotide
uacaggucugccaagcucc

SEQ ID NO: 1629278 - RNA, 19 nt, Artificial Sequence
  Description of Artificial Sequence: Synthetic oligonucleotide
uaucagauaaggauccaac

SEQ ID NO: 1629279 - RNA, 19 nt, Artificial Sequence
  Description of Artificial Sequence: Synthetic oligonucleotide
aacagaugguguugaucgc

SEQ ID NO: 1629280 - RNA, 19 nt, Artificial Sequence
  Description of Artificial Sequence: Synthetic oligonucleotide
uguuccuaagugcugcucc

SEQ ID NO: 1629281 - RNA, 19 nt, Artificial Sequence
  Description of Artificial Sequence: Synthetic oligonucleotide
ugcucaaacuugaggacgg

SEQ ID NO: 1629282 - RNA, 19 nt, Artificial Sequence
  Description of Artificial Sequence: Synthetic oligonucleotide
ucuagugaacagauggugu

SEQ ID NO: 1629283 - RNA, 19 nt, Artificial Sequence
  Description of Artificial Sequence: Synthetic oligonucleotide
uccucaacagagcaauucc

SEQ ID NO: 1629284 - RNA, 19 nt, Artificial Sequence
  Description of Artificial Sequence: Synthetic oligonucleotide
aaauguauuauagcuuccu

SEQ ID NO: 1629285 - RNA, 19 nt, Artificial Sequence
  Description of Artificial Sequence: Synthetic oligonucleotide
uuggcgcccaaguauaggg

SEQ ID NO: 1629286 - RNA, 19 nt, Artificial Sequence
  Description of Artificial Sequence: Synthetic oligonucleotide
uagcgcuugcuauagaagc

SEQ ID NO: 1629287 - RNA, 19 nt, Artificial Sequence
  Description of Artificial Sequence: Synthetic oligonucleotide
uauagccucccgaaaaugu

SEQ ID NO: 1629288 - RNA, 19 nt, Artificial Sequence
  Description of Artificial Sequence: Synthetic oligonucleotide
ugcugaucagaaauguuga

SEQ ID NO: 1629289 - RNA, 19 nt, Artificial Sequence
  Description of Artificial Sequence: Synthetic oligonucleotide
cacagucuggauuacauuc

SEQ ID NO: 1629290 - RNA, 19 nt, Artificial Sequence
  Description of Artificial Sequence: Synthetic oligonucleotide
ucauaacagucuaagcgac

SEQ ID NO: 1629291 - RNA, 19 nt, Artificial Sequence
  Description of Artificial Sequence: Synthetic oligonucleotide
ugcaccuagaguuuuguaa

SEQ ID NO: 1629292 - RNA, 19 nt, Artificial Sequence
  Description of Artificial Sequence: Synthetic oligonucleotide
caaguauagggcccgagag

SEQ ID NO: 1629293 - RNA, 19 nt, Artificial Sequence
  Description of Artificial Sequence: Synthetic oligonucleotide
acaucauguuuauuuuggg

SEQ ID NO: 1629294 - RNA, 19 nt, Artificial Sequence
  Description of Artificial Sequence: Synthetic oligonucleotide
aaggcggcagccaagguuc

SEQ ID NO: 1629295 - RNA, 19 nt, Artificial Sequence
  Description of Artificial Sequence: Synthetic oligonucleotide
ucucgaaugcugcuagaag

SEQ ID NO: 1629296 - RNA, 19 nt, Artificial Sequence
  Description of Artificial Sequence: Synthetic oligonucleotide
uguugaucgcucuugaguu

SEQ ID NO: 1629297 - RNA, 19 nt, Artificial Sequence
  Description of Artificial Sequence: Synthetic oligonucleotide
cugcuagaagcuaaguagc

SEQ ID NO: 1629298 - RNA, 19 nt, Artificial Sequence
  Description of Artificial Sequence: Synthetic oligonucleotide
ugugcacuugcaccuagag

SEQ ID NO: 1629299 - RNA, 19 nt, Artificial Sequence
  Description of Artificial Sequence: Synthetic oligonucleotide
uugcuauagaagcuauggc

SEQ ID NO: 1629300 - RNA, 19 nt, Artificial Sequence
  Description of Artificial Sequence: Synthetic oligonucleotide
acauaguccggccucuggg

SEQ ID NO: 1629301 - RNA, 19 nt, Artificial Sequence
  Description of Artificial Sequence: Synthetic oligonucleotide
uccgaugcaggacacaguc

SEQ ID NO: 1629302 - RNA, 19 nt, Artificial Sequence
  Description of Artificial Sequence: Synthetic oligonucleotide
aacguccauuccuuuauca

SEQ ID NO: 1629303 - RNA, 19 nt, Artificial Sequence
  Description of Artificial Sequence: Synthetic oligonucleotide
uaggaaucagcagaggcug

SEQ ID NO: 1629304 - RNA, 19 nt, Artificial Sequence
  Description of Artificial Sequence: Synthetic oligonucleotide
cugcaugcccucuagagac

SEQ ID NO: 1629305 - RNA, 19 nt, Artificial Sequence
  Description of Artificial Sequence: Synthetic oligonucleotide
cuauagaagcuauggcacc

SEQ ID NO: 1629306 - RNA, 19 nt, Artificial Sequence
  Description of Artificial Sequence: Synthetic oligonucleotide
auaguccggccucugggcc

SEQ ID NO: 1629307 - RNA, 19 nt, Artificial Sequence
  Description of Artificial Sequence: Synthetic oligonucleotide
aaguauagggcccgagagu

SEQ ID NO: 1629308 - RNA, 19 nt, Artificial Sequence
  Description of Artificial Sequence: Synthetic oligonucleotide
accaucgcuucucgaaugc

SEQ ID NO: 1629309 - RNA, 19 nt, Artificial Sequence
  Description of Artificial Sequence: Synthetic oligonucleotide
aaacguccauuccuuuauc

SEQ ID NO: 1629310 - RNA, 19 nt, Artificial Sequence
  Description of Artificial Sequence: Synthetic oligonucleotide
aucuaacaaagcuuuggcu

SEQ ID NO: 1629311 - RNA, 19 nt, Artificial Sequence
  Description of Artificial Sequence: Synthetic oligonucleotide
aagccuuauagccucccga

SEQ ID NO: 1629312 - RNA, 19 nt, Artificial Sequence
  Description of Artificial Sequence: Synthetic oligonucleotide
aacagagcaauuccgucuu

SEQ ID NO: 1629313 - RNA, 19 nt, Artificial Sequence
  Description of Artificial Sequence: Synthetic oligonucleotide
ucauugggguccaaacuca

SEQ ID NO: 1629314 - RNA, 19 nt, Artificial Sequence
  Description of Artificial Sequence: Synthetic oligonucleotide
cacacgguggcuagcaggg

SEQ ID NO: 1629315 - RNA, 19 nt, Artificial Sequence
  Description of Artificial Sequence: Synthetic oligonucleotide
acauucaucgucauugaug

SEQ ID NO: 1629316 - RNA, 19 nt, Artificial Sequence
  Description of Artificial Sequence: Synthetic oligonucleotide
uacuguacugguccauugc

SEQ ID NO: 1629317 - RNA, 19 nt, Artificial Sequence
  Description of Artificial Sequence: Synthetic oligonucleotide
aggguaagagucugugcac

SEQ ID NO: 1629318 - RNA, 19 nt, Artificial Sequence
  Description of Artificial Sequence: Synthetic oligonucleotide
gaggacggaguucuuacug

SEQ ID NO: 1629319 - RNA, 19 nt, Artificial Sequence
  Description of Artificial Sequence: Synthetic oligonucleotide
aaauguugaaaaggcggca

SEQ ID NO: 1629320 - RNA, 19 nt, Artificial Sequence
  Description of Artificial Sequence: Synthetic oligonucleotide
gagguagccguaaacgucc

SEQ ID NO: 1629321 - RNA, 19 nt, Artificial Sequence
  Description of Artificial Sequence: Synthetic oligonucleotide
ugcuagaagcuaaguagca

SEQ ID NO: 1629322 - RNA, 19 nt, Artificial Sequence
  Description of Artificial Sequence: Synthetic oligonucleotide
ucucuagugaacagauggu

SEQ ID NO: 1629323 - RNA, 19 nt, Artificial Sequence
  Description of Artificial Sequence: Synthetic oligonucleotide
agguuugccaacaucaugu

SEQ ID NO: 1629324 - RNA, 19 nt, Artificial Sequence
  Description of Artificial Sequence: Synthetic oligonucleotide
acucccuuccaugucgucc

SEQ ID NO: 1629325 - RNA, 19 nt, Artificial Sequence
  Description of Artificial Sequence: Synthetic oligonucleotide
aaaggcggcagccaagguu

SEQ ID NO: 1629326 - RNA, 19 nt, Artificial Sequence
  Description of Artificial Sequence: Synthetic oligonucleotide
aaugcugcuagaagcuaag

SEQ ID NO: 1629327 - RNA, 19 nt, Artificial Sequence
  Description of Artificial Sequence: Synthetic oligonucleotide
acacacgguggcuagcagg

SEQ ID NO: 1629328 - RNA, 19 nt, Artificial Sequence
  Description of Artificial Sequence: Synthetic oligonucleotide
agccguaaacguccauucc

SEQ ID NO: 1629329 - RNA, 19 nt, Artificial Sequence
  Description of Artificial Sequence: Synthetic oligonucleotide
ugcaccuuuuacagaaaga

SEQ ID NO: 1629330 - RNA, 19 nt, Artificial Sequence
  Description of Artificial Sequence: Synthetic oligonucleotide
cuaugagaccuucauaaca

SEQ ID NO: 1629331 - RNA, 19 nt, Artificial Sequence
  Description of Artificial Sequence: Synthetic oligonucleotide
aguagcgcuugcuauagaa

SEQ ID NO: 1629332 - RNA, 19 nt, Artificial Sequence
  Description of Artificial Sequence: Synthetic oligonucleotide
uugaggacggaguucuuac

SEQ ID NO: 1629333 - RNA, 19 nt, Artificial Sequence
  Description of Artificial Sequence: Synthetic oligonucleotide
auaggcuuuaauccacaca

SEQ ID NO: 1629334 - RNA, 19 nt, Artificial Sequence
  Description of Artificial Sequence: Synthetic oligonucleotide
acguccauuccuuuaucag

SEQ ID NO: 1629335 - RNA, 19 nt, Artificial Sequence
  Description of Artificial Sequence: Synthetic oligonucleotide
uaaagcuuggacgcuguug

SEQ ID NO: 1629336 - RNA, 19 nt, Artificial Sequence
  Description of Artificial Sequence: Synthetic oligonucleotide
caggagguagccguaaacg

SEQ ID NO: 1629337 - RNA, 19 nt, Artificial Sequence
  Description of Artificial Sequence: Synthetic oligonucleotide
aacucagugcgauacugua

SEQ ID NO: 1629338 - RNA, 19 nt, Artificial Sequence
  Description of Artificial Sequence: Synthetic oligonucleotide
ucaacagagcaauuccguc

SEQ ID NO: 1629339 - RNA, 19 nt, Artificial Sequence
  Description of Artificial Sequence: Synthetic oligonucleotide
gaaagagacaacaaaccua

SEQ ID NO: 1629340 - RNA, 19 nt, Artificial Sequence
  Description of Artificial Sequence: Synthetic oligonucleotide
uuacauucaucgucauuga

SEQ ID NO: 1629341 - RNA, 19 nt, Artificial Sequence
  Description of Artificial Sequence: Synthetic oligonucleotide
ucuggauuacauucaucgu

SEQ ID NO: 1629342 - RNA, 19 nt, Artificial Sequence
  Description of Artificial Sequence: Synthetic oligonucleotide
cacguugucucgcaguaag

SEQ ID NO: 1629343 - RNA, 19 nt, Artificial Sequence
  Description of Artificial Sequence: Synthetic oligonucleotide
uccugguauucguucacag

SEQ ID NO: 1629344 - RNA, 19 nt, Artificial Sequence
  Description of Artificial Sequence: Synthetic oligonucleotide
ugcugcuagaagcuaagua

SEQ ID NO: 1629345 - RNA, 19 nt, Artificial Sequence
  Description of Artificial Sequence: Synthetic oligonucleotide
aacaaaccuagaauggcau

SEQ ID NO: 1629346 - RNA, 19 nt, Artificial Sequence
  Description of Artificial Sequence: Synthetic oligonucleotide
ugcccauguuccuaagugc

SEQ ID NO: 1629347 - RNA, 19 nt, Artificial Sequence
  Description of Artificial Sequence: Synthetic oligonucleotide
uugggcacagucuggauua

SEQ ID NO: 1629348 - RNA, 19 nt, Artificial Sequence
  Description of Artificial Sequence: Synthetic oligonucleotide
uauagggcccgagaguagc

SEQ ID NO: 1629349 - RNA, 19 nt, Artificial Sequence
  Description of Artificial Sequence: Synthetic oligonucleotide
cuaagcgacaaggugcaag

SEQ ID NO: 1629350 - RNA, 19 nt, Artificial Sequence
  Description of Artificial Sequence: Synthetic oligonucleotide
agcauaggcuuuaauccac

SEQ ID NO: 1629351 - RNA, 19 nt, Artificial Sequence
  Description of Artificial Sequence: Synthetic oligonucleotide
gguucucugucuugaaggg

SEQ ID NO: 1629352 - RNA, 19 nt, Artificial Sequence
  Description of Artificial Sequence: Synthetic oligonucleotide
caggguaagagucugugca

SEQ ID NO: 1629353 - RNA, 19 nt, Artificial Sequence
  Description of Artificial Sequence: Synthetic oligonucleotide
aggagguagccguaaacgu

SEQ ID NO: 1629354 - RNA, 19 nt, Artificial Sequence
  Description of Artificial Sequence: Synthetic oligonucleotide
auaacagucuaagcgacaa

SEQ ID NO: 1629355 - RNA, 19 nt, Artificial Sequence
  Description of Artificial Sequence: Synthetic oligonucleotide
cucuuggucagcccacugg

SEQ ID NO: 1629356 - RNA, 19 nt, Artificial Sequence
  Description of Artificial Sequence: Synthetic oligonucleotide
uaacagucuaagcgacaag

SEQ ID NO: 1629357 - RNA, 19 nt, Artificial Sequence
  Description of Artificial Sequence: Synthetic oligonucleotide
cagucuaagcgacaaggug

SEQ ID NO: 1629358 - RNA, 19 nt, Artificial Sequence
  Description of Artificial Sequence: Synthetic oligonucleotide
aagcgacaaggugcaagcc

SEQ ID NO: 1629359 - RNA, 19 nt, Artificial Sequence
  Description of Artificial Sequence: Synthetic oligonucleotide
gcuguugcuauucaguuga

SEQ ID NO: 1629360 - RNA, 19 nt, Artificial Sequence
  Description of Artificial Sequence: Synthetic oligonucleotide
ucgcucuugaguugucucc

SEQ ID NO: 1629361 - RNA, 19 nt, Artificial Sequence
  Description of Artificial Sequence: Synthetic oligonucleotide
uuauagccucccgaaaaug

SEQ ID NO: 1629362 - RNA, 19 nt, Artificial Sequence
  Description of Artificial Sequence: Synthetic oligonucleotide
ucugugcacuugcaccuag

SEQ ID NO: 1629363 - RNA, 19 nt, Artificial Sequence
  Description of Artificial Sequence: Synthetic oligonucleotide
agcgacaaggugcaagccu

SEQ ID NO: 1629364 - RNA, 19 nt, Artificial Sequence
  Description of Artificial Sequence: Synthetic oligonucleotide
caacaaaccuagaauggca

SEQ ID NO: 1629365 - RNA, 19 nt, Artificial Sequence
  Description of Artificial Sequence: Synthetic oligonucleotide
cauaguccggccucugggc

SEQ ID NO: 1629366 - RNA, 19 nt, Artificial Sequence
  Description of Artificial Sequence: Synthetic oligonucleotide
cucuagugaacagauggug

SEQ ID NO: 1629367 - RNA, 19 nt, Artificial Sequence
  Description of Artificial Sequence: Synthetic oligonucleotide
aguauagggcccgagagua

SEQ ID NO: 1629368 - RNA, 19 nt, Artificial Sequence
  Description of Artificial Sequence: Synthetic oligonucleotide
guauuauagcuuccuggac

SEQ ID NO: 1629369 - RNA, 19 nt, Artificial Sequence
  Description of Artificial Sequence: Synthetic oligonucleotide
ugaacagaugguguugauc

SEQ ID NO: 1629370 - RNA, 19 nt, Artificial Sequence
  Description of Artificial Sequence: Synthetic oligonucleotide
caaacucagugcgauacug

SEQ ID NO: 1629371 - RNA, 19 nt, Artificial Sequence
  Description of Artificial Sequence: Synthetic oligonucleotide
uagccguaaacguccauuc

SEQ ID NO: 1629372 - RNA, 19 nt, Artificial Sequence
  Description of Artificial Sequence: Synthetic oligonucleotide
ugucucgcaguaaggauuu

SEQ ID NO: 1629373 - RNA, 19 nt, Artificial Sequence
  Description of Artificial Sequence: Synthetic oligonucleotide
cugguauucguucacagcu

SEQ ID NO: 1629374 - RNA, 19 nt, Artificial Sequence
  Description of Artificial Sequence: Synthetic oligonucleotide
gaagcuaaguagcacucua

SEQ ID NO: 1629375 - RNA, 19 nt, Artificial Sequence
  Description of Artificial Sequence: Synthetic oligonucleotide
ucuagagacuucuggucau

SEQ ID NO: 1629376 - RNA, 19 nt, Artificial Sequence
  Description of Artificial Sequence: Synthetic oligonucleotide
uaguaaagcuuggacgcug

SEQ ID NO: 1629377 - RNA, 19 nt, Artificial Sequence
  Description of Artificial Sequence: Synthetic oligonucleotide
caucgcuucucgaaugcug

SEQ ID NO: 1629378 - RNA, 19 nt, Artificial Sequence
  Description of Artificial Sequence: Synthetic oligonucleotide
cuagaagcuaaguagcacu

SEQ ID NO: 1629379 - RNA, 19 nt, Artificial Sequence
  Description of Artificial Sequence: Synthetic oligonucleotide
cagagcuuuaucuaacaaa

SEQ ID NO: 1629380 - RNA, 19 nt, Artificial Sequence
  Description of Artificial Sequence: Synthetic oligonucleotide
cauugcuuccugguauucg

SEQ ID NO: 1629381 - RNA, 19 nt, Artificial Sequence
  Description of Artificial Sequence: Synthetic oligonucleotide
uagugaacagaugguguug

SEQ ID NO: 1629382 - RNA, 19 nt, Artificial Sequence
  Description of Artificial Sequence: Synthetic oligonucleotide
uuccucaacagagcaauuc

SEQ ID NO: 1629383 - RNA, 19 nt, Artificial Sequence
  Description of Artificial Sequence: Synthetic oligonucleotide
acacagucgcucugauugg

SEQ ID NO: 1629384 - RNA, 19 nt, Artificial Sequence
  Description of Artificial Sequence: Synthetic oligonucleotide
uucucgugccaggagguag

SEQ ID NO: 1629385 - RNA, 19 nt, Artificial Sequence
  Description of Artificial Sequence: Synthetic oligonucleotide
cucuagagacuucugguca

SEQ ID NO: 1629386 - RNA, 19 nt, Artificial Sequence
  Description of Artificial Sequence: Synthetic oligonucleotide
uugaucgcucuugaguugu

SEQ ID NO: 1629387 - RNA, 19 nt, Artificial Sequence
  Description of Artificial Sequence: Synthetic oligonucleotide
cauaggcuuuaauccacac

SEQ ID NO: 1629388 - RNA, 19 nt, Artificial Sequence
  Description of Artificial Sequence: Synthetic oligonucleotide
aaacucagugcgauacugu

SEQ ID NO: 1629389 - RNA, 19 nt, Artificial Sequence
  Description of Artificial Sequence: Synthetic oligonucleotide
ucaccaucgcuucucgaau

SEQ ID NO: 1629390 - RNA, 19 nt, Artificial Sequence
  Description of Artificial Sequence: Synthetic oligonucleotide
ucugcgccugcucaaacuu

SEQ ID NO: 1629391 - RNA, 19 nt, Artificial Sequence
  Description of Artificial Sequence: Synthetic oligonucleotide
aggacggaguucuuacugu

SEQ ID NO: 1629392 - RNA, 19 nt, Artificial Sequence
  Description of Artificial Sequence: Synthetic oligonucleotide
gauaaggauccaacaucug

SEQ ID NO: 1629393 - RNA, 19 nt, Artificial Sequence
  Description of Artificial Sequence: Synthetic oligonucleotide
aucgucauugaugccaccu

SEQ ID NO: 1629394 - RNA, 19 nt, Artificial Sequence
  Description of Artificial Sequence: Synthetic oligonucleotide
cauugggguccaaacucag

SEQ ID NO: 1629395 - RNA, 19 nt, Artificial Sequence
  Description of Artificial Sequence: Synthetic oligonucleotide
agucgcucugauuggccag

SEQ ID NO: 1629396 - RNA, 19 nt, Artificial Sequence
  Description of Artificial Sequence: Synthetic oligonucleotide
agccuuauagccucccgaa

SEQ ID NO: 1629397 - RNA, 19 nt, Artificial Sequence
  Description of Artificial Sequence: Synthetic oligonucleotide
uagccucccgaaaauguau

SEQ ID NO: 1629398 - RNA, 19 nt, Artificial Sequence
  Description of Artificial Sequence: Synthetic oligonucleotide
caagccuuauagccucccg

SEQ ID NO: 1629399 - RNA, 19 nt, Artificial Sequence
  Description of Artificial Sequence: Synthetic oligonucleotide
augcaggacacagucgcuc

SEQ ID NO: 1629400 - RNA, 19 nt, Artificial Sequence
  Description of Artificial Sequence: Synthetic oligonucleotide
guagcgcuugcuauagaag

SEQ ID NO: 1629401 - RNA, 19 nt, Artificial Sequence
  Description of Artificial Sequence: Synthetic oligonucleotide
cccgaaaauguauuauagc

SEQ ID NO: 1629402 - RNA, 19 nt, Artificial Sequence
  Description of Artificial Sequence: Synthetic oligonucleotide
cagguuugccaacaucaug

SEQ ID NO: 1629403 - RNA, 19 nt, Artificial Sequence
  Description of Artificial Sequence: Synthetic oligonucleotide
acagucgcucugauuggcc

SEQ ID NO: 1629404 - RNA, 19 nt, Artificial Sequence
  Description of Artificial Sequence: Synthetic oligonucleotide
caccuagaguuuuguaaac

SEQ ID NO: 1629405 - RNA, 19 nt, Artificial Sequence
  Description of Artificial Sequence: Synthetic oligonucleotide
ccucuagucgcccuucucg

SEQ ID NO: 1629406 - RNA, 19 nt, Artificial Sequence
  Description of Artificial Sequence: Synthetic oligonucleotide
cuagcaggguaagagucug

SEQ ID NO: 1629407 - RNA, 19 nt, Artificial Sequence
  Description of Artificial Sequence: Synthetic oligonucleotide
ugguauucguucacagcua

SEQ ID NO: 1629408 - RNA, 19 nt, Artificial Sequence
  Description of Artificial Sequence: Synthetic oligonucleotide
ugaggacggaguucuuacu

SEQ ID NO: 1629409 - RNA, 19 nt, Artificial Sequence
  Description of Artificial Sequence: Synthetic oligonucleotide
guacaggucugccaagcuc

SEQ ID NO: 1629410 - RNA, 19 nt, Artificial Sequence
  Description of Artificial Sequence: Synthetic oligonucleotide
ucccugcugagcaguuccg

SEQ ID NO: 1629411 - RNA, 19 nt, Artificial Sequence
  Description of Artificial Sequence: Synthetic oligonucleotide
agagcaauuccgucuucau

SEQ ID NO: 1629412 - RNA, 19 nt, Artificial Sequence
  Description of Artificial Sequence: Synthetic oligonucleotide
ucagugcgauacuguacug

SEQ ID NO: 1629413 - RNA, 19 nt, Artificial Sequence
  Description of Artificial Sequence: Synthetic oligonucleotide
ccgaaaauguauuauagcu

SEQ ID NO: 1629414 - RNA, 19 nt, Artificial Sequence
  Description of Artificial Sequence: Synthetic oligonucleotide
guguugaucgcucuugagu

SEQ ID NO: 1629415 - RNA, 19 nt, Artificial Sequence
  Description of Artificial Sequence: Synthetic oligonucleotide
uggcgcccaaguauagggc

SEQ ID NO: 1629416 - RNA, 19 nt, Artificial Sequence
  Description of Artificial Sequence: Synthetic oligonucleotide
gugcaagccuuauagccuc

SEQ ID NO: 1629417 - RNA, 19 nt, Artificial Sequence
  Description of Artificial Sequence: Synthetic oligonucleotide
guaaacguccauuccuuua

SEQ ID NO: 1629418 - RNA, 19 nt, Artificial Sequence
  Description of Artificial Sequence: Synthetic oligonucleotide
guaaacauuguuggccauc

SEQ ID NO: 1629419 - RNA, 19 nt, Artificial Sequence
  Description of Artificial Sequence: Synthetic oligonucleotide
aucugcgccugcucaaacu

SEQ ID NO: 1629420 - RNA, 19 nt, Artificial Sequence
  Description of Artificial Sequence: Synthetic oligonucleotide
gagaguagcgcuugcuaua

SEQ ID NO: 1629421 - RNA, 19 nt, Artificial Sequence
  Description of Artificial Sequence: Synthetic oligonucleotide
cucugaaguacaggucugc

SEQ ID NO: 1629422 - RNA, 19 nt, Artificial Sequence
  Description of Artificial Sequence: Synthetic oligonucleotide
cauaacagucuaagcgaca

SEQ ID NO: 1629423 - RNA, 19 nt, Artificial Sequence
  Description of Artificial Sequence: Synthetic oligonucleotide
agaagcuaaguagcacucu

SEQ ID NO: 1629424 - RNA, 19 nt, Artificial Sequence
  Description of Artificial Sequence: Synthetic oligonucleotide
aagcuaaguagcacucuau

SEQ ID NO: 1629425 - RNA, 19 nt, Artificial Sequence
  Description of Artificial Sequence: Synthetic oligonucleotide
cuuggcgcccaaguauagg

SEQ ID NO: 1629426 - RNA, 19 nt, Artificial Sequence
  Description of Artificial Sequence: Synthetic oligonucleotide
guagcacucuaugagaccu

SEQ ID NO: 1629427 - RNA, 19 nt, Artificial Sequence
  Description of Artificial Sequence: Synthetic oligonucleotide
agagaccacccagggcucc

SEQ ID NO: 1629428 - RNA, 19 nt, Artificial Sequence
  Description of Artificial Sequence: Synthetic oligonucleotide
uccaacaucugcgccugcu

SEQ ID NO: 1629429 - RNA, 19 nt, Artificial Sequence
  Description of Artificial Sequence: Synthetic oligonucleotide
gcccucuagagacuucugg

SEQ ID NO: 1629430 - RNA, 19 nt, Artificial Sequence
  Description of Artificial Sequence: Synthetic oligonucleotide
gacacacgguggcuagcag

SEQ ID NO: 1629431 - RNA, 19 nt, Artificial Sequence
  Description of Artificial Sequence: Synthetic oligonucleotide
caccaucgcuucucgaaug

SEQ ID NO: 1629432 - RNA, 19 nt, Artificial Sequence
  Description of Artificial Sequence: Synthetic oligonucleotide
gucuaagcgacaaggugca

SEQ ID NO: 1629433 - RNA, 19 nt, Artificial Sequence
  Description of Artificial Sequence: Synthetic oligonucleotide
gucauugaugccaccucug

SEQ ID NO: 1629434 - RNA, 19 nt, Artificial Sequence
  Description of Artificial Sequence: Synthetic oligonucleotide
caacagagcaauuccgucu

SEQ ID NO: 1629435 - RNA, 19 nt, Artificial Sequence
  Description of Artificial Sequence: Synthetic oligonucleotide
uuggacgcuguugcuauuc

SEQ ID NO: 1629436 - RNA, 19 nt, Artificial Sequence
  Description of Artificial Sequence: Synthetic oligonucleotide
caccacggccuugacauag

SEQ ID NO: 1629437 - RNA, 19 nt, Artificial Sequence
  Description of Artificial Sequence: Synthetic oligonucleotide
ggcgcccaaguauagggcc

SEQ ID NO: 1629438 - RNA, 19 nt, Artificial Sequence
  Description of Artificial Sequence: Synthetic oligonucleotide
gguguugaucgcucuugag

SEQ ID NO: 1629439 - RNA, 19 nt, Artificial Sequence
  Description of Artificial Sequence: Synthetic oligonucleotide
cucccgaaaauguauuaua

SEQ ID NO: 1629440 - RNA, 19 nt, Artificial Sequence
  Description of Artificial Sequence: Synthetic oligonucleotide
cugcucugaaguacagguc

SEQ ID NO: 1629441 - RNA, 19 nt, Artificial Sequence
  Description of Artificial Sequence: Synthetic oligonucleotide
aguaaagcuuggacgcugu

SEQ ID NO: 1629442 - RNA, 19 nt, Artificial Sequence
  Description of Artificial Sequence: Synthetic oligonucleotide
acaggucugccaagcuccc

SEQ ID NO: 1629443 - RNA, 19 nt, Artificial Sequence
  Description of Artificial Sequence: Synthetic oligonucleotide
caacaucugcgccugcuca

SEQ ID NO: 1629444 - RNA, 19 nt, Artificial Sequence
  Description of Artificial Sequence: Synthetic oligonucleotide
cuaacaaagcuuuggcuuu

SEQ ID NO: 1629445 - RNA, 19 nt, Artificial Sequence
  Description of Artificial Sequence: Synthetic oligonucleotide
agacacacgguggcuagca

SEQ ID NO: 1629446 - RNA, 19 nt, Artificial Sequence
  Description of Artificial Sequence: Synthetic oligonucleotide
gucgcucugauuggccagg

SEQ ID NO: 1629447 - RNA, 19 nt, Artificial Sequence
  Description of Artificial Sequence: Synthetic oligonucleotide
ugcaugcccucuagagacu

SEQ ID NO: 1629448 - RNA, 19 nt, Artificial Sequence
  Description of Artificial Sequence: Synthetic oligonucleotide
augcccucuagagacuucu

SEQ ID NO: 1629449 - RNA, 19 nt, Artificial Sequence
  Description of Artificial Sequence: Synthetic oligonucleotide
agcgcuugcuauagaagcu

SEQ ID NO: 1629450 - RNA, 19 nt, Artificial Sequence
  Description of Artificial Sequence: Synthetic oligonucleotide
guauucguucacagcuacc

SEQ ID NO: 1629451 - RNA, 19 nt, Artificial Sequence
  Description of Artificial Sequence: Synthetic oligonucleotide
uccgcaugcugaucagaaa

SEQ ID NO: 1629452 - RNA, 19 nt, Artificial Sequence
  Description of Artificial Sequence: Synthetic oligonucleotide
acaaggugcaagccuuaua

SEQ ID NO: 1629453 - RNA, 19 nt, Artificial Sequence
  Description of Artificial Sequence: Synthetic oligonucleotide
gacgcuguugcuauucagu

SEQ ID NO: 1629454 - RNA, 19 nt, Artificial Sequence
  Description of Artificial Sequence: Synthetic oligonucleotide
uaguccggccucugggcca

SEQ ID NO: 1629455 - RNA, 19 nt, Artificial Sequence
  Description of Artificial Sequence: Synthetic oligonucleotide
auagggcccgagaguagcg

SEQ ID NO: 1629456 - RNA, 19 nt, Artificial Sequence
  Description of Artificial Sequence: Synthetic oligonucleotide
ugcccucuagagacuucug

SEQ ID NO: 1629457 - RNA, 19 nt, Artificial Sequence
  Description of Artificial Sequence: Synthetic oligonucleotide
ccuuuuacagaaagagaca

SEQ ID NO: 1629458 - RNA, 19 nt, Artificial Sequence
  Description of Artificial Sequence: Synthetic oligonucleotide
ccucuagagacuucugguc

SEQ ID NO: 1629459 - RNA, 19 nt, Artificial Sequence
  Description of Artificial Sequence: Synthetic oligonucleotide
cuagugaacagaugguguu

SEQ ID NO: 1629460 - RNA, 19 nt, Artificial Sequence
  Description of Artificial Sequence: Synthetic oligonucleotide
gcuagaagcuaaguagcac

SEQ ID NO: 1629461 - RNA, 19 nt, Artificial Sequence
  Description of Artificial Sequence: Synthetic oligonucleotide
uuauagcuuccuggacucu

SEQ ID NO: 1629462 - RNA, 19 nt, Artificial Sequence
  Description of Artificial Sequence: Synthetic oligonucleotide
aggggcacugccgcaggac

SEQ ID NO: 1629463 - RNA, 19 nt, Artificial Sequence
  Description of Artificial Sequence: Synthetic oligonucleotide
cagugugcacaaaagcaua

SEQ ID NO: 1629464 - RNA, 19 nt, Artificial Sequence
  Description of Artificial Sequence: Synthetic oligonucleotide
ucgcuucucgaaugcugcu

SEQ ID NO: 1629465 - RNA, 19 nt, Artificial Sequence
  Description of Artificial Sequence: Synthetic oligonucleotide
uugcaccuagaguuuugua

SEQ ID NO: 1629466 - RNA, 19 nt, Artificial Sequence
  Description of Artificial Sequence: Synthetic oligonucleotide
gcaggguaagagucugugc

SEQ ID NO: 1629467 - RNA, 19 nt, Artificial Sequence
  Description of Artificial Sequence: Synthetic oligonucleotide
cuagaguuuuguaaacauu

SEQ ID NO: 1629468 - RNA, 19 nt, Artificial Sequence
  Description of Artificial Sequence: Synthetic oligonucleotide
cuuauagccucccgaaaau

SEQ ID NO: 1629469 - RNA, 19 nt, Artificial Sequence
  Description of Artificial Sequence: Synthetic oligonucleotide
agggcccgagaguagcgcu

SEQ ID NO: 1629470 - RNA, 19 nt, Artificial Sequence
  Description of Artificial Sequence: Synthetic oligonucleotide
auagccucccgaaaaugua

SEQ ID NO: 1629471 - RNA, 19 nt, Artificial Sequence
  Description of Artificial Sequence: Synthetic oligonucleotide
ggagguagccguaaacguc

SEQ ID NO: 1629472 - RNA, 19 nt, Artificial Sequence
  Description of Artificial Sequence: Synthetic oligonucleotide
guauagggcccgagaguag

SEQ ID NO: 1629473 - RNA, 19 nt, Artificial Sequence
  Description of Artificial Sequence: Synthetic oligonucleotide
guugucucgcaguaaggau

SEQ ID NO: 1629474 - RNA, 19 nt, Artificial Sequence
  Description of Artificial Sequence: Synthetic oligonucleotide
ggcuagcaggguaagaguc

SEQ ID NO: 1629475 - RNA, 19 nt, Artificial Sequence
  Description of Artificial Sequence: Synthetic oligonucleotide
cugcgccugcucaaacuug

SEQ ID NO: 1629476 - RNA, 19 nt, Artificial Sequence
  Description of Artificial Sequence: Synthetic oligonucleotide
ggacggaguucuuacuguc

SEQ ID NO: 1629477 - RNA, 19 nt, Artificial Sequence
  Description of Artificial Sequence: Synthetic oligonucleotide
caugccgaaccacugcucu

SEQ ID NO: 1629478 - RNA, 19 nt, Artificial Sequence
  Description of Artificial Sequence: Synthetic oligonucleotide
cagagcaauuccgucuuca

SEQ ID NO: 1629479 - RNA, 19 nt, Artificial Sequence
  Description of Artificial Sequence: Synthetic oligonucleotide
caucugcgccugcucaaac

SEQ ID NO: 1629480 - RNA, 19 nt, Artificial Sequence
  Description of Artificial Sequence: Synthetic oligonucleotide
ggccaaggggcacugccgc

SEQ ID NO: 1629481 - RNA, 19 nt, Artificial Sequence
  Description of Artificial Sequence: Synthetic oligonucleotide
gaccuccuuauagcuggug

SEQ ID NO: 1629482 - RNA, 19 nt, Artificial Sequence
  Description of Artificial Sequence: Synthetic oligonucleotide
uagcacucuaugagaccuu

SEQ ID NO: 1629483 - RNA, 19 nt, Artificial Sequence
  Description of Artificial Sequence: Synthetic oligonucleotide
cugcguggcaucuguggga

SEQ ID NO: 1629484 - RNA, 19 nt, Artificial Sequence
  Description of Artificial Sequence: Synthetic oligonucleotide
gccguaaacguccauuccu

SEQ ID NO: 1629485 - RNA, 19 nt, Artificial Sequence
  Description of Artificial Sequence: Synthetic oligonucleotide
agcuuggacgcuguugcua

SEQ ID NO: 1629486 - RNA, 19 nt, Artificial Sequence
  Description of Artificial Sequence: Synthetic oligonucleotide
aggcuuuaauccacacaga

SEQ ID NO: 1629487 - RNA, 19 nt, Artificial Sequence
  Description of Artificial Sequence: Synthetic oligonucleotide
ccaggagguagccguaaac

SEQ ID NO: 1629488 - RNA, 19 nt, Artificial Sequence
  Description of Artificial Sequence: Synthetic oligonucleotide
ggucugccaagcuccccag

SEQ ID NO: 1629489 - RNA, 19 nt, Artificial Sequence
  Description of Artificial Sequence: Synthetic oligonucleotide
ccaaguauagggcccgaga

SEQ ID NO: 1629490 - RNA, 19 nt, Artificial Sequence
  Description of Artificial Sequence: Synthetic oligonucleotide
cucuagucgcccuucucgu

SEQ ID NO: 1629491 - RNA, 19 nt, Artificial Sequence
  Description of Artificial Sequence: Synthetic oligonucleotide
gacggaguucuuacugucu

SEQ ID NO: 1629492 - RNA, 19 nt, Artificial Sequence
  Description of Artificial Sequence: Synthetic oligonucleotide
gcuauggcacccagagacc

SEQ ID NO: 1629493 - RNA, 19 nt, Artificial Sequence
  Description of Artificial Sequence: Synthetic oligonucleotide
ggugcaagccuuauagccu

SEQ ID NO: 1629494 - RNA, 19 nt, Artificial Sequence
  Description of Artificial Sequence: Synthetic oligonucleotide
gaguagcgcuugcuauaga

SEQ ID NO: 1629495 - RNA, 19 nt, Artificial Sequence
  Description of Artificial Sequence: Synthetic oligonucleotide
gccgaaccacugcucuugg

SEQ ID NO: 1629496 - RNA, 19 nt, Artificial Sequence
  Description of Artificial Sequence: Synthetic oligonucleotide
cagacacacgguggcuagc

SEQ ID NO: 1629497 - RNA, 19 nt, Artificial Sequence
  Description of Artificial Sequence: Synthetic oligonucleotide
gcuugcuauagaagcuaug

SEQ ID NO: 1629498 - RNA, 19 nt, Artificial Sequence
  Description of Artificial Sequence: Synthetic oligonucleotide
guagccguaaacguccauu

SEQ ID NO: 1629499 - RNA, 19 nt, Artificial Sequence
  Description of Artificial Sequence: Synthetic oligonucleotide
ucuaagcgacaaggugcaa

SEQ ID NO: 1629500 - RNA, 19 nt, Artificial Sequence
  Description of Artificial Sequence: Synthetic oligonucleotide
ggugacugaugggcguucc

SEQ ID NO: 1629501 - RNA, 19 nt, Artificial Sequence
  Description of Artificial Sequence: Synthetic oligonucleotide
cugugcacuugcaccuaga

SEQ ID NO: 1629502 - RNA, 19 nt, Artificial Sequence
  Description of Artificial Sequence: Synthetic oligonucleotide
agggcuccgcaugcugauc

SEQ ID NO: 1629503 - RNA, 19 nt, Artificial Sequence
  Description of Artificial Sequence: Synthetic oligonucleotide
ugccaggagguagccguaa

SEQ ID NO: 1629504 - RNA, 19 nt, Artificial Sequence
  Description of Artificial Sequence: Synthetic oligonucleotide
cacgguggcuagcagggua

SEQ ID NO: 1629505 - RNA, 19 nt, Artificial Sequence
  Description of Artificial Sequence: Synthetic oligonucleotide
cauguuccuaagugcugcu

SEQ ID NO: 1629506 - RNA, 19 nt, Artificial Sequence
  Description of Artificial Sequence: Synthetic oligonucleotide
gaugcaggacacagucgcu

SEQ ID NO: 1629507 - RNA, 19 nt, Artificial Sequence
  Description of Artificial Sequence: Synthetic oligonucleotide
auccgaugcaggacacagu

SEQ ID NO: 1629508 - RNA, 19 nt, Artificial Sequence
  Description of Artificial Sequence: Synthetic oligonucleotide
gguccauugcuuccuggua

SEQ ID NO: 1629509 - RNA, 19 nt, Artificial Sequence
  Description of Artificial Sequence: Synthetic oligonucleotide
gcgauacuguacuggucca

SEQ ID NO: 1629510 - RNA, 19 nt, Artificial Sequence
  Description of Artificial Sequence: Synthetic oligonucleotide
guuggccaucaccaucgcu

SEQ ID NO: 1629511 - RNA, 19 nt, Artificial Sequence
  Description of Artificial Sequence: Synthetic oligonucleotide
gcaugcugaucagaaaugu

SEQ ID NO: 1629512 - RNA, 19 nt, Artificial Sequence
  Description of Artificial Sequence: Synthetic oligonucleotide
caauuccgucuucauauuu

SEQ ID NO: 1629513 - RNA, 19 nt, Artificial Sequence
  Description of Artificial Sequence: Synthetic oligonucleotide
agccucccgaaaauguauu

SEQ ID NO: 1629514 - RNA, 19 nt, Artificial Sequence
  Description of Artificial Sequence: Synthetic oligonucleotide
ccagugugcacaaaagcau

SEQ ID NO: 1629515 - RNA, 19 nt, Artificial Sequence
  Description of Artificial Sequence: Synthetic oligonucleotide
ucaccacggccuugacaua

SEQ ID NO: 1629516 - RNA, 19 nt, Artificial Sequence
  Description of Artificial Sequence: Synthetic oligonucleotide
ccaaggggcacugccgcag

SEQ ID NO: 1629517 - RNA, 19 nt, Artificial Sequence
  Description of Artificial Sequence: Synthetic oligonucleotide
agucgcccuucucgugcca

SEQ ID NO: 1629518 - RNA, 19 nt, Artificial Sequence
  Description of Artificial Sequence: Synthetic oligonucleotide
gcauaggcuuuaauccaca

SEQ ID NO: 1629519 - RNA, 19 nt, Artificial Sequence
  Description of Artificial Sequence: Synthetic oligonucleotide
ccaggauccgaugcaggac

SEQ ID NO: 1629520 - RNA, 19 nt, Artificial Sequence
  Description of Artificial Sequence: Synthetic oligonucleotide
guccaaacucagugcgaua

SEQ ID NO: 1629521 - RNA, 19 nt, Artificial Sequence
  Description of Artificial Sequence: Synthetic oligonucleotide
gacaaggugcaagccuuau

SEQ ID NO: 1629522 - RNA, 19 nt, Artificial Sequence
  Description of Artificial Sequence: Synthetic oligonucleotide
gcuuggacgcuguugcuau

SEQ ID NO: 1629523 - RNA, 19 nt, Artificial Sequence
  Description of Artificial Sequence: Synthetic oligonucleotide
agguagccguaaacgucca

SEQ ID NO: 1629524 - RNA, 19 nt, Artificial Sequence
  Description of Artificial Sequence: Synthetic oligonucleotide
gguccaaacucagugcgau

SEQ ID NO: 1629525 - RNA, 19 nt, Artificial Sequence
  Description of Artificial Sequence: Synthetic oligonucleotide
gccuuauagccucccgaaa

SEQ ID NO: 1629526 - RNA, 19 nt, Artificial Sequence
  Description of Artificial Sequence: Synthetic oligonucleotide
ggguaagagucugugcacu

SEQ ID NO: 1629527 - RNA, 19 nt, Artificial Sequence
  Description of Artificial Sequence: Synthetic oligonucleotide
cguggcaucugugggacuc

SEQ ID NO: 1629528 - RNA, 19 nt, Artificial Sequence
  Description of Artificial Sequence: Synthetic oligonucleotide
gguaagagucugugcacuu

SEQ ID NO: 1629529 - RNA, 19 nt, Artificial Sequence
  Description of Artificial Sequence: Synthetic oligonucleotide
cguugucucgcaguaagga

SEQ ID NO: 1629530 - RNA, 19 nt, Artificial Sequence
  Description of Artificial Sequence: Synthetic oligonucleotide
gcuagcaggguaagagucu

SEQ ID NO: 1629531 - RNA, 19 nt, Artificial Sequence
  Description of Artificial Sequence: Synthetic oligonucleotide
acacgguggcuagcagggu

SEQ ID NO: 1629532 - RNA, 19 nt, Artificial Sequence
  Description of Artificial Sequence: Synthetic oligonucleotide
gccucccgaaaauguauua

SEQ ID NO: 1629533 - RNA, 19 nt, Artificial Sequence
  Description of Artificial Sequence: Synthetic oligonucleotide
cccaaguauagggcccgag

SEQ ID NO: 1629534 - RNA, 19 nt, Artificial Sequence
  Description of Artificial Sequence: Synthetic oligonucleotide
guaaagcuuggacgcuguu

SEQ ID NO: 1629535 - RNA, 19 nt, Artificial Sequence
  Description of Artificial Sequence: Synthetic oligonucleotide
ggguccaaacucagugcga

SEQ ID NO: 1629536 - RNA, 19 nt, Artificial Sequence
  Description of Artificial Sequence: Synthetic oligonucleotide
ggauuacauucaucgucau

SEQ ID NO: 1629537 - RNA, 19 nt, Artificial Sequence
  Description of Artificial Sequence: Synthetic oligonucleotide
gcgcuugcuauagaagcua

SEQ ID NO: 1629538 - RNA, 19 nt, Artificial Sequence
  Description of Artificial Sequence: Synthetic oligonucleotide
ccgagaguagcgcuugcua

SEQ ID NO: 1629539 - RNA, 19 nt, Artificial Sequence
  Description of Artificial Sequence: Synthetic oligonucleotide
gucugugcacuugcaccua

SEQ ID NO: 1629540 - RNA, 19 nt, Artificial Sequence
  Description of Artificial Sequence: Synthetic oligonucleotide
gcucaaacuugaggacgga

SEQ ID NO: 1629541 - RNA, 19 nt, Artificial Sequence
  Description of Artificial Sequence: Synthetic oligonucleotide
gcgacaaggugcaagccuu

SEQ ID NO: 1629542 - RNA, 19 nt, Artificial Sequence
  Description of Artificial Sequence: Synthetic oligonucleotide
gcaauuccgucuucauauu

SEQ ID NO: 1629543 - RNA, 19 nt, Artificial Sequence
  Description of Artificial Sequence: Synthetic oligonucleotide
cgagaguagcgcuugcuau

SEQ ID NO: 1629544 - RNA, 19 nt, Artificial Sequence
  Description of Artificial Sequence: Synthetic oligonucleotide
gcccgagaguagcgcuugc

SEQ ID NO: 1629545 - RNA, 19 nt, Artificial Sequence
  Description of Artificial Sequence: Synthetic oligonucleotide
ccguaaacguccauuccuu

SEQ ID NO: 1629546 - RNA, 19 nt, Artificial Sequence
  Description of Artificial Sequence: Synthetic oligonucleotide
aggcggcagccaagguucu

SEQ ID NO: 1629547 - RNA, 19 nt, Artificial Sequence
  Description of Artificial Sequence: Synthetic oligonucleotide
ccaaacucagugcgauacu

SEQ ID NO: 1629548 - RNA, 19 nt, Artificial Sequence
  Description of Artificial Sequence: Synthetic oligonucleotide
ccucccgaaaauguauuau

SEQ ID NO: 1629549 - RNA, 19 nt, Artificial Sequence
  Description of Artificial Sequence: Synthetic oligonucleotide
gguagccguaaacguccau

SEQ ID NO: 1629550 - RNA, 19 nt, Artificial Sequence
  Description of Artificial Sequence: Synthetic oligonucleotide
gcacuugcaccuagaguuu

SEQ ID NO: 1629551 - RNA, 19 nt, Artificial Sequence
  Description of Artificial Sequence: Synthetic oligonucleotide
cgaaugcugcuagaagcua

SEQ ID NO: 1629552 - RNA, 19 nt, Artificial Sequence
  Description of Artificial Sequence: Synthetic oligonucleotide
cguaaacguccauuccuuu

SEQ ID NO: 1629553 - RNA, 19 nt, Artificial Sequence
  Description of Artificial Sequence: Synthetic oligonucleotide
gcccaaguauagggcccga

SEQ ID NO: 1629554 - RNA, 19 nt, Artificial Sequence
  Description of Artificial Sequence: Synthetic oligonucleotide
cgacaaggugcaagccuua

SEQ ID NO: 1629555 - RNA, 19 nt, Artificial Sequence
  Description of Artificial Sequence: Synthetic oligonucleotide
ccaucgcuucucgaaugcu

SEQ ID NO: 1629556 - RNA, 19 nt, Artificial Sequence
  Description of Artificial Sequence: Synthetic oligonucleotide
ccgaaccacugcucuuggu

SEQ ID NO: 1629557 - RNA, 19 nt, Artificial Sequence
  Description of Artificial Sequence: Synthetic oligonucleotide
gucucgcaguaaggauuuu

SEQ ID NO: 1629558 - RNA, 19 nt, Artificial Sequence
  Description of Artificial Sequence: Synthetic oligonucleotide
gggcccgagaguagcgcuu

SEQ ID NO: 1629559 - RNA, 19 nt, Artificial Sequence
  Description of Artificial Sequence: Synthetic oligonucleotide
gcguggcaucugugggacu

SEQ ID NO: 1629560 - RNA, 19 nt, Artificial Sequence
  Description of Artificial Sequence: Synthetic oligonucleotide
ucauauuccacauaggcca

SEQ ID NO: 1629561 - RNA, 19 nt, Artificial Sequence
  Description of Artificial Sequence: Synthetic oligonucleotide
aaagcagucggccuccacc

SEQ ID NO: 1629562 - RNA, 19 nt, Artificial Sequence
  Description of Artificial Sequence: Synthetic oligonucleotide
acaaaugggccccaaaagc

SEQ ID NO: 1629563 - RNA, 19 nt, Artificial Sequence
  Description of Artificial Sequence: Synthetic oligonucleotide
ucuaucguuacacauuucc

SEQ ID NO: 1629564 - RNA, 19 nt, Artificial Sequence
  Description of Artificial Sequence: Synthetic oligonucleotide
uccacccucaauaugaggg

SEQ ID NO: 1629565 - RNA, 19 nt, Artificial Sequence
  Description of Artificial Sequence: Synthetic oligonucleotide
uuauguuucuccagggugg

SEQ ID NO: 1629566 - RNA, 19 nt, Artificial Sequence
  Description of Artificial Sequence: Synthetic oligonucleotide
aguaucaggacaaaugggc

SEQ ID NO: 1629567 - RNA, 19 nt, Artificial Sequence
  Description of Artificial Sequence: Synthetic oligonucleotide
uuuauguuucuccagggug

SEQ ID NO: 1629568 - RNA, 19 nt, Artificial Sequence
  Description of Artificial Sequence: Synthetic oligonucleotide
agugacacuaucuuuacug

SEQ ID NO: 1629569 - RNA, 19 nt, Artificial Sequence
  Description of Artificial Sequence: Synthetic oligonucleotide
aggggaaacaaacaucggc

SEQ ID NO: 1629570 - RNA, 19 nt, Artificial Sequence
  Description of Artificial Sequence: Synthetic oligonucleotide
aauaugagggaacacuccu

SEQ ID NO: 1629571 - RNA, 19 nt, Artificial Sequence
  Description of Artificial Sequence: Synthetic oligonucleotide
uucauauuccacauaggcc

SEQ ID NO: 1629572 - RNA, 19 nt, Artificial Sequence
  Description of Artificial Sequence: Synthetic oligonucleotide
ugcucuuauccacacaagg

SEQ ID NO: 1629573 - RNA, 19 nt, Artificial Sequence
  Description of Artificial Sequence: Synthetic oligonucleotide
uggaacuuuccgcugaggg

SEQ ID NO: 1629574 - RNA, 19 nt, Artificial Sequence
  Description of Artificial Sequence: Synthetic oligonucleotide
cauuggacaucuuaggagc

SEQ ID NO: 1629575 - RNA, 19 nt, Artificial Sequence
  Description of Artificial Sequence: Synthetic oligonucleotide
uuggugacgagccugaggu

SEQ ID NO: 1629576 - RNA, 19 nt, Artificial Sequence
  Description of Artificial Sequence: Synthetic oligonucleotide
ucuuugauggucaugccgu

SEQ ID NO: 1629577 - RNA, 19 nt, Artificial Sequence
  Description of Artificial Sequence: Synthetic oligonucleotide
cucuuauccacacaagggg

SEQ ID NO: 1629578 - RNA, 19 nt, Artificial Sequence
  Description of Artificial Sequence: Synthetic oligonucleotide
ucugcuuggaaggagaagc

SEQ ID NO: 1629579 - RNA, 19 nt, Artificial Sequence
  Description of Artificial Sequence: Synthetic oligonucleotide
uucucuuugauggucaugc

SEQ ID NO: 1629580 - RNA, 19 nt, Artificial Sequence
  Description of Artificial Sequence: Synthetic oligonucleotide
aaguaaggcauuucccauc

SEQ ID NO: 1629581 - RNA, 19 nt, Artificial Sequence
  Description of Artificial Sequence: Synthetic oligonucleotide
uaucguuacacauuuccca

SEQ ID NO: 1629582 - RNA, 19 nt, Artificial Sequence
  Description of Artificial Sequence: Synthetic oligonucleotide
ggagaagcaacaucuaucg

SEQ ID NO: 1629583 - RNA, 19 nt, Artificial Sequence
  Description of Artificial Sequence: Synthetic oligonucleotide
cugauugccacuuuaauga

SEQ ID NO: 1629584 - RNA, 19 nt, Artificial Sequence
  Description of Artificial Sequence: Synthetic oligonucleotide
acugaaguaccuugggacg

SEQ ID NO: 1629585 - RNA, 19 nt, Artificial Sequence
  Description of Artificial Sequence: Synthetic oligonucleotide
uuacagauguccucgagcu

SEQ ID NO: 1629586 - RNA, 19 nt, Artificial Sequence
  Description of Artificial Sequence: Synthetic oligonucleotide
acauuucccagagaguucc

SEQ ID NO: 1629587 - RNA, 19 nt, Artificial Sequence
  Description of Artificial Sequence: Synthetic oligonucleotide
ucaauaugagggaacacuc

SEQ ID NO: 1629588 - RNA, 19 nt, Artificial Sequence
  Description of Artificial Sequence: Synthetic oligonucleotide
ugaaggaguaaguaaggca

SEQ ID NO: 1629589 - RNA, 19 nt, Artificial Sequence
  Description of Artificial Sequence: Synthetic oligonucleotide
aaagaguggccugagcuuc

SEQ ID NO: 1629590 - RNA, 19 nt, Artificial Sequence
  Description of Artificial Sequence: Synthetic oligonucleotide
caaaugggccccaaaagcc

SEQ ID NO: 1629591 - RNA, 19 nt, Artificial Sequence
  Description of Artificial Sequence: Synthetic oligonucleotide
aguuuauguuucuccaggg

SEQ ID NO: 1629592 - RNA, 19 nt, Artificial Sequence
  Description of Artificial Sequence: Synthetic oligonucleotide
aaacaucggccuuccuucc

SEQ ID NO: 1629593 - RNA, 19 nt, Artificial Sequence
  Description of Artificial Sequence: Synthetic oligonucleotide
ucuuauccacacaagggga

SEQ ID NO: 1629594 - RNA, 19 nt, Artificial Sequence
  Description of Artificial Sequence: Synthetic oligonucleotide
ucaugcucaauguaggcgu

SEQ ID NO: 1629595 - RNA, 19 nt, Artificial Sequence
  Description of Artificial Sequence: Synthetic oligonucleotide
uguuaggacacugaaguac

SEQ ID NO: 1629596 - RNA, 19 nt, Artificial Sequence
  Description of Artificial Sequence: Synthetic oligonucleotide
ggugccaugagccuuacag

SEQ ID NO: 1629597 - RNA, 19 nt, Artificial Sequence
  Description of Artificial Sequence: Synthetic oligonucleotide
aucguuacacauuucccag

SEQ ID NO: 1629598 - RNA, 19 nt, Artificial Sequence
  Description of Artificial Sequence: Synthetic oligonucleotide
caugaaggaguaaguaagg

SEQ ID NO: 1629599 - RNA, 19 nt, Artificial Sequence
  Description of Artificial Sequence: Synthetic oligonucleotide
guaaguaaggcauuuccca

SEQ ID NO: 1629600 - RNA, 19 nt, Artificial Sequence
  Description of Artificial Sequence: Synthetic oligonucleotide
cuuuaaacuccacauagca

SEQ ID NO: 1629601 - RNA, 19 nt, Artificial Sequence
  Description of Artificial Sequence: Synthetic oligonucleotide
uucauuacugccugugaug

SEQ ID NO: 1629602 - RNA, 19 nt, Artificial Sequence
  Description of Artificial Sequence: Synthetic oligonucleotide
aucuuaggagccucggugg

SEQ ID NO: 1629603 - RNA, 19 nt, Artificial Sequence
  Description of Artificial Sequence: Synthetic oligonucleotide
ucauuacugccugugaugc

SEQ ID NO: 1629604 - RNA, 19 nt, Artificial Sequence
  Description of Artificial Sequence: Synthetic oligonucleotide
cuuacagauguccucgagc

SEQ ID NO: 1629605 - RNA, 19 nt, Artificial Sequence
  Description of Artificial Sequence: Synthetic oligonucleotide
cuaucguuacacauuuccc

SEQ ID NO: 1629606 - RNA, 19 nt, Artificial Sequence
  Description of Artificial Sequence: Synthetic oligonucleotide
agaugaagaguuuauguuu

SEQ ID NO: 1629607 - RNA, 19 nt, Artificial Sequence
  Description of Artificial Sequence: Synthetic oligonucleotide
augccugggacucauuuuc

SEQ ID NO: 1629608 - RNA, 19 nt, Artificial Sequence
  Description of Artificial Sequence: Synthetic oligonucleotide
gacgucaugcucaauguag

SEQ ID NO: 1629609 - RNA, 19 nt, Artificial Sequence
  Description of Artificial Sequence: Synthetic oligonucleotide
cugaacaccuugaaaucgg

SEQ ID NO: 1629610 - RNA, 19 nt, Artificial Sequence
  Description of Artificial Sequence: Synthetic oligonucleotide
uuuggaaggcugcucuucc

SEQ ID NO: 1629611 - RNA, 19 nt, Artificial Sequence
  Description of Artificial Sequence: Synthetic oligonucleotide
augagccuuacagaugucc

SEQ ID NO: 1629612 - RNA, 19 nt, Artificial Sequence
  Description of Artificial Sequence: Synthetic oligonucleotide
cuuguuaggacacugaagu

SEQ ID NO: 1629613 - RNA, 19 nt, Artificial Sequence
  Description of Artificial Sequence: Synthetic oligonucleotide
caaacaucggccuuccuuc

SEQ ID NO: 1629614 - RNA, 19 nt, Artificial Sequence
  Description of Artificial Sequence: Synthetic oligonucleotide
cucuucugcguuuggaagg

SEQ ID NO: 1629615 - RNA, 19 nt, Artificial Sequence
  Description of Artificial Sequence: Synthetic oligonucleotide
cugaaguccacuccagagg

SEQ ID NO: 1629616 - RNA, 19 nt, Artificial Sequence
  Description of Artificial Sequence: Synthetic oligonucleotide
ugucaugugccaccuuggg

SEQ ID NO: 1629617 - RNA, 19 nt, Artificial Sequence
  Description of Artificial Sequence: Synthetic oligonucleotide
cuugggacggccugaaagc

SEQ ID NO: 1629618 - RNA, 19 nt, Artificial Sequence
  Description of Artificial Sequence: Synthetic oligonucleotide
aguaaggcauuucccaucu

SEQ ID NO: 1629619 - RNA, 19 nt, Artificial Sequence
  Description of Artificial Sequence: Synthetic oligonucleotide
aucuuuacugcugucaugu

SEQ ID NO: 1629620 - RNA, 19 nt, Artificial Sequence
  Description of Artificial Sequence: Synthetic oligonucleotide
caauaugagggaacacucc

SEQ ID NO: 1629621 - RNA, 19 nt, Artificial Sequence
  Description of Artificial Sequence: Synthetic oligonucleotide
ugagcuucgccucuggcuc

SEQ ID NO: 1629622 - RNA, 19 nt, Artificial Sequence
  Description of Artificial Sequence: Synthetic oligonucleotide
caugcuguagggcaaguug

SEQ ID NO: 1629623 - RNA, 19 nt, Artificial Sequence
  Description of Artificial Sequence: Synthetic oligonucleotide
ucaauguaggcguuucuuc

SEQ ID NO: 1629624 - RNA, 19 nt, Artificial Sequence
  Description of Artificial Sequence: Synthetic oligonucleotide
agcauuggacaucuuagga

SEQ ID NO: 1629625 - RNA, 19 nt, Artificial Sequence
  Description of Artificial Sequence: Synthetic oligonucleotide
aguggcuccuuguuaggac

SEQ ID NO: 1629626 - RNA, 19 nt, Artificial Sequence
  Description of Artificial Sequence: Synthetic oligonucleotide
caucuuaggagccucggug

SEQ ID NO: 1629627 - RNA, 19 nt, Artificial Sequence
  Description of Artificial Sequence: Synthetic oligonucleotide
ugagggaacacuccucgac

SEQ ID NO: 1629628 - RNA, 19 nt, Artificial Sequence
  Description of Artificial Sequence: Synthetic oligonucleotide
agcaugaaggaguaaguaa

SEQ ID NO: 1629629 - RNA, 19 nt, Artificial Sequence
  Description of Artificial Sequence: Synthetic oligonucleotide
agcaacuucgcaaaaucag

SEQ ID NO: 1629630 - RNA, 19 nt, Artificial Sequence
  Description of Artificial Sequence: Synthetic oligonucleotide
ucugcguuuggaaggcugc

SEQ ID NO: 1629631 - RNA, 19 nt, Artificial Sequence
  Description of Artificial Sequence: Synthetic oligonucleotide
ugagccuuacagauguccu

SEQ ID NO: 1629632 - RNA, 19 nt, Artificial Sequence
  Description of Artificial Sequence: Synthetic oligonucleotide
cucgacgucaugcucaaug

SEQ ID NO: 1629633 - RNA, 19 nt, Artificial Sequence
  Description of Artificial Sequence: Synthetic oligonucleotide
uaaguaaggcauuucccau

SEQ ID NO: 1629634 - RNA, 19 nt, Artificial Sequence
  Description of Artificial Sequence: Synthetic oligonucleotide
acggccugaaagcagucgg

SEQ ID NO: 1629635 - RNA, 19 nt, Artificial Sequence
  Description of Artificial Sequence: Synthetic oligonucleotide
acaaggggaaacaaacauc

SEQ ID NO: 1629636 - RNA, 19 nt, Artificial Sequence
  Description of Artificial Sequence: Synthetic oligonucleotide
uucgcaaaaucagcauugg

SEQ ID NO: 1629637 - RNA, 19 nt, Artificial Sequence
  Description of Artificial Sequence: Synthetic oligonucleotide
uucucagaagcaacuucgc

SEQ ID NO: 1629638 - RNA, 19 nt, Artificial Sequence
  Description of Artificial Sequence: Synthetic oligonucleotide
acaaacaucggccuuccuu

SEQ ID NO: 1629639 - RNA, 19 nt, Artificial Sequence
  Description of Artificial Sequence: Synthetic oligonucleotide
ugccaugagccuuacagau

SEQ ID NO: 1629640 - RNA, 19 nt, Artificial Sequence
  Description of Artificial Sequence: Synthetic oligonucleotide
gugacacuaucuuuacugc

SEQ ID NO: 1629641 - RNA, 19 nt, Artificial Sequence
  Description of Artificial Sequence: Synthetic oligonucleotide
agccuuacagauguccucg

SEQ ID NO: 1629642 - RNA, 19 nt, Artificial Sequence
  Description of Artificial Sequence: Synthetic oligonucleotide
uggaaggagaagcaacauc

SEQ ID NO: 1629643 - RNA, 19 nt, Artificial Sequence
  Description of Artificial Sequence: Synthetic oligonucleotide
auaucugaacaccuugaaa

SEQ ID NO: 1629644 - RNA, 19 nt, Artificial Sequence
  Description of Artificial Sequence: Synthetic oligonucleotide
ugacacuaucuuuacugcu

SEQ ID NO: 1629645 - RNA, 19 nt, Artificial Sequence
  Description of Artificial Sequence: Synthetic oligonucleotide
auuggacaucuuaggagcc

SEQ ID NO: 1629646 - RNA, 19 nt, Artificial Sequence
  Description of Artificial Sequence: Synthetic oligonucleotide
uccuuguuaggacacugaa

SEQ ID NO: 1629647 - RNA, 19 nt, Artificial Sequence
  Description of Artificial Sequence: Synthetic oligonucleotide
gcugauugccacuuuaaug

SEQ ID NO: 1629648 - RNA, 19 nt, Artificial Sequence
  Description of Artificial Sequence: Synthetic oligonucleotide
ggugcuauaucugaacacc

SEQ ID NO: 1629649 - RNA, 19 nt, Artificial Sequence
  Description of Artificial Sequence: Synthetic oligonucleotide
ggaacuuuccgcugagggg

SEQ ID NO: 1629650 - RNA, 19 nt, Artificial Sequence
  Description of Artificial Sequence: Synthetic oligonucleotide
uucugcguuuggaaggcug

SEQ ID NO: 1629651 - RNA, 19 nt, Artificial Sequence
  Description of Artificial Sequence: Synthetic oligonucleotide
cacggcagggccauucucg

SEQ ID NO: 1629652 - RNA, 19 nt, Artificial Sequence
  Description of Artificial Sequence: Synthetic oligonucleotide
aguaccuugggacggccug

SEQ ID NO: 1629653 - RNA, 19 nt, Artificial Sequence
  Description of Artificial Sequence: Synthetic oligonucleotide
uaucuuuacugcugucaug

SEQ ID NO: 1629654 - RNA, 19 nt, Artificial Sequence
  Description of Artificial Sequence: Synthetic oligonucleotide
uguagggcaaguugcugac

SEQ ID NO: 1629655 - RNA, 19 nt, Artificial Sequence
  Description of Artificial Sequence: Synthetic oligonucleotide
gcuauaucugaacaccuug

SEQ ID NO: 1629656 - RNA, 19 nt, Artificial Sequence
  Description of Artificial Sequence: Synthetic oligonucleotide
ggcucauccaugcuguagg

SEQ ID NO: 1629657 - RNA, 19 nt, Artificial Sequence
  Description of Artificial Sequence: Synthetic oligonucleotide
augccguccaucuucauua

SEQ ID NO: 1629658 - RNA, 19 nt, Artificial Sequence
  Description of Artificial Sequence: Synthetic oligonucleotide
cucagaagcaacuucgcaa

SEQ ID NO: 1629659 - RNA, 19 nt, Artificial Sequence
  Description of Artificial Sequence: Synthetic oligonucleotide
uggugcuauaucugaacac

SEQ ID NO: 1629660 - RNA, 19 nt, Artificial Sequence
  Description of Artificial Sequence: Synthetic oligonucleotide
guaucaggacaaaugggcc

SEQ ID NO: 1629661 - RNA, 19 nt, Artificial Sequence
  Description of Artificial Sequence: Synthetic oligonucleotide
aucagcauuggacaucuua

SEQ ID NO: 1629662 - RNA, 19 nt, Artificial Sequence
  Description of Artificial Sequence: Synthetic oligonucleotide
aaguccacuccagaggcca

SEQ ID NO: 1629663 - RNA, 19 nt, Artificial Sequence
  Description of Artificial Sequence: Synthetic oligonucleotide
aagugacacuaucuuuacu

SEQ ID NO: 1629664 - RNA, 19 nt, Artificial Sequence
  Description of Artificial Sequence: Synthetic oligonucleotide
guuggugacgagccugagg

SEQ ID NO: 1629665 - RNA, 19 nt, Artificial Sequence
  Description of Artificial Sequence: Synthetic oligonucleotide
ucgacgucaugcucaaugu

SEQ ID NO: 1629666 - RNA, 19 nt, Artificial Sequence
  Description of Artificial Sequence: Synthetic oligonucleotide
aaaagggccagagguggug

SEQ ID NO: 1629667 - RNA, 19 nt, Artificial Sequence
  Description of Artificial Sequence: Synthetic oligonucleotide
uauuccacauaggccaggc

SEQ ID NO: 1629668 - RNA, 19 nt, Artificial Sequence
  Description of Artificial Sequence: Synthetic oligonucleotide
agcaacaucuaucguuaca

SEQ ID NO: 1629669 - RNA, 19 nt, Artificial Sequence
  Description of Artificial Sequence: Synthetic oligonucleotide
cugaaguaccuugggacgg

SEQ ID NO: 1629670 - RNA, 19 nt, Artificial Sequence
  Description of Artificial Sequence: Synthetic oligonucleotide
ugaaaguaucaggacaaau

SEQ ID NO: 1629671 - RNA, 19 nt, Artificial Sequence
  Description of Artificial Sequence: Synthetic oligonucleotide
uugcucuuauccacacaag

SEQ ID NO: 1629672 - RNA, 19 nt, Artificial Sequence
  Description of Artificial Sequence: Synthetic oligonucleotide
caagugacacuaucuuuac

SEQ ID NO: 1629673 - RNA, 19 nt, Artificial Sequence
  Description of Artificial Sequence: Synthetic oligonucleotide
ucuucugcguuuggaaggc

SEQ ID NO: 1629674 - RNA, 19 nt, Artificial Sequence
  Description of Artificial Sequence: Synthetic oligonucleotide
ggcauuucccaucucucgg

SEQ ID NO: 1629675 - RNA, 19 nt, Artificial Sequence
  Description of Artificial Sequence: Synthetic oligonucleotide
cgcaaaaucagcauuggac

SEQ ID NO: 1629676 - RNA, 19 nt, Artificial Sequence
  Description of Artificial Sequence: Synthetic oligonucleotide
ugauugccacuuuaaugac

SEQ ID NO: 1629677 - RNA, 19 nt, Artificial Sequence
  Description of Artificial Sequence: Synthetic oligonucleotide
gacaucuuaggagccucgg

SEQ ID NO: 1629678 - RNA, 19 nt, Artificial Sequence
  Description of Artificial Sequence: Synthetic oligonucleotide
gcugaaguccacuccagag

SEQ ID NO: 1629679 - RNA, 19 nt, Artificial Sequence
  Description of Artificial Sequence: Synthetic oligonucleotide
ucgcaaaaucagcauugga

SEQ ID NO: 1629680 - RNA, 19 nt, Artificial Sequence
  Description of Artificial Sequence: Synthetic oligonucleotide
gguggugaaaguaucagga

SEQ ID NO: 1629681 - RNA, 19 nt, Artificial Sequence
  Description of Artificial Sequence: Synthetic oligonucleotide
ugcugauugccacuuuaau

SEQ ID NO: 1629682 - RNA, 19 nt, Artificial Sequence
  Description of Artificial Sequence: Synthetic oligonucleotide
gagaugaagaguuuauguu

SEQ ID NO: 1629683 - RNA, 19 nt, Artificial Sequence
  Description of Artificial Sequence: Synthetic oligonucleotide
gcaacaucuaucguuacac

SEQ ID NO: 1629684 - RNA, 19 nt, Artificial Sequence
  Description of Artificial Sequence: Synthetic oligonucleotide
acgucaugcucaauguagg

SEQ ID NO: 1629685 - RNA, 19 nt, Artificial Sequence
  Description of Artificial Sequence: Synthetic oligonucleotide
ugcuauaucugaacaccuu

SEQ ID NO: 1629686 - RNA, 19 nt, Artificial Sequence
  Description of Artificial Sequence: Synthetic oligonucleotide
agcccgaggaagaagagca

SEQ ID NO: 1629687 - RNA, 19 nt, Artificial Sequence
  Description of Artificial Sequence: Synthetic oligonucleotide
augaagaguuuauguuucu

SEQ ID NO: 1629688 - RNA, 19 nt, Artificial Sequence
  Description of Artificial Sequence: Synthetic oligonucleotide
guggugaaaguaucaggac

SEQ ID NO: 1629689 - RNA, 19 nt, Artificial Sequence
  Description of Artificial Sequence: Synthetic oligonucleotide
aacaucggccuuccuucca

SEQ ID NO: 1629690 - RNA, 19 nt, Artificial Sequence
  Description of Artificial Sequence: Synthetic oligonucleotide
ugggacggccugaaagcag

SEQ ID NO: 1629691 - RNA, 19 nt, Artificial Sequence
  Description of Artificial Sequence: Synthetic oligonucleotide
cugucuacaucagaggaca

SEQ ID NO: 1629692 - RNA, 19 nt, Artificial Sequence
  Description of Artificial Sequence: Synthetic oligonucleotide
auguaggcguuucuuccug

SEQ ID NO: 1629693 - RNA, 19 nt, Artificial Sequence
  Description of Artificial Sequence: Synthetic oligonucleotide
cauucucggccugaggagc

SEQ ID NO: 1629694 - RNA, 19 nt, Artificial Sequence
  Description of Artificial Sequence: Synthetic oligonucleotide
agggaacacuccucgacgu

SEQ ID NO: 1629695 - RNA, 19 nt, Artificial Sequence
  Description of Artificial Sequence: Synthetic oligonucleotide
ggaaggagaagcaacaucu

SEQ ID NO: 1629696 - RNA, 19 nt, Artificial Sequence
  Description of Artificial Sequence: Synthetic oligonucleotide
ugaagaccggccugaucug

SEQ ID NO: 1629697 - RNA, 19 nt, Artificial Sequence
  Description of Artificial Sequence: Synthetic oligonucleotide
acggcagggccauucucgg

SEQ ID NO: 1629698 - RNA, 19 nt, Artificial Sequence
  Description of Artificial Sequence: Synthetic oligonucleotide
uucacggugccaugagccu

SEQ ID NO: 1629699 - RNA, 19 nt, Artificial Sequence
  Description of Artificial Sequence: Synthetic oligonucleotide
acaucuuaggagccucggu

SEQ ID NO: 1629700 - RNA, 19 nt, Artificial Sequence
  Description of Artificial Sequence: Synthetic oligonucleotide
ucuuuacugcugucaugug

SEQ ID NO: 1629701 - RNA, 19 nt, Artificial Sequence
  Description of Artificial Sequence: Synthetic oligonucleotide
ucccagagaguuccguuuc

SEQ ID NO: 1629702 - RNA, 19 nt, Artificial Sequence
  Description of Artificial Sequence: Synthetic oligonucleotide
cuuccggcuucucuggaac

SEQ ID NO: 1629703 - RNA, 19 nt, Artificial Sequence
  Description of Artificial Sequence: Synthetic oligonucleotide
cuguagggcaaguugcuga

SEQ ID NO: 1629704 - RNA, 19 nt, Artificial Sequence
  Description of Artificial Sequence: Synthetic oligonucleotide
accggccugaucuggacca

SEQ ID NO: 1629705 - RNA, 19 nt, Artificial Sequence
  Description of Artificial Sequence: Synthetic oligonucleotide
uauccacacaaggggaaac

SEQ ID NO: 1629706 - RNA, 19 nt, Artificial Sequence
  Description of Artificial Sequence: Synthetic oligonucleotide
gccagcaugaaggaguaag

SEQ ID NO: 1629707 - RNA, 19 nt, Artificial Sequence
  Description of Artificial Sequence: Synthetic oligonucleotide
agaccggccugaucuggac

SEQ ID NO: 1629708 - RNA, 19 nt, Artificial Sequence
  Description of Artificial Sequence: Synthetic oligonucleotide
cacuuuaaugacauucucu

SEQ ID NO: 1629709 - RNA, 19 nt, Artificial Sequence
  Description of Artificial Sequence: Synthetic oligonucleotide
ggugacgagccugaggucc

SEQ ID NO: 1629710 - RNA, 19 nt, Artificial Sequence
  Description of Artificial Sequence: Synthetic oligonucleotide
ugaaguaccuugggacggc

SEQ ID NO: 1629711 - RNA, 19 nt, Artificial Sequence
  Description of Artificial Sequence: Synthetic oligonucleotide
aagaguggccugagcuucg

SEQ ID NO: 1629712 - RNA, 19 nt, Artificial Sequence
  Description of Artificial Sequence: Synthetic oligonucleotide
uauguuucuccaggguggu

SEQ ID NO: 1629713 - RNA, 19 nt, Artificial Sequence
  Description of Artificial Sequence: Synthetic oligonucleotide
cauuacugccugugaugcc

SEQ ID NO: 1629714 - RNA, 19 nt, Artificial Sequence
  Description of Artificial Sequence: Synthetic oligonucleotide
uuucccagagaguuccguu

SEQ ID NO: 1629715 - RNA, 19 nt, Artificial Sequence
  Description of Artificial Sequence: Synthetic oligonucleotide
cucaauaugagggaacacu

SEQ ID NO: 1629716 - RNA, 19 nt, Artificial Sequence
  Description of Artificial Sequence: Synthetic oligonucleotide
gcaacuucgcaaaaucagc

SEQ ID NO: 1629717 - RNA, 19 nt, Artificial Sequence
  Description of Artificial Sequence: Synthetic oligonucleotide
agaagcaacuucgcaaaau

SEQ ID NO: 1629718 - RNA, 19 nt, Artificial Sequence
  Description of Artificial Sequence: Synthetic oligonucleotide
uucccagagaguuccguuu

SEQ ID NO: 1629719 - RNA, 19 nt, Artificial Sequence
  Description of Artificial Sequence: Synthetic oligonucleotide
gagccuuacagauguccuc

SEQ ID NO: 1629720 - RNA, 19 nt, Artificial Sequence
  Description of Artificial Sequence: Synthetic oligonucleotide
gagguggugacagccggcc

SEQ ID NO: 1629721 - RNA, 19 nt, Artificial Sequence
  Description of Artificial Sequence: Synthetic oligonucleotide
gguggugcuauaucugaac

SEQ ID NO: 1629722 - RNA, 19 nt, Artificial Sequence
  Description of Artificial Sequence: Synthetic oligonucleotide
ggugaaaguaucaggacaa

SEQ ID NO: 1629723 - RNA, 19 nt, Artificial Sequence
  Description of Artificial Sequence: Synthetic oligonucleotide
agacuguucuccacucuuc

SEQ ID NO: 1629724 - RNA, 19 nt, Artificial Sequence
  Description of Artificial Sequence: Synthetic oligonucleotide
acaucuaucguuacacauu

SEQ ID NO: 1629725 - RNA, 19 nt, Artificial Sequence
  Description of Artificial Sequence: Synthetic oligonucleotide
aguagccucggaagucccc

SEQ ID NO: 1629726 - RNA, 19 nt, Artificial Sequence
  Description of Artificial Sequence: Synthetic oligonucleotide
uguaggcguuucuuccugu

SEQ ID NO: 1629727 - RNA, 19 nt, Artificial Sequence
  Description of Artificial Sequence: Synthetic oligonucleotide
uggcucauccaugcuguag

SEQ ID NO: 1629728 - RNA, 19 nt, Artificial Sequence
  Description of Artificial Sequence: Synthetic oligonucleotide
uugagugcccagcccuugu

SEQ ID NO: 1629729 - RNA, 19 nt, Artificial Sequence
  Description of Artificial Sequence: Synthetic oligonucleotide
guuuauguuucuccagggu

SEQ ID NO: 1629730 - RNA, 19 nt, Artificial Sequence
  Description of Artificial Sequence: Synthetic oligonucleotide
aacacuccucgacgucaug

SEQ ID NO: 1629731 - RNA, 19 nt, Artificial Sequence
  Description of Artificial Sequence: Synthetic oligonucleotide
uugggacggccugaaagca

SEQ ID NO: 1629732 - RNA, 19 nt, Artificial Sequence
  Description of Artificial Sequence: Synthetic oligonucleotide
cugggacucauuuucauau

SEQ ID NO: 1629733 - RNA, 19 nt, Artificial Sequence
  Description of Artificial Sequence: Synthetic oligonucleotide
ggacacugaaguaccuugg

SEQ ID NO: 1629734 - RNA, 19 nt, Artificial Sequence
  Description of Artificial Sequence: Synthetic oligonucleotide
agacagguugagugcccag

SEQ ID NO: 1629735 - RNA, 19 nt, Artificial Sequence
  Description of Artificial Sequence: Synthetic oligonucleotide
cuccucgacgucaugcuca

SEQ ID NO: 1629736 - RNA, 19 nt, Artificial Sequence
  Description of Artificial Sequence: Synthetic oligonucleotide
cuuaggagccucgguggcc

SEQ ID NO: 1629737 - RNA, 19 nt, Artificial Sequence
  Description of Artificial Sequence: Synthetic oligonucleotide
ggacaaaugggccccaaaa

SEQ ID NO: 1629738 - RNA, 19 nt, Artificial Sequence
  Description of Artificial Sequence: Synthetic oligonucleotide
ggccccaaaagccgagugg

SEQ ID NO: 1629739 - RNA, 19 nt, Artificial Sequence
  Description of Artificial Sequence: Synthetic oligonucleotide
aggcguuucuuccugucua

SEQ ID NO: 1629740 - RNA, 19 nt, Artificial Sequence
  Description of Artificial Sequence: Synthetic oligonucleotide
ggcuugccagcccuguugg

SEQ ID NO: 1629741 - RNA, 19 nt, Artificial Sequence
  Description of Artificial Sequence: Synthetic oligonucleotide
uggacaucuuaggagccuc

SEQ ID NO: 1629742 - RNA, 19 nt, Artificial Sequence
  Description of Artificial Sequence: Synthetic oligonucleotide
ugucuacaucagaggacaa

SEQ ID NO: 1629743 - RNA, 19 nt, Artificial Sequence
  Description of Artificial Sequence: Synthetic oligonucleotide
gaccggccugaucuggacc

SEQ ID NO: 1629744 - RNA, 19 nt, Artificial Sequence
  Description of Artificial Sequence: Synthetic oligonucleotide
ugcuuggaaggagaagcaa

SEQ ID NO: 1629745 - RNA, 19 nt, Artificial Sequence
  Description of Artificial Sequence: Synthetic oligonucleotide
agaguggccugagcuucgc

SEQ ID NO: 1629746 - RNA, 19 nt, Artificial Sequence
  Description of Artificial Sequence: Synthetic oligonucleotide
caacaucuaucguuacaca

SEQ ID NO: 1629747 - RNA, 19 nt, Artificial Sequence
  Description of Artificial Sequence: Synthetic oligonucleotide
uucuccaggguggugcuau

SEQ ID NO: 1629748 - RNA, 19 nt, Artificial Sequence
  Description of Artificial Sequence: Synthetic oligonucleotide
gaaguaccuugggacggcc

SEQ ID NO: 1629749 - RNA, 19 nt, Artificial Sequence
  Description of Artificial Sequence: Synthetic oligonucleotide
cagguugagugcccagccc

SEQ ID NO: 1629750 - RNA, 19 nt, Artificial Sequence
  Description of Artificial Sequence: Synthetic oligonucleotide
ucuggaccaccuccccaca

SEQ ID NO: 1629751 - RNA, 19 nt, Artificial Sequence
  Description of Artificial Sequence: Synthetic oligonucleotide
aaggaguaaguaaggcauu

SEQ ID NO: 1629752 - RNA, 19 nt, Artificial Sequence
  Description of Artificial Sequence: Synthetic oligonucleotide
gugccaugagccuuacaga

SEQ ID NO: 1629753 - RNA, 19 nt, Artificial Sequence
  Description of Artificial Sequence: Synthetic oligonucleotide
ccgaguggcuccuuguuag

SEQ ID NO: 1629754 - RNA, 19 nt, Artificial Sequence
  Description of Artificial Sequence: Synthetic oligonucleotide
auccacacaaggggaaaca

SEQ ID NO: 1629755 - RNA, 19 nt, Artificial Sequence
  Description of Artificial Sequence: Synthetic oligonucleotide
guuuggaaggcugcucuuc

SEQ ID NO: 1629756 - RNA, 19 nt, Artificial Sequence
  Description of Artificial Sequence: Synthetic oligonucleotide
ccugucuacaucagaggac

SEQ ID NO: 1629757 - RNA, 19 nt, Artificial Sequence
  Description of Artificial Sequence: Synthetic oligonucleotide
gcgccauacaucugccugg

SEQ ID NO: 1629758 - RNA, 19 nt, Artificial Sequence
  Description of Artificial Sequence: Synthetic oligonucleotide
guaggcguuucuuccuguc

SEQ ID NO: 1629759 - RNA, 19 nt, Artificial Sequence
  Description of Artificial Sequence: Synthetic oligonucleotide
ucuucgccccacucucucu

SEQ ID NO: 1629760 - RNA, 19 nt, Artificial Sequence
  Description of Artificial Sequence: Synthetic oligonucleotide
ucauccgccuugcguuugu

SEQ ID NO: 1629761 - RNA, 19 nt, Artificial Sequence
  Description of Artificial Sequence: Synthetic oligonucleotide
cuucgccccacucucucuc

SEQ ID NO: 1629762 - RNA, 19 nt, Artificial Sequence
  Description of Artificial Sequence: Synthetic oligonucleotide
caucuaucguuacacauuu

SEQ ID NO: 1629763 - RNA, 19 nt, Artificial Sequence
  Description of Artificial Sequence: Synthetic oligonucleotide
uuccggcuucucuggaacu

SEQ ID NO: 1629764 - RNA, 19 nt, Artificial Sequence
  Description of Artificial Sequence: Synthetic oligonucleotide
acaaucugugggagacagg

SEQ ID NO: 1629765 - RNA, 19 nt, Artificial Sequence
  Description of Artificial Sequence: Synthetic oligonucleotide
aggacaaaugggccccaaa

SEQ ID NO: 1629766 - RNA, 19 nt, Artificial Sequence
  Description of Artificial Sequence: Synthetic oligonucleotide
ugggacucauuuucauauu

SEQ ID NO: 1629767 - RNA, 19 nt, Artificial Sequence
  Description of Artificial Sequence: Synthetic oligonucleotide
uccucgacgucaugcucaa

SEQ ID NO: 1629768 - RNA, 19 nt, Artificial Sequence
  Description of Artificial Sequence: Synthetic oligonucleotide
gaccaccuccccacaaggc

SEQ ID NO: 1629769 - RNA, 19 nt, Artificial Sequence
  Description of Artificial Sequence: Synthetic oligonucleotide
uacugcugucaugugccac

SEQ ID NO: 1629770 - RNA, 19 nt, Artificial Sequence
  Description of Artificial Sequence: Synthetic oligonucleotide
cuccuuguuaggacacuga

SEQ ID NO: 1629771 - RNA, 19 nt, Artificial Sequence
  Description of Artificial Sequence: Synthetic oligonucleotide
acgagccugagguccuuca

SEQ ID NO: 1629772 - RNA, 19 nt, Artificial Sequence
  Description of Artificial Sequence: Synthetic oligonucleotide
aagaccggccugaucugga

SEQ ID NO: 1629773 - RNA, 19 nt, Artificial Sequence
  Description of Artificial Sequence: Synthetic oligonucleotide
ucccgcgcgcgccauacau

SEQ ID NO: 1629774 - RNA, 19 nt, Artificial Sequence
  Description of Artificial Sequence: Synthetic oligonucleotide
aggccucaaagaguggccu

SEQ ID NO: 1629775 - RNA, 19 nt, Artificial Sequence
  Description of Artificial Sequence: Synthetic oligonucleotide
gccccaaaagccgaguggc

SEQ ID NO: 1629776 - RNA, 19 nt, Artificial Sequence
  Description of Artificial Sequence: Synthetic oligonucleotide
gccucggaaguccccacgg

SEQ ID NO: 1629777 - RNA, 19 nt, Artificial Sequence
  Description of Artificial Sequence: Synthetic oligonucleotide
auccaugcuguagggcaag

SEQ ID NO: 1629778 - RNA, 19 nt, Artificial Sequence
  Description of Artificial Sequence: Synthetic oligonucleotide
aucuaucguuacacauuuc

SEQ ID NO: 1629779 - RNA, 19 nt, Artificial Sequence
  Description of Artificial Sequence: Synthetic oligonucleotide
ugcguuuggaaggcugcuc

SEQ ID NO: 1629780 - RNA, 19 nt, Artificial Sequence
  Description of Artificial Sequence: Synthetic oligonucleotide
gagacagguugagugccca

SEQ ID NO: 1629781 - RNA, 19 nt, Artificial Sequence
  Description of Artificial Sequence: Synthetic oligonucleotide
gaguggcuccuuguuagga

SEQ ID NO: 1629782 - RNA, 19 nt, Artificial Sequence
  Description of Artificial Sequence: Synthetic oligonucleotide
uucccuucccgcgcgcgcc

SEQ ID NO: 1629783 - RNA, 19 nt, Artificial Sequence
  Description of Artificial Sequence: Synthetic oligonucleotide
ucuccacucuucugcguuu

SEQ ID NO: 1629784 - RNA, 19 nt, Artificial Sequence
  Description of Artificial Sequence: Synthetic oligonucleotide
ggaacacuccucgacguca

SEQ ID NO: 1629785 - RNA, 19 nt, Artificial Sequence
  Description of Artificial Sequence: Synthetic oligonucleotide
guagccucggaagucccca

SEQ ID NO: 1629786 - RNA, 19 nt, Artificial Sequence
  Description of Artificial Sequence: Synthetic oligonucleotide
ccauucucggccugaggag

SEQ ID NO: 1629787 - RNA, 19 nt, Artificial Sequence
  Description of Artificial Sequence: Synthetic oligonucleotide
cucuucgccccacucucuc

SEQ ID NO: 1629788 - RNA, 19 nt, Artificial Sequence
  Description of Artificial Sequence: Synthetic oligonucleotide
ugcgcugacuucuccucuu

SEQ ID NO: 1629789 - RNA, 19 nt, Artificial Sequence
  Description of Artificial Sequence: Synthetic oligonucleotide
guugagugcccagcccuug

SEQ ID NO: 1629790 - RNA, 19 nt, Artificial Sequence
  Description of Artificial Sequence: Synthetic oligonucleotide
gccgcaguggcaugccggg

SEQ ID NO: 1629791 - RNA, 19 nt, Artificial Sequence
  Description of Artificial Sequence: Synthetic oligonucleotide
ggacaucuuaggagccucg

SEQ ID NO: 1629792 - RNA, 19 nt, Artificial Sequence
  Description of Artificial Sequence: Synthetic oligonucleotide
gacagccggccccacggca

SEQ ID NO: 1629793 - RNA, 19 nt, Artificial Sequence
  Description of Artificial Sequence: Synthetic oligonucleotide
ggugacagccggccccacg

SEQ ID NO: 1629794 - RNA, 19 nt, Artificial Sequence
  Description of Artificial Sequence: Synthetic oligonucleotide
cuccucuuuggugcaggag

SEQ ID NO: 1629795 - RNA, 19 nt, Artificial Sequence
  Description of Artificial Sequence: Synthetic oligonucleotide
aaucugugggagacagguu

SEQ ID NO: 1629796 - RNA, 19 nt, Artificial Sequence
  Description of Artificial Sequence: Synthetic oligonucleotide
aaggccugcugcgcugacu

SEQ ID NO: 1629797 - RNA, 19 nt, Artificial Sequence
  Description of Artificial Sequence: Synthetic oligonucleotide
gaugccugggacucauuuu

SEQ ID NO: 1629798 - RNA, 19 nt, Artificial Sequence
  Description of Artificial Sequence: Synthetic oligonucleotide
agggccgcaguggcaugcc

SEQ ID NO: 1629799 - RNA, 19 nt, Artificial Sequence
  Description of Artificial Sequence: Synthetic oligonucleotide
gcauuucccaucucucgga

SEQ ID NO: 1629800 - RNA, 19 nt, Artificial Sequence
  Description of Artificial Sequence: Synthetic oligonucleotide
ggcguuucuuccugucuac

SEQ ID NO: 1629801 - RNA, 19 nt, Artificial Sequence
  Description of Artificial Sequence: Synthetic oligonucleotide
auucucggccugaggagca

SEQ ID NO: 1629802 - RNA, 19 nt, Artificial Sequence
  Description of Artificial Sequence: Synthetic oligonucleotide
acuccagaggccagacugu

SEQ ID NO: 1629803 - RNA, 19 nt, Artificial Sequence
  Description of Artificial Sequence: Synthetic oligonucleotide
acagccggccccacggcag

SEQ ID NO: 1629804 - RNA, 19 nt, Artificial Sequence
  Description of Artificial Sequence: Synthetic oligonucleotide
gcgcgcgccauacaucugc

SEQ ID NO: 1629805 - RNA, 19 nt, Artificial Sequence
  Description of Artificial Sequence: Synthetic oligonucleotide
cugcauggcugaaguccac

SEQ ID NO: 1629806 - RNA, 19 nt, Artificial Sequence
  Description of Artificial Sequence: Synthetic oligonucleotide
uagccucggaaguccccac

SEQ ID NO: 1629807 - RNA, 19 nt, Artificial Sequence
  Description of Artificial Sequence: Synthetic oligonucleotide
ugaaagcagucggccucca

SEQ ID NO: 1629808 - RNA, 19 nt, Artificial Sequence
  Description of Artificial Sequence: Synthetic oligonucleotide
uggugacgagccugagguc

SEQ ID NO: 1629809 - RNA, 19 nt, Artificial Sequence
  Description of Artificial Sequence: Synthetic oligonucleotide
caaagaguggccugagcuu

SEQ ID NO: 1629810 - RNA, 19 nt, Artificial Sequence
  Description of Artificial Sequence: Synthetic oligonucleotide
cuucccgcgcgcgccauac

SEQ ID NO: 1629811 - RNA, 19 nt, Artificial Sequence
  Description of Artificial Sequence: Synthetic oligonucleotide
ggcccuucggcuugccagc

SEQ ID NO: 1629812 - RNA, 19 nt, Artificial Sequence
  Description of Artificial Sequence: Synthetic oligonucleotide
agccgaguggcuccuuguu

SEQ ID NO: 1629813 - RNA, 19 nt, Artificial Sequence
  Description of Artificial Sequence: Synthetic oligonucleotide
gagcuucgccucuggcuca

SEQ ID NO: 1629814 - RNA, 19 nt, Artificial Sequence
  Description of Artificial Sequence: Synthetic oligonucleotide
ggccucaaagaguggccug

SEQ ID NO: 1629815 - RNA, 19 nt, Artificial Sequence
  Description of Artificial Sequence: Synthetic oligonucleotide
ccuucacggugccaugagc

SEQ ID NO: 1629816 - RNA, 19 nt, Artificial Sequence
  Description of Artificial Sequence: Synthetic oligonucleotide
cccgaggaagaagagcaag

SEQ ID NO: 1629817 - RNA, 19 nt, Artificial Sequence
  Description of Artificial Sequence: Synthetic oligonucleotide
gugaaaguaucaggacaaa

SEQ ID NO: 1629818 - RNA, 19 nt, Artificial Sequence
  Description of Artificial Sequence: Synthetic oligonucleotide
gcccuguuggugacgagcc

SEQ ID NO: 1629819 - RNA, 19 nt, Artificial Sequence
  Description of Artificial Sequence: Synthetic oligonucleotide
gugcuauaucugaacaccu

SEQ ID NO: 1629820 - RNA, 19 nt, Artificial Sequence
  Description of Artificial Sequence: Synthetic oligonucleotide
agcagucggccuccacccu

SEQ ID NO: 1629821 - RNA, 19 nt, Artificial Sequence
  Description of Artificial Sequence: Synthetic oligonucleotide
guaaggcauuucccaucuc

SEQ ID NO: 1629822 - RNA, 19 nt, Artificial Sequence
  Description of Artificial Sequence: Synthetic oligonucleotide
cagggccgcaguggcaugc

SEQ ID NO: 1629823 - RNA, 19 nt, Artificial Sequence
  Description of Artificial Sequence: Synthetic oligonucleotide
gguugcugaagaccggccu

SEQ ID NO: 1629824 - RNA, 19 nt, Artificial Sequence
  Description of Artificial Sequence: Synthetic oligonucleotide
ggccgcaguggcaugccgg

SEQ ID NO: 1629825 - RNA, 19 nt, Artificial Sequence
  Description of Artificial Sequence: Synthetic oligonucleotide
caccuccccacaaggccuc

SEQ ID NO: 1629826 - RNA, 19 nt, Artificial Sequence
  Description of Artificial Sequence: Synthetic oligonucleotide
cucggagccuucuucacuu

SEQ ID NO: 1629827 - RNA, 19 nt, Artificial Sequence
  Description of Artificial Sequence: Synthetic oligonucleotide
ggccauucucggccugagg

SEQ ID NO: 1629828 - RNA, 19 nt, Artificial Sequence
  Description of Artificial Sequence: Synthetic oligonucleotide
aguccacuccagaggccag

SEQ ID NO: 1629829 - RNA, 19 nt, Artificial Sequence
  Description of Artificial Sequence: Synthetic oligonucleotide
uucccaucucucggagccu

SEQ ID NO: 1629830 - RNA, 19 nt, Artificial Sequence
  Description of Artificial Sequence: Synthetic oligonucleotide
cgcgccauacaucugccug

SEQ ID NO: 1629831 - RNA, 19 nt, Artificial Sequence
  Description of Artificial Sequence: Synthetic oligonucleotide
gggccccaaaagccgagug

SEQ ID NO: 1629832 - RNA, 19 nt, Artificial Sequence
  Description of Artificial Sequence: Synthetic oligonucleotide
guaccuugggacggccuga

SEQ ID NO: 1629833 - RNA, 19 nt, Artificial Sequence
  Description of Artificial Sequence: Synthetic oligonucleotide
ugggccccaaaagccgagu

SEQ ID NO: 1629834 - RNA, 19 nt, Artificial Sequence
  Description of Artificial Sequence: Synthetic oligonucleotide
cagaagcaacuucgcaaaa

SEQ ID NO: 1629835 - RNA, 19 nt, Artificial Sequence
  Description of Artificial Sequence: Synthetic oligonucleotide
cagccggccccacggcagg

SEQ ID NO: 1629836 - RNA, 19 nt, Artificial Sequence
  Description of Artificial Sequence: Synthetic oligonucleotide
cagucggccuccacccuca

SEQ ID NO: 1629837 - RNA, 19 nt, Artificial Sequence
  Description of Artificial Sequence: Synthetic oligonucleotide
ggaaacaaacaucggccuu

SEQ ID NO: 1629838 - RNA, 19 nt, Artificial Sequence
  Description of Artificial Sequence: Synthetic oligonucleotide
cacuccucgacgucaugcu

SEQ ID NO: 1629839 - RNA, 19 nt, Artificial Sequence
  Description of Artificial Sequence: Synthetic oligonucleotide
gcuguccucacuuccggcu

SEQ ID NO: 1629840 - RNA, 19 nt, Artificial Sequence
  Description of Artificial Sequence: Synthetic oligonucleotide
gcguuuggaaggcugcucu

SEQ ID NO: 1629841 - RNA, 19 nt, Artificial Sequence
  Description of Artificial Sequence: Synthetic oligonucleotide
guagggcaaguugcugaca

SEQ ID NO: 1629842 - RNA, 19 nt, Artificial Sequence
  Description of Artificial Sequence: Synthetic oligonucleotide
accuugaaaucgggguuuu

SEQ ID NO: 1629843 - RNA, 19 nt, Artificial Sequence
  Description of Artificial Sequence: Synthetic oligonucleotide
ucuccaggguggugcuaua

SEQ ID NO: 1629844 - RNA, 19 nt, Artificial Sequence
  Description of Artificial Sequence: Synthetic oligonucleotide
caucggccuuccuuccaca

SEQ ID NO: 1629845 - RNA, 19 nt, Artificial Sequence
  Description of Artificial Sequence: Synthetic oligonucleotide
ucggagccuucuucacuuu

SEQ ID NO: 1629846 - RNA, 19 nt, Artificial Sequence
  Description of Artificial Sequence: Synthetic oligonucleotide
ccaggguggugcuauaucu

SEQ ID NO: 1629847 - RNA, 19 nt, Artificial Sequence
  Description of Artificial Sequence: Synthetic oligonucleotide
aaaagccgaguggcuccuu

SEQ ID NO: 1629848 - RNA, 19 nt, Artificial Sequence
  Description of Artificial Sequence: Synthetic oligonucleotide
cacccggugcuguccucac

SEQ ID NO: 1629849 - RNA, 19 nt, Artificial Sequence
  Description of Artificial Sequence: Synthetic oligonucleotide
caugccguccaucuucauu

SEQ ID NO: 1629850 - RNA, 19 nt, Artificial Sequence
  Description of Artificial Sequence: Synthetic oligonucleotide
uucccgcgcgcgccauaca

SEQ ID NO: 1629851 - RNA, 19 nt, Artificial Sequence
  Description of Artificial Sequence: Synthetic oligonucleotide
ugcugaagaccggccugau

SEQ ID NO: 1629852 - RNA, 19 nt, Artificial Sequence
  Description of Artificial Sequence: Synthetic oligonucleotide
augcucaauguaggcguuu

SEQ ID NO: 1629853 - RNA, 19 nt, Artificial Sequence
  Description of Artificial Sequence: Synthetic oligonucleotide
gacgagccugagguccuuc

SEQ ID NO: 1629854 - RNA, 19 nt, Artificial Sequence
  Description of Artificial Sequence: Synthetic oligonucleotide
guggugacagccggcccca

SEQ ID NO: 1629855 - RNA, 19 nt, Artificial Sequence
  Description of Artificial Sequence: Synthetic oligonucleotide
acccggugcuguccucacu

SEQ ID NO: 1629856 - RNA, 19 nt, Artificial Sequence
  Description of Artificial Sequence: Synthetic oligonucleotide
cuccccacaaggccucaaa

SEQ ID NO: 1629857 - RNA, 19 nt, Artificial Sequence
  Description of Artificial Sequence: Synthetic oligonucleotide
ggugggguguucguagaaa

SEQ ID NO: 1629858 - RNA, 19 nt, Artificial Sequence
  Description of Artificial Sequence: Synthetic oligonucleotide
cuccuucugcuuggaagga

SEQ ID NO: 1629859 - RNA, 19 nt, Artificial Sequence
  Description of Artificial Sequence: Synthetic oligonucleotide
cgaguggcuccuuguuagg

SEQ ID NO: 1629860 - RNA, 19 nt, Artificial Sequence
  Description of Artificial Sequence: Synthetic oligonucleotide
gaacacuccucgacgucau

SEQ ID NO: 1629861 - RNA, 19 nt, Artificial Sequence
  Description of Artificial Sequence: Synthetic oligonucleotide
aggagccucgguggccaug

SEQ ID NO: 1629862 - RNA, 19 nt, Artificial Sequence
  Description of Artificial Sequence: Synthetic oligonucleotide
caaggccugcugcgcugac

SEQ ID NO: 1629863 - RNA, 19 nt, Artificial Sequence
  Description of Artificial Sequence: Synthetic oligonucleotide
cucggaaguccccacgguu

SEQ ID NO: 1629864 - RNA, 19 nt, Artificial Sequence
  Description of Artificial Sequence: Synthetic oligonucleotide
ccagcaugaaggaguaagu

SEQ ID NO: 1629865 - RNA, 19 nt, Artificial Sequence
  Description of Artificial Sequence: Synthetic oligonucleotide
gggccgcaguggcaugccg

SEQ ID NO: 1629866 - RNA, 19 nt, Artificial Sequence
  Description of Artificial Sequence: Synthetic oligonucleotide
cagcccuguuggugacgag

SEQ ID NO: 1629867 - RNA, 19 nt, Artificial Sequence
  Description of Artificial Sequence: Synthetic oligonucleotide
accuugggacggccugaaa

SEQ ID NO: 1629868 - RNA, 19 nt, Artificial Sequence
  Description of Artificial Sequence: Synthetic oligonucleotide
cuggaccaccuccccacaa

SEQ ID NO: 1629869 - RNA, 19 nt, Artificial Sequence
  Description of Artificial Sequence: Synthetic oligonucleotide
gccugagaugaagaguuua

SEQ ID NO: 1629870 - RNA, 19 nt, Artificial Sequence
  Description of Artificial Sequence: Synthetic oligonucleotide
cagggccauucucggccug

SEQ ID NO: 1629871 - RNA, 19 nt, Artificial Sequence
  Description of Artificial Sequence: Synthetic oligonucleotide
gccuuacagauguccucga

SEQ ID NO: 1629872 - RNA, 19 nt, Artificial Sequence
  Description of Artificial Sequence: Synthetic oligonucleotide
caugcucaauguaggcguu

SEQ ID NO: 1629873 - RNA, 19 nt, Artificial Sequence
  Description of Artificial Sequence: Synthetic oligonucleotide
cgguugcugaagaccggcc

SEQ ID NO: 1629874 - RNA, 19 nt, Artificial Sequence
  Description of Artificial Sequence: Synthetic oligonucleotide
cgccauacaucugccuggg

SEQ ID NO: 1629875 - RNA, 19 nt, Artificial Sequence
  Description of Artificial Sequence: Synthetic oligonucleotide
gccugaaagcagucggccu

SEQ ID NO: 1629876 - RNA, 19 nt, Artificial Sequence
  Description of Artificial Sequence: Synthetic oligonucleotide
ggacaaucugugggagaca

SEQ ID NO: 1629877 - RNA, 19 nt, Artificial Sequence
  Description of Artificial Sequence: Synthetic oligonucleotide
cauccgccuugcguuuguc

SEQ ID NO: 1629878 - RNA, 19 nt, Artificial Sequence
  Description of Artificial Sequence: Synthetic oligonucleotide
gccgaguggcuccuuguua

SEQ ID NO: 1629879 - RNA, 19 nt, Artificial Sequence
  Description of Artificial Sequence: Synthetic oligonucleotide
agcuucgccucuggcucau

SEQ ID NO: 1629880 - RNA, 19 nt, Artificial Sequence
  Description of Artificial Sequence: Synthetic oligonucleotide
caaaagccgaguggcuccu

SEQ ID NO: 1629881 - RNA, 19 nt, Artificial Sequence
  Description of Artificial Sequence: Synthetic oligonucleotide
ugacgagccugagguccuu

SEQ ID NO: 1629882 - RNA, 19 nt, Artificial Sequence
  Description of Artificial Sequence: Synthetic oligonucleotide
ggggcacccggugcugucc

SEQ ID NO: 1629883 - RNA, 19 nt, Artificial Sequence
  Description of Artificial Sequence: Synthetic oligonucleotide
gggugggguguucguagaa

SEQ ID NO: 1629884 - RNA, 19 nt, Artificial Sequence
  Description of Artificial Sequence: Synthetic oligonucleotide
ccuucccuucccgcgcgcg

SEQ ID NO: 1629885 - RNA, 19 nt, Artificial Sequence
  Description of Artificial Sequence: Synthetic oligonucleotide
ggguggugcuauaucugaa

SEQ ID NO: 1629886 - RNA, 19 nt, Artificial Sequence
  Description of Artificial Sequence: Synthetic oligonucleotide
gugacgagccugagguccu

SEQ ID NO: 1629887 - RNA, 19 nt, Artificial Sequence
  Description of Artificial Sequence: Synthetic oligonucleotide
gcguuucuuccugucuaca

SEQ ID NO: 1629888 - RNA, 19 nt, Artificial Sequence
  Description of Artificial Sequence: Synthetic oligonucleotide
ccuccucauccgccuugcg

SEQ ID NO: 1629889 - RNA, 19 nt, Artificial Sequence
  Description of Artificial Sequence: Synthetic oligonucleotide
cgggccagcaugaaggagu

SEQ ID NO: 1629890 - RNA, 19 nt, Artificial Sequence
  Description of Artificial Sequence: Synthetic oligonucleotide
cuggcucauccaugcugua

SEQ ID NO: 1629891 - RNA, 19 nt, Artificial Sequence
  Description of Artificial Sequence: Synthetic oligonucleotide
cgcgcgccauacaucugcc

SEQ ID NO: 1629892 - RNA, 19 nt, Artificial Sequence
  Description of Artificial Sequence: Synthetic oligonucleotide
ccagcccuguuggugacga

SEQ ID NO: 1629893 - RNA, 19 nt, Artificial Sequence
  Description of Artificial Sequence: Synthetic oligonucleotide
gcacccggugcuguccuca

SEQ ID NO: 1629894 - RNA, 19 nt, Artificial Sequence
  Description of Artificial Sequence: Synthetic oligonucleotide
ggccauggagguggugaca

SEQ ID NO: 1629895 - RNA, 19 nt, Artificial Sequence
  Description of Artificial Sequence: Synthetic oligonucleotide
ccacggcagggccauucuc

SEQ ID NO: 1629896 - RNA, 19 nt, Artificial Sequence
  Description of Artificial Sequence: Synthetic oligonucleotide
caggacaaaugggccccaa

SEQ ID NO: 1629897 - RNA, 19 nt, Artificial Sequence
  Description of Artificial Sequence: Synthetic oligonucleotide
cccuucggcuugccagccc

SEQ ID NO: 1629898 - RNA, 19 nt, Artificial Sequence
  Description of Artificial Sequence: Synthetic oligonucleotide
gccugcugcgcugacuucu

SEQ ID NO: 1629899 - RNA, 19 nt, Artificial Sequence
  Description of Artificial Sequence: Synthetic oligonucleotide
ggccugagcuucgccucug

SEQ ID NO: 1629900 - RNA, 19 nt, Artificial Sequence
  Description of Artificial Sequence: Synthetic oligonucleotide
ggccugaucuggaccaccu

SEQ ID NO: 1629901 - RNA, 19 nt, Artificial Sequence
  Description of Artificial Sequence: Synthetic oligonucleotide
ccuucggcuugccagcccu

SEQ ID NO: 1629902 - RNA, 19 nt, Artificial Sequence
  Description of Artificial Sequence: Synthetic oligonucleotide
cccgcgcgcgccauacauc

SEQ ID NO: 1629903 - RNA, 19 nt, Artificial Sequence
  Description of Artificial Sequence: Synthetic oligonucleotide
ggacggccugaaagcaguc

SEQ ID NO: 1629904 - RNA, 19 nt, Artificial Sequence
  Description of Artificial Sequence: Synthetic oligonucleotide
gcccuucggcuugccagcc

SEQ ID NO: 1629905 - RNA, 19 nt, Artificial Sequence
  Description of Artificial Sequence: Synthetic oligonucleotide
ccgggccagcaugaaggag

SEQ ID NO: 1629906 - RNA, 19 nt, Artificial Sequence
  Description of Artificial Sequence: Synthetic oligonucleotide
ccucacuuccggcuucucu

SEQ ID NO: 1629907 - RNA, 19 nt, Artificial Sequence
  Description of Artificial Sequence: Synthetic oligonucleotide
cguuucuuccugucuacau

SEQ ID NO: 1629908 - RNA, 19 nt, Artificial Sequence
  Description of Artificial Sequence: Synthetic oligonucleotide
caucucucggagccuucuu

SEQ ID NO: 1629909 - RNA, 19 nt, Artificial Sequence
  Description of Artificial Sequence: Synthetic oligonucleotide
ccgcgcgcgccauacaucu

SEQ ID NO: 1629910 - RNA, 19 nt, Artificial Sequence
  Description of Artificial Sequence: Synthetic oligonucleotide
cuccaggguggugcuauau

SEQ ID NO: 1629911 - RNA, 19 nt, Artificial Sequence
  Description of Artificial Sequence: Synthetic oligonucleotide
ggccugcugcgcugacuuc

SEQ ID NO: 1629912 - RNA, 19 nt, Artificial Sequence
  Description of Artificial Sequence: Synthetic oligonucleotide
ggguugcugauugccacuu

SEQ ID NO: 1629913 - RNA, 19 nt, Artificial Sequence
  Description of Artificial Sequence: Synthetic oligonucleotide
ccccacggcagggccauuc

SEQ ID NO: 1629914 - RNA, 19 nt, Artificial Sequence
  Description of Artificial Sequence: Synthetic oligonucleotide
ccagggccgcaguggcaug

SEQ ID NO: 1629915 - RNA, 19 nt, Artificial Sequence
  Description of Artificial Sequence: Synthetic oligonucleotide
gguugcugauugccacuuu

SEQ ID NO: 1629916 - RNA, 19 nt, Artificial Sequence
  Description of Artificial Sequence: Synthetic oligonucleotide
ggcuccuuguuaggacacu

SEQ ID NO: 1629917 - RNA, 19 nt, Artificial Sequence
  Description of Artificial Sequence: Synthetic oligonucleotide
cgacgucaugcucaaugua

SEQ ID NO: 1629918 - RNA, 19 nt, Artificial Sequence
  Description of Artificial Sequence: Synthetic oligonucleotide
gguugagugcccagcccuu

SEQ ID NO: 1629919 - RNA, 19 nt, Artificial Sequence
  Description of Artificial Sequence: Synthetic oligonucleotide
gcccgaggaagaagagcaa

SEQ ID NO: 1629920 - RNA, 19 nt, Artificial Sequence
  Description of Artificial Sequence: Synthetic oligonucleotide
cggccugaucuggaccacc

SEQ ID NO: 1629921 - RNA, 19 nt, Artificial Sequence
  Description of Artificial Sequence: Synthetic oligonucleotide
ccgcaguggcaugccgggc

SEQ ID NO: 1629922 - RNA, 19 nt, Artificial Sequence
  Description of Artificial Sequence: Synthetic oligonucleotide
cccagagaguuccguuucu

SEQ ID NO: 1629923 - RNA, 19 nt, Artificial Sequence
  Description of Artificial Sequence: Synthetic oligonucleotide
guggcgcugcagagcccga

SEQ ID NO: 1629924 - RNA, 19 nt, Artificial Sequence
  Description of Artificial Sequence: Synthetic oligonucleotide
cgccccacucucucucauc

SEQ ID NO: 1629925 - RNA, 19 nt, Artificial Sequence
  Description of Artificial Sequence: Synthetic oligonucleotide
gggcacccggugcuguccu

SEQ ID NO: 1629926 - RNA, 19 nt, Artificial Sequence
  Description of Artificial Sequence: Synthetic oligonucleotide
gcuugccagcccuguuggu

SEQ ID NO: 1629927 - RNA, 19 nt, Artificial Sequence
  Description of Artificial Sequence: Synthetic oligonucleotide
ccccaaaagccgaguggcu

SEQ ID NO: 1629928 - RNA, 19 nt, Artificial Sequence
  Description of Artificial Sequence: Synthetic oligonucleotide
ccggccugaucuggaccac

SEQ ID NO: 1629929 - RNA, 19 nt, Artificial Sequence
  Description of Artificial Sequence: Synthetic oligonucleotide
gcgcgccauacaucugccu

SEQ ID NO: 1629930 - RNA, 19 nt, Artificial Sequence
  Description of Artificial Sequence: Synthetic oligonucleotide
ccaucucucggagccuucu

SEQ ID NO: 1629931 - RNA, 19 nt, Artificial Sequence
  Description of Artificial Sequence: Synthetic oligonucleotide
ccucggaaguccccacggu

SEQ ID NO: 1629932 - RNA, 19 nt, Artificial Sequence
  Description of Artificial Sequence: Synthetic oligonucleotide
gccugaggagcagcacugu

SEQ ID NO: 1629933 - RNA, 19 nt, Artificial Sequence
  Description of Artificial Sequence: Synthetic oligonucleotide
gcgcugacuucuccucuuu

SEQ ID NO: 1629934 - RNA, 19 nt, Artificial Sequence
  Description of Artificial Sequence: Synthetic oligonucleotide
cgcgcgcgccauacaucug

SEQ ID NO: 1629935 - RNA, 19 nt, Artificial Sequence
  Description of Artificial Sequence: Synthetic oligonucleotide
ccucauccgccuugcguuu

SEQ ID NO: 1629936 - RNA, 19 nt, Artificial Sequence
  Description of Artificial Sequence: Synthetic oligonucleotide
ggccugagaugaagaguuu

SEQ ID NO: 1629937 - RNA, 19 nt, Artificial Sequence
  Description of Artificial Sequence: Synthetic oligonucleotide
cccuguuggugacgagccu

SEQ ID NO: 1629938 - RNA, 19 nt, Artificial Sequence
  Description of Artificial Sequence: Synthetic oligonucleotide
cguuuggaaggcugcucuu

SEQ ID NO: 1629939 - RNA, 19 nt, Artificial Sequence
  Description of Artificial Sequence: Synthetic oligonucleotide
ccaugcuguagggcaaguu

SEQ ID NO: 1629940 - RNA, 19 nt, Artificial Sequence
  Description of Artificial Sequence: Synthetic oligonucleotide
ccuccccacaaggccucaa

SEQ ID NO: 1629941 - RNA, 19 nt, Artificial Sequence
  Description of Artificial Sequence: Synthetic oligonucleotide
ccuucccgcgcgcgccaua

SEQ ID NO: 1629942 - RNA, 19 nt, Artificial Sequence
  Description of Artificial Sequence: Synthetic oligonucleotide
cggugccaugagccuuaca

SEQ ID NO: 1629943 - RNA, 19 nt, Artificial Sequence
  Description of Artificial Sequence: Synthetic oligonucleotide
ccucgacgucaugcucaau

SEQ ID NO: 1629944 - RNA, 19 nt, Artificial Sequence
  Description of Artificial Sequence: Synthetic oligonucleotide
gccccacggcagggccauu

SEQ ID NO: 1629945 - RNA, 19 nt, Artificial Sequence
  Description of Artificial Sequence: Synthetic oligonucleotide
aacgaaaugcuauaagccc

SEQ ID NO: 1629946 - RNA, 19 nt, Artificial Sequence
  Description of Artificial Sequence: Synthetic oligonucleotide
ugaagaauggcccugagug

SEQ ID NO: 1629947 - RNA, 19 nt, Artificial Sequence
  Description of Artificial Sequence: Synthetic oligonucleotide
aaugcuauaagccccuagg

SEQ ID NO: 1629948 - RNA, 19 nt, Artificial Sequence
  Description of Artificial Sequence: Synthetic oligonucleotide
aaacgaaaugcuauaagcc

SEQ ID NO: 1629949 - RNA, 19 nt, Artificial Sequence
  Description of Artificial Sequence: Synthetic oligonucleotide
gaaacgaaaugcuauaagc

SEQ ID NO: 1629950 - RNA, 19 nt, Artificial Sequence
  Description of Artificial Sequence: Synthetic oligonucleotide
aaaagaucguuggugaugg

SEQ ID NO: 1629951 - RNA, 19 nt, Artificial Sequence
  Description of Artificial Sequence: Synthetic oligonucleotide
agccacaaugaucugaucc

SEQ ID NO: 1629952 - RNA, 19 nt, Artificial Sequence
  Description of Artificial Sequence: Synthetic oligonucleotide
uuuagaaacgaaaugcuau

SEQ ID NO: 1629953 - RNA, 19 nt, Artificial Sequence
  Description of Artificial Sequence: Synthetic oligonucleotide
uuucugaucaggcucaggc

SEQ ID NO: 1629954 - RNA, 19 nt, Artificial Sequence
  Description of Artificial Sequence: Synthetic oligonucleotide
aaagaucagcuccagagcu

SEQ ID NO: 1629955 - RNA, 19 nt, Artificial Sequence
  Description of Artificial Sequence: Synthetic oligonucleotide
uagguguacugcuagaggg

SEQ ID NO: 1629956 - RNA, 19 nt, Artificial Sequence
  Description of Artificial Sequence: Synthetic oligonucleotide
ugcuuuagaaacgaaaugc

SEQ ID NO: 1629957 - RNA, 19 nt, Artificial Sequence
  Description of Artificial Sequence: Synthetic oligonucleotide
ugcuagagggcguagaccg

SEQ ID NO: 1629958 - RNA, 19 nt, Artificial Sequence
  Description of Artificial Sequence: Synthetic oligonucleotide
aacguauccagcaugcugg

SEQ ID NO: 1629959 - RNA, 19 nt, Artificial Sequence
  Description of Artificial Sequence: Synthetic oligonucleotide
ucaucuuuuagcuuccggc

SEQ ID NO: 1629960 - RNA, 19 nt, Artificial Sequence
  Description of Artificial Sequence: Synthetic oligonucleotide
agaacguggacuguggacc

SEQ ID NO: 1629961 - RNA, 19 nt, Artificial Sequence
  Description of Artificial Sequence: Synthetic oligonucleotide
gagcccaucaaacaggaag

SEQ ID NO: 1629962 - RNA, 19 nt, Artificial Sequence
  Description of Artificial Sequence: Synthetic oligonucleotide
cucgguacgagcuggaggg

SEQ ID NO: 1629963 - RNA, 19 nt, Artificial Sequence
  Description of Artificial Sequence: Synthetic oligonucleotide
uuuguaguagagcaucaga

SEQ ID NO: 1629964 - RNA, 19 nt, Artificial Sequence
  Description of Artificial Sequence: Synthetic oligonucleotide
gauggcauugacuagagcu

SEQ ID NO: 1629965 - RNA, 19 nt, Artificial Sequence
  Description of Artificial Sequence: Synthetic oligonucleotide
acaagugccuccuuugagg

SEQ ID NO: 1629966 - RNA, 19 nt, Artificial Sequence
  Description of Artificial Sequence: Synthetic oligonucleotide
guacaagaaguucaugggg

SEQ ID NO: 1629967 - RNA, 19 nt, Artificial Sequence
  Description of Artificial Sequence: Synthetic oligonucleotide
uuagcuuccggccacaaua

SEQ ID NO: 1629968 - RNA, 19 nt, Artificial Sequence
  Description of Artificial Sequence: Synthetic oligonucleotide
caauagaucagaucaauca

SEQ ID NO: 1629969 - RNA, 19 nt, Artificial Sequence
  Description of Artificial Sequence: Synthetic oligonucleotide
ucugaucaggcucaggcca

SEQ ID NO: 1629970 - RNA, 19 nt, Artificial Sequence
  Description of Artificial Sequence: Synthetic oligonucleotide
aacccggccgcagagagcc

SEQ ID NO: 1629971 - RNA, 19 nt, Artificial Sequence
  Description of Artificial Sequence: Synthetic oligonucleotide
agauuuacggagaacgugg

SEQ ID NO: 1629972 - RNA, 19 nt, Artificial Sequence
  Description of Artificial Sequence: Synthetic oligonucleotide
agaaacgaaaugcuauaag

SEQ ID NO: 1629973 - RNA, 19 nt, Artificial Sequence
  Description of Artificial Sequence: Synthetic oligonucleotide
uuguaguagagcaucagau

SEQ ID NO: 1629974 - RNA, 19 nt, Artificial Sequence
  Description of Artificial Sequence: Synthetic oligonucleotide
ucugcaacuugcuaggcac

SEQ ID NO: 1629975 - RNA, 19 nt, Artificial Sequence
  Description of Artificial Sequence: Synthetic oligonucleotide
gagcaucagauauauuggg

SEQ ID NO: 1629976 - RNA, 19 nt, Artificial Sequence
  Description of Artificial Sequence: Synthetic oligonucleotide
gcaaagaucagcuccagag

SEQ ID NO: 1629977 - RNA, 19 nt, Artificial Sequence
  Description of Artificial Sequence: Synthetic oligonucleotide
uggaggaaacuucacaagu

SEQ ID NO: 1629978 - RNA, 19 nt, Artificial Sequence
  Description of Artificial Sequence: Synthetic oligonucleotide
uuuacggagaacguggacu

SEQ ID NO: 1629979 - RNA, 19 nt, Artificial Sequence
  Description of Artificial Sequence: Synthetic oligonucleotide
aauugccucugcaacuugc

SEQ ID NO: 1629980 - RNA, 19 nt, Artificial Sequence
  Description of Artificial Sequence: Synthetic oligonucleotide
acgaaaugcuauaagcccc

SEQ ID NO: 1629981 - RNA, 19 nt, Artificial Sequence
  Description of Artificial Sequence: Synthetic oligonucleotide
auugacuagagcuggguga

SEQ ID NO: 1629982 - RNA, 19 nt, Artificial Sequence
  Description of Artificial Sequence: Synthetic oligonucleotide
caucuuuuagcuuccggcc

SEQ ID NO: 1629983 - RNA, 19 nt, Artificial Sequence
  Description of Artificial Sequence: Synthetic oligonucleotide
uggauauccccuccagucg

SEQ ID NO: 1629984 - RNA, 19 nt, Artificial Sequence
  Description of Artificial Sequence: Synthetic oligonucleotide
uuaaagaccgccucccugu

SEQ ID NO: 1629985 - RNA, 19 nt, Artificial Sequence
  Description of Artificial Sequence: Synthetic oligonucleotide
aaaugcuauaagccccuag

SEQ ID NO: 1629986 - RNA, 19 nt, Artificial Sequence
  Description of Artificial Sequence: Synthetic oligonucleotide
aagauuuacggagaacgug

SEQ ID NO: 1629987 - RNA, 19 nt, Artificial Sequence
  Description of Artificial Sequence: Synthetic oligonucleotide
gguacaagaaguucauggg

SEQ ID NO: 1629988 - RNA, 19 nt, Artificial Sequence
  Description of Artificial Sequence: Synthetic oligonucleotide
agauucuuuauugcugagc

SEQ ID NO: 1629989 - RNA, 19 nt, Artificial Sequence
  Description of Artificial Sequence: Synthetic oligonucleotide
ugagcaggcaccaacguau

SEQ ID NO: 1629990 - RNA, 19 nt, Artificial Sequence
  Description of Artificial Sequence: Synthetic oligonucleotide
auauucucccacuucuguc

SEQ ID NO: 1629991 - RNA, 19 nt, Artificial Sequence
  Description of Artificial Sequence: Synthetic oligonucleotide
ugcuauaagccccuaggga

SEQ ID NO: 1629992 - RNA, 19 nt, Artificial Sequence
  Description of Artificial Sequence: Synthetic oligonucleotide
uuggauauccccuccaguc

SEQ ID NO: 1629993 - RNA, 19 nt, Artificial Sequence
  Description of Artificial Sequence: Synthetic oligonucleotide
aucuuaaagaccgccuccc

SEQ ID NO: 1629994 - RNA, 19 nt, Artificial Sequence
  Description of Artificial Sequence: Synthetic oligonucleotide
agagcaucagauauauugg

SEQ ID NO: 1629995 - RNA, 19 nt, Artificial Sequence
  Description of Artificial Sequence: Synthetic oligonucleotide
aaccccuagagcaaugggg

SEQ ID NO: 1629996 - RNA, 19 nt, Artificial Sequence
  Description of Artificial Sequence: Synthetic oligonucleotide
uauucucccacuucugucu

SEQ ID NO: 1629997 - RNA, 19 nt, Artificial Sequence
  Description of Artificial Sequence: Synthetic oligonucleotide
agaucaaucagcuccggau

SEQ ID NO: 1629998 - RNA, 19 nt, Artificial Sequence
  Description of Artificial Sequence: Synthetic oligonucleotide
ucucgguacgagcuggagg

SEQ ID NO: 1629999 - RNA, 19 nt, Artificial Sequence
  Description of Artificial Sequence: Synthetic oligonucleotide
augcuauaagccccuaggg

SEQ ID NO: 1630000 - RNA, 19 nt, Artificial Sequence
  Description of Artificial Sequence: Synthetic oligonucleotide
acugcuagagggcguagac

SEQ ID NO: 1630001 - RNA, 19 nt, Artificial Sequence
  Description of Artificial Sequence: Synthetic oligonucleotide
auccagagauucuuuauug

SEQ ID NO: 1630002 - RNA, 19 nt, Artificial Sequence
  Description of Artificial Sequence: Synthetic oligonucleotide
uuggugaggugccugaaga

SEQ ID NO: 1630003 - RNA, 19 nt, Artificial Sequence
  Description of Artificial Sequence: Synthetic oligonucleotide
uuacggagaacguggacug

SEQ ID NO: 1630004 - RNA, 19 nt, Artificial Sequence
  Description of Artificial Sequence: Synthetic oligonucleotide
cagucugagagagacaucc

SEQ ID NO: 1630005 - RNA, 19 nt, Artificial Sequence
  Description of Artificial Sequence: Synthetic oligonucleotide
cucaggccaagauuuacgg

SEQ ID NO: 1630006 - RNA, 19 nt, Artificial Sequence
  Description of Artificial Sequence: Synthetic oligonucleotide
uuagaaacgaaaugcuaua

SEQ ID NO: 1630007 - RNA, 19 nt, Artificial Sequence
  Description of Artificial Sequence: Synthetic oligonucleotide
ccaagauuuacggagaacg

SEQ ID NO: 1630008 - RNA, 19 nt, Artificial Sequence
  Description of Artificial Sequence: Synthetic oligonucleotide
cugaauaccauagaaguca

SEQ ID NO: 1630009 - RNA, 19 nt, Artificial Sequence
  Description of Artificial Sequence: Synthetic oligonucleotide
uuggaggaaacuucacaag

SEQ ID NO: 1630010 - RNA, 19 nt, Artificial Sequence
  Description of Artificial Sequence: Synthetic oligonucleotide
gaggaauugccucugcaac

SEQ ID NO: 1630011 - RNA, 19 nt, Artificial Sequence
  Description of Artificial Sequence: Synthetic oligonucleotide
cuuggguacaagaaguuca

SEQ ID NO: 1630012 - RNA, 19 nt, Artificial Sequence
  Description of Artificial Sequence: Synthetic oligonucleotide
agcccaucaaacaggaagc

SEQ ID NO: 1630013 - RNA, 19 nt, Artificial Sequence
  Description of Artificial Sequence: Synthetic oligonucleotide
auuccuggagcuugccagc

SEQ ID NO: 1630014 - RNA, 19 nt, Artificial Sequence
  Description of Artificial Sequence: Synthetic oligonucleotide
agaagucaaggguuugguc

SEQ ID NO: 1630015 - RNA, 19 nt, Artificial Sequence
  Description of Artificial Sequence: Synthetic oligonucleotide
cugaagaauugacuugggg

SEQ ID NO: 1630016 - RNA, 19 nt, Artificial Sequence
  Description of Artificial Sequence: Synthetic oligonucleotide
caaagaucagcuccagagc

SEQ ID NO: 1630017 - RNA, 19 nt, Artificial Sequence
  Description of Artificial Sequence: Synthetic oligonucleotide
auuuacggagaacguggac

SEQ ID NO: 1630018 - RNA, 19 nt, Artificial Sequence
  Description of Artificial Sequence: Synthetic oligonucleotide
gaagaauggcccugagugc

SEQ ID NO: 1630019 - RNA, 19 nt, Artificial Sequence
  Description of Artificial Sequence: Synthetic oligonucleotide
cuagggaauauucucccac

SEQ ID NO: 1630020 - RNA, 19 nt, Artificial Sequence
  Description of Artificial Sequence: Synthetic oligonucleotide
accaacguauccagcaugc

SEQ ID NO: 1630021 - RNA, 19 nt, Artificial Sequence
  Description of Artificial Sequence: Synthetic oligonucleotide
ugcuaccgagugcagaacc

SEQ ID NO: 1630022 - RNA, 19 nt, Artificial Sequence
  Description of Artificial Sequence: Synthetic oligonucleotide
aagucaaggguuuggucau

SEQ ID NO: 1630023 - RNA, 19 nt, Artificial Sequence
  Description of Artificial Sequence: Synthetic oligonucleotide
ugaauaccauagaagucaa

SEQ ID NO: 1630024 - RNA, 19 nt, Artificial Sequence
  Description of Artificial Sequence: Synthetic oligonucleotide
agcaucagauauauugggg

SEQ ID NO: 1630025 - RNA, 19 nt, Artificial Sequence
  Description of Artificial Sequence: Synthetic oligonucleotide
aacaggaagccaccuggca

SEQ ID NO: 1630026 - RNA, 19 nt, Artificial Sequence
  Description of Artificial Sequence: Synthetic oligonucleotide
uucugaucaggcucaggcc

SEQ ID NO: 1630027 - RNA, 19 nt, Artificial Sequence
  Description of Artificial Sequence: Synthetic oligonucleotide
aguagagcaucagauauau

SEQ ID NO: 1630028 - RNA, 19 nt, Artificial Sequence
  Description of Artificial Sequence: Synthetic oligonucleotide
agccaccuggcauaucucg

SEQ ID NO: 1630029 - RNA, 19 nt, Artificial Sequence
  Description of Artificial Sequence: Synthetic oligonucleotide
uguggacccaggcugaaua

SEQ ID NO: 1630030 - RNA, 19 nt, Artificial Sequence
  Description of Artificial Sequence: Synthetic oligonucleotide
cuuaaagaccgccucccug

SEQ ID NO: 1630031 - RNA, 19 nt, Artificial Sequence
  Description of Artificial Sequence: Synthetic oligonucleotide
caucaaacaggaagccacc

SEQ ID NO: 1630032 - RNA, 19 nt, Artificial Sequence
  Description of Artificial Sequence: Synthetic oligonucleotide
aucaaucagcuccggaucu

SEQ ID NO: 1630033 - RNA, 19 nt, Artificial Sequence
  Description of Artificial Sequence: Synthetic oligonucleotide
uugcuaggcacuuggguac

SEQ ID NO: 1630034 - RNA, 19 nt, Artificial Sequence
  Description of Artificial Sequence: Synthetic oligonucleotide
ugagaacugcucucuggag

SEQ ID NO: 1630035 - RNA, 19 nt, Artificial Sequence
  Description of Artificial Sequence: Synthetic oligonucleotide
uagcuuccggccacaauag

SEQ ID NO: 1630036 - RNA, 19 nt, Artificial Sequence
  Description of Artificial Sequence: Synthetic oligonucleotide
aaggaacccggccgcagag

SEQ ID NO: 1630037 - RNA, 19 nt, Artificial Sequence
  Description of Artificial Sequence: Synthetic oligonucleotide
cagguuucugaucaggcuc

SEQ ID NO: 1630038 - RNA, 19 nt, Artificial Sequence
  Description of Artificial Sequence: Synthetic oligonucleotide
auaucucgguacgagcugg

SEQ ID NO: 1630039 - RNA, 19 nt, Artificial Sequence
  Description of Artificial Sequence: Synthetic oligonucleotide
aggaauugccucugcaacu

SEQ ID NO: 1630040 - RNA, 19 nt, Artificial Sequence
  Description of Artificial Sequence: Synthetic oligonucleotide
gaaccccuagagcaauggg

SEQ ID NO: 1630041 - RNA, 19 nt, Artificial Sequence
  Description of Artificial Sequence: Synthetic oligonucleotide
acuugcuaggcacuugggu

SEQ ID NO: 1630042 - RNA, 19 nt, Artificial Sequence
  Description of Artificial Sequence: Synthetic oligonucleotide
cugcuuuagaaacgaaaug

SEQ ID NO: 1630043 - RNA, 19 nt, Artificial Sequence
  Description of Artificial Sequence: Synthetic oligonucleotide
ugagagagacauccucucu

SEQ ID NO: 1630044 - RNA, 19 nt, Artificial Sequence
  Description of Artificial Sequence: Synthetic oligonucleotide
caugcuucgggaagaggag

SEQ ID NO: 1630045 - RNA, 19 nt, Artificial Sequence
  Description of Artificial Sequence: Synthetic oligonucleotide
caacguauccagcaugcug

SEQ ID NO: 1630046 - RNA, 19 nt, Artificial Sequence
  Description of Artificial Sequence: Synthetic oligonucleotide
aaagaucguuggugauggg

SEQ ID NO: 1630047 - RNA, 19 nt, Artificial Sequence
  Description of Artificial Sequence: Synthetic oligonucleotide
guaguagagcaucagauau

SEQ ID NO: 1630048 - RNA, 19 nt, Artificial Sequence
  Description of Artificial Sequence: Synthetic oligonucleotide
gagaacguggacuguggac

SEQ ID NO: 1630049 - RNA, 19 nt, Artificial Sequence
  Description of Artificial Sequence: Synthetic oligonucleotide
uccgagagcccaucaaaca

SEQ ID NO: 1630050 - RNA, 19 nt, Artificial Sequence
  Description of Artificial Sequence: Synthetic oligonucleotide
uagaccgggugcuugggug

SEQ ID NO: 1630051 - RNA, 19 nt, Artificial Sequence
  Description of Artificial Sequence: Synthetic oligonucleotide
uagggaauauucucccacu

SEQ ID NO: 1630052 - RNA, 19 nt, Artificial Sequence
  Description of Artificial Sequence: Synthetic oligonucleotide
ggugcuugggugaaagucg

SEQ ID NO: 1630053 - RNA, 19 nt, Artificial Sequence
  Description of Artificial Sequence: Synthetic oligonucleotide
uggcaacugaagaauugac

SEQ ID NO: 1630054 - RNA, 19 nt, Artificial Sequence
  Description of Artificial Sequence: Synthetic oligonucleotide
caccagaggacauugguga

SEQ ID NO: 1630055 - RNA, 19 nt, Artificial Sequence
  Description of Artificial Sequence: Synthetic oligonucleotide
aaagaccgccucccuguag

SEQ ID NO: 1630056 - RNA, 19 nt, Artificial Sequence
  Description of Artificial Sequence: Synthetic oligonucleotide
agcaggcaccaacguaucc

SEQ ID NO: 1630057 - RNA, 19 nt, Artificial Sequence
  Description of Artificial Sequence: Synthetic oligonucleotide
ucuggaguacuggccaggg

SEQ ID NO: 1630058 - RNA, 19 nt, Artificial Sequence
  Description of Artificial Sequence: Synthetic oligonucleotide
gagauucuuuauugcugag

SEQ ID NO: 1630059 - RNA, 19 nt, Artificial Sequence
  Description of Artificial Sequence: Synthetic oligonucleotide
gaagccaccuggcauaucu

SEQ ID NO: 1630060 - RNA, 19 nt, Artificial Sequence
  Description of Artificial Sequence: Synthetic oligonucleotide
gagggcaugcuucgggaag

SEQ ID NO: 1630061 - RNA, 19 nt, Artificial Sequence
  Description of Artificial Sequence: Synthetic oligonucleotide
agaucguuggugaugggug

SEQ ID NO: 1630062 - RNA, 19 nt, Artificial Sequence
  Description of Artificial Sequence: Synthetic oligonucleotide
cauugacuagagcugggug

SEQ ID NO: 1630063 - RNA, 19 nt, Artificial Sequence
  Description of Artificial Sequence: Synthetic oligonucleotide
ugugcagugcagugugcag

SEQ ID NO: 1630064 - RNA, 19 nt, Artificial Sequence
  Description of Artificial Sequence: Synthetic oligonucleotide
gaacguggacuguggaccc

SEQ ID NO: 1630065 - RNA, 19 nt, Artificial Sequence
  Description of Artificial Sequence: Synthetic oligonucleotide
agaaccccuagagcaaugg

SEQ ID NO: 1630066 - RNA, 19 nt, Artificial Sequence
  Description of Artificial Sequence: Synthetic oligonucleotide
ugagcaucuuaaagaccgc

SEQ ID NO: 1630067 - RNA, 19 nt, Artificial Sequence
  Description of Artificial Sequence: Synthetic oligonucleotide
ucuuaaagaccgccucccu

SEQ ID NO: 1630068 - RNA, 19 nt, Artificial Sequence
  Description of Artificial Sequence: Synthetic oligonucleotide
uagaaacgaaaugcuauaa

SEQ ID NO: 1630069 - RNA, 19 nt, Artificial Sequence
  Description of Artificial Sequence: Synthetic oligonucleotide
ucgccugaagggcacggag

SEQ ID NO: 1630070 - RNA, 19 nt, Artificial Sequence
  Description of Artificial Sequence: Synthetic oligonucleotide
agcuggagggcaugcuucg

SEQ ID NO: 1630071 - RNA, 19 nt, Artificial Sequence
  Description of Artificial Sequence: Synthetic oligonucleotide
cuugcuaggcacuugggua

SEQ ID NO: 1630072 - RNA, 19 nt, Artificial Sequence
  Description of Artificial Sequence: Synthetic oligonucleotide
ugucacgcaacugcugcag

SEQ ID NO: 1630073 - RNA, 19 nt, Artificial Sequence
  Description of Artificial Sequence: Synthetic oligonucleotide
uggcauaucucgguacgag

SEQ ID NO: 1630074 - RNA, 19 nt, Artificial Sequence
  Description of Artificial Sequence: Synthetic oligonucleotide
ggcugaauaccauagaagu

SEQ ID NO: 1630075 - RNA, 19 nt, Artificial Sequence
  Description of Artificial Sequence: Synthetic oligonucleotide
uaguagagcaucagauaua

SEQ ID NO: 1630076 - RNA, 19 nt, Artificial Sequence
  Description of Artificial Sequence: Synthetic oligonucleotide
uauugcugagcaucuuaaa

SEQ ID NO: 1630077 - RNA, 19 nt, Artificial Sequence
  Description of Artificial Sequence: Synthetic oligonucleotide
gagaagagguccuuguccu

SEQ ID NO: 1630078 - RNA, 19 nt, Artificial Sequence
  Description of Artificial Sequence: Synthetic oligonucleotide
uggggugugagaacugcuc

SEQ ID NO: 1630079 - RNA, 19 nt, Artificial Sequence
  Description of Artificial Sequence: Synthetic oligonucleotide
auggcauugacuagagcug

SEQ ID NO: 1630080 - RNA, 19 nt, Artificial Sequence
  Description of Artificial Sequence: Synthetic oligonucleotide
cacagguucagguuucuga

SEQ ID NO: 1630081 - RNA, 19 nt, Artificial Sequence
  Description of Artificial Sequence: Synthetic oligonucleotide
agugugcagcacccggaac

SEQ ID NO: 1630082 - RNA, 19 nt, Artificial Sequence
  Description of Artificial Sequence: Synthetic oligonucleotide
gagggcguagaccgggugc

SEQ ID NO: 1630083 - RNA, 19 nt, Artificial Sequence
  Description of Artificial Sequence: Synthetic oligonucleotide
uccagucgccugaagggca

SEQ ID NO: 1630084 - RNA, 19 nt, Artificial Sequence
  Description of Artificial Sequence: Synthetic oligonucleotide
cauaucucgguacgagcug

SEQ ID NO: 1630085 - RNA, 19 nt, Artificial Sequence
  Description of Artificial Sequence: Synthetic oligonucleotide
uguaccccagggaggccgg

SEQ ID NO: 1630086 - RNA, 19 nt, Artificial Sequence
  Description of Artificial Sequence: Synthetic oligonucleotide
cuagagggcguagaccggg

SEQ ID NO: 1630087 - RNA, 19 nt, Artificial Sequence
  Description of Artificial Sequence: Synthetic oligonucleotide
ugcugggaucagcaaagac

SEQ ID NO: 1630088 - RNA, 19 nt, Artificial Sequence
  Description of Artificial Sequence: Synthetic oligonucleotide
ucccugacgggacaccaga

SEQ ID NO: 1630089 - RNA, 19 nt, Artificial Sequence
  Description of Artificial Sequence: Synthetic oligonucleotide
gaugggugucccugacggg

SEQ ID NO: 1630090 - RNA, 19 nt, Artificial Sequence
  Description of Artificial Sequence: Synthetic oligonucleotide
cacaagugccuccuuugag

SEQ ID NO: 1630091 - RNA, 19 nt, Artificial Sequence
  Description of Artificial Sequence: Synthetic oligonucleotide
acuagagcugggugagcag

SEQ ID NO: 1630092 - RNA, 19 nt, Artificial Sequence
  Description of Artificial Sequence: Synthetic oligonucleotide
ggaauauucucccacuucu

SEQ ID NO: 1630093 - RNA, 19 nt, Artificial Sequence
  Description of Artificial Sequence: Synthetic oligonucleotide
acauuggugaggugccuga

SEQ ID NO: 1630094 - RNA, 19 nt, Artificial Sequence
  Description of Artificial Sequence: Synthetic oligonucleotide
aacuugcuaggcacuuggg

SEQ ID NO: 1630095 - RNA, 19 nt, Artificial Sequence
  Description of Artificial Sequence: Synthetic oligonucleotide
ugcuuggauauccccucca

SEQ ID NO: 1630096 - RNA, 19 nt, Artificial Sequence
  Description of Artificial Sequence: Synthetic oligonucleotide
ucccgcggaaggaacccgg

SEQ ID NO: 1630097 - RNA, 19 nt, Artificial Sequence
  Description of Artificial Sequence: Synthetic oligonucleotide
uugggugaaagucguccuc

SEQ ID NO: 1630098 - RNA, 19 nt, Artificial Sequence
  Description of Artificial Sequence: Synthetic oligonucleotide
gguguacugcuagagggcg

SEQ ID NO: 1630099 - RNA, 19 nt, Artificial Sequence
  Description of Artificial Sequence: Synthetic oligonucleotide
acguauccagcaugcuggg

SEQ ID NO: 1630100 - RNA, 19 nt, Artificial Sequence
  Description of Artificial Sequence: Synthetic oligonucleotide
cagugcagugugcagcacc

SEQ ID NO: 1630101 - RNA, 19 nt, Artificial Sequence
  Description of Artificial Sequence: Synthetic oligonucleotide
cacuguaccccagggaggc

SEQ ID NO: 1630102 - RNA, 19 nt, Artificial Sequence
  Description of Artificial Sequence: Synthetic oligonucleotide
uaccgagugcagaaccaga

SEQ ID NO: 1630103 - RNA, 19 nt, Artificial Sequence
  Description of Artificial Sequence: Synthetic oligonucleotide
agagccgccgguguaaaca

SEQ ID NO: 1630104 - RNA, 19 nt, Artificial Sequence
  Description of Artificial Sequence: Synthetic oligonucleotide
ucagaucaaucagcuccgg

SEQ ID NO: 1630105 - RNA, 19 nt, Artificial Sequence
  Description of Artificial Sequence: Synthetic oligonucleotide
uggagggcaugcuucggga

SEQ ID NO: 1630106 - RNA, 19 nt, Artificial Sequence
  Description of Artificial Sequence: Synthetic oligonucleotide
gacuagagcugggugagca

SEQ ID NO: 1630107 - RNA, 19 nt, Artificial Sequence
  Description of Artificial Sequence: Synthetic oligonucleotide
uuuagcuuccggccacaau

SEQ ID NO: 1630108 - RNA, 19 nt, Artificial Sequence
  Description of Artificial Sequence: Synthetic oligonucleotide
agugccuccuuugaggaau

SEQ ID NO: 1630109 - RNA, 19 nt, Artificial Sequence
  Description of Artificial Sequence: Synthetic oligonucleotide
ggauauccccuccagucgc

SEQ ID NO: 1630110 - RNA, 19 nt, Artificial Sequence
  Description of Artificial Sequence: Synthetic oligonucleotide
caagugccuccuuugagga

SEQ ID NO: 1630111 - RNA, 19 nt, Artificial Sequence
  Description of Artificial Sequence: Synthetic oligonucleotide
ugcugccugcuaccgagug

SEQ ID NO: 1630112 - RNA, 19 nt, Artificial Sequence
  Description of Artificial Sequence: Synthetic oligonucleotide
gauagggcggggcccagca

SEQ ID NO: 1630113 - RNA, 19 nt, Artificial Sequence
  Description of Artificial Sequence: Synthetic oligonucleotide
ugaagggcacggaggcuca

SEQ ID NO: 1630114 - RNA, 19 nt, Artificial Sequence
  Description of Artificial Sequence: Synthetic oligonucleotide
gacaccagaggacauuggu

SEQ ID NO: 1630115 - RNA, 19 nt, Artificial Sequence
  Description of Artificial Sequence: Synthetic oligonucleotide
gcccaugucacgcaacugc

SEQ ID NO: 1630116 - RNA, 19 nt, Artificial Sequence
  Description of Artificial Sequence: Synthetic oligonucleotide
ggcaccaacguauccagca

SEQ ID NO: 1630117 - RNA, 19 nt, Artificial Sequence
  Description of Artificial Sequence: Synthetic oligonucleotide
ggagcuugccagcaauaag

SEQ ID NO: 1630118 - RNA, 19 nt, Artificial Sequence
  Description of Artificial Sequence: Synthetic oligonucleotide
acaccagaggacauuggug

SEQ ID NO: 1630119 - RNA, 19 nt, Artificial Sequence
  Description of Artificial Sequence: Synthetic oligonucleotide
uccggccacaauagaucag

SEQ ID NO: 1630120 - RNA, 19 nt, Artificial Sequence
  Description of Artificial Sequence: Synthetic oligonucleotide
gauuuacggagaacgugga

SEQ ID NO: 1630121 - RNA, 19 nt, Artificial Sequence
  Description of Artificial Sequence: Synthetic oligonucleotide
cucaucauccgagagccca

SEQ ID NO: 1630122 - RNA, 19 nt, Artificial Sequence
  Description of Artificial Sequence: Synthetic oligonucleotide
accccuagagcaauggggu

SEQ ID NO: 1630123 - RNA, 19 nt, Artificial Sequence
  Description of Artificial Sequence: Synthetic oligonucleotide
ggcauaucucgguacgagc

SEQ ID NO: 1630124 - RNA, 19 nt, Artificial Sequence
  Description of Artificial Sequence: Synthetic oligonucleotide
uaucucgguacgagcugga

SEQ ID NO: 1630125 - RNA, 19 nt, Artificial Sequence
  Description of Artificial Sequence: Synthetic oligonucleotide
agggaauauucucccacuu

SEQ ID NO: 1630126 - RNA, 19 nt, Artificial Sequence
  Description of Artificial Sequence: Synthetic oligonucleotide
gcuugggugaaagucgucc

SEQ ID NO: 1630127 - RNA, 19 nt, Artificial Sequence
  Description of Artificial Sequence: Synthetic oligonucleotide
cuaccgagugcagaaccag

SEQ ID NO: 1630128 - RNA, 19 nt, Artificial Sequence
  Description of Artificial Sequence: Synthetic oligonucleotide
uggagcuugccagcaauaa

SEQ ID NO: 1630129 - RNA, 19 nt, Artificial Sequence
  Description of Artificial Sequence: Synthetic oligonucleotide
gcaacugaagaauugacuu

SEQ ID NO: 1630130 - RNA, 19 nt, Artificial Sequence
  Description of Artificial Sequence: Synthetic oligonucleotide
aucagcuccggaucuggaa

SEQ ID NO: 1630131 - RNA, 19 nt, Artificial Sequence
  Description of Artificial Sequence: Synthetic oligonucleotide
ucguuggugaugggugucc

SEQ ID NO: 1630132 - RNA, 19 nt, Artificial Sequence
  Description of Artificial Sequence: Synthetic oligonucleotide
gcuagguguacugcuagag

SEQ ID NO: 1630133 - RNA, 19 nt, Artificial Sequence
  Description of Artificial Sequence: Synthetic oligonucleotide
ggaacccggccgcagagag

SEQ ID NO: 1630134 - RNA, 19 nt, Artificial Sequence
  Description of Artificial Sequence: Synthetic oligonucleotide
gaaggaacccggccgcaga

SEQ ID NO: 1630135 - RNA, 19 nt, Artificial Sequence
  Description of Artificial Sequence: Synthetic oligonucleotide
ccuggcauaucucgguacg

SEQ ID NO: 1630136 - RNA, 19 nt, Artificial Sequence
  Description of Artificial Sequence: Synthetic oligonucleotide
aucguuggugauggguguc

SEQ ID NO: 1630137 - RNA, 19 nt, Artificial Sequence
  Description of Artificial Sequence: Synthetic oligonucleotide
acggagaacguggacugug

SEQ ID NO: 1630138 - RNA, 19 nt, Artificial Sequence
  Description of Artificial Sequence: Synthetic oligonucleotide
cagaaugauggcauugacu

SEQ ID NO: 1630139 - RNA, 19 nt, Artificial Sequence
  Description of Artificial Sequence: Synthetic oligonucleotide
gagccgccgguguaaacac

SEQ ID NO: 1630140 - RNA, 19 nt, Artificial Sequence
  Description of Artificial Sequence: Synthetic oligonucleotide
ccgagagcccaucaaacag

SEQ ID NO: 1630141 - RNA, 19 nt, Artificial Sequence
  Description of Artificial Sequence: Synthetic oligonucleotide
gauauccccuccagucgcc

SEQ ID NO: 1630142 - RNA, 19 nt, Artificial Sequence
  Description of Artificial Sequence: Synthetic oligonucleotide
gcaugcuucgggaagagga

SEQ ID NO: 1630143 - RNA, 19 nt, Artificial Sequence
  Description of Artificial Sequence: Synthetic oligonucleotide
uauaagccccuagggaaua

SEQ ID NO: 1630144 - RNA, 19 nt, Artificial Sequence
  Description of Artificial Sequence: Synthetic oligonucleotide
agcuagguguacugcuaga

SEQ ID NO: 1630145 - RNA, 19 nt, Artificial Sequence
  Description of Artificial Sequence: Synthetic oligonucleotide
agcugcuuggauauccccu

SEQ ID NO: 1630146 - RNA, 19 nt, Artificial Sequence
  Description of Artificial Sequence: Synthetic oligonucleotide
uggguacaagaaguucaug

SEQ ID NO: 1630147 - RNA, 19 nt, Artificial Sequence
  Description of Artificial Sequence: Synthetic oligonucleotide
cuccagucgccugaagggc

SEQ ID NO: 1630148 - RNA, 19 nt, Artificial Sequence
  Description of Artificial Sequence: Synthetic oligonucleotide
cugcuagagggcguagacc

SEQ ID NO: 1630149 - RNA, 19 nt, Artificial Sequence
  Description of Artificial Sequence: Synthetic oligonucleotide
gcucaggccaagauuuacg

SEQ ID NO: 1630150 - RNA, 19 nt, Artificial Sequence
  Description of Artificial Sequence: Synthetic oligonucleotide
ccccuagggaauauucucc

SEQ ID NO: 1630151 - RNA, 19 nt, Artificial Sequence
  Description of Artificial Sequence: Synthetic oligonucleotide
ugggugucccugacgggac

SEQ ID NO: 1630152 - RNA, 19 nt, Artificial Sequence
  Description of Artificial Sequence: Synthetic oligonucleotide
gcuuggauauccccuccag

SEQ ID NO: 1630153 - RNA, 19 nt, Artificial Sequence
  Description of Artificial Sequence: Synthetic oligonucleotide
guuucugaucaggcucagg

SEQ ID NO: 1630154 - RNA, 19 nt, Artificial Sequence
  Description of Artificial Sequence: Synthetic oligonucleotide
uaaagaccgccucccugua

SEQ ID NO: 1630155 - RNA, 19 nt, Artificial Sequence
  Description of Artificial Sequence: Synthetic oligonucleotide
cuccccgucccgcggaagg

SEQ ID NO: 1630156 - RNA, 19 nt, Artificial Sequence
  Description of Artificial Sequence: Synthetic oligonucleotide
aagugccuccuuugaggaa

SEQ ID NO: 1630157 - RNA, 19 nt, Artificial Sequence
  Description of Artificial Sequence: Synthetic oligonucleotide
caagauuuacggagaacgu

SEQ ID NO: 1630158 - RNA, 19 nt, Artificial Sequence
  Description of Artificial Sequence: Synthetic oligonucleotide
agcacccggaacucccuca

SEQ ID NO: 1630159 - RNA, 19 nt, Artificial Sequence
  Description of Artificial Sequence: Synthetic oligonucleotide
cagcaugcugggaucagca

SEQ ID NO: 1630160 - RNA, 19 nt, Artificial Sequence
  Description of Artificial Sequence: Synthetic oligonucleotide
ucuuucgcgcucucucuuu

SEQ ID NO: 1630161 - RNA, 19 nt, Artificial Sequence
  Description of Artificial Sequence: Synthetic oligonucleotide
guggacccaggcugaauac

SEQ ID NO: 1630162 - RNA, 19 nt, Artificial Sequence
  Description of Artificial Sequence: Synthetic oligonucleotide
agagggcguagaccgggug

SEQ ID NO: 1630163 - RNA, 19 nt, Artificial Sequence
  Description of Artificial Sequence: Synthetic oligonucleotide
uauccccuccagucgccug

SEQ ID NO: 1630164 - RNA, 19 nt, Artificial Sequence
  Description of Artificial Sequence: Synthetic oligonucleotide
uacgagcuggagggcaugc

SEQ ID NO: 1630165 - RNA, 19 nt, Artificial Sequence
  Description of Artificial Sequence: Synthetic oligonucleotide
aggguuuggucaucuuuua

SEQ ID NO: 1630166 - RNA, 19 nt, Artificial Sequence
  Description of Artificial Sequence: Synthetic oligonucleotide
aaucagcuccggaucugga

SEQ ID NO: 1630167 - RNA, 19 nt, Artificial Sequence
  Description of Artificial Sequence: Synthetic oligonucleotide
agucgccugaagggcacgg

SEQ ID NO: 1630168 - RNA, 19 nt, Artificial Sequence
  Description of Artificial Sequence: Synthetic oligonucleotide
gggugagcaggcaccaacg

SEQ ID NO: 1630169 - RNA, 19 nt, Artificial Sequence
  Description of Artificial Sequence: Synthetic oligonucleotide
ugcaacuugcuaggcacuu

SEQ ID NO: 1630170 - RNA, 19 nt, Artificial Sequence
  Description of Artificial Sequence: Synthetic oligonucleotide
uagagggcguagaccgggu

SEQ ID NO: 1630171 - RNA, 19 nt, Artificial Sequence
  Description of Artificial Sequence: Synthetic oligonucleotide
cuaggcacuuggguacaag

SEQ ID NO: 1630172 - RNA, 19 nt, Artificial Sequence
  Description of Artificial Sequence: Synthetic oligonucleotide
gguagccacaaugaucuga

SEQ ID NO: 1630173 - RNA, 19 nt, Artificial Sequence
  Description of Artificial Sequence: Synthetic oligonucleotide
cugggugauagggcggggc

SEQ ID NO: 1630174 - RNA, 19 nt, Artificial Sequence
  Description of Artificial Sequence: Synthetic oligonucleotide
uccggaucuggaacagauu

SEQ ID NO: 1630175 - RNA, 19 nt, Artificial Sequence
  Description of Artificial Sequence: Synthetic oligonucleotide
agucaaggguuuggucauc

SEQ ID NO: 1630176 - RNA, 19 nt, Artificial Sequence
  Description of Artificial Sequence: Synthetic oligonucleotide
acuguaccccagggaggcc

SEQ ID NO: 1630177 - RNA, 19 nt, Artificial Sequence
  Description of Artificial Sequence: Synthetic oligonucleotide
uuuuagcuuccggccacaa

SEQ ID NO: 1630178 - RNA, 19 nt, Artificial Sequence
  Description of Artificial Sequence: Synthetic oligonucleotide
gggugcuugggugaaaguc

SEQ ID NO: 1630179 - RNA, 19 nt, Artificial Sequence
  Description of Artificial Sequence: Synthetic oligonucleotide
agggcaugcuucgggaaga

SEQ ID NO: 1630180 - RNA, 19 nt, Artificial Sequence
  Description of Artificial Sequence: Synthetic oligonucleotide
gagaaccccuagagcaaug

SEQ ID NO: 1630181 - RNA, 19 nt, Artificial Sequence
  Description of Artificial Sequence: Synthetic oligonucleotide
augcuucgggaagaggagu

SEQ ID NO: 1630182 - RNA, 19 nt, Artificial Sequence
  Description of Artificial Sequence: Synthetic oligonucleotide
caauggggucacugcugag

SEQ ID NO: 1630183 - RNA, 19 nt, Artificial Sequence
  Description of Artificial Sequence: Synthetic oligonucleotide
aucucgguacgagcuggag

SEQ ID NO: 1630184 - RNA, 19 nt, Artificial Sequence
  Description of Artificial Sequence: Synthetic oligonucleotide
ugcuaggcacuuggguaca

SEQ ID NO: 1630185 - RNA, 19 nt, Artificial Sequence
  Description of Artificial Sequence: Synthetic oligonucleotide
agggcguagaccgggugcu

SEQ ID NO: 1630186 - RNA, 19 nt, Artificial Sequence
  Description of Artificial Sequence: Synthetic oligonucleotide
cuugggugaaagucguccu

SEQ ID NO: 1630187 - RNA, 19 nt, Artificial Sequence
  Description of Artificial Sequence: Synthetic oligonucleotide
cagaucaaucagcuccgga

SEQ ID NO: 1630188 - RNA, 19 nt, Artificial Sequence
  Description of Artificial Sequence: Synthetic oligonucleotide
ucaaggguuuggucaucuu

SEQ ID NO: 1630189 - RNA, 19 nt, Artificial Sequence
  Description of Artificial Sequence: Synthetic oligonucleotide
ggccacaauagaucagauc

SEQ ID NO: 1630190 - RNA, 19 nt, Artificial Sequence
  Description of Artificial Sequence: Synthetic oligonucleotide
gccccuagggaauauucuc

SEQ ID NO: 1630191 - RNA, 19 nt, Artificial Sequence
  Description of Artificial Sequence: Synthetic oligonucleotide
cuauaagccccuagggaau

SEQ ID NO: 1630192 - RNA, 19 nt, Artificial Sequence
  Description of Artificial Sequence: Synthetic oligonucleotide
agccccuagggaauauucu

SEQ ID NO: 1630193 - RNA, 19 nt, Artificial Sequence
  Description of Artificial Sequence: Synthetic oligonucleotide
gcuuuagaaacgaaaugcu

SEQ ID NO: 1630194 - RNA, 19 nt, Artificial Sequence
  Description of Artificial Sequence: Synthetic oligonucleotide
gcguagaccgggugcuugg

SEQ ID NO: 1630195 - RNA, 19 nt, Artificial Sequence
  Description of Artificial Sequence: Synthetic oligonucleotide
gugagcaggcaccaacgua

SEQ ID NO: 1630196 - RNA, 19 nt, Artificial Sequence
  Description of Artificial Sequence: Synthetic oligonucleotide
gcugcuuuagaaacgaaau

SEQ ID NO: 1630197 - RNA, 19 nt, Artificial Sequence
  Description of Artificial Sequence: Synthetic oligonucleotide
ugcuugggugaaagucguc

SEQ ID NO: 1630198 - RNA, 19 nt, Artificial Sequence
  Description of Artificial Sequence: Synthetic oligonucleotide
ugacuagagcugggugagc

SEQ ID NO: 1630199 - RNA, 19 nt, Artificial Sequence
  Description of Artificial Sequence: Synthetic oligonucleotide
agaaguucauggggcuccu

SEQ ID NO: 1630200 - RNA, 19 nt, Artificial Sequence
  Description of Artificial Sequence: Synthetic oligonucleotide
ggugaaagucguccucauc

SEQ ID NO: 1630201 - RNA, 19 nt, Artificial Sequence
  Description of Artificial Sequence: Synthetic oligonucleotide
ggcauugacuagagcuggg

SEQ ID NO: 1630202 - RNA, 19 nt, Artificial Sequence
  Description of Artificial Sequence: Synthetic oligonucleotide
ccagcaauaagcugcuuua

SEQ ID NO: 1630203 - RNA, 19 nt, Artificial Sequence
  Description of Artificial Sequence: Synthetic oligonucleotide
cuuggauauccccuccagu

SEQ ID NO: 1630204 - RNA, 19 nt, Artificial Sequence
  Description of Artificial Sequence: Synthetic oligonucleotide
ccuggcauuggggugcugc

SEQ ID NO: 1630205 - RNA, 19 nt, Artificial Sequence
  Description of Artificial Sequence: Synthetic oligonucleotide
cgcggaaggaacccggccg

SEQ ID NO: 1630206 - RNA, 19 nt, Artificial Sequence
  Description of Artificial Sequence: Synthetic oligonucleotide
gccaccuggcauaucucgg

SEQ ID NO: 1630207 - RNA, 19 nt, Artificial Sequence
  Description of Artificial Sequence: Synthetic oligonucleotide
ugccugcuaccgagugcag

SEQ ID NO: 1630208 - RNA, 19 nt, Artificial Sequence
  Description of Artificial Sequence: Synthetic oligonucleotide
ugauagggcggggcccagc

SEQ ID NO: 1630209 - RNA, 19 nt, Artificial Sequence
  Description of Artificial Sequence: Synthetic oligonucleotide
cugaucaggcucaggccaa

SEQ ID NO: 1630210 - RNA, 19 nt, Artificial Sequence
  Description of Artificial Sequence: Synthetic oligonucleotide
gaugccagucugagagaga

SEQ ID NO: 1630211 - RNA, 19 nt, Artificial Sequence
  Description of Artificial Sequence: Synthetic oligonucleotide
uaagccccuagggaauauu

SEQ ID NO: 1630212 - RNA, 19 nt, Artificial Sequence
  Description of Artificial Sequence: Synthetic oligonucleotide
ggagaacguggacugugga

SEQ ID NO: 1630213 - RNA, 19 nt, Artificial Sequence
  Description of Artificial Sequence: Synthetic oligonucleotide
gaucugauccagagauucu

SEQ ID NO: 1630214 - RNA, 19 nt, Artificial Sequence
  Description of Artificial Sequence: Synthetic oligonucleotide
uacggagaacguggacugu

SEQ ID NO: 1630215 - RNA, 19 nt, Artificial Sequence
  Description of Artificial Sequence: Synthetic oligonucleotide
ggcaacugaagaauugacu

SEQ ID NO: 1630216 - RNA, 19 nt, Artificial Sequence
  Description of Artificial Sequence: Synthetic oligonucleotide
cacccggaacucccucagg

SEQ ID NO: 1630217 - RNA, 19 nt, Artificial Sequence
  Description of Artificial Sequence: Synthetic oligonucleotide
gcucacucugggugauagg

SEQ ID NO: 1630218 - RNA, 19 nt, Artificial Sequence
  Description of Artificial Sequence: Synthetic oligonucleotide
cuccggaucuggaacagau

SEQ ID NO: 1630219 - RNA, 19 nt, Artificial Sequence
  Description of Artificial Sequence: Synthetic oligonucleotide
gagagccgccgguguaaac

SEQ ID NO: 1630220 - RNA, 19 nt, Artificial Sequence
  Description of Artificial Sequence: Synthetic oligonucleotide
auauccccuccagucgccu

SEQ ID NO: 1630221 - RNA, 19 nt, Artificial Sequence
  Description of Artificial Sequence: Synthetic oligonucleotide
ggggcgaguggcuggucag

SEQ ID NO: 1630222 - RNA, 19 nt, Artificial Sequence
  Description of Artificial Sequence: Synthetic oligonucleotide
gcauaucucgguacgagcu

SEQ ID NO: 1630223 - RNA, 19 nt, Artificial Sequence
  Description of Artificial Sequence: Synthetic oligonucleotide
ucgguacgagcuggagggc

SEQ ID NO: 1630224 - RNA, 19 nt, Artificial Sequence
  Description of Artificial Sequence: Synthetic oligonucleotide
agaauggcccugagugcca

SEQ ID NO: 1630225 - RNA, 19 nt, Artificial Sequence
  Description of Artificial Sequence: Synthetic oligonucleotide
ccugcuaccgagugcagaa

SEQ ID NO: 1630226 - RNA, 19 nt, Artificial Sequence
  Description of Artificial Sequence: Synthetic oligonucleotide
caucauccgagagcccauc

SEQ ID NO: 1630227 - RNA, 19 nt, Artificial Sequence
  Description of Artificial Sequence: Synthetic oligonucleotide
gaacccggccgcagagagc

SEQ ID NO: 1630228 - RNA, 19 nt, Artificial Sequence
  Description of Artificial Sequence: Synthetic oligonucleotide
gaucaggcucaggccaaga

SEQ ID NO: 1630229 - RNA, 19 nt, Artificial Sequence
  Description of Artificial Sequence: Synthetic oligonucleotide
cagaugccagucugagaga

SEQ ID NO: 1630230 - RNA, 19 nt, Artificial Sequence
  Description of Artificial Sequence: Synthetic oligonucleotide
cacugcugagaccuggggu

SEQ ID NO: 1630231 - RNA, 19 nt, Artificial Sequence
  Description of Artificial Sequence: Synthetic oligonucleotide
gcgggagcuagguguacug

SEQ ID NO: 1630232 - RNA, 19 nt, Artificial Sequence
  Description of Artificial Sequence: Synthetic oligonucleotide
gugcagugugcagcacccg

SEQ ID NO: 1630233 - RNA, 19 nt, Artificial Sequence
  Description of Artificial Sequence: Synthetic oligonucleotide
auaagccccuagggaauau

SEQ ID NO: 1630234 - RNA, 19 nt, Artificial Sequence
  Description of Artificial Sequence: Synthetic oligonucleotide
gcccaucaaacaggaagcc

SEQ ID NO: 1630235 - RNA, 19 nt, Artificial Sequence
  Description of Artificial Sequence: Synthetic oligonucleotide
guacgagcuggagggcaug

SEQ ID NO: 1630236 - RNA, 19 nt, Artificial Sequence
  Description of Artificial Sequence: Synthetic oligonucleotide
ggaguacuggccagggcca

SEQ ID NO: 1630237 - RNA, 19 nt, Artificial Sequence
  Description of Artificial Sequence: Synthetic oligonucleotide
augcugggaucagcaaaga

SEQ ID NO: 1630238 - RNA, 19 nt, Artificial Sequence
  Description of Artificial Sequence: Synthetic oligonucleotide
gcuagagggcguagaccgg

SEQ ID NO: 1630239 - RNA, 19 nt, Artificial Sequence
  Description of Artificial Sequence: Synthetic oligonucleotide
cugcuaccgagugcagaac

SEQ ID NO: 1630240 - RNA, 19 nt, Artificial Sequence
  Description of Artificial Sequence: Synthetic oligonucleotide
gaaaugcuauaagccccua

SEQ ID NO: 1630241 - RNA, 19 nt, Artificial Sequence
  Description of Artificial Sequence: Synthetic oligonucleotide
ggcucaggccaagauuuac

SEQ ID NO: 1630242 - RNA, 19 nt, Artificial Sequence
  Description of Artificial Sequence: Synthetic oligonucleotide
aggaagccaccuggcauau

SEQ ID NO: 1630243 - RNA, 19 nt, Artificial Sequence
  Description of Artificial Sequence: Synthetic oligonucleotide
cagugugcagcacccggaa

SEQ ID NO: 1630244 - RNA, 19 nt, Artificial Sequence
  Description of Artificial Sequence: Synthetic oligonucleotide
cuggcauaucucgguacga

SEQ ID NO: 1630245 - RNA, 19 nt, Artificial Sequence
  Description of Artificial Sequence: Synthetic oligonucleotide
ccuagagcaauggggucac

SEQ ID NO: 1630246 - RNA, 19 nt, Artificial Sequence
  Description of Artificial Sequence: Synthetic oligonucleotide
gggagcuagguguacugcu

SEQ ID NO: 1630247 - RNA, 19 nt, Artificial Sequence
  Description of Artificial Sequence: Synthetic oligonucleotide
ggugauagggcggggccca

SEQ ID NO: 1630248 - RNA, 19 nt, Artificial Sequence
  Description of Artificial Sequence: Synthetic oligonucleotide
gucaaggguuuggucaucu

SEQ ID NO: 1630249 - RNA, 19 nt, Artificial Sequence
  Description of Artificial Sequence: Synthetic oligonucleotide
gcaacuugcuaggcacuug

SEQ ID NO: 1630250 - RNA, 19 nt, Artificial Sequence
  Description of Artificial Sequence: Synthetic oligonucleotide
ccugaagaauggcccugag

SEQ ID NO: 1630251 - RNA, 19 nt, Artificial Sequence
  Description of Artificial Sequence: Synthetic oligonucleotide
guuggugaugggugucccu

SEQ ID NO: 1630252 - RNA, 19 nt, Artificial Sequence
  Description of Artificial Sequence: Synthetic oligonucleotide
gcuaccgagugcagaacca

SEQ ID NO: 1630253 - RNA, 19 nt, Artificial Sequence
  Description of Artificial Sequence: Synthetic oligonucleotide
ggggugcugccugcuaccg

SEQ ID NO: 1630254 - RNA, 19 nt, Artificial Sequence
  Description of Artificial Sequence: Synthetic oligonucleotide
gccaagauuuacggagaac

SEQ ID NO: 1630255 - RNA, 19 nt, Artificial Sequence
  Description of Artificial Sequence: Synthetic oligonucleotide
uccccgucccgcggaagga

SEQ ID NO: 1630256 - RNA, 19 nt, Artificial Sequence
  Description of Artificial Sequence: Synthetic oligonucleotide
ucuccccgucccgcggaag

SEQ ID NO: 1630257 - RNA, 19 nt, Artificial Sequence
  Description of Artificial Sequence: Synthetic oligonucleotide
ggcguagaccgggugcuug

SEQ ID NO: 1630258 - RNA, 19 nt, Artificial Sequence
  Description of Artificial Sequence: Synthetic oligonucleotide
aggaacccggccgcagaga

SEQ ID NO: 1630259 - RNA, 19 nt, Artificial Sequence
  Description of Artificial Sequence: Synthetic oligonucleotide
agagagccgccgguguaaa

SEQ ID NO: 1630260 - RNA, 19 nt, Artificial Sequence
  Description of Artificial Sequence: Synthetic oligonucleotide
cagcuccacuguaccccag

SEQ ID NO: 1630261 - RNA, 19 nt, Artificial Sequence
  Description of Artificial Sequence: Synthetic oligonucleotide
cagucgccugaagggcacg

SEQ ID NO: 1630262 - RNA, 19 nt, Artificial Sequence
  Description of Artificial Sequence: Synthetic oligonucleotide
ccagucgccugaagggcac

SEQ ID NO: 1630263 - RNA, 19 nt, Artificial Sequence
  Description of Artificial Sequence: Synthetic oligonucleotide
guagaccgggugcuugggu

SEQ ID NO: 1630264 - RNA, 19 nt, Artificial Sequence
  Description of Artificial Sequence: Synthetic oligonucleotide
gcuggagggcaugcuucgg

SEQ ID NO: 1630265 - RNA, 19 nt, Artificial Sequence
  Description of Artificial Sequence: Synthetic oligonucleotide
ggagggcaugcuucgggaa

SEQ ID NO: 1630266 - RNA, 19 nt, Artificial Sequence
  Description of Artificial Sequence: Synthetic oligonucleotide
ggugagcaggcaccaacgu

SEQ ID NO: 1630267 - RNA, 19 nt, Artificial Sequence
  Description of Artificial Sequence: Synthetic oligonucleotide
ggcccugagugccaggagu

SEQ ID NO: 1630268 - RNA, 19 nt, Artificial Sequence
  Description of Artificial Sequence: Synthetic oligonucleotide
ggagcuagguguacugcua

SEQ ID NO: 1630269 - RNA, 19 nt, Artificial Sequence
  Description of Artificial Sequence: Synthetic oligonucleotide
ccggccacaauagaucaga

SEQ ID NO: 1630270 - RNA, 19 nt, Artificial Sequence
  Description of Artificial Sequence: Synthetic oligonucleotide
cagagagccgccgguguaa

SEQ ID NO: 1630271 - RNA, 19 nt, Artificial Sequence
  Description of Artificial Sequence: Synthetic oligonucleotide
ccgucccgcggaaggaacc

SEQ ID NO: 1630272 - RNA, 19 nt, Artificial Sequence
  Description of Artificial Sequence: Synthetic oligonucleotide
ggaauugccucugcaacuu

SEQ ID NO: 1630273 - RNA, 19 nt, Artificial Sequence
  Description of Artificial Sequence: Synthetic oligonucleotide
guaccccagggaggccggg

SEQ ID NO: 1630274 - RNA, 19 nt, Artificial Sequence
  Description of Artificial Sequence: Synthetic oligonucleotide
gcagugugcagcacccgga

SEQ ID NO: 1630275 - RNA, 19 nt, Artificial Sequence
  Description of Artificial Sequence: Synthetic oligonucleotide
gggcaugcuucgggaagag

SEQ ID NO: 1630276 - RNA, 19 nt, Artificial Sequence
  Description of Artificial Sequence: Synthetic oligonucleotide
ccagucugagagagacauc

SEQ ID NO: 1630277 - RNA, 19 nt, Artificial Sequence
  Description of Artificial Sequence: Synthetic oligonucleotide
ccgcggaaggaacccggcc

SEQ ID NO: 1630278 - RNA, 19 nt, Artificial Sequence
  Description of Artificial Sequence: Synthetic oligonucleotide
gucgccugaagggcacgga

SEQ ID NO: 1630279 - RNA, 19 nt, Artificial Sequence
  Description of Artificial Sequence: Synthetic oligonucleotide
cccgcggaaggaacccggc

SEQ ID NO: 1630280 - RNA, 19 nt, Artificial Sequence
  Description of Artificial Sequence: Synthetic oligonucleotide
agagcccaucaaacaggaa

SEQ ID NO: 1630281 - RNA, 19 nt, Artificial Sequence
  Description of Artificial Sequence: Synthetic oligonucleotide
uccccuccagucgccugaa

SEQ ID NO: 1630282 - RNA, 19 nt, Artificial Sequence
  Description of Artificial Sequence: Synthetic oligonucleotide
cacggaggcucagcucauc

SEQ ID NO: 1630283 - RNA, 19 nt, Artificial Sequence
  Description of Artificial Sequence: Synthetic oligonucleotide
ccccuagagcaaugggguc

SEQ ID NO: 1630284 - RNA, 19 nt, Artificial Sequence
  Description of Artificial Sequence: Synthetic oligonucleotide
gcauugacuagagcugggu

SEQ ID NO: 1630285 - RNA, 19 nt, Artificial Sequence
  Description of Artificial Sequence: Synthetic oligonucleotide
gccugaagaauggcccuga

SEQ ID NO: 1630286 - RNA, 19 nt, Artificial Sequence
  Description of Artificial Sequence: Synthetic oligonucleotide
gaccgggugcuugggugaa

SEQ ID NO: 1630287 - RNA, 19 nt, Artificial Sequence
  Description of Artificial Sequence: Synthetic oligonucleotide
cgaaaugcuauaagccccu

SEQ ID NO: 1630288 - RNA, 19 nt, Artificial Sequence
  Description of Artificial Sequence: Synthetic oligonucleotide
gggcgaguggcuggucagc

SEQ ID NO: 1630289 - RNA, 19 nt, Artificial Sequence
  Description of Artificial Sequence: Synthetic oligonucleotide
ccgggcgggagcuaggugu

SEQ ID NO: 1630290 - RNA, 19 nt, Artificial Sequence
  Description of Artificial Sequence: Synthetic oligonucleotide
gcgaguggcuggucagcca

SEQ ID NO: 1630291 - RNA, 19 nt, Artificial Sequence
  Description of Artificial Sequence: Synthetic oligonucleotide
gggugucccugacgggaca

SEQ ID NO: 1630292 - RNA, 19 nt, Artificial Sequence
  Description of Artificial Sequence: Synthetic oligonucleotide
cuggagggcuuggcuaaaa

SEQ ID NO: 1630293 - RNA, 19 nt, Artificial Sequence
  Description of Artificial Sequence: Synthetic oligonucleotide
gugccaggaguuggggugu

SEQ ID NO: 1630294 - RNA, 19 nt, Artificial Sequence
  Description of Artificial Sequence: Synthetic oligonucleotide
cgggaagaggagucagcuc

SEQ ID NO: 1630295 - RNA, 19 nt, Artificial Sequence
  Description of Artificial Sequence: Synthetic oligonucleotide
aggcucaggccaagauuua

SEQ ID NO: 1630296 - RNA, 19 nt, Artificial Sequence
  Description of Artificial Sequence: Synthetic oligonucleotide
ggagaaccccuagagcaau

SEQ ID NO: 1630297 - RNA, 19 nt, Artificial Sequence
  Description of Artificial Sequence: Synthetic oligonucleotide
cacugccagaugccagucu

SEQ ID NO: 1630298 - RNA, 19 nt, Artificial Sequence
  Description of Artificial Sequence: Synthetic oligonucleotide
gccugcuaccgagugcaga

SEQ ID NO: 1630299 - RNA, 19 nt, Artificial Sequence
  Description of Artificial Sequence: Synthetic oligonucleotide
cgggagcuagguguacugc

SEQ ID NO: 1630300 - RNA, 19 nt, Artificial Sequence
  Description of Artificial Sequence: Synthetic oligonucleotide
cccggccgcagagagccgc

SEQ ID NO: 1630301 - RNA, 19 nt, Artificial Sequence
  Description of Artificial Sequence: Synthetic oligonucleotide
cccugagugccaggaguug

SEQ ID NO: 1630302 - RNA, 19 nt, Artificial Sequence
  Description of Artificial Sequence: Synthetic oligonucleotide
cgucccgcggaaggaaccc

SEQ ID NO: 1630303 - RNA, 19 nt, Artificial Sequence
  Description of Artificial Sequence: Synthetic oligonucleotide
guagagcaucagauauauu

SEQ ID NO: 1630304 - RNA, 19 nt, Artificial Sequence
  Description of Artificial Sequence: Synthetic oligonucleotide
ccuggagcuugccagcaau

SEQ ID NO: 1630305 - RNA, 19 nt, Artificial Sequence
  Description of Artificial Sequence: Synthetic oligonucleotide
gcuccggaucuggaacaga

SEQ ID NO: 1630306 - RNA, 19 nt, Artificial Sequence
  Description of Artificial Sequence: Synthetic oligonucleotide
ggcgggagcuagguguacu

SEQ ID NO: 1630307 - RNA, 19 nt, Artificial Sequence
  Description of Artificial Sequence: Synthetic oligonucleotide
acccggccgcagagagccg

SEQ ID NO: 1630308 - RNA, 19 nt, Artificial Sequence
  Description of Artificial Sequence: Synthetic oligonucleotide
ggaagccaccuggcauauc

SEQ ID NO: 1630309 - RNA, 19 nt, Artificial Sequence
  Description of Artificial Sequence: Synthetic oligonucleotide
gcuaggcacuuggguacaa

SEQ ID NO: 1630310 - RNA, 19 nt, Artificial Sequence
  Description of Artificial Sequence: Synthetic oligonucleotide
ccgagugcagaaccagaau

SEQ ID NO: 1630311 - RNA, 19 nt, Artificial Sequence
  Description of Artificial Sequence: Synthetic oligonucleotide
gggcgggagcuagguguac

SEQ ID NO: 1630312 - RNA, 19 nt, Artificial Sequence
  Description of Artificial Sequence: Synthetic oligonucleotide
cuguggacccaggcugaau

SEQ ID NO: 1630313 - RNA, 19 nt, Artificial Sequence
  Description of Artificial Sequence: Synthetic oligonucleotide
gcccugagugccaggaguu

SEQ ID NO: 1630314 - RNA, 19 nt, Artificial Sequence
  Description of Artificial Sequence: Synthetic oligonucleotide
gcagcacccggaacucccu

SEQ ID NO: 1630315 - RNA, 19 nt, Artificial Sequence
  Description of Artificial Sequence: Synthetic oligonucleotide
ccaacguauccagcaugcu

SEQ ID NO: 1630316 - RNA, 19 nt, Artificial Sequence
  Description of Artificial Sequence: Synthetic oligonucleotide
cagcucacucugggugaua

SEQ ID NO: 1630317 - RNA, 19 nt, Artificial Sequence
  Description of Artificial Sequence: Synthetic oligonucleotide
cggccgcagagagccgccg

SEQ ID NO: 1630318 - RNA, 19 nt, Artificial Sequence
  Description of Artificial Sequence: Synthetic oligonucleotide
cgcagagagccgccggugu

SEQ ID NO: 1630319 - RNA, 19 nt, Artificial Sequence
  Description of Artificial Sequence: Synthetic oligonucleotide
cgggcgggagcuaggugua

SEQ ID NO: 1630320 - RNA, 19 nt, Artificial Sequence
  Description of Artificial Sequence: Synthetic oligonucleotide
cggccacaauagaucagau

SEQ ID NO: 1630321 - RNA, 19 nt, Artificial Sequence
  Description of Artificial Sequence: Synthetic oligonucleotide
ccccgucccgcggaaggaa

SEQ ID NO: 1630322 - RNA, 19 nt, Artificial Sequence
  Description of Artificial Sequence: Synthetic oligonucleotide
gcacggaggcucagcucau

SEQ ID NO: 1630323 - RNA, 19 nt, Artificial Sequence
  Description of Artificial Sequence: Synthetic oligonucleotide
cgggugcuugggugaaagu

SEQ ID NO: 1630324 - RNA, 19 nt, Artificial Sequence
  Description of Artificial Sequence: Synthetic oligonucleotide
cgccucccuguaggaggag

SEQ ID NO: 1630325 - RNA, 19 nt, Artificial Sequence
  Description of Artificial Sequence: Synthetic oligonucleotide
uguuucaacagacuaaucu

SEQ ID NO: 1630326 - RNA, 19 nt, Artificial Sequence
  Description of Artificial Sequence: Synthetic oligonucleotide
agccguuccacauacaggc

SEQ ID NO: 1630327 - RNA, 19 nt, Artificial Sequence
  Description of Artificial Sequence: Synthetic oligonucleotide
gaguaaagggguuagagac

SEQ ID NO: 1630328 - RNA, 19 nt, Artificial Sequence
  Description of Artificial Sequence: Synthetic oligonucleotide
agugcuuuuauuucuggag

SEQ ID NO: 1630329 - RNA, 19 nt, Artificial Sequence
  Description of Artificial Sequence: Synthetic oligonucleotide
ugcgucuucagacugaaga

SEQ ID NO: 1630330 - RNA, 19 nt, Artificial Sequence
  Description of Artificial Sequence: Synthetic oligonucleotide
uuuggaggacuccaggcgg

SEQ ID NO: 1630331 - RNA, 19 nt, Artificial Sequence
  Description of Artificial Sequence: Synthetic oligonucleotide
uucaacagacuaaucuccg

SEQ ID NO: 1630332 - RNA, 19 nt, Artificial Sequence
  Description of Artificial Sequence: Synthetic oligonucleotide
aggguaucuucucauagcg

SEQ ID NO: 1630333 - RNA, 19 nt, Artificial Sequence
  Description of Artificial Sequence: Synthetic oligonucleotide
ucuugaguuccucacaggu

SEQ ID NO: 1630334 - RNA, 19 nt, Artificial Sequence
  Description of Artificial Sequence: Synthetic oligonucleotide
ugaacuggccucuacaggu

SEQ ID NO: 1630335 - RNA, 19 nt, Artificial Sequence
  Description of Artificial Sequence: Synthetic oligonucleotide
aagaccucaggccaagucu

SEQ ID NO: 1630336 - RNA, 19 nt, Artificial Sequence
  Description of Artificial Sequence: Synthetic oligonucleotide
ucuagcaccugaguaaagg

SEQ ID NO: 1630337 - RNA, 19 nt, Artificial Sequence
  Description of Artificial Sequence: Synthetic oligonucleotide
ucaggguaucuucucauag

SEQ ID NO: 1630338 - RNA, 19 nt, Artificial Sequence
  Description of Artificial Sequence: Synthetic oligonucleotide
guuccgacgauacaugucc

SEQ ID NO: 1630339 - RNA, 19 nt, Artificial Sequence
  Description of Artificial Sequence: Synthetic oligonucleotide
caggucucaggcaacaugg

SEQ ID NO: 1630340 - RNA, 19 nt, Artificial Sequence
  Description of Artificial Sequence: Synthetic oligonucleotide
guagugucagauuuuggag

SEQ ID NO: 1630341 - RNA, 19 nt, Artificial Sequence
  Description of Artificial Sequence: Synthetic oligonucleotide
uagcaccugaguaaagggg

SEQ ID NO: 1630342 - RNA, 19 nt, Artificial Sequence
  Description of Artificial Sequence: Synthetic oligonucleotide
guuucaacagacuaaucuc

SEQ ID NO: 1630343 - RNA, 19 nt, Artificial Sequence
  Description of Artificial Sequence: Synthetic oligonucleotide
ucugccucagaccagcgca

SEQ ID NO: 1630344 - RNA, 19 nt, Artificial Sequence
  Description of Artificial Sequence: Synthetic oligonucleotide
ugaguaaagggguuagaga

SEQ ID NO: 1630345 - RNA, 19 nt, Artificial Sequence
  Description of Artificial Sequence: Synthetic oligonucleotide
ucagacaaccacaaccgcu

SEQ ID NO: 1630346 - RNA, 19 nt, Artificial Sequence
  Description of Artificial Sequence: Synthetic oligonucleotide
gguaucuucucauagcgug

SEQ ID NO: 1630347 - RNA, 19 nt, Artificial Sequence
  Description of Artificial Sequence: Synthetic oligonucleotide
aagucugccgcuccagcuc

SEQ ID NO: 1630348 - RNA, 19 nt, Artificial Sequence
  Description of Artificial Sequence: Synthetic oligonucleotide
uuuacugggccacacccac

SEQ ID NO: 1630349 - RNA, 19 nt, Artificial Sequence
  Description of Artificial Sequence: Synthetic oligonucleotide
caagucuccaaccacccgc

SEQ ID NO: 1630350 - RNA, 19 nt, Artificial Sequence
  Description of Artificial Sequence: Synthetic oligonucleotide
agugucagauuuuggagga

SEQ ID NO: 1630351 - RNA, 19 nt, Artificial Sequence
  Description of Artificial Sequence: Synthetic oligonucleotide
caaccuacuuuacugggcc

SEQ ID NO: 1630352 - RNA, 19 nt, Artificial Sequence
  Description of Artificial Sequence: Synthetic oligonucleotide
ucagccuccacuugggaac

SEQ ID NO: 1630353 - RNA, 19 nt, Artificial Sequence
  Description of Artificial Sequence: Synthetic oligonucleotide
uucgauggcuccaaccuac

SEQ ID NO: 1630354 - RNA, 19 nt, Artificial Sequence
  Description of Artificial Sequence: Synthetic oligonucleotide
ggagguuacgcucacuccg

SEQ ID NO: 1630355 - RNA, 19 nt, Artificial Sequence
  Description of Artificial Sequence: Synthetic oligonucleotide
aaguugcgucuucagacug

SEQ ID NO: 1630356 - RNA, 19 nt, Artificial Sequence
  Description of Artificial Sequence: Synthetic oligonucleotide
acccuauccagcccauugc

SEQ ID NO: 1630357 - RNA, 19 nt, Artificial Sequence
  Description of Artificial Sequence: Synthetic oligonucleotide
ugcgcaaugucucccgcag

SEQ ID NO: 1630358 - RNA, 19 nt, Artificial Sequence
  Description of Artificial Sequence: Synthetic oligonucleotide
aacuggccucuacagguuc

SEQ ID NO: 1630359 - RNA, 19 nt, Artificial Sequence
  Description of Artificial Sequence: Synthetic oligonucleotide
cagacaaccacaaccgcug

SEQ ID NO: 1630360 - RNA, 19 nt, Artificial Sequence
  Description of Artificial Sequence: Synthetic oligonucleotide
cugaguaaagggguuagag

SEQ ID NO: 1630361 - RNA, 19 nt, Artificial Sequence
  Description of Artificial Sequence: Synthetic oligonucleotide
ucaacagacuaaucuccgc

SEQ ID NO: 1630362 - RNA, 19 nt, Artificial Sequence
  Description of Artificial Sequence: Synthetic oligonucleotide
acuaaucuccgcugucuuc

SEQ ID NO: 1630363 - RNA, 19 nt, Artificial Sequence
  Description of Artificial Sequence: Synthetic oligonucleotide
acgauacauguccauguag

SEQ ID NO: 1630364 - RNA, 19 nt, Artificial Sequence
  Description of Artificial Sequence: Synthetic oligonucleotide
aguguccugagccugggcu

SEQ ID NO: 1630365 - RNA, 19 nt, Artificial Sequence
  Description of Artificial Sequence: Synthetic oligonucleotide
cuccaaccuacuuuacugg

SEQ ID NO: 1630366 - RNA, 19 nt, Artificial Sequence
  Description of Artificial Sequence: Synthetic oligonucleotide
acauggcuaccucuccacc

SEQ ID NO: 1630367 - RNA, 19 nt, Artificial Sequence
  Description of Artificial Sequence: Synthetic oligonucleotide
uccucuagcaccugaguaa

SEQ ID NO: 1630368 - RNA, 19 nt, Artificial Sequence
  Description of Artificial Sequence: Synthetic oligonucleotide
gguagugucagauuuugga

SEQ ID NO: 1630369 - RNA, 19 nt, Artificial Sequence
  Description of Artificial Sequence: Synthetic oligonucleotide
ucgaaguugcgucuucaga

SEQ ID NO: 1630370 - RNA, 19 nt, Artificial Sequence
  Description of Artificial Sequence: Synthetic oligonucleotide
uggagcaggcacccuaucc

SEQ ID NO: 1630371 - RNA, 19 nt, Artificial Sequence
  Description of Artificial Sequence: Synthetic oligonucleotide
uagcgcaacacccuuuccu

SEQ ID NO: 1630372 - RNA, 19 nt, Artificial Sequence
  Description of Artificial Sequence: Synthetic oligonucleotide
agagguccagauuccuugg

SEQ ID NO: 1630373 - RNA, 19 nt, Artificial Sequence
  Description of Artificial Sequence: Synthetic oligonucleotide
acgaagccgcucuugcagc

SEQ ID NO: 1630374 - RNA, 19 nt, Artificial Sequence
  Description of Artificial Sequence: Synthetic oligonucleotide
accagcgcaagggaggagc

SEQ ID NO: 1630375 - RNA, 19 nt, Artificial Sequence
  Description of Artificial Sequence: Synthetic oligonucleotide
aacacccuuuccuuuuccu

SEQ ID NO: 1630376 - RNA, 19 nt, Artificial Sequence
  Description of Artificial Sequence: Synthetic oligonucleotide
agacugaagaucucggcaa

SEQ ID NO: 1630377 - RNA, 19 nt, Artificial Sequence
  Description of Artificial Sequence: Synthetic oligonucleotide
aucucggcaagcuucugug

SEQ ID NO: 1630378 - RNA, 19 nt, Artificial Sequence
  Description of Artificial Sequence: Synthetic oligonucleotide
cagagguccagauuccuug

SEQ ID NO: 1630379 - RNA, 19 nt, Artificial Sequence
  Description of Artificial Sequence: Synthetic oligonucleotide
augcagccguuccacauac

SEQ ID NO: 1630380 - RNA, 19 nt, Artificial Sequence
  Description of Artificial Sequence: Synthetic oligonucleotide
agcaagacuuugccauagc

SEQ ID NO: 1630381 - RNA, 19 nt, Artificial Sequence
  Description of Artificial Sequence: Synthetic oligonucleotide
acccucuugaguuccucac

SEQ ID NO: 1630382 - RNA, 19 nt, Artificial Sequence
  Description of Artificial Sequence: Synthetic oligonucleotide
ucaguacagccagaggucc

SEQ ID NO: 1630383 - RNA, 19 nt, Artificial Sequence
  Description of Artificial Sequence: Synthetic oligonucleotide
gacgucucgaaguugcguc

SEQ ID NO: 1630384 - RNA, 19 nt, Artificial Sequence
  Description of Artificial Sequence: Synthetic oligonucleotide
acugaagaucucggcaagc

SEQ ID NO: 1630385 - RNA, 19 nt, Artificial Sequence
  Description of Artificial Sequence: Synthetic oligonucleotide
acaggucucaggcaacaug

SEQ ID NO: 1630386 - RNA, 19 nt, Artificial Sequence
  Description of Artificial Sequence: Synthetic oligonucleotide
acagacuaaucuccgcugu

SEQ ID NO: 1630387 - RNA, 19 nt, Artificial Sequence
  Description of Artificial Sequence: Synthetic oligonucleotide
acccuggugagcccgcagc

SEQ ID NO: 1630388 - RNA, 19 nt, Artificial Sequence
  Description of Artificial Sequence: Synthetic oligonucleotide
cacgaagccgcucuugcag

SEQ ID NO: 1630389 - RNA, 19 nt, Artificial Sequence
  Description of Artificial Sequence: Synthetic oligonucleotide
cuugggaaccagagguccg

SEQ ID NO: 1630390 - RNA, 19 nt, Artificial Sequence
  Description of Artificial Sequence: Synthetic oligonucleotide
accuacuuuacugggccac

SEQ ID NO: 1630391 - RNA, 19 nt, Artificial Sequence
  Description of Artificial Sequence: Synthetic oligonucleotide
gcucagacaaccacaaccg

SEQ ID NO: 1630392 - RNA, 19 nt, Artificial Sequence
  Description of Artificial Sequence: Synthetic oligonucleotide
cuguugggccauaaagagc

SEQ ID NO: 1630393 - RNA, 19 nt, Artificial Sequence
  Description of Artificial Sequence: Synthetic oligonucleotide
gcuccaaccuacuuuacug

SEQ ID NO: 1630394 - RNA, 19 nt, Artificial Sequence
  Description of Artificial Sequence: Synthetic oligonucleotide
cuugaguuccucacagguc

SEQ ID NO: 1630395 - RNA, 19 nt, Artificial Sequence
  Description of Artificial Sequence: Synthetic oligonucleotide
aaccacaaccgcuggcgcu

SEQ ID NO: 1630396 - RNA, 19 nt, Artificial Sequence
  Description of Artificial Sequence: Synthetic oligonucleotide
cuccgcucagcuuucuggg

SEQ ID NO: 1630397 - RNA, 19 nt, Artificial Sequence
  Description of Artificial Sequence: Synthetic oligonucleotide
auuucucgcugguagcgca

SEQ ID NO: 1630398 - RNA, 19 nt, Artificial Sequence
  Description of Artificial Sequence: Synthetic oligonucleotide
ggagccugccaucucaggg

SEQ ID NO: 1630399 - RNA, 19 nt, Artificial Sequence
  Description of Artificial Sequence: Synthetic oligonucleotide
uggagguuacgcucacucc

SEQ ID NO: 1630400 - RNA, 19 nt, Artificial Sequence
  Description of Artificial Sequence: Synthetic oligonucleotide
aguuggagguuacgcucac

SEQ ID NO: 1630401 - RNA, 19 nt, Artificial Sequence
  Description of Artificial Sequence: Synthetic oligonucleotide
ugucagcacacuugguagu

SEQ ID NO: 1630402 - RNA, 19 nt, Artificial Sequence
  Description of Artificial Sequence: Synthetic oligonucleotide
agacaaccacaaccgcugg

SEQ ID NO: 1630403 - RNA, 19 nt, Artificial Sequence
  Description of Artificial Sequence: Synthetic oligonucleotide
cgauacauguccauguagc

SEQ ID NO: 1630404 - RNA, 19 nt, Artificial Sequence
  Description of Artificial Sequence: Synthetic oligonucleotide
cagacugaagaucucggca

SEQ ID NO: 1630405 - RNA, 19 nt, Artificial Sequence
  Description of Artificial Sequence: Synthetic oligonucleotide
gacaaccacaaccgcuggc

SEQ ID NO: 1630406 - RNA, 19 nt, Artificial Sequence
  Description of Artificial Sequence: Synthetic oligonucleotide
cuggcgcuccucuagcacc

SEQ ID NO: 1630407 - RNA, 19 nt, Artificial Sequence
  Description of Artificial Sequence: Synthetic oligonucleotide
uggaucccuccucugggug

SEQ ID NO: 1630408 - RNA, 19 nt, Artificial Sequence
  Description of Artificial Sequence: Synthetic oligonucleotide
aaccuacuuuacugggcca

SEQ ID NO: 1630409 - RNA, 19 nt, Artificial Sequence
  Description of Artificial Sequence: Synthetic oligonucleotide
uucugccucagaccagcgc

SEQ ID NO: 1630410 - RNA, 19 nt, Artificial Sequence
  Description of Artificial Sequence: Synthetic oligonucleotide
accccuggcuccuuccacg

SEQ ID NO: 1630411 - RNA, 19 nt, Artificial Sequence
  Description of Artificial Sequence: Synthetic oligonucleotide
cauugaggacccucuugag

SEQ ID NO: 1630412 - RNA, 19 nt, Artificial Sequence
  Description of Artificial Sequence: Synthetic oligonucleotide
cugggugggucucccaucc

SEQ ID NO: 1630413 - RNA, 19 nt, Artificial Sequence
  Description of Artificial Sequence: Synthetic oligonucleotide
gguccagauuccuuggggc

SEQ ID NO: 1630414 - RNA, 19 nt, Artificial Sequence
  Description of Artificial Sequence: Synthetic oligonucleotide
ucugcccguaacugcucgg

SEQ ID NO: 1630415 - RNA, 19 nt, Artificial Sequence
  Description of Artificial Sequence: Synthetic oligonucleotide
agacuaaucuccgcugucu

SEQ ID NO: 1630416 - RNA, 19 nt, Artificial Sequence
  Description of Artificial Sequence: Synthetic oligonucleotide
gauuucucgcugguagcgc

SEQ ID NO: 1630417 - RNA, 19 nt, Artificial Sequence
  Description of Artificial Sequence: Synthetic oligonucleotide
ugguuccgacgauacaugu

SEQ ID NO: 1630418 - RNA, 19 nt, Artificial Sequence
  Description of Artificial Sequence: Synthetic oligonucleotide
cucagacaaccacaaccgc

SEQ ID NO: 1630419 - RNA, 19 nt, Artificial Sequence
  Description of Artificial Sequence: Synthetic oligonucleotide
ggauuucucgcugguagcg

SEQ ID NO: 1630420 - RNA, 19 nt, Artificial Sequence
  Description of Artificial Sequence: Synthetic oligonucleotide
cgaaguugcgucuucagac

SEQ ID NO: 1630421 - RNA, 19 nt, Artificial Sequence
  Description of Artificial Sequence: Synthetic oligonucleotide
cugcaguuggagguuacgc

SEQ ID NO: 1630422 - RNA, 19 nt, Artificial Sequence
  Description of Artificial Sequence: Synthetic oligonucleotide
ugcccuucugcaucccgag

SEQ ID NO: 1630423 - RNA, 19 nt, Artificial Sequence
  Description of Artificial Sequence: Synthetic oligonucleotide
cugguuccgacgauacaug

SEQ ID NO: 1630424 - RNA, 19 nt, Artificial Sequence
  Description of Artificial Sequence: Synthetic oligonucleotide
agcagcucugcccguaacu

SEQ ID NO: 1630425 - RNA, 19 nt, Artificial Sequence
  Description of Artificial Sequence: Synthetic oligonucleotide
ucucggcaagcuucugugc

SEQ ID NO: 1630426 - RNA, 19 nt, Artificial Sequence
  Description of Artificial Sequence: Synthetic oligonucleotide
accacaaccgcuggcgcuc

SEQ ID NO: 1630427 - RNA, 19 nt, Artificial Sequence
  Description of Artificial Sequence: Synthetic oligonucleotide
gaaguugcgucuucagacu

SEQ ID NO: 1630428 - RNA, 19 nt, Artificial Sequence
  Description of Artificial Sequence: Synthetic oligonucleotide
agucuccaaccacccgccc

SEQ ID NO: 1630429 - RNA, 19 nt, Artificial Sequence
  Description of Artificial Sequence: Synthetic oligonucleotide
acacuugguagugucagau

SEQ ID NO: 1630430 - RNA, 19 nt, Artificial Sequence
  Description of Artificial Sequence: Synthetic oligonucleotide
ucuacagguucugccucag

SEQ ID NO: 1630431 - RNA, 19 nt, Artificial Sequence
  Description of Artificial Sequence: Synthetic oligonucleotide
accugaguaaagggguuag

SEQ ID NO: 1630432 - RNA, 19 nt, Artificial Sequence
  Description of Artificial Sequence: Synthetic oligonucleotide
cacauacaggcgcuucagc

SEQ ID NO: 1630433 - RNA, 19 nt, Artificial Sequence
  Description of Artificial Sequence: Synthetic oligonucleotide
gagguuacgcucacuccgc

SEQ ID NO: 1630434 - RNA, 19 nt, Artificial Sequence
  Description of Artificial Sequence: Synthetic oligonucleotide
uuacgcucacuccgcucag

SEQ ID NO: 1630435 - RNA, 19 nt, Artificial Sequence
  Description of Artificial Sequence: Synthetic oligonucleotide
cuguucgagugccugguuc

SEQ ID NO: 1630436 - RNA, 19 nt, Artificial Sequence
  Description of Artificial Sequence: Synthetic oligonucleotide
aggcgcuucagcucagaca

SEQ ID NO: 1630437 - RNA, 19 nt, Artificial Sequence
  Description of Artificial Sequence: Synthetic oligonucleotide
agcgcaacacccuuuccuu

SEQ ID NO: 1630438 - RNA, 19 nt, Artificial Sequence
  Description of Artificial Sequence: Synthetic oligonucleotide
uuccgacgauacaugucca

SEQ ID NO: 1630439 - RNA, 19 nt, Artificial Sequence
  Description of Artificial Sequence: Synthetic oligonucleotide
ggggucagccuccacuugg

SEQ ID NO: 1630440 - RNA, 19 nt, Artificial Sequence
  Description of Artificial Sequence: Synthetic oligonucleotide
gagguccgagguucugggg

SEQ ID NO: 1630441 - RNA, 19 nt, Artificial Sequence
  Description of Artificial Sequence: Synthetic oligonucleotide
ucgagugccugguuccgac

SEQ ID NO: 1630442 - RNA, 19 nt, Artificial Sequence
  Description of Artificial Sequence: Synthetic oligonucleotide
ccugaacuggccucuacag

SEQ ID NO: 1630443 - RNA, 19 nt, Artificial Sequence
  Description of Artificial Sequence: Synthetic oligonucleotide
cugacgucucgaaguugcg

SEQ ID NO: 1630444 - RNA, 19 nt, Artificial Sequence
  Description of Artificial Sequence: Synthetic oligonucleotide
ugcccguaacugcucggcc

SEQ ID NO: 1630445 - RNA, 19 nt, Artificial Sequence
  Description of Artificial Sequence: Synthetic oligonucleotide
caccaguggugcaggagag

SEQ ID NO: 1630446 - RNA, 19 nt, Artificial Sequence
  Description of Artificial Sequence: Synthetic oligonucleotide
acggugccugcucaugcag

SEQ ID NO: 1630447 - RNA, 19 nt, Artificial Sequence
  Description of Artificial Sequence: Synthetic oligonucleotide
cugggcuugugcccugacg

SEQ ID NO: 1630448 - RNA, 19 nt, Artificial Sequence
  Description of Artificial Sequence: Synthetic oligonucleotide
caucucaggguaucuucuc

SEQ ID NO: 1630449 - RNA, 19 nt, Artificial Sequence
  Description of Artificial Sequence: Synthetic oligonucleotide
ugucucccgcagccgagcc

SEQ ID NO: 1630450 - RNA, 19 nt, Artificial Sequence
  Description of Artificial Sequence: Synthetic oligonucleotide
uccaccaguggugcaggag

SEQ ID NO: 1630451 - RNA, 19 nt, Artificial Sequence
  Description of Artificial Sequence: Synthetic oligonucleotide
cuuuacugggccacaccca

SEQ ID NO: 1630452 - RNA, 19 nt, Artificial Sequence
  Description of Artificial Sequence: Synthetic oligonucleotide
agccgagccagcucagugu

SEQ ID NO: 1630453 - RNA, 19 nt, Artificial Sequence
  Description of Artificial Sequence: Synthetic oligonucleotide
agcgcaagggaggagccug

SEQ ID NO: 1630454 - RNA, 19 nt, Artificial Sequence
  Description of Artificial Sequence: Synthetic oligonucleotide
cagggcuaggcccugccug

SEQ ID NO: 1630455 - RNA, 19 nt, Artificial Sequence
  Description of Artificial Sequence: Synthetic oligonucleotide
cagagguccgagguucugg

SEQ ID NO: 1630456 - RNA, 19 nt, Artificial Sequence
  Description of Artificial Sequence: Synthetic oligonucleotide
ugugcccugacgucucgaa

SEQ ID NO: 1630457 - RNA, 19 nt, Artificial Sequence
  Description of Artificial Sequence: Synthetic oligonucleotide
uccgcucagcuuucugggc

SEQ ID NO: 1630458 - RNA, 19 nt, Artificial Sequence
  Description of Artificial Sequence: Synthetic oligonucleotide
acgucucgaaguugcgucu

SEQ ID NO: 1630459 - RNA, 19 nt, Artificial Sequence
  Description of Artificial Sequence: Synthetic oligonucleotide
caggcugcgcaaugucucc

SEQ ID NO: 1630460 - RNA, 19 nt, Artificial Sequence
  Description of Artificial Sequence: Synthetic oligonucleotide
ucuccgcugucuucuggca

SEQ ID NO: 1630461 - RNA, 19 nt, Artificial Sequence
  Description of Artificial Sequence: Synthetic oligonucleotide
cagcacacuugguaguguc

SEQ ID NO: 1630462 - RNA, 19 nt, Artificial Sequence
  Description of Artificial Sequence: Synthetic oligonucleotide
gucagcacacuugguagug

SEQ ID NO: 1630463 - RNA, 19 nt, Artificial Sequence
  Description of Artificial Sequence: Synthetic oligonucleotide
uuucucgcugguagcgcaa

SEQ ID NO: 1630464 - RNA, 19 nt, Artificial Sequence
  Description of Artificial Sequence: Synthetic oligonucleotide
gcuccuugaagcacggucc

SEQ ID NO: 1630465 - RNA, 19 nt, Artificial Sequence
  Description of Artificial Sequence: Synthetic oligonucleotide
caaccacaaccgcuggcgc

SEQ ID NO: 1630466 - RNA, 19 nt, Artificial Sequence
  Description of Artificial Sequence: Synthetic oligonucleotide
ccaaccuacuuuacugggc

SEQ ID NO: 1630467 - RNA, 19 nt, Artificial Sequence
  Description of Artificial Sequence: Synthetic oligonucleotide
agccagagguccagauucc

SEQ ID NO: 1630468 - RNA, 19 nt, Artificial Sequence
  Description of Artificial Sequence: Synthetic oligonucleotide
uccagauuccuuggggcuc

SEQ ID NO: 1630469 - RNA, 19 nt, Artificial Sequence
  Description of Artificial Sequence: Synthetic oligonucleotide
cuccgaccgggcauugggg

SEQ ID NO: 1630470 - RNA, 19 nt, Artificial Sequence
  Description of Artificial Sequence: Synthetic oligonucleotide
caacacccuuuccuuuucc

SEQ ID NO: 1630471 - RNA, 19 nt, Artificial Sequence
  Description of Artificial Sequence: Synthetic oligonucleotide
ugacgucucgaaguugcgu

SEQ ID NO: 1630472 - RNA, 19 nt, Artificial Sequence
  Description of Artificial Sequence: Synthetic oligonucleotide
caucugucucacagcugcc

SEQ ID NO: 1630473 - RNA, 19 nt, Artificial Sequence
  Description of Artificial Sequence: Synthetic oligonucleotide
uccuguucgagugccuggu

SEQ ID NO: 1630474 - RNA, 19 nt, Artificial Sequence
  Description of Artificial Sequence: Synthetic oligonucleotide
cucccaccgggcuuccucc

SEQ ID NO: 1630475 - RNA, 19 nt, Artificial Sequence
  Description of Artificial Sequence: Synthetic oligonucleotide
uccgacgauacauguccau

SEQ ID NO: 1630476 - RNA, 19 nt, Artificial Sequence
  Description of Artificial Sequence: Synthetic oligonucleotide
gacccucuugaguuccuca

SEQ ID NO: 1630477 - RNA, 19 nt, Artificial Sequence
  Description of Artificial Sequence: Synthetic oligonucleotide
acgcucacuccgcucagcu

SEQ ID NO: 1630478 - RNA, 19 nt, Artificial Sequence
  Description of Artificial Sequence: Synthetic oligonucleotide
cccuucugcaucccgaggc

SEQ ID NO: 1630479 - RNA, 19 nt, Artificial Sequence
  Description of Artificial Sequence: Synthetic oligonucleotide
cuuccacggaggaagaccu

SEQ ID NO: 1630480 - RNA, 19 nt, Artificial Sequence
  Description of Artificial Sequence: Synthetic oligonucleotide
ucugggugggucucccauc

SEQ ID NO: 1630481 - RNA, 19 nt, Artificial Sequence
  Description of Artificial Sequence: Synthetic oligonucleotide
caacagacuaaucuccgcu

SEQ ID NO: 1630482 - RNA, 19 nt, Artificial Sequence
  Description of Artificial Sequence: Synthetic oligonucleotide
uuacugggccacacccacu

SEQ ID NO: 1630483 - RNA, 19 nt, Artificial Sequence
  Description of Artificial Sequence: Synthetic oligonucleotide
cagacuaaucuccgcuguc

SEQ ID NO: 1630484 - RNA, 19 nt, Artificial Sequence
  Description of Artificial Sequence: Synthetic oligonucleotide
aggcugcgcaaugucuccc

SEQ ID NO: 1630485 - RNA, 19 nt, Artificial Sequence
  Description of Artificial Sequence: Synthetic oligonucleotide
cugucuucuggcacaccuc

SEQ ID NO: 1630486 - RNA, 19 nt, Artificial Sequence
  Description of Artificial Sequence: Synthetic oligonucleotide
gguagcgcaacacccuuuc

SEQ ID NO: 1630487 - RNA, 19 nt, Artificial Sequence
  Description of Artificial Sequence: Synthetic oligonucleotide
cugcuguuucaacagacua

SEQ ID NO: 1630488 - RNA, 19 nt, Artificial Sequence
  Description of Artificial Sequence: Synthetic oligonucleotide
ccucagaccagcgcaaggg

SEQ ID NO: 1630489 - RNA, 19 nt, Artificial Sequence
  Description of Artificial Sequence: Synthetic oligonucleotide
uggaggacuccaggcgggg

SEQ ID NO: 1630490 - RNA, 19 nt, Artificial Sequence
  Description of Artificial Sequence: Synthetic oligonucleotide
guucgagugccugguuccg

SEQ ID NO: 1630491 - RNA, 19 nt, Artificial Sequence
  Description of Artificial Sequence: Synthetic oligonucleotide
cucuagcaccugaguaaag

SEQ ID NO: 1630492 - RNA, 19 nt, Artificial Sequence
  Description of Artificial Sequence: Synthetic oligonucleotide
ggccucuacagguucugcc

SEQ ID NO: 1630493 - RNA, 19 nt, Artificial Sequence
  Description of Artificial Sequence: Synthetic oligonucleotide
cuugugcccugacgucucg

SEQ ID NO: 1630494 - RNA, 19 nt, Artificial Sequence
  Description of Artificial Sequence: Synthetic oligonucleotide
gacggugccugcucaugca

SEQ ID NO: 1630495 - RNA, 19 nt, Artificial Sequence
  Description of Artificial Sequence: Synthetic oligonucleotide
gcugucagcacacuuggua

SEQ ID NO: 1630496 - RNA, 19 nt, Artificial Sequence
  Description of Artificial Sequence: Synthetic oligonucleotide
cuggagcuuccucccgacg

SEQ ID NO: 1630497 - RNA, 19 nt, Artificial Sequence
  Description of Artificial Sequence: Synthetic oligonucleotide
gguuagagacauccugguc

SEQ ID NO: 1630498 - RNA, 19 nt, Artificial Sequence
  Description of Artificial Sequence: Synthetic oligonucleotide
caagacuuugccauagcuu

SEQ ID NO: 1630499 - RNA, 19 nt, Artificial Sequence
  Description of Artificial Sequence: Synthetic oligonucleotide
ggccaagucuccaaccacc

SEQ ID NO: 1630500 - RNA, 19 nt, Artificial Sequence
  Description of Artificial Sequence: Synthetic oligonucleotide
gguccgagguucuggggcc

SEQ ID NO: 1630501 - RNA, 19 nt, Artificial Sequence
  Description of Artificial Sequence: Synthetic oligonucleotide
ccguuccacauacaggcgc

SEQ ID NO: 1630502 - RNA, 19 nt, Artificial Sequence
  Description of Artificial Sequence: Synthetic oligonucleotide
ugggucucccaucccugaa

SEQ ID NO: 1630503 - RNA, 19 nt, Artificial Sequence
  Description of Artificial Sequence: Synthetic oligonucleotide
cugcccguaacugcucggc

SEQ ID NO: 1630504 - RNA, 19 nt, Artificial Sequence
  Description of Artificial Sequence: Synthetic oligonucleotide
ucccugaacuggccucuac

SEQ ID NO: 1630505 - RNA, 19 nt, Artificial Sequence
  Description of Artificial Sequence: Synthetic oligonucleotide
cuccucuagcaccugagua

SEQ ID NO: 1630506 - RNA, 19 nt, Artificial Sequence
  Description of Artificial Sequence: Synthetic oligonucleotide
ccauaaagagcugcaguug

SEQ ID NO: 1630507 - RNA, 19 nt, Artificial Sequence
  Description of Artificial Sequence: Synthetic oligonucleotide
agguuacgcucacuccgcu

SEQ ID NO: 1630508 - RNA, 19 nt, Artificial Sequence
  Description of Artificial Sequence: Synthetic oligonucleotide
ggcugcgcaaugucucccg

SEQ ID NO: 1630509 - RNA, 19 nt, Artificial Sequence
  Description of Artificial Sequence: Synthetic oligonucleotide
gccaucucaggguaucuuc

SEQ ID NO: 1630510 - RNA, 19 nt, Artificial Sequence
  Description of Artificial Sequence: Synthetic oligonucleotide
ccuuccacggaggaagacc

SEQ ID NO: 1630511 - RNA, 19 nt, Artificial Sequence
  Description of Artificial Sequence: Synthetic oligonucleotide
cucagaccagcgcaaggga

SEQ ID NO: 1630512 - RNA, 19 nt, Artificial Sequence
  Description of Artificial Sequence: Synthetic oligonucleotide
ugccucagaccagcgcaag

SEQ ID NO: 1630513 - RNA, 19 nt, Artificial Sequence
  Description of Artificial Sequence: Synthetic oligonucleotide
ucccgacggugccugcuca

SEQ ID NO: 1630514 - RNA, 19 nt, Artificial Sequence
  Description of Artificial Sequence: Synthetic oligonucleotide
cuccgcugucuucuggcac

SEQ ID NO: 1630515 - RNA, 19 nt, Artificial Sequence
  Description of Artificial Sequence: Synthetic oligonucleotide
ccuggcuccuuccacggag

SEQ ID NO: 1630516 - RNA, 19 nt, Artificial Sequence
  Description of Artificial Sequence: Synthetic oligonucleotide
caaccacccgcccucgcuc

SEQ ID NO: 1630517 - RNA, 19 nt, Artificial Sequence
  Description of Artificial Sequence: Synthetic oligonucleotide
cauagcgugccugcuguca

SEQ ID NO: 1630518 - RNA, 19 nt, Artificial Sequence
  Description of Artificial Sequence: Synthetic oligonucleotide
gccacgaagccgcucuugc

SEQ ID NO: 1630519 - RNA, 19 nt, Artificial Sequence
  Description of Artificial Sequence: Synthetic oligonucleotide
cuguagggagcagggcuag

SEQ ID NO: 1630520 - RNA, 19 nt, Artificial Sequence
  Description of Artificial Sequence: Synthetic oligonucleotide
ggcaacauggcuaccucuc

SEQ ID NO: 1630521 - RNA, 19 nt, Artificial Sequence
  Description of Artificial Sequence: Synthetic oligonucleotide
uggcuaccucuccaccagu

SEQ ID NO: 1630522 - RNA, 19 nt, Artificial Sequence
  Description of Artificial Sequence: Synthetic oligonucleotide
ugguagcgcaacacccuuu

SEQ ID NO: 1630523 - RNA, 19 nt, Artificial Sequence
  Description of Artificial Sequence: Synthetic oligonucleotide
ccuccgaccgggcauuggg

SEQ ID NO: 1630524 - RNA, 19 nt, Artificial Sequence
  Description of Artificial Sequence: Synthetic oligonucleotide
gcccguaacugcucggccc

SEQ ID NO: 1630525 - RNA, 19 nt, Artificial Sequence
  Description of Artificial Sequence: Synthetic oligonucleotide
agcgugccugcugucagca

SEQ ID NO: 1630526 - RNA, 19 nt, Artificial Sequence
  Description of Artificial Sequence: Synthetic oligonucleotide
ggccagacccuggugagcc

SEQ ID NO: 1630527 - RNA, 19 nt, Artificial Sequence
  Description of Artificial Sequence: Synthetic oligonucleotide
uucucgcugguagcgcaac

SEQ ID NO: 1630528 - RNA, 19 nt, Artificial Sequence
  Description of Artificial Sequence: Synthetic oligonucleotide
uggcuccaaccuacuuuac

SEQ ID NO: 1630529 - RNA, 19 nt, Artificial Sequence
  Description of Artificial Sequence: Synthetic oligonucleotide
guugcgucuucagacugaa

SEQ ID NO: 1630530 - RNA, 19 nt, Artificial Sequence
  Description of Artificial Sequence: Synthetic oligonucleotide
cuggggcuucgauggcucc

SEQ ID NO: 1630531 - RNA, 19 nt, Artificial Sequence
  Description of Artificial Sequence: Synthetic oligonucleotide
uacgcucacuccgcucagc

SEQ ID NO: 1630532 - RNA, 19 nt, Artificial Sequence
  Description of Artificial Sequence: Synthetic oligonucleotide
agugccugguuccgacgau

SEQ ID NO: 1630533 - RNA, 19 nt, Artificial Sequence
  Description of Artificial Sequence: Synthetic oligonucleotide
uggccucuacagguucugc

SEQ ID NO: 1630534 - RNA, 19 nt, Artificial Sequence
  Description of Artificial Sequence: Synthetic oligonucleotide
gccauaaagagcugcaguu

SEQ ID NO: 1630535 - RNA, 19 nt, Artificial Sequence
  Description of Artificial Sequence: Synthetic oligonucleotide
cuggcacaccucccaccgg

SEQ ID NO: 1630536 - RNA, 19 nt, Artificial Sequence
  Description of Artificial Sequence: Synthetic oligonucleotide
gccucagaccagcgcaagg

SEQ ID NO: 1630537 - RNA, 19 nt, Artificial Sequence
  Description of Artificial Sequence: Synthetic oligonucleotide
uccuccgaccgggcauugg

SEQ ID NO: 1630538 - RNA, 19 nt, Artificial Sequence
  Description of Artificial Sequence: Synthetic oligonucleotide
gcugcaguuggagguuacg

SEQ ID NO: 1630539 - RNA, 19 nt, Artificial Sequence
  Description of Artificial Sequence: Synthetic oligonucleotide
ccaagucuccaaccacccg

SEQ ID NO: 1630540 - RNA, 19 nt, Artificial Sequence
  Description of Artificial Sequence: Synthetic oligonucleotide
cccguaacugcucggcccc

SEQ ID NO: 1630541 - RNA, 19 nt, Artificial Sequence
  Description of Artificial Sequence: Synthetic oligonucleotide
cagccuccacuugggaacc

SEQ ID NO: 1630542 - RNA, 19 nt, Artificial Sequence
  Description of Artificial Sequence: Synthetic oligonucleotide
cagacccuggugagcccgc

SEQ ID NO: 1630543 - RNA, 19 nt, Artificial Sequence
  Description of Artificial Sequence: Synthetic oligonucleotide
caguggugcaggagagcuc

SEQ ID NO: 1630544 - RNA, 19 nt, Artificial Sequence
  Description of Artificial Sequence: Synthetic oligonucleotide
gccugggucuguuucucug

SEQ ID NO: 1630545 - RNA, 19 nt, Artificial Sequence
  Description of Artificial Sequence: Synthetic oligonucleotide
gccaagucuccaaccaccc

SEQ ID NO: 1630546 - RNA, 19 nt, Artificial Sequence
  Description of Artificial Sequence: Synthetic oligonucleotide
ggccauaaagagcugcagu

SEQ ID NO: 1630547 - RNA, 19 nt, Artificial Sequence
  Description of Artificial Sequence: Synthetic oligonucleotide
ucggccccuucucuggcuu

SEQ ID NO: 1630548 - RNA, 19 nt, Artificial Sequence
  Description of Artificial Sequence: Synthetic oligonucleotide
cugaagaucucggcaagcu

SEQ ID NO: 1630549 - RNA, 19 nt, Artificial Sequence
  Description of Artificial Sequence: Synthetic oligonucleotide
uccugccaagucugccgcu

SEQ ID NO: 1630550 - RNA, 19 nt, Artificial Sequence
  Description of Artificial Sequence: Synthetic oligonucleotide
caugcagccguuccacaua

SEQ ID NO: 1630551 - RNA, 19 nt, Artificial Sequence
  Description of Artificial Sequence: Synthetic oligonucleotide
gccuccgucaucugucuca

SEQ ID NO: 1630552 - RNA, 19 nt, Artificial Sequence
  Description of Artificial Sequence: Synthetic oligonucleotide
caguacagccagaggucca

SEQ ID NO: 1630553 - RNA, 19 nt, Artificial Sequence
  Description of Artificial Sequence: Synthetic oligonucleotide
gugggucucccaucccuga

SEQ ID NO: 1630554 - RNA, 19 nt, Artificial Sequence
  Description of Artificial Sequence: Synthetic oligonucleotide
ggaggccugucuucccacc

SEQ ID NO: 1630555 - RNA, 19 nt, Artificial Sequence
  Description of Artificial Sequence: Synthetic oligonucleotide
ugccaucucaggguaucuu

SEQ ID NO: 1630556 - RNA, 19 nt, Artificial Sequence
  Description of Artificial Sequence: Synthetic oligonucleotide
cagcccauugccugcugga

SEQ ID NO: 1630557 - RNA, 19 nt, Artificial Sequence
  Description of Artificial Sequence: Synthetic oligonucleotide
ccgucaucugucucacagc

SEQ ID NO: 1630558 - RNA, 19 nt, Artificial Sequence
  Description of Artificial Sequence: Synthetic oligonucleotide
gggucucccaucccugaac

SEQ ID NO: 1630559 - RNA, 19 nt, Artificial Sequence
  Description of Artificial Sequence: Synthetic oligonucleotide
cacuccgcucagcuuucug

SEQ ID NO: 1630560 - RNA, 19 nt, Artificial Sequence
  Description of Artificial Sequence: Synthetic oligonucleotide
cuccaggcggggacuccag

SEQ ID NO: 1630561 - RNA, 19 nt, Artificial Sequence
  Description of Artificial Sequence: Synthetic oligonucleotide
ugccuccgucaucugucuc

SEQ ID NO: 1630562 - RNA, 19 nt, Artificial Sequence
  Description of Artificial Sequence: Synthetic oligonucleotide
cugcgcaaugucucccgca

SEQ ID NO: 1630563 - RNA, 19 nt, Artificial Sequence
  Description of Artificial Sequence: Synthetic oligonucleotide
caccccuggcuccuuccac

SEQ ID NO: 1630564 - RNA, 19 nt, Artificial Sequence
  Description of Artificial Sequence: Synthetic oligonucleotide
ccaccaguggugcaggaga

SEQ ID NO: 1630565 - RNA, 19 nt, Artificial Sequence
  Description of Artificial Sequence: Synthetic oligonucleotide
ccagcgcaagggaggagcc

SEQ ID NO: 1630566 - RNA, 19 nt, Artificial Sequence
  Description of Artificial Sequence: Synthetic oligonucleotide
ccagcccauugccugcugg

SEQ ID NO: 1630567 - RNA, 19 nt, Artificial Sequence
  Description of Artificial Sequence: Synthetic oligonucleotide
gguuccgacgauacauguc

SEQ ID NO: 1630568 - RNA, 19 nt, Artificial Sequence
  Description of Artificial Sequence: Synthetic oligonucleotide
gugucagauuuuggaggac

SEQ ID NO: 1630569 - RNA, 19 nt, Artificial Sequence
  Description of Artificial Sequence: Synthetic oligonucleotide
ccgacgauacauguccaug

SEQ ID NO: 1630570 - RNA, 19 nt, Artificial Sequence
  Description of Artificial Sequence: Synthetic oligonucleotide
ggugggucucccaucccug

SEQ ID NO: 1630571 - RNA, 19 nt, Artificial Sequence
  Description of Artificial Sequence: Synthetic oligonucleotide
ccagauuccuuggggcucc

SEQ ID NO: 1630572 - RNA, 19 nt, Artificial Sequence
  Description of Artificial Sequence: Synthetic oligonucleotide
gacuccaggcggggacucc

SEQ ID NO: 1630573 - RNA, 19 nt, Artificial Sequence
  Description of Artificial Sequence: Synthetic oligonucleotide
agguucugccucagaccag

SEQ ID NO: 1630574 - RNA, 19 nt, Artificial Sequence
  Description of Artificial Sequence: Synthetic oligonucleotide
agaucucggcaagcuucug

SEQ ID NO: 1630575 - RNA, 19 nt, Artificial Sequence
  Description of Artificial Sequence: Synthetic oligonucleotide
ccucuacagguucugccuc

SEQ ID NO: 1630576 - RNA, 19 nt, Artificial Sequence
  Description of Artificial Sequence: Synthetic oligonucleotide
cucccgacggugccugcuc

SEQ ID NO: 1630577 - RNA, 19 nt, Artificial Sequence
  Description of Artificial Sequence: Synthetic oligonucleotide
ugcuccuguugggccauaa

SEQ ID NO: 1630578 - RNA, 19 nt, Artificial Sequence
  Description of Artificial Sequence: Synthetic oligonucleotide
gcugcgcaaugucucccgc

SEQ ID NO: 1630579 - RNA, 19 nt, Artificial Sequence
  Description of Artificial Sequence: Synthetic oligonucleotide
acccgcccucgcuccugcc

SEQ ID NO: 1630580 - RNA, 19 nt, Artificial Sequence
  Description of Artificial Sequence: Synthetic oligonucleotide
agcccauugccugcuggau

SEQ ID NO: 1630581 - RNA, 19 nt, Artificial Sequence
  Description of Artificial Sequence: Synthetic oligonucleotide
uccuugcgcaggcgccgcu

SEQ ID NO: 1630582 - RNA, 19 nt, Artificial Sequence
  Description of Artificial Sequence: Synthetic oligonucleotide
cugcaucccgaggcugggg

SEQ ID NO: 1630583 - RNA, 19 nt, Artificial Sequence
  Description of Artificial Sequence: Synthetic oligonucleotide
gccacacccacuguaggga

SEQ ID NO: 1630584 - RNA, 19 nt, Artificial Sequence
  Description of Artificial Sequence: Synthetic oligonucleotide
cucaggcaacauggcuacc

SEQ ID NO: 1630585 - RNA, 19 nt, Artificial Sequence
  Description of Artificial Sequence: Synthetic oligonucleotide
ccugcccuucugcaucccg

SEQ ID NO: 1630586 - RNA, 19 nt, Artificial Sequence
  Description of Artificial Sequence: Synthetic oligonucleotide
gccguuccacauacaggcg

SEQ ID NO: 1630587 - RNA, 19 nt, Artificial Sequence
  Description of Artificial Sequence: Synthetic oligonucleotide
gaccagcgcaagggaggag

SEQ ID NO: 1630588 - RNA, 19 nt, Artificial Sequence
  Description of Artificial Sequence: Synthetic oligonucleotide
cgggcuuccuccuccgacc

SEQ ID NO: 1630589 - RNA, 19 nt, Artificial Sequence
  Description of Artificial Sequence: Synthetic oligonucleotide
cuccuugcgcaggcgccgc

SEQ ID NO: 1630590 - RNA, 19 nt, Artificial Sequence
  Description of Artificial Sequence: Synthetic oligonucleotide
ucccgaggcuggggcuucg

SEQ ID NO: 1630591 - RNA, 19 nt, Artificial Sequence
  Description of Artificial Sequence: Synthetic oligonucleotide
gcucaugcaggcugcgcaa

SEQ ID NO: 1630592 - RNA, 19 nt, Artificial Sequence
  Description of Artificial Sequence: Synthetic oligonucleotide
ucacuccgcucagcuuucu

SEQ ID NO: 1630593 - RNA, 19 nt, Artificial Sequence
  Description of Artificial Sequence: Synthetic oligonucleotide
ccugccaucucaggguauc

SEQ ID NO: 1630594 - RNA, 19 nt, Artificial Sequence
  Description of Artificial Sequence: Synthetic oligonucleotide
gccaagucugccgcuccag

SEQ ID NO: 1630595 - RNA, 19 nt, Artificial Sequence
  Description of Artificial Sequence: Synthetic oligonucleotide
gucucccgcagccgagcca

SEQ ID NO: 1630596 - RNA, 19 nt, Artificial Sequence
  Description of Artificial Sequence: Synthetic oligonucleotide
gcuucagcucagacaacca

SEQ ID NO: 1630597 - RNA, 19 nt, Artificial Sequence
  Description of Artificial Sequence: Synthetic oligonucleotide
cccugaacuggccucuaca

SEQ ID NO: 1630598 - RNA, 19 nt, Artificial Sequence
  Description of Artificial Sequence: Synthetic oligonucleotide
caccugaguaaagggguua

SEQ ID NO: 1630599 - RNA, 19 nt, Artificial Sequence
  Description of Artificial Sequence: Synthetic oligonucleotide
cgcuccucuagcaccugag

SEQ ID NO: 1630600 - RNA, 19 nt, Artificial Sequence
  Description of Artificial Sequence: Synthetic oligonucleotide
ggcaagcuucugugccagc

SEQ ID NO: 1630601 - RNA, 19 nt, Artificial Sequence
  Description of Artificial Sequence: Synthetic oligonucleotide
accgggcuuccuccuccga

SEQ ID NO: 1630602 - RNA, 19 nt, Artificial Sequence
  Description of Artificial Sequence: Synthetic oligonucleotide
cccugccugggucuguuuc

SEQ ID NO: 1630603 - RNA, 19 nt, Artificial Sequence
  Description of Artificial Sequence: Synthetic oligonucleotide
uggccacgaagccgcucuu

SEQ ID NO: 1630604 - RNA, 19 nt, Artificial Sequence
  Description of Artificial Sequence: Synthetic oligonucleotide
cgagugccugguuccgacg

SEQ ID NO: 1630605 - RNA, 19 nt, Artificial Sequence
  Description of Artificial Sequence: Synthetic oligonucleotide
ccugguuccgacgauacau

SEQ ID NO: 1630606 - RNA, 19 nt, Artificial Sequence
  Description of Artificial Sequence: Synthetic oligonucleotide
ccaucucaggguaucuucu

SEQ ID NO: 1630607 - RNA, 19 nt, Artificial Sequence
  Description of Artificial Sequence: Synthetic oligonucleotide
ggagcuuccucccgacggu

SEQ ID NO: 1630608 - RNA, 19 nt, Artificial Sequence
  Description of Artificial Sequence: Synthetic oligonucleotide
cucugggugggucucccau

SEQ ID NO: 1630609 - RNA, 19 nt, Artificial Sequence
  Description of Artificial Sequence: Synthetic oligonucleotide
gggugggucucccaucccu

SEQ ID NO: 1630610 - RNA, 19 nt, Artificial Sequence
  Description of Artificial Sequence: Synthetic oligonucleotide
ccuccgucaucugucucac

SEQ ID NO: 1630611 - RNA, 19 nt, Artificial Sequence
  Description of Artificial Sequence: Synthetic oligonucleotide
caucccugaacuggccucu

SEQ ID NO: 1630612 - RNA, 19 nt, Artificial Sequence
  Description of Artificial Sequence: Synthetic oligonucleotide
gccugcucaugcaggcugc

SEQ ID NO: 1630613 - RNA, 19 nt, Artificial Sequence
  Description of Artificial Sequence: Synthetic oligonucleotide
gaacuggccucuacagguu

SEQ ID NO: 1630614 - RNA, 19 nt, Artificial Sequence
  Description of Artificial Sequence: Synthetic oligonucleotide
ggccacgaagccgcucuug

SEQ ID NO: 1630615 - RNA, 19 nt, Artificial Sequence
  Description of Artificial Sequence: Synthetic oligonucleotide
cgacgauacauguccaugu

SEQ ID NO: 1630616 - RNA, 19 nt, Artificial Sequence
  Description of Artificial Sequence: Synthetic oligonucleotide
gcuugugcccugacgucuc

SEQ ID NO: 1630617 - RNA, 19 nt, Artificial Sequence
  Description of Artificial Sequence: Synthetic oligonucleotide
ccgagccagcucagugucc

SEQ ID NO: 1630618 - RNA, 19 nt, Artificial Sequence
  Description of Artificial Sequence: Synthetic oligonucleotide
gugccugguuccgacgaua

SEQ ID NO: 1630619 - RNA, 19 nt, Artificial Sequence
  Description of Artificial Sequence: Synthetic oligonucleotide
ccgaccgggcauugggguc

SEQ ID NO: 1630620 - RNA, 19 nt, Artificial Sequence
  Description of Artificial Sequence: Synthetic oligonucleotide
cccgcccucgcuccugccc

SEQ ID NO: 1630621 - RNA, 19 nt, Artificial Sequence
  Description of Artificial Sequence: Synthetic oligonucleotide
cacccacuguagggagcag

SEQ ID NO: 1630622 - RNA, 19 nt, Artificial Sequence
  Description of Artificial Sequence: Synthetic oligonucleotide
ggguaucuucucauagcgu

SEQ ID NO: 1630623 - RNA, 19 nt, Artificial Sequence
  Description of Artificial Sequence: Synthetic oligonucleotide
ccacgaagccgcucuugca

SEQ ID NO: 1630624 - RNA, 19 nt, Artificial Sequence
  Description of Artificial Sequence: Synthetic oligonucleotide
ccagcaagacuuugccaua

SEQ ID NO: 1630625 - RNA, 19 nt, Artificial Sequence
  Description of Artificial Sequence: Synthetic oligonucleotide
guccgagguucuggggcca

SEQ ID NO: 1630626 - RNA, 19 nt, Artificial Sequence
  Description of Artificial Sequence: Synthetic oligonucleotide
gccugguuccgacgauaca

SEQ ID NO: 1630627 - RNA, 19 nt, Artificial Sequence
  Description of Artificial Sequence: Synthetic oligonucleotide
agccuccacuugggaacca

SEQ ID NO: 1630628 - RNA, 19 nt, Artificial Sequence
  Description of Artificial Sequence: Synthetic oligonucleotide
gguucuggggccagacccu

SEQ ID NO: 1630629 - RNA, 19 nt, Artificial Sequence
  Description of Artificial Sequence: Synthetic oligonucleotide
ccugaguaaagggguuaga

SEQ ID NO: 1630630 - RNA, 19 nt, Artificial Sequence
  Description of Artificial Sequence: Synthetic oligonucleotide
ggcggggacuccaggaugu

SEQ ID NO: 1630631 - RNA, 19 nt, Artificial Sequence
  Description of Artificial Sequence: Synthetic oligonucleotide
gcgcaagggaggagccugc

SEQ ID NO: 1630632 - RNA, 19 nt, Artificial Sequence
  Description of Artificial Sequence: Synthetic oligonucleotide
aucccugaacuggccucua

SEQ ID NO: 1630633 - RNA, 19 nt, Artificial Sequence
  Description of Artificial Sequence: Synthetic oligonucleotide
cuccuccgaccgggcauug

SEQ ID NO: 1630634 - RNA, 19 nt, Artificial Sequence
  Description of Artificial Sequence: Synthetic oligonucleotide
cgaagccgcucuugcagca

SEQ ID NO: 1630635 - RNA, 19 nt, Artificial Sequence
  Description of Artificial Sequence: Synthetic oligonucleotide
ccgacggugccugcucaug

SEQ ID NO: 1630636 - RNA, 19 nt, Artificial Sequence
  Description of Artificial Sequence: Synthetic oligonucleotide
ggcuccuuccacggaggaa

SEQ ID NO: 1630637 - RNA, 19 nt, Artificial Sequence
  Description of Artificial Sequence: Synthetic oligonucleotide
caccucccaccgggcuucc

SEQ ID NO: 1630638 - RNA, 19 nt, Artificial Sequence
  Description of Artificial Sequence: Synthetic oligonucleotide
cccgaagcugcuguuucaa

SEQ ID NO: 1630639 - RNA, 19 nt, Artificial Sequence
  Description of Artificial Sequence: Synthetic oligonucleotide
ccacaaccgcuggcgcucc

SEQ ID NO: 1630640 - RNA, 19 nt, Artificial Sequence
  Description of Artificial Sequence: Synthetic oligonucleotide
cgcucagcuuucugggcca

SEQ ID NO: 1630641 - RNA, 19 nt, Artificial Sequence
  Description of Artificial Sequence: Synthetic oligonucleotide
gcgugccugcugucagcac

SEQ ID NO: 1630642 - RNA, 19 nt, Artificial Sequence
  Description of Artificial Sequence: Synthetic oligonucleotide
cgcaagggaggagccugcc

SEQ ID NO: 1630643 - RNA, 19 nt, Artificial Sequence
  Description of Artificial Sequence: Synthetic oligonucleotide
ccaccucaugcagccguuc

SEQ ID NO: 1630644 - RNA, 19 nt, Artificial Sequence
  Description of Artificial Sequence: Synthetic oligonucleotide
gcagggcuaggcccugccu

SEQ ID NO: 1630645 - RNA, 19 nt, Artificial Sequence
  Description of Artificial Sequence: Synthetic oligonucleotide
ccgcuccagcucgaagcgc

SEQ ID NO: 1630646 - RNA, 19 nt, Artificial Sequence
  Description of Artificial Sequence: Synthetic oligonucleotide
ccaccccuggcuccuucca

SEQ ID NO: 1630647 - RNA, 19 nt, Artificial Sequence
  Description of Artificial Sequence: Synthetic oligonucleotide
ccagagguccagauuccuu

SEQ ID NO: 1630648 - RNA, 19 nt, Artificial Sequence
  Description of Artificial Sequence: Synthetic oligonucleotide
gccugcugucagcacacuu

SEQ ID NO: 1630649 - RNA, 19 nt, Artificial Sequence
  Description of Artificial Sequence: Synthetic oligonucleotide
cgaccgggcauugggguca

SEQ ID NO: 1630650 - RNA, 19 nt, Artificial Sequence
  Description of Artificial Sequence: Synthetic oligonucleotide
ggcuaggcccugccugggu

SEQ ID NO: 1630651 - RNA, 19 nt, Artificial Sequence
  Description of Artificial Sequence: Synthetic oligonucleotide
gcgcaacacccuuuccuuu

SEQ ID NO: 1630652 - RNA, 19 nt, Artificial Sequence
  Description of Artificial Sequence: Synthetic oligonucleotide
cagcgcaagggaggagccu

SEQ ID NO: 1630653 - RNA, 19 nt, Artificial Sequence
  Description of Artificial Sequence: Synthetic oligonucleotide
gcgcuucagcucagacaac

SEQ ID NO: 1630654 - RNA, 19 nt, Artificial Sequence
  Description of Artificial Sequence: Synthetic oligonucleotide
cacaaccgcuggcgcuccu

SEQ ID NO: 1630655 - RNA, 19 nt, Artificial Sequence
  Description of Artificial Sequence: Synthetic oligonucleotide
cccuggcuccuuccacgga

SEQ ID NO: 1630656 - RNA, 19 nt, Artificial Sequence
  Description of Artificial Sequence: Synthetic oligonucleotide
ggcacccuauccagcccau

SEQ ID NO: 1630657 - RNA, 19 nt, Artificial Sequence
  Description of Artificial Sequence: Synthetic oligonucleotide
ggugagcccgcagcuccuu

SEQ ID NO: 1630658 - RNA, 19 nt, Artificial Sequence
  Description of Artificial Sequence: Synthetic oligonucleotide
gcggggacuccaggaugua

SEQ ID NO: 1630659 - RNA, 19 nt, Artificial Sequence
  Description of Artificial Sequence: Synthetic oligonucleotide
ccuguucgagugccugguu

SEQ ID NO: 1630660 - RNA, 19 nt, Artificial Sequence
  Description of Artificial Sequence: Synthetic oligonucleotide
gccaccucaugcagccguu

SEQ ID NO: 1630661 - RNA, 19 nt, Artificial Sequence
  Description of Artificial Sequence: Synthetic oligonucleotide
ccucccgacggugccugcu

SEQ ID NO: 1630662 - RNA, 19 nt, Artificial Sequence
  Description of Artificial Sequence: Synthetic oligonucleotide
cgauggcuccaaccuacuu

SEQ ID NO: 1630663 - RNA, 19 nt, Artificial Sequence
  Description of Artificial Sequence: Synthetic oligonucleotide
cccgacggugccugcucau

SEQ ID NO: 1630664 - RNA, 19 nt, Artificial Sequence
  Description of Artificial Sequence: Synthetic oligonucleotide
ccgaggcuggggcuucgau

SEQ ID NO: 1630665 - RNA, 19 nt, Artificial Sequence
  Description of Artificial Sequence: Synthetic oligonucleotide
cccgaggcuggggcuucga

SEQ ID NO: 1630666 - RNA, 19 nt, Artificial Sequence
  Description of Artificial Sequence: Synthetic oligonucleotide
ccuccuccgaccgggcauu

SEQ ID NO: 1630667 - RNA, 19 nt, Artificial Sequence
  Description of Artificial Sequence: Synthetic oligonucleotide
cgucucgaaguugcgucuu

SEQ ID NO: 1630668 - RNA, 19 nt, Artificial Sequence
  Description of Artificial Sequence: Synthetic oligonucleotide
ccguaacugcucggccccu

SEQ ID NO: 1630669 - RNA, 19 nt, Artificial Sequence
  Description of Artificial Sequence: Synthetic oligonucleotide
uaugaagucucagagaggg

SEQ ID NO: 1630670 - RNA, 19 nt, Artificial Sequence
  Description of Artificial Sequence: Synthetic oligonucleotide
cauaaauauguccagaguc

SEQ ID NO: 1630671 - RNA, 19 nt, Artificial Sequence
  Description of Artificial Sequence: Synthetic oligonucleotide
augacagaagggcugaggc

SEQ ID NO: 1630672 - RNA, 19 nt, Artificial Sequence
  Description of Artificial Sequence: Synthetic oligonucleotide
ucuuucuucugguaguagg

SEQ ID NO: 1630673 - RNA, 19 nt, Artificial Sequence
  Description of Artificial Sequence: Synthetic oligonucleotide
uugggauaggcuaaggggc

SEQ ID NO: 1630674 - RNA, 19 nt, Artificial Sequence
  Description of Artificial Sequence: Synthetic oligonucleotide
gaagcagguagcuggaagg

SEQ ID NO: 1630675 - RNA, 19 nt, Artificial Sequence
  Description of Artificial Sequence: Synthetic oligonucleotide
agacccuagaagcuggccc

SEQ ID NO: 1630676 - RNA, 19 nt, Artificial Sequence
  Description of Artificial Sequence: Synthetic oligonucleotide
aggguaugaagucucagag

SEQ ID NO: 1630677 - RNA, 19 nt, Artificial Sequence
  Description of Artificial Sequence: Synthetic oligonucleotide
agauacuugucaguguccc

SEQ ID NO: 1630678 - RNA, 19 nt, Artificial Sequence
  Description of Artificial Sequence: Synthetic oligonucleotide
agagucuccagcuguagag

SEQ ID NO: 1630679 - RNA, 19 nt, Artificial Sequence
  Description of Artificial Sequence: Synthetic oligonucleotide
acaacgaccccaucauccc

SEQ ID NO: 1630680 - RNA, 19 nt, Artificial Sequence
  Description of Artificial Sequence: Synthetic oligonucleotide
cacaacgaccccaucaucc

SEQ ID NO: 1630681 - RNA, 19 nt, Artificial Sequence
  Description of Artificial Sequence: Synthetic oligonucleotide
uuuaguggggaaguggagc

SEQ ID NO: 1630682 - RNA, 19 nt, Artificial Sequence
  Description of Artificial Sequence: Synthetic oligonucleotide
aguggagccauaaauaugu

SEQ ID NO: 1630683 - RNA, 19 nt, Artificial Sequence
  Description of Artificial Sequence: Synthetic oligonucleotide
aggaacaggguaugaaguc

SEQ ID NO: 1630684 - RNA, 19 nt, Artificial Sequence
  Description of Artificial Sequence: Synthetic oligonucleotide
uggacguaggcccucacca

SEQ ID NO: 1630685 - RNA, 19 nt, Artificial Sequence
  Description of Artificial Sequence: Synthetic oligonucleotide
accuugacaggguugaucu

SEQ ID NO: 1630686 - RNA, 19 nt, Artificial Sequence
  Description of Artificial Sequence: Synthetic oligonucleotide
auaaauauguccagagucu

SEQ ID NO: 1630687 - RNA, 19 nt, Artificial Sequence
  Description of Artificial Sequence: Synthetic oligonucleotide
gguaguagcaggcuguugc

SEQ ID NO: 1630688 - RNA, 19 nt, Artificial Sequence
  Description of Artificial Sequence: Synthetic oligonucleotide
uggagccauaaauaugucc

SEQ ID NO: 1630689 - RNA, 19 nt, Artificial Sequence
  Description of Artificial Sequence: Synthetic oligonucleotide
aaucuuuaaugaaauugga

SEQ ID NO: 1630690 - RNA, 19 nt, Artificial Sequence
  Description of Artificial Sequence: Synthetic oligonucleotide
gacaggguugaucuccccg

SEQ ID NO: 1630691 - RNA, 19 nt, Artificial Sequence
  Description of Artificial Sequence: Synthetic oligonucleotide
aucuuuaaugaaauuggag

SEQ ID NO: 1630692 - RNA, 19 nt, Artificial Sequence
  Description of Artificial Sequence: Synthetic oligonucleotide
uguagagcccgcacugggg

SEQ ID NO: 1630693 - RNA, 19 nt, Artificial Sequence
  Description of Artificial Sequence: Synthetic oligonucleotide
cuugacaggguugaucucc

SEQ ID NO: 1630694 - RNA, 19 nt, Artificial Sequence
  Description of Artificial Sequence: Synthetic oligonucleotide
ugcagucaaggccaggaca

SEQ ID NO: 1630695 - RNA, 19 nt, Artificial Sequence
  Description of Artificial Sequence: Synthetic oligonucleotide
cuucagauacuugucagug

SEQ ID NO: 1630696 - RNA, 19 nt, Artificial Sequence
  Description of Artificial Sequence: Synthetic oligonucleotide
ugucaguguccccacgucc

SEQ ID NO: 1630697 - RNA, 19 nt, Artificial Sequence
  Description of Artificial Sequence: Synthetic oligonucleotide
aacggguaggggcagggcu

SEQ ID NO: 1630698 - RNA, 19 nt, Artificial Sequence
  Description of Artificial Sequence: Synthetic oligonucleotide
gaccccaucaucccacuag

SEQ ID NO: 1630699 - RNA, 19 nt, Artificial Sequence
  Description of Artificial Sequence: Synthetic oligonucleotide
gacguaggcccucaccagg

SEQ ID NO: 1630700 - RNA, 19 nt, Artificial Sequence
  Description of Artificial Sequence: Synthetic oligonucleotide
uccagagucucagaggcgc

SEQ ID NO: 1630701 - RNA, 19 nt, Artificial Sequence
  Description of Artificial Sequence: Synthetic oligonucleotide
aggcuguugcuccuccucc

SEQ ID NO: 1630702 - RNA, 19 nt, Artificial Sequence
  Description of Artificial Sequence: Synthetic oligonucleotide
caucaucccacuaggggag

SEQ ID NO: 1630703 - RNA, 19 nt, Artificial Sequence
  Description of Artificial Sequence: Synthetic oligonucleotide
uuaggugguggaguacugg

SEQ ID NO: 1630704 - RNA, 19 nt, Artificial Sequence
  Description of Artificial Sequence: Synthetic oligonucleotide
ucucucuugucagaugcag

SEQ ID NO: 1630705 - RNA, 19 nt, Artificial Sequence
  Description of Artificial Sequence: Synthetic oligonucleotide
uaaauauguccagagucuc

SEQ ID NO: 1630706 - RNA, 19 nt, Artificial Sequence
  Description of Artificial Sequence: Synthetic oligonucleotide
ucucagaggcgcaggaaca

SEQ ID NO: 1630707 - RNA, 19 nt, Artificial Sequence
  Description of Artificial Sequence: Synthetic oligonucleotide
gagacuucaggagucuugc

SEQ ID NO: 1630708 - RNA, 19 nt, Artificial Sequence
  Description of Artificial Sequence: Synthetic oligonucleotide
ugaggaucugguugguggc

SEQ ID NO: 1630709 - RNA, 19 nt, Artificial Sequence
  Description of Artificial Sequence: Synthetic oligonucleotide
aacgaccccaucaucccac

SEQ ID NO: 1630710 - RNA, 19 nt, Artificial Sequence
  Description of Artificial Sequence: Synthetic oligonucleotide
gguagugcaguccacacca

SEQ ID NO: 1630711 - RNA, 19 nt, Artificial Sequence
  Description of Artificial Sequence: Synthetic oligonucleotide
cuuccgauggcugaggauc

SEQ ID NO: 1630712 - RNA, 19 nt, Artificial Sequence
  Description of Artificial Sequence: Synthetic oligonucleotide
agaugcaggggccagccca

SEQ ID NO: 1630713 - RNA, 19 nt, Artificial Sequence
  Description of Artificial Sequence: Synthetic oligonucleotide
guuuccucgguccccuugg

SEQ ID NO: 1630714 - RNA, 19 nt, Artificial Sequence
  Description of Artificial Sequence: Synthetic oligonucleotide
auacuugucagugucccca

SEQ ID NO: 1630715 - RNA, 19 nt, Artificial Sequence
  Description of Artificial Sequence: Synthetic oligonucleotide
gaccccaggguccucagug

SEQ ID NO: 1630716 - RNA, 19 nt, Artificial Sequence
  Description of Artificial Sequence: Synthetic oligonucleotide
ggagccauaaauaugucca

SEQ ID NO: 1630717 - RNA, 19 nt, Artificial Sequence
  Description of Artificial Sequence: Synthetic oligonucleotide
gauacuugucagugucccc

SEQ ID NO: 1630718 - RNA, 19 nt, Artificial Sequence
  Description of Artificial Sequence: Synthetic oligonucleotide
gacagccuuccucaggaug

SEQ ID NO: 1630719 - RNA, 19 nt, Artificial Sequence
  Description of Artificial Sequence: Synthetic oligonucleotide
uucagauacuugucagugu

SEQ ID NO: 1630720 - RNA, 19 nt, Artificial Sequence
  Description of Artificial Sequence: Synthetic oligonucleotide
ugguagugcaguccacacc

SEQ ID NO: 1630721 - RNA, 19 nt, Artificial Sequence
  Description of Artificial Sequence: Synthetic oligonucleotide
agaccauguuuccucgguc

SEQ ID NO: 1630722 - RNA, 19 nt, Artificial Sequence
  Description of Artificial Sequence: Synthetic oligonucleotide
aaauauguccagagucuca

SEQ ID NO: 1630723 - RNA, 19 nt, Artificial Sequence
  Description of Artificial Sequence: Synthetic oligonucleotide
gaaguggagccauaaauau

SEQ ID NO: 1630724 - RNA, 19 nt, Artificial Sequence
  Description of Artificial Sequence: Synthetic oligonucleotide
gaucuccccgcuuuugcug

SEQ ID NO: 1630725 - RNA, 19 nt, Artificial Sequence
  Description of Artificial Sequence: Synthetic oligonucleotide
cuuguggacagccuuccuc

SEQ ID NO: 1630726 - RNA, 19 nt, Artificial Sequence
  Description of Artificial Sequence: Synthetic oligonucleotide
agggcugaggccuugggau

SEQ ID NO: 1630727 - RNA, 19 nt, Artificial Sequence
  Description of Artificial Sequence: Synthetic oligonucleotide
uaguagggcuugauggcca

SEQ ID NO: 1630728 - RNA, 19 nt, Artificial Sequence
  Description of Artificial Sequence: Synthetic oligonucleotide
agaagcuggcccauccucg

SEQ ID NO: 1630729 - RNA, 19 nt, Artificial Sequence
  Description of Artificial Sequence: Synthetic oligonucleotide
gucucagaggcgcaggaac

SEQ ID NO: 1630730 - RNA, 19 nt, Artificial Sequence
  Description of Artificial Sequence: Synthetic oligonucleotide
gaggccuugggauaggcua

SEQ ID NO: 1630731 - RNA, 19 nt, Artificial Sequence
  Description of Artificial Sequence: Synthetic oligonucleotide
agcuggcccauccucggcg

SEQ ID NO: 1630732 - RNA, 19 nt, Artificial Sequence
  Description of Artificial Sequence: Synthetic oligonucleotide
agugcagucaaggccagga

SEQ ID NO: 1630733 - RNA, 19 nt, Artificial Sequence
  Description of Artificial Sequence: Synthetic oligonucleotide
gaaggagacuucaggaguc

SEQ ID NO: 1630734 - RNA, 19 nt, Artificial Sequence
  Description of Artificial Sequence: Synthetic oligonucleotide
caugacagaagggcugagg

SEQ ID NO: 1630735 - RNA, 19 nt, Artificial Sequence
  Description of Artificial Sequence: Synthetic oligonucleotide
gacccuagaagcuggccca

SEQ ID NO: 1630736 - RNA, 19 nt, Artificial Sequence
  Description of Artificial Sequence: Synthetic oligonucleotide
guaguagggcuugauggcc

SEQ ID NO: 1630737 - RNA, 19 nt, Artificial Sequence
  Description of Artificial Sequence: Synthetic oligonucleotide
ugaucuccccgcuuuugcu

SEQ ID NO: 1630738 - RNA, 19 nt, Artificial Sequence
  Description of Artificial Sequence: Synthetic oligonucleotide
auaacggguaggggcaggg

SEQ ID NO: 1630739 - RNA, 19 nt, Artificial Sequence
  Description of Artificial Sequence: Synthetic oligonucleotide
caggacaccacugguagug

SEQ ID NO: 1630740 - RNA, 19 nt, Artificial Sequence
  Description of Artificial Sequence: Synthetic oligonucleotide
gcggagcuaccuuaggugg

SEQ ID NO: 1630741 - RNA, 19 nt, Artificial Sequence
  Description of Artificial Sequence: Synthetic oligonucleotide
guaugaagucucagagagg

SEQ ID NO: 1630742 - RNA, 19 nt, Artificial Sequence
  Description of Artificial Sequence: Synthetic oligonucleotide
cuugcggaaguagcgguag

SEQ ID NO: 1630743 - RNA, 19 nt, Artificial Sequence
  Description of Artificial Sequence: Synthetic oligonucleotide
ccucucucuugucagaugc

SEQ ID NO: 1630744 - RNA, 19 nt, Artificial Sequence
  Description of Artificial Sequence: Synthetic oligonucleotide
acuugucaguguccccacg

SEQ ID NO: 1630745 - RNA, 19 nt, Artificial Sequence
  Description of Artificial Sequence: Synthetic oligonucleotide
ugucugggaguccggggug

SEQ ID NO: 1630746 - RNA, 19 nt, Artificial Sequence
  Description of Artificial Sequence: Synthetic oligonucleotide
uuccgauggcugaggaucu

SEQ ID NO: 1630747 - RNA, 19 nt, Artificial Sequence
  Description of Artificial Sequence: Synthetic oligonucleotide
gaacaggguaugaagucuc

SEQ ID NO: 1630748 - RNA, 19 nt, Artificial Sequence
  Description of Artificial Sequence: Synthetic oligonucleotide
ugcuugcggaaguagcggu

SEQ ID NO: 1630749 - RNA, 19 nt, Artificial Sequence
  Description of Artificial Sequence: Synthetic oligonucleotide
uguggacagccuuccucag

SEQ ID NO: 1630750 - RNA, 19 nt, Artificial Sequence
  Description of Artificial Sequence: Synthetic oligonucleotide
aggauaacggguaggggca

SEQ ID NO: 1630751 - RNA, 19 nt, Artificial Sequence
  Description of Artificial Sequence: Synthetic oligonucleotide
cuuaggugguggaguacug

SEQ ID NO: 1630752 - RNA, 19 nt, Artificial Sequence
  Description of Artificial Sequence: Synthetic oligonucleotide
gauaacggguaggggcagg

SEQ ID NO: 1630753 - RNA, 19 nt, Artificial Sequence
  Description of Artificial Sequence: Synthetic oligonucleotide
ugagugcggguggaggcgg

SEQ ID NO: 1630754 - RNA, 19 nt, Artificial Sequence
  Description of Artificial Sequence: Synthetic oligonucleotide
gugcaguccacaccagcag

SEQ ID NO: 1630755 - RNA, 19 nt, Artificial Sequence
  Description of Artificial Sequence: Synthetic oligonucleotide
cccaucaucccacuagggg

SEQ ID NO: 1630756 - RNA, 19 nt, Artificial Sequence
  Description of Artificial Sequence: Synthetic oligonucleotide
gaucuuguggacagccuuc

SEQ ID NO: 1630757 - RNA, 19 nt, Artificial Sequence
  Description of Artificial Sequence: Synthetic oligonucleotide
uaggcuaaggggccaggau

SEQ ID NO: 1630758 - RNA, 19 nt, Artificial Sequence
  Description of Artificial Sequence: Synthetic oligonucleotide
acugguagugcaguccaca

SEQ ID NO: 1630759 - RNA, 19 nt, Artificial Sequence
  Description of Artificial Sequence: Synthetic oligonucleotide
guuuaguggggaaguggag

SEQ ID NO: 1630760 - RNA, 19 nt, Artificial Sequence
  Description of Artificial Sequence: Synthetic oligonucleotide
cucuugucagaugcagggg

SEQ ID NO: 1630761 - RNA, 19 nt, Artificial Sequence
  Description of Artificial Sequence: Synthetic oligonucleotide
uggugguccgcuccucccc

SEQ ID NO: 1630762 - RNA, 19 nt, Artificial Sequence
  Description of Artificial Sequence: Synthetic oligonucleotide
aggacaccacugguagugc

SEQ ID NO: 1630763 - RNA, 19 nt, Artificial Sequence
  Description of Artificial Sequence: Synthetic oligonucleotide
aaggagacuucaggagucu

SEQ ID NO: 1630764 - RNA, 19 nt, Artificial Sequence
  Description of Artificial Sequence: Synthetic oligonucleotide
ggcggagcuaccuuaggug

SEQ ID NO: 1630765 - RNA, 19 nt, Artificial Sequence
  Description of Artificial Sequence: Synthetic oligonucleotide
uaccuuaggugguggagua

SEQ ID NO: 1630766 - RNA, 19 nt, Artificial Sequence
  Description of Artificial Sequence: Synthetic oligonucleotide
aggcggagcuaccuuaggu

SEQ ID NO: 1630767 - RNA, 19 nt, Artificial Sequence
  Description of Artificial Sequence: Synthetic oligonucleotide
cuauggggaggcugccagg

SEQ ID NO: 1630768 - RNA, 19 nt, Artificial Sequence
  Description of Artificial Sequence: Synthetic oligonucleotide
cuacucggaccccaggguc

SEQ ID NO: 1630769 - RNA, 19 nt, Artificial Sequence
  Description of Artificial Sequence: Synthetic oligonucleotide
cauccucggcgccagaguc

SEQ ID NO: 1630770 - RNA, 19 nt, Artificial Sequence
  Description of Artificial Sequence: Synthetic oligonucleotide
ucaucccacuaggggaggg

SEQ ID NO: 1630771 - RNA, 19 nt, Artificial Sequence
  Description of Artificial Sequence: Synthetic oligonucleotide
cuugcgcccgugcuugcgg

SEQ ID NO: 1630772 - RNA, 19 nt, Artificial Sequence
  Description of Artificial Sequence: Synthetic oligonucleotide
ucacaacgaccccaucauc

SEQ ID NO: 1630773 - RNA, 19 nt, Artificial Sequence
  Description of Artificial Sequence: Synthetic oligonucleotide
cuggacguaggcccucacc

SEQ ID NO: 1630774 - RNA, 19 nt, Artificial Sequence
  Description of Artificial Sequence: Synthetic oligonucleotide
gaggcggagcuaccuuagg

SEQ ID NO: 1630775 - RNA, 19 nt, Artificial Sequence
  Description of Artificial Sequence: Synthetic oligonucleotide
gccaggauaacggguaggg

SEQ ID NO: 1630776 - RNA, 19 nt, Artificial Sequence
  Description of Artificial Sequence: Synthetic oligonucleotide
gaugcaggggccagcccag

SEQ ID NO: 1630777 - RNA, 19 nt, Artificial Sequence
  Description of Artificial Sequence: Synthetic oligonucleotide
aggguccucaguggcuucc

SEQ ID NO: 1630778 - RNA, 19 nt, Artificial Sequence
  Description of Artificial Sequence: Synthetic oligonucleotide
ggguuuaguggggaagugg

SEQ ID NO: 1630779 - RNA, 19 nt, Artificial Sequence
  Description of Artificial Sequence: Synthetic oligonucleotide
auauguccagagucucaga

SEQ ID NO: 1630780 - RNA, 19 nt, Artificial Sequence
  Description of Artificial Sequence: Synthetic oligonucleotide
guagcuggaagggccuggg

SEQ ID NO: 1630781 - RNA, 19 nt, Artificial Sequence
  Description of Artificial Sequence: Synthetic oligonucleotide
gguuuaguggggaagugga

SEQ ID NO: 1630782 - RNA, 19 nt, Artificial Sequence
  Description of Artificial Sequence: Synthetic oligonucleotide
agucaaggccaggacacca

SEQ ID NO: 1630783 - RNA, 19 nt, Artificial Sequence
  Description of Artificial Sequence: Synthetic oligonucleotide
ucuuguggacagccuuccu

SEQ ID NO: 1630784 - RNA, 19 nt, Artificial Sequence
  Description of Artificial Sequence: Synthetic oligonucleotide
uccuccuccuccuccucug

SEQ ID NO: 1630785 - RNA, 19 nt, Artificial Sequence
  Description of Artificial Sequence: Synthetic oligonucleotide
uugcggaaguagcgguagc

SEQ ID NO: 1630786 - RNA, 19 nt, Artificial Sequence
  Description of Artificial Sequence: Synthetic oligonucleotide
cuuugcucggcuggccagg

SEQ ID NO: 1630787 - RNA, 19 nt, Artificial Sequence
  Description of Artificial Sequence: Synthetic oligonucleotide
ccuagaagcuggcccaucc

SEQ ID NO: 1630788 - RNA, 19 nt, Artificial Sequence
  Description of Artificial Sequence: Synthetic oligonucleotide
ucccuccuccuccuccucc

SEQ ID NO: 1630789 - RNA, 19 nt, Artificial Sequence
  Description of Artificial Sequence: Synthetic oligonucleotide
agcccagugggaguaggag

SEQ ID NO: 1630790 - RNA, 19 nt, Artificial Sequence
  Description of Artificial Sequence: Synthetic oligonucleotide
ccaucaucccacuagggga

SEQ ID NO: 1630791 - RNA, 19 nt, Artificial Sequence
  Description of Artificial Sequence: Synthetic oligonucleotide
aggcccaaggaagugggca

SEQ ID NO: 1630792 - RNA, 19 nt, Artificial Sequence
  Description of Artificial Sequence: Synthetic oligonucleotide
gagacccuagaagcuggcc

SEQ ID NO: 1630793 - RNA, 19 nt, Artificial Sequence
  Description of Artificial Sequence: Synthetic oligonucleotide
ggaaguggagccauaaaua

SEQ ID NO: 1630794 - RNA, 19 nt, Artificial Sequence
  Description of Artificial Sequence: Synthetic oligonucleotide
gguagcgcuggacguaggc

SEQ ID NO: 1630795 - RNA, 19 nt, Artificial Sequence
  Description of Artificial Sequence: Synthetic oligonucleotide
uccuccuccuccuccuccu

SEQ ID NO: 1630796 - RNA, 19 nt, Artificial Sequence
  Description of Artificial Sequence: Synthetic oligonucleotide
ccuccuauggggaggcugc

SEQ ID NO: 1630797 - RNA, 19 nt, Artificial Sequence
  Description of Artificial Sequence: Synthetic oligonucleotide
auaggcuaaggggccagga

SEQ ID NO: 1630798 - RNA, 19 nt, Artificial Sequence
  Description of Artificial Sequence: Synthetic oligonucleotide
ccaucuugaacagcagugc

SEQ ID NO: 1630799 - RNA, 19 nt, Artificial Sequence
  Description of Artificial Sequence: Synthetic oligonucleotide
ugacaggguugaucucccc

SEQ ID NO: 1630800 - RNA, 19 nt, Artificial Sequence
  Description of Artificial Sequence: Synthetic oligonucleotide
cucugccccuacucggacc

SEQ ID NO: 1630801 - RNA, 19 nt, Artificial Sequence
  Description of Artificial Sequence: Synthetic oligonucleotide
uguccccacgucccucuga

SEQ ID NO: 1630802 - RNA, 19 nt, Artificial Sequence
  Description of Artificial Sequence: Synthetic oligonucleotide
guugguggccuggaucagc

SEQ ID NO: 1630803 - RNA, 19 nt, Artificial Sequence
  Description of Artificial Sequence: Synthetic oligonucleotide
ggagacuucaggagucuug

SEQ ID NO: 1630804 - RNA, 19 nt, Artificial Sequence
  Description of Artificial Sequence: Synthetic oligonucleotide
aguaggagggguggagcca

SEQ ID NO: 1630805 - RNA, 19 nt, Artificial Sequence
  Description of Artificial Sequence: Synthetic oligonucleotide
cacugucugggaguccggg

SEQ ID NO: 1630806 - RNA, 19 nt, Artificial Sequence
  Description of Artificial Sequence: Synthetic oligonucleotide
uccccuuggcgccaucuuu

SEQ ID NO: 1630807 - RNA, 19 nt, Artificial Sequence
  Description of Artificial Sequence: Synthetic oligonucleotide
caucccacuaggggagggg

SEQ ID NO: 1630808 - RNA, 19 nt, Artificial Sequence
  Description of Artificial Sequence: Synthetic oligonucleotide
cuuccucacaacgacccca

SEQ ID NO: 1630809 - RNA, 19 nt, Artificial Sequence
  Description of Artificial Sequence: Synthetic oligonucleotide
guaggagggguggagccac

SEQ ID NO: 1630810 - RNA, 19 nt, Artificial Sequence
  Description of Artificial Sequence: Synthetic oligonucleotide
gaggguggcuuccgauggc

SEQ ID NO: 1630811 - RNA, 19 nt, Artificial Sequence
  Description of Artificial Sequence: Synthetic oligonucleotide
cagaguggaggguggcuuc

SEQ ID NO: 1630812 - RNA, 19 nt, Artificial Sequence
  Description of Artificial Sequence: Synthetic oligonucleotide
aguggaggguggcuuccga

SEQ ID NO: 1630813 - RNA, 19 nt, Artificial Sequence
  Description of Artificial Sequence: Synthetic oligonucleotide
ccuauggggaggcugccag

SEQ ID NO: 1630814 - RNA, 19 nt, Artificial Sequence
  Description of Artificial Sequence: Synthetic oligonucleotide
aguccggggugagugcggg

SEQ ID NO: 1630815 - RNA, 19 nt, Artificial Sequence
  Description of Artificial Sequence: Synthetic oligonucleotide
gggaaguggagccauaaau

SEQ ID NO: 1630816 - RNA, 19 nt, Artificial Sequence
  Description of Artificial Sequence: Synthetic oligonucleotide
gcuaccuuaggugguggag

SEQ ID NO: 1630817 - RNA, 19 nt, Artificial Sequence
  Description of Artificial Sequence: Synthetic oligonucleotide
gaguggaggguggcuuccg

SEQ ID NO: 1630818 - RNA, 19 nt, Artificial Sequence
  Description of Artificial Sequence: Synthetic oligonucleotide
guggcuuccgauggcugag

SEQ ID NO: 1630819 - RNA, 19 nt, Artificial Sequence
  Description of Artificial Sequence: Synthetic oligonucleotide
cuccuccuccuccuccucc

SEQ ID NO: 1630820 - RNA, 19 nt, Artificial Sequence
  Description of Artificial Sequence: Synthetic oligonucleotide
uaguagcaggcuguugcuc

SEQ ID NO: 1630821 - RNA, 19 nt, Artificial Sequence
  Description of Artificial Sequence: Synthetic oligonucleotide
gguagcgugggcagcuggg

SEQ ID NO: 1630822 - RNA, 19 nt, Artificial Sequence
  Description of Artificial Sequence: Synthetic oligonucleotide
cagagucucagaggcgcag

SEQ ID NO: 1630823 - RNA, 19 nt, Artificial Sequence
  Description of Artificial Sequence: Synthetic oligonucleotide
gggagacccuagaagcugg

SEQ ID NO: 1630824 - RNA, 19 nt, Artificial Sequence
  Description of Artificial Sequence: Synthetic oligonucleotide
aguggggaaguggagccau

SEQ ID NO: 1630825 - RNA, 19 nt, Artificial Sequence
  Description of Artificial Sequence: Synthetic oligonucleotide
uggcuuccgauggcugagg

SEQ ID NO: 1630826 - RNA, 19 nt, Artificial Sequence
  Description of Artificial Sequence: Synthetic oligonucleotide
ggacguaggcccucaccag

SEQ ID NO: 1630827 - RNA, 19 nt, Artificial Sequence
  Description of Artificial Sequence: Synthetic oligonucleotide
ugguaguagcaggcuguug

SEQ ID NO: 1630828 - RNA, 19 nt, Artificial Sequence
  Description of Artificial Sequence: Synthetic oligonucleotide
cccuacucggaccccaggg

SEQ ID NO: 1630829 - RNA, 19 nt, Artificial Sequence
  Description of Artificial Sequence: Synthetic oligonucleotide
ggaguccggggugagugcg

SEQ ID NO: 1630830 - RNA, 19 nt, Artificial Sequence
  Description of Artificial Sequence: Synthetic oligonucleotide
uaacggguaggggcagggc

SEQ ID NO: 1630831 - RNA, 19 nt, Artificial Sequence
  Description of Artificial Sequence: Synthetic oligonucleotide
cccagaccauguuuccucg

SEQ ID NO: 1630832 - RNA, 19 nt, Artificial Sequence
  Description of Artificial Sequence: Synthetic oligonucleotide
gcaggcccaaggaaguggg

SEQ ID NO: 1630833 - RNA, 19 nt, Artificial Sequence
  Description of Artificial Sequence: Synthetic oligonucleotide
gugcagucaaggccaggac

SEQ ID NO: 1630834 - RNA, 19 nt, Artificial Sequence
  Description of Artificial Sequence: Synthetic oligonucleotide
cuugucaguguccccacgu

SEQ ID NO: 1630835 - RNA, 19 nt, Artificial Sequence
  Description of Artificial Sequence: Synthetic oligonucleotide
guaguagcaggcuguugcu

SEQ ID NO: 1630836 - RNA, 19 nt, Artificial Sequence
  Description of Artificial Sequence: Synthetic oligonucleotide
uaguggggaaguggagcca

SEQ ID NO: 1630837 - RNA, 19 nt, Artificial Sequence
  Description of Artificial Sequence: Synthetic oligonucleotide
gcgugugcagcuucuucag

SEQ ID NO: 1630838 - RNA, 19 nt, Artificial Sequence
  Description of Artificial Sequence: Synthetic oligonucleotide
guccagagucucagaggcg

SEQ ID NO: 1630839 - RNA, 19 nt, Artificial Sequence
  Description of Artificial Sequence: Synthetic oligonucleotide
uccuauggggaggcugcca

SEQ ID NO: 1630840 - RNA, 19 nt, Artificial Sequence
  Description of Artificial Sequence: Synthetic oligonucleotide
cucacaacgaccccaucau

SEQ ID NO: 1630841 - RNA, 19 nt, Artificial Sequence
  Description of Artificial Sequence: Synthetic oligonucleotide
cagagucuccagcuguaga

SEQ ID NO: 1630842 - RNA, 19 nt, Artificial Sequence
  Description of Artificial Sequence: Synthetic oligonucleotide
uccucggcgccagagucuc

SEQ ID NO: 1630843 - RNA, 19 nt, Artificial Sequence
  Description of Artificial Sequence: Synthetic oligonucleotide
uuugcucggcuggccaggu

SEQ ID NO: 1630844 - RNA, 19 nt, Artificial Sequence
  Description of Artificial Sequence: Synthetic oligonucleotide
ggcagguuccagggcaugg

SEQ ID NO: 1630845 - RNA, 19 nt, Artificial Sequence
  Description of Artificial Sequence: Synthetic oligonucleotide
ggagcuaccuuagguggug

SEQ ID NO: 1630846 - RNA, 19 nt, Artificial Sequence
  Description of Artificial Sequence: Synthetic oligonucleotide
acggguaggggcagggcug

SEQ ID NO: 1630847 - RNA, 19 nt, Artificial Sequence
  Description of Artificial Sequence: Synthetic oligonucleotide
gaguccggggugagugcgg

SEQ ID NO: 1630848 - RNA, 19 nt, Artificial Sequence
  Description of Artificial Sequence: Synthetic oligonucleotide
uugcgcccgugcuugcgga

SEQ ID NO: 1630849 - RNA, 19 nt, Artificial Sequence
  Description of Artificial Sequence: Synthetic oligonucleotide
cucucucuugucagaugca

SEQ ID NO: 1630850 - RNA, 19 nt, Artificial Sequence
  Description of Artificial Sequence: Synthetic oligonucleotide
aggagucuugcagcugcug

SEQ ID NO: 1630851 - RNA, 19 nt, Artificial Sequence
  Description of Artificial Sequence: Synthetic oligonucleotide
ccgugcuugcggaaguagc

SEQ ID NO: 1630852 - RNA, 19 nt, Artificial Sequence
  Description of Artificial Sequence: Synthetic oligonucleotide
aggguggcuuccgauggcu

SEQ ID NO: 1630853 - RNA, 19 nt, Artificial Sequence
  Description of Artificial Sequence: Synthetic oligonucleotide
gggcaugacagaagggcug

SEQ ID NO: 1630854 - RNA, 19 nt, Artificial Sequence
  Description of Artificial Sequence: Synthetic oligonucleotide
cagucaaggccaggacacc

SEQ ID NO: 1630855 - RNA, 19 nt, Artificial Sequence
  Description of Artificial Sequence: Synthetic oligonucleotide
gucagaugcaggggccagc

SEQ ID NO: 1630856 - RNA, 19 nt, Artificial Sequence
  Description of Artificial Sequence: Synthetic oligonucleotide
guagugcaguccacaccag

SEQ ID NO: 1630857 - RNA, 19 nt, Artificial Sequence
  Description of Artificial Sequence: Synthetic oligonucleotide
ggguagcgugggcagcugg

SEQ ID NO: 1630858 - RNA, 19 nt, Artificial Sequence
  Description of Artificial Sequence: Synthetic oligonucleotide
gggugagugcggguggagg

SEQ ID NO: 1630859 - RNA, 19 nt, Artificial Sequence
  Description of Artificial Sequence: Synthetic oligonucleotide
gguugcccaccuugacagg

SEQ ID NO: 1630860 - RNA, 19 nt, Artificial Sequence
  Description of Artificial Sequence: Synthetic oligonucleotide
caccacugguagugcaguc

SEQ ID NO: 1630861 - RNA, 19 nt, Artificial Sequence
  Description of Artificial Sequence: Synthetic oligonucleotide
ucuccccgcuuuugcugug

SEQ ID NO: 1630862 - RNA, 19 nt, Artificial Sequence
  Description of Artificial Sequence: Synthetic oligonucleotide
aggcccucaccagguugcc

SEQ ID NO: 1630863 - RNA, 19 nt, Artificial Sequence
  Description of Artificial Sequence: Synthetic oligonucleotide
gggaguaggagggguggag

SEQ ID NO: 1630864 - RNA, 19 nt, Artificial Sequence
  Description of Artificial Sequence: Synthetic oligonucleotide
ucggcgccagagucuccag

SEQ ID NO: 1630865 - RNA, 19 nt, Artificial Sequence
  Description of Artificial Sequence: Synthetic oligonucleotide
uaggagggguggagccaca

SEQ ID NO: 1630866 - RNA, 19 nt, Artificial Sequence
  Description of Artificial Sequence: Synthetic oligonucleotide
ggaacaggguaugaagucu

SEQ ID NO: 1630867 - RNA, 19 nt, Artificial Sequence
  Description of Artificial Sequence: Synthetic oligonucleotide
acgaccccaucaucccacu

SEQ ID NO: 1630868 - RNA, 19 nt, Artificial Sequence
  Description of Artificial Sequence: Synthetic oligonucleotide
uccgauggcugaggaucug

SEQ ID NO: 1630869 - RNA, 19 nt, Artificial Sequence
  Description of Artificial Sequence: Synthetic oligonucleotide
gauggcugaggaucugguu

SEQ ID NO: 1630870 - RNA, 19 nt, Artificial Sequence
  Description of Artificial Sequence: Synthetic oligonucleotide
agaggcgcaggaacagggu

SEQ ID NO: 1630871 - RNA, 19 nt, Artificial Sequence
  Description of Artificial Sequence: Synthetic oligonucleotide
cuaccuuaggugguggagu

SEQ ID NO: 1630872 - RNA, 19 nt, Artificial Sequence
  Description of Artificial Sequence: Synthetic oligonucleotide
acguaggcccucaccaggu

SEQ ID NO: 1630873 - RNA, 19 nt, Artificial Sequence
  Description of Artificial Sequence: Synthetic oligonucleotide
ggaggcggagcuaccuuag

SEQ ID NO: 1630874 - RNA, 19 nt, Artificial Sequence
  Description of Artificial Sequence: Synthetic oligonucleotide
caacgaccccaucauccca

SEQ ID NO: 1630875 - RNA, 19 nt, Artificial Sequence
  Description of Artificial Sequence: Synthetic oligonucleotide
agucucagaggcgcaggaa

SEQ ID NO: 1630876 - RNA, 19 nt, Artificial Sequence
  Description of Artificial Sequence: Synthetic oligonucleotide
aggcgcaggaacaggguau

SEQ ID NO: 1630877 - RNA, 19 nt, Artificial Sequence
  Description of Artificial Sequence: Synthetic oligonucleotide
cugucugggaguccggggu

SEQ ID NO: 1630878 - RNA, 19 nt, Artificial Sequence
  Description of Artificial Sequence: Synthetic oligonucleotide
gcggaaguagcgguagcgc

SEQ ID NO: 1630879 - RNA, 19 nt, Artificial Sequence
  Description of Artificial Sequence: Synthetic oligonucleotide
guccccacgucccucugaa

SEQ ID NO: 1630880 - RNA, 19 nt, Artificial Sequence
  Description of Artificial Sequence: Synthetic oligonucleotide
cugggagacccuagaagcu

SEQ ID NO: 1630881 - RNA, 19 nt, Artificial Sequence
  Description of Artificial Sequence: Synthetic oligonucleotide
ggccaggauaacggguagg

SEQ ID NO: 1630882 - RNA, 19 nt, Artificial Sequence
  Description of Artificial Sequence: Synthetic oligonucleotide
aggguugaucuccccgcuu

SEQ ID NO: 1630883 - RNA, 19 nt, Artificial Sequence
  Description of Artificial Sequence: Synthetic oligonucleotide
cccacgucccucugaacug

SEQ ID NO: 1630884 - RNA, 19 nt, Artificial Sequence
  Description of Artificial Sequence: Synthetic oligonucleotide
cuccccgcuuuugcugugg

SEQ ID NO: 1630885 - RNA, 19 nt, Artificial Sequence
  Description of Artificial Sequence: Synthetic oligonucleotide
ggggcagugcuuggggcgg

SEQ ID NO: 1630886 - RNA, 19 nt, Artificial Sequence
  Description of Artificial Sequence: Synthetic oligonucleotide
uccugggccuuugcucggc

SEQ ID NO: 1630887 - RNA, 19 nt, Artificial Sequence
  Description of Artificial Sequence: Synthetic oligonucleotide
ggacaccacugguagugca

SEQ ID NO: 1630888 - RNA, 19 nt, Artificial Sequence
  Description of Artificial Sequence: Synthetic oligonucleotide
uggcccauccucggcgcca

SEQ ID NO: 1630889 - RNA, 19 nt, Artificial Sequence
  Description of Artificial Sequence: Synthetic oligonucleotide
ccagcuguagagcccgcac

SEQ ID NO: 1630890 - RNA, 19 nt, Artificial Sequence
  Description of Artificial Sequence: Synthetic oligonucleotide
ggauaacggguaggggcag

SEQ ID NO: 1630891 - RNA, 19 nt, Artificial Sequence
  Description of Artificial Sequence: Synthetic oligonucleotide
agugcggguggaggcggag

SEQ ID NO: 1630892 - RNA, 19 nt, Artificial Sequence
  Description of Artificial Sequence: Synthetic oligonucleotide
cagaccauguuuccucggu

SEQ ID NO: 1630893 - RNA, 19 nt, Artificial Sequence
  Description of Artificial Sequence: Synthetic oligonucleotide
cuccuauggggaggcugcc

SEQ ID NO: 1630894 - RNA, 19 nt, Artificial Sequence
  Description of Artificial Sequence: Synthetic oligonucleotide
aggccuugggauaggcuaa

SEQ ID NO: 1630895 - RNA, 19 nt, Artificial Sequence
  Description of Artificial Sequence: Synthetic oligonucleotide
ggcgcaggaacaggguaug

SEQ ID NO: 1630896 - RNA, 19 nt, Artificial Sequence
  Description of Artificial Sequence: Synthetic oligonucleotide
gugcuuggggcggcugcgg

SEQ ID NO: 1630897 - RNA, 19 nt, Artificial Sequence
  Description of Artificial Sequence: Synthetic oligonucleotide
guggagccauaaauauguc

SEQ ID NO: 1630898 - RNA, 19 nt, Artificial Sequence
  Description of Artificial Sequence: Synthetic oligonucleotide
gugguccgcuccuccccag

SEQ ID NO: 1630899 - RNA, 19 nt, Artificial Sequence
  Description of Artificial Sequence: Synthetic oligonucleotide
ggcgccagagucuccagcu

SEQ ID NO: 1630900 - RNA, 19 nt, Artificial Sequence
  Description of Artificial Sequence: Synthetic oligonucleotide
cucggcgccagagucucca

SEQ ID NO: 1630901 - RNA, 19 nt, Artificial Sequence
  Description of Artificial Sequence: Synthetic oligonucleotide
uggcuccuuggguggucga

SEQ ID NO: 1630902 - RNA, 19 nt, Artificial Sequence
  Description of Artificial Sequence: Synthetic oligonucleotide
ccucgguccccuuggcgcc

SEQ ID NO: 1630903 - RNA, 19 nt, Artificial Sequence
  Description of Artificial Sequence: Synthetic oligonucleotide
ccacugguagugcagucca

SEQ ID NO: 1630904 - RNA, 19 nt, Artificial Sequence
  Description of Artificial Sequence: Synthetic oligonucleotide
ccauguuuccucggucccc

SEQ ID NO: 1630905 - RNA, 19 nt, Artificial Sequence
  Description of Artificial Sequence: Synthetic oligonucleotide
auccucggcgccagagucu

SEQ ID NO: 1630906 - RNA, 19 nt, Artificial Sequence
  Description of Artificial Sequence: Synthetic oligonucleotide
cagugcagucaaggccagg

SEQ ID NO: 1630907 - RNA, 19 nt, Artificial Sequence
  Description of Artificial Sequence: Synthetic oligonucleotide
cauguuuccucgguccccu

SEQ ID NO: 1630908 - RNA, 19 nt, Artificial Sequence
  Description of Artificial Sequence: Synthetic oligonucleotide
gggguuuaguggggaagug

SEQ ID NO: 1630909 - RNA, 19 nt, Artificial Sequence
  Description of Artificial Sequence: Synthetic oligonucleotide
gaacugcugcugcccucuc

SEQ ID NO: 1630910 - RNA, 19 nt, Artificial Sequence
  Description of Artificial Sequence: Synthetic oligonucleotide
uccccacgucccucugaac

SEQ ID NO: 1630911 - RNA, 19 nt, Artificial Sequence
  Description of Artificial Sequence: Synthetic oligonucleotide
gguccgcuccuccccagac

SEQ ID NO: 1630912 - RNA, 19 nt, Artificial Sequence
  Description of Artificial Sequence: Synthetic oligonucleotide
gcucggcuggccagguugg

SEQ ID NO: 1630913 - RNA, 19 nt, Artificial Sequence
  Description of Artificial Sequence: Synthetic oligonucleotide
ugcgcccgugcuugcggaa

SEQ ID NO: 1630914 - RNA, 19 nt, Artificial Sequence
  Description of Artificial Sequence: Synthetic oligonucleotide
cagcccagugggaguagga

SEQ ID NO: 1630915 - RNA, 19 nt, Artificial Sequence
  Description of Artificial Sequence: Synthetic oligonucleotide
gccuccuauggggaggcug

SEQ ID NO: 1630916 - RNA, 19 nt, Artificial Sequence
  Description of Artificial Sequence: Synthetic oligonucleotide
ggagacccuagaagcuggc

SEQ ID NO: 1630917 - RNA, 19 nt, Artificial Sequence
  Description of Artificial Sequence: Synthetic oligonucleotide
aggaagcagguagcuggaa

SEQ ID NO: 1630918 - RNA, 19 nt, Artificial Sequence
  Description of Artificial Sequence: Synthetic oligonucleotide
ggugguccgcuccucccca

SEQ ID NO: 1630919 - RNA, 19 nt, Artificial Sequence
  Description of Artificial Sequence: Synthetic oligonucleotide
ggcuuccgauggcugagga

SEQ ID NO: 1630920 - RNA, 19 nt, Artificial Sequence
  Description of Artificial Sequence: Synthetic oligonucleotide
cagguagcuggaagggccu

SEQ ID NO: 1630921 - RNA, 19 nt, Artificial Sequence
  Description of Artificial Sequence: Synthetic oligonucleotide
gugcggguggaggcggagc

SEQ ID NO: 1630922 - RNA, 19 nt, Artificial Sequence
  Description of Artificial Sequence: Synthetic oligonucleotide
gucugggaguccgggguga

SEQ ID NO: 1630923 - RNA, 19 nt, Artificial Sequence
  Description of Artificial Sequence: Synthetic oligonucleotide
ggccuugggauaggcuaag

SEQ ID NO: 1630924 - RNA, 19 nt, Artificial Sequence
  Description of Artificial Sequence: Synthetic oligonucleotide
ggggaaguggagccauaaa

SEQ ID NO: 1630925 - RNA, 19 nt, Artificial Sequence
  Description of Artificial Sequence: Synthetic oligonucleotide
gcuugcgcccgugcuugcg

SEQ ID NO: 1630926 - RNA, 19 nt, Artificial Sequence
  Description of Artificial Sequence: Synthetic oligonucleotide
caccgcccgcuccugcgug

SEQ ID NO: 1630927 - RNA, 19 nt, Artificial Sequence
  Description of Artificial Sequence: Synthetic oligonucleotide
acgucccucugaacugcug

SEQ ID NO: 1630928 - RNA, 19 nt, Artificial Sequence
  Description of Artificial Sequence: Synthetic oligonucleotide
gggccacccuugucugggg

SEQ ID NO: 1630929 - RNA, 19 nt, Artificial Sequence
  Description of Artificial Sequence: Synthetic oligonucleotide
guggaggguggcuuccgau

SEQ ID NO: 1630930 - RNA, 19 nt, Artificial Sequence
  Description of Artificial Sequence: Synthetic oligonucleotide
caguguccccacgucccuc

SEQ ID NO: 1630931 - RNA, 19 nt, Artificial Sequence
  Description of Artificial Sequence: Synthetic oligonucleotide
cccucucucuugucagaug

SEQ ID NO: 1630932 - RNA, 19 nt, Artificial Sequence
  Description of Artificial Sequence: Synthetic oligonucleotide
gcgccagagucuccagcug

SEQ ID NO: 1630933 - RNA, 19 nt, Artificial Sequence
  Description of Artificial Sequence: Synthetic oligonucleotide
uugcucggcuggccagguu

SEQ ID NO: 1630934 - RNA, 19 nt, Artificial Sequence
  Description of Artificial Sequence: Synthetic oligonucleotide
gggauaggcuaaggggcca

SEQ ID NO: 1630935 - RNA, 19 nt, Artificial Sequence
  Description of Artificial Sequence: Synthetic oligonucleotide
ggguugaucuccccgcuuu

SEQ ID NO: 1630936 - RNA, 19 nt, Artificial Sequence
  Description of Artificial Sequence: Synthetic oligonucleotide
gcagugcagucaaggccag

SEQ ID NO: 1630937 - RNA, 19 nt, Artificial Sequence
  Description of Artificial Sequence: Synthetic oligonucleotide
ccagcccagugggaguagg

SEQ ID NO: 1630938 - RNA, 19 nt, Artificial Sequence
  Description of Artificial Sequence: Synthetic oligonucleotide
cccauccucggcgccagag

SEQ ID NO: 1630939 - RNA, 19 nt, Artificial Sequence
  Description of Artificial Sequence: Synthetic oligonucleotide
ggggcaugacagaagggcu

SEQ ID NO: 1630940 - RNA, 19 nt, Artificial Sequence
  Description of Artificial Sequence: Synthetic oligonucleotide
guccacugucugggagucc

SEQ ID NO: 1630941 - RNA, 19 nt, Artificial Sequence
  Description of Artificial Sequence: Synthetic oligonucleotide
caggguugaucuccccgcu

SEQ ID NO: 1630942 - RNA, 19 nt, Artificial Sequence
  Description of Artificial Sequence: Synthetic oligonucleotide
cccgugcuugcggaaguag

SEQ ID NO: 1630943 - RNA, 19 nt, Artificial Sequence
  Description of Artificial Sequence: Synthetic oligonucleotide
gcuaaggggccaggauaac

SEQ ID NO: 1630944 - RNA, 19 nt, Artificial Sequence
  Description of Artificial Sequence: Synthetic oligonucleotide
ggccuuugcucggcuggcc

SEQ ID NO: 1630945 - RNA, 19 nt, Artificial Sequence
  Description of Artificial Sequence: Synthetic oligonucleotide
ccccuacucggaccccagg

SEQ ID NO: 1630946 - RNA, 19 nt, Artificial Sequence
  Description of Artificial Sequence: Synthetic oligonucleotide
gagugcggguggaggcgga

SEQ ID NO: 1630947 - RNA, 19 nt, Artificial Sequence
  Description of Artificial Sequence: Synthetic oligonucleotide
gguggaggcggagcuaccu

SEQ ID NO: 1630948 - RNA, 19 nt, Artificial Sequence
  Description of Artificial Sequence: Synthetic oligonucleotide
gggcaggcccaaggaagug

SEQ ID NO: 1630949 - RNA, 19 nt, Artificial Sequence
  Description of Artificial Sequence: Synthetic oligonucleotide
cuccuccuccuccuccucu

SEQ ID NO: 1630950 - RNA, 19 nt, Artificial Sequence
  Description of Artificial Sequence: Synthetic oligonucleotide
ccagagucucagaggcgca

SEQ ID NO: 1630951 - RNA, 19 nt, Artificial Sequence
  Description of Artificial Sequence: Synthetic oligonucleotide
guggaggcggagcuaccuu

SEQ ID NO: 1630952 - RNA, 19 nt, Artificial Sequence
  Description of Artificial Sequence: Synthetic oligonucleotide
cugccccuacucggacccc

SEQ ID NO: 1630953 - RNA, 19 nt, Artificial Sequence
  Description of Artificial Sequence: Synthetic oligonucleotide
gcuggacguaggcccucac

SEQ ID NO: 1630954 - RNA, 19 nt, Artificial Sequence
  Description of Artificial Sequence: Synthetic oligonucleotide
gcgcccgugcuugcggaag

SEQ ID NO: 1630955 - RNA, 19 nt, Artificial Sequence
  Description of Artificial Sequence: Synthetic oligonucleotide
ggggcggcugcggcggugc

SEQ ID NO: 1630956 - RNA, 19 nt, Artificial Sequence
  Description of Artificial Sequence: Synthetic oligonucleotide
ggcccucaccagguugccc

SEQ ID NO: 1630957 - RNA, 19 nt, Artificial Sequence
  Description of Artificial Sequence: Synthetic oligonucleotide
gcuugcggaaguagcggua

SEQ ID NO: 1630958 - RNA, 19 nt, Artificial Sequence
  Description of Artificial Sequence: Synthetic oligonucleotide
ccuacucggaccccagggu

SEQ ID NO: 1630959 - RNA, 19 nt, Artificial Sequence
  Description of Artificial Sequence: Synthetic oligonucleotide
ggcuugcgcccgugcuugc

SEQ ID NO: 1630960 - RNA, 19 nt, Artificial Sequence
  Description of Artificial Sequence: Synthetic oligonucleotide
gguugaucuccccgcuuuu

SEQ ID NO: 1630961 - RNA, 19 nt, Artificial Sequence
  Description of Artificial Sequence: Synthetic oligonucleotide
ggggcaggcccaaggaagu

SEQ ID NO: 1630962 - RNA, 19 nt, Artificial Sequence
  Description of Artificial Sequence: Synthetic oligonucleotide
gggguagcgugggcagcug

SEQ ID NO: 1630963 - RNA, 19 nt, Artificial Sequence
  Description of Artificial Sequence: Synthetic oligonucleotide
aggggccagcccaguggga

SEQ ID NO: 1630964 - RNA, 19 nt, Artificial Sequence
  Description of Artificial Sequence: Synthetic oligonucleotide
cucgguccccuuggcgcca

SEQ ID NO: 1630965 - RNA, 19 nt, Artificial Sequence
  Description of Artificial Sequence: Synthetic oligonucleotide
ccccagaguggaggguggc

SEQ ID NO: 1630966 - RNA, 19 nt, Artificial Sequence
  Description of Artificial Sequence: Synthetic oligonucleotide
cggcuugcgcccgugcuug

SEQ ID NO: 1630967 - RNA, 19 nt, Artificial Sequence
  Description of Artificial Sequence: Synthetic oligonucleotide
cggcgccagagucuccagc

SEQ ID NO: 1630968 - RNA, 19 nt, Artificial Sequence
  Description of Artificial Sequence: Synthetic oligonucleotide
guggggaaguggagccaua

SEQ ID NO: 1630969 - RNA, 19 nt, Artificial Sequence
  Description of Artificial Sequence: Synthetic oligonucleotide
ggccagcccagugggagua

SEQ ID NO: 1630970 - RNA, 19 nt, Artificial Sequence
  Description of Artificial Sequence: Synthetic oligonucleotide
cgugugcagcuucuucaga

SEQ ID NO: 1630971 - RNA, 19 nt, Artificial Sequence
  Description of Artificial Sequence: Synthetic oligonucleotide
ccuccuccuccuccuccuc

SEQ ID NO: 1630972 - RNA, 19 nt, Artificial Sequence
  Description of Artificial Sequence: Synthetic oligonucleotide
ccccgcuuuugcuguggca

SEQ ID NO: 1630973 - RNA, 19 nt, Artificial Sequence
  Description of Artificial Sequence: Synthetic oligonucleotide
gcgcaggaacaggguauga

SEQ ID NO: 1630974 - RNA, 19 nt, Artificial Sequence
  Description of Artificial Sequence: Synthetic oligonucleotide
cccuagaagcuggcccauc

SEQ ID NO: 1630975 - RNA, 19 nt, Artificial Sequence
  Description of Artificial Sequence: Synthetic oligonucleotide
cucggaccccaggguccuc

SEQ ID NO: 1630976 - RNA, 19 nt, Artificial Sequence
  Description of Artificial Sequence: Synthetic oligonucleotide
gggccagcccagugggagu

SEQ ID NO: 1630977 - RNA, 19 nt, Artificial Sequence
  Description of Artificial Sequence: Synthetic oligonucleotide
gcaggccugggccacccuu

SEQ ID NO: 1630978 - RNA, 19 nt, Artificial Sequence
  Description of Artificial Sequence: Synthetic oligonucleotide
ggacagccuuccucaggau

SEQ ID NO: 1630979 - RNA, 19 nt, Artificial Sequence
  Description of Artificial Sequence: Synthetic oligonucleotide
ccaggacaccacugguagu

SEQ ID NO: 1630980 - RNA, 19 nt, Artificial Sequence
  Description of Artificial Sequence: Synthetic oligonucleotide
gcacaggagcuggguucac

SEQ ID NO: 1630981 - RNA, 19 nt, Artificial Sequence
  Description of Artificial Sequence: Synthetic oligonucleotide
cgccagagucuccagcugu

SEQ ID NO: 1630982 - RNA, 19 nt, Artificial Sequence
  Description of Artificial Sequence: Synthetic oligonucleotide
cccuccuccuccuccuccu

SEQ ID NO: 1630983 - RNA, 19 nt, Artificial Sequence
  Description of Artificial Sequence: Synthetic oligonucleotide
cggagcuaccuuagguggu

SEQ ID NO: 1630984 - RNA, 19 nt, Artificial Sequence
  Description of Artificial Sequence: Synthetic oligonucleotide
cccggcuugcgcccgugcu

SEQ ID NO: 1630985 - RNA, 19 nt, Artificial Sequence
  Description of Artificial Sequence: Synthetic oligonucleotide
gcggguggaggcggagcua

SEQ ID NO: 1630986 - RNA, 19 nt, Artificial Sequence
  Description of Artificial Sequence: Synthetic oligonucleotide
ccggcuugcgcccgugcuu

SEQ ID NO: 1630987 - RNA, 19 nt, Artificial Sequence
  Description of Artificial Sequence: Synthetic oligonucleotide
cgaccccaucaucccacua

SEQ ID NO: 1630988 - RNA, 19 nt, Artificial Sequence
  Description of Artificial Sequence: Synthetic oligonucleotide
cgcccgugcuugcggaagu

SEQ ID NO: 1630989 - RNA, 19 nt, Artificial Sequence
  Description of Artificial Sequence: Synthetic oligonucleotide
cccuggcuccuuggguggu

SEQ ID NO: 1630990 - RNA, 19 nt, Artificial Sequence
  Description of Artificial Sequence: Synthetic oligonucleotide
ccgcuccuccccagaccau

SEQ ID NO: 1630991 - RNA, 19 nt, Artificial Sequence
  Description of Artificial Sequence: Synthetic oligonucleotide
cgguccccuuggcgccauc

SEQ ID NO: 1630992 - RNA, 19 nt, Artificial Sequence
  Description of Artificial Sequence: Synthetic oligonucleotide
aaaacuccaauucuggucc

SEQ ID NO: 1630993 - RNA, 19 nt, Artificial Sequence
  Description of Artificial Sequence: Synthetic oligonucleotide
aaagggaucauuuauauca

SEQ ID NO: 1630994 - RNA, 19 nt, Artificial Sequence
  Description of Artificial Sequence: Synthetic oligonucleotide
uuugcaguaaaauucaccg

SEQ ID NO: 1630995 - RNA, 19 nt, Artificial Sequence
  Description of Artificial Sequence: Synthetic oligonucleotide
agaaaaggcaccuaaauag

SEQ ID NO: 1630996 - RNA, 19 nt, Artificial Sequence
  Description of Artificial Sequence: Synthetic oligonucleotide
auuacuuccaauaaaaggg

SEQ ID NO: 1630997 - RNA, 19 nt, Artificial Sequence
  Description of Artificial Sequence: Synthetic oligonucleotide
aguuaaggaauccuggagc

SEQ ID NO: 1630998 - RNA, 19 nt, Artificial Sequence
  Description of Artificial Sequence: Synthetic oligonucleotide
aaucccucaucguaguugc

SEQ ID NO: 1630999 - RNA, 19 nt, Artificial Sequence
  Description of Artificial Sequence: Synthetic oligonucleotide
ugaggugacauauaugagg

SEQ ID NO: 1631000 - RNA, 19 nt, Artificial Sequence
  Description of Artificial Sequence: Synthetic oligonucleotide
cauuacuuccaauaaaagg

SEQ ID NO: 1631001 - RNA, 19 nt, Artificial Sequence
  Description of Artificial Sequence: Synthetic oligonucleotide
uuugcucuuaaacagcugc

SEQ ID NO: 1631002 - RNA, 19 nt, Artificial Sequence
  Description of Artificial Sequence: Synthetic oligonucleotide
agaucaaccuccuuggacg

SEQ ID NO: 1631003 - RNA, 19 nt, Artificial Sequence
  Description of Artificial Sequence: Synthetic oligonucleotide
guuauuugacuauaucucg

SEQ ID NO: 1631004 - RNA, 19 nt, Artificial Sequence
  Description of Artificial Sequence: Synthetic oligonucleotide
ugcaguaaaauucaccgug

SEQ ID NO: 1631005 - RNA, 19 nt, Artificial Sequence
  Description of Artificial Sequence: Synthetic oligonucleotide
uuugacuauaucucgacug

SEQ ID NO: 1631006 - RNA, 19 nt, Artificial Sequence
  Description of Artificial Sequence: Synthetic oligonucleotide
aaaaguuaaggaauccugg

SEQ ID NO: 1631007 - RNA, 19 nt, Artificial Sequence
  Description of Artificial Sequence: Synthetic oligonucleotide
uaguuauuugacuauaucu

SEQ ID NO: 1631008 - RNA, 19 nt, Artificial Sequence
  Description of Artificial Sequence: Synthetic oligonucleotide
acuauaucucgacugaggg

SEQ ID NO: 1631009 - RNA, 19 nt, Artificial Sequence
  Description of Artificial Sequence: Synthetic oligonucleotide
uuauuaaauccaaaugaga

SEQ ID NO: 1631010 - RNA, 19 nt, Artificial Sequence
  Description of Artificial Sequence: Synthetic oligonucleotide
uggauugugcagaagaagc

SEQ ID NO: 1631011 - RNA, 19 nt, Artificial Sequence
  Description of Artificial Sequence: Synthetic oligonucleotide
aguuauuugacuauaucuc

SEQ ID NO: 1631012 - RNA, 19 nt, Artificial Sequence
  Description of Artificial Sequence: Synthetic oligonucleotide
uguuagagggaccucaggc

SEQ ID NO: 1631013 - RNA, 19 nt, Artificial Sequence
  Description of Artificial Sequence: Synthetic oligonucleotide
auggugaaaacuccaauuc

SEQ ID NO: 1631014 - RNA, 19 nt, Artificial Sequence
  Description of Artificial Sequence: Synthetic oligonucleotide
aaauucaccgugcagugca

SEQ ID NO: 1631015 - RNA, 19 nt, Artificial Sequence
  Description of Artificial Sequence: Synthetic oligonucleotide
auuauuaaauccaaaugag

SEQ ID NO: 1631016 - RNA, 19 nt, Artificial Sequence
  Description of Artificial Sequence: Synthetic oligonucleotide
aaguuaaggaauccuggag

SEQ ID NO: 1631017 - RNA, 19 nt, Artificial Sequence
  Description of Artificial Sequence: Synthetic oligonucleotide
ugcaacagaagcaagaguu

SEQ ID NO: 1631018 - RNA, 19 nt, Artificial Sequence
  Description of Artificial Sequence: Synthetic oligonucleotide
uauaucucgacugagggcu

SEQ ID NO: 1631019 - RNA, 19 nt, Artificial Sequence
  Description of Artificial Sequence: Synthetic oligonucleotide
ugcauuacuuccaauaaaa

SEQ ID NO: 1631020 - RNA, 19 nt, Artificial Sequence
  Description of Artificial Sequence: Synthetic oligonucleotide
auaguuauuugacuauauc

SEQ ID NO: 1631021 - RNA, 19 nt, Artificial Sequence
  Description of Artificial Sequence: Synthetic oligonucleotide
gucagaaccaggcuaaggg

SEQ ID NO: 1631022 - RNA, 19 nt, Artificial Sequence
  Description of Artificial Sequence: Synthetic oligonucleotide
uaaauagggaagcugggcu

SEQ ID NO: 1631023 - RNA, 19 nt, Artificial Sequence
  Description of Artificial Sequence: Synthetic oligonucleotide
uuuauaucagccucuuccc

SEQ ID NO: 1631024 - RNA, 19 nt, Artificial Sequence
  Description of Artificial Sequence: Synthetic oligonucleotide
ucugaauuguggauugugc

SEQ ID NO: 1631025 - RNA, 19 nt, Artificial Sequence
  Description of Artificial Sequence: Synthetic oligonucleotide
aaaccugucugagggagcc

SEQ ID NO: 1631026 - RNA, 19 nt, Artificial Sequence
  Description of Artificial Sequence: Synthetic oligonucleotide
uuuguucaucauuccaugg

SEQ ID NO: 1631027 - RNA, 19 nt, Artificial Sequence
  Description of Artificial Sequence: Synthetic oligonucleotide
auauaugaggcccagcaga

SEQ ID NO: 1631028 - RNA, 19 nt, Artificial Sequence
  Description of Artificial Sequence: Synthetic oligonucleotide
uuuggcuucaugagagggg

SEQ ID NO: 1631029 - RNA, 19 nt, Artificial Sequence
  Description of Artificial Sequence: Synthetic oligonucleotide
uuauuugacuauaucucga

SEQ ID NO: 1631030 - RNA, 19 nt, Artificial Sequence
  Description of Artificial Sequence: Synthetic oligonucleotide
gggaacagauguuagaggg

SEQ ID NO: 1631031 - RNA, 19 nt, Artificial Sequence
  Description of Artificial Sequence: Synthetic oligonucleotide
cuguuuacggccaaauccc

SEQ ID NO: 1631032 - RNA, 19 nt, Artificial Sequence
  Description of Artificial Sequence: Synthetic oligonucleotide
agcaguauggugaaaacuc

SEQ ID NO: 1631033 - RNA, 19 nt, Artificial Sequence
  Description of Artificial Sequence: Synthetic oligonucleotide
gaaaacuccaauucugguc

SEQ ID NO: 1631034 - RNA, 19 nt, Artificial Sequence
  Description of Artificial Sequence: Synthetic oligonucleotide
uaaaagggaucauuuauau

SEQ ID NO: 1631035 - RNA, 19 nt, Artificial Sequence
  Description of Artificial Sequence: Synthetic oligonucleotide
acggccaaaucccucaucg

SEQ ID NO: 1631036 - RNA, 19 nt, Artificial Sequence
  Description of Artificial Sequence: Synthetic oligonucleotide
cugaaagugagguuugcag

SEQ ID NO: 1631037 - RNA, 19 nt, Artificial Sequence
  Description of Artificial Sequence: Synthetic oligonucleotide
aaaauucaccgugcagugc

SEQ ID NO: 1631038 - RNA, 19 nt, Artificial Sequence
  Description of Artificial Sequence: Synthetic oligonucleotide
caagcuaaaggacuuggag

SEQ ID NO: 1631039 - RNA, 19 nt, Artificial Sequence
  Description of Artificial Sequence: Synthetic oligonucleotide
agacauggggugcacaagg

SEQ ID NO: 1631040 - RNA, 19 nt, Artificial Sequence
  Description of Artificial Sequence: Synthetic oligonucleotide
accuaaauagggaagcugg

SEQ ID NO: 1631041 - RNA, 19 nt, Artificial Sequence
  Description of Artificial Sequence: Synthetic oligonucleotide
uugacuauaucucgacuga

SEQ ID NO: 1631042 - RNA, 19 nt, Artificial Sequence
  Description of Artificial Sequence: Synthetic oligonucleotide
ggugaggugacauauauga

SEQ ID NO: 1631043 - RNA, 19 nt, Artificial Sequence
  Description of Artificial Sequence: Synthetic oligonucleotide
agagcccuaugccugaaac

SEQ ID NO: 1631044 - RNA, 19 nt, Artificial Sequence
  Description of Artificial Sequence: Synthetic oligonucleotide
uuuacggccaaaucccuca

SEQ ID NO: 1631045 - RNA, 19 nt, Artificial Sequence
  Description of Artificial Sequence: Synthetic oligonucleotide
ugaaggaagcaguauggug

SEQ ID NO: 1631046 - RNA, 19 nt, Artificial Sequence
  Description of Artificial Sequence: Synthetic oligonucleotide
uauaucagccucuucccca

SEQ ID NO: 1631047 - RNA, 19 nt, Artificial Sequence
  Description of Artificial Sequence: Synthetic oligonucleotide
gcuguuuacggccaaaucc

SEQ ID NO: 1631048 - RNA, 19 nt, Artificial Sequence
  Description of Artificial Sequence: Synthetic oligonucleotide
uauuugacuauaucucgac

SEQ ID NO: 1631049 - RNA, 19 nt, Artificial Sequence
  Description of Artificial Sequence: Synthetic oligonucleotide
cuuaaacagcugcugaaag

SEQ ID NO: 1631050 - RNA, 19 nt, Artificial Sequence
  Description of Artificial Sequence: Synthetic oligonucleotide
guuguggggcucuaggacg

SEQ ID NO: 1631051 - RNA, 19 nt, Artificial Sequence
  Description of Artificial Sequence: Synthetic oligonucleotide
uauggugaaaacuccaauu

SEQ ID NO: 1631052 - RNA, 19 nt, Artificial Sequence
  Description of Artificial Sequence: Synthetic oligonucleotide
ugagcccgcaagcuaaagg

SEQ ID NO: 1631053 - RNA, 19 nt, Artificial Sequence
  Description of Artificial Sequence: Synthetic oligonucleotide
uuauaucagccucuucccc

SEQ ID NO: 1631054 - RNA, 19 nt, Artificial Sequence
  Description of Artificial Sequence: Synthetic oligonucleotide
aaaucccucaucguaguug

SEQ ID NO: 1631055 - RNA, 19 nt, Artificial Sequence
  Description of Artificial Sequence: Synthetic oligonucleotide
ccaaaugagaaguuguggg

SEQ ID NO: 1631056 - RNA, 19 nt, Artificial Sequence
  Description of Artificial Sequence: Synthetic oligonucleotide
aaggcaccuaaauagggaa

SEQ ID NO: 1631057 - RNA, 19 nt, Artificial Sequence
  Description of Artificial Sequence: Synthetic oligonucleotide
ucuccuucaccugagcccg

SEQ ID NO: 1631058 - RNA, 19 nt, Artificial Sequence
  Description of Artificial Sequence: Synthetic oligonucleotide
ugaaaccugucugagggag

SEQ ID NO: 1631059 - RNA, 19 nt, Artificial Sequence
  Description of Artificial Sequence: Synthetic oligonucleotide
aagguucugaugugcgguc

SEQ ID NO: 1631060 - RNA, 19 nt, Artificial Sequence
  Description of Artificial Sequence: Synthetic oligonucleotide
uggugaaaacuccaauucu

SEQ ID NO: 1631061 - RNA, 19 nt, Artificial Sequence
  Description of Artificial Sequence: Synthetic oligonucleotide
aaagguucugaugugcggu

SEQ ID NO: 1631062 - RNA, 19 nt, Artificial Sequence
  Description of Artificial Sequence: Synthetic oligonucleotide
aagaguuguggaaaaugag

SEQ ID NO: 1631063 - RNA, 19 nt, Artificial Sequence
  Description of Artificial Sequence: Synthetic oligonucleotide
ccugaaaccugucugaggg

SEQ ID NO: 1631064 - RNA, 19 nt, Artificial Sequence
  Description of Artificial Sequence: Synthetic oligonucleotide
ugggaaaaguuaaggaauc

SEQ ID NO: 1631065 - RNA, 19 nt, Artificial Sequence
  Description of Artificial Sequence: Synthetic oligonucleotide
gugaaaacuccaauucugg

SEQ ID NO: 1631066 - RNA, 19 nt, Artificial Sequence
  Description of Artificial Sequence: Synthetic oligonucleotide
agugcauuacuuccaauaa

SEQ ID NO: 1631067 - RNA, 19 nt, Artificial Sequence
  Description of Artificial Sequence: Synthetic oligonucleotide
guuaaggaauccuggagca

SEQ ID NO: 1631068 - RNA, 19 nt, Artificial Sequence
  Description of Artificial Sequence: Synthetic oligonucleotide
aaaggacuuggagcgcugc

SEQ ID NO: 1631069 - RNA, 19 nt, Artificial Sequence
  Description of Artificial Sequence: Synthetic oligonucleotide
uucugguccccaaaccucc

SEQ ID NO: 1631070 - RNA, 19 nt, Artificial Sequence
  Description of Artificial Sequence: Synthetic oligonucleotide
uccuaugggaaaaguuaag

SEQ ID NO: 1631071 - RNA, 19 nt, Artificial Sequence
  Description of Artificial Sequence: Synthetic oligonucleotide
uauaugaggcccagcagau

SEQ ID NO: 1631072 - RNA, 19 nt, Artificial Sequence
  Description of Artificial Sequence: Synthetic oligonucleotide
uggagcagagcccuaugcc

SEQ ID NO: 1631073 - RNA, 19 nt, Artificial Sequence
  Description of Artificial Sequence: Synthetic oligonucleotide
agggcuugcagugcaaagc

SEQ ID NO: 1631074 - RNA, 19 nt, Artificial Sequence
  Description of Artificial Sequence: Synthetic oligonucleotide
cuauaucucgacugagggc

SEQ ID NO: 1631075 - RNA, 19 nt, Artificial Sequence
  Description of Artificial Sequence: Synthetic oligonucleotide
ugcaaagccaggccagugc

SEQ ID NO: 1631076 - RNA, 19 nt, Artificial Sequence
  Description of Artificial Sequence: Synthetic oligonucleotide
cuaaauagggaagcugggc

SEQ ID NO: 1631077 - RNA, 19 nt, Artificial Sequence
  Description of Artificial Sequence: Synthetic oligonucleotide
gauggucugaaggaagcag

SEQ ID NO: 1631078 - RNA, 19 nt, Artificial Sequence
  Description of Artificial Sequence: Synthetic oligonucleotide
aauagggaagcugggcuug

SEQ ID NO: 1631079 - RNA, 19 nt, Artificial Sequence
  Description of Artificial Sequence: Synthetic oligonucleotide
acuuccaauaaaagggauc

SEQ ID NO: 1631080 - RNA, 19 nt, Artificial Sequence
  Description of Artificial Sequence: Synthetic oligonucleotide
cuugggacccugaggaggg

SEQ ID NO: 1631081 - RNA, 19 nt, Artificial Sequence
  Description of Artificial Sequence: Synthetic oligonucleotide
ucgacugagggcuugcagu

SEQ ID NO: 1631082 - RNA, 19 nt, Artificial Sequence
  Description of Artificial Sequence: Synthetic oligonucleotide
aacagauguuagagggacc

SEQ ID NO: 1631083 - RNA, 19 nt, Artificial Sequence
  Description of Artificial Sequence: Synthetic oligonucleotide
caaagguucugaugugcgg

SEQ ID NO: 1631084 - RNA, 19 nt, Artificial Sequence
  Description of Artificial Sequence: Synthetic oligonucleotide
aaaggcaccuaaauaggga

SEQ ID NO: 1631085 - RNA, 19 nt, Artificial Sequence
  Description of Artificial Sequence: Synthetic oligonucleotide
aagcaguauggugaaaacu

SEQ ID NO: 1631086 - RNA, 19 nt, Artificial Sequence
  Description of Artificial Sequence: Synthetic oligonucleotide
auuugacuauaucucgacu

SEQ ID NO: 1631087 - RNA, 19 nt, Artificial Sequence
  Description of Artificial Sequence: Synthetic oligonucleotide
guaaaauucaccgugcagu

SEQ ID NO: 1631088 - RNA, 19 nt, Artificial Sequence
  Description of Artificial Sequence: Synthetic oligonucleotide
aauuguggauugugcagaa

SEQ ID NO: 1631089 - RNA, 19 nt, Artificial Sequence
  Description of Artificial Sequence: Synthetic oligonucleotide
gaagcaguauggugaaaac

SEQ ID NO: 1631090 - RNA, 19 nt, Artificial Sequence
  Description of Artificial Sequence: Synthetic oligonucleotide
cauauaugaggcccagcag

SEQ ID NO: 1631091 - RNA, 19 nt, Artificial Sequence
  Description of Artificial Sequence: Synthetic oligonucleotide
ugcagccauaguuauuuga

SEQ ID NO: 1631092 - RNA, 19 nt, Artificial Sequence
  Description of Artificial Sequence: Synthetic oligonucleotide
agugcagcauaacugccca

SEQ ID NO: 1631093 - RNA, 19 nt, Artificial Sequence
  Description of Artificial Sequence: Synthetic oligonucleotide
gaauuguggauugugcaga

SEQ ID NO: 1631094 - RNA, 19 nt, Artificial Sequence
  Description of Artificial Sequence: Synthetic oligonucleotide
cugaauuguggauugugca

SEQ ID NO: 1631095 - RNA, 19 nt, Artificial Sequence
  Description of Artificial Sequence: Synthetic oligonucleotide
gacuuggagcgcugcaccg

SEQ ID NO: 1631096 - RNA, 19 nt, Artificial Sequence
  Description of Artificial Sequence: Synthetic oligonucleotide
agauguuagagggaccuca

SEQ ID NO: 1631097 - RNA, 19 nt, Artificial Sequence
  Description of Artificial Sequence: Synthetic oligonucleotide
ucuucggaggugguuggcg

SEQ ID NO: 1631098 - RNA, 19 nt, Artificial Sequence
  Description of Artificial Sequence: Synthetic oligonucleotide
ugaugugcgguccccuagc

SEQ ID NO: 1631099 - RNA, 19 nt, Artificial Sequence
  Description of Artificial Sequence: Synthetic oligonucleotide
gugucugaauuguggauug

SEQ ID NO: 1631100 - RNA, 19 nt, Artificial Sequence
  Description of Artificial Sequence: Synthetic oligonucleotide
ugugucugaauuguggauu

SEQ ID NO: 1631101 - RNA, 19 nt, Artificial Sequence
  Description of Artificial Sequence: Synthetic oligonucleotide
ggugaaaacuccaauucug

SEQ ID NO: 1631102 - RNA, 19 nt, Artificial Sequence
  Description of Artificial Sequence: Synthetic oligonucleotide
agcccuaugccugaaaccu

SEQ ID NO: 1631103 - RNA, 19 nt, Artificial Sequence
  Description of Artificial Sequence: Synthetic oligonucleotide
ggaacauggcucuucggag

SEQ ID NO: 1631104 - RNA, 19 nt, Artificial Sequence
  Description of Artificial Sequence: Synthetic oligonucleotide
gauguuagagggaccucag

SEQ ID NO: 1631105 - RNA, 19 nt, Artificial Sequence
  Description of Artificial Sequence: Synthetic oligonucleotide
auguuagagggaccucagg

SEQ ID NO: 1631106 - RNA, 19 nt, Artificial Sequence
  Description of Artificial Sequence: Synthetic oligonucleotide
cuucggaggugguuggcgg

SEQ ID NO: 1631107 - RNA, 19 nt, Artificial Sequence
  Description of Artificial Sequence: Synthetic oligonucleotide
cagaucaaccuccuuggac

SEQ ID NO: 1631108 - RNA, 19 nt, Artificial Sequence
  Description of Artificial Sequence: Synthetic oligonucleotide
ugcugugccaccauuuguu

SEQ ID NO: 1631109 - RNA, 19 nt, Artificial Sequence
  Description of Artificial Sequence: Synthetic oligonucleotide
ugacuauaucucgacugag

SEQ ID NO: 1631110 - RNA, 19 nt, Artificial Sequence
  Description of Artificial Sequence: Synthetic oligonucleotide
uggagaaaaggcaccuaaa

SEQ ID NO: 1631111 - RNA, 19 nt, Artificial Sequence
  Description of Artificial Sequence: Synthetic oligonucleotide
uguuuacggccaaaucccu

SEQ ID NO: 1631112 - RNA, 19 nt, Artificial Sequence
  Description of Artificial Sequence: Synthetic oligonucleotide
gagaugagauggucugaag

SEQ ID NO: 1631113 - RNA, 19 nt, Artificial Sequence
  Description of Artificial Sequence: Synthetic oligonucleotide
uaacugcccaagcugaguu

SEQ ID NO: 1631114 - RNA, 19 nt, Artificial Sequence
  Description of Artificial Sequence: Synthetic oligonucleotide
cauggggugagaugagaug

SEQ ID NO: 1631115 - RNA, 19 nt, Artificial Sequence
  Description of Artificial Sequence: Synthetic oligonucleotide
gagcccuaugccugaaacc

SEQ ID NO: 1631116 - RNA, 19 nt, Artificial Sequence
  Description of Artificial Sequence: Synthetic oligonucleotide
cucguggaagggcagggcc

SEQ ID NO: 1631117 - RNA, 19 nt, Artificial Sequence
  Description of Artificial Sequence: Synthetic oligonucleotide
uucaccgugcagugcagca

SEQ ID NO: 1631118 - RNA, 19 nt, Artificial Sequence
  Description of Artificial Sequence: Synthetic oligonucleotide
ccuaugggaaaaguuaagg

SEQ ID NO: 1631119 - RNA, 19 nt, Artificial Sequence
  Description of Artificial Sequence: Synthetic oligonucleotide
auucugguccccaaaccuc

SEQ ID NO: 1631120 - RNA, 19 nt, Artificial Sequence
  Description of Artificial Sequence: Synthetic oligonucleotide
ucaucguaguugccuuugc

SEQ ID NO: 1631121 - RNA, 19 nt, Artificial Sequence
  Description of Artificial Sequence: Synthetic oligonucleotide
cuuggagcgcugcaccgcg

SEQ ID NO: 1631122 - RNA, 19 nt, Artificial Sequence
  Description of Artificial Sequence: Synthetic oligonucleotide
ugacauauaugaggcccag

SEQ ID NO: 1631123 - RNA, 19 nt, Artificial Sequence
  Description of Artificial Sequence: Synthetic oligonucleotide
cauggcucuucggaggugg

SEQ ID NO: 1631124 - RNA, 19 nt, Artificial Sequence
  Description of Artificial Sequence: Synthetic oligonucleotide
uaaaggacuuggagcgcug

SEQ ID NO: 1631125 - RNA, 19 nt, Artificial Sequence
  Description of Artificial Sequence: Synthetic oligonucleotide
gagccauggggugagauga

SEQ ID NO: 1631126 - RNA, 19 nt, Artificial Sequence
  Description of Artificial Sequence: Synthetic oligonucleotide
gaauccuggagcagagccc

SEQ ID NO: 1631127 - RNA, 19 nt, Artificial Sequence
  Description of Artificial Sequence: Synthetic oligonucleotide
ugaguuugguguggcagug

SEQ ID NO: 1631128 - RNA, 19 nt, Artificial Sequence
  Description of Artificial Sequence: Synthetic oligonucleotide
acuuggagcgcugcaccgc

SEQ ID NO: 1631129 - RNA, 19 nt, Artificial Sequence
  Description of Artificial Sequence: Synthetic oligonucleotide
guuuaccugccuuggccag

SEQ ID NO: 1631130 - RNA, 19 nt, Artificial Sequence
  Description of Artificial Sequence: Synthetic oligonucleotide
ugcuguuuacggccaaauc

SEQ ID NO: 1631131 - RNA, 19 nt, Artificial Sequence
  Description of Artificial Sequence: Synthetic oligonucleotide
aggacgggcccaaagguuc

SEQ ID NO: 1631132 - RNA, 19 nt, Artificial Sequence
  Description of Artificial Sequence: Synthetic oligonucleotide
agguucugaugugcggucc

SEQ ID NO: 1631133 - RNA, 19 nt, Artificial Sequence
  Description of Artificial Sequence: Synthetic oligonucleotide
cucacaagcccagaucaac

SEQ ID NO: 1631134 - RNA, 19 nt, Artificial Sequence
  Description of Artificial Sequence: Synthetic oligonucleotide
auucaccgugcagugcagc

SEQ ID NO: 1631135 - RNA, 19 nt, Artificial Sequence
  Description of Artificial Sequence: Synthetic oligonucleotide
cccagaucaaccuccuugg

SEQ ID NO: 1631136 - RNA, 19 nt, Artificial Sequence
  Description of Artificial Sequence: Synthetic oligonucleotide
cuucaccugagcccgcaag

SEQ ID NO: 1631137 - RNA, 19 nt, Artificial Sequence
  Description of Artificial Sequence: Synthetic oligonucleotide
aguuugguguggcaguguu

SEQ ID NO: 1631138 - RNA, 19 nt, Artificial Sequence
  Description of Artificial Sequence: Synthetic oligonucleotide
agcaccuccccuccaccgg

SEQ ID NO: 1631139 - RNA, 19 nt, Artificial Sequence
  Description of Artificial Sequence: Synthetic oligonucleotide
ugguguggcaguguuugca

SEQ ID NO: 1631140 - RNA, 19 nt, Artificial Sequence
  Description of Artificial Sequence: Synthetic oligonucleotide
guacaggucuccuucaccu

SEQ ID NO: 1631141 - RNA, 19 nt, Artificial Sequence
  Description of Artificial Sequence: Synthetic oligonucleotide
cuccuaugggaaaaguuaa

SEQ ID NO: 1631142 - RNA, 19 nt, Artificial Sequence
  Description of Artificial Sequence: Synthetic oligonucleotide
ggcaccuaaauagggaagc

SEQ ID NO: 1631143 - RNA, 19 nt, Artificial Sequence
  Description of Artificial Sequence: Synthetic oligonucleotide
aguauggugaaaacuccaa

SEQ ID NO: 1631144 - RNA, 19 nt, Artificial Sequence
  Description of Artificial Sequence: Synthetic oligonucleotide
ucaucauuccaugggguuu

SEQ ID NO: 1631145 - RNA, 19 nt, Artificial Sequence
  Description of Artificial Sequence: Synthetic oligonucleotide
guuagagggaccucaggcu

SEQ ID NO: 1631146 - RNA, 19 nt, Artificial Sequence
  Description of Artificial Sequence: Synthetic oligonucleotide
cucuuaaacagcugcugaa

SEQ ID NO: 1631147 - RNA, 19 nt, Artificial Sequence
  Description of Artificial Sequence: Synthetic oligonucleotide
gagcagagcccuaugccug

SEQ ID NO: 1631148 - RNA, 19 nt, Artificial Sequence
  Description of Artificial Sequence: Synthetic oligonucleotide
ugguuggcggccugggugu

SEQ ID NO: 1631149 - RNA, 19 nt, Artificial Sequence
  Description of Artificial Sequence: Synthetic oligonucleotide
ccuccuuggacgccgagcg

SEQ ID NO: 1631150 - RNA, 19 nt, Artificial Sequence
  Description of Artificial Sequence: Synthetic oligonucleotide
uucggaggugguuggcggc

SEQ ID NO: 1631151 - RNA, 19 nt, Artificial Sequence
  Description of Artificial Sequence: Synthetic oligonucleotide
caccuaaauagggaagcug

SEQ ID NO: 1631152 - RNA, 19 nt, Artificial Sequence
  Description of Artificial Sequence: Synthetic oligonucleotide
aauucaccgugcagugcag

SEQ ID NO: 1631153 - RNA, 19 nt, Artificial Sequence
  Description of Artificial Sequence: Synthetic oligonucleotide
gacauggggugcacaaggc

SEQ ID NO: 1631154 - RNA, 19 nt, Artificial Sequence
  Description of Artificial Sequence: Synthetic oligonucleotide
gggcuugcagugcaaagcc

SEQ ID NO: 1631155 - RNA, 19 nt, Artificial Sequence
  Description of Artificial Sequence: Synthetic oligonucleotide
augagaaguuguggggcuc

SEQ ID NO: 1631156 - RNA, 19 nt, Artificial Sequence
  Description of Artificial Sequence: Synthetic oligonucleotide
gugaggugacauauaugag

SEQ ID NO: 1631157 - RNA, 19 nt, Artificial Sequence
  Description of Artificial Sequence: Synthetic oligonucleotide
cugaugugcgguccccuag

SEQ ID NO: 1631158 - RNA, 19 nt, Artificial Sequence
  Description of Artificial Sequence: Synthetic oligonucleotide
cucuaggacgggcccaaag

SEQ ID NO: 1631159 - RNA, 19 nt, Artificial Sequence
  Description of Artificial Sequence: Synthetic oligonucleotide
uuuaccugccuuggccagc

SEQ ID NO: 1631160 - RNA, 19 nt, Artificial Sequence
  Description of Artificial Sequence: Synthetic oligonucleotide
guagacgccgcgccaggag

SEQ ID NO: 1631161 - RNA, 19 nt, Artificial Sequence
  Description of Artificial Sequence: Synthetic oligonucleotide
cagagguagauggggagac

SEQ ID NO: 1631162 - RNA, 19 nt, Artificial Sequence
  Description of Artificial Sequence: Synthetic oligonucleotide
cucgacugagggcuugcag

SEQ ID NO: 1631163 - RNA, 19 nt, Artificial Sequence
  Description of Artificial Sequence: Synthetic oligonucleotide
gaaaccugucugagggagc

SEQ ID NO: 1631164 - RNA, 19 nt, Artificial Sequence
  Description of Artificial Sequence: Synthetic oligonucleotide
gacauauaugaggcccagc

SEQ ID NO: 1631165 - RNA, 19 nt, Artificial Sequence
  Description of Artificial Sequence: Synthetic oligonucleotide
uccaccuccuaugggaaaa

SEQ ID NO: 1631166 - RNA, 19 nt, Artificial Sequence
  Description of Artificial Sequence: Synthetic oligonucleotide
gcagccauaguuauuugac

SEQ ID NO: 1631167 - RNA, 19 nt, Artificial Sequence
  Description of Artificial Sequence: Synthetic oligonucleotide
gcauuacuuccaauaaaag

SEQ ID NO: 1631168 - RNA, 19 nt, Artificial Sequence
  Description of Artificial Sequence: Synthetic oligonucleotide
cuggaacauggcucuucgg

SEQ ID NO: 1631169 - RNA, 19 nt, Artificial Sequence
  Description of Artificial Sequence: Synthetic oligonucleotide
aucucgacugagggcuugc

SEQ ID NO: 1631170 - RNA, 19 nt, Artificial Sequence
  Description of Artificial Sequence: Synthetic oligonucleotide
cuaagggcagagguagaug

SEQ ID NO: 1631171 - RNA, 19 nt, Artificial Sequence
  Description of Artificial Sequence: Synthetic oligonucleotide
gugcauuacuuccaauaaa

SEQ ID NO: 1631172 - RNA, 19 nt, Artificial Sequence
  Description of Artificial Sequence: Synthetic oligonucleotide
cucaucguaguugccuuug

SEQ ID NO: 1631173 - RNA, 19 nt, Artificial Sequence
  Description of Artificial Sequence: Synthetic oligonucleotide
cugaggagggcaugcugac

SEQ ID NO: 1631174 - RNA, 19 nt, Artificial Sequence
  Description of Artificial Sequence: Synthetic oligonucleotide
gcaguaaaauucaccgugc

SEQ ID NO: 1631175 - RNA, 19 nt, Artificial Sequence
  Description of Artificial Sequence: Synthetic oligonucleotide
cagcaccuccccuccaccg

SEQ ID NO: 1631176 - RNA, 19 nt, Artificial Sequence
  Description of Artificial Sequence: Synthetic oligonucleotide
ggaucauuuauaucagccu

SEQ ID NO: 1631177 - RNA, 19 nt, Artificial Sequence
  Description of Artificial Sequence: Synthetic oligonucleotide
auuguggauugugcagaag

SEQ ID NO: 1631178 - RNA, 19 nt, Artificial Sequence
  Description of Artificial Sequence: Synthetic oligonucleotide
ggacuuggagcgcugcacc

SEQ ID NO: 1631179 - RNA, 19 nt, Artificial Sequence
  Description of Artificial Sequence: Synthetic oligonucleotide
gggaaaaguuaaggaaucc

SEQ ID NO: 1631180 - RNA, 19 nt, Artificial Sequence
  Description of Artificial Sequence: Synthetic oligonucleotide
agcccgcaagcuaaaggac

SEQ ID NO: 1631181 - RNA, 19 nt, Artificial Sequence
  Description of Artificial Sequence: Synthetic oligonucleotide
accgccucgggugcgagag

SEQ ID NO: 1631182 - RNA, 19 nt, Artificial Sequence
  Description of Artificial Sequence: Synthetic oligonucleotide
ucugaugugcgguccccua

SEQ ID NO: 1631183 - RNA, 19 nt, Artificial Sequence
  Description of Artificial Sequence: Synthetic oligonucleotide
gcaguauggugaaaacucc

SEQ ID NO: 1631184 - RNA, 19 nt, Artificial Sequence
  Description of Artificial Sequence: Synthetic oligonucleotide
gaugugcgguccccuagca

SEQ ID NO: 1631185 - RNA, 19 nt, Artificial Sequence
  Description of Artificial Sequence: Synthetic oligonucleotide
gcucuuaaacagcugcuga

SEQ ID NO: 1631186 - RNA, 19 nt, Artificial Sequence
  Description of Artificial Sequence: Synthetic oligonucleotide
ccaauucugguccccaaac

SEQ ID NO: 1631187 - RNA, 19 nt, Artificial Sequence
  Description of Artificial Sequence: Synthetic oligonucleotide
aggcaccuaaauagggaag

SEQ ID NO: 1631188 - RNA, 19 nt, Artificial Sequence
  Description of Artificial Sequence: Synthetic oligonucleotide
agcagagcccuaugccuga

SEQ ID NO: 1631189 - RNA, 19 nt, Artificial Sequence
  Description of Artificial Sequence: Synthetic oligonucleotide
uaucucgacugagggcuug

SEQ ID NO: 1631190 - RNA, 19 nt, Artificial Sequence
  Description of Artificial Sequence: Synthetic oligonucleotide
aagugcugugccaccauuu

SEQ ID NO: 1631191 - RNA, 19 nt, Artificial Sequence
  Description of Artificial Sequence: Synthetic oligonucleotide
aaccuccuuggacgccgag

SEQ ID NO: 1631192 - RNA, 19 nt, Artificial Sequence
  Description of Artificial Sequence: Synthetic oligonucleotide
gacgccgagcgcagggagg

SEQ ID NO: 1631193 - RNA, 19 nt, Artificial Sequence
  Description of Artificial Sequence: Synthetic oligonucleotide
ggagccauggggugagaug

SEQ ID NO: 1631194 - RNA, 19 nt, Artificial Sequence
  Description of Artificial Sequence: Synthetic oligonucleotide
ggagggaacagauguuaga

SEQ ID NO: 1631195 - RNA, 19 nt, Artificial Sequence
  Description of Artificial Sequence: Synthetic oligonucleotide
gcaacagaagcaagaguug

SEQ ID NO: 1631196 - RNA, 19 nt, Artificial Sequence
  Description of Artificial Sequence: Synthetic oligonucleotide
agggagccucgucccuucc

SEQ ID NO: 1631197 - RNA, 19 nt, Artificial Sequence
  Description of Artificial Sequence: Synthetic oligonucleotide
ggucagaaccaggcuaagg

SEQ ID NO: 1631198 - RNA, 19 nt, Artificial Sequence
  Description of Artificial Sequence: Synthetic oligonucleotide
agggagggaacagauguua

SEQ ID NO: 1631199 - RNA, 19 nt, Artificial Sequence
  Description of Artificial Sequence: Synthetic oligonucleotide
gcuccuugugcuguuuacg

SEQ ID NO: 1631200 - RNA, 19 nt, Artificial Sequence
  Description of Artificial Sequence: Synthetic oligonucleotide
gguucugaugugcgguccc

SEQ ID NO: 1631201 - RNA, 19 nt, Artificial Sequence
  Description of Artificial Sequence: Synthetic oligonucleotide
cagccgcuccauaggauac

SEQ ID NO: 1631202 - RNA, 19 nt, Artificial Sequence
  Description of Artificial Sequence: Synthetic oligonucleotide
cuggguguagacgccgcgc

SEQ ID NO: 1631203 - RNA, 19 nt, Artificial Sequence
  Description of Artificial Sequence: Synthetic oligonucleotide
uuacggccaaaucccucau

SEQ ID NO: 1631204 - RNA, 19 nt, Artificial Sequence
  Description of Artificial Sequence: Synthetic oligonucleotide
cucgucccuucccaccccg

SEQ ID NO: 1631205 - RNA, 19 nt, Artificial Sequence
  Description of Artificial Sequence: Synthetic oligonucleotide
uccaccggugaggugacau

SEQ ID NO: 1631206 - RNA, 19 nt, Artificial Sequence
  Description of Artificial Sequence: Synthetic oligonucleotide
gccugaaaccugucugagg

SEQ ID NO: 1631207 - RNA, 19 nt, Artificial Sequence
  Description of Artificial Sequence: Synthetic oligonucleotide
ggagaguucgggcccggcc

SEQ ID NO: 1631208 - RNA, 19 nt, Artificial Sequence
  Description of Artificial Sequence: Synthetic oligonucleotide
guauggugaaaacuccaau

SEQ ID NO: 1631209 - RNA, 19 nt, Artificial Sequence
  Description of Artificial Sequence: Synthetic oligonucleotide
agugagguuugcaguaaaa

SEQ ID NO: 1631210 - RNA, 19 nt, Artificial Sequence
  Description of Artificial Sequence: Synthetic oligonucleotide
ugucugaauuguggauugu

SEQ ID NO: 1631211 - RNA, 19 nt, Artificial Sequence
  Description of Artificial Sequence: Synthetic oligonucleotide
ggcucuucggaggugguug

SEQ ID NO: 1631212 - RNA, 19 nt, Artificial Sequence
  Description of Artificial Sequence: Synthetic oligonucleotide
ugagggcuugcagugcaaa

SEQ ID NO: 1631213 - RNA, 19 nt, Artificial Sequence
  Description of Artificial Sequence: Synthetic oligonucleotide
auaugaggcccagcagaug

SEQ ID NO: 1631214 - RNA, 19 nt, Artificial Sequence
  Description of Artificial Sequence: Synthetic oligonucleotide
agugcaaagccaggccagu

SEQ ID NO: 1631215 - RNA, 19 nt, Artificial Sequence
  Description of Artificial Sequence: Synthetic oligonucleotide
aucauuccaugggguuuac

SEQ ID NO: 1631216 - RNA, 19 nt, Artificial Sequence
  Description of Artificial Sequence: Synthetic oligonucleotide
ugcaugcugccacccuccu

SEQ ID NO: 1631217 - RNA, 19 nt, Artificial Sequence
  Description of Artificial Sequence: Synthetic oligonucleotide
uguagacgccgcgccagga

SEQ ID NO: 1631218 - RNA, 19 nt, Artificial Sequence
  Description of Artificial Sequence: Synthetic oligonucleotide
uucugaugugcgguccccu

SEQ ID NO: 1631219 - RNA, 19 nt, Artificial Sequence
  Description of Artificial Sequence: Synthetic oligonucleotide
ggaccucaggcugucuugg

SEQ ID NO: 1631220 - RNA, 19 nt, Artificial Sequence
  Description of Artificial Sequence: Synthetic oligonucleotide
guguggcaguguuugcaac

SEQ ID NO: 1631221 - RNA, 19 nt, Artificial Sequence
  Description of Artificial Sequence: Synthetic oligonucleotide
guuuacggccaaaucccuc

SEQ ID NO: 1631222 - RNA, 19 nt, Artificial Sequence
  Description of Artificial Sequence: Synthetic oligonucleotide
uggucagaaccaggcuaag

SEQ ID NO: 1631223 - RNA, 19 nt, Artificial Sequence
  Description of Artificial Sequence: Synthetic oligonucleotide
ccaagcugaguuuggugug

SEQ ID NO: 1631224 - RNA, 19 nt, Artificial Sequence
  Description of Artificial Sequence: Synthetic oligonucleotide
ggugcaugcugccacccuc

SEQ ID NO: 1631225 - RNA, 19 nt, Artificial Sequence
  Description of Artificial Sequence: Synthetic oligonucleotide
ugaggagggcaugcugacu

SEQ ID NO: 1631226 - RNA, 19 nt, Artificial Sequence
  Description of Artificial Sequence: Synthetic oligonucleotide
cuaggacgggcccaaaggu

SEQ ID NO: 1631227 - RNA, 19 nt, Artificial Sequence
  Description of Artificial Sequence: Synthetic oligonucleotide
gugcaugcugccacccucc

SEQ ID NO: 1631228 - RNA, 19 nt, Artificial Sequence
  Description of Artificial Sequence: Synthetic oligonucleotide
aagcccagaucaaccuccu

SEQ ID NO: 1631229 - RNA, 19 nt, Artificial Sequence
  Description of Artificial Sequence: Synthetic oligonucleotide
ggccaaaucccucaucgua

SEQ ID NO: 1631230 - RNA, 19 nt, Artificial Sequence
  Description of Artificial Sequence: Synthetic oligonucleotide
accuccuaugggaaaaguu

SEQ ID NO: 1631231 - RNA, 19 nt, Artificial Sequence
  Description of Artificial Sequence: Synthetic oligonucleotide
ugggacccugaggagggca

SEQ ID NO: 1631232 - RNA, 19 nt, Artificial Sequence
  Description of Artificial Sequence: Synthetic oligonucleotide
cugaaaccugucugaggga

SEQ ID NO: 1631233 - RNA, 19 nt, Artificial Sequence
  Description of Artificial Sequence: Synthetic oligonucleotide
agguagauggggagacaug

SEQ ID NO: 1631234 - RNA, 19 nt, Artificial Sequence
  Description of Artificial Sequence: Synthetic oligonucleotide
gggaccucaggcugucuug

SEQ ID NO: 1631235 - RNA, 19 nt, Artificial Sequence
  Description of Artificial Sequence: Synthetic oligonucleotide
caacagaagcaagaguugu

SEQ ID NO: 1631236 - RNA, 19 nt, Artificial Sequence
  Description of Artificial Sequence: Synthetic oligonucleotide
aggugcaugcugccacccu

SEQ ID NO: 1631237 - RNA, 19 nt, Artificial Sequence
  Description of Artificial Sequence: Synthetic oligonucleotide
cacaagcccagaucaaccu

SEQ ID NO: 1631238 - RNA, 19 nt, Artificial Sequence
  Description of Artificial Sequence: Synthetic oligonucleotide
gcaugcugacuccuugcug

SEQ ID NO: 1631239 - RNA, 19 nt, Artificial Sequence
  Description of Artificial Sequence: Synthetic oligonucleotide
cuaaaggacuuggagcgcu

SEQ ID NO: 1631240 - RNA, 19 nt, Artificial Sequence
  Description of Artificial Sequence: Synthetic oligonucleotide
ucucgacugagggcuugca

SEQ ID NO: 1631241 - RNA, 19 nt, Artificial Sequence
  Description of Artificial Sequence: Synthetic oligonucleotide
ugggagcuugggacccuga

SEQ ID NO: 1631242 - RNA, 19 nt, Artificial Sequence
  Description of Artificial Sequence: Synthetic oligonucleotide
uccccuccaccggugaggu

SEQ ID NO: 1631243 - RNA, 19 nt, Artificial Sequence
  Description of Artificial Sequence: Synthetic oligonucleotide
aguugccuuugcucuuaaa

SEQ ID NO: 1631244 - RNA, 19 nt, Artificial Sequence
  Description of Artificial Sequence: Synthetic oligonucleotide
ccuagcagcccuuggccug

SEQ ID NO: 1631245 - RNA, 19 nt, Artificial Sequence
  Description of Artificial Sequence: Synthetic oligonucleotide
uccuggagcagagcccuau

SEQ ID NO: 1631246 - RNA, 19 nt, Artificial Sequence
  Description of Artificial Sequence: Synthetic oligonucleotide
caggcuaagggcagaggua

SEQ ID NO: 1631247 - RNA, 19 nt, Artificial Sequence
  Description of Artificial Sequence: Synthetic oligonucleotide
aucccucaucguaguugcc

SEQ ID NO: 1631248 - RNA, 19 nt, Artificial Sequence
  Description of Artificial Sequence: Synthetic oligonucleotide
ucgucccuucccaccccgc

SEQ ID NO: 1631249 - RNA, 19 nt, Artificial Sequence
  Description of Artificial Sequence: Synthetic oligonucleotide
cuaugccugaaaccugucu

SEQ ID NO: 1631250 - RNA, 19 nt, Artificial Sequence
  Description of Artificial Sequence: Synthetic oligonucleotide
gugcaaagccaggccagug

SEQ ID NO: 1631251 - RNA, 19 nt, Artificial Sequence
  Description of Artificial Sequence: Synthetic oligonucleotide
caucauuccaugggguuua

SEQ ID NO: 1631252 - RNA, 19 nt, Artificial Sequence
  Description of Artificial Sequence: Synthetic oligonucleotide
ggagccucgucccuuccca

SEQ ID NO: 1631253 - RNA, 19 nt, Artificial Sequence
  Description of Artificial Sequence: Synthetic oligonucleotide
agacgccgcgccaggagag

SEQ ID NO: 1631254 - RNA, 19 nt, Artificial Sequence
  Description of Artificial Sequence: Synthetic oligonucleotide
ugagggagccucgucccuu

SEQ ID NO: 1631255 - RNA, 19 nt, Artificial Sequence
  Description of Artificial Sequence: Synthetic oligonucleotide
ccccuagcagcccuuggcc

SEQ ID NO: 1631256 - RNA, 19 nt, Artificial Sequence
  Description of Artificial Sequence: Synthetic oligonucleotide
cuuggacgccgagcgcagg

SEQ ID NO: 1631257 - RNA, 19 nt, Artificial Sequence
  Description of Artificial Sequence: Synthetic oligonucleotide
gcccaagcugaguuuggug

SEQ ID NO: 1631258 - RNA, 19 nt, Artificial Sequence
  Description of Artificial Sequence: Synthetic oligonucleotide
uggacgccgagcgcaggga

SEQ ID NO: 1631259 - RNA, 19 nt, Artificial Sequence
  Description of Artificial Sequence: Synthetic oligonucleotide
ccccgcuccccucacaagc

SEQ ID NO: 1631260 - RNA, 19 nt, Artificial Sequence
  Description of Artificial Sequence: Synthetic oligonucleotide
aaccugucugagggagccu

SEQ ID NO: 1631261 - RNA, 19 nt, Artificial Sequence
  Description of Artificial Sequence: Synthetic oligonucleotide
aguucgggcccggccugcg

SEQ ID NO: 1631262 - RNA, 19 nt, Artificial Sequence
  Description of Artificial Sequence: Synthetic oligonucleotide
ggggcucuaggacgggccc

SEQ ID NO: 1631263 - RNA, 19 nt, Artificial Sequence
  Description of Artificial Sequence: Synthetic oligonucleotide
gcugaaagugagguuugca

SEQ ID NO: 1631264 - RNA, 19 nt, Artificial Sequence
  Description of Artificial Sequence: Synthetic oligonucleotide
agccccucguggaagggca

SEQ ID NO: 1631265 - RNA, 19 nt, Artificial Sequence
  Description of Artificial Sequence: Synthetic oligonucleotide
cagauguuagagggaccuc

SEQ ID NO: 1631266 - RNA, 19 nt, Artificial Sequence
  Description of Artificial Sequence: Synthetic oligonucleotide
ggacgccgagcgcagggag

SEQ ID NO: 1631267 - RNA, 19 nt, Artificial Sequence
  Description of Artificial Sequence: Synthetic oligonucleotide
cugagcccgcaagcuaaag

SEQ ID NO: 1631268 - RNA, 19 nt, Artificial Sequence
  Description of Artificial Sequence: Synthetic oligonucleotide
caucguaguugccuuugcu

SEQ ID NO: 1631269 - RNA, 19 nt, Artificial Sequence
  Description of Artificial Sequence: Synthetic oligonucleotide
caccagccgcuccauagga

SEQ ID NO: 1631270 - RNA, 19 nt, Artificial Sequence
  Description of Artificial Sequence: Synthetic oligonucleotide
guaguugccuuugcucuua

SEQ ID NO: 1631271 - RNA, 19 nt, Artificial Sequence
  Description of Artificial Sequence: Synthetic oligonucleotide
gaaccaggcuaagggcaga

SEQ ID NO: 1631272 - RNA, 19 nt, Artificial Sequence
  Description of Artificial Sequence: Synthetic oligonucleotide
accccgcuccccucacaag

SEQ ID NO: 1631273 - RNA, 19 nt, Artificial Sequence
  Description of Artificial Sequence: Synthetic oligonucleotide
ggauugugcagaagaagcu

SEQ ID NO: 1631274 - RNA, 19 nt, Artificial Sequence
  Description of Artificial Sequence: Synthetic oligonucleotide
ugugggagcuugggacccu

SEQ ID NO: 1631275 - RNA, 19 nt, Artificial Sequence
  Description of Artificial Sequence: Synthetic oligonucleotide
gccauaguuauuugacuau

SEQ ID NO: 1631276 - RNA, 19 nt, Artificial Sequence
  Description of Artificial Sequence: Synthetic oligonucleotide
accuccccuccaccgguga

SEQ ID NO: 1631277 - RNA, 19 nt, Artificial Sequence
  Description of Artificial Sequence: Synthetic oligonucleotide
gcaagcuaaaggacuugga

SEQ ID NO: 1631278 - RNA, 19 nt, Artificial Sequence
  Description of Artificial Sequence: Synthetic oligonucleotide
gccgcgccaggagaguucg

SEQ ID NO: 1631279 - RNA, 19 nt, Artificial Sequence
  Description of Artificial Sequence: Synthetic oligonucleotide
gacgggcccaaagguucug

SEQ ID NO: 1631280 - RNA, 19 nt, Artificial Sequence
  Description of Artificial Sequence: Synthetic oligonucleotide
caccgugcagugcagcaua

SEQ ID NO: 1631281 - RNA, 19 nt, Artificial Sequence
  Description of Artificial Sequence: Synthetic oligonucleotide
gugcugugccaccauuugu

SEQ ID NO: 1631282 - RNA, 19 nt, Artificial Sequence
  Description of Artificial Sequence: Synthetic oligonucleotide
agccgcuccauaggauaca

SEQ ID NO: 1631283 - RNA, 19 nt, Artificial Sequence
  Description of Artificial Sequence: Synthetic oligonucleotide
cccgcuccccucacaagcc

SEQ ID NO: 1631284 - RNA, 19 nt, Artificial Sequence
  Description of Artificial Sequence: Synthetic oligonucleotide
uugggacccugaggagggc

SEQ ID NO: 1631285 - RNA, 19 nt, Artificial Sequence
  Description of Artificial Sequence: Synthetic oligonucleotide
gccagugcauuacuuccaa

SEQ ID NO: 1631286 - RNA, 19 nt, Artificial Sequence
  Description of Artificial Sequence: Synthetic oligonucleotide
acccuccuuuccucccgcu

SEQ ID NO: 1631287 - RNA, 19 nt, Artificial Sequence
  Description of Artificial Sequence: Synthetic oligonucleotide
ugccugaguccaccuccuu

SEQ ID NO: 1631288 - RNA, 19 nt, Artificial Sequence
  Description of Artificial Sequence: Synthetic oligonucleotide
guucgggcccggccugcgc

SEQ ID NO: 1631289 - RNA, 19 nt, Artificial Sequence
  Description of Artificial Sequence: Synthetic oligonucleotide
caccgcgcugcugccacug

SEQ ID NO: 1631290 - RNA, 19 nt, Artificial Sequence
  Description of Artificial Sequence: Synthetic oligonucleotide
caccccgcuccccucacaa

SEQ ID NO: 1631291 - RNA, 19 nt, Artificial Sequence
  Description of Artificial Sequence: Synthetic oligonucleotide
ccccucacaagcccagauc

SEQ ID NO: 1631292 - RNA, 19 nt, Artificial Sequence
  Description of Artificial Sequence: Synthetic oligonucleotide
cuucccaccccgcuccccu

SEQ ID NO: 1631293 - RNA, 19 nt, Artificial Sequence
  Description of Artificial Sequence: Synthetic oligonucleotide
ccuaugccugaaaccuguc

SEQ ID NO: 1631294 - RNA, 19 nt, Artificial Sequence
  Description of Artificial Sequence: Synthetic oligonucleotide
gagaaguuguggggcucua

SEQ ID NO: 1631295 - RNA, 19 nt, Artificial Sequence
  Description of Artificial Sequence: Synthetic oligonucleotide
aggaagcaguauggugaaa

SEQ ID NO: 1631296 - RNA, 19 nt, Artificial Sequence
  Description of Artificial Sequence: Synthetic oligonucleotide
gccgcuccauaggauacac

SEQ ID NO: 1631297 - RNA, 19 nt, Artificial Sequence
  Description of Artificial Sequence: Synthetic oligonucleotide
ggguguagacgccgcgcca

SEQ ID NO: 1631298 - RNA, 19 nt, Artificial Sequence
  Description of Artificial Sequence: Synthetic oligonucleotide
gcugucuuggugccugagu

SEQ ID NO: 1631299 - RNA, 19 nt, Artificial Sequence
  Description of Artificial Sequence: Synthetic oligonucleotide
gaccgccucgggugcgaga

SEQ ID NO: 1631300 - RNA, 19 nt, Artificial Sequence
  Description of Artificial Sequence: Synthetic oligonucleotide
ggucaggugcaugcugcca

SEQ ID NO: 1631301 - RNA, 19 nt, Artificial Sequence
  Description of Artificial Sequence: Synthetic oligonucleotide
cgugcagugcagcauaacu

SEQ ID NO: 1631302 - RNA, 19 nt, Artificial Sequence
  Description of Artificial Sequence: Synthetic oligonucleotide
ggcuugcagugcaaagcca

SEQ ID NO: 1631303 - RNA, 19 nt, Artificial Sequence
  Description of Artificial Sequence: Synthetic oligonucleotide
caaagugcugugccaccau

SEQ ID NO: 1631304 - RNA, 19 nt, Artificial Sequence
  Description of Artificial Sequence: Synthetic oligonucleotide
gugcuguuuacggccaaau

SEQ ID NO: 1631305 - RNA, 19 nt, Artificial Sequence
  Description of Artificial Sequence: Synthetic oligonucleotide
gcccuaugccugaaaccug

SEQ ID NO: 1631306 - RNA, 19 nt, Artificial Sequence
  Description of Artificial Sequence: Synthetic oligonucleotide
accgugcagugcagcauaa

SEQ ID NO: 1631307 - RNA, 19 nt, Artificial Sequence
  Description of Artificial Sequence: Synthetic oligonucleotide
cccuaugccugaaaccugu

SEQ ID NO: 1631308 - RNA, 19 nt, Artificial Sequence
  Description of Artificial Sequence: Synthetic oligonucleotide
caccggugaggugacauau

SEQ ID NO: 1631309 - RNA, 19 nt, Artificial Sequence
  Description of Artificial Sequence: Synthetic oligonucleotide
accggugaggugacauaua

SEQ ID NO: 1631310 - RNA, 19 nt, Artificial Sequence
  Description of Artificial Sequence: Synthetic oligonucleotide
gcuaagggcagagguagau

SEQ ID NO: 1631311 - RNA, 19 nt, Artificial Sequence
  Description of Artificial Sequence: Synthetic oligonucleotide
ccgagcgcagggagggaac

SEQ ID NO: 1631312 - RNA, 19 nt, Artificial Sequence
  Description of Artificial Sequence: Synthetic oligonucleotide
cagagcccuaugccugaaa

SEQ ID NO: 1631313 - RNA, 19 nt, Artificial Sequence
  Description of Artificial Sequence: Synthetic oligonucleotide
ccucguggaagggcagggc

SEQ ID NO: 1631314 - RNA, 19 nt, Artificial Sequence
  Description of Artificial Sequence: Synthetic oligonucleotide
caaaucccucaucguaguu

SEQ ID NO: 1631315 - RNA, 19 nt, Artificial Sequence
  Description of Artificial Sequence: Synthetic oligonucleotide
ccagaucaaccuccuugga

SEQ ID NO: 1631316 - RNA, 19 nt, Artificial Sequence
  Description of Artificial Sequence: Synthetic oligonucleotide
gccaccauuuguucaucau

SEQ ID NO: 1631317 - RNA, 19 nt, Artificial Sequence
  Description of Artificial Sequence: Synthetic oligonucleotide
gcaccuaaauagggaagcu

SEQ ID NO: 1631318 - RNA, 19 nt, Artificial Sequence
  Description of Artificial Sequence: Synthetic oligonucleotide
caggcuguacaggucuccu

SEQ ID NO: 1631319 - RNA, 19 nt, Artificial Sequence
  Description of Artificial Sequence: Synthetic oligonucleotide
gcccgcaagcuaaaggacu

SEQ ID NO: 1631320 - RNA, 19 nt, Artificial Sequence
  Description of Artificial Sequence: Synthetic oligonucleotide
ggucugaaggaagcaguau

SEQ ID NO: 1631321 - RNA, 19 nt, Artificial Sequence
  Description of Artificial Sequence: Synthetic oligonucleotide
ccuccaccggugaggugac

SEQ ID NO: 1631322 - RNA, 19 nt, Artificial Sequence
  Description of Artificial Sequence: Synthetic oligonucleotide
guuugguguggcaguguuu

SEQ ID NO: 1631323 - RNA, 19 nt, Artificial Sequence
  Description of Artificial Sequence: Synthetic oligonucleotide
ccaccauuuguucaucauu

SEQ ID NO: 1631324 - RNA, 19 nt, Artificial Sequence
  Description of Artificial Sequence: Synthetic oligonucleotide
ccucacaagcccagaucaa

SEQ ID NO: 1631325 - RNA, 19 nt, Artificial Sequence
  Description of Artificial Sequence: Synthetic oligonucleotide
ccccucguggaagggcagg

SEQ ID NO: 1631326 - RNA, 19 nt, Artificial Sequence
  Description of Artificial Sequence: Synthetic oligonucleotide
ccggugaggugacauauau

SEQ ID NO: 1631327 - RNA, 19 nt, Artificial Sequence
  Description of Artificial Sequence: Synthetic oligonucleotide
ccucgucccuucccacccc

SEQ ID NO: 1631328 - RNA, 19 nt, Artificial Sequence
  Description of Artificial Sequence: Synthetic oligonucleotide
cgccucgggugcgagaggc

SEQ ID NO: 1631329 - RNA, 19 nt, Artificial Sequence
  Description of Artificial Sequence: Synthetic oligonucleotide
ugccuggaacauggcucuu

SEQ ID NO: 1631330 - RNA, 19 nt, Artificial Sequence
  Description of Artificial Sequence: Synthetic oligonucleotide
ggcucuaggacgggcccaa

SEQ ID NO: 1631331 - RNA, 19 nt, Artificial Sequence
  Description of Artificial Sequence: Synthetic oligonucleotide
ggcuaagggcagagguaga

SEQ ID NO: 1631332 - RNA, 19 nt, Artificial Sequence
  Description of Artificial Sequence: Synthetic oligonucleotide
ccgcaagcuaaaggacuug

SEQ ID NO: 1631333 - RNA, 19 nt, Artificial Sequence
  Description of Artificial Sequence: Synthetic oligonucleotide
gcuggagaaaaggcaccua

SEQ ID NO: 1631334 - RNA, 19 nt, Artificial Sequence
  Description of Artificial Sequence: Synthetic oligonucleotide
acgccgcgccaggagaguu

SEQ ID NO: 1631335 - RNA, 19 nt, Artificial Sequence
  Description of Artificial Sequence: Synthetic oligonucleotide
caccuccuaugggaaaagu

SEQ ID NO: 1631336 - RNA, 19 nt, Artificial Sequence
  Description of Artificial Sequence: Synthetic oligonucleotide
gccugcgccgcgggguggg

SEQ ID NO: 1631337 - RNA, 19 nt, Artificial Sequence
  Description of Artificial Sequence: Synthetic oligonucleotide
gagggcaugcugacuccuu

SEQ ID NO: 1631338 - RNA, 19 nt, Artificial Sequence
  Description of Artificial Sequence: Synthetic oligonucleotide
ggggaccgccucgggugcg

SEQ ID NO: 1631339 - RNA, 19 nt, Artificial Sequence
  Description of Artificial Sequence: Synthetic oligonucleotide
ccaaaccuccaccuccuau

SEQ ID NO: 1631340 - RNA, 19 nt, Artificial Sequence
  Description of Artificial Sequence: Synthetic oligonucleotide
gggcucuaggacgggccca

SEQ ID NO: 1631341 - RNA, 19 nt, Artificial Sequence
  Description of Artificial Sequence: Synthetic oligonucleotide
cccgcaagcuaaaggacuu

SEQ ID NO: 1631342 - RNA, 19 nt, Artificial Sequence
  Description of Artificial Sequence: Synthetic oligonucleotide
gacgccgcgccaggagagu

SEQ ID NO: 1631343 - RNA, 19 nt, Artificial Sequence
  Description of Artificial Sequence: Synthetic oligonucleotide
gccaggccagugcauuacu

SEQ ID NO: 1631344 - RNA, 19 nt, Artificial Sequence
  Description of Artificial Sequence: Synthetic oligonucleotide
gcaccuccccuccaccggu

SEQ ID NO: 1631345 - RNA, 19 nt, Artificial Sequence
  Description of Artificial Sequence: Synthetic oligonucleotide
gccgagcgcagggagggaa

SEQ ID NO: 1631346 - RNA, 19 nt, Artificial Sequence
  Description of Artificial Sequence: Synthetic oligonucleotide
ggaccgccucgggugcgag

SEQ ID NO: 1631347 - RNA, 19 nt, Artificial Sequence
  Description of Artificial Sequence: Synthetic oligonucleotide
ccgugcagugcagcauaac

SEQ ID NO: 1631348 - RNA, 19 nt, Artificial Sequence
  Description of Artificial Sequence: Synthetic oligonucleotide
ccugagcccgcaagcuaaa

SEQ ID NO: 1631349 - RNA, 19 nt, Artificial Sequence
  Description of Artificial Sequence: Synthetic oligonucleotide
gccccucguggaagggcag

SEQ ID NO: 1631350 - RNA, 19 nt, Artificial Sequence
  Description of Artificial Sequence: Synthetic oligonucleotide
ccgcuccauaggauacaca

SEQ ID NO: 1631351 - RNA, 19 nt, Artificial Sequence
  Description of Artificial Sequence: Synthetic oligonucleotide
ccaccggugaggugacaua

SEQ ID NO: 1631352 - RNA, 19 nt, Artificial Sequence
  Description of Artificial Sequence: Synthetic oligonucleotide
gagggaccucaggcugucu

SEQ ID NO: 1631353 - RNA, 19 nt, Artificial Sequence
  Description of Artificial Sequence: Synthetic oligonucleotide
ggguggccugggcggcccc

SEQ ID NO: 1631354 - RNA, 19 nt, Artificial Sequence
  Description of Artificial Sequence: Synthetic oligonucleotide
ggccugcgccgcggggugg

SEQ ID NO: 1631355 - RNA, 19 nt, Artificial Sequence
  Description of Artificial Sequence: Synthetic oligonucleotide
ggacgggcccaaagguucu

SEQ ID NO: 1631356 - RNA, 19 nt, Artificial Sequence
  Description of Artificial Sequence: Synthetic oligonucleotide
auccuggagcagagcccua

SEQ ID NO: 1631357 - RNA, 19 nt, Artificial Sequence
  Description of Artificial Sequence: Synthetic oligonucleotide
cgcuccccucacaagccca

SEQ ID NO: 1631358 - RNA, 19 nt, Artificial Sequence
  Description of Artificial Sequence: Synthetic oligonucleotide
gggagccauggggugagau

SEQ ID NO: 1631359 - RNA, 19 nt, Artificial Sequence
  Description of Artificial Sequence: Synthetic oligonucleotide
gcccggccugcgccgcggg

SEQ ID NO: 1631360 - RNA, 19 nt, Artificial Sequence
  Description of Artificial Sequence: Synthetic oligonucleotide
ccgccucgggugcgagagg

SEQ ID NO: 1631361 - RNA, 19 nt, Artificial Sequence
  Description of Artificial Sequence: Synthetic oligonucleotide
gcgcagggagggaacagau

SEQ ID NO: 1631362 - RNA, 19 nt, Artificial Sequence
  Description of Artificial Sequence: Synthetic oligonucleotide
ccgcgccaggagaguucgg

SEQ ID NO: 1631363 - RNA, 19 nt, Artificial Sequence
  Description of Artificial Sequence: Synthetic oligonucleotide
cccaccccgcuccccucac

SEQ ID NO: 1631364 - RNA, 19 nt, Artificial Sequence
  Description of Artificial Sequence: Synthetic oligonucleotide
ccaggccagugcauuacuu

SEQ ID NO: 1631365 - RNA, 19 nt, Artificial Sequence
  Description of Artificial Sequence: Synthetic oligonucleotide
gggacccugaggagggcau

SEQ ID NO: 1631366 - RNA, 19 nt, Artificial Sequence
  Description of Artificial Sequence: Synthetic oligonucleotide
gggaccgccucgggugcga

SEQ ID NO: 1631367 - RNA, 19 nt, Artificial Sequence
  Description of Artificial Sequence: Synthetic oligonucleotide
ccagugcauuacuuccaau

SEQ ID NO: 1631368 - RNA, 19 nt, Artificial Sequence
  Description of Artificial Sequence: Synthetic oligonucleotide
cgccgcgccaggagaguuc

SEQ ID NO: 1631369 - RNA, 19 nt, Artificial Sequence
  Description of Artificial Sequence: Synthetic oligonucleotide
cuccaccggugaggugaca

SEQ ID NO: 1631370 - RNA, 19 nt, Artificial Sequence
  Description of Artificial Sequence: Synthetic oligonucleotide
gguuggcggccugggugua

SEQ ID NO: 1631371 - RNA, 19 nt, Artificial Sequence
  Description of Artificial Sequence: Synthetic oligonucleotide
gcucuaggacgggcccaaa

SEQ ID NO: 1631372 - RNA, 19 nt, Artificial Sequence
  Description of Artificial Sequence: Synthetic oligonucleotide
ccaccccgcuccccucaca

SEQ ID NO: 1631373 - RNA, 19 nt, Artificial Sequence
  Description of Artificial Sequence: Synthetic oligonucleotide
gcaccgcgcugcugccacu

SEQ ID NO: 1631374 - RNA, 19 nt, Artificial Sequence
  Description of Artificial Sequence: Synthetic oligonucleotide
cgccgagcgcagggaggga

SEQ ID NO: 1631375 - RNA, 19 nt, Artificial Sequence
  Description of Artificial Sequence: Synthetic oligonucleotide
uuucaaauaacgcuugugg

SEQ ID NO: 1631376 - RNA, 19 nt, Artificial Sequence
  Description of Artificial Sequence: Synthetic oligonucleotide
aaaucgaggagccagccgc

SEQ ID NO: 1631377 - RNA, 19 nt, Artificial Sequence
  Description of Artificial Sequence: Synthetic oligonucleotide
agcucaaugaauuucgucg

SEQ ID NO: 1631378 - RNA, 19 nt, Artificial Sequence
  Description of Artificial Sequence: Synthetic oligonucleotide
aauuugcacuccuucaggc

SEQ ID NO: 1631379 - RNA, 19 nt, Artificial Sequence
  Description of Artificial Sequence: Synthetic oligonucleotide
agauagaucucacagggac

SEQ ID NO: 1631380 - RNA, 19 nt, Artificial Sequence
  Description of Artificial Sequence: Synthetic oligonucleotide
aaagcugaucucucuggcc

SEQ ID NO: 1631381 - RNA, 19 nt, Artificial Sequence
  Description of Artificial Sequence: Synthetic oligonucleotide
aaauggugcggaaugaugg

SEQ ID NO: 1631382 - RNA, 19 nt, Artificial Sequence
  Description of Artificial Sequence: Synthetic oligonucleotide
ugaacgucagcacacacug

SEQ ID NO: 1631383 - RNA, 19 nt, Artificial Sequence
  Description of Artificial Sequence: Synthetic oligonucleotide
gaaucguucuuucucagag

SEQ ID NO: 1631384 - RNA, 19 nt, Artificial Sequence
  Description of Artificial Sequence: Synthetic oligonucleotide
aauggugcggaaugauggc

SEQ ID NO: 1631385 - RNA, 19 nt, Artificial Sequence
  Description of Artificial Sequence: Synthetic oligonucleotide
agaaaggccaugccuaagc

SEQ ID NO: 1631386 - RNA, 19 nt, Artificial Sequence
  Description of Artificial Sequence: Synthetic oligonucleotide
gaucuaaugcuguagaguc

SEQ ID NO: 1631387 - RNA, 19 nt, Artificial Sequence
  Description of Artificial Sequence: Synthetic oligonucleotide
uguagaaucguucuuucuc

SEQ ID NO: 1631388 - RNA, 19 nt, Artificial Sequence
  Description of Artificial Sequence: Synthetic oligonucleotide
uaaaauuugcacuccuuca

SEQ ID NO: 1631389 - RNA, 19 nt, Artificial Sequence
  Description of Artificial Sequence: Synthetic oligonucleotide
ggagauagaucucacaggg

SEQ ID NO: 1631390 - RNA, 19 nt, Artificial Sequence
  Description of Artificial Sequence: Synthetic oligonucleotide
uccaguguagccaaguacu

SEQ ID NO: 1631391 - RNA, 19 nt, Artificial Sequence
  Description of Artificial Sequence: Synthetic oligonucleotide
cuuaagggcuuucacagcc

SEQ ID NO: 1631392 - RNA, 19 nt, Artificial Sequence
  Description of Artificial Sequence: Synthetic oligonucleotide
aaugcuguagagucugugu

SEQ ID NO: 1631393 - RNA, 19 nt, Artificial Sequence
  Description of Artificial Sequence: Synthetic oligonucleotide
uaggauuucgaucucccgc

SEQ ID NO: 1631394 - RNA, 19 nt, Artificial Sequence
  Description of Artificial Sequence: Synthetic oligonucleotide
ucaaauaacgcuuguggaa

SEQ ID NO: 1631395 - RNA, 19 nt, Artificial Sequence
  Description of Artificial Sequence: Synthetic oligonucleotide
uucaaauaacgcuugugga

SEQ ID NO: 1631396 - RNA, 19 nt, Artificial Sequence
  Description of Artificial Sequence: Synthetic oligonucleotide
auguguucaugguacaggg

SEQ ID NO: 1631397 - RNA, 19 nt, Artificial Sequence
  Description of Artificial Sequence: Synthetic oligonucleotide
aaucguucuuucucagagg

SEQ ID NO: 1631398 - RNA, 19 nt, Artificial Sequence
  Description of Artificial Sequence: Synthetic oligonucleotide
auuucgaucucccgcugcc

SEQ ID NO: 1631399 - RNA, 19 nt, Artificial Sequence
  Description of Artificial Sequence: Synthetic oligonucleotide
accacaucccuccuuaagg

SEQ ID NO: 1631400 - RNA, 19 nt, Artificial Sequence
  Description of Artificial Sequence: Synthetic oligonucleotide
gacaccacaucauucauga

SEQ ID NO: 1631401 - RNA, 19 nt, Artificial Sequence
  Description of Artificial Sequence: Synthetic oligonucleotide
ucuaaugcuguagagucug

SEQ ID NO: 1631402 - RNA, 19 nt, Artificial Sequence
  Description of Artificial Sequence: Synthetic oligonucleotide
aauaacgcuuguggaaaac

SEQ ID NO: 1631403 - RNA, 19 nt, Artificial Sequence
  Description of Artificial Sequence: Synthetic oligonucleotide
ugagccucaacacagucau

SEQ ID NO: 1631404 - RNA, 19 nt, Artificial Sequence
  Description of Artificial Sequence: Synthetic oligonucleotide
agugaggucccgcaaaaug

SEQ ID NO: 1631405 - RNA, 19 nt, Artificial Sequence
  Description of Artificial Sequence: Synthetic oligonucleotide
uucuuaaagugguggaucu

SEQ ID NO: 1631406 - RNA, 19 nt, Artificial Sequence
  Description of Artificial Sequence: Synthetic oligonucleotide
guagagucuguguucacag

SEQ ID NO: 1631407 - RNA, 19 nt, Artificial Sequence
  Description of Artificial Sequence: Synthetic oligonucleotide
agagucuguguucacagcu

SEQ ID NO: 1631408 - RNA, 19 nt, Artificial Sequence
  Description of Artificial Sequence: Synthetic oligonucleotide
guacucguggccuucaggc

SEQ ID NO: 1631409 - RNA, 19 nt, Artificial Sequence
  Description of Artificial Sequence: Synthetic oligonucleotide
agagcaagguggcagaggu

SEQ ID NO: 1631410 - RNA, 19 nt, Artificial Sequence
  Description of Artificial Sequence: Synthetic oligonucleotide
cauugguuggaucauagca

SEQ ID NO: 1631411 - RNA, 19 nt, Artificial Sequence
  Description of Artificial Sequence: Synthetic oligonucleotide
uggugcggaaugauggccg

SEQ ID NO: 1631412 - RNA, 19 nt, Artificial Sequence
  Description of Artificial Sequence: Synthetic oligonucleotide
aagaaucgccggaagacuc

SEQ ID NO: 1631413 - RNA, 19 nt, Artificial Sequence
  Description of Artificial Sequence: Synthetic oligonucleotide
augagcucaaugaauuucg

SEQ ID NO: 1631414 - RNA, 19 nt, Artificial Sequence
  Description of Artificial Sequence: Synthetic oligonucleotide
ugcucugagccaaaucgag

SEQ ID NO: 1631415 - RNA, 19 nt, Artificial Sequence
  Description of Artificial Sequence: Synthetic oligonucleotide
ugguucguaggucaggcac

SEQ ID NO: 1631416 - RNA, 19 nt, Artificial Sequence
  Description of Artificial Sequence: Synthetic oligonucleotide
uuugcacuccuucaggcau

SEQ ID NO: 1631417 - RNA, 19 nt, Artificial Sequence
  Description of Artificial Sequence: Synthetic oligonucleotide
aaaauggugcggaaugaug

SEQ ID NO: 1631418 - RNA, 19 nt, Artificial Sequence
  Description of Artificial Sequence: Synthetic oligonucleotide
cugaccuugccaaagugac

SEQ ID NO: 1631419 - RNA, 19 nt, Artificial Sequence
  Description of Artificial Sequence: Synthetic oligonucleotide
agggacaucugucaggccu

SEQ ID NO: 1631420 - RNA, 19 nt, Artificial Sequence
  Description of Artificial Sequence: Synthetic oligonucleotide
uugaacgucagcacacacu

SEQ ID NO: 1631421 - RNA, 19 nt, Artificial Sequence
  Description of Artificial Sequence: Synthetic oligonucleotide
agacaggucccgaagagac

SEQ ID NO: 1631422 - RNA, 19 nt, Artificial Sequence
  Description of Artificial Sequence: Synthetic oligonucleotide
ugggaucuaaugcuguaga

SEQ ID NO: 1631423 - RNA, 19 nt, Artificial Sequence
  Description of Artificial Sequence: Synthetic oligonucleotide
ucguaggucaggcacuggc

SEQ ID NO: 1631424 - RNA, 19 nt, Artificial Sequence
  Description of Artificial Sequence: Synthetic oligonucleotide
uacgucaacagcucauaca

SEQ ID NO: 1631425 - RNA, 19 nt, Artificial Sequence
  Description of Artificial Sequence: Synthetic oligonucleotide
agagucacaguacgucaac

SEQ ID NO: 1631426 - RNA, 19 nt, Artificial Sequence
  Description of Artificial Sequence: Synthetic oligonucleotide
guaggucaggcacuggcgg

SEQ ID NO: 1631427 - RNA, 19 nt, Artificial Sequence
  Description of Artificial Sequence: Synthetic oligonucleotide
ggcacaagauucuggaagg

SEQ ID NO: 1631428 - RNA, 19 nt, Artificial Sequence
  Description of Artificial Sequence: Synthetic oligonucleotide
augaacucauauuuucccu

SEQ ID NO: 1631429 - RNA, 19 nt, Artificial Sequence
  Description of Artificial Sequence: Synthetic oligonucleotide
guagaaucguucuuucuca

SEQ ID NO: 1631430 - RNA, 19 nt, Artificial Sequence
  Description of Artificial Sequence: Synthetic oligonucleotide
gacacacugguauaugcuc

SEQ ID NO: 1631431 - RNA, 19 nt, Artificial Sequence
  Description of Artificial Sequence: Synthetic oligonucleotide
gggucgacgaccuugcagg

SEQ ID NO: 1631432 - RNA, 19 nt, Artificial Sequence
  Description of Artificial Sequence: Synthetic oligonucleotide
ugguauaugcucugagcca

SEQ ID NO: 1631433 - RNA, 19 nt, Artificial Sequence
  Description of Artificial Sequence: Synthetic oligonucleotide
caugguacaggguccguag

SEQ ID NO: 1631434 - RNA, 19 nt, Artificial Sequence
  Description of Artificial Sequence: Synthetic oligonucleotide
gaaaggcccgcaagaaucg

SEQ ID NO: 1631435 - RNA, 19 nt, Artificial Sequence
  Description of Artificial Sequence: Synthetic oligonucleotide
aguacucguggccuucagg

SEQ ID NO: 1631436 - RNA, 19 nt, Artificial Sequence
  Description of Artificial Sequence: Synthetic oligonucleotide
ucgacgaccuugcaggggu

SEQ ID NO: 1631437 - RNA, 19 nt, Artificial Sequence
  Description of Artificial Sequence: Synthetic oligonucleotide
uagaaucguucuuucucag

SEQ ID NO: 1631438 - RNA, 19 nt, Artificial Sequence
  Description of Artificial Sequence: Synthetic oligonucleotide
aucgccggaagacucugcg

SEQ ID NO: 1631439 - RNA, 19 nt, Artificial Sequence
  Description of Artificial Sequence: Synthetic oligonucleotide
uguguagaaucguucuuuc

SEQ ID NO: 1631440 - RNA, 19 nt, Artificial Sequence
  Description of Artificial Sequence: Synthetic oligonucleotide
uucgaucucccgcugccag

SEQ ID NO: 1631441 - RNA, 19 nt, Artificial Sequence
  Description of Artificial Sequence: Synthetic oligonucleotide
ugacccucgcccaauuccc

SEQ ID NO: 1631442 - RNA, 19 nt, Artificial Sequence
  Description of Artificial Sequence: Synthetic oligonucleotide
acuagacaggucccgaaga

SEQ ID NO: 1631443 - RNA, 19 nt, Artificial Sequence
  Description of Artificial Sequence: Synthetic oligonucleotide
guaggauuucgaucucccg

SEQ ID NO: 1631444 - RNA, 19 nt, Artificial Sequence
  Description of Artificial Sequence: Synthetic oligonucleotide
cuagacaggucccgaagag

SEQ ID NO: 1631445 - RNA, 19 nt, Artificial Sequence
  Description of Artificial Sequence: Synthetic oligonucleotide
cacgcgguaguacucgugg

SEQ ID NO: 1631446 - RNA, 19 nt, Artificial Sequence
  Description of Artificial Sequence: Synthetic oligonucleotide
agaucucacagggacaucu

SEQ ID NO: 1631447 - RNA, 19 nt, Artificial Sequence
  Description of Artificial Sequence: Synthetic oligonucleotide
aaaggcccgcaagaaucgc

SEQ ID NO: 1631448 - RNA, 19 nt, Artificial Sequence
  Description of Artificial Sequence: Synthetic oligonucleotide
aaggcccgcaagaaucgcc

SEQ ID NO: 1631449 - RNA, 19 nt, Artificial Sequence
  Description of Artificial Sequence: Synthetic oligonucleotide
ucucagagggucgacgacc

SEQ ID NO: 1631450 - RNA, 19 nt, Artificial Sequence
  Description of Artificial Sequence: Synthetic oligonucleotide
ugaggaugggcacaagauu

SEQ ID NO: 1631451 - RNA, 19 nt, Artificial Sequence
  Description of Artificial Sequence: Synthetic oligonucleotide
uuuguguagaaucguucuu

SEQ ID NO: 1631452 - RNA, 19 nt, Artificial Sequence
  Description of Artificial Sequence: Synthetic oligonucleotide
acuuaaccaucacaaccug

SEQ ID NO: 1631453 - RNA, 19 nt, Artificial Sequence
  Description of Artificial Sequence: Synthetic oligonucleotide
gauuucgaucucccgcugc

SEQ ID NO: 1631454 - RNA, 19 nt, Artificial Sequence
  Description of Artificial Sequence: Synthetic oligonucleotide
ugguacaggguccguagga

SEQ ID NO: 1631455 - RNA, 19 nt, Artificial Sequence
  Description of Artificial Sequence: Synthetic oligonucleotide
auggugcggaaugauggcc

SEQ ID NO: 1631456 - RNA, 19 nt, Artificial Sequence
  Description of Artificial Sequence: Synthetic oligonucleotide
cauaccagaacacugggcu

SEQ ID NO: 1631457 - RNA, 19 nt, Artificial Sequence
  Description of Artificial Sequence: Synthetic oligonucleotide
cuggcggaaugaacgaggg

SEQ ID NO: 1631458 - RNA, 19 nt, Artificial Sequence
  Description of Artificial Sequence: Synthetic oligonucleotide
auuugcacuccuucaggca

SEQ ID NO: 1631459 - RNA, 19 nt, Artificial Sequence
  Description of Artificial Sequence: Synthetic oligonucleotide
auagaucucacagggacau

SEQ ID NO: 1631460 - RNA, 19 nt, Artificial Sequence
  Description of Artificial Sequence: Synthetic oligonucleotide
uaaccaucacaaccugcug

SEQ ID NO: 1631461 - RNA, 19 nt, Artificial Sequence
  Description of Artificial Sequence: Synthetic oligonucleotide
uaggucaggcacuggcggg

SEQ ID NO: 1631462 - RNA, 19 nt, Artificial Sequence
  Description of Artificial Sequence: Synthetic oligonucleotide
acuauuuauuugcccuuga

SEQ ID NO: 1631463 - RNA, 19 nt, Artificial Sequence
  Description of Artificial Sequence: Synthetic oligonucleotide
uaaagugguggaucucuuc

SEQ ID NO: 1631464 - RNA, 19 nt, Artificial Sequence
  Description of Artificial Sequence: Synthetic oligonucleotide
uacaggguccguaggauuu

SEQ ID NO: 1631465 - RNA, 19 nt, Artificial Sequence
  Description of Artificial Sequence: Synthetic oligonucleotide
agucuguguucacagcuga

SEQ ID NO: 1631466 - RNA, 19 nt, Artificial Sequence
  Description of Artificial Sequence: Synthetic oligonucleotide
caaguacuuaaccaucaca

SEQ ID NO: 1631467 - RNA, 19 nt, Artificial Sequence
  Description of Artificial Sequence: Synthetic oligonucleotide
auaccagaacacugggcug

SEQ ID NO: 1631468 - RNA, 19 nt, Artificial Sequence
  Description of Artificial Sequence: Synthetic oligonucleotide
agaaucguucuuucucaga

SEQ ID NO: 1631469 - RNA, 19 nt, Artificial Sequence
  Description of Artificial Sequence: Synthetic oligonucleotide
agggucgacgaccuugcag

SEQ ID NO: 1631470 - RNA, 19 nt, Artificial Sequence
  Description of Artificial Sequence: Synthetic oligonucleotide
agagggucgacgaccuugc

SEQ ID NO: 1631471 - RNA, 19 nt, Artificial Sequence
  Description of Artificial Sequence: Synthetic oligonucleotide
uuguguagaaucguucuuu

SEQ ID NO: 1631472 - RNA, 19 nt, Artificial Sequence
  Description of Artificial Sequence: Synthetic oligonucleotide
guccguaggauuucgaucu

SEQ ID NO: 1631473 - RNA, 19 nt, Artificial Sequence
  Description of Artificial Sequence: Synthetic oligonucleotide
augguacaggguccguagg

SEQ ID NO: 1631474 - RNA, 19 nt, Artificial Sequence
  Description of Artificial Sequence: Synthetic oligonucleotide
guucaugguacaggguccg

SEQ ID NO: 1631475 - RNA, 19 nt, Artificial Sequence
  Description of Artificial Sequence: Synthetic oligonucleotide
ucgcccaauucccggaucu

SEQ ID NO: 1631476 - RNA, 19 nt, Artificial Sequence
  Description of Artificial Sequence: Synthetic oligonucleotide
cacaucccuccuuaagggc

SEQ ID NO: 1631477 - RNA, 19 nt, Artificial Sequence
  Description of Artificial Sequence: Synthetic oligonucleotide
agccaaguacuuaaccauc

SEQ ID NO: 1631478 - RNA, 19 nt, Artificial Sequence
  Description of Artificial Sequence: Synthetic oligonucleotide
caaauaacgcuuguggaaa

SEQ ID NO: 1631479 - RNA, 19 nt, Artificial Sequence
  Description of Artificial Sequence: Synthetic oligonucleotide
cuuuguguagaaucguucu

SEQ ID NO: 1631480 - RNA, 19 nt, Artificial Sequence
  Description of Artificial Sequence: Synthetic oligonucleotide
caugaggagauagaucuca

SEQ ID NO: 1631481 - RNA, 19 nt, Artificial Sequence
  Description of Artificial Sequence: Synthetic oligonucleotide
acgcgguaguacucguggc

SEQ ID NO: 1631482 - RNA, 19 nt, Artificial Sequence
  Description of Artificial Sequence: Synthetic oligonucleotide
cacuagacaggucccgaag

SEQ ID NO: 1631483 - RNA, 19 nt, Artificial Sequence
  Description of Artificial Sequence: Synthetic oligonucleotide
agugacccucgcccaauuc

SEQ ID NO: 1631484 - RNA, 19 nt, Artificial Sequence
  Description of Artificial Sequence: Synthetic oligonucleotide
augaacgagggaugcauuu

SEQ ID NO: 1631485 - RNA, 19 nt, Artificial Sequence
  Description of Artificial Sequence: Synthetic oligonucleotide
acaguacgucaacagcuca

SEQ ID NO: 1631486 - RNA, 19 nt, Artificial Sequence
  Description of Artificial Sequence: Synthetic oligonucleotide
cuugaacgucagcacacac

SEQ ID NO: 1631487 - RNA, 19 nt, Artificial Sequence
  Description of Artificial Sequence: Synthetic oligonucleotide
gaucucaaggagggugggg

SEQ ID NO: 1631488 - RNA, 19 nt, Artificial Sequence
  Description of Artificial Sequence: Synthetic oligonucleotide
aaucgccggaagacucugc

SEQ ID NO: 1631489 - RNA, 19 nt, Artificial Sequence
  Description of Artificial Sequence: Synthetic oligonucleotide
ccagcuccgggcaugaggg

SEQ ID NO: 1631490 - RNA, 19 nt, Artificial Sequence
  Description of Artificial Sequence: Synthetic oligonucleotide
ucaugaggagauagaucuc

SEQ ID NO: 1631491 - RNA, 19 nt, Artificial Sequence
  Description of Artificial Sequence: Synthetic oligonucleotide
ugccuaagcucucauucuu

SEQ ID NO: 1631492 - RNA, 19 nt, Artificial Sequence
  Description of Artificial Sequence: Synthetic oligonucleotide
ugcggaaugauggccgcug

SEQ ID NO: 1631493 - RNA, 19 nt, Artificial Sequence
  Description of Artificial Sequence: Synthetic oligonucleotide
gggaucuaaugcuguagag

SEQ ID NO: 1631494 - RNA, 19 nt, Artificial Sequence
  Description of Artificial Sequence: Synthetic oligonucleotide
ugaacgagggaugcauuuc

SEQ ID NO: 1631495 - RNA, 19 nt, Artificial Sequence
  Description of Artificial Sequence: Synthetic oligonucleotide
ucgccggaagacucugcgg

SEQ ID NO: 1631496 - RNA, 19 nt, Artificial Sequence
  Description of Artificial Sequence: Synthetic oligonucleotide
gugggaucuaaugcuguag

SEQ ID NO: 1631497 - RNA, 19 nt, Artificial Sequence
  Description of Artificial Sequence: Synthetic oligonucleotide
guaccuccagaugacacac

SEQ ID NO: 1631498 - RNA, 19 nt, Artificial Sequence
  Description of Artificial Sequence: Synthetic oligonucleotide
uagacaggucccgaagaga

SEQ ID NO: 1631499 - RNA, 19 nt, Artificial Sequence
  Description of Artificial Sequence: Synthetic oligonucleotide
aggcauuccggagcauacc

SEQ ID NO: 1631500 - RNA, 19 nt, Artificial Sequence
  Description of Artificial Sequence: Synthetic oligonucleotide
caucugaugcauaguaaaa

SEQ ID NO: 1631501 - RNA, 19 nt, Artificial Sequence
  Description of Artificial Sequence: Synthetic oligonucleotide
ucacuagacaggucccgaa

SEQ ID NO: 1631502 - RNA, 19 nt, Artificial Sequence
  Description of Artificial Sequence: Synthetic oligonucleotide
agcgcauugugcuggcgga

SEQ ID NO: 1631503 - RNA, 19 nt, Artificial Sequence
  Description of Artificial Sequence: Synthetic oligonucleotide
acaucccuccuuaagggcu

SEQ ID NO: 1631504 - RNA, 19 nt, Artificial Sequence
  Description of Artificial Sequence: Synthetic oligonucleotide
guacgucaacagcucauac

SEQ ID NO: 1631505 - RNA, 19 nt, Artificial Sequence
  Description of Artificial Sequence: Synthetic oligonucleotide
uaguacucguggccuucag

SEQ ID NO: 1631506 - RNA, 19 nt, Artificial Sequence
  Description of Artificial Sequence: Synthetic oligonucleotide
ucccgcaaaauggugcgga

SEQ ID NO: 1631507 - RNA, 19 nt, Artificial Sequence
  Description of Artificial Sequence: Synthetic oligonucleotide
agaucucaaggaggguggg

SEQ ID NO: 1631508 - RNA, 19 nt, Artificial Sequence
  Description of Artificial Sequence: Synthetic oligonucleotide
ggugaccaggcugaaaggc

SEQ ID NO: 1631509 - RNA, 19 nt, Artificial Sequence
  Description of Artificial Sequence: Synthetic oligonucleotide
gaacgagggaugcauuucu

SEQ ID NO: 1631510 - RNA, 19 nt, Artificial Sequence
  Description of Artificial Sequence: Synthetic oligonucleotide
ggugacuccgaugagcuca

SEQ ID NO: 1631511 - RNA, 19 nt, Artificial Sequence
  Description of Artificial Sequence: Synthetic oligonucleotide
aguaaaauuugcacuccuu

SEQ ID NO: 1631512 - RNA, 19 nt, Artificial Sequence
  Description of Artificial Sequence: Synthetic oligonucleotide
cugcagccuagugaggucc

SEQ ID NO: 1631513 - RNA, 19 nt, Artificial Sequence
  Description of Artificial Sequence: Synthetic oligonucleotide
cagagggucgacgaccuug

SEQ ID NO: 1631514 - RNA, 19 nt, Artificial Sequence
  Description of Artificial Sequence: Synthetic oligonucleotide
agacucugcggagacgcag

SEQ ID NO: 1631515 - RNA, 19 nt, Artificial Sequence
  Description of Artificial Sequence: Synthetic oligonucleotide
agugggaucuaaugcugua

SEQ ID NO: 1631516 - RNA, 19 nt, Artificial Sequence
  Description of Artificial Sequence: Synthetic oligonucleotide
gacaucugaugcauaguaa

SEQ ID NO: 1631517 - RNA, 19 nt, Artificial Sequence
  Description of Artificial Sequence: Synthetic oligonucleotide
ucuuaaagugguggaucuc

SEQ ID NO: 1631518 - RNA, 19 nt, Artificial Sequence
  Description of Artificial Sequence: Synthetic oligonucleotide
gaaugaacgagggaugcau

SEQ ID NO: 1631519 - RNA, 19 nt, Artificial Sequence
  Description of Artificial Sequence: Synthetic oligonucleotide
acgaccuugcaggggugcc

SEQ ID NO: 1631520 - RNA, 19 nt, Artificial Sequence
  Description of Artificial Sequence: Synthetic oligonucleotide
gaaucgccggaagacucug

SEQ ID NO: 1631521 - RNA, 19 nt, Artificial Sequence
  Description of Artificial Sequence: Synthetic oligonucleotide
ugcugggagaggugaccag

SEQ ID NO: 1631522 - RNA, 19 nt, Artificial Sequence
  Description of Artificial Sequence: Synthetic oligonucleotide
gguccguaggauuucgauc

SEQ ID NO: 1631523 - RNA, 19 nt, Artificial Sequence
  Description of Artificial Sequence: Synthetic oligonucleotide
caguacaggcugaccuugc

SEQ ID NO: 1631524 - RNA, 19 nt, Artificial Sequence
  Description of Artificial Sequence: Synthetic oligonucleotide
ucgcgcacgcgguaguacu

SEQ ID NO: 1631525 - RNA, 19 nt, Artificial Sequence
  Description of Artificial Sequence: Synthetic oligonucleotide
agccuagugaggucccgca

SEQ ID NO: 1631526 - RNA, 19 nt, Artificial Sequence
  Description of Artificial Sequence: Synthetic oligonucleotide
acgagggaugcauuucuua

SEQ ID NO: 1631527 - RNA, 19 nt, Artificial Sequence
  Description of Artificial Sequence: Synthetic oligonucleotide
augugcuggcggaaugaac

SEQ ID NO: 1631528 - RNA, 19 nt, Artificial Sequence
  Description of Artificial Sequence: Synthetic oligonucleotide
gcuggcggaaugaacgagg

SEQ ID NO: 1631529 - RNA, 19 nt, Artificial Sequence
  Description of Artificial Sequence: Synthetic oligonucleotide
guucguaggucaggcacug

SEQ ID NO: 1631530 - RNA, 19 nt, Artificial Sequence
  Description of Artificial Sequence: Synthetic oligonucleotide
gacgcaggcgcgugagcgc

SEQ ID NO: 1631531 - RNA, 19 nt, Artificial Sequence
  Description of Artificial Sequence: Synthetic oligonucleotide
aguacgucaacagcucaua

SEQ ID NO: 1631532 - RNA, 19 nt, Artificial Sequence
  Description of Artificial Sequence: Synthetic oligonucleotide
ucuccacguuccagcaacu

SEQ ID NO: 1631533 - RNA, 19 nt, Artificial Sequence
  Description of Artificial Sequence: Synthetic oligonucleotide
caucugucaggccucggca

SEQ ID NO: 1631534 - RNA, 19 nt, Artificial Sequence
  Description of Artificial Sequence: Synthetic oligonucleotide
gguauaugcucugagccaa

SEQ ID NO: 1631535 - RNA, 19 nt, Artificial Sequence
  Description of Artificial Sequence: Synthetic oligonucleotide
aucuaaugcuguagagucu

SEQ ID NO: 1631536 - RNA, 19 nt, Artificial Sequence
  Description of Artificial Sequence: Synthetic oligonucleotide
cgcaaaauggugcggaaug

SEQ ID NO: 1631537 - RNA, 19 nt, Artificial Sequence
  Description of Artificial Sequence: Synthetic oligonucleotide
uggcggaaugaacgaggga

SEQ ID NO: 1631538 - RNA, 19 nt, Artificial Sequence
  Description of Artificial Sequence: Synthetic oligonucleotide
gagauagaucucacaggga

SEQ ID NO: 1631539 - RNA, 19 nt, Artificial Sequence
  Description of Artificial Sequence: Synthetic oligonucleotide
uuucgaucucccgcugcca

SEQ ID NO: 1631540 - RNA, 19 nt, Artificial Sequence
  Description of Artificial Sequence: Synthetic oligonucleotide
cauacaaggucaccccgaa

SEQ ID NO: 1631541 - RNA, 19 nt, Artificial Sequence
  Description of Artificial Sequence: Synthetic oligonucleotide
cguaggauuucgaucuccc

SEQ ID NO: 1631542 - RNA, 19 nt, Artificial Sequence
  Description of Artificial Sequence: Synthetic oligonucleotide
caucucgccagugccauca

SEQ ID NO: 1631543 - RNA, 19 nt, Artificial Sequence
  Description of Artificial Sequence: Synthetic oligonucleotide
agaaucgccggaagacucu

SEQ ID NO: 1631544 - RNA, 19 nt, Artificial Sequence
  Description of Artificial Sequence: Synthetic oligonucleotide
gacgaccuugcaggggugc

SEQ ID NO: 1631545 - RNA, 19 nt, Artificial Sequence
  Description of Artificial Sequence: Synthetic oligonucleotide
ccgaagagacaccacauca

SEQ ID NO: 1631546 - RNA, 19 nt, Artificial Sequence
  Description of Artificial Sequence: Synthetic oligonucleotide
gacccucgcccaauucccg

SEQ ID NO: 1631547 - RNA, 19 nt, Artificial Sequence
  Description of Artificial Sequence: Synthetic oligonucleotide
cuaagcucucauucuuaaa

SEQ ID NO: 1631548 - RNA, 19 nt, Artificial Sequence
  Description of Artificial Sequence: Synthetic oligonucleotide
uucguaggucaggcacugg

SEQ ID NO: 1631549 - RNA, 19 nt, Artificial Sequence
  Description of Artificial Sequence: Synthetic oligonucleotide
ugagcgcauugugcuggcg

SEQ ID NO: 1631550 - RNA, 19 nt, Artificial Sequence
  Description of Artificial Sequence: Synthetic oligonucleotide
ggaucucuuccucacuaga

SEQ ID NO: 1631551 - RNA, 19 nt, Artificial Sequence
  Description of Artificial Sequence: Synthetic oligonucleotide
ggcugaaaggcccgcaaga

SEQ ID NO: 1631552 - RNA, 19 nt, Artificial Sequence
  Description of Artificial Sequence: Synthetic oligonucleotide
uccguaggauuucgaucuc

SEQ ID NO: 1631553 - RNA, 19 nt, Artificial Sequence
  Description of Artificial Sequence: Synthetic oligonucleotide
gucgacgaccuugcagggg

SEQ ID NO: 1631554 - RNA, 19 nt, Artificial Sequence
  Description of Artificial Sequence: Synthetic oligonucleotide
cagcugagauacccacuag

SEQ ID NO: 1631555 - RNA, 19 nt, Artificial Sequence
  Description of Artificial Sequence: Synthetic oligonucleotide
cugcggagacgcaggcgcg

SEQ ID NO: 1631556 - RNA, 19 nt, Artificial Sequence
  Description of Artificial Sequence: Synthetic oligonucleotide
gcuuuguguagaaucguuc

SEQ ID NO: 1631557 - RNA, 19 nt, Artificial Sequence
  Description of Artificial Sequence: Synthetic oligonucleotide
gaaaacagugggaucuaau

SEQ ID NO: 1631558 - RNA, 19 nt, Artificial Sequence
  Description of Artificial Sequence: Synthetic oligonucleotide
gucuguguucacagcugag

SEQ ID NO: 1631559 - RNA, 19 nt, Artificial Sequence
  Description of Artificial Sequence: Synthetic oligonucleotide
ggucgacgaccuugcaggg

SEQ ID NO: 1631560 - RNA, 19 nt, Artificial Sequence
  Description of Artificial Sequence: Synthetic oligonucleotide
cguaggucaggcacuggcg

SEQ ID NO: 1631561 - RNA, 19 nt, Artificial Sequence
  Description of Artificial Sequence: Synthetic oligonucleotide
gaugugcuggcggaaugaa

SEQ ID NO: 1631562 - RNA, 19 nt, Artificial Sequence
  Description of Artificial Sequence: Synthetic oligonucleotide
ccuuaagggcuuucacagc

SEQ ID NO: 1631563 - RNA, 19 nt, Artificial Sequence
  Description of Artificial Sequence: Synthetic oligonucleotide
acguuccagcaacucugug

SEQ ID NO: 1631564 - RNA, 19 nt, Artificial Sequence
  Description of Artificial Sequence: Synthetic oligonucleotide
caggguccguaggauuucg

SEQ ID NO: 1631565 - RNA, 19 nt, Artificial Sequence
  Description of Artificial Sequence: Synthetic oligonucleotide
ggaucuaaugcuguagagu

SEQ ID NO: 1631566 - RNA, 19 nt, Artificial Sequence
  Description of Artificial Sequence: Synthetic oligonucleotide
ggugcggaaugauggccgc

SEQ ID NO: 1631567 - RNA, 19 nt, Artificial Sequence
  Description of Artificial Sequence: Synthetic oligonucleotide
gagacgcaggcgcgugagc

SEQ ID NO: 1631568 - RNA, 19 nt, Artificial Sequence
  Description of Artificial Sequence: Synthetic oligonucleotide
ccaaguacuuaaccaucac

SEQ ID NO: 1631569 - RNA, 19 nt, Artificial Sequence
  Description of Artificial Sequence: Synthetic oligonucleotide
ggcggaaugaacgagggau

SEQ ID NO: 1631570 - RNA, 19 nt, Artificial Sequence
  Description of Artificial Sequence: Synthetic oligonucleotide
cucugcggagacgcaggcg

SEQ ID NO: 1631571 - RNA, 19 nt, Artificial Sequence
  Description of Artificial Sequence: Synthetic oligonucleotide
gccaaguacuuaaccauca

SEQ ID NO: 1631572 - RNA, 19 nt, Artificial Sequence
  Description of Artificial Sequence: Synthetic oligonucleotide
cauugugcuggcggaugug

SEQ ID NO: 1631573 - RNA, 19 nt, Artificial Sequence
  Description of Artificial Sequence: Synthetic oligonucleotide
gcugaccuugccaaaguga

SEQ ID NO: 1631574 - RNA, 19 nt, Artificial Sequence
  Description of Artificial Sequence: Synthetic oligonucleotide
guguagccaaguacuuaac

SEQ ID NO: 1631575 - RNA, 19 nt, Artificial Sequence
  Description of Artificial Sequence: Synthetic oligonucleotide
cuggcgggugaguguggcc

SEQ ID NO: 1631576 - RNA, 19 nt, Artificial Sequence
  Description of Artificial Sequence: Synthetic oligonucleotide
ggcgcgugagcgcauugug

SEQ ID NO: 1631577 - RNA, 19 nt, Artificial Sequence
  Description of Artificial Sequence: Synthetic oligonucleotide
cagccuagugaggucccgc

SEQ ID NO: 1631578 - RNA, 19 nt, Artificial Sequence
  Description of Artificial Sequence: Synthetic oligonucleotide
auuugcccuugaacgucag

SEQ ID NO: 1631579 - RNA, 19 nt, Artificial Sequence
  Description of Artificial Sequence: Synthetic oligonucleotide
gacaggucccgaagagaca

SEQ ID NO: 1631580 - RNA, 19 nt, Artificial Sequence
  Description of Artificial Sequence: Synthetic oligonucleotide
gcaaaauggugcggaauga

SEQ ID NO: 1631581 - RNA, 19 nt, Artificial Sequence
  Description of Artificial Sequence: Synthetic oligonucleotide
auggcaccuggccuuggua

SEQ ID NO: 1631582 - RNA, 19 nt, Artificial Sequence
  Description of Artificial Sequence: Synthetic oligonucleotide
gggacucugaccagaguca

SEQ ID NO: 1631583 - RNA, 19 nt, Artificial Sequence
  Description of Artificial Sequence: Synthetic oligonucleotide
caacucugugagccucaac

SEQ ID NO: 1631584 - RNA, 19 nt, Artificial Sequence
  Description of Artificial Sequence: Synthetic oligonucleotide
gcggaaugaacgagggaug

SEQ ID NO: 1631585 - RNA, 19 nt, Artificial Sequence
  Description of Artificial Sequence: Synthetic oligonucleotide
ggagacgcaggcgcgugag

SEQ ID NO: 1631586 - RNA, 19 nt, Artificial Sequence
  Description of Artificial Sequence: Synthetic oligonucleotide
agcaacucugugagccuca

SEQ ID NO: 1631587 - RNA, 19 nt, Artificial Sequence
  Description of Artificial Sequence: Synthetic oligonucleotide
gucccgcaaaauggugcgg

SEQ ID NO: 1631588 - RNA, 19 nt, Artificial Sequence
  Description of Artificial Sequence: Synthetic oligonucleotide
cucagagggucgacgaccu

SEQ ID NO: 1631589 - RNA, 19 nt, Artificial Sequence
  Description of Artificial Sequence: Synthetic oligonucleotide
cguuccagcaacucuguga

SEQ ID NO: 1631590 - RNA, 19 nt, Artificial Sequence
  Description of Artificial Sequence: Synthetic oligonucleotide
caagaaucgccggaagacu

SEQ ID NO: 1631591 - RNA, 19 nt, Artificial Sequence
  Description of Artificial Sequence: Synthetic oligonucleotide
cagggacaucugucaggcc

SEQ ID NO: 1631592 - RNA, 19 nt, Artificial Sequence
  Description of Artificial Sequence: Synthetic oligonucleotide
gccggaagacucugcggag

SEQ ID NO: 1631593 - RNA, 19 nt, Artificial Sequence
  Description of Artificial Sequence: Synthetic oligonucleotide
guaguacucguggccuuca

SEQ ID NO: 1631594 - RNA, 19 nt, Artificial Sequence
  Description of Artificial Sequence: Synthetic oligonucleotide
ggacucugaccagagucac

SEQ ID NO: 1631595 - RNA, 19 nt, Artificial Sequence
  Description of Artificial Sequence: Synthetic oligonucleotide
ccuaagcucucauucuuaa

SEQ ID NO: 1631596 - RNA, 19 nt, Artificial Sequence
  Description of Artificial Sequence: Synthetic oligonucleotide
ugcggagacgcaggcgcgu

SEQ ID NO: 1631597 - RNA, 19 nt, Artificial Sequence
  Description of Artificial Sequence: Synthetic oligonucleotide
ggcacugccuucaaugugu

SEQ ID NO: 1631598 - RNA, 19 nt, Artificial Sequence
  Description of Artificial Sequence: Synthetic oligonucleotide
cucgcccaauucccggauc

SEQ ID NO: 1631599 - RNA, 19 nt, Artificial Sequence
  Description of Artificial Sequence: Synthetic oligonucleotide
cuccacguuccagcaacuc

SEQ ID NO: 1631600 - RNA, 19 nt, Artificial Sequence
  Description of Artificial Sequence: Synthetic oligonucleotide
cugagauacccacuagauu

SEQ ID NO: 1631601 - RNA, 19 nt, Artificial Sequence
  Description of Artificial Sequence: Synthetic oligonucleotide
ggaugugcuggcggaauga

SEQ ID NO: 1631602 - RNA, 19 nt, Artificial Sequence
  Description of Artificial Sequence: Synthetic oligonucleotide
uagaucucacagggacauc

SEQ ID NO: 1631603 - RNA, 19 nt, Artificial Sequence
  Description of Artificial Sequence: Synthetic oligonucleotide
guccucgcgcacgcgguag

SEQ ID NO: 1631604 - RNA, 19 nt, Artificial Sequence
  Description of Artificial Sequence: Synthetic oligonucleotide
cgcgguaguacucguggcc

SEQ ID NO: 1631605 - RNA, 19 nt, Artificial Sequence
  Description of Artificial Sequence: Synthetic oligonucleotide
cgcugugcugguucguagg

SEQ ID NO: 1631606 - RNA, 19 nt, Artificial Sequence
  Description of Artificial Sequence: Synthetic oligonucleotide
cucgcgcacgcgguaguac

SEQ ID NO: 1631607 - RNA, 19 nt, Artificial Sequence
  Description of Artificial Sequence: Synthetic oligonucleotide
gcugaaaggcccgcaagaa

SEQ ID NO: 1631608 - RNA, 19 nt, Artificial Sequence
  Description of Artificial Sequence: Synthetic oligonucleotide
caguacgucaacagcucau

SEQ ID NO: 1631609 - RNA, 19 nt, Artificial Sequence
  Description of Artificial Sequence: Synthetic oligonucleotide
cugaaaggcccgcaagaau

SEQ ID NO: 1631610 - RNA, 19 nt, Artificial Sequence
  Description of Artificial Sequence: Synthetic oligonucleotide
aggcgcgugagcgcauugu

SEQ ID NO: 1631611 - RNA, 19 nt, Artificial Sequence
  Description of Artificial Sequence: Synthetic oligonucleotide
cagcuccgggcaugagggc

SEQ ID NO: 1631612 - RNA, 19 nt, Artificial Sequence
  Description of Artificial Sequence: Synthetic oligonucleotide
ccguaggauuucgaucucc

SEQ ID NO: 1631613 - RNA, 19 nt, Artificial Sequence
  Description of Artificial Sequence: Synthetic oligonucleotide
ggcgggugaguguggccag

SEQ ID NO: 1631614 - RNA, 19 nt, Artificial Sequence
  Description of Artificial Sequence: Synthetic oligonucleotide
caguguagccaaguacuua

SEQ ID NO: 1631615 - RNA, 19 nt, Artificial Sequence
  Description of Artificial Sequence: Synthetic oligonucleotide
aggccaugccuaagcucuc

SEQ ID NO: 1631616 - RNA, 19 nt, Artificial Sequence
  Description of Artificial Sequence: Synthetic oligonucleotide
gcgcacgcgguaguacucg

SEQ ID NO: 1631617 - RNA, 19 nt, Artificial Sequence
  Description of Artificial Sequence: Synthetic oligonucleotide
cgagggaugcauuucuuaa

SEQ ID NO: 1631618 - RNA, 19 nt, Artificial Sequence
  Description of Artificial Sequence: Synthetic oligonucleotide
guacaggguccguaggauu

SEQ ID NO: 1631619 - RNA, 19 nt, Artificial Sequence
  Description of Artificial Sequence: Synthetic oligonucleotide
ccuagugaggucccgcaaa

SEQ ID NO: 1631620 - RNA, 19 nt, Artificial Sequence
  Description of Artificial Sequence: Synthetic oligonucleotide
ggaaaacagugggaucuaa

SEQ ID NO: 1631621 - RNA, 19 nt, Artificial Sequence
  Description of Artificial Sequence: Synthetic oligonucleotide
cuaaugcuguagagucugu

SEQ ID NO: 1631622 - RNA, 19 nt, Artificial Sequence
  Description of Artificial Sequence: Synthetic oligonucleotide
gagggucgacgaccuugca

SEQ ID NO: 1631623 - RNA, 19 nt, Artificial Sequence
  Description of Artificial Sequence: Synthetic oligonucleotide
gaccagagucacaguacgu

SEQ ID NO: 1631624 - RNA, 19 nt, Artificial Sequence
  Description of Artificial Sequence: Synthetic oligonucleotide
cacguuccagcaacucugu

SEQ ID NO: 1631625 - RNA, 19 nt, Artificial Sequence
  Description of Artificial Sequence: Synthetic oligonucleotide
ggccucugacucccagcag

SEQ ID NO: 1631626 - RNA, 19 nt, Artificial Sequence
  Description of Artificial Sequence: Synthetic oligonucleotide
aucucgccagugccaucau

SEQ ID NO: 1631627 - RNA, 19 nt, Artificial Sequence
  Description of Artificial Sequence: Synthetic oligonucleotide
gcagccuagugaggucccg

SEQ ID NO: 1631628 - RNA, 19 nt, Artificial Sequence
  Description of Artificial Sequence: Synthetic oligonucleotide
gcgcgugagcgcauugugc

SEQ ID NO: 1631629 - RNA, 19 nt, Artificial Sequence
  Description of Artificial Sequence: Synthetic oligonucleotide
caggcgcgugagcgcauug

SEQ ID NO: 1631630 - RNA, 19 nt, Artificial Sequence
  Description of Artificial Sequence: Synthetic oligonucleotide
cgaucucccgcugccagcc

SEQ ID NO: 1631631 - RNA, 19 nt, Artificial Sequence
  Description of Artificial Sequence: Synthetic oligonucleotide
aggguccguaggauuucga

SEQ ID NO: 1631632 - RNA, 19 nt, Artificial Sequence
  Description of Artificial Sequence: Synthetic oligonucleotide
ccgcugugcugguucguag

SEQ ID NO: 1631633 - RNA, 19 nt, Artificial Sequence
  Description of Artificial Sequence: Synthetic oligonucleotide
ggguccguaggauuucgau

SEQ ID NO: 1631634 - RNA, 19 nt, Artificial Sequence
  Description of Artificial Sequence: Synthetic oligonucleotide
gguggaucucuuccucacu

SEQ ID NO: 1631635 - RNA, 19 nt, Artificial Sequence
  Description of Artificial Sequence: Synthetic oligonucleotide
caccuggccuugguacuuc

SEQ ID NO: 1631636 - RNA, 19 nt, Artificial Sequence
  Description of Artificial Sequence: Synthetic oligonucleotide
gcccgcaagaaucgccgga

SEQ ID NO: 1631637 - RNA, 19 nt, Artificial Sequence
  Description of Artificial Sequence: Synthetic oligonucleotide
cgccggaagacucugcgga

SEQ ID NO: 1631638 - RNA, 19 nt, Artificial Sequence
  Description of Artificial Sequence: Synthetic oligonucleotide
caucccuccuuaagggcuu

SEQ ID NO: 1631639 - RNA, 19 nt, Artificial Sequence
  Description of Artificial Sequence: Synthetic oligonucleotide
ggucccgaagagacaccac

SEQ ID NO: 1631640 - RNA, 19 nt, Artificial Sequence
  Description of Artificial Sequence: Synthetic oligonucleotide
gcgguaguacucguggccu

SEQ ID NO: 1631641 - RNA, 19 nt, Artificial Sequence
  Description of Artificial Sequence: Synthetic oligonucleotide
gcacgcgguaguacucgug

SEQ ID NO: 1631642 - RNA, 19 nt, Artificial Sequence
  Description of Artificial Sequence: Synthetic oligonucleotide
gccuagugaggucccgcaa

SEQ ID NO: 1631643 - RNA, 19 nt, Artificial Sequence
  Description of Artificial Sequence: Synthetic oligonucleotide
ccuugaacgucagcacaca

SEQ ID NO: 1631644 - RNA, 19 nt, Artificial Sequence
  Description of Artificial Sequence: Synthetic oligonucleotide
gccuaagcucucauucuua

SEQ ID NO: 1631645 - RNA, 19 nt, Artificial Sequence
  Description of Artificial Sequence: Synthetic oligonucleotide
ggaccacaucccuccuuaa

SEQ ID NO: 1631646 - RNA, 19 nt, Artificial Sequence
  Description of Artificial Sequence: Synthetic oligonucleotide
ggccaugccuaagcucuca

SEQ ID NO: 1631647 - RNA, 19 nt, Artificial Sequence
  Description of Artificial Sequence: Synthetic oligonucleotide
cgcgugagcgcauugugcu

SEQ ID NO: 1631648 - RNA, 19 nt, Artificial Sequence
  Description of Artificial Sequence: Synthetic oligonucleotide
gcacaagauucuggaaggu

SEQ ID NO: 1631649 - RNA, 19 nt, Artificial Sequence
  Description of Artificial Sequence: Synthetic oligonucleotide
aucccuccuuaagggcuuu

SEQ ID NO: 1631650 - RNA, 19 nt, Artificial Sequence
  Description of Artificial Sequence: Synthetic oligonucleotide
gccagccgcuccaguguag

SEQ ID NO: 1631651 - RNA, 19 nt, Artificial Sequence
  Description of Artificial Sequence: Synthetic oligonucleotide
cccgcaagaaucgccggaa

SEQ ID NO: 1631652 - RNA, 19 nt, Artificial Sequence
  Description of Artificial Sequence: Synthetic oligonucleotide
gcaacucugugagccucaa

SEQ ID NO: 1631653 - RNA, 19 nt, Artificial Sequence
  Description of Artificial Sequence: Synthetic oligonucleotide
cccgcaaaauggugcggaa

SEQ ID NO: 1631654 - RNA, 19 nt, Artificial Sequence
  Description of Artificial Sequence: Synthetic oligonucleotide
gcggaaugauggccgcugu

SEQ ID NO: 1631655 - RNA, 19 nt, Artificial Sequence
  Description of Artificial Sequence: Synthetic oligonucleotide
cgcgcacgcgguaguacuc

SEQ ID NO: 1631656 - RNA, 19 nt, Artificial Sequence
  Description of Artificial Sequence: Synthetic oligonucleotide
gugcggaaugauggccgcu

SEQ ID NO: 1631657 - RNA, 19 nt, Artificial Sequence
  Description of Artificial Sequence: Synthetic oligonucleotide
gccaugccuaagcucucau

SEQ ID NO: 1631658 - RNA, 19 nt, Artificial Sequence
  Description of Artificial Sequence: Synthetic oligonucleotide
cgacgaccuugcaggggug

SEQ ID NO: 1631659 - RNA, 19 nt, Artificial Sequence
  Description of Artificial Sequence: Synthetic oligonucleotide
ccgcuccaguguagccaag

SEQ ID NO: 1631660 - RNA, 19 nt, Artificial Sequence
  Description of Artificial Sequence: Synthetic oligonucleotide
ggcccugggugacuccgau

SEQ ID NO: 1631661 - RNA, 19 nt, Artificial Sequence
  Description of Artificial Sequence: Synthetic oligonucleotide
ccaugccuaagcucucauu

SEQ ID NO: 1631662 - RNA, 19 nt, Artificial Sequence
  Description of Artificial Sequence: Synthetic oligonucleotide
ccgcaaaauggugcggaau

SEQ ID NO: 1631663 - RNA, 19 nt, Artificial Sequence
  Description of Artificial Sequence: Synthetic oligonucleotide
cggagacgcaggcgcguga

SEQ ID NO: 1631664 - RNA, 19 nt, Artificial Sequence
  Description of Artificial Sequence: Synthetic oligonucleotide
gcgcauugugcuggcggau

SEQ ID NO: 1631665 - RNA, 19 nt, Artificial Sequence
  Description of Artificial Sequence: Synthetic oligonucleotide
ccucgcccaauucccggau

SEQ ID NO: 1631666 - RNA, 19 nt, Artificial Sequence
  Description of Artificial Sequence: Synthetic oligonucleotide
gggccggaaggaggccucu

SEQ ID NO: 1631667 - RNA, 19 nt, Artificial Sequence
  Description of Artificial Sequence: Synthetic oligonucleotide
ccucgcgcacgcgguagua

SEQ ID NO: 1631668 - RNA, 19 nt, Artificial Sequence
  Description of Artificial Sequence: Synthetic oligonucleotide
cgcacgcgguaguacucgu

SEQ ID NO: 1631669 - RNA, 19 nt, Artificial Sequence
  Description of Artificial Sequence: Synthetic oligonucleotide
gcaggcgcgugagcgcauu

SEQ ID NO: 1631670 - RNA, 19 nt, Artificial Sequence
  Description of Artificial Sequence: Synthetic oligonucleotide
cguccucgcgcacgcggua

SEQ ID NO: 1631671 - RNA, 19 nt, Artificial Sequence
  Description of Artificial Sequence: Synthetic oligonucleotide
aacguuuucaaauuuucac

SEQ ID NO: 1631672 - RNA, 19 nt, Artificial Sequence
  Description of Artificial Sequence: Synthetic oligonucleotide
uugacaaagaaccaguucc

SEQ ID NO: 1631673 - RNA, 19 nt, Artificial Sequence
  Description of Artificial Sequence: Synthetic oligonucleotide
ugaauggcaauacaaaucc

SEQ ID NO: 1631674 - RNA, 19 nt, Artificial Sequence
  Description of Artificial Sequence: Synthetic oligonucleotide
uuuaccuugaccuugcagc

SEQ ID NO: 1631675 - RNA, 19 nt, Artificial Sequence
  Description of Artificial Sequence: Synthetic oligonucleotide
aaugauggaaacgagcgac

SEQ ID NO: 1631676 - RNA, 19 nt, Artificial Sequence
  Description of Artificial Sequence: Synthetic oligonucleotide
uuuuauaaccaguggaagg

SEQ ID NO: 1631677 - RNA, 19 nt, Artificial Sequence
  Description of Artificial Sequence: Synthetic oligonucleotide
ucuaauuuaauuucaacau

SEQ ID NO: 1631678 - RNA, 19 nt, Artificial Sequence
  Description of Artificial Sequence: Synthetic oligonucleotide
ugauucagcaaucugacga

SEQ ID NO: 1631679 - RNA, 19 nt, Artificial Sequence
  Description of Artificial Sequence: Synthetic oligonucleotide
uuuauaaccaguggaaggg

SEQ ID NO: 1631680 - RNA, 19 nt, Artificial Sequence
  Description of Artificial Sequence: Synthetic oligonucleotide
uuagcgaacaugaaugaag

SEQ ID NO: 1631681 - RNA, 19 nt, Artificial Sequence
  Description of Artificial Sequence: Synthetic oligonucleotide
uagggaacuauugagaggg

SEQ ID NO: 1631682 - RNA, 19 nt, Artificial Sequence
  Description of Artificial Sequence: Synthetic oligonucleotide
uuaccaauggacaggagag

SEQ ID NO: 1631683 - RNA, 19 nt, Artificial Sequence
  Description of Artificial Sequence: Synthetic oligonucleotide
uccuuuauuaccaauggac

SEQ ID NO: 1631684 - RNA, 19 nt, Artificial Sequence
  Description of Artificial Sequence: Synthetic oligonucleotide
guguccaaaauacagaaag

SEQ ID NO: 1631685 - RNA, 19 nt, Artificial Sequence
  Description of Artificial Sequence: Synthetic oligonucleotide
ucuugaauccuguagccgg

SEQ ID NO: 1631686 - RNA, 19 nt, Artificial Sequence
  Description of Artificial Sequence: Synthetic oligonucleotide
gaugcaaaauacaaucucg

SEQ ID NO: 1631687 - RNA, 19 nt, Artificial Sequence
  Description of Artificial Sequence: Synthetic oligonucleotide
caauuagcgaacaugaaug

SEQ ID NO: 1631688 - RNA, 19 nt, Artificial Sequence
  Description of Artificial Sequence: Synthetic oligonucleotide
uaugguguaacaauagggu

SEQ ID NO: 1631689 - RNA, 19 nt, Artificial Sequence
  Description of Artificial Sequence: Synthetic oligonucleotide
uccaaaauacagaaaggcc

SEQ ID NO: 1631690 - RNA, 19 nt, Artificial Sequence
  Description of Artificial Sequence: Synthetic oligonucleotide
aaaacgaggaauguaucuc

SEQ ID NO: 1631691 - RNA, 19 nt, Artificial Sequence
  Description of Artificial Sequence: Synthetic oligonucleotide
ugacucuuuaccuugaccu

SEQ ID NO: 1631692 - RNA, 19 nt, Artificial Sequence
  Description of Artificial Sequence: Synthetic oligonucleotide
ucuucguuaguaaaacgag

SEQ ID NO: 1631693 - RNA, 19 nt, Artificial Sequence
  Description of Artificial Sequence: Synthetic oligonucleotide
uucguuaguaaaacgagga

SEQ ID NO: 1631694 - RNA, 19 nt, Artificial Sequence
  Description of Artificial Sequence: Synthetic oligonucleotide
uauugagaggguaaaguug

SEQ ID NO: 1631695 - RNA, 19 nt, Artificial Sequence
  Description of Artificial Sequence: Synthetic oligonucleotide
ugcauuuagaaaugccugg

SEQ ID NO: 1631696 - RNA, 19 nt, Artificial Sequence
  Description of Artificial Sequence: Synthetic oligonucleotide
aauguaucucacaacggac

SEQ ID NO: 1631697 - RNA, 19 nt, Artificial Sequence
  Description of Artificial Sequence: Synthetic oligonucleotide
auaaaguugaccggguggc

SEQ ID NO: 1631698 - RNA, 19 nt, Artificial Sequence
  Description of Artificial Sequence: Synthetic oligonucleotide
cuuuauuaccaauggacag

SEQ ID NO: 1631699 - RNA, 19 nt, Artificial Sequence
  Description of Artificial Sequence: Synthetic oligonucleotide
aauacaaucucgaucccag

SEQ ID NO: 1631700 - RNA, 19 nt, Artificial Sequence
  Description of Artificial Sequence: Synthetic oligonucleotide
ucaauuagcgaacaugaau

SEQ ID NO: 1631701 - RNA, 19 nt, Artificial Sequence
  Description of Artificial Sequence: Synthetic oligonucleotide
aacaaaagucucagcaacc

SEQ ID NO: 1631702 - RNA, 19 nt, Artificial Sequence
  Description of Artificial Sequence: Synthetic oligonucleotide
cagaauccuauaaacagcc

SEQ ID NO: 1631703 - RNA, 19 nt, Artificial Sequence
  Description of Artificial Sequence: Synthetic oligonucleotide
ugaggucaugaaaagcugg

SEQ ID NO: 1631704 - RNA, 19 nt, Artificial Sequence
  Description of Artificial Sequence: Synthetic oligonucleotide
auuaccaauggacaggaga

SEQ ID NO: 1631705 - RNA, 19 nt, Artificial Sequence
  Description of Artificial Sequence: Synthetic oligonucleotide
guuaguaaaacgaggaaug

SEQ ID NO: 1631706 - RNA, 19 nt, Artificial Sequence
  Description of Artificial Sequence: Synthetic oligonucleotide
accaauucaagucuugaug

SEQ ID NO: 1631707 - RNA, 19 nt, Artificial Sequence
  Description of Artificial Sequence: Synthetic oligonucleotide
aagaucaaucaguccaguc

SEQ ID NO: 1631708 - RNA, 19 nt, Artificial Sequence
  Description of Artificial Sequence: Synthetic oligonucleotide
cauaaaguugaccgggugg

SEQ ID NO: 1631709 - RNA, 19 nt, Artificial Sequence
  Description of Artificial Sequence: Synthetic oligonucleotide
gaauccuauaaacagccac

SEQ ID NO: 1631710 - RNA, 19 nt, Artificial Sequence
  Description of Artificial Sequence: Synthetic oligonucleotide
aauuagcgaacaugaauga

SEQ ID NO: 1631711 - RNA, 19 nt, Artificial Sequence
  Description of Artificial Sequence: Synthetic oligonucleotide
aagggcgugagucugguca

SEQ ID NO: 1631712 - RNA, 19 nt, Artificial Sequence
  Description of Artificial Sequence: Synthetic oligonucleotide
uggucaagagccaccaagg

SEQ ID NO: 1631713 - RNA, 19 nt, Artificial Sequence
  Description of Artificial Sequence: Synthetic oligonucleotide
aaaccugucacugugucca

SEQ ID NO: 1631714 - RNA, 19 nt, Artificial Sequence
  Description of Artificial Sequence: Synthetic oligonucleotide
uaaaacgaggaauguaucu

SEQ ID NO: 1631715 - RNA, 19 nt, Artificial Sequence
  Description of Artificial Sequence: Synthetic oligonucleotide
ugaacaaccugguagccca

SEQ ID NO: 1631716 - RNA, 19 nt, Artificial Sequence
  Description of Artificial Sequence: Synthetic oligonucleotide
ucuucgucuaauuuaauuu

SEQ ID NO: 1631717 - RNA, 19 nt, Artificial Sequence
  Description of Artificial Sequence: Synthetic oligonucleotide
cuuccuaaauaaagcaggg

SEQ ID NO: 1631718 - RNA, 19 nt, Artificial Sequence
  Description of Artificial Sequence: Synthetic oligonucleotide
ugguguaacaauagggugu

SEQ ID NO: 1631719 - RNA, 19 nt, Artificial Sequence
  Description of Artificial Sequence: Synthetic oligonucleotide
auggaaacgagcgaccagc

SEQ ID NO: 1631720 - RNA, 19 nt, Artificial Sequence
  Description of Artificial Sequence: Synthetic oligonucleotide
aacgguucgauugauucag

SEQ ID NO: 1631721 - RNA, 19 nt, Artificial Sequence
  Description of Artificial Sequence: Synthetic oligonucleotide
gaauguaucucacaacgga

SEQ ID NO: 1631722 - RNA, 19 nt, Artificial Sequence
  Description of Artificial Sequence: Synthetic oligonucleotide
cuucguuaguaaaacgagg

SEQ ID NO: 1631723 - RNA, 19 nt, Artificial Sequence
  Description of Artificial Sequence: Synthetic oligonucleotide
uucaguagcaacuguggug

SEQ ID NO: 1631724 - RNA, 19 nt, Artificial Sequence
  Description of Artificial Sequence: Synthetic oligonucleotide
aacgacuucacaugauacu

SEQ ID NO: 1631725 - RNA, 19 nt, Artificial Sequence
  Description of Artificial Sequence: Synthetic oligonucleotide
augacucuuuaccuugacc

SEQ ID NO: 1631726 - RNA, 19 nt, Artificial Sequence
  Description of Artificial Sequence: Synthetic oligonucleotide
cuacaugccgcucuaacgc

SEQ ID NO: 1631727 - RNA, 19 nt, Artificial Sequence
  Description of Artificial Sequence: Synthetic oligonucleotide
uuuucugacuggcaaacaa

SEQ ID NO: 1631728 - RNA, 19 nt, Artificial Sequence
  Description of Artificial Sequence: Synthetic oligonucleotide
uucgucuaauuuaauuuca

SEQ ID NO: 1631729 - RNA, 19 nt, Artificial Sequence
  Description of Artificial Sequence: Synthetic oligonucleotide
cuugcccaauuuuauaacc

SEQ ID NO: 1631730 - RNA, 19 nt, Artificial Sequence
  Description of Artificial Sequence: Synthetic oligonucleotide
ugggcuuagaaagaauccg

SEQ ID NO: 1631731 - RNA, 19 nt, Artificial Sequence
  Description of Artificial Sequence: Synthetic oligonucleotide
gaaacgagcgaccagcaca

SEQ ID NO: 1631732 - RNA, 19 nt, Artificial Sequence
  Description of Artificial Sequence: Synthetic oligonucleotide
uagugucagcgcaaaaccg

SEQ ID NO: 1631733 - RNA, 19 nt, Artificial Sequence
  Description of Artificial Sequence: Synthetic oligonucleotide
auucaauuagcgaacauga

SEQ ID NO: 1631734 - RNA, 19 nt, Artificial Sequence
  Description of Artificial Sequence: Synthetic oligonucleotide
uugaugcaaaauacaaucu

SEQ ID NO: 1631735 - RNA, 19 nt, Artificial Sequence
  Description of Artificial Sequence: Synthetic oligonucleotide
agcgcaaaaccgcuguggc

SEQ ID NO: 1631736 - RNA, 19 nt, Artificial Sequence
  Description of Artificial Sequence: Synthetic oligonucleotide
cucagcaaccauauugagg

SEQ ID NO: 1631737 - RNA, 19 nt, Artificial Sequence
  Description of Artificial Sequence: Synthetic oligonucleotide
gacaggagagcuuugagaa

SEQ ID NO: 1631738 - RNA, 19 nt, Artificial Sequence
  Description of Artificial Sequence: Synthetic oligonucleotide
caaacgguucgauugauuc

SEQ ID NO: 1631739 - RNA, 19 nt, Artificial Sequence
  Description of Artificial Sequence: Synthetic oligonucleotide
acguuuucaaauuuucaca

SEQ ID NO: 1631740 - RNA, 19 nt, Artificial Sequence
  Description of Artificial Sequence: Synthetic oligonucleotide
uagcgaacaugaaugaaga

SEQ ID NO: 1631741 - RNA, 19 nt, Artificial Sequence
  Description of Artificial Sequence: Synthetic oligonucleotide
ggugucaacacuuuugaug

SEQ ID NO: 1631742 - RNA, 19 nt, Artificial Sequence
  Description of Artificial Sequence: Synthetic oligonucleotide
agaaagcuucaguagcaac

SEQ ID NO: 1631743 - RNA, 19 nt, Artificial Sequence
  Description of Artificial Sequence: Synthetic oligonucleotide
uggcaauacaaauccaucu

SEQ ID NO: 1631744 - RNA, 19 nt, Artificial Sequence
  Description of Artificial Sequence: Synthetic oligonucleotide
aauuuucacacugcaguug

SEQ ID NO: 1631745 - RNA, 19 nt, Artificial Sequence
  Description of Artificial Sequence: Synthetic oligonucleotide
gacuucacaugauacugag

SEQ ID NO: 1631746 - RNA, 19 nt, Artificial Sequence
  Description of Artificial Sequence: Synthetic oligonucleotide
uacuccaccaauucaaguc

SEQ ID NO: 1631747 - RNA, 19 nt, Artificial Sequence
  Description of Artificial Sequence: Synthetic oligonucleotide
aaacgagcgaccagcacac

SEQ ID NO: 1631748 - RNA, 19 nt, Artificial Sequence
  Description of Artificial Sequence: Synthetic oligonucleotide
aguaaaacgaggaauguau

SEQ ID NO: 1631749 - RNA, 19 nt, Artificial Sequence
  Description of Artificial Sequence: Synthetic oligonucleotide
acaaucucgaucccagaag

SEQ ID NO: 1631750 - RNA, 19 nt, Artificial Sequence
  Description of Artificial Sequence: Synthetic oligonucleotide
agaggguaaaguuguugac

SEQ ID NO: 1631751 - RNA, 19 nt, Artificial Sequence
  Description of Artificial Sequence: Synthetic oligonucleotide
uagggugucaacacuuuug

SEQ ID NO: 1631752 - RNA, 19 nt, Artificial Sequence
  Description of Artificial Sequence: Synthetic oligonucleotide
uaacaauagggugucaaca

SEQ ID NO: 1631753 - RNA, 19 nt, Artificial Sequence
  Description of Artificial Sequence: Synthetic oligonucleotide
cuucgucuaauuuaauuuc

SEQ ID NO: 1631754 - RNA, 19 nt, Artificial Sequence
  Description of Artificial Sequence: Synthetic oligonucleotide
aguuccagugccucacagc

SEQ ID NO: 1631755 - RNA, 19 nt, Artificial Sequence
  Description of Artificial Sequence: Synthetic oligonucleotide
ucugacuggcaaacaaaag

SEQ ID NO: 1631756 - RNA, 19 nt, Artificial Sequence
  Description of Artificial Sequence: Synthetic oligonucleotide
uaaagcaggggcauuuggu

SEQ ID NO: 1631757 - RNA, 19 nt, Artificial Sequence
  Description of Artificial Sequence: Synthetic oligonucleotide
caaacguuuucaaauuuuc

SEQ ID NO: 1631758 - RNA, 19 nt, Artificial Sequence
  Description of Artificial Sequence: Synthetic oligonucleotide
aauggcaauacaaauccau

SEQ ID NO: 1631759 - RNA, 19 nt, Artificial Sequence
  Description of Artificial Sequence: Synthetic oligonucleotide
uauagaaaggggcacucua

SEQ ID NO: 1631760 - RNA, 19 nt, Artificial Sequence
  Description of Artificial Sequence: Synthetic oligonucleotide
uccuuuguaaauacuccac

SEQ ID NO: 1631761 - RNA, 19 nt, Artificial Sequence
  Description of Artificial Sequence: Synthetic oligonucleotide
auacagaaaggccuccaag

SEQ ID NO: 1631762 - RNA, 19 nt, Artificial Sequence
  Description of Artificial Sequence: Synthetic oligonucleotide
uccgugagaaaccugucac

SEQ ID NO: 1631763 - RNA, 19 nt, Artificial Sequence
  Description of Artificial Sequence: Synthetic oligonucleotide
uaucucacaacggacuugc

SEQ ID NO: 1631764 - RNA, 19 nt, Artificial Sequence
  Description of Artificial Sequence: Synthetic oligonucleotide
gagaggguaaaguuguuga

SEQ ID NO: 1631765 - RNA, 19 nt, Artificial Sequence
  Description of Artificial Sequence: Synthetic oligonucleotide
ugcccaauuuuauaaccag

SEQ ID NO: 1631766 - RNA, 19 nt, Artificial Sequence
  Description of Artificial Sequence: Synthetic oligonucleotide
aaacgguucgauugauuca

SEQ ID NO: 1631767 - RNA, 19 nt, Artificial Sequence
  Description of Artificial Sequence: Synthetic oligonucleotide
uuaccuugaccuugcagcc

SEQ ID NO: 1631768 - RNA, 19 nt, Artificial Sequence
  Description of Artificial Sequence: Synthetic oligonucleotide
cugcauuuagaaaugccug

SEQ ID NO: 1631769 - RNA, 19 nt, Artificial Sequence
  Description of Artificial Sequence: Synthetic oligonucleotide
gugagucuggucaagagcc

SEQ ID NO: 1631770 - RNA, 19 nt, Artificial Sequence
  Description of Artificial Sequence: Synthetic oligonucleotide
ggacuugggacucagguag

SEQ ID NO: 1631771 - RNA, 19 nt, Artificial Sequence
  Description of Artificial Sequence: Synthetic oligonucleotide
uauaaacagccacaauguc

SEQ ID NO: 1631772 - RNA, 19 nt, Artificial Sequence
  Description of Artificial Sequence: Synthetic oligonucleotide
uacaaucucgaucccagaa

SEQ ID NO: 1631773 - RNA, 19 nt, Artificial Sequence
  Description of Artificial Sequence: Synthetic oligonucleotide
acuauugagaggguaaagu

SEQ ID NO: 1631774 - RNA, 19 nt, Artificial Sequence
  Description of Artificial Sequence: Synthetic oligonucleotide
auugagaggguaaaguugu

SEQ ID NO: 1631775 - RNA, 19 nt, Artificial Sequence
  Description of Artificial Sequence: Synthetic oligonucleotide
cucuucguuaguaaaacga

SEQ ID NO: 1631776 - RNA, 19 nt, Artificial Sequence
  Description of Artificial Sequence: Synthetic oligonucleotide
ucaacaucuaugguguaac

SEQ ID NO: 1631777 - RNA, 19 nt, Artificial Sequence
  Description of Artificial Sequence: Synthetic oligonucleotide
uuccuaaauaaagcagggg

SEQ ID NO: 1631778 - RNA, 19 nt, Artificial Sequence
  Description of Artificial Sequence: Synthetic oligonucleotide
uguaacaauagggugucaa

SEQ ID NO: 1631779 - RNA, 19 nt, Artificial Sequence
  Description of Artificial Sequence: Synthetic oligonucleotide
uuucugacuggcaaacaaa

SEQ ID NO: 1631780 - RNA, 19 nt, Artificial Sequence
  Description of Artificial Sequence: Synthetic oligonucleotide
agcuacaugccgcucuaac

SEQ ID NO: 1631781 - RNA, 19 nt, Artificial Sequence
  Description of Artificial Sequence: Synthetic oligonucleotide
uuuugacauaaaguugacc

SEQ ID NO: 1631782 - RNA, 19 nt, Artificial Sequence
  Description of Artificial Sequence: Synthetic oligonucleotide
ugauagggaaccugaacaa

SEQ ID NO: 1631783 - RNA, 19 nt, Artificial Sequence
  Description of Artificial Sequence: Synthetic oligonucleotide
ucuaacgccuccgugagaa

SEQ ID NO: 1631784 - RNA, 19 nt, Artificial Sequence
  Description of Artificial Sequence: Synthetic oligonucleotide
aacgccuccgugagaaacc

SEQ ID NO: 1631785 - RNA, 19 nt, Artificial Sequence
  Description of Artificial Sequence: Synthetic oligonucleotide
aacuauugagaggguaaag

SEQ ID NO: 1631786 - RNA, 19 nt, Artificial Sequence
  Description of Artificial Sequence: Synthetic oligonucleotide
aaacguuuucaaauuuuca

SEQ ID NO: 1631787 - RNA, 19 nt, Artificial Sequence
  Description of Artificial Sequence: Synthetic oligonucleotide
gcaaaauacaaucucgauc

SEQ ID NO: 1631788 - RNA, 19 nt, Artificial Sequence
  Description of Artificial Sequence: Synthetic oligonucleotide
aacaucuaugguguaacaa

SEQ ID NO: 1631789 - RNA, 19 nt, Artificial Sequence
  Description of Artificial Sequence: Synthetic oligonucleotide
agugcugaugacaucgggg

SEQ ID NO: 1631790 - RNA, 19 nt, Artificial Sequence
  Description of Artificial Sequence: Synthetic oligonucleotide
cucacaacggacuugccca

SEQ ID NO: 1631791 - RNA, 19 nt, Artificial Sequence
  Description of Artificial Sequence: Synthetic oligonucleotide
gacuugcccaauuuuauaa

SEQ ID NO: 1631792 - RNA, 19 nt, Artificial Sequence
  Description of Artificial Sequence: Synthetic oligonucleotide
guaacaauagggugucaac

SEQ ID NO: 1631793 - RNA, 19 nt, Artificial Sequence
  Description of Artificial Sequence: Synthetic oligonucleotide
caugauagggaaccugaac

SEQ ID NO: 1631794 - RNA, 19 nt, Artificial Sequence
  Description of Artificial Sequence: Synthetic oligonucleotide
ugcaguugacaaagaacca

SEQ ID NO: 1631795 - RNA, 19 nt, Artificial Sequence
  Description of Artificial Sequence: Synthetic oligonucleotide
uccagggagcagcauggcg

SEQ ID NO: 1631796 - RNA, 19 nt, Artificial Sequence
  Description of Artificial Sequence: Synthetic oligonucleotide
aaaccgcuguggcccaucg

SEQ ID NO: 1631797 - RNA, 19 nt, Artificial Sequence
  Description of Artificial Sequence: Synthetic oligonucleotide
aaucugacgaggugagaau

SEQ ID NO: 1631798 - RNA, 19 nt, Artificial Sequence
  Description of Artificial Sequence: Synthetic oligonucleotide
uguaucucacaacggacuu

SEQ ID NO: 1631799 - RNA, 19 nt, Artificial Sequence
  Description of Artificial Sequence: Synthetic oligonucleotide
gauggaaacgagcgaccag

SEQ ID NO: 1631800 - RNA, 19 nt, Artificial Sequence
  Description of Artificial Sequence: Synthetic oligonucleotide
uucgauugauucagcaauc

SEQ ID NO: 1631801 - RNA, 19 nt, Artificial Sequence
  Description of Artificial Sequence: Synthetic oligonucleotide
acauaaaguugaccgggug

SEQ ID NO: 1631802 - RNA, 19 nt, Artificial Sequence
  Description of Artificial Sequence: Synthetic oligonucleotide
agccgguuuccuuuauuac

SEQ ID NO: 1631803 - RNA, 19 nt, Artificial Sequence
  Description of Artificial Sequence: Synthetic oligonucleotide
uccagcucaugauagggaa

SEQ ID NO: 1631804 - RNA, 19 nt, Artificial Sequence
  Description of Artificial Sequence: Synthetic oligonucleotide
cucagguagggaacuauug

SEQ ID NO: 1631805 - RNA, 19 nt, Artificial Sequence
  Description of Artificial Sequence: Synthetic oligonucleotide
auacugaggaaggagcuug

SEQ ID NO: 1631806 - RNA, 19 nt, Artificial Sequence
  Description of Artificial Sequence: Synthetic oligonucleotide
uuccaaacgguucgauuga

SEQ ID NO: 1631807 - RNA, 19 nt, Artificial Sequence
  Description of Artificial Sequence: Synthetic oligonucleotide
ggucaugaaaagcugggug

SEQ ID NO: 1631808 - RNA, 19 nt, Artificial Sequence
  Description of Artificial Sequence: Synthetic oligonucleotide
auggcaauacaaauccauc

SEQ ID NO: 1631809 - RNA, 19 nt, Artificial Sequence
  Description of Artificial Sequence: Synthetic oligonucleotide
aacaaccugguagcccagc

SEQ ID NO: 1631810 - RNA, 19 nt, Artificial Sequence
  Description of Artificial Sequence: Synthetic oligonucleotide
uucaauuagcgaacaugaa

SEQ ID NO: 1631811 - RNA, 19 nt, Artificial Sequence
  Description of Artificial Sequence: Synthetic oligonucleotide
ucgucuaauuuaauuucaa

SEQ ID NO: 1631812 - RNA, 19 nt, Artificial Sequence
  Description of Artificial Sequence: Synthetic oligonucleotide
ucguuaguaaaacgaggaa

SEQ ID NO: 1631813 - RNA, 19 nt, Artificial Sequence
  Description of Artificial Sequence: Synthetic oligonucleotide
cuuuaccuugaccuugcag

SEQ ID NO: 1631814 - RNA, 19 nt, Artificial Sequence
  Description of Artificial Sequence: Synthetic oligonucleotide
aucuucgucuaauuuaauu

SEQ ID NO: 1631815 - RNA, 19 nt, Artificial Sequence
  Description of Artificial Sequence: Synthetic oligonucleotide
uggcucacggacuugggac

SEQ ID NO: 1631816 - RNA, 19 nt, Artificial Sequence
  Description of Artificial Sequence: Synthetic oligonucleotide
acaaaagucucagcaacca

SEQ ID NO: 1631817 - RNA, 19 nt, Artificial Sequence
  Description of Artificial Sequence: Synthetic oligonucleotide
agaagaucaaucaguccag

SEQ ID NO: 1631818 - RNA, 19 nt, Artificial Sequence
  Description of Artificial Sequence: Synthetic oligonucleotide
augauggaaacgagcgacc

SEQ ID NO: 1631819 - RNA, 19 nt, Artificial Sequence
  Description of Artificial Sequence: Synthetic oligonucleotide
gcuacaugccgcucuaacg

SEQ ID NO: 1631820 - RNA, 19 nt, Artificial Sequence
  Description of Artificial Sequence: Synthetic oligonucleotide
ggaaaugauggaaacgagc

SEQ ID NO: 1631821 - RNA, 19 nt, Artificial Sequence
  Description of Artificial Sequence: Synthetic oligonucleotide
gcaaccauauugaggaugg

SEQ ID NO: 1631822 - RNA, 19 nt, Artificial Sequence
  Description of Artificial Sequence: Synthetic oligonucleotide
gaacgacuucacaugauac

SEQ ID NO: 1631823 - RNA, 19 nt, Artificial Sequence
  Description of Artificial Sequence: Synthetic oligonucleotide
auagaaaggggcacucuag

SEQ ID NO: 1631824 - RNA, 19 nt, Artificial Sequence
  Description of Artificial Sequence: Synthetic oligonucleotide
gugaauggcaauacaaauc

SEQ ID NO: 1631825 - RNA, 19 nt, Artificial Sequence
  Description of Artificial Sequence: Synthetic oligonucleotide
uguguccaaaauacagaaa

SEQ ID NO: 1631826 - RNA, 19 nt, Artificial Sequence
  Description of Artificial Sequence: Synthetic oligonucleotide
cucuuuaccuugaccuugc

SEQ ID NO: 1631827 - RNA, 19 nt, Artificial Sequence
  Description of Artificial Sequence: Synthetic oligonucleotide
acaugaaugaagaaagcuu

SEQ ID NO: 1631828 - RNA, 19 nt, Artificial Sequence
  Description of Artificial Sequence: Synthetic oligonucleotide
aggacugaggucaugaaaa

SEQ ID NO: 1631829 - RNA, 19 nt, Artificial Sequence
  Description of Artificial Sequence: Synthetic oligonucleotide
acuugugccaggcucacuu

SEQ ID NO: 1631830 - RNA, 19 nt, Artificial Sequence
  Description of Artificial Sequence: Synthetic oligonucleotide
ucuuuguuuaauggccucu

SEQ ID NO: 1631831 - RNA, 19 nt, Artificial Sequence
  Description of Artificial Sequence: Synthetic oligonucleotide
uagaaaugccugguguuug

SEQ ID NO: 1631832 - RNA, 19 nt, Artificial Sequence
  Description of Artificial Sequence: Synthetic oligonucleotide
aucuaugguguaacaauag

SEQ ID NO: 1631833 - RNA, 19 nt, Artificial Sequence
  Description of Artificial Sequence: Synthetic oligonucleotide
gugggaaaugauggaaacg

SEQ ID NO: 1631834 - RNA, 19 nt, Artificial Sequence
  Description of Artificial Sequence: Synthetic oligonucleotide
agcaaccauauugaggaug

SEQ ID NO: 1631835 - RNA, 19 nt, Artificial Sequence
  Description of Artificial Sequence: Synthetic oligonucleotide
cugaggucaugaaaagcug

SEQ ID NO: 1631836 - RNA, 19 nt, Artificial Sequence
  Description of Artificial Sequence: Synthetic oligonucleotide
ugauggaaacgagcgacca

SEQ ID NO: 1631837 - RNA, 19 nt, Artificial Sequence
  Description of Artificial Sequence: Synthetic oligonucleotide
gauagggaaccugaacaac

SEQ ID NO: 1631838 - RNA, 19 nt, Artificial Sequence
  Description of Artificial Sequence: Synthetic oligonucleotide
uacaugccgcucuaacgcc

SEQ ID NO: 1631839 - RNA, 19 nt, Artificial Sequence
  Description of Artificial Sequence: Synthetic oligonucleotide
aacggacuugcccaauuuu

SEQ ID NO: 1631840 - RNA, 19 nt, Artificial Sequence
  Description of Artificial Sequence: Synthetic oligonucleotide
gaggaacgacuucacauga

SEQ ID NO: 1631841 - RNA, 19 nt, Artificial Sequence
  Description of Artificial Sequence: Synthetic oligonucleotide
guucgauugauucagcaau

SEQ ID NO: 1631842 - RNA, 19 nt, Artificial Sequence
  Description of Artificial Sequence: Synthetic oligonucleotide
uucaacaucuaugguguaa

SEQ ID NO: 1631843 - RNA, 19 nt, Artificial Sequence
  Description of Artificial Sequence: Synthetic oligonucleotide
accaauggacaggagagcu

SEQ ID NO: 1631844 - RNA, 19 nt, Artificial Sequence
  Description of Artificial Sequence: Synthetic oligonucleotide
caaucucgaucccagaaga

SEQ ID NO: 1631845 - RNA, 19 nt, Artificial Sequence
  Description of Artificial Sequence: Synthetic oligonucleotide
uauuaccaauggacaggag

SEQ ID NO: 1631846 - RNA, 19 nt, Artificial Sequence
  Description of Artificial Sequence: Synthetic oligonucleotide
cucuugaauccuguagccg

SEQ ID NO: 1631847 - RNA, 19 nt, Artificial Sequence
  Description of Artificial Sequence: Synthetic oligonucleotide
uccgcuuucuacugcagua

SEQ ID NO: 1631848 - RNA, 19 nt, Artificial Sequence
  Description of Artificial Sequence: Synthetic oligonucleotide
cuuauagaaaggggcacuc

SEQ ID NO: 1631849 - RNA, 19 nt, Artificial Sequence
  Description of Artificial Sequence: Synthetic oligonucleotide
auacuccaccaauucaagu

SEQ ID NO: 1631850 - RNA, 19 nt, Artificial Sequence
  Description of Artificial Sequence: Synthetic oligonucleotide
aaaguugaccggguggcau

SEQ ID NO: 1631851 - RNA, 19 nt, Artificial Sequence
  Description of Artificial Sequence: Synthetic oligonucleotide
agaaaugccugguguuugu

SEQ ID NO: 1631852 - RNA, 19 nt, Artificial Sequence
  Description of Artificial Sequence: Synthetic oligonucleotide
aaguuguugacugcauuua

SEQ ID NO: 1631853 - RNA, 19 nt, Artificial Sequence
  Description of Artificial Sequence: Synthetic oligonucleotide
ugugccaggcucacuuugu

SEQ ID NO: 1631854 - RNA, 19 nt, Artificial Sequence
  Description of Artificial Sequence: Synthetic oligonucleotide
ucgauugauucagcaaucu

SEQ ID NO: 1631855 - RNA, 19 nt, Artificial Sequence
  Description of Artificial Sequence: Synthetic oligonucleotide
uggaaacgagcgaccagca

SEQ ID NO: 1631856 - RNA, 19 nt, Artificial Sequence
  Description of Artificial Sequence: Synthetic oligonucleotide
uaguaaaacgaggaaugua

SEQ ID NO: 1631857 - RNA, 19 nt, Artificial Sequence
  Description of Artificial Sequence: Synthetic oligonucleotide
auguaucucacaacggacu

SEQ ID NO: 1631858 - RNA, 19 nt, Artificial Sequence
  Description of Artificial Sequence: Synthetic oligonucleotide
gacuuguaaagauggagau

SEQ ID NO: 1631859 - RNA, 19 nt, Artificial Sequence
  Description of Artificial Sequence: Synthetic oligonucleotide
uagccgguuuccuuuauua

SEQ ID NO: 1631860 - RNA, 19 nt, Artificial Sequence
  Description of Artificial Sequence: Synthetic oligonucleotide
uuguaaagauggagaucca

SEQ ID NO: 1631861 - RNA, 19 nt, Artificial Sequence
  Description of Artificial Sequence: Synthetic oligonucleotide
ggugcuuagugucagcgca

SEQ ID NO: 1631862 - RNA, 19 nt, Artificial Sequence
  Description of Artificial Sequence: Synthetic oligonucleotide
agcgccacccuuuuaugga

SEQ ID NO: 1631863 - RNA, 19 nt, Artificial Sequence
  Description of Artificial Sequence: Synthetic oligonucleotide
ggaauguaucucacaacgg

SEQ ID NO: 1631864 - RNA, 19 nt, Artificial Sequence
  Description of Artificial Sequence: Synthetic oligonucleotide
ugacugcauuuagaaaugc

SEQ ID NO: 1631865 - RNA, 19 nt, Artificial Sequence
  Description of Artificial Sequence: Synthetic oligonucleotide
gccgguuuccuuuauuacc

SEQ ID NO: 1631866 - RNA, 19 nt, Artificial Sequence
  Description of Artificial Sequence: Synthetic oligonucleotide
cuuccuaagcucuucguua

SEQ ID NO: 1631867 - RNA, 19 nt, Artificial Sequence
  Description of Artificial Sequence: Synthetic oligonucleotide
accgcuguggcccaucgau

SEQ ID NO: 1631868 - RNA, 19 nt, Artificial Sequence
  Description of Artificial Sequence: Synthetic oligonucleotide
ggugggaaaugauggaaac

SEQ ID NO: 1631869 - RNA, 19 nt, Artificial Sequence
  Description of Artificial Sequence: Synthetic oligonucleotide
ugguggcaaauaauucagu

SEQ ID NO: 1631870 - RNA, 19 nt, Artificial Sequence
  Description of Artificial Sequence: Synthetic oligonucleotide
aaaagcugggugacuugug

SEQ ID NO: 1631871 - RNA, 19 nt, Artificial Sequence
  Description of Artificial Sequence: Synthetic oligonucleotide
aaaaccgcuguggcccauc

SEQ ID NO: 1631872 - RNA, 19 nt, Artificial Sequence
  Description of Artificial Sequence: Synthetic oligonucleotide
ugaccuugcagccguugaa

SEQ ID NO: 1631873 - RNA, 19 nt, Artificial Sequence
  Description of Artificial Sequence: Synthetic oligonucleotide
ccuaaauaaagcaggggca

SEQ ID NO: 1631874 - RNA, 19 nt, Artificial Sequence
  Description of Artificial Sequence: Synthetic oligonucleotide
agcuuugagaaaauaguuu

SEQ ID NO: 1631875 - RNA, 19 nt, Artificial Sequence
  Description of Artificial Sequence: Synthetic oligonucleotide
caucuaugguguaacaaua

SEQ ID NO: 1631876 - RNA, 19 nt, Artificial Sequence
  Description of Artificial Sequence: Synthetic oligonucleotide
ucagcgcaaaaccgcugug

SEQ ID NO: 1631877 - RNA, 19 nt, Artificial Sequence
  Description of Artificial Sequence: Synthetic oligonucleotide
ccuuuauuaccaauggaca

SEQ ID NO: 1631878 - RNA, 19 nt, Artificial Sequence
  Description of Artificial Sequence: Synthetic oligonucleotide
guaaaacgaggaauguauc

SEQ ID NO: 1631879 - RNA, 19 nt, Artificial Sequence
  Description of Artificial Sequence: Synthetic oligonucleotide
ugucagcgcaaaaccgcug

SEQ ID NO: 1631880 - RNA, 19 nt, Artificial Sequence
  Description of Artificial Sequence: Synthetic oligonucleotide
uggggcaaacguuuucaaa

SEQ ID NO: 1631881 - RNA, 19 nt, Artificial Sequence
  Description of Artificial Sequence: Synthetic oligonucleotide
acgaggaauguaucucaca

SEQ ID NO: 1631882 - RNA, 19 nt, Artificial Sequence
  Description of Artificial Sequence: Synthetic oligonucleotide
auuagcgaacaugaaugaa

SEQ ID NO: 1631883 - RNA, 19 nt, Artificial Sequence
  Description of Artificial Sequence: Synthetic oligonucleotide
uaaccaguggaagggcgug

SEQ ID NO: 1631884 - RNA, 19 nt, Artificial Sequence
  Description of Artificial Sequence: Synthetic oligonucleotide
aaguugaccggguggcauu

SEQ ID NO: 1631885 - RNA, 19 nt, Artificial Sequence
  Description of Artificial Sequence: Synthetic oligonucleotide
gugaggaacgacuucacau

SEQ ID NO: 1631886 - RNA, 19 nt, Artificial Sequence
  Description of Artificial Sequence: Synthetic oligonucleotide
uguggcccaucgaugcaca

SEQ ID NO: 1631887 - RNA, 19 nt, Artificial Sequence
  Description of Artificial Sequence: Synthetic oligonucleotide
caaucaguccagucaccac

SEQ ID NO: 1631888 - RNA, 19 nt, Artificial Sequence
  Description of Artificial Sequence: Synthetic oligonucleotide
cagugcugaugacaucggg

SEQ ID NO: 1631889 - RNA, 19 nt, Artificial Sequence
  Description of Artificial Sequence: Synthetic oligonucleotide
uaccaauggacaggagagc

SEQ ID NO: 1631890 - RNA, 19 nt, Artificial Sequence
  Description of Artificial Sequence: Synthetic oligonucleotide
gcucuucguuaguaaaacg

SEQ ID NO: 1631891 - RNA, 19 nt, Artificial Sequence
  Description of Artificial Sequence: Synthetic oligonucleotide
caaucugacgaggugagaa

SEQ ID NO: 1631892 - RNA, 19 nt, Artificial Sequence
  Description of Artificial Sequence: Synthetic oligonucleotide
gaacuauugagaggguaaa

SEQ ID NO: 1631893 - RNA, 19 nt, Artificial Sequence
  Description of Artificial Sequence: Synthetic oligonucleotide
uggggcccuuauagaaagg

SEQ ID NO: 1631894 - RNA, 19 nt, Artificial Sequence
  Description of Artificial Sequence: Synthetic oligonucleotide
cagcgcaaaaccgcugugg

SEQ ID NO: 1631895 - RNA, 19 nt, Artificial Sequence
  Description of Artificial Sequence: Synthetic oligonucleotide
ggacugaggucaugaaaag

SEQ ID NO: 1631896 - RNA, 19 nt, Artificial Sequence
  Description of Artificial Sequence: Synthetic oligonucleotide
auaaccaguggaagggcgu

SEQ ID NO: 1631897 - RNA, 19 nt, Artificial Sequence
  Description of Artificial Sequence: Synthetic oligonucleotide
gaggguaaaguuguugacu

SEQ ID NO: 1631898 - RNA, 19 nt, Artificial Sequence
  Description of Artificial Sequence: Synthetic oligonucleotide
aauccgcuuucuacugcag

SEQ ID NO: 1631899 - RNA, 19 nt, Artificial Sequence
  Description of Artificial Sequence: Synthetic oligonucleotide
agagccaccaaggcaguga

SEQ ID NO: 1631900 - RNA, 19 nt, Artificial Sequence
  Description of Artificial Sequence: Synthetic oligonucleotide
ugcugaugacaucgggguc

SEQ ID NO: 1631901 - RNA, 19 nt, Artificial Sequence
  Description of Artificial Sequence: Synthetic oligonucleotide
acagcgccacccuuuuaug

SEQ ID NO: 1631902 - RNA, 19 nt, Artificial Sequence
  Description of Artificial Sequence: Synthetic oligonucleotide
cuauugagaggguaaaguu

SEQ ID NO: 1631903 - RNA, 19 nt, Artificial Sequence
  Description of Artificial Sequence: Synthetic oligonucleotide
agcaggugcuuagugucag

SEQ ID NO: 1631904 - RNA, 19 nt, Artificial Sequence
  Description of Artificial Sequence: Synthetic oligonucleotide
gacuugggacucagguagg

SEQ ID NO: 1631905 - RNA, 19 nt, Artificial Sequence
  Description of Artificial Sequence: Synthetic oligonucleotide
guaucucacaacggacuug

SEQ ID NO: 1631906 - RNA, 19 nt, Artificial Sequence
  Description of Artificial Sequence: Synthetic oligonucleotide
gcgaacaugaaugaagaaa

SEQ ID NO: 1631907 - RNA, 19 nt, Artificial Sequence
  Description of Artificial Sequence: Synthetic oligonucleotide
agcgcaggugucuuuguuu

SEQ ID NO: 1631908 - RNA, 19 nt, Artificial Sequence
  Description of Artificial Sequence: Synthetic oligonucleotide
gaauggcaauacaaaucca

SEQ ID NO: 1631909 - RNA, 19 nt, Artificial Sequence
  Description of Artificial Sequence: Synthetic oligonucleotide
gaaccaguuccagugccuc

SEQ ID NO: 1631910 - RNA, 19 nt, Artificial Sequence
  Description of Artificial Sequence: Synthetic oligonucleotide
caguuccagugccucacag

SEQ ID NO: 1631911 - RNA, 19 nt, Artificial Sequence
  Description of Artificial Sequence: Synthetic oligonucleotide
cuugcagccguugaagaaa

SEQ ID NO: 1631912 - RNA, 19 nt, Artificial Sequence
  Description of Artificial Sequence: Synthetic oligonucleotide
guagcaacuguggugggaa

SEQ ID NO: 1631913 - RNA, 19 nt, Artificial Sequence
  Description of Artificial Sequence: Synthetic oligonucleotide
gggcuuagaaagaauccgc

SEQ ID NO: 1631914 - RNA, 19 nt, Artificial Sequence
  Description of Artificial Sequence: Synthetic oligonucleotide
uugaccggguggcauucaa

SEQ ID NO: 1631915 - RNA, 19 nt, Artificial Sequence
  Description of Artificial Sequence: Synthetic oligonucleotide
uccuaagcucuucguuagu

SEQ ID NO: 1631916 - RNA, 19 nt, Artificial Sequence
  Description of Artificial Sequence: Synthetic oligonucleotide
aguagcaacugugguggga

SEQ ID NO: 1631917 - RNA, 19 nt, Artificial Sequence
  Description of Artificial Sequence: Synthetic oligonucleotide
gguucgauugauucagcaa

SEQ ID NO: 1631918 - RNA, 19 nt, Artificial Sequence
  Description of Artificial Sequence: Synthetic oligonucleotide
agcuuggggcccuuauaga

SEQ ID NO: 1631919 - RNA, 19 nt, Artificial Sequence
  Description of Artificial Sequence: Synthetic oligonucleotide
cauggcgugaggaacgacu

SEQ ID NO: 1631920 - RNA, 19 nt, Artificial Sequence
  Description of Artificial Sequence: Synthetic oligonucleotide
ggaacuauugagaggguaa

SEQ ID NO: 1631921 - RNA, 19 nt, Artificial Sequence
  Description of Artificial Sequence: Synthetic oligonucleotide
aagcgcaggugucuuuguu

SEQ ID NO: 1631922 - RNA, 19 nt, Artificial Sequence
  Description of Artificial Sequence: Synthetic oligonucleotide
caucgaugcacagcgccac

SEQ ID NO: 1631923 - RNA, 19 nt, Artificial Sequence
  Description of Artificial Sequence: Synthetic oligonucleotide
aggaugggcuuagaaagaa

SEQ ID NO: 1631924 - RNA, 19 nt, Artificial Sequence
  Description of Artificial Sequence: Synthetic oligonucleotide
aacuguggugggaaaugau

SEQ ID NO: 1631925 - RNA, 19 nt, Artificial Sequence
  Description of Artificial Sequence: Synthetic oligonucleotide
ucacaacggacuugcccaa

SEQ ID NO: 1631926 - RNA, 19 nt, Artificial Sequence
  Description of Artificial Sequence: Synthetic oligonucleotide
gauggagauccagaggggu

SEQ ID NO: 1631927 - RNA, 19 nt, Artificial Sequence
  Description of Artificial Sequence: Synthetic oligonucleotide
cugggugacuugugccagg

SEQ ID NO: 1631928 - RNA, 19 nt, Artificial Sequence
  Description of Artificial Sequence: Synthetic oligonucleotide
cgcaaaaccgcuguggccc

SEQ ID NO: 1631929 - RNA, 19 nt, Artificial Sequence
  Description of Artificial Sequence: Synthetic oligonucleotide
acaacggacuugcccaauu

SEQ ID NO: 1631930 - RNA, 19 nt, Artificial Sequence
  Description of Artificial Sequence: Synthetic oligonucleotide
accaguggaagggcgugag

SEQ ID NO: 1631931 - RNA, 19 nt, Artificial Sequence
  Description of Artificial Sequence: Synthetic oligonucleotide
gaaaugccugguguuuguc

SEQ ID NO: 1631932 - RNA, 19 nt, Artificial Sequence
  Description of Artificial Sequence: Synthetic oligonucleotide
ggaacgacuucacaugaua

SEQ ID NO: 1631933 - RNA, 19 nt, Artificial Sequence
  Description of Artificial Sequence: Synthetic oligonucleotide
gagcgaccagcacacuuuc

SEQ ID NO: 1631934 - RNA, 19 nt, Artificial Sequence
  Description of Artificial Sequence: Synthetic oligonucleotide
ggacaugccugcagaaucc

SEQ ID NO: 1631935 - RNA, 19 nt, Artificial Sequence
  Description of Artificial Sequence: Synthetic oligonucleotide
ugcuuagugucagcgcaaa

SEQ ID NO: 1631936 - RNA, 19 nt, Artificial Sequence
  Description of Artificial Sequence: Synthetic oligonucleotide
aucugacgaggugagaauu

SEQ ID NO: 1631937 - RNA, 19 nt, Artificial Sequence
  Description of Artificial Sequence: Synthetic oligonucleotide
cgucuaauuuaauuucaac

SEQ ID NO: 1631938 - RNA, 19 nt, Artificial Sequence
  Description of Artificial Sequence: Synthetic oligonucleotide
cuccgugagaaaccuguca

SEQ ID NO: 1631939 - RNA, 19 nt, Artificial Sequence
  Description of Artificial Sequence: Synthetic oligonucleotide
caacaucuaugguguaaca

SEQ ID NO: 1631940 - RNA, 19 nt, Artificial Sequence
  Description of Artificial Sequence: Synthetic oligonucleotide
acgagcgaccagcacacuu

SEQ ID NO: 1631941 - RNA, 19 nt, Artificial Sequence
  Description of Artificial Sequence: Synthetic oligonucleotide
ugaccggguggcauucaau

SEQ ID NO: 1631942 - RNA, 19 nt, Artificial Sequence
  Description of Artificial Sequence: Synthetic oligonucleotide
ugccgcucuaacgccuccg

SEQ ID NO: 1631943 - RNA, 19 nt, Artificial Sequence
  Description of Artificial Sequence: Synthetic oligonucleotide
cauauugaggaugggcuua

SEQ ID NO: 1631944 - RNA, 19 nt, Artificial Sequence
  Description of Artificial Sequence: Synthetic oligonucleotide
acgguucgauugauucagc

SEQ ID NO: 1631945 - RNA, 19 nt, Artificial Sequence
  Description of Artificial Sequence: Synthetic oligonucleotide
gcgaccagcacacuuucca

SEQ ID NO: 1631946 - RNA, 19 nt, Artificial Sequence
  Description of Artificial Sequence: Synthetic oligonucleotide
uguagccgguuuccuuuau

SEQ ID NO: 1631947 - RNA, 19 nt, Artificial Sequence
  Description of Artificial Sequence: Synthetic oligonucleotide
ugcacagcgccacccuuuu

SEQ ID NO: 1631948 - RNA, 19 nt, Artificial Sequence
  Description of Artificial Sequence: Synthetic oligonucleotide
ccaucuucgucuaauuuaa

SEQ ID NO: 1631949 - RNA, 19 nt, Artificial Sequence
  Description of Artificial Sequence: Synthetic oligonucleotide
agcgaccagcacacuuucc

SEQ ID NO: 1631950 - RNA, 19 nt, Artificial Sequence
  Description of Artificial Sequence: Synthetic oligonucleotide
ccgguuuccuuuauuacca

SEQ ID NO: 1631951 - RNA, 19 nt, Artificial Sequence
  Description of Artificial Sequence: Synthetic oligonucleotide
gaaccugaacaaccuggua

SEQ ID NO: 1631952 - RNA, 19 nt, Artificial Sequence
  Description of Artificial Sequence: Synthetic oligonucleotide
caguagcaacugugguggg

SEQ ID NO: 1631953 - RNA, 19 nt, Artificial Sequence
  Description of Artificial Sequence: Synthetic oligonucleotide
acggacuugcccaauuuua

SEQ ID NO: 1631954 - RNA, 19 nt, Artificial Sequence
  Description of Artificial Sequence: Synthetic oligonucleotide
gggcccuuauagaaagggg

SEQ ID NO: 1631955 - RNA, 19 nt, Artificial Sequence
  Description of Artificial Sequence: Synthetic oligonucleotide
accggguggcauucaauua

SEQ ID NO: 1631956 - RNA, 19 nt, Artificial Sequence
  Description of Artificial Sequence: Synthetic oligonucleotide
gaacaaccugguagcccag

SEQ ID NO: 1631957 - RNA, 19 nt, Artificial Sequence
  Description of Artificial Sequence: Synthetic oligonucleotide
gguggcaaauaauucaguu

SEQ ID NO: 1631958 - RNA, 19 nt, Artificial Sequence
  Description of Artificial Sequence: Synthetic oligonucleotide
gucagcgcaaaaccgcugu

SEQ ID NO: 1631959 - RNA, 19 nt, Artificial Sequence
  Description of Artificial Sequence: Synthetic oligonucleotide
gacauaaaguugaccgggu

SEQ ID NO: 1631960 - RNA, 19 nt, Artificial Sequence
  Description of Artificial Sequence: Synthetic oligonucleotide
cuguggcccaucgaugcac

SEQ ID NO: 1631961 - RNA, 19 nt, Artificial Sequence
  Description of Artificial Sequence: Synthetic oligonucleotide
aaccgcuguggcccaucga

SEQ ID NO: 1631962 - RNA, 19 nt, Artificial Sequence
  Description of Artificial Sequence: Synthetic oligonucleotide
ggcgugaggaacgacuuca

SEQ ID NO: 1631963 - RNA, 19 nt, Artificial Sequence
  Description of Artificial Sequence: Synthetic oligonucleotide
gaccggguggcauucaauu

SEQ ID NO: 1631964 - RNA, 19 nt, Artificial Sequence
  Description of Artificial Sequence: Synthetic oligonucleotide
gcgugagucuggucaagag

SEQ ID NO: 1631965 - RNA, 19 nt, Artificial Sequence
  Description of Artificial Sequence: Synthetic oligonucleotide
cacacuuuccagcuuccua

SEQ ID NO: 1631966 - RNA, 19 nt, Artificial Sequence
  Description of Artificial Sequence: Synthetic oligonucleotide
ucgaucccagaagaucaau

SEQ ID NO: 1631967 - RNA, 19 nt, Artificial Sequence
  Description of Artificial Sequence: Synthetic oligonucleotide
gaagaucaaucaguccagu

SEQ ID NO: 1631968 - RNA, 19 nt, Artificial Sequence
  Description of Artificial Sequence: Synthetic oligonucleotide
gacucuuuaccuugaccuu

SEQ ID NO: 1631969 - RNA, 19 nt, Artificial Sequence
  Description of Artificial Sequence: Synthetic oligonucleotide
ggaaacgagcgaccagcac

SEQ ID NO: 1631970 - RNA, 19 nt, Artificial Sequence
  Description of Artificial Sequence: Synthetic oligonucleotide
uagcaacuguggugggaaa

SEQ ID NO: 1631971 - RNA, 19 nt, Artificial Sequence
  Description of Artificial Sequence: Synthetic oligonucleotide
cuugaauccuguagccggu

SEQ ID NO: 1631972 - RNA, 19 nt, Artificial Sequence
  Description of Artificial Sequence: Synthetic oligonucleotide
ucacagccugaaccuugaa

SEQ ID NO: 1631973 - RNA, 19 nt, Artificial Sequence
  Description of Artificial Sequence: Synthetic oligonucleotide
acucagguagggaacuauu

SEQ ID NO: 1631974 - RNA, 19 nt, Artificial Sequence
  Description of Artificial Sequence: Synthetic oligonucleotide
cccuuuuauggacauccuc

SEQ ID NO: 1631975 - RNA, 19 nt, Artificial Sequence
  Description of Artificial Sequence: Synthetic oligonucleotide
gcaagcgcaggugucuuug

SEQ ID NO: 1631976 - RNA, 19 nt, Artificial Sequence
  Description of Artificial Sequence: Synthetic oligonucleotide
acaugccgcucuaacgccu

SEQ ID NO: 1631977 - RNA, 19 nt, Artificial Sequence
  Description of Artificial Sequence: Synthetic oligonucleotide
aggggcauuugguggcaaa

SEQ ID NO: 1631978 - RNA, 19 nt, Artificial Sequence
  Description of Artificial Sequence: Synthetic oligonucleotide
gcgcaaaaccgcuguggcc

SEQ ID NO: 1631979 - RNA, 19 nt, Artificial Sequence
  Description of Artificial Sequence: Synthetic oligonucleotide
ggcauucaauuagcgaaca

SEQ ID NO: 1631980 - RNA, 19 nt, Artificial Sequence
  Description of Artificial Sequence: Synthetic oligonucleotide
agcauggcgugaggaacga

SEQ ID NO: 1631981 - RNA, 19 nt, Artificial Sequence
  Description of Artificial Sequence: Synthetic oligonucleotide
cgauugauucagcaaucug

SEQ ID NO: 1631982 - RNA, 19 nt, Artificial Sequence
  Description of Artificial Sequence: Synthetic oligonucleotide
cacagcgccacccuuuuau

SEQ ID NO: 1631983 - RNA, 19 nt, Artificial Sequence
  Description of Artificial Sequence: Synthetic oligonucleotide
caucgggguccagggagag

SEQ ID NO: 1631984 - RNA, 19 nt, Artificial Sequence
  Description of Artificial Sequence: Synthetic oligonucleotide
ggacuugcccaauuuuaua

SEQ ID NO: 1631985 - RNA, 19 nt, Artificial Sequence
  Description of Artificial Sequence: Synthetic oligonucleotide
caccaauucaagucuugau

SEQ ID NO: 1631986 - RNA, 19 nt, Artificial Sequence
  Description of Artificial Sequence: Synthetic oligonucleotide
acgccuccgugagaaaccu

SEQ ID NO: 1631987 - RNA, 19 nt, Artificial Sequence
  Description of Artificial Sequence: Synthetic oligonucleotide
gaagggcgugagucugguc

SEQ ID NO: 1631988 - RNA, 19 nt, Artificial Sequence
  Description of Artificial Sequence: Synthetic oligonucleotide
acaucgggguccagggaga

SEQ ID NO: 1631989 - RNA, 19 nt, Artificial Sequence
  Description of Artificial Sequence: Synthetic oligonucleotide
caaccugguagcccagcaa

SEQ ID NO: 1631990 - RNA, 19 nt, Artificial Sequence
  Description of Artificial Sequence: Synthetic oligonucleotide
aggaacgacuucacaugau

SEQ ID NO: 1631991 - RNA, 19 nt, Artificial Sequence
  Description of Artificial Sequence: Synthetic oligonucleotide
caauggacaggagagcuuu

SEQ ID NO: 1631992 - RNA, 19 nt, Artificial Sequence
  Description of Artificial Sequence: Synthetic oligonucleotide
cugguguuuguccacuuuu

SEQ ID NO: 1631993 - RNA, 19 nt, Artificial Sequence
  Description of Artificial Sequence: Synthetic oligonucleotide
agcaagcgcaggugucuuu

SEQ ID NO: 1631994 - RNA, 19 nt, Artificial Sequence
  Description of Artificial Sequence: Synthetic oligonucleotide
acccuuuuauggacauccu

SEQ ID NO: 1631995 - RNA, 19 nt, Artificial Sequence
  Description of Artificial Sequence: Synthetic oligonucleotide
ggcuuagaaagaauccgcu

SEQ ID NO: 1631996 - RNA, 19 nt, Artificial Sequence
  Description of Artificial Sequence: Synthetic oligonucleotide
aacgagcgaccagcacacu

SEQ ID NO: 1631997 - RNA, 19 nt, Artificial Sequence
  Description of Artificial Sequence: Synthetic oligonucleotide
cuccagggagcagcauggc

SEQ ID NO: 1631998 - RNA, 19 nt, Artificial Sequence
  Description of Artificial Sequence: Synthetic oligonucleotide
aggagagcuuugagaaaau

SEQ ID NO: 1631999 - RNA, 19 nt, Artificial Sequence
  Description of Artificial Sequence: Synthetic oligonucleotide
gacaugccugcagaauccu

SEQ ID NO: 1632000 - RNA, 19 nt, Artificial Sequence
  Description of Artificial Sequence: Synthetic oligonucleotide
gggaacuauugagagggua

SEQ ID NO: 1632001 - RNA, 19 nt, Artificial Sequence
  Description of Artificial Sequence: Synthetic oligonucleotide
gugucagcgcaaaaccgcu

SEQ ID NO: 1632002 - RNA, 19 nt, Artificial Sequence
  Description of Artificial Sequence: Synthetic oligonucleotide
ggcaaacguuuucaaauuu

SEQ ID NO: 1632003 - RNA, 19 nt, Artificial Sequence
  Description of Artificial Sequence: Synthetic oligonucleotide
gcuuagaaagaauccgcuu

SEQ ID NO: 1632004 - RNA, 19 nt, Artificial Sequence
  Description of Artificial Sequence: Synthetic oligonucleotide
gcgccacccuuuuauggac

SEQ ID NO: 1632005 - RNA, 19 nt, Artificial Sequence
  Description of Artificial Sequence: Synthetic oligonucleotide
agggaacuauugagagggu

SEQ ID NO: 1632006 - RNA, 19 nt, Artificial Sequence
  Description of Artificial Sequence: Synthetic oligonucleotide
ccgcuuucuacugcaguac

SEQ ID NO: 1632007 - RNA, 19 nt, Artificial Sequence
  Description of Artificial Sequence: Synthetic oligonucleotide
cuguagccgguuuccuuua

SEQ ID NO: 1632008 - RNA, 19 nt, Artificial Sequence
  Description of Artificial Sequence: Synthetic oligonucleotide
gcaaacguuuucaaauuuu

SEQ ID NO: 1632009 - RNA, 19 nt, Artificial Sequence
  Description of Artificial Sequence: Synthetic oligonucleotide
cccagcaagcgcagguguc

SEQ ID NO: 1632010 - RNA, 19 nt, Artificial Sequence
  Description of Artificial Sequence: Synthetic oligonucleotide
gccuccgugagaaaccugu

SEQ ID NO: 1632011 - RNA, 19 nt, Artificial Sequence
  Description of Artificial Sequence: Synthetic oligonucleotide
acaugccugcagaauccua

SEQ ID NO: 1632012 - RNA, 19 nt, Artificial Sequence
  Description of Artificial Sequence: Synthetic oligonucleotide
ccaccaauucaagucuuga

SEQ ID NO: 1632013 - RNA, 19 nt, Artificial Sequence
  Description of Artificial Sequence: Synthetic oligonucleotide
cguuaguaaaacgaggaau

SEQ ID NO: 1632014 - RNA, 19 nt, Artificial Sequence
  Description of Artificial Sequence: Synthetic oligonucleotide
cgacuucacaugauacuga

SEQ ID NO: 1632015 - RNA, 19 nt, Artificial Sequence
  Description of Artificial Sequence: Synthetic oligonucleotide
cuaacgccuccgugagaaa

SEQ ID NO: 1632016 - RNA, 19 nt, Artificial Sequence
  Description of Artificial Sequence: Synthetic oligonucleotide
ggcgugagucuggucaaga

SEQ ID NO: 1632017 - RNA, 19 nt, Artificial Sequence
  Description of Artificial Sequence: Synthetic oligonucleotide
ccuccgugagaaaccuguc

SEQ ID NO: 1632018 - RNA, 19 nt, Artificial Sequence
  Description of Artificial Sequence: Synthetic oligonucleotide
guagccgguuuccuuuauu

SEQ ID NO: 1632019 - RNA, 19 nt, Artificial Sequence
  Description of Artificial Sequence: Synthetic oligonucleotide
ccuaagcucuucguuagua

SEQ ID NO: 1632020 - RNA, 19 nt, Artificial Sequence
  Description of Artificial Sequence: Synthetic oligonucleotide
guugaccggguggcauuca

SEQ ID NO: 1632021 - RNA, 19 nt, Artificial Sequence
  Description of Artificial Sequence: Synthetic oligonucleotide
ggcucacuuuguccaaaua

SEQ ID NO: 1632022 - RNA, 19 nt, Artificial Sequence
  Description of Artificial Sequence: Synthetic oligonucleotide
cgguucgauugauucagca

SEQ ID NO: 1632023 - RNA, 19 nt, Artificial Sequence
  Description of Artificial Sequence: Synthetic oligonucleotide
gggcauuugguggcaaaua

SEQ ID NO: 1632024 - RNA, 19 nt, Artificial Sequence
  Description of Artificial Sequence: Synthetic oligonucleotide
caacggacuugcccaauuu

SEQ ID NO: 1632025 - RNA, 19 nt, Artificial Sequence
  Description of Artificial Sequence: Synthetic oligonucleotide
ccgcuguggcccaucgaug

SEQ ID NO: 1632026 - RNA, 19 nt, Artificial Sequence
  Description of Artificial Sequence: Synthetic oligonucleotide
cugacgaggugagaauuuu

SEQ ID NO: 1632027 - RNA, 19 nt, Artificial Sequence
  Description of Artificial Sequence: Synthetic oligonucleotide
caagcgcaggugucuuugu

SEQ ID NO: 1632028 - RNA, 19 nt, Artificial Sequence
  Description of Artificial Sequence: Synthetic oligonucleotide
gcauucaauuagcgaacau

SEQ ID NO: 1632029 - RNA, 19 nt, Artificial Sequence
  Description of Artificial Sequence: Synthetic oligonucleotide
gcucacggacuugggacuc

SEQ ID NO: 1632030 - RNA, 19 nt, Artificial Sequence
  Description of Artificial Sequence: Synthetic oligonucleotide
gggacucagguagggaacu

SEQ ID NO: 1632031 - RNA, 19 nt, Artificial Sequence
  Description of Artificial Sequence: Synthetic oligonucleotide
ccuguagccgguuuccuuu

SEQ ID NO: 1632032 - RNA, 19 nt, Artificial Sequence
  Description of Artificial Sequence: Synthetic oligonucleotide
cuugugccaggcucacuuu

SEQ ID NO: 1632033 - RNA, 19 nt, Artificial Sequence
  Description of Artificial Sequence: Synthetic oligonucleotide
gcgugaggaacgacuucac

SEQ ID NO: 1632034 - RNA, 19 nt, Artificial Sequence
  Description of Artificial Sequence: Synthetic oligonucleotide
gcaggugucuuuguuuaau

SEQ ID NO: 1632035 - RNA, 19 nt, Artificial Sequence
  Description of Artificial Sequence: Synthetic oligonucleotide
gcaaucugacgaggugaga

SEQ ID NO: 1632036 - RNA, 19 nt, Artificial Sequence
  Description of Artificial Sequence: Synthetic oligonucleotide
cagugccucacagccugaa

SEQ ID NO: 1632037 - RNA, 19 nt, Artificial Sequence
  Description of Artificial Sequence: Synthetic oligonucleotide
gcacauggcucacggacuu

SEQ ID NO: 1632038 - RNA, 19 nt, Artificial Sequence
  Description of Artificial Sequence: Synthetic oligonucleotide
ccuuccuaagcucuucguu

SEQ ID NO: 1632039 - RNA, 19 nt, Artificial Sequence
  Description of Artificial Sequence: Synthetic oligonucleotide
gacuugugccaggcucacu

SEQ ID NO: 1632040 - RNA, 19 nt, Artificial Sequence
  Description of Artificial Sequence: Synthetic oligonucleotide
ccgugagaaaccugucacu

SEQ ID NO: 1632041 - RNA, 19 nt, Artificial Sequence
  Description of Artificial Sequence: Synthetic oligonucleotide
ggaagggcgugagucuggu

SEQ ID NO: 1632042 - RNA, 19 nt, Artificial Sequence
  Description of Artificial Sequence: Synthetic oligonucleotide
ggaugggcuuagaaagaau

SEQ ID NO: 1632043 - RNA, 19 nt, Artificial Sequence
  Description of Artificial Sequence: Synthetic oligonucleotide
cagcaaccauauugaggau

SEQ ID NO: 1632044 - RNA, 19 nt, Artificial Sequence
  Description of Artificial Sequence: Synthetic oligonucleotide
gcauggcgugaggaacgac

SEQ ID NO: 1632045 - RNA, 19 nt, Artificial Sequence
  Description of Artificial Sequence: Synthetic oligonucleotide
ggacucagguagggaacua

SEQ ID NO: 1632046 - RNA, 19 nt, Artificial Sequence
  Description of Artificial Sequence: Synthetic oligonucleotide
gccgcucuaacgccuccgu

SEQ ID NO: 1632047 - RNA, 19 nt, Artificial Sequence
  Description of Artificial Sequence: Synthetic oligonucleotide
gcccaucgaugcacagcgc

SEQ ID NO: 1632048 - RNA, 19 nt, Artificial Sequence
  Description of Artificial Sequence: Synthetic oligonucleotide
ccagcaagcgcaggugucu

SEQ ID NO: 1632049 - RNA, 19 nt, Artificial Sequence
  Description of Artificial Sequence: Synthetic oligonucleotide
cagcuacaugccgcucuaa

SEQ ID NO: 1632050 - RNA, 19 nt, Artificial Sequence
  Description of Artificial Sequence: Synthetic oligonucleotide
ccaauggacaggagagcuu

SEQ ID NO: 1632051 - RNA, 19 nt, Artificial Sequence
  Description of Artificial Sequence: Synthetic oligonucleotide
cgccacccuuuuauggaca

SEQ ID NO: 1632052 - RNA, 19 nt, Artificial Sequence
  Description of Artificial Sequence: Synthetic oligonucleotide
gggugacuugugccaggcu

SEQ ID NO: 1632053 - RNA, 19 nt, Artificial Sequence
  Description of Artificial Sequence: Synthetic oligonucleotide
cacaacggacuugcccaau

SEQ ID NO: 1632054 - RNA, 19 nt, Artificial Sequence
  Description of Artificial Sequence: Synthetic oligonucleotide
cgguuuccuuuauuaccaa

SEQ ID NO: 1632055 - RNA, 19 nt, Artificial Sequence
  Description of Artificial Sequence: Synthetic oligonucleotide
gcacagcgccacccuuuua

SEQ ID NO: 1632056 - RNA, 19 nt, Artificial Sequence
  Description of Artificial Sequence: Synthetic oligonucleotide
caaaaccgcuguggcccau

SEQ ID NO: 1632057 - RNA, 19 nt, Artificial Sequence
  Description of Artificial Sequence: Synthetic oligonucleotide
ccaguggaagggcgugagu

SEQ ID NO: 1632058 - RNA, 19 nt, Artificial Sequence
  Description of Artificial Sequence: Synthetic oligonucleotide
cgaugcacagcgccacccu

SEQ ID NO: 1632059 - RNA, 19 nt, Artificial Sequence
  Description of Artificial Sequence: Synthetic oligonucleotide
acaaacuugguauagcucc

SEQ ID NO: 1632060 - RNA, 19 nt, Artificial Sequence
  Description of Artificial Sequence: Synthetic oligonucleotide
uugaaaaucuucccaaugg

SEQ ID NO: 1632061 - RNA, 19 nt, Artificial Sequence
  Description of Artificial Sequence: Synthetic oligonucleotide
auaagaaaaccacaucgcc

SEQ ID NO: 1632062 - RNA, 19 nt, Artificial Sequence
  Description of Artificial Sequence: Synthetic oligonucleotide
gaugaagugggccagcagg

SEQ ID NO: 1632063 - RNA, 19 nt, Artificial Sequence
  Description of Artificial Sequence: Synthetic oligonucleotide
cuuauuggaaaccugcucc

SEQ ID NO: 1632064 - RNA, 19 nt, Artificial Sequence
  Description of Artificial Sequence: Synthetic oligonucleotide
uaaauguuuggucaggcga

SEQ ID NO: 1632065 - RNA, 19 nt, Artificial Sequence
  Description of Artificial Sequence: Synthetic oligonucleotide
auugagaugacguguaaag

SEQ ID NO: 1632066 - RNA, 19 nt, Artificial Sequence
  Description of Artificial Sequence: Synthetic oligonucleotide
acacauggcaaauauggac

SEQ ID NO: 1632067 - RNA, 19 nt, Artificial Sequence
  Description of Artificial Sequence: Synthetic oligonucleotide
aauauggacaugaagccag

SEQ ID NO: 1632068 - RNA, 19 nt, Artificial Sequence
  Description of Artificial Sequence: Synthetic oligonucleotide
aaaucuucccaauggagcu

SEQ ID NO: 1632069 - RNA, 19 nt, Artificial Sequence
  Description of Artificial Sequence: Synthetic oligonucleotide
aaggcguuggacaucaggc

SEQ ID NO: 1632070 - RNA, 19 nt, Artificial Sequence
  Description of Artificial Sequence: Synthetic oligonucleotide
ugagaugacguguaaagga

SEQ ID NO: 1632071 - RNA, 19 nt, Artificial Sequence
  Description of Artificial Sequence: Synthetic oligonucleotide
uuguugacagccaugaggu

SEQ ID NO: 1632072 - RNA, 19 nt, Artificial Sequence
  Description of Artificial Sequence: Synthetic oligonucleotide
uacuccagggcaaagcacg

SEQ ID NO: 1632073 - RNA, 19 nt, Artificial Sequence
  Description of Artificial Sequence: Synthetic oligonucleotide
cauaagaaaaccacaucgc

SEQ ID NO: 1632074 - RNA, 19 nt, Artificial Sequence
  Description of Artificial Sequence: Synthetic oligonucleotide
uucagugaagucuucaugu

SEQ ID NO: 1632075 - RNA, 19 nt, Artificial Sequence
  Description of Artificial Sequence: Synthetic oligonucleotide
uucaugucauccuuauugg

SEQ ID NO: 1632076 - RNA, 19 nt, Artificial Sequence
  Description of Artificial Sequence: Synthetic oligonucleotide
uggacaugaagccaggcug

SEQ ID NO: 1632077 - RNA, 19 nt, Artificial Sequence
  Description of Artificial Sequence: Synthetic oligonucleotide
aaaggaugggccagcaugc

SEQ ID NO: 1632078 - RNA, 19 nt, Artificial Sequence
  Description of Artificial Sequence: Synthetic oligonucleotide
aaauguuuggucaggcgac

SEQ ID NO: 1632079 - RNA, 19 nt, Artificial Sequence
  Description of Artificial Sequence: Synthetic oligonucleotide
accugaacgauguacuugg

SEQ ID NO: 1632080 - RNA, 19 nt, Artificial Sequence
  Description of Artificial Sequence: Synthetic oligonucleotide
gaggugagggauuaagccg

SEQ ID NO: 1632081 - RNA, 19 nt, Artificial Sequence
  Description of Artificial Sequence: Synthetic oligonucleotide
ugaaaaucuucccaaugga

SEQ ID NO: 1632082 - RNA, 19 nt, Artificial Sequence
  Description of Artificial Sequence: Synthetic oligonucleotide
agcacauuggucccaaggg

SEQ ID NO: 1632083 - RNA, 19 nt, Artificial Sequence
  Description of Artificial Sequence: Synthetic oligonucleotide
gaugacguguaaaggaugg

SEQ ID NO: 1632084 - RNA, 19 nt, Artificial Sequence
  Description of Artificial Sequence: Synthetic oligonucleotide
auaaauguuuggucaggcg

SEQ ID NO: 1632085 - RNA, 19 nt, Artificial Sequence
  Description of Artificial Sequence: Synthetic oligonucleotide
uuuccaucaaccugaacga

SEQ ID NO: 1632086 - RNA, 19 nt, Artificial Sequence
  Description of Artificial Sequence: Synthetic oligonucleotide
ucaaccugaacgauguacu

SEQ ID NO: 1632087 - RNA, 19 nt, Artificial Sequence
  Description of Artificial Sequence: Synthetic oligonucleotide
ugagggauuaagccgacga

SEQ ID NO: 1632088 - RNA, 19 nt, Artificial Sequence
  Description of Artificial Sequence: Synthetic oligonucleotide
uacgaugucucuuucacaa

SEQ ID NO: 1632089 - RNA, 19 nt, Artificial Sequence
  Description of Artificial Sequence: Synthetic oligonucleotide
caugcuuacugcuaucccc

SEQ ID NO: 1632090 - RNA, 19 nt, Artificial Sequence
  Description of Artificial Sequence: Synthetic oligonucleotide
auccuuauuggaaaccugc

SEQ ID NO: 1632091 - RNA, 19 nt, Artificial Sequence
  Description of Artificial Sequence: Synthetic oligonucleotide
ugaacugggaaccuggauu

SEQ ID NO: 1632092 - RNA, 19 nt, Artificial Sequence
  Description of Artificial Sequence: Synthetic oligonucleotide
guaggcauugaugaagugg

SEQ ID NO: 1632093 - RNA, 19 nt, Artificial Sequence
  Description of Artificial Sequence: Synthetic oligonucleotide
aucaaccugaacgauguac

SEQ ID NO: 1632094 - RNA, 19 nt, Artificial Sequence
  Description of Artificial Sequence: Synthetic oligonucleotide
aagcucggcagguagagga

SEQ ID NO: 1632095 - RNA, 19 nt, Artificial Sequence
  Description of Artificial Sequence: Synthetic oligonucleotide
gggaaaaccuucuucaugc

SEQ ID NO: 1632096 - RNA, 19 nt, Artificial Sequence
  Description of Artificial Sequence: Synthetic oligonucleotide
cacgcugucauccaccagg

SEQ ID NO: 1632097 - RNA, 19 nt, Artificial Sequence
  Description of Artificial Sequence: Synthetic oligonucleotide
ucuggacagacacauggca

SEQ ID NO: 1632098 - RNA, 19 nt, Artificial Sequence
  Description of Artificial Sequence: Synthetic oligonucleotide
ucaugacccaccuggauca

SEQ ID NO: 1632099 - RNA, 19 nt, Artificial Sequence
  Description of Artificial Sequence: Synthetic oligonucleotide
cuaucuuuccaucaaccug

SEQ ID NO: 1632100 - RNA, 19 nt, Artificial Sequence
  Description of Artificial Sequence: Synthetic oligonucleotide
ugcacacucagguacuucc

SEQ ID NO: 1632101 - RNA, 19 nt, Artificial Sequence
  Description of Artificial Sequence: Synthetic oligonucleotide
uugagaugacguguaaagg

SEQ ID NO: 1632102 - RNA, 19 nt, Artificial Sequence
  Description of Artificial Sequence: Synthetic oligonucleotide
aaauauggacaugaagcca

SEQ ID NO: 1632103 - RNA, 19 nt, Artificial Sequence
  Description of Artificial Sequence: Synthetic oligonucleotide
cauacgaugucucuuucac

SEQ ID NO: 1632104 - RNA, 19 nt, Artificial Sequence
  Description of Artificial Sequence: Synthetic oligonucleotide
uaggugaagaagcucggca

SEQ ID NO: 1632105 - RNA, 19 nt, Artificial Sequence
  Description of Artificial Sequence: Synthetic oligonucleotide
aagggguaggucagcaugc

SEQ ID NO: 1632106 - RNA, 19 nt, Artificial Sequence
  Description of Artificial Sequence: Synthetic oligonucleotide
auuggaaaccugcuccauc

SEQ ID NO: 1632107 - RNA, 19 nt, Artificial Sequence
  Description of Artificial Sequence: Synthetic oligonucleotide
uccaucaaccugaacgaug

SEQ ID NO: 1632108 - RNA, 19 nt, Artificial Sequence
  Description of Artificial Sequence: Synthetic oligonucleotide
accccauaaauguuugguc

SEQ ID NO: 1632109 - RNA, 19 nt, Artificial Sequence
  Description of Artificial Sequence: Synthetic oligonucleotide
uuauuggaaaccugcucca

SEQ ID NO: 1632110 - RNA, 19 nt, Artificial Sequence
  Description of Artificial Sequence: Synthetic oligonucleotide
cuuacugcuauccccauca

SEQ ID NO: 1632111 - RNA, 19 nt, Artificial Sequence
  Description of Artificial Sequence: Synthetic oligonucleotide
gaacugggaaccuggauuc

SEQ ID NO: 1632112 - RNA, 19 nt, Artificial Sequence
  Description of Artificial Sequence: Synthetic oligonucleotide
gcugucauccaccagguag

SEQ ID NO: 1632113 - RNA, 19 nt, Artificial Sequence
  Description of Artificial Sequence: Synthetic oligonucleotide
gauucuggucguuucccag

SEQ ID NO: 1632114 - RNA, 19 nt, Artificial Sequence
  Description of Artificial Sequence: Synthetic oligonucleotide
ugacguguaaaggaugggc

SEQ ID NO: 1632115 - RNA, 19 nt, Artificial Sequence
  Description of Artificial Sequence: Synthetic oligonucleotide
ugcuauccccaucacaaac

SEQ ID NO: 1632116 - RNA, 19 nt, Artificial Sequence
  Description of Artificial Sequence: Synthetic oligonucleotide
ucauccggagggaaaaccu

SEQ ID NO: 1632117 - RNA, 19 nt, Artificial Sequence
  Description of Artificial Sequence: Synthetic oligonucleotide
uauagcuccugauggccag

SEQ ID NO: 1632118 - RNA, 19 nt, Artificial Sequence
  Description of Artificial Sequence: Synthetic oligonucleotide
cacauggcaaauauggaca

SEQ ID NO: 1632119 - RNA, 19 nt, Artificial Sequence
  Description of Artificial Sequence: Synthetic oligonucleotide
uuagguuacuccagggcaa

SEQ ID NO: 1632120 - RNA, 19 nt, Artificial Sequence
  Description of Artificial Sequence: Synthetic oligonucleotide
ugggcuagagucccucagg

SEQ ID NO: 1632121 - RNA, 19 nt, Artificial Sequence
  Description of Artificial Sequence: Synthetic oligonucleotide
agcacgaccccgaugacac

SEQ ID NO: 1632122 - RNA, 19 nt, Artificial Sequence
  Description of Artificial Sequence: Synthetic oligonucleotide
aacagcgccucgguggucg

SEQ ID NO: 1632123 - RNA, 19 nt, Artificial Sequence
  Description of Artificial Sequence: Synthetic oligonucleotide
agggaaaaccuucuucaug

SEQ ID NO: 1632124 - RNA, 19 nt, Artificial Sequence
  Description of Artificial Sequence: Synthetic oligonucleotide
cauaggugaagaagcucgg

SEQ ID NO: 1632125 - RNA, 19 nt, Artificial Sequence
  Description of Artificial Sequence: Synthetic oligonucleotide
agccccauaagaaaaccac

SEQ ID NO: 1632126 - RNA, 19 nt, Artificial Sequence
  Description of Artificial Sequence: Synthetic oligonucleotide
ucauccuuauuggaaaccu

SEQ ID NO: 1632127 - RNA, 19 nt, Artificial Sequence
  Description of Artificial Sequence: Synthetic oligonucleotide
ucagcaugcuuacugcuau

SEQ ID NO: 1632128 - RNA, 19 nt, Artificial Sequence
  Description of Artificial Sequence: Synthetic oligonucleotide
ugacccaccuggaucagca

SEQ ID NO: 1632129 - RNA, 19 nt, Artificial Sequence
  Description of Artificial Sequence: Synthetic oligonucleotide
gacgccacuguacuuggcc

SEQ ID NO: 1632130 - RNA, 19 nt, Artificial Sequence
  Description of Artificial Sequence: Synthetic oligonucleotide
cagcggguggcucagagcc

SEQ ID NO: 1632131 - RNA, 19 nt, Artificial Sequence
  Description of Artificial Sequence: Synthetic oligonucleotide
aaccugaacgauguacuug

SEQ ID NO: 1632132 - RNA, 19 nt, Artificial Sequence
  Description of Artificial Sequence: Synthetic oligonucleotide
uccuuauuggaaaccugcu

SEQ ID NO: 1632133 - RNA, 19 nt, Artificial Sequence
  Description of Artificial Sequence: Synthetic oligonucleotide
ggcaaauauggacaugaag

SEQ ID NO: 1632134 - RNA, 19 nt, Artificial Sequence
  Description of Artificial Sequence: Synthetic oligonucleotide
uucuggucguuucccagcc

SEQ ID NO: 1632135 - RNA, 19 nt, Artificial Sequence
  Description of Artificial Sequence: Synthetic oligonucleotide
auaggugaagaagcucggc

SEQ ID NO: 1632136 - RNA, 19 nt, Artificial Sequence
  Description of Artificial Sequence: Synthetic oligonucleotide
uucacguagagcagcgggu

SEQ ID NO: 1632137 - RNA, 19 nt, Artificial Sequence
  Description of Artificial Sequence: Synthetic oligonucleotide
ucauacgaugucucuuuca

SEQ ID NO: 1632138 - RNA, 19 nt, Artificial Sequence
  Description of Artificial Sequence: Synthetic oligonucleotide
accccgaugacacccggcg

SEQ ID NO: 1632139 - RNA, 19 nt, Artificial Sequence
  Description of Artificial Sequence: Synthetic oligonucleotide
aggcguuggacaucaggcg

SEQ ID NO: 1632140 - RNA, 19 nt, Artificial Sequence
  Description of Artificial Sequence: Synthetic oligonucleotide
uaagccgacgaagaauccc

SEQ ID NO: 1632141 - RNA, 19 nt, Artificial Sequence
  Description of Artificial Sequence: Synthetic oligonucleotide
uggacagacacauggcaaa

SEQ ID NO: 1632142 - RNA, 19 nt, Artificial Sequence
  Description of Artificial Sequence: Synthetic oligonucleotide
aggcgacuuagguuacucc

SEQ ID NO: 1632143 - RNA, 19 nt, Artificial Sequence
  Description of Artificial Sequence: Synthetic oligonucleotide
caaggcguuggacaucagg

SEQ ID NO: 1632144 - RNA, 19 nt, Artificial Sequence
  Description of Artificial Sequence: Synthetic oligonucleotide
uagaggaccuuccucccca

SEQ ID NO: 1632145 - RNA, 19 nt, Artificial Sequence
  Description of Artificial Sequence: Synthetic oligonucleotide
uaaggagggaguccagccu

SEQ ID NO: 1632146 - RNA, 19 nt, Artificial Sequence
  Description of Artificial Sequence: Synthetic oligonucleotide
cucagagccgucacgcccg

SEQ ID NO: 1632147 - RNA, 19 nt, Artificial Sequence
  Description of Artificial Sequence: Synthetic oligonucleotide
aggaggugagggauuaagc

SEQ ID NO: 1632148 - RNA, 19 nt, Artificial Sequence
  Description of Artificial Sequence: Synthetic oligonucleotide
acagcccuaucuuuccauc

SEQ ID NO: 1632149 - RNA, 19 nt, Artificial Sequence
  Description of Artificial Sequence: Synthetic oligonucleotide
uuaagccgacgaagaaucc

SEQ ID NO: 1632150 - RNA, 19 nt, Artificial Sequence
  Description of Artificial Sequence: Synthetic oligonucleotide
ucucauacgaugucucuuu

SEQ ID NO: 1632151 - RNA, 19 nt, Artificial Sequence
  Description of Artificial Sequence: Synthetic oligonucleotide
cagcacauuggucccaagg

SEQ ID NO: 1632152 - RNA, 19 nt, Artificial Sequence
  Description of Artificial Sequence: Synthetic oligonucleotide
agcgcauugagaugacgug

SEQ ID NO: 1632153 - RNA, 19 nt, Artificial Sequence
  Description of Artificial Sequence: Synthetic oligonucleotide
uacugcuauccccaucaca

SEQ ID NO: 1632154 - RNA, 19 nt, Artificial Sequence
  Description of Artificial Sequence: Synthetic oligonucleotide
guggacaaggcguuggaca

SEQ ID NO: 1632155 - RNA, 19 nt, Artificial Sequence
  Description of Artificial Sequence: Synthetic oligonucleotide
ugacgggcccucaccaggg

SEQ ID NO: 1632156 - RNA, 19 nt, Artificial Sequence
  Description of Artificial Sequence: Synthetic oligonucleotide
gagaugacgggcccucacc

SEQ ID NO: 1632157 - RNA, 19 nt, Artificial Sequence
  Description of Artificial Sequence: Synthetic oligonucleotide
agguacuuccagcagugga

SEQ ID NO: 1632158 - RNA, 19 nt, Artificial Sequence
  Description of Artificial Sequence: Synthetic oligonucleotide
guuuggucaggcgacuuag

SEQ ID NO: 1632159 - RNA, 19 nt, Artificial Sequence
  Description of Artificial Sequence: Synthetic oligonucleotide
acgaugucucuuucacaac

SEQ ID NO: 1632160 - RNA, 19 nt, Artificial Sequence
  Description of Artificial Sequence: Synthetic oligonucleotide
cuggucguuucccagcccc

SEQ ID NO: 1632161 - RNA, 19 nt, Artificial Sequence
  Description of Artificial Sequence: Synthetic oligonucleotide
cacaaacuugguauagcuc

SEQ ID NO: 1632162 - RNA, 19 nt, Artificial Sequence
  Description of Artificial Sequence: Synthetic oligonucleotide
caucacaaacuugguauag

SEQ ID NO: 1632163 - RNA, 19 nt, Artificial Sequence
  Description of Artificial Sequence: Synthetic oligonucleotide
cagguuacagccccauaag

SEQ ID NO: 1632164 - RNA, 19 nt, Artificial Sequence
  Description of Artificial Sequence: Synthetic oligonucleotide
accagccccacaucuggac

SEQ ID NO: 1632165 - RNA, 19 nt, Artificial Sequence
  Description of Artificial Sequence: Synthetic oligonucleotide
uggcauaggugaagaagcu

SEQ ID NO: 1632166 - RNA, 19 nt, Artificial Sequence
  Description of Artificial Sequence: Synthetic oligonucleotide
agguuacagccccauaaga

SEQ ID NO: 1632167 - RNA, 19 nt, Artificial Sequence
  Description of Artificial Sequence: Synthetic oligonucleotide
aauguuuggucaggcgacu

SEQ ID NO: 1632168 - RNA, 19 nt, Artificial Sequence
  Description of Artificial Sequence: Synthetic oligonucleotide
acaguggacaaggcguugg

SEQ ID NO: 1632169 - RNA, 19 nt, Artificial Sequence
  Description of Artificial Sequence: Synthetic oligonucleotide
cacccggcggaaaagcagg

SEQ ID NO: 1632170 - RNA, 19 nt, Artificial Sequence
  Description of Artificial Sequence: Synthetic oligonucleotide
cagcaugcgggacacacac

SEQ ID NO: 1632171 - RNA, 19 nt, Artificial Sequence
  Description of Artificial Sequence: Synthetic oligonucleotide
agaugacgggcccucacca

SEQ ID NO: 1632172 - RNA, 19 nt, Artificial Sequence
  Description of Artificial Sequence: Synthetic oligonucleotide
ggcguuggacaucaggcgg

SEQ ID NO: 1632173 - RNA, 19 nt, Artificial Sequence
  Description of Artificial Sequence: Synthetic oligonucleotide
acucacgcugucauccacc

SEQ ID NO: 1632174 - RNA, 19 nt, Artificial Sequence
  Description of Artificial Sequence: Synthetic oligonucleotide
aagccgacgaagaauccca

SEQ ID NO: 1632175 - RNA, 19 nt, Artificial Sequence
  Description of Artificial Sequence: Synthetic oligonucleotide
acauggcaaauauggacau

SEQ ID NO: 1632176 - RNA, 19 nt, Artificial Sequence
  Description of Artificial Sequence: Synthetic oligonucleotide
agggcaaagcacgaccccg

SEQ ID NO: 1632177 - RNA, 19 nt, Artificial Sequence
  Description of Artificial Sequence: Synthetic oligonucleotide
aggaugggccagcaugcgg

SEQ ID NO: 1632178 - RNA, 19 nt, Artificial Sequence
  Description of Artificial Sequence: Synthetic oligonucleotide
uacuuggcauaggugaaga

SEQ ID NO: 1632179 - RNA, 19 nt, Artificial Sequence
  Description of Artificial Sequence: Synthetic oligonucleotide
agcgcgggccuccacuccc

SEQ ID NO: 1632180 - RNA, 19 nt, Artificial Sequence
  Description of Artificial Sequence: Synthetic oligonucleotide
gaugacgggcccucaccag

SEQ ID NO: 1632181 - RNA, 19 nt, Artificial Sequence
  Description of Artificial Sequence: Synthetic oligonucleotide
aguggacaaggcguuggac

SEQ ID NO: 1632182 - RNA, 19 nt, Artificial Sequence
  Description of Artificial Sequence: Synthetic oligonucleotide
auccaggacuugaacacgg

SEQ ID NO: 1632183 - RNA, 19 nt, Artificial Sequence
  Description of Artificial Sequence: Synthetic oligonucleotide
ucccaauggagcucaggac

SEQ ID NO: 1632184 - RNA, 19 nt, Artificial Sequence
  Description of Artificial Sequence: Synthetic oligonucleotide
aaggaugggccagcaugcg

SEQ ID NO: 1632185 - RNA, 19 nt, Artificial Sequence
  Description of Artificial Sequence: Synthetic oligonucleotide
aaacugcaccaugcagcgc

SEQ ID NO: 1632186 - RNA, 19 nt, Artificial Sequence
  Description of Artificial Sequence: Synthetic oligonucleotide
uccggagggaaaaccuucu

SEQ ID NO: 1632187 - RNA, 19 nt, Artificial Sequence
  Description of Artificial Sequence: Synthetic oligonucleotide
ugagaugacgggcccucac

SEQ ID NO: 1632188 - RNA, 19 nt, Artificial Sequence
  Description of Artificial Sequence: Synthetic oligonucleotide
aggacgccacuguacuugg

SEQ ID NO: 1632189 - RNA, 19 nt, Artificial Sequence
  Description of Artificial Sequence: Synthetic oligonucleotide
gacaaggcguuggacauca

SEQ ID NO: 1632190 - RNA, 19 nt, Artificial Sequence
  Description of Artificial Sequence: Synthetic oligonucleotide
augcgggacacacacugca

SEQ ID NO: 1632191 - RNA, 19 nt, Artificial Sequence
  Description of Artificial Sequence: Synthetic oligonucleotide
gaugacacccggcggaaaa

SEQ ID NO: 1632192 - RNA, 19 nt, Artificial Sequence
  Description of Artificial Sequence: Synthetic oligonucleotide
augcagcgcauugagauga

SEQ ID NO: 1632193 - RNA, 19 nt, Artificial Sequence
  Description of Artificial Sequence: Synthetic oligonucleotide
uguuuggucaggcgacuua

SEQ ID NO: 1632194 - RNA, 19 nt, Artificial Sequence
  Description of Artificial Sequence: Synthetic oligonucleotide
uagagcagcggguggcuca

SEQ ID NO: 1632195 - RNA, 19 nt, Artificial Sequence
  Description of Artificial Sequence: Synthetic oligonucleotide
gcaugcgggacacacacug

SEQ ID NO: 1632196 - RNA, 19 nt, Artificial Sequence
  Description of Artificial Sequence: Synthetic oligonucleotide
caccaugcagcgcauugag

SEQ ID NO: 1632197 - RNA, 19 nt, Artificial Sequence
  Description of Artificial Sequence: Synthetic oligonucleotide
ggggcaucggcucaugacc

SEQ ID NO: 1632198 - RNA, 19 nt, Artificial Sequence
  Description of Artificial Sequence: Synthetic oligonucleotide
ggucaggcgacuuagguua

SEQ ID NO: 1632199 - RNA, 19 nt, Artificial Sequence
  Description of Artificial Sequence: Synthetic oligonucleotide
cucauccggagggaaaacc

SEQ ID NO: 1632200 - RNA, 19 nt, Artificial Sequence
  Description of Artificial Sequence: Synthetic oligonucleotide
ggaugggccagcaugcggg

SEQ ID NO: 1632201 - RNA, 19 nt, Artificial Sequence
  Description of Artificial Sequence: Synthetic oligonucleotide
caugcagcgcauugagaug

SEQ ID NO: 1632202 - RNA, 19 nt, Artificial Sequence
  Description of Artificial Sequence: Synthetic oligonucleotide
gguauagcuccugauggcc

SEQ ID NO: 1632203 - RNA, 19 nt, Artificial Sequence
  Description of Artificial Sequence: Synthetic oligonucleotide
aggugagggauuaagccga

SEQ ID NO: 1632204 - RNA, 19 nt, Artificial Sequence
  Description of Artificial Sequence: Synthetic oligonucleotide
cagggacaggccaggaccc

SEQ ID NO: 1632205 - RNA, 19 nt, Artificial Sequence
  Description of Artificial Sequence: Synthetic oligonucleotide
ggcauugaugaagugggcc

SEQ ID NO: 1632206 - RNA, 19 nt, Artificial Sequence
  Description of Artificial Sequence: Synthetic oligonucleotide
auccggagggaaaaccuuc

SEQ ID NO: 1632207 - RNA, 19 nt, Artificial Sequence
  Description of Artificial Sequence: Synthetic oligonucleotide
cuagagucccucaggcauc

SEQ ID NO: 1632208 - RNA, 19 nt, Artificial Sequence
  Description of Artificial Sequence: Synthetic oligonucleotide
augacguguaaaggauggg

SEQ ID NO: 1632209 - RNA, 19 nt, Artificial Sequence
  Description of Artificial Sequence: Synthetic oligonucleotide
aagcacgaccccgaugaca

SEQ ID NO: 1632210 - RNA, 19 nt, Artificial Sequence
  Description of Artificial Sequence: Synthetic oligonucleotide
cccauaaauguuuggucag

SEQ ID NO: 1632211 - RNA, 19 nt, Artificial Sequence
  Description of Artificial Sequence: Synthetic oligonucleotide
ugacacccggcggaaaagc

SEQ ID NO: 1632212 - RNA, 19 nt, Artificial Sequence
  Description of Artificial Sequence: Synthetic oligonucleotide
guagaggaccuuccucccc

SEQ ID NO: 1632213 - RNA, 19 nt, Artificial Sequence
  Description of Artificial Sequence: Synthetic oligonucleotide
ggcgacuuagguuacucca

SEQ ID NO: 1632214 - RNA, 19 nt, Artificial Sequence
  Description of Artificial Sequence: Synthetic oligonucleotide
guugacagccaugaggucu

SEQ ID NO: 1632215 - RNA, 19 nt, Artificial Sequence
  Description of Artificial Sequence: Synthetic oligonucleotide
gagucccucaggcaucuga

SEQ ID NO: 1632216 - RNA, 19 nt, Artificial Sequence
  Description of Artificial Sequence: Synthetic oligonucleotide
cacgaccccgaugacaccc

SEQ ID NO: 1632217 - RNA, 19 nt, Artificial Sequence
  Description of Artificial Sequence: Synthetic oligonucleotide
uggucaggcgacuuagguu

SEQ ID NO: 1632218 - RNA, 19 nt, Artificial Sequence
  Description of Artificial Sequence: Synthetic oligonucleotide
cugaacgauguacuuggca

SEQ ID NO: 1632219 - RNA, 19 nt, Artificial Sequence
  Description of Artificial Sequence: Synthetic oligonucleotide
caggacgccacuguacuug

SEQ ID NO: 1632220 - RNA, 19 nt, Artificial Sequence
  Description of Artificial Sequence: Synthetic oligonucleotide
caugcgggacacacacugc

SEQ ID NO: 1632221 - RNA, 19 nt, Artificial Sequence
  Description of Artificial Sequence: Synthetic oligonucleotide
ucugagaugacgggcccuc

SEQ ID NO: 1632222 - RNA, 19 nt, Artificial Sequence
  Description of Artificial Sequence: Synthetic oligonucleotide
gagggauuaagccgacgaa

SEQ ID NO: 1632223 - RNA, 19 nt, Artificial Sequence
  Description of Artificial Sequence: Synthetic oligonucleotide
cacguagagcagcgggugg

SEQ ID NO: 1632224 - RNA, 19 nt, Artificial Sequence
  Description of Artificial Sequence: Synthetic oligonucleotide
caugaagccaggcugggcu

SEQ ID NO: 1632225 - RNA, 19 nt, Artificial Sequence
  Description of Artificial Sequence: Synthetic oligonucleotide
aagaagcucggcagguaga

SEQ ID NO: 1632226 - RNA, 19 nt, Artificial Sequence
  Description of Artificial Sequence: Synthetic oligonucleotide
guggucggggcguuguccc

SEQ ID NO: 1632227 - RNA, 19 nt, Artificial Sequence
  Description of Artificial Sequence: Synthetic oligonucleotide
gaagcucggcagguagagg

SEQ ID NO: 1632228 - RNA, 19 nt, Artificial Sequence
  Description of Artificial Sequence: Synthetic oligonucleotide
agguaggcauugaugaagu

SEQ ID NO: 1632229 - RNA, 19 nt, Artificial Sequence
  Description of Artificial Sequence: Synthetic oligonucleotide
ccaauggagcucaggacgc

SEQ ID NO: 1632230 - RNA, 19 nt, Artificial Sequence
  Description of Artificial Sequence: Synthetic oligonucleotide
augucucuuucacaacuuu

SEQ ID NO: 1632231 - RNA, 19 nt, Artificial Sequence
  Description of Artificial Sequence: Synthetic oligonucleotide
aucuucccaauggagcuca

SEQ ID NO: 1632232 - RNA, 19 nt, Artificial Sequence
  Description of Artificial Sequence: Synthetic oligonucleotide
cuggacagacacauggcaa

SEQ ID NO: 1632233 - RNA, 19 nt, Artificial Sequence
  Description of Artificial Sequence: Synthetic oligonucleotide
acgccacuguacuuggccu

SEQ ID NO: 1632234 - RNA, 19 nt, Artificial Sequence
  Description of Artificial Sequence: Synthetic oligonucleotide
acgggcccucaccagggac

SEQ ID NO: 1632235 - RNA, 19 nt, Artificial Sequence
  Description of Artificial Sequence: Synthetic oligonucleotide
ucuggucguuucccagccc

SEQ ID NO: 1632236 - RNA, 19 nt, Artificial Sequence
  Description of Artificial Sequence: Synthetic oligonucleotide
aucggcucaugacccaccu

SEQ ID NO: 1632237 - RNA, 19 nt, Artificial Sequence
  Description of Artificial Sequence: Synthetic oligonucleotide
gguuacuccagggcaaagc

SEQ ID NO: 1632238 - RNA, 19 nt, Artificial Sequence
  Description of Artificial Sequence: Synthetic oligonucleotide
gguaggucagcaugcuuac

SEQ ID NO: 1632239 - RNA, 19 nt, Artificial Sequence
  Description of Artificial Sequence: Synthetic oligonucleotide
augaagugggccagcaggu

SEQ ID NO: 1632240 - RNA, 19 nt, Artificial Sequence
  Description of Artificial Sequence: Synthetic oligonucleotide
agcccuaucuuuccaucaa

SEQ ID NO: 1632241 - RNA, 19 nt, Artificial Sequence
  Description of Artificial Sequence: Synthetic oligonucleotide
ugggaaccuggauucuggu

SEQ ID NO: 1632242 - RNA, 19 nt, Artificial Sequence
  Description of Artificial Sequence: Synthetic oligonucleotide
aggcauugaugaagugggc

SEQ ID NO: 1632243 - RNA, 19 nt, Artificial Sequence
  Description of Artificial Sequence: Synthetic oligonucleotide
agccacggaagagcuggcc

SEQ ID NO: 1632244 - RNA, 19 nt, Artificial Sequence
  Description of Artificial Sequence: Synthetic oligonucleotide
cucauacgaugucucuuuc

SEQ ID NO: 1632245 - RNA, 19 nt, Artificial Sequence
  Description of Artificial Sequence: Synthetic oligonucleotide
acggcugagccgcgggccg

SEQ ID NO: 1632246 - RNA, 19 nt, Artificial Sequence
  Description of Artificial Sequence: Synthetic oligonucleotide
cuucccaauggagcucagg

SEQ ID NO: 1632247 - RNA, 19 nt, Artificial Sequence
  Description of Artificial Sequence: Synthetic oligonucleotide
uauuggaaaccugcuccau

SEQ ID NO: 1632248 - RNA, 19 nt, Artificial Sequence
  Description of Artificial Sequence: Synthetic oligonucleotide
ggaaaccugcuccaucuca

SEQ ID NO: 1632249 - RNA, 19 nt, Artificial Sequence
  Description of Artificial Sequence: Synthetic oligonucleotide
uggaaaccugcuccaucuc

SEQ ID NO: 1632250 - RNA, 19 nt, Artificial Sequence
  Description of Artificial Sequence: Synthetic oligonucleotide
cauuggucccaaggguggg

SEQ ID NO: 1632251 - RNA, 19 nt, Artificial Sequence
  Description of Artificial Sequence: Synthetic oligonucleotide
cacuguacuuggccucccg

SEQ ID NO: 1632252 - RNA, 19 nt, Artificial Sequence
  Description of Artificial Sequence: Synthetic oligonucleotide
gucacgcccgcgcccaggg

SEQ ID NO: 1632253 - RNA, 19 nt, Artificial Sequence
  Description of Artificial Sequence: Synthetic oligonucleotide
cacgcccgcgcccagggcc

SEQ ID NO: 1632254 - RNA, 19 nt, Artificial Sequence
  Description of Artificial Sequence: Synthetic oligonucleotide
cuccaacaagcaggaaggg

SEQ ID NO: 1632255 - RNA, 19 nt, Artificial Sequence
  Description of Artificial Sequence: Synthetic oligonucleotide
augacacccggcggaaaag

SEQ ID NO: 1632256 - RNA, 19 nt, Artificial Sequence
  Description of Artificial Sequence: Synthetic oligonucleotide
ccuuauuggaaaccugcuc

SEQ ID NO: 1632257 - RNA, 19 nt, Artificial Sequence
  Description of Artificial Sequence: Synthetic oligonucleotide
uagagucccucaggcaucu

SEQ ID NO: 1632258 - RNA, 19 nt, Artificial Sequence
  Description of Artificial Sequence: Synthetic oligonucleotide
ccauaaauguuuggucagg

SEQ ID NO: 1632259 - RNA, 19 nt, Artificial Sequence
  Description of Artificial Sequence: Synthetic oligonucleotide
ccaggacuugaacacgggg

SEQ ID NO: 1632260 - RNA, 19 nt, Artificial Sequence
  Description of Artificial Sequence: Synthetic oligonucleotide
gggauuaagccgacgaaga

SEQ ID NO: 1632261 - RNA, 19 nt, Artificial Sequence
  Description of Artificial Sequence: Synthetic oligonucleotide
gaccuuccuccccagcaca

SEQ ID NO: 1632262 - RNA, 19 nt, Artificial Sequence
  Description of Artificial Sequence: Synthetic oligonucleotide
cacugcaucaucaucucau

SEQ ID NO: 1632263 - RNA, 19 nt, Artificial Sequence
  Description of Artificial Sequence: Synthetic oligonucleotide
ugcgggacacacacugcau

SEQ ID NO: 1632264 - RNA, 19 nt, Artificial Sequence
  Description of Artificial Sequence: Synthetic oligonucleotide
guacuuccagcaguggauc

SEQ ID NO: 1632265 - RNA, 19 nt, Artificial Sequence
  Description of Artificial Sequence: Synthetic oligonucleotide
guguaaaggaugggccagc

SEQ ID NO: 1632266 - RNA, 19 nt, Artificial Sequence
  Description of Artificial Sequence: Synthetic oligonucleotide
cucacgcugucauccacca

SEQ ID NO: 1632267 - RNA, 19 nt, Artificial Sequence
  Description of Artificial Sequence: Synthetic oligonucleotide
uagguuacuccagggcaaa

SEQ ID NO: 1632268 - RNA, 19 nt, Artificial Sequence
  Description of Artificial Sequence: Synthetic oligonucleotide
ggaccccauaaauguuugg

SEQ ID NO: 1632269 - RNA, 19 nt, Artificial Sequence
  Description of Artificial Sequence: Synthetic oligonucleotide
agcgccucgguggucgggg

SEQ ID NO: 1632270 - RNA, 19 nt, Artificial Sequence
  Description of Artificial Sequence: Synthetic oligonucleotide
gaaaagcaggcuggagcca

SEQ ID NO: 1632271 - RNA, 19 nt, Artificial Sequence
  Description of Artificial Sequence: Synthetic oligonucleotide
gacggcugagccgcgggcc

SEQ ID NO: 1632272 - RNA, 19 nt, Artificial Sequence
  Description of Artificial Sequence: Synthetic oligonucleotide
ucggcucaugacccaccug

SEQ ID NO: 1632273 - RNA, 19 nt, Artificial Sequence
  Description of Artificial Sequence: Synthetic oligonucleotide
cauugagaugacguguaaa

SEQ ID NO: 1632274 - RNA, 19 nt, Artificial Sequence
  Description of Artificial Sequence: Synthetic oligonucleotide
gugaagucuucaugucauc

SEQ ID NO: 1632275 - RNA, 19 nt, Artificial Sequence
  Description of Artificial Sequence: Synthetic oligonucleotide
agcucggcagguagaggac

SEQ ID NO: 1632276 - RNA, 19 nt, Artificial Sequence
  Description of Artificial Sequence: Synthetic oligonucleotide
guccccggagcccggaccc

SEQ ID NO: 1632277 - RNA, 19 nt, Artificial Sequence
  Description of Artificial Sequence: Synthetic oligonucleotide
gcugccccgggucacagug

SEQ ID NO: 1632278 - RNA, 19 nt, Artificial Sequence
  Description of Artificial Sequence: Synthetic oligonucleotide
cagccccauaagaaaacca

SEQ ID NO: 1632279 - RNA, 19 nt, Artificial Sequence
  Description of Artificial Sequence: Synthetic oligonucleotide
cugagccgcgggccgaggg

SEQ ID NO: 1632280 - RNA, 19 nt, Artificial Sequence
  Description of Artificial Sequence: Synthetic oligonucleotide
uuccaucaaccugaacgau

SEQ ID NO: 1632281 - RNA, 19 nt, Artificial Sequence
  Description of Artificial Sequence: Synthetic oligonucleotide
ugcagcgcauugagaugac

SEQ ID NO: 1632282 - RNA, 19 nt, Artificial Sequence
  Description of Artificial Sequence: Synthetic oligonucleotide
cagcgcauugagaugacgu

SEQ ID NO: 1632283 - RNA, 19 nt, Artificial Sequence
  Description of Artificial Sequence: Synthetic oligonucleotide
ccgacgaagaaucccagca

SEQ ID NO: 1632284 - RNA, 19 nt, Artificial Sequence
  Description of Artificial Sequence: Synthetic oligonucleotide
uccugcgcgccgacggcug

SEQ ID NO: 1632285 - RNA, 19 nt, Artificial Sequence
  Description of Artificial Sequence: Synthetic oligonucleotide
ggauuaagccgacgaagaa

SEQ ID NO: 1632286 - RNA, 19 nt, Artificial Sequence
  Description of Artificial Sequence: Synthetic oligonucleotide
cagcccuaucuuuccauca

SEQ ID NO: 1632287 - RNA, 19 nt, Artificial Sequence
  Description of Artificial Sequence: Synthetic oligonucleotide
gugagggauuaagccgacg

SEQ ID NO: 1632288 - RNA, 19 nt, Artificial Sequence
  Description of Artificial Sequence: Synthetic oligonucleotide
gcgacuuagguuacuccag

SEQ ID NO: 1632289 - RNA, 19 nt, Artificial Sequence
  Description of Artificial Sequence: Synthetic oligonucleotide
gguaggcauugaugaagug

SEQ ID NO: 1632290 - RNA, 19 nt, Artificial Sequence
  Description of Artificial Sequence: Synthetic oligonucleotide
ccgccguccauccugcgcg

SEQ ID NO: 1632291 - RNA, 19 nt, Artificial Sequence
  Description of Artificial Sequence: Synthetic oligonucleotide
gaaaccugcuccaucucau

SEQ ID NO: 1632292 - RNA, 19 nt, Artificial Sequence
  Description of Artificial Sequence: Synthetic oligonucleotide
gaaccuggauucuggucgu

SEQ ID NO: 1632293 - RNA, 19 nt, Artificial Sequence
  Description of Artificial Sequence: Synthetic oligonucleotide
cucaggacgccacuguacu

SEQ ID NO: 1632294 - RNA, 19 nt, Artificial Sequence
  Description of Artificial Sequence: Synthetic oligonucleotide
caucucauccggagggaaa

SEQ ID NO: 1632295 - RNA, 19 nt, Artificial Sequence
  Description of Artificial Sequence: Synthetic oligonucleotide
caggcgacuuagguuacuc

SEQ ID NO: 1632296 - RNA, 19 nt, Artificial Sequence
  Description of Artificial Sequence: Synthetic oligonucleotide
ugcuuacugcuauccccau

SEQ ID NO: 1632297 - RNA, 19 nt, Artificial Sequence
  Description of Artificial Sequence: Synthetic oligonucleotide
ucaggacgccacuguacuu

SEQ ID NO: 1632298 - RNA, 19 nt, Artificial Sequence
  Description of Artificial Sequence: Synthetic oligonucleotide
cgacuuagguuacuccagg

SEQ ID NO: 1632299 - RNA, 19 nt, Artificial Sequence
  Description of Artificial Sequence: Synthetic oligonucleotide
cauccugcgcgccgacggc

SEQ ID NO: 1632300 - RNA, 19 nt, Artificial Sequence
  Description of Artificial Sequence: Synthetic oligonucleotide
gcguuggacaucaggcggg

SEQ ID NO: 1632301 - RNA, 19 nt, Artificial Sequence
  Description of Artificial Sequence: Synthetic oligonucleotide
acccggcggaaaagcaggc

SEQ ID NO: 1632302 - RNA, 19 nt, Artificial Sequence
  Description of Artificial Sequence: Synthetic oligonucleotide
ggauucuggucguuuccca

SEQ ID NO: 1632303 - RNA, 19 nt, Artificial Sequence
  Description of Artificial Sequence: Synthetic oligonucleotide
gacagacacauggcaaaua

SEQ ID NO: 1632304 - RNA, 19 nt, Artificial Sequence
  Description of Artificial Sequence: Synthetic oligonucleotide
cacaucgcccaggagguga

SEQ ID NO: 1632305 - RNA, 19 nt, Artificial Sequence
  Description of Artificial Sequence: Synthetic oligonucleotide
ggguaggucagcaugcuua

SEQ ID NO: 1632306 - RNA, 19 nt, Artificial Sequence
  Description of Artificial Sequence: Synthetic oligonucleotide
agguuacuccagggcaaag

SEQ ID NO: 1632307 - RNA, 19 nt, Artificial Sequence
  Description of Artificial Sequence: Synthetic oligonucleotide
caucucauacgaugucucu

SEQ ID NO: 1632308 - RNA, 19 nt, Artificial Sequence
  Description of Artificial Sequence: Synthetic oligonucleotide
ccggcggaaaagcaggcug

SEQ ID NO: 1632309 - RNA, 19 nt, Artificial Sequence
  Description of Artificial Sequence: Synthetic oligonucleotide
ggaccuuccuccccagcac

SEQ ID NO: 1632310 - RNA, 19 nt, Artificial Sequence
  Description of Artificial Sequence: Synthetic oligonucleotide
uggucggggcguugucccc

SEQ ID NO: 1632311 - RNA, 19 nt, Artificial Sequence
  Description of Artificial Sequence: Synthetic oligonucleotide
ccaucaaccugaacgaugu

SEQ ID NO: 1632312 - RNA, 19 nt, Artificial Sequence
  Description of Artificial Sequence: Synthetic oligonucleotide
ucaggcgacuuagguuacu

SEQ ID NO: 1632313 - RNA, 19 nt, Artificial Sequence
  Description of Artificial Sequence: Synthetic oligonucleotide
ucgguggucggggcguugu

SEQ ID NO: 1632314 - RNA, 19 nt, Artificial Sequence
  Description of Artificial Sequence: Synthetic oligonucleotide
gcaggcuggagccacggaa

SEQ ID NO: 1632315 - RNA, 19 nt, Artificial Sequence
  Description of Artificial Sequence: Synthetic oligonucleotide
gguggcucagagccgucac

SEQ ID NO: 1632316 - RNA, 19 nt, Artificial Sequence
  Description of Artificial Sequence: Synthetic oligonucleotide
acgaccccgaugacacccg

SEQ ID NO: 1632317 - RNA, 19 nt, Artificial Sequence
  Description of Artificial Sequence: Synthetic oligonucleotide
gggcaucggcucaugaccc

SEQ ID NO: 1632318 - RNA, 19 nt, Artificial Sequence
  Description of Artificial Sequence: Synthetic oligonucleotide
gucagcaugcuuacugcua

SEQ ID NO: 1632319 - RNA, 19 nt, Artificial Sequence
  Description of Artificial Sequence: Synthetic oligonucleotide
gucggggcguuguccccgg

SEQ ID NO: 1632320 - RNA, 19 nt, Artificial Sequence
  Description of Artificial Sequence: Synthetic oligonucleotide
cacaguggacaaggcguug

SEQ ID NO: 1632321 - RNA, 19 nt, Artificial Sequence
  Description of Artificial Sequence: Synthetic oligonucleotide
agccgacgaagaaucccag

SEQ ID NO: 1632322 - RNA, 19 nt, Artificial Sequence
  Description of Artificial Sequence: Synthetic oligonucleotide
gccgacgaagaaucccagc

SEQ ID NO: 1632323 - RNA, 19 nt, Artificial Sequence
  Description of Artificial Sequence: Synthetic oligonucleotide
gccagcaugcgggacacac

SEQ ID NO: 1632324 - RNA, 19 nt, Artificial Sequence
  Description of Artificial Sequence: Synthetic oligonucleotide
agggguaggucagcaugcu

SEQ ID NO: 1632325 - RNA, 19 nt, Artificial Sequence
  Description of Artificial Sequence: Synthetic oligonucleotide
cacggaagagcuggcccug

SEQ ID NO: 1632326 - RNA, 19 nt, Artificial Sequence
  Description of Artificial Sequence: Synthetic oligonucleotide
gagcgcgggccuccacucc

SEQ ID NO: 1632327 - RNA, 19 nt, Artificial Sequence
  Description of Artificial Sequence: Synthetic oligonucleotide
cgacgaagaaucccagcag

SEQ ID NO: 1632328 - RNA, 19 nt, Artificial Sequence
  Description of Artificial Sequence: Synthetic oligonucleotide
gaccccgaugacacccggc

SEQ ID NO: 1632329 - RNA, 19 nt, Artificial Sequence
  Description of Artificial Sequence: Synthetic oligonucleotide
gguggucggggcguugucc

SEQ ID NO: 1632330 - RNA, 19 nt, Artificial Sequence
  Description of Artificial Sequence: Synthetic oligonucleotide
ccaugcagcgcauugagau

SEQ ID NO: 1632331 - RNA, 19 nt, Artificial Sequence
  Description of Artificial Sequence: Synthetic oligonucleotide
agcagguuacagccccaua

SEQ ID NO: 1632332 - RNA, 19 nt, Artificial Sequence
  Description of Artificial Sequence: Synthetic oligonucleotide
gcccuaucuuuccaucaac

SEQ ID NO: 1632333 - RNA, 19 nt, Artificial Sequence
  Description of Artificial Sequence: Synthetic oligonucleotide
acgcugucauccaccaggu

SEQ ID NO: 1632334 - RNA, 19 nt, Artificial Sequence
  Description of Artificial Sequence: Synthetic oligonucleotide
cggcggaaaagcaggcugg

SEQ ID NO: 1632335 - RNA, 19 nt, Artificial Sequence
  Description of Artificial Sequence: Synthetic oligonucleotide
gguacuuccagcaguggau

SEQ ID NO: 1632336 - RNA, 19 nt, Artificial Sequence
  Description of Artificial Sequence: Synthetic oligonucleotide
caggaccccauaaauguuu

SEQ ID NO: 1632337 - RNA, 19 nt, Artificial Sequence
  Description of Artificial Sequence: Synthetic oligonucleotide
caugacccaccuggaucag

SEQ ID NO: 1632338 - RNA, 19 nt, Artificial Sequence
  Description of Artificial Sequence: Synthetic oligonucleotide
gcagcgcauugagaugacg

SEQ ID NO: 1632339 - RNA, 19 nt, Artificial Sequence
  Description of Artificial Sequence: Synthetic oligonucleotide
gcuuacugcuauccccauc

SEQ ID NO: 1632340 - RNA, 19 nt, Artificial Sequence
  Description of Artificial Sequence: Synthetic oligonucleotide
accuggauucuggucguuu

SEQ ID NO: 1632341 - RNA, 19 nt, Artificial Sequence
  Description of Artificial Sequence: Synthetic oligonucleotide
auguuuggucaggcgacuu

SEQ ID NO: 1632342 - RNA, 19 nt, Artificial Sequence
  Description of Artificial Sequence: Synthetic oligonucleotide
cugcacacucagguacuuc

SEQ ID NO: 1632343 - RNA, 19 nt, Artificial Sequence
  Description of Artificial Sequence: Synthetic oligonucleotide
gcuucacguagagcagcgg

SEQ ID NO: 1632344 - RNA, 19 nt, Artificial Sequence
  Description of Artificial Sequence: Synthetic oligonucleotide
guaaaggaugggccagcau

SEQ ID NO: 1632345 - RNA, 19 nt, Artificial Sequence
  Description of Artificial Sequence: Synthetic oligonucleotide
gcucggcagguagaggacc

SEQ ID NO: 1632346 - RNA, 19 nt, Artificial Sequence
  Description of Artificial Sequence: Synthetic oligonucleotide
gcgccgacggcugagccgc

SEQ ID NO: 1632347 - RNA, 19 nt, Artificial Sequence
  Description of Artificial Sequence: Synthetic oligonucleotide
gcuauccccaucacaaacu

SEQ ID NO: 1632348 - RNA, 19 nt, Artificial Sequence
  Description of Artificial Sequence: Synthetic oligonucleotide
guagagcagcggguggcuc

SEQ ID NO: 1632349 - RNA, 19 nt, Artificial Sequence
  Description of Artificial Sequence: Synthetic oligonucleotide
auccugcgcgccgacggcu

SEQ ID NO: 1632350 - RNA, 19 nt, Artificial Sequence
  Description of Artificial Sequence: Synthetic oligonucleotide
cucggcagguagaggaccu

SEQ ID NO: 1632351 - RNA, 19 nt, Artificial Sequence
  Description of Artificial Sequence: Synthetic oligonucleotide
gcauugagaugacguguaa

SEQ ID NO: 1632352 - RNA, 19 nt, Artificial Sequence
  Description of Artificial Sequence: Synthetic oligonucleotide
gucgcgagcgcgggccucc

SEQ ID NO: 1632353 - RNA, 19 nt, Artificial Sequence
  Description of Artificial Sequence: Synthetic oligonucleotide
caucgcccaggaggugagg

SEQ ID NO: 1632354 - RNA, 19 nt, Artificial Sequence
  Description of Artificial Sequence: Synthetic oligonucleotide
cucccgccauccccgcggc

SEQ ID NO: 1632355 - RNA, 19 nt, Artificial Sequence
  Description of Artificial Sequence: Synthetic oligonucleotide
ccaucacaaacuugguaua

SEQ ID NO: 1632356 - RNA, 19 nt, Artificial Sequence
  Description of Artificial Sequence: Synthetic oligonucleotide
cccgaugacacccggcgga

SEQ ID NO: 1632357 - RNA, 19 nt, Artificial Sequence
  Description of Artificial Sequence: Synthetic oligonucleotide
caaccugaacgauguacuu

SEQ ID NO: 1632358 - RNA, 19 nt, Artificial Sequence
  Description of Artificial Sequence: Synthetic oligonucleotide
agugggccagcagguuaca

SEQ ID NO: 1632359 - RNA, 19 nt, Artificial Sequence
  Description of Artificial Sequence: Synthetic oligonucleotide
gccgccguccauccugcgc

SEQ ID NO: 1632360 - RNA, 19 nt, Artificial Sequence
  Description of Artificial Sequence: Synthetic oligonucleotide
cauccggagggaaaaccuu

SEQ ID NO: 1632361 - RNA, 19 nt, Artificial Sequence
  Description of Artificial Sequence: Synthetic oligonucleotide
ggcaucggcucaugaccca

SEQ ID NO: 1632362 - RNA, 19 nt, Artificial Sequence
  Description of Artificial Sequence: Synthetic oligonucleotide
ggugagggauuaagccgac

SEQ ID NO: 1632363 - RNA, 19 nt, Artificial Sequence
  Description of Artificial Sequence: Synthetic oligonucleotide
gggccuccacucccgccgg

SEQ ID NO: 1632364 - RNA, 19 nt, Artificial Sequence
  Description of Artificial Sequence: Synthetic oligonucleotide
cgggacacacacugcauca

SEQ ID NO: 1632365 - RNA, 19 nt, Artificial Sequence
  Description of Artificial Sequence: Synthetic oligonucleotide
cgaugucucuuucacaacu

SEQ ID NO: 1632366 - RNA, 19 nt, Artificial Sequence
  Description of Artificial Sequence: Synthetic oligonucleotide
ccccgaugacacccggcgg

SEQ ID NO: 1632367 - RNA, 19 nt, Artificial Sequence
  Description of Artificial Sequence: Synthetic oligonucleotide
ggugcgcgcggugcgcggg

SEQ ID NO: 1632368 - RNA, 19 nt, Artificial Sequence
  Description of Artificial Sequence: Synthetic oligonucleotide
ggcggaaaagcaggcugga

SEQ ID NO: 1632369 - RNA, 19 nt, Artificial Sequence
  Description of Artificial Sequence: Synthetic oligonucleotide
gcugggcuagagucccuca

SEQ ID NO: 1632370 - RNA, 19 nt, Artificial Sequence
  Description of Artificial Sequence: Synthetic oligonucleotide
ucggcagguagaggaccuu

SEQ ID NO: 1632371 - RNA, 19 nt, Artificial Sequence
  Description of Artificial Sequence: Synthetic oligonucleotide
caugcugccccgggucaca

SEQ ID NO: 1632372 - RNA, 19 nt, Artificial Sequence
  Description of Artificial Sequence: Synthetic oligonucleotide
ccgacggcugagccgcggg

SEQ ID NO: 1632373 - RNA, 19 nt, Artificial Sequence
  Description of Artificial Sequence: Synthetic oligonucleotide
gcgcauugagaugacgugu

SEQ ID NO: 1632374 - RNA, 19 nt, Artificial Sequence
  Description of Artificial Sequence: Synthetic oligonucleotide
ccacaucuggacagacaca

SEQ ID NO: 1632375 - RNA, 19 nt, Artificial Sequence
  Description of Artificial Sequence: Synthetic oligonucleotide
ucggggcguuguccccgga

SEQ ID NO: 1632376 - RNA, 19 nt, Artificial Sequence
  Description of Artificial Sequence: Synthetic oligonucleotide
guccauccugcgcgccgac

SEQ ID NO: 1632377 - RNA, 19 nt, Artificial Sequence
  Description of Artificial Sequence: Synthetic oligonucleotide
gugcgcgcggugcgcgggc

SEQ ID NO: 1632378 - RNA, 19 nt, Artificial Sequence
  Description of Artificial Sequence: Synthetic oligonucleotide
cgcauugagaugacgugua

SEQ ID NO: 1632379 - RNA, 19 nt, Artificial Sequence
  Description of Artificial Sequence: Synthetic oligonucleotide
gcggcgggucgcgagcgcg

SEQ ID NO: 1632380 - RNA, 19 nt, Artificial Sequence
  Description of Artificial Sequence: Synthetic oligonucleotide
gaacagcgccucggugguc

SEQ ID NO: 1632381 - RNA, 19 nt, Artificial Sequence
  Description of Artificial Sequence: Synthetic oligonucleotide
cugcgcgccgacggcugag

SEQ ID NO: 1632382 - RNA, 19 nt, Artificial Sequence
  Description of Artificial Sequence: Synthetic oligonucleotide
agagucccucaggcaucug

SEQ ID NO: 1632383 - RNA, 19 nt, Artificial Sequence
  Description of Artificial Sequence: Synthetic oligonucleotide
ggcgggucgcgagcgcggg

SEQ ID NO: 1632384 - RNA, 19 nt, Artificial Sequence
  Description of Artificial Sequence: Synthetic oligonucleotide
cagcgccucgguggucggg

SEQ ID NO: 1632385 - RNA, 19 nt, Artificial Sequence
  Description of Artificial Sequence: Synthetic oligonucleotide
ccagcaugcgggacacaca

SEQ ID NO: 1632386 - RNA, 19 nt, Artificial Sequence
  Description of Artificial Sequence: Synthetic oligonucleotide
guaggucagcaugcuuacu

SEQ ID NO: 1632387 - RNA, 19 nt, Artificial Sequence
  Description of Artificial Sequence: Synthetic oligonucleotide
ccagcacauuggucccaag

SEQ ID NO: 1632388 - RNA, 19 nt, Artificial Sequence
  Description of Artificial Sequence: Synthetic oligonucleotide
gggacaggccaggacccca

SEQ ID NO: 1632389 - RNA, 19 nt, Artificial Sequence
  Description of Artificial Sequence: Synthetic oligonucleotide
ggaagggguaggucagcau

SEQ ID NO: 1632390 - RNA, 19 nt, Artificial Sequence
  Description of Artificial Sequence: Synthetic oligonucleotide
cgccacuguacuuggccuc

SEQ ID NO: 1632391 - RNA, 19 nt, Artificial Sequence
  Description of Artificial Sequence: Synthetic oligonucleotide
gccgcgagcuccugcucca

SEQ ID NO: 1632392 - RNA, 19 nt, Artificial Sequence
  Description of Artificial Sequence: Synthetic oligonucleotide
gcacgaccccgaugacacc

SEQ ID NO: 1632393 - RNA, 19 nt, Artificial Sequence
  Description of Artificial Sequence: Synthetic oligonucleotide
cccgcgccgccguccaucc

SEQ ID NO: 1632394 - RNA, 19 nt, Artificial Sequence
  Description of Artificial Sequence: Synthetic oligonucleotide
ggcccugcacacucaggua

SEQ ID NO: 1632395 - RNA, 19 nt, Artificial Sequence
  Description of Artificial Sequence: Synthetic oligonucleotide
ccccggaacagcccuaucu

SEQ ID NO: 1632396 - RNA, 19 nt, Artificial Sequence
  Description of Artificial Sequence: Synthetic oligonucleotide
ccacggaagagcuggcccu

SEQ ID NO: 1632397 - RNA, 19 nt, Artificial Sequence
  Description of Artificial Sequence: Synthetic oligonucleotide
ggacgccacuguacuuggc

SEQ ID NO: 1632398 - RNA, 19 nt, Artificial Sequence
  Description of Artificial Sequence: Synthetic oligonucleotide
gggugucacucacgcuguc

SEQ ID NO: 1632399 - RNA, 19 nt, Artificial Sequence
  Description of Artificial Sequence: Synthetic oligonucleotide
ccccuggggugucacucac

SEQ ID NO: 1632400 - RNA, 19 nt, Artificial Sequence
  Description of Artificial Sequence: Synthetic oligonucleotide
gcgcgccgacggcugagcc

SEQ ID NO: 1632401 - RNA, 19 nt, Artificial Sequence
  Description of Artificial Sequence: Synthetic oligonucleotide
gccuccacucccgccggug

SEQ ID NO: 1632402 - RNA, 19 nt, Artificial Sequence
  Description of Artificial Sequence: Synthetic oligonucleotide
gccgacggcugagccgcgg

SEQ ID NO: 1632403 - RNA, 19 nt, Artificial Sequence
  Description of Artificial Sequence: Synthetic oligonucleotide
ucgcgagcgcgggccucca

SEQ ID NO: 1632404 - RNA, 19 nt, Artificial Sequence
  Description of Artificial Sequence: Synthetic oligonucleotide
ggcaaagcacgaccccgau

SEQ ID NO: 1632405 - RNA, 19 nt, Artificial Sequence
  Description of Artificial Sequence: Synthetic oligonucleotide
cgagcgcgggccuccacuc

SEQ ID NO: 1632406 - RNA, 19 nt, Artificial Sequence
  Description of Artificial Sequence: Synthetic oligonucleotide
ccgggucacaguggacaag

SEQ ID NO: 1632407 - RNA, 19 nt, Artificial Sequence
  Description of Artificial Sequence: Synthetic oligonucleotide
cgaccccgaugacacccgg

SEQ ID NO: 1632408 - RNA, 19 nt, Artificial Sequence
  Description of Artificial Sequence: Synthetic oligonucleotide
gcgggccgaggguggcggg

SEQ ID NO: 1632409 - RNA, 19 nt, Artificial Sequence
  Description of Artificial Sequence: Synthetic oligonucleotide
cggggcguuguccccggag

SEQ ID NO: 1632410 - RNA, 19 nt, Artificial Sequence
  Description of Artificial Sequence: Synthetic oligonucleotide
gcgagcgcgggccuccacu

SEQ ID NO: 1632411 - RNA, 19 nt, Artificial Sequence
  Description of Artificial Sequence: Synthetic oligonucleotide
cgcgcccagggccacgaac

SEQ ID NO: 1632412 - RNA, 19 nt, Artificial Sequence
  Description of Artificial Sequence: Synthetic oligonucleotide
cgacggcugagccgcgggc

SEQ ID NO: 1632413 - RNA, 19 nt, Artificial Sequence
  Description of Artificial Sequence: Synthetic oligonucleotide
gcugagccgcgggccgagg

SEQ ID NO: 1632414 - RNA, 19 nt, Artificial Sequence
  Description of Artificial Sequence: Synthetic oligonucleotide
cguuguccccggagcccgg

SEQ ID NO: 1632415 - RNA, 19 nt, Artificial Sequence
  Description of Artificial Sequence: Synthetic oligonucleotide
gcgccucgguggucggggc

SEQ ID NO: 1632416 - RNA, 19 nt, Artificial Sequence
  Description of Artificial Sequence: Synthetic oligonucleotide
gggacacacacugcaucau

SEQ ID NO: 1632417 - RNA, 19 nt, Artificial Sequence
  Description of Artificial Sequence: Synthetic oligonucleotide
gcgcgcggugcgcgggcgg

SEQ ID NO: 1632418 - RNA, 19 nt, Artificial Sequence
  Description of Artificial Sequence: Synthetic oligonucleotide
cccgccccacaaacugcac

SEQ ID NO: 1632419 - RNA, 19 nt, Artificial Sequence
  Description of Artificial Sequence: Synthetic oligonucleotide
cccggaacagcccuaucuu

SEQ ID NO: 1632420 - RNA, 19 nt, Artificial Sequence
  Description of Artificial Sequence: Synthetic oligonucleotide
gccguccauccugcgcgcc

SEQ ID NO: 1632421 - RNA, 19 nt, Artificial Sequence
  Description of Artificial Sequence: Synthetic oligonucleotide
cccugcacacucagguacu

SEQ ID NO: 1632422 - RNA, 19 nt, Artificial Sequence
  Description of Artificial Sequence: Synthetic oligonucleotide
gcggguggcucagagccgu

SEQ ID NO: 1632423 - RNA, 19 nt, Artificial Sequence
  Description of Artificial Sequence: Synthetic oligonucleotide
gggguaggucagcaugcuu

SEQ ID NO: 1632424 - RNA, 19 nt, Artificial Sequence
  Description of Artificial Sequence: Synthetic oligonucleotide
cggcgggucgcgagcgcgg

SEQ ID NO: 1632425 - RNA, 19 nt, Artificial Sequence
  Description of Artificial Sequence: Synthetic oligonucleotide
ccaggaccccauaaauguu

SEQ ID NO: 1632426 - RNA, 19 nt, Artificial Sequence
  Description of Artificial Sequence: Synthetic oligonucleotide
cgaacagcgccucgguggu

SEQ ID NO: 1632427 - RNA, 19 nt, Artificial Sequence
  Description of Artificial Sequence: Synthetic oligonucleotide
ccggaacagcccuaucuuu

SEQ ID NO: 1632428 - RNA, 19 nt, Artificial Sequence
  Description of Artificial Sequence: Synthetic oligonucleotide
ccacaucgcccaggaggug

SEQ ID NO: 1632429 - RNA, 19 nt, Artificial Sequence
  Description of Artificial Sequence: Synthetic oligonucleotide
cgccguccauccugcgcgc

SEQ ID NO: 1632430 - RNA, 19 nt, Artificial Sequence
  Description of Artificial Sequence: Synthetic oligonucleotide
ggucgcgagcgcgggccuc

SEQ ID NO: 1632431 - RNA, 19 nt, Artificial Sequence
  Description of Artificial Sequence: Synthetic oligonucleotide
cgucacgcccgcgcccagg

SEQ ID NO: 1632432 - RNA, 19 nt, Artificial Sequence
  Description of Artificial Sequence: Synthetic oligonucleotide
ccgaugacacccggcggaa

SEQ ID NO: 1632433 - RNA, 19 nt, Artificial Sequence
  Description of Artificial Sequence: Synthetic oligonucleotide
gccccggaacagcccuauc

SEQ ID NO: 1632434 - RNA, 19 nt, Artificial Sequence
  Description of Artificial Sequence: Synthetic oligonucleotide
ccccgcgccgccguccauc

SEQ ID NO: 1632435 - RNA, 19 nt, Artificial Sequence
  Description of Artificial Sequence: Synthetic oligonucleotide
ccugcgcgccgacggcuga

SEQ ID NO: 1632436 - RNA, 19 nt, Artificial Sequence
  Description of Artificial Sequence: Synthetic oligonucleotide
ccggugcgccgccgcgagc

SEQ ID NO: 1632437 - RNA, 19 nt, Artificial Sequence
  Description of Artificial Sequence: Synthetic oligonucleotide
cgcgcggugcgcgggcggc

SEQ ID NO: 1632438 - RNA, 19 nt, Artificial Sequence
  Description of Artificial Sequence: Synthetic oligonucleotide
ccgucacgcccgcgcccag

SEQ ID NO: 1632439 - RNA, 19 nt, Artificial Sequence
  Description of Artificial Sequence: Synthetic oligonucleotide
cgguggucggggcguuguc

SEQ ID NO: 1632440 - RNA, 19 nt, Artificial Sequence
  Description of Artificial Sequence: Synthetic oligonucleotide
ccggagggaaaaccuucuu

SEQ ID NO: 1632441 - RNA, 19 nt, Artificial Sequence
  Description of Artificial Sequence: Synthetic oligonucleotide
cccggcggaaaagcaggcu

SEQ ID NO: 1632442 - RNA, 19 nt, Artificial Sequence
  Description of Artificial Sequence: Synthetic oligonucleotide
ggccuccacucccgccggu

SEQ ID NO: 1632443 - RNA, 19 nt, Artificial Sequence
  Description of Artificial Sequence: Synthetic oligonucleotide
cggugcgccgccgcgagcu

SEQ ID NO: 1632444 - RNA, 19 nt, Artificial Sequence
  Description of Artificial Sequence: Synthetic oligonucleotide
cgaugacacccggcggaaa

SEQ ID NO: 1632445 - RNA, 19 nt, Artificial Sequence
  Description of Artificial Sequence: Synthetic oligonucleotide
cgcgagcgcgggccuccac

SEQ ID NO: 1632446 - RNA, 19 nt, Artificial Sequence
  Description of Artificial Sequence: Synthetic oligonucleotide
cgccggugcgccgccgcga

SEQ ID NO: 1632447 - RNA, 19 nt, Artificial Sequence
  Description of Artificial Sequence: Synthetic oligonucleotide
ccucgguggucggggcguu

SEQ ID NO: 1632448 - RNA, 19 nt, Artificial Sequence
  Description of Artificial Sequence: Synthetic oligonucleotide
aacacaauaaguuacacug

SEQ ID NO: 1632449 - RNA, 19 nt, Artificial Sequence
  Description of Artificial Sequence: Synthetic oligonucleotide
aauaguaguagccaacggg

SEQ ID NO: 1632450 - RNA, 19 nt, Artificial Sequence
  Description of Artificial Sequence: Synthetic oligonucleotide
agagacaacacacacacac

SEQ ID NO: 1632451 - RNA, 19 nt, Artificial Sequence
  Description of Artificial Sequence: Synthetic oligonucleotide
aacacacacacacacacac

SEQ ID NO: 1632452 - RNA, 19 nt, Artificial Sequence
  Description of Artificial Sequence: Synthetic oligonucleotide
auaaaauaccacugaaccc

SEQ ID NO: 1632453 - RNA, 19 nt, Artificial Sequence
  Description of Artificial Sequence: Synthetic oligonucleotide
uacucaaauauuuacaaca

SEQ ID NO: 1632454 - RNA, 19 nt, Artificial Sequence
  Description of Artificial Sequence: Synthetic oligonucleotide
acaucuugaaacuucugcc

SEQ ID NO: 1632455 - RNA, 19 nt, Artificial Sequence
  Description of Artificial Sequence: Synthetic oligonucleotide
ugcaccaacacauauauac

SEQ ID NO: 1632456 - RNA, 19 nt, Artificial Sequence
  Description of Artificial Sequence: Synthetic oligonucleotide
aaguuacacuguuaggagc

SEQ ID NO: 1632457 - RNA, 19 nt, Artificial Sequence
  Description of Artificial Sequence: Synthetic oligonucleotide
aauaaguuacacuguuagg

SEQ ID NO: 1632458 - RNA, 19 nt, Artificial Sequence
  Description of Artificial Sequence: Synthetic oligonucleotide
acaacacacacacacacac

SEQ ID NO: 1632459 - RNA, 19 nt, Artificial Sequence
  Description of Artificial Sequence: Synthetic oligonucleotide
aaaguuuuggcugcuggcc

SEQ ID NO: 1632460 - RNA, 19 nt, Artificial Sequence
  Description of Artificial Sequence: Synthetic oligonucleotide
aaauaaauauguggggaac

SEQ ID NO: 1632461 - RNA, 19 nt, Artificial Sequence
  Description of Artificial Sequence: Synthetic oligonucleotide
guuguaagcguacauaacc

SEQ ID NO: 1632462 - RNA, 19 nt, Artificial Sequence
  Description of Artificial Sequence: Synthetic oligonucleotide
agcaacaccaggcacacgg

SEQ ID NO: 1632463 - RNA, 19 nt, Artificial Sequence
  Description of Artificial Sequence: Synthetic oligonucleotide
caauaaguuacacuguuag

SEQ ID NO: 1632464 - RNA, 19 nt, Artificial Sequence
  Description of Artificial Sequence: Synthetic oligonucleotide
agacaacacacacacacac

SEQ ID NO: 1632465 - RNA, 19 nt, Artificial Sequence
  Description of Artificial Sequence: Synthetic oligonucleotide
aaucuugagagacccaucu

SEQ ID NO: 1632466 - RNA, 19 nt, Artificial Sequence
  Description of Artificial Sequence: Synthetic oligonucleotide
gugucugaaauucacagag

SEQ ID NO: 1632467 - RNA, 19 nt, Artificial Sequence
  Description of Artificial Sequence: Synthetic oligonucleotide
auaaguuacacuguuagga

SEQ ID NO: 1632468 - RNA, 19 nt, Artificial Sequence
  Description of Artificial Sequence: Synthetic oligonucleotide
aguucuaagggguacacca

SEQ ID NO: 1632469 - RNA, 19 nt, Artificial Sequence
  Description of Artificial Sequence: Synthetic oligonucleotide
acuaccagcaccugcaguc

SEQ ID NO: 1632470 - RNA, 19 nt, Artificial Sequence
  Description of Artificial Sequence: Synthetic oligonucleotide
ugaauaguaguagccaacg

SEQ ID NO: 1632471 - RNA, 19 nt, Artificial Sequence
  Description of Artificial Sequence: Synthetic oligonucleotide
uaaguuacacuguuaggag

SEQ ID NO: 1632472 - RNA, 19 nt, Artificial Sequence
  Description of Artificial Sequence: Synthetic oligonucleotide
aguggcaugaccccuuccc

SEQ ID NO: 1632473 - RNA, 19 nt, Artificial Sequence
  Description of Artificial Sequence: Synthetic oligonucleotide
auacucaaauauuuacaac

SEQ ID NO: 1632474 - RNA, 19 nt, Artificial Sequence
  Description of Artificial Sequence: Synthetic oligonucleotide
acgacaguaacacgguagc

SEQ ID NO: 1632475 - RNA, 19 nt, Artificial Sequence
  Description of Artificial Sequence: Synthetic oligonucleotide
aacacgguagcuuucugca

SEQ ID NO: 1632476 - RNA, 19 nt, Artificial Sequence
  Description of Artificial Sequence: Synthetic oligonucleotide
aaguuuuggcugcuggccg

SEQ ID NO: 1632477 - RNA, 19 nt, Artificial Sequence
  Description of Artificial Sequence: Synthetic oligonucleotide
cacauccauacauaaaugc

SEQ ID NO: 1632478 - RNA, 19 nt, Artificial Sequence
  Description of Artificial Sequence: Synthetic oligonucleotide
cacacacacacacacaucc

SEQ ID NO: 1632479 - RNA, 19 nt, Artificial Sequence
  Description of Artificial Sequence: Synthetic oligonucleotide
gaagacuugacagagacaa

SEQ ID NO: 1632480 - RNA, 19 nt, Artificial Sequence
  Description of Artificial Sequence: Synthetic oligonucleotide
aucgauagagcccagcgug

SEQ ID NO: 1632481 - RNA, 19 nt, Artificial Sequence
  Description of Artificial Sequence: Synthetic oligonucleotide
cauccauacauaaaugcac

SEQ ID NO: 1632482 - RNA, 19 nt, Artificial Sequence
  Description of Artificial Sequence: Synthetic oligonucleotide
gaagugacaaaaccagcag

SEQ ID NO: 1632483 - RNA, 19 nt, Artificial Sequence
  Description of Artificial Sequence: Synthetic oligonucleotide
auaaauauguggggaacac

SEQ ID NO: 1632484 - RNA, 19 nt, Artificial Sequence
  Description of Artificial Sequence: Synthetic oligonucleotide
aguauccacagcaagcccc

SEQ ID NO: 1632485 - RNA, 19 nt, Artificial Sequence
  Description of Artificial Sequence: Synthetic oligonucleotide
aguauaaaauaccacugaa

SEQ ID NO: 1632486 - RNA, 19 nt, Artificial Sequence
  Description of Artificial Sequence: Synthetic oligonucleotide
ugagagacccaucugaaua

SEQ ID NO: 1632487 - RNA, 19 nt, Artificial Sequence
  Description of Artificial Sequence: Synthetic oligonucleotide
uuguaagcguacauaacca

SEQ ID NO: 1632488 - RNA, 19 nt, Artificial Sequence
  Description of Artificial Sequence: Synthetic oligonucleotide
acuguuaggagcccuuuuc

SEQ ID NO: 1632489 - RNA, 19 nt, Artificial Sequence
  Description of Artificial Sequence: Synthetic oligonucleotide
auaaccauuagcguuugag

SEQ ID NO: 1632490 - RNA, 19 nt, Artificial Sequence
  Description of Artificial Sequence: Synthetic oligonucleotide
aacgggaucccagaguuuc

SEQ ID NO: 1632491 - RNA, 19 nt, Artificial Sequence
  Description of Artificial Sequence: Synthetic oligonucleotide
cuccaaguagcaucgauag

SEQ ID NO: 1632492 - RNA, 19 nt, Artificial Sequence
  Description of Artificial Sequence: Synthetic oligonucleotide
caucugaauaguaguagcc

SEQ ID NO: 1632493 - RNA, 19 nt, Artificial Sequence
  Description of Artificial Sequence: Synthetic oligonucleotide
agcguacauaaccauuagc

SEQ ID NO: 1632494 - RNA, 19 nt, Artificial Sequence
  Description of Artificial Sequence: Synthetic oligonucleotide
aucccauccccauauguac

SEQ ID NO: 1632495 - RNA, 19 nt, Artificial Sequence
  Description of Artificial Sequence: Synthetic oligonucleotide
uacaccaauguccucucag

SEQ ID NO: 1632496 - RNA, 19 nt, Artificial Sequence
  Description of Artificial Sequence: Synthetic oligonucleotide
uaagcguacauaaccauua

SEQ ID NO: 1632497 - RNA, 19 nt, Artificial Sequence
  Description of Artificial Sequence: Synthetic oligonucleotide
acgugucugaaauucacag

SEQ ID NO: 1632498 - RNA, 19 nt, Artificial Sequence
  Description of Artificial Sequence: Synthetic oligonucleotide
gaauaguaguagccaacgg

SEQ ID NO: 1632499 - RNA, 19 nt, Artificial Sequence
  Description of Artificial Sequence: Synthetic oligonucleotide
uuuccuagagcugggagag

SEQ ID NO: 1632500 - RNA, 19 nt, Artificial Sequence
  Description of Artificial Sequence: Synthetic oligonucleotide
uauguggggaacacaauaa

SEQ ID NO: 1632501 - RNA, 19 nt, Artificial Sequence
  Description of Artificial Sequence: Synthetic oligonucleotide
agaggauaugccaguaucc

SEQ ID NO: 1632502 - RNA, 19 nt, Artificial Sequence
  Description of Artificial Sequence: Synthetic oligonucleotide
gcguacauaaccauuagcg

SEQ ID NO: 1632503 - RNA, 19 nt, Artificial Sequence
  Description of Artificial Sequence: Synthetic oligonucleotide
gauaugccaguauccacag

SEQ ID NO: 1632504 - RNA, 19 nt, Artificial Sequence
  Description of Artificial Sequence: Synthetic oligonucleotide
uacauaaccauuagcguuu

SEQ ID NO: 1632505 - RNA, 19 nt, Artificial Sequence
  Description of Artificial Sequence: Synthetic oligonucleotide
gagagacccaucugaauag

SEQ ID NO: 1632506 - RNA, 19 nt, Artificial Sequence
  Description of Artificial Sequence: Synthetic oligonucleotide
agcaggacuaggcccaccc

SEQ ID NO: 1632507 - RNA, 19 nt, Artificial Sequence
  Description of Artificial Sequence: Synthetic oligonucleotide
ucugaauaguaguagccaa

SEQ ID NO: 1632508 - RNA, 19 nt, Artificial Sequence
  Description of Artificial Sequence: Synthetic oligonucleotide
uaaccauuagcguuugagu

SEQ ID NO: 1632509 - RNA, 19 nt, Artificial Sequence
  Description of Artificial Sequence: Synthetic oligonucleotide
ugagccaaguggcagugcc

SEQ ID NO: 1632510 - RNA, 19 nt, Artificial Sequence
  Description of Artificial Sequence: Synthetic oligonucleotide
uaaaugcaccaacacauau

SEQ ID NO: 1632511 - RNA, 19 nt, Artificial Sequence
  Description of Artificial Sequence: Synthetic oligonucleotide
aacaccaggcacacggccc

SEQ ID NO: 1632512 - RNA, 19 nt, Artificial Sequence
  Description of Artificial Sequence: Synthetic oligonucleotide
gaagccgagucggagaagg

SEQ ID NO: 1632513 - RNA, 19 nt, Artificial Sequence
  Description of Artificial Sequence: Synthetic oligonucleotide
ucuaagggguacaccaaug

SEQ ID NO: 1632514 - RNA, 19 nt, Artificial Sequence
  Description of Artificial Sequence: Synthetic oligonucleotide
caucacugucccaagcucg

SEQ ID NO: 1632515 - RNA, 19 nt, Artificial Sequence
  Description of Artificial Sequence: Synthetic oligonucleotide
cauucacagcccuaggagc

SEQ ID NO: 1632516 - RNA, 19 nt, Artificial Sequence
  Description of Artificial Sequence: Synthetic oligonucleotide
cauaaaugcaccaacacau

SEQ ID NO: 1632517 - RNA, 19 nt, Artificial Sequence
  Description of Artificial Sequence: Synthetic oligonucleotide
gucgaagugacaaaaccag

SEQ ID NO: 1632518 - RNA, 19 nt, Artificial Sequence
  Description of Artificial Sequence: Synthetic oligonucleotide
cacacacacacacacacac

SEQ ID NO: 1632519 - RNA, 19 nt, Artificial Sequence
  Description of Artificial Sequence: Synthetic oligonucleotide
aggauaugccaguauccac

SEQ ID NO: 1632520 - RNA, 19 nt, Artificial Sequence
  Description of Artificial Sequence: Synthetic oligonucleotide
aauucacagaggaaggcgu

SEQ ID NO: 1632521 - RNA, 19 nt, Artificial Sequence
  Description of Artificial Sequence: Synthetic oligonucleotide
cuaggugaagccgagucgg

SEQ ID NO: 1632522 - RNA, 19 nt, Artificial Sequence
  Description of Artificial Sequence: Synthetic oligonucleotide
guaguagccaacgggaucc

SEQ ID NO: 1632523 - RNA, 19 nt, Artificial Sequence
  Description of Artificial Sequence: Synthetic oligonucleotide
caguccugggucauaaagg

SEQ ID NO: 1632524 - RNA, 19 nt, Artificial Sequence
  Description of Artificial Sequence: Synthetic oligonucleotide
uaacacgguagcuuucugc

SEQ ID NO: 1632525 - RNA, 19 nt, Artificial Sequence
  Description of Artificial Sequence: Synthetic oligonucleotide
ugaaacuucugccuugcua

SEQ ID NO: 1632526 - RNA, 19 nt, Artificial Sequence
  Description of Artificial Sequence: Synthetic oligonucleotide
uagcguuugaguuccgacc

SEQ ID NO: 1632527 - RNA, 19 nt, Artificial Sequence
  Description of Artificial Sequence: Synthetic oligonucleotide
gagaggauaugccaguauc

SEQ ID NO: 1632528 - RNA, 19 nt, Artificial Sequence
  Description of Artificial Sequence: Synthetic oligonucleotide
aagcguacauaaccauuag

SEQ ID NO: 1632529 - RNA, 19 nt, Artificial Sequence
  Description of Artificial Sequence: Synthetic oligonucleotide
ucuugaaacuucugccuug

SEQ ID NO: 1632530 - RNA, 19 nt, Artificial Sequence
  Description of Artificial Sequence: Synthetic oligonucleotide
aggcacaaucuugagagac

SEQ ID NO: 1632531 - RNA, 19 nt, Artificial Sequence
  Description of Artificial Sequence: Synthetic oligonucleotide
cacgacaguaacacgguag

SEQ ID NO: 1632532 - RNA, 19 nt, Artificial Sequence
  Description of Artificial Sequence: Synthetic oligonucleotide
uaugccaggaggcggagaa

SEQ ID NO: 1632533 - RNA, 19 nt, Artificial Sequence
  Description of Artificial Sequence: Synthetic oligonucleotide
ucgaagugacaaaaccagc

SEQ ID NO: 1632534 - RNA, 19 nt, Artificial Sequence
  Description of Artificial Sequence: Synthetic oligonucleotide
uccaaagacucaccaggag

SEQ ID NO: 1632535 - RNA, 19 nt, Artificial Sequence
  Description of Artificial Sequence: Synthetic oligonucleotide
acugucccaagcucgggac

SEQ ID NO: 1632536 - RNA, 19 nt, Artificial Sequence
  Description of Artificial Sequence: Synthetic oligonucleotide
cacacacacacauccauac

SEQ ID NO: 1632537 - RNA, 19 nt, Artificial Sequence
  Description of Artificial Sequence: Synthetic oligonucleotide
ucgauagagcccagcgugg

SEQ ID NO: 1632538 - RNA, 19 nt, Artificial Sequence
  Description of Artificial Sequence: Synthetic oligonucleotide
aaggcgugccuccugugag

SEQ ID NO: 1632539 - RNA, 19 nt, Artificial Sequence
  Description of Artificial Sequence: Synthetic oligonucleotide
uuugaguuccgaccacccc

SEQ ID NO: 1632540 - RNA, 19 nt, Artificial Sequence
  Description of Artificial Sequence: Synthetic oligonucleotide
uuagcguuugaguuccgac

SEQ ID NO: 1632541 - RNA, 19 nt, Artificial Sequence
  Description of Artificial Sequence: Synthetic oligonucleotide
agcguuugaguuccgacca

SEQ ID NO: 1632542 - RNA, 19 nt, Artificial Sequence
  Description of Artificial Sequence: Synthetic oligonucleotide
cacgguagcuuucugcagg

SEQ ID NO: 1632543 - RNA, 19 nt, Artificial Sequence
  Description of Artificial Sequence: Synthetic oligonucleotide
ccaaguagcaucgauagag

SEQ ID NO: 1632544 - RNA, 19 nt, Artificial Sequence
  Description of Artificial Sequence: Synthetic oligonucleotide
caaguagcaucgauagagc

SEQ ID NO: 1632545 - RNA, 19 nt, Artificial Sequence
  Description of Artificial Sequence: Synthetic oligonucleotide
cugaauaguaguagccaac

SEQ ID NO: 1632546 - RNA, 19 nt, Artificial Sequence
  Description of Artificial Sequence: Synthetic oligonucleotide
aggcagaguggcaugaccc

SEQ ID NO: 1632547 - RNA, 19 nt, Artificial Sequence
  Description of Artificial Sequence: Synthetic oligonucleotide
uccauacauaaaugcacca

SEQ ID NO: 1632548 - RNA, 19 nt, Artificial Sequence
  Description of Artificial Sequence: Synthetic oligonucleotide
cugcagguagccuuguccc

SEQ ID NO: 1632549 - RNA, 19 nt, Artificial Sequence
  Description of Artificial Sequence: Synthetic oligonucleotide
agagcacaaguauaaaaua

SEQ ID NO: 1632550 - RNA, 19 nt, Artificial Sequence
  Description of Artificial Sequence: Synthetic oligonucleotide
aaaauaccacugaacccag

SEQ ID NO: 1632551 - RNA, 19 nt, Artificial Sequence
  Description of Artificial Sequence: Synthetic oligonucleotide
uguuaggagcccuuuuccu

SEQ ID NO: 1632552 - RNA, 19 nt, Artificial Sequence
  Description of Artificial Sequence: Synthetic oligonucleotide
caaauaaauauguggggaa

SEQ ID NO: 1632553 - RNA, 19 nt, Artificial Sequence
  Description of Artificial Sequence: Synthetic oligonucleotide
ugccaguauccacagcaag

SEQ ID NO: 1632554 - RNA, 19 nt, Artificial Sequence
  Description of Artificial Sequence: Synthetic oligonucleotide
cugggagaggauaugccag

SEQ ID NO: 1632555 - RNA, 19 nt, Artificial Sequence
  Description of Artificial Sequence: Synthetic oligonucleotide
uaagggguacaccaauguc

SEQ ID NO: 1632556 - RNA, 19 nt, Artificial Sequence
  Description of Artificial Sequence: Synthetic oligonucleotide
agcaagccccaccuucucc

SEQ ID NO: 1632557 - RNA, 19 nt, Artificial Sequence
  Description of Artificial Sequence: Synthetic oligonucleotide
uguaagcguacauaaccau

SEQ ID NO: 1632558 - RNA, 19 nt, Artificial Sequence
  Description of Artificial Sequence: Synthetic oligonucleotide
gguagcuuucugcagguag

SEQ ID NO: 1632559 - RNA, 19 nt, Artificial Sequence
  Description of Artificial Sequence: Synthetic oligonucleotide
gauagagcccagcguggcg

SEQ ID NO: 1632560 - RNA, 19 nt, Artificial Sequence
  Description of Artificial Sequence: Synthetic oligonucleotide
acaguaacacgguagcuuu

SEQ ID NO: 1632561 - RNA, 19 nt, Artificial Sequence
  Description of Artificial Sequence: Synthetic oligonucleotide
cuguuaggagcccuuuucc

SEQ ID NO: 1632562 - RNA, 19 nt, Artificial Sequence
  Description of Artificial Sequence: Synthetic oligonucleotide
aguuguaagcguacauaac

SEQ ID NO: 1632563 - RNA, 19 nt, Artificial Sequence
  Description of Artificial Sequence: Synthetic oligonucleotide
acauccauacauaaaugca

SEQ ID NO: 1632564 - RNA, 19 nt, Artificial Sequence
  Description of Artificial Sequence: Synthetic oligonucleotide
uggggaacacaauaaguua

SEQ ID NO: 1632565 - RNA, 19 nt, Artificial Sequence
  Description of Artificial Sequence: Synthetic oligonucleotide
acaacacccuguccauccc

SEQ ID NO: 1632566 - RNA, 19 nt, Artificial Sequence
  Description of Artificial Sequence: Synthetic oligonucleotide
guagcaucgauagagccca

SEQ ID NO: 1632567 - RNA, 19 nt, Artificial Sequence
  Description of Artificial Sequence: Synthetic oligonucleotide
auacauaaaugcaccaaca

SEQ ID NO: 1632568 - RNA, 19 nt, Artificial Sequence
  Description of Artificial Sequence: Synthetic oligonucleotide
ggucauaaaggaaggagcc

SEQ ID NO: 1632569 - RNA, 19 nt, Artificial Sequence
  Description of Artificial Sequence: Synthetic oligonucleotide
uucuaagggguacaccaau

SEQ ID NO: 1632570 - RNA, 19 nt, Artificial Sequence
  Description of Artificial Sequence: Synthetic oligonucleotide
aacuucugccuugcuaaag

SEQ ID NO: 1632571 - RNA, 19 nt, Artificial Sequence
  Description of Artificial Sequence: Synthetic oligonucleotide
uuucccaaggggagcccgg

SEQ ID NO: 1632572 - RNA, 19 nt, Artificial Sequence
  Description of Artificial Sequence: Synthetic oligonucleotide
agacccaucugaauaguag

SEQ ID NO: 1632573 - RNA, 19 nt, Artificial Sequence
  Description of Artificial Sequence: Synthetic oligonucleotide
cuugaaacuucugccuugc

SEQ ID NO: 1632574 - RNA, 19 nt, Artificial Sequence
  Description of Artificial Sequence: Synthetic oligonucleotide
acacccacaucuugaaacu

SEQ ID NO: 1632575 - RNA, 19 nt, Artificial Sequence
  Description of Artificial Sequence: Synthetic oligonucleotide
gcaucgauagagcccagcg

SEQ ID NO: 1632576 - RNA, 19 nt, Artificial Sequence
  Description of Artificial Sequence: Synthetic oligonucleotide
acaaacacccacaucuuga

SEQ ID NO: 1632577 - RNA, 19 nt, Artificial Sequence
  Description of Artificial Sequence: Synthetic oligonucleotide
ccaaagggguacaacaccc

SEQ ID NO: 1632578 - RNA, 19 nt, Artificial Sequence
  Description of Artificial Sequence: Synthetic oligonucleotide
cugagcauccuucucgguc

SEQ ID NO: 1632579 - RNA, 19 nt, Artificial Sequence
  Description of Artificial Sequence: Synthetic oligonucleotide
caucacuaccagcaccugc

SEQ ID NO: 1632580 - RNA, 19 nt, Artificial Sequence
  Description of Artificial Sequence: Synthetic oligonucleotide
auaaaggaaggagccaggu

SEQ ID NO: 1632581 - RNA, 19 nt, Artificial Sequence
  Description of Artificial Sequence: Synthetic oligonucleotide
aguaacacgguagcuuucu

SEQ ID NO: 1632582 - RNA, 19 nt, Artificial Sequence
  Description of Artificial Sequence: Synthetic oligonucleotide
cacccuguccaucccaucc

SEQ ID NO: 1632583 - RNA, 19 nt, Artificial Sequence
  Description of Artificial Sequence: Synthetic oligonucleotide
caguuguaagcguacauaa

SEQ ID NO: 1632584 - RNA, 19 nt, Artificial Sequence
  Description of Artificial Sequence: Synthetic oligonucleotide
ccaagcucgggacaggugg

SEQ ID NO: 1632585 - RNA, 19 nt, Artificial Sequence
  Description of Artificial Sequence: Synthetic oligonucleotide
acagaggaaggcgugccuc

SEQ ID NO: 1632586 - RNA, 19 nt, Artificial Sequence
  Description of Artificial Sequence: Synthetic oligonucleotide
ucuagcuguucccgaaguc

SEQ ID NO: 1632587 - RNA, 19 nt, Artificial Sequence
  Description of Artificial Sequence: Synthetic oligonucleotide
agcuagccauacaagcccc

SEQ ID NO: 1632588 - RNA, 19 nt, Artificial Sequence
  Description of Artificial Sequence: Synthetic oligonucleotide
uccccucccaguuguaagc

SEQ ID NO: 1632589 - RNA, 19 nt, Artificial Sequence
  Description of Artificial Sequence: Synthetic oligonucleotide
ugucgggagagcacaagua

SEQ ID NO: 1632590 - RNA, 19 nt, Artificial Sequence
  Description of Artificial Sequence: Synthetic oligonucleotide
gggucauaaaggaaggagc

SEQ ID NO: 1632591 - RNA, 19 nt, Artificial Sequence
  Description of Artificial Sequence: Synthetic oligonucleotide
ucccauccccauauguaca

SEQ ID NO: 1632592 - RNA, 19 nt, Artificial Sequence
  Description of Artificial Sequence: Synthetic oligonucleotide
ccaucugaauaguaguagc

SEQ ID NO: 1632593 - RNA, 19 nt, Artificial Sequence
  Description of Artificial Sequence: Synthetic oligonucleotide
agugcccacgcugagcauc

SEQ ID NO: 1632594 - RNA, 19 nt, Artificial Sequence
  Description of Artificial Sequence: Synthetic oligonucleotide
ggguacaacacccugucca

SEQ ID NO: 1632595 - RNA, 19 nt, Artificial Sequence
  Description of Artificial Sequence: Synthetic oligonucleotide
accgggcaugaccaggcac

SEQ ID NO: 1632596 - RNA, 19 nt, Artificial Sequence
  Description of Artificial Sequence: Synthetic oligonucleotide
uucugccuugcuaaaguuu

SEQ ID NO: 1632597 - RNA, 19 nt, Artificial Sequence
  Description of Artificial Sequence: Synthetic oligonucleotide
uccaaguagcaucgauaga

SEQ ID NO: 1632598 - RNA, 19 nt, Artificial Sequence
  Description of Artificial Sequence: Synthetic oligonucleotide
guacauaaccauuagcguu

SEQ ID NO: 1632599 - RNA, 19 nt, Artificial Sequence
  Description of Artificial Sequence: Synthetic oligonucleotide
gcaguccugggucauaaag

SEQ ID NO: 1632600 - RNA, 19 nt, Artificial Sequence
  Description of Artificial Sequence: Synthetic oligonucleotide
aagucgccgucgaagugac

SEQ ID NO: 1632601 - RNA, 19 nt, Artificial Sequence
  Description of Artificial Sequence: Synthetic oligonucleotide
ucccacgugucugaaauuc

SEQ ID NO: 1632602 - RNA, 19 nt, Artificial Sequence
  Description of Artificial Sequence: Synthetic oligonucleotide
aucuugagagacccaucug

SEQ ID NO: 1632603 - RNA, 19 nt, Artificial Sequence
  Description of Artificial Sequence: Synthetic oligonucleotide
aaacuucugccuugcuaaa

SEQ ID NO: 1632604 - RNA, 19 nt, Artificial Sequence
  Description of Artificial Sequence: Synthetic oligonucleotide
ucgggagagcacaaguaua

SEQ ID NO: 1632605 - RNA, 19 nt, Artificial Sequence
  Description of Artificial Sequence: Synthetic oligonucleotide
agcaucgauagagcccagc

SEQ ID NO: 1632606 - RNA, 19 nt, Artificial Sequence
  Description of Artificial Sequence: Synthetic oligonucleotide
uuccuugggcaguucuaag

SEQ ID NO: 1632607 - RNA, 19 nt, Artificial Sequence
  Description of Artificial Sequence: Synthetic oligonucleotide
aagggguacaacacccugu

SEQ ID NO: 1632608 - RNA, 19 nt, Artificial Sequence
  Description of Artificial Sequence: Synthetic oligonucleotide
ugggagaggauaugccagu

SEQ ID NO: 1632609 - RNA, 19 nt, Artificial Sequence
  Description of Artificial Sequence: Synthetic oligonucleotide
guagccaacgggaucccag

SEQ ID NO: 1632610 - RNA, 19 nt, Artificial Sequence
  Description of Artificial Sequence: Synthetic oligonucleotide
acacauccauacauaaaug

SEQ ID NO: 1632611 - RNA, 19 nt, Artificial Sequence
  Description of Artificial Sequence: Synthetic oligonucleotide
agaguggcaugaccccuuc

SEQ ID NO: 1632612 - RNA, 19 nt, Artificial Sequence
  Description of Artificial Sequence: Synthetic oligonucleotide
agcaccugcaguccugggu

SEQ ID NO: 1632613 - RNA, 19 nt, Artificial Sequence
  Description of Artificial Sequence: Synthetic oligonucleotide
gcccuggugagccaagugg

SEQ ID NO: 1632614 - RNA, 19 nt, Artificial Sequence
  Description of Artificial Sequence: Synthetic oligonucleotide
gacccaucugaauaguagu

SEQ ID NO: 1632615 - RNA, 19 nt, Artificial Sequence
  Description of Artificial Sequence: Synthetic oligonucleotide
cuugagagacccaucugaa

SEQ ID NO: 1632616 - RNA, 19 nt, Artificial Sequence
  Description of Artificial Sequence: Synthetic oligonucleotide
ggggaacacaauaaguuac

SEQ ID NO: 1632617 - RNA, 19 nt, Artificial Sequence
  Description of Artificial Sequence: Synthetic oligonucleotide
guuaggagcccuuuuccua

SEQ ID NO: 1632618 - RNA, 19 nt, Artificial Sequence
  Description of Artificial Sequence: Synthetic oligonucleotide
gaaggcgugccuccuguga

SEQ ID NO: 1632619 - RNA, 19 nt, Artificial Sequence
  Description of Artificial Sequence: Synthetic oligonucleotide
caaucuugagagacccauc

SEQ ID NO: 1632620 - RNA, 19 nt, Artificial Sequence
  Description of Artificial Sequence: Synthetic oligonucleotide
uacacuguuaggagcccuu

SEQ ID NO: 1632621 - RNA, 19 nt, Artificial Sequence
  Description of Artificial Sequence: Synthetic oligonucleotide
uauguacaucacuguccca

SEQ ID NO: 1632622 - RNA, 19 nt, Artificial Sequence
  Description of Artificial Sequence: Synthetic oligonucleotide
aagccgagucggagaaggc

SEQ ID NO: 1632623 - RNA, 19 nt, Artificial Sequence
  Description of Artificial Sequence: Synthetic oligonucleotide
caguauccacagcaagccc

SEQ ID NO: 1632624 - RNA, 19 nt, Artificial Sequence
  Description of Artificial Sequence: Synthetic oligonucleotide
acuaggcccaccccugagu

SEQ ID NO: 1632625 - RNA, 19 nt, Artificial Sequence
  Description of Artificial Sequence: Synthetic oligonucleotide
cuaggcccaccccugaguc

SEQ ID NO: 1632626 - RNA, 19 nt, Artificial Sequence
  Description of Artificial Sequence: Synthetic oligonucleotide
agggguacaccaauguccu

SEQ ID NO: 1632627 - RNA, 19 nt, Artificial Sequence
  Description of Artificial Sequence: Synthetic oligonucleotide
guggcaugaccccuucccc

SEQ ID NO: 1632628 - RNA, 19 nt, Artificial Sequence
  Description of Artificial Sequence: Synthetic oligonucleotide
gagacaacacacacacaca

SEQ ID NO: 1632629 - RNA, 19 nt, Artificial Sequence
  Description of Artificial Sequence: Synthetic oligonucleotide
gcacaaucuugagagaccc

SEQ ID NO: 1632630 - RNA, 19 nt, Artificial Sequence
  Description of Artificial Sequence: Synthetic oligonucleotide
auccccauauguacaucac

SEQ ID NO: 1632631 - RNA, 19 nt, Artificial Sequence
  Description of Artificial Sequence: Synthetic oligonucleotide
ccauauguacaucacuguc

SEQ ID NO: 1632632 - RNA, 19 nt, Artificial Sequence
  Description of Artificial Sequence: Synthetic oligonucleotide
gacaacacacacacacaca

SEQ ID NO: 1632633 - RNA, 19 nt, Artificial Sequence
  Description of Artificial Sequence: Synthetic oligonucleotide
aggaaggcgugccuccugu

SEQ ID NO: 1632634 - RNA, 19 nt, Artificial Sequence
  Description of Artificial Sequence: Synthetic oligonucleotide
ccgucgaagugacaaaacc

SEQ ID NO: 1632635 - RNA, 19 nt, Artificial Sequence
  Description of Artificial Sequence: Synthetic oligonucleotide
auuagcguuugaguuccga

SEQ ID NO: 1632636 - RNA, 19 nt, Artificial Sequence
  Description of Artificial Sequence: Synthetic oligonucleotide
cuggcaccgggcaugacca

SEQ ID NO: 1632637 - RNA, 19 nt, Artificial Sequence
  Description of Artificial Sequence: Synthetic oligonucleotide
gacuaggcccaccccugag

SEQ ID NO: 1632638 - RNA, 19 nt, Artificial Sequence
  Description of Artificial Sequence: Synthetic oligonucleotide
auucacagaggaaggcgug

SEQ ID NO: 1632639 - RNA, 19 nt, Artificial Sequence
  Description of Artificial Sequence: Synthetic oligonucleotide
agccaacgggaucccagag

SEQ ID NO: 1632640 - RNA, 19 nt, Artificial Sequence
  Description of Artificial Sequence: Synthetic oligonucleotide
cucccaguuguaagcguac

SEQ ID NO: 1632641 - RNA, 19 nt, Artificial Sequence
  Description of Artificial Sequence: Synthetic oligonucleotide
aggcgugccuccugugagg

SEQ ID NO: 1632642 - RNA, 19 nt, Artificial Sequence
  Description of Artificial Sequence: Synthetic oligonucleotide
ccuaggugaagccgagucg

SEQ ID NO: 1632643 - RNA, 19 nt, Artificial Sequence
  Description of Artificial Sequence: Synthetic oligonucleotide
acgguagcuuucugcaggu

SEQ ID NO: 1632644 - RNA, 19 nt, Artificial Sequence
  Description of Artificial Sequence: Synthetic oligonucleotide
guaacacgguagcuuucug

SEQ ID NO: 1632645 - RNA, 19 nt, Artificial Sequence
  Description of Artificial Sequence: Synthetic oligonucleotide
aaggggagcccgggccucc

SEQ ID NO: 1632646 - RNA, 19 nt, Artificial Sequence
  Description of Artificial Sequence: Synthetic oligonucleotide
caagugggaggcccugccc

SEQ ID NO: 1632647 - RNA, 19 nt, Artificial Sequence
  Description of Artificial Sequence: Synthetic oligonucleotide
gcuccuccaaguagcaucg

SEQ ID NO: 1632648 - RNA, 19 nt, Artificial Sequence
  Description of Artificial Sequence: Synthetic oligonucleotide
caggccaagggaagacuug

SEQ ID NO: 1632649 - RNA, 19 nt, Artificial Sequence
  Description of Artificial Sequence: Synthetic oligonucleotide
acacacacacacacacauc

SEQ ID NO: 1632650 - RNA, 19 nt, Artificial Sequence
  Description of Artificial Sequence: Synthetic oligonucleotide
uucccaaggggagcccggg

SEQ ID NO: 1632651 - RNA, 19 nt, Artificial Sequence
  Description of Artificial Sequence: Synthetic oligonucleotide
gcuggcaccgggcaugacc

SEQ ID NO: 1632652 - RNA, 19 nt, Artificial Sequence
  Description of Artificial Sequence: Synthetic oligonucleotide
agguagccuuguccccugc

SEQ ID NO: 1632653 - RNA, 19 nt, Artificial Sequence
  Description of Artificial Sequence: Synthetic oligonucleotide
guuacacuguuaggagccc

SEQ ID NO: 1632654 - RNA, 19 nt, Artificial Sequence
  Description of Artificial Sequence: Synthetic oligonucleotide
aggggcuggccagguaugc

SEQ ID NO: 1632655 - RNA, 19 nt, Artificial Sequence
  Description of Artificial Sequence: Synthetic oligonucleotide
gugaagccgagucggagaa

SEQ ID NO: 1632656 - RNA, 19 nt, Artificial Sequence
  Description of Artificial Sequence: Synthetic oligonucleotide
cccaaagggguacaacacc

SEQ ID NO: 1632657 - RNA, 19 nt, Artificial Sequence
  Description of Artificial Sequence: Synthetic oligonucleotide
aggugaagccgagucggag

SEQ ID NO: 1632658 - RNA, 19 nt, Artificial Sequence
  Description of Artificial Sequence: Synthetic oligonucleotide
ugcuggccgucccacgugu

SEQ ID NO: 1632659 - RNA, 19 nt, Artificial Sequence
  Description of Artificial Sequence: Synthetic oligonucleotide
caucccauccccauaugua

SEQ ID NO: 1632660 - RNA, 19 nt, Artificial Sequence
  Description of Artificial Sequence: Synthetic oligonucleotide
ugggcaguucuaaggggua

SEQ ID NO: 1632661 - RNA, 19 nt, Artificial Sequence
  Description of Artificial Sequence: Synthetic oligonucleotide
ucucgguccuccccuccca

SEQ ID NO: 1632662 - RNA, 19 nt, Artificial Sequence
  Description of Artificial Sequence: Synthetic oligonucleotide
gggacugguuguuuccuug

SEQ ID NO: 1632663 - RNA, 19 nt, Artificial Sequence
  Description of Artificial Sequence: Synthetic oligonucleotide
auaaaugcaccaacacaua

SEQ ID NO: 1632664 - RNA, 19 nt, Artificial Sequence
  Description of Artificial Sequence: Synthetic oligonucleotide
gucgccgucgaagugacaa

SEQ ID NO: 1632665 - RNA, 19 nt, Artificial Sequence
  Description of Artificial Sequence: Synthetic oligonucleotide
cacacacacacacacacau

SEQ ID NO: 1632666 - RNA, 19 nt, Artificial Sequence
  Description of Artificial Sequence: Synthetic oligonucleotide
gacaguaacacgguagcuu

SEQ ID NO: 1632667 - RNA, 19 nt, Artificial Sequence
  Description of Artificial Sequence: Synthetic oligonucleotide
agcguggcggggcugggca

SEQ ID NO: 1632668 - RNA, 19 nt, Artificial Sequence
  Description of Artificial Sequence: Synthetic oligonucleotide
uaccagcaccugcaguccu

SEQ ID NO: 1632669 - RNA, 19 nt, Artificial Sequence
  Description of Artificial Sequence: Synthetic oligonucleotide
caguucuaagggguacacc

SEQ ID NO: 1632670 - RNA, 19 nt, Artificial Sequence
  Description of Artificial Sequence: Synthetic oligonucleotide
cgaagugacaaaaccagca

SEQ ID NO: 1632671 - RNA, 19 nt, Artificial Sequence
  Description of Artificial Sequence: Synthetic oligonucleotide
aacacccuguccaucccau

SEQ ID NO: 1632672 - RNA, 19 nt, Artificial Sequence
  Description of Artificial Sequence: Synthetic oligonucleotide
caacacacacacacacaca

SEQ ID NO: 1632673 - RNA, 19 nt, Artificial Sequence
  Description of Artificial Sequence: Synthetic oligonucleotide
caccgaugggccagccacg

SEQ ID NO: 1632674 - RNA, 19 nt, Artificial Sequence
  Description of Artificial Sequence: Synthetic oligonucleotide
cugccuugcuaaaguuuug

SEQ ID NO: 1632675 - RNA, 19 nt, Artificial Sequence
  Description of Artificial Sequence: Synthetic oligonucleotide
gaggaaggcgugccuccug

SEQ ID NO: 1632676 - RNA, 19 nt, Artificial Sequence
  Description of Artificial Sequence: Synthetic oligonucleotide
cccuggugagccaaguggc

SEQ ID NO: 1632677 - RNA, 19 nt, Artificial Sequence
  Description of Artificial Sequence: Synthetic oligonucleotide
agagacccaucugaauagu

SEQ ID NO: 1632678 - RNA, 19 nt, Artificial Sequence
  Description of Artificial Sequence: Synthetic oligonucleotide
uguucccgaagucgccguc

SEQ ID NO: 1632679 - RNA, 19 nt, Artificial Sequence
  Description of Artificial Sequence: Synthetic oligonucleotide
ugcuaaaguuuuggcugcu

SEQ ID NO: 1632680 - RNA, 19 nt, Artificial Sequence
  Description of Artificial Sequence: Synthetic oligonucleotide
agccgagucggagaaggca

SEQ ID NO: 1632681 - RNA, 19 nt, Artificial Sequence
  Description of Artificial Sequence: Synthetic oligonucleotide
ggcacaaucuugagagacc

SEQ ID NO: 1632682 - RNA, 19 nt, Artificial Sequence
  Description of Artificial Sequence: Synthetic oligonucleotide
gccuugcuaaaguuuuggc

SEQ ID NO: 1632683 - RNA, 19 nt, Artificial Sequence
  Description of Artificial Sequence: Synthetic oligonucleotide
cccaacaaccuuucccagc

SEQ ID NO: 1632684 - RNA, 19 nt, Artificial Sequence
  Description of Artificial Sequence: Synthetic oligonucleotide
caguaacacgguagcuuuc

SEQ ID NO: 1632685 - RNA, 19 nt, Artificial Sequence
  Description of Artificial Sequence: Synthetic oligonucleotide
ucccaaggggagcccgggc

SEQ ID NO: 1632686 - RNA, 19 nt, Artificial Sequence
  Description of Artificial Sequence: Synthetic oligonucleotide
gagccaaguggcagugccc

SEQ ID NO: 1632687 - RNA, 19 nt, Artificial Sequence
  Description of Artificial Sequence: Synthetic oligonucleotide
gaguggcaugaccccuucc

SEQ ID NO: 1632688 - RNA, 19 nt, Artificial Sequence
  Description of Artificial Sequence: Synthetic oligonucleotide
gcuguucccgaagucgccg

SEQ ID NO: 1632689 - RNA, 19 nt, Artificial Sequence
  Description of Artificial Sequence: Synthetic oligonucleotide
cauuagcguuugaguuccg

SEQ ID NO: 1632690 - RNA, 19 nt, Artificial Sequence
  Description of Artificial Sequence: Synthetic oligonucleotide
gccaagggaagacuugaca

SEQ ID NO: 1632691 - RNA, 19 nt, Artificial Sequence
  Description of Artificial Sequence: Synthetic oligonucleotide
gcaccugcaguccuggguc

SEQ ID NO: 1632692 - RNA, 19 nt, Artificial Sequence
  Description of Artificial Sequence: Synthetic oligonucleotide
gaugcccuggugagccaag

SEQ ID NO: 1632693 - RNA, 19 nt, Artificial Sequence
  Description of Artificial Sequence: Synthetic oligonucleotide
aggacuaggcccaccccug

SEQ ID NO: 1632694 - RNA, 19 nt, Artificial Sequence
  Description of Artificial Sequence: Synthetic oligonucleotide
ugaugcccuggugagccaa

SEQ ID NO: 1632695 - RNA, 19 nt, Artificial Sequence
  Description of Artificial Sequence: Synthetic oligonucleotide
gccgagucggagaaggcag

SEQ ID NO: 1632696 - RNA, 19 nt, Artificial Sequence
  Description of Artificial Sequence: Synthetic oligonucleotide
gucgggagagcacaaguau

SEQ ID NO: 1632697 - RNA, 19 nt, Artificial Sequence
  Description of Artificial Sequence: Synthetic oligonucleotide
acacacacacacacacaca

SEQ ID NO: 1632698 - RNA, 19 nt, Artificial Sequence
  Description of Artificial Sequence: Synthetic oligonucleotide
acacacacacacacaucca

SEQ ID NO: 1632699 - RNA, 19 nt, Artificial Sequence
  Description of Artificial Sequence: Synthetic oligonucleotide
cccuaggugaagccgaguc

SEQ ID NO: 1632700 - RNA, 19 nt, Artificial Sequence
  Description of Artificial Sequence: Synthetic oligonucleotide
cgucgaagugacaaaacca

SEQ ID NO: 1632701 - RNA, 19 nt, Artificial Sequence
  Description of Artificial Sequence: Synthetic oligonucleotide
uagcaucgauagagcccag

SEQ ID NO: 1632702 - RNA, 19 nt, Artificial Sequence
  Description of Artificial Sequence: Synthetic oligonucleotide
ugaccccuuccccuucaua

SEQ ID NO: 1632703 - RNA, 19 nt, Artificial Sequence
  Description of Artificial Sequence: Synthetic oligonucleotide
cacugucccaagcucggga

SEQ ID NO: 1632704 - RNA, 19 nt, Artificial Sequence
  Description of Artificial Sequence: Synthetic oligonucleotide
uaguagccaacgggauccc

SEQ ID NO: 1632705 - RNA, 19 nt, Artificial Sequence
  Description of Artificial Sequence: Synthetic oligonucleotide
acacacacacacauccaua

SEQ ID NO: 1632706 - RNA, 19 nt, Artificial Sequence
  Description of Artificial Sequence: Synthetic oligonucleotide
ucgccgucgaagugacaaa

SEQ ID NO: 1632707 - RNA, 19 nt, Artificial Sequence
  Description of Artificial Sequence: Synthetic oligonucleotide
gcauccuucucgguccucc

SEQ ID NO: 1632708 - RNA, 19 nt, Artificial Sequence
  Description of Artificial Sequence: Synthetic oligonucleotide
guaagcguacauaaccauu

SEQ ID NO: 1632709 - RNA, 19 nt, Artificial Sequence
  Description of Artificial Sequence: Synthetic oligonucleotide
cccaaggggagcccgggcc

SEQ ID NO: 1632710 - RNA, 19 nt, Artificial Sequence
  Description of Artificial Sequence: Synthetic oligonucleotide
cacacacacacacauccau

SEQ ID NO: 1632711 - RNA, 19 nt, Artificial Sequence
  Description of Artificial Sequence: Synthetic oligonucleotide
ugcaguccugggucauaaa

SEQ ID NO: 1632712 - RNA, 19 nt, Artificial Sequence
  Description of Artificial Sequence: Synthetic oligonucleotide
gagacccaucugaauagua

SEQ ID NO: 1632713 - RNA, 19 nt, Artificial Sequence
  Description of Artificial Sequence: Synthetic oligonucleotide
accgaugggccagccacga

SEQ ID NO: 1632714 - RNA, 19 nt, Artificial Sequence
  Description of Artificial Sequence: Synthetic oligonucleotide
ggcaccgggcaugaccagg

SEQ ID NO: 1632715 - RNA, 19 nt, Artificial Sequence
  Description of Artificial Sequence: Synthetic oligonucleotide
gcuaaaguuuuggcugcug

SEQ ID NO: 1632716 - RNA, 19 nt, Artificial Sequence
  Description of Artificial Sequence: Synthetic oligonucleotide
caacacccuguccauccca

SEQ ID NO: 1632717 - RNA, 19 nt, Artificial Sequence
  Description of Artificial Sequence: Synthetic oligonucleotide
caucgauagagcccagcgu

SEQ ID NO: 1632718 - RNA, 19 nt, Artificial Sequence
  Description of Artificial Sequence: Synthetic oligonucleotide
ucgguccuccccucccagu

SEQ ID NO: 1632719 - RNA, 19 nt, Artificial Sequence
  Description of Artificial Sequence: Synthetic oligonucleotide
aguagccaacgggauccca

SEQ ID NO: 1632720 - RNA, 19 nt, Artificial Sequence
  Description of Artificial Sequence: Synthetic oligonucleotide
guacaccaauguccucuca

SEQ ID NO: 1632721 - RNA, 19 nt, Artificial Sequence
  Description of Artificial Sequence: Synthetic oligonucleotide
guacaacacccuguccauc

SEQ ID NO: 1632722 - RNA, 19 nt, Artificial Sequence
  Description of Artificial Sequence: Synthetic oligonucleotide
ggguacaccaauguccucu

SEQ ID NO: 1632723 - RNA, 19 nt, Artificial Sequence
  Description of Artificial Sequence: Synthetic oligonucleotide
ccgagucggagaaggcagg

SEQ ID NO: 1632724 - RNA, 19 nt, Artificial Sequence
  Description of Artificial Sequence: Synthetic oligonucleotide
ggaaggagccagguuguuc

SEQ ID NO: 1632725 - RNA, 19 nt, Artificial Sequence
  Description of Artificial Sequence: Synthetic oligonucleotide
gcaguucuaagggguacac

SEQ ID NO: 1632726 - RNA, 19 nt, Artificial Sequence
  Description of Artificial Sequence: Synthetic oligonucleotide
uggcaccgggcaugaccag

SEQ ID NO: 1632727 - RNA, 19 nt, Artificial Sequence
  Description of Artificial Sequence: Synthetic oligonucleotide
cugggucauaaaggaagga

SEQ ID NO: 1632728 - RNA, 19 nt, Artificial Sequence
  Description of Artificial Sequence: Synthetic oligonucleotide
caggcacaaucuugagaga

SEQ ID NO: 1632729 - RNA, 19 nt, Artificial Sequence
  Description of Artificial Sequence: Synthetic oligonucleotide
augccaguauccacagcaa

SEQ ID NO: 1632730 - RNA, 19 nt, Artificial Sequence
  Description of Artificial Sequence: Synthetic oligonucleotide
cugucccaagcucgggaca

SEQ ID NO: 1632731 - RNA, 19 nt, Artificial Sequence
  Description of Artificial Sequence: Synthetic oligonucleotide
gucaccgaugggccagcca

SEQ ID NO: 1632732 - RNA, 19 nt, Artificial Sequence
  Description of Artificial Sequence: Synthetic oligonucleotide
cauaaccauuagcguuuga

SEQ ID NO: 1632733 - RNA, 19 nt, Artificial Sequence
  Description of Artificial Sequence: Synthetic oligonucleotide
cacugaacccagaggccaa

SEQ ID NO: 1632734 - RNA, 19 nt, Artificial Sequence
  Description of Artificial Sequence: Synthetic oligonucleotide
guuuuggcugcuggccguc

SEQ ID NO: 1632735 - RNA, 19 nt, Artificial Sequence
  Description of Artificial Sequence: Synthetic oligonucleotide
ggaagacuugacagagaca

SEQ ID NO: 1632736 - RNA, 19 nt, Artificial Sequence
  Description of Artificial Sequence: Synthetic oligonucleotide
cguuugaguuccgaccacc

SEQ ID NO: 1632737 - RNA, 19 nt, Artificial Sequence
  Description of Artificial Sequence: Synthetic oligonucleotide
cagcaagccccaccuucuc

SEQ ID NO: 1632738 - RNA, 19 nt, Artificial Sequence
  Description of Artificial Sequence: Synthetic oligonucleotide
cccuguccaucccaucccc

SEQ ID NO: 1632739 - RNA, 19 nt, Artificial Sequence
  Description of Artificial Sequence: Synthetic oligonucleotide
cguacauaaccauuagcgu

SEQ ID NO: 1632740 - RNA, 19 nt, Artificial Sequence
  Description of Artificial Sequence: Synthetic oligonucleotide
caggaggaacccaggccaa

SEQ ID NO: 1632741 - RNA, 19 nt, Artificial Sequence
  Description of Artificial Sequence: Synthetic oligonucleotide
ggaucccagaguuucucau

SEQ ID NO: 1632742 - RNA, 19 nt, Artificial Sequence
  Description of Artificial Sequence: Synthetic oligonucleotide
cgggagagcacaaguauaa

SEQ ID NO: 1632743 - RNA, 19 nt, Artificial Sequence
  Description of Artificial Sequence: Synthetic oligonucleotide
ccccucccaguuguaagcg

SEQ ID NO: 1632744 - RNA, 19 nt, Artificial Sequence
  Description of Artificial Sequence: Synthetic oligonucleotide
gggcaguucuaagggguac

SEQ ID NO: 1632745 - RNA, 19 nt, Artificial Sequence
  Description of Artificial Sequence: Synthetic oligonucleotide
acgggaucccagaguuucu

SEQ ID NO: 1632746 - RNA, 19 nt, Artificial Sequence
  Description of Artificial Sequence: Synthetic oligonucleotide
gccgucgaagugacaaaac

SEQ ID NO: 1632747 - RNA, 19 nt, Artificial Sequence
  Description of Artificial Sequence: Synthetic oligonucleotide
cgaugggccagccacgaca

SEQ ID NO: 1632748 - RNA, 19 nt, Artificial Sequence
  Description of Artificial Sequence: Synthetic oligonucleotide
ggagaggauaugccaguau

SEQ ID NO: 1632749 - RNA, 19 nt, Artificial Sequence
  Description of Artificial Sequence: Synthetic oligonucleotide
caccccugaguccugcgcu

SEQ ID NO: 1632750 - RNA, 19 nt, Artificial Sequence
  Description of Artificial Sequence: Synthetic oligonucleotide
gcguuugaguuccgaccac

SEQ ID NO: 1632751 - RNA, 19 nt, Artificial Sequence
  Description of Artificial Sequence: Synthetic oligonucleotide
guaugccaggaggcggaga

SEQ ID NO: 1632752 - RNA, 19 nt, Artificial Sequence
  Description of Artificial Sequence: Synthetic oligonucleotide
augggccagccacgacagu

SEQ ID NO: 1632753 - RNA, 19 nt, Artificial Sequence
  Description of Artificial Sequence: Synthetic oligonucleotide
cccuaggagcaggacuagg

SEQ ID NO: 1632754 - RNA, 19 nt, Artificial Sequence
  Description of Artificial Sequence: Synthetic oligonucleotide
ggacuaggcccaccccuga

SEQ ID NO: 1632755 - RNA, 19 nt, Artificial Sequence
  Description of Artificial Sequence: Synthetic oligonucleotide
cagcaacaccaggcacacg

SEQ ID NO: 1632756 - RNA, 19 nt, Artificial Sequence
  Description of Artificial Sequence: Synthetic oligonucleotide
cccacgugucugaaauuca

SEQ ID NO: 1632757 - RNA, 19 nt, Artificial Sequence
  Description of Artificial Sequence: Synthetic oligonucleotide
cgagucggagaaggcaggg

SEQ ID NO: 1632758 - RNA, 19 nt, Artificial Sequence
  Description of Artificial Sequence: Synthetic oligonucleotide
caaccuuucccagcccugu

SEQ ID NO: 1632759 - RNA, 19 nt, Artificial Sequence
  Description of Artificial Sequence: Synthetic oligonucleotide
ccaacgggaucccagaguu

SEQ ID NO: 1632760 - RNA, 19 nt, Artificial Sequence
  Description of Artificial Sequence: Synthetic oligonucleotide
aggccaagugggaggcccu

SEQ ID NO: 1632761 - RNA, 19 nt, Artificial Sequence
  Description of Artificial Sequence: Synthetic oligonucleotide
ggccaagggaagacuugac

SEQ ID NO: 1632762 - RNA, 19 nt, Artificial Sequence
  Description of Artificial Sequence: Synthetic oligonucleotide
ccugucgggagagcacaag

SEQ ID NO: 1632763 - RNA, 19 nt, Artificial Sequence
  Description of Artificial Sequence: Synthetic oligonucleotide
cccagaguuucucaucugu

SEQ ID NO: 1632764 - RNA, 19 nt, Artificial Sequence
  Description of Artificial Sequence: Synthetic oligonucleotide
cacuaccagcaccugcagu

SEQ ID NO: 1632765 - RNA, 19 nt, Artificial Sequence
  Description of Artificial Sequence: Synthetic oligonucleotide
ccucccaguuguaagcgua

SEQ ID NO: 1632766 - RNA, 19 nt, Artificial Sequence
  Description of Artificial Sequence: Synthetic oligonucleotide
aggaaggagccagguuguu

SEQ ID NO: 1632767 - RNA, 19 nt, Artificial Sequence
  Description of Artificial Sequence: Synthetic oligonucleotide
gggagagcacaaguauaaa

SEQ ID NO: 1632768 - RNA, 19 nt, Artificial Sequence
  Description of Artificial Sequence: Synthetic oligonucleotide
augcaccaacacauauaua

SEQ ID NO: 1632769 - RNA, 19 nt, Artificial Sequence
  Description of Artificial Sequence: Synthetic oligonucleotide
gccaacgggaucccagagu

SEQ ID NO: 1632770 - RNA, 19 nt, Artificial Sequence
  Description of Artificial Sequence: Synthetic oligonucleotide
gccaagugggaggcccugc

SEQ ID NO: 1632771 - RNA, 19 nt, Artificial Sequence
  Description of Artificial Sequence: Synthetic oligonucleotide
cagcguggcggggcugggc

SEQ ID NO: 1632772 - RNA, 19 nt, Artificial Sequence
  Description of Artificial Sequence: Synthetic oligonucleotide
cagaguggcaugaccccuu

SEQ ID NO: 1632773 - RNA, 19 nt, Artificial Sequence
  Description of Artificial Sequence: Synthetic oligonucleotide
ccaucccauccccauaugu

SEQ ID NO: 1632774 - RNA, 19 nt, Artificial Sequence
  Description of Artificial Sequence: Synthetic oligonucleotide
ggccgucccacgugucuga

SEQ ID NO: 1632775 - RNA, 19 nt, Artificial Sequence
  Description of Artificial Sequence: Synthetic oligonucleotide
caccgggcaugaccaggca

SEQ ID NO: 1632776 - RNA, 19 nt, Artificial Sequence
  Description of Artificial Sequence: Synthetic oligonucleotide
ggcaugaccccuuccccuu

SEQ ID NO: 1632777 - RNA, 19 nt, Artificial Sequence
  Description of Artificial Sequence: Synthetic oligonucleotide
gggccagccacgacaguaa

SEQ ID NO: 1632778 - RNA, 19 nt, Artificial Sequence
  Description of Artificial Sequence: Synthetic oligonucleotide
ggucaccgaugggccagcc

SEQ ID NO: 1632779 - RNA, 19 nt, Artificial Sequence
  Description of Artificial Sequence: Synthetic oligonucleotide
gccacgacaguaacacggu

SEQ ID NO: 1632780 - RNA, 19 nt, Artificial Sequence
  Description of Artificial Sequence: Synthetic oligonucleotide
ccccugaguccugcgcucc

SEQ ID NO: 1632781 - RNA, 19 nt, Artificial Sequence
  Description of Artificial Sequence: Synthetic oligonucleotide
cgucccacgugucugaaau

SEQ ID NO: 1632782 - RNA, 19 nt, Artificial Sequence
  Description of Artificial Sequence: Synthetic oligonucleotide
ccauccccauauguacauc

SEQ ID NO: 1632783 - RNA, 19 nt, Artificial Sequence
  Description of Artificial Sequence: Synthetic oligonucleotide
gucccacgugucugaaauu

SEQ ID NO: 1632784 - RNA, 19 nt, Artificial Sequence
  Description of Artificial Sequence: Synthetic oligonucleotide
ccccuuccccuucauagcu

SEQ ID NO: 1632785 - RNA, 19 nt, Artificial Sequence
  Description of Artificial Sequence: Synthetic oligonucleotide
cuccuccaaguagcaucga

SEQ ID NO: 1632786 - RNA, 19 nt, Artificial Sequence
  Description of Artificial Sequence: Synthetic oligonucleotide
cccauccccauauguacau

SEQ ID NO: 1632787 - RNA, 19 nt, Artificial Sequence
  Description of Artificial Sequence: Synthetic oligonucleotide
cccaguuguaagcguacau

SEQ ID NO: 1632788 - RNA, 19 nt, Artificial Sequence
  Description of Artificial Sequence: Synthetic oligonucleotide
caacgggaucccagaguuu

SEQ ID NO: 1632789 - RNA, 19 nt, Artificial Sequence
  Description of Artificial Sequence: Synthetic oligonucleotide
agucgccgucgaagugaca

SEQ ID NO: 1632790 - RNA, 19 nt, Artificial Sequence
  Description of Artificial Sequence: Synthetic oligonucleotide
ccacgacaguaacacggua

SEQ ID NO: 1632791 - RNA, 19 nt, Artificial Sequence
  Description of Artificial Sequence: Synthetic oligonucleotide
ccgaugggccagccacgac

SEQ ID NO: 1632792 - RNA, 19 nt, Artificial Sequence
  Description of Artificial Sequence: Synthetic oligonucleotide
ccaaggggagcccgggccu

SEQ ID NO: 1632793 - RNA, 19 nt, Artificial Sequence
  Description of Artificial Sequence: Synthetic oligonucleotide
cgccgucgaagugacaaaa

SEQ ID NO: 1632794 - RNA, 19 nt, Artificial Sequence
  Description of Artificial Sequence: Synthetic oligonucleotide
ggccuccagggucaccgau

SEQ ID NO: 1632795 - RNA, 19 nt, Artificial Sequence
  Description of Artificial Sequence: Synthetic oligonucleotide
ccuagagcugggagaggau

SEQ ID NO: 1632796 - RNA, 19 nt, Artificial Sequence
  Description of Artificial Sequence: Synthetic oligonucleotide
ccuccccucccaguuguaa

SEQ ID NO: 1632797 - RNA, 19 nt, Artificial Sequence
  Description of Artificial Sequence: Synthetic oligonucleotide
gcuggccgucccacguguc

SEQ ID NO: 1632798 - RNA, 19 nt, Artificial Sequence
  Description of Artificial Sequence: Synthetic oligonucleotide
cugcuccuccaaguagcau

SEQ ID NO: 1632799 - RNA, 19 nt, Artificial Sequence
  Description of Artificial Sequence: Synthetic oligonucleotide
cccugucgggagagcacaa

SEQ ID NO: 1632800 - RNA, 19 nt, Artificial Sequence
  Description of Artificial Sequence: Synthetic oligonucleotide
gggguaggagaggcagagu

SEQ ID NO: 1632801 - RNA, 19 nt, Artificial Sequence
  Description of Artificial Sequence: Synthetic oligonucleotide
cccucccaguuguaagcgu

SEQ ID NO: 1632802 - RNA, 19 nt, Artificial Sequence
  Description of Artificial Sequence: Synthetic oligonucleotide
gccgucccacgugucugaa

SEQ ID NO: 1632803 - RNA, 19 nt, Artificial Sequence
  Description of Artificial Sequence: Synthetic oligonucleotide
cgacaguaacacgguagcu

SEQ ID NO: 1632804 - RNA, 19 nt, Artificial Sequence
  Description of Artificial Sequence: Synthetic oligonucleotide
gcggggcugggcagccauc

SEQ ID NO: 1632805 - RNA, 19 nt, Artificial Sequence
  Description of Artificial Sequence: Synthetic oligonucleotide
gcgugccuccugugaggcu

SEQ ID NO: 1632806 - RNA, 19 nt, Artificial Sequence
  Description of Artificial Sequence: Synthetic oligonucleotide
cgggcaugaccaggcacaa

SEQ ID NO: 1632807 - RNA, 19 nt, Artificial Sequence
  Description of Artificial Sequence: Synthetic oligonucleotide
gggcaugaccaggcacaau

SEQ ID NO: 1632808 - RNA, 19 nt, Artificial Sequence
  Description of Artificial Sequence: Synthetic oligonucleotide
cgguccuccccucccaguu

SEQ ID NO: 1632809 - RNA, 19 nt, Artificial Sequence
  Description of Artificial Sequence: Synthetic oligonucleotide
ccccuaggugaagccgagu

SEQ ID NO: 1632810 - RNA, 19 nt, Artificial Sequence
  Description of Artificial Sequence: Synthetic oligonucleotide
gaauuaaagacaucaaagg

SEQ ID NO: 1632811 - RNA, 19 nt, Artificial Sequence
  Description of Artificial Sequence: Synthetic oligonucleotide
aacauuuacagccacgaga

SEQ ID NO: 1632812 - RNA, 19 nt, Artificial Sequence
  Description of Artificial Sequence: Synthetic oligonucleotide
gauagaucaaggcaagccg

SEQ ID NO: 1632813 - RNA, 19 nt, Artificial Sequence
  Description of Artificial Sequence: Synthetic oligonucleotide
agauguguuacuaugaggg

SEQ ID NO: 1632814 - RNA, 19 nt, Artificial Sequence
  Description of Artificial Sequence: Synthetic oligonucleotide
uauaauaaauucuggguac

SEQ ID NO: 1632815 - RNA, 19 nt, Artificial Sequence
  Description of Artificial Sequence: Synthetic oligonucleotide
gaggccagaauuuaaacag

SEQ ID NO: 1632816 - RNA, 19 nt, Artificial Sequence
  Description of Artificial Sequence: Synthetic oligonucleotide
cugucugucauacagaaag

SEQ ID NO: 1632817 - RNA, 19 nt, Artificial Sequence
  Description of Artificial Sequence: Synthetic oligonucleotide
ucuacaagccaacagugag

SEQ ID NO: 1632818 - RNA, 19 nt, Artificial Sequence
  Description of Artificial Sequence: Synthetic oligonucleotide
uuaggcuuauuaaugacug

SEQ ID NO: 1632819 - RNA, 19 nt, Artificial Sequence
  Description of Artificial Sequence: Synthetic oligonucleotide
ucuugcuaaccacagaaag

SEQ ID NO: 1632820 - RNA, 19 nt, Artificial Sequence
  Description of Artificial Sequence: Synthetic oligonucleotide
uuagagaaguguauggacc

SEQ ID NO: 1632821 - RNA, 19 nt, Artificial Sequence
  Description of Artificial Sequence: Synthetic oligonucleotide
aagguuuacaaucccaugu

SEQ ID NO: 1632822 - RNA, 19 nt, Artificial Sequence
  Description of Artificial Sequence: Synthetic oligonucleotide
cacauggugaauuaaagac

SEQ ID NO: 1632823 - RNA, 19 nt, Artificial Sequence
  Description of Artificial Sequence: Synthetic oligonucleotide
aacaggaugugcuuuacca

SEQ ID NO: 1632824 - RNA, 19 nt, Artificial Sequence
  Description of Artificial Sequence: Synthetic oligonucleotide
agauagaucaaggcaagcc

SEQ ID NO: 1632825 - RNA, 19 nt, Artificial Sequence
  Description of Artificial Sequence: Synthetic oligonucleotide
uacaaucccauguagggag

SEQ ID NO: 1632826 - RNA, 19 nt, Artificial Sequence
  Description of Artificial Sequence: Synthetic oligonucleotide
aaggcaagccgcucuauac

SEQ ID NO: 1632827 - RNA, 19 nt, Artificial Sequence
  Description of Artificial Sequence: Synthetic oligonucleotide
aaaucugauacagaggcca

SEQ ID NO: 1632828 - RNA, 19 nt, Artificial Sequence
  Description of Artificial Sequence: Synthetic oligonucleotide
uacuaugagggaacaaacg

SEQ ID NO: 1632829 - RNA, 19 nt, Artificial Sequence
  Description of Artificial Sequence: Synthetic oligonucleotide
aauccuauuagcuccaauu

SEQ ID NO: 1632830 - RNA, 19 nt, Artificial Sequence
  Description of Artificial Sequence: Synthetic oligonucleotide
aaguggaacacuggaaggc

SEQ ID NO: 1632831 - RNA, 19 nt, Artificial Sequence
  Description of Artificial Sequence: Synthetic oligonucleotide
auauaauaaauucugggua

SEQ ID NO: 1632832 - RNA, 19 nt, Artificial Sequence
  Description of Artificial Sequence: Synthetic oligonucleotide
ugaacagauagaucaaggc

SEQ ID NO: 1632833 - RNA, 19 nt, Artificial Sequence
  Description of Artificial Sequence: Synthetic oligonucleotide
uggugaauuaaagacauca

SEQ ID NO: 1632834 - RNA, 19 nt, Artificial Sequence
  Description of Artificial Sequence: Synthetic oligonucleotide
auuaucugcaaagagcguc

SEQ ID NO: 1632835 - RNA, 19 nt, Artificial Sequence
  Description of Artificial Sequence: Synthetic oligonucleotide
aaauacguccaucuucucu

SEQ ID NO: 1632836 - RNA, 19 nt, Artificial Sequence
  Description of Artificial Sequence: Synthetic oligonucleotide
aauacguccaucuucucuu

SEQ ID NO: 1632837 - RNA, 19 nt, Artificial Sequence
  Description of Artificial Sequence: Synthetic oligonucleotide
uuaaccacagggaagcuaa

SEQ ID NO: 1632838 - RNA, 19 nt, Artificial Sequence
  Description of Artificial Sequence: Synthetic oligonucleotide
aagguuaguuacuguguac

SEQ ID NO: 1632839 - RNA, 19 nt, Artificial Sequence
  Description of Artificial Sequence: Synthetic oligonucleotide
uaucuacaagccaacagug

SEQ ID NO: 1632840 - RNA, 19 nt, Artificial Sequence
  Description of Artificial Sequence: Synthetic oligonucleotide
gacgcugagaaacaggaug

SEQ ID NO: 1632841 - RNA, 19 nt, Artificial Sequence
  Description of Artificial Sequence: Synthetic oligonucleotide
acuaugagggaacaaacga

SEQ ID NO: 1632842 - RNA, 19 nt, Artificial Sequence
  Description of Artificial Sequence: Synthetic oligonucleotide
uaugagggaacaaacgagu

SEQ ID NO: 1632843 - RNA, 19 nt, Artificial Sequence
  Description of Artificial Sequence: Synthetic oligonucleotide
ugucucacugugcugagag

SEQ ID NO: 1632844 - RNA, 19 nt, Artificial Sequence
  Description of Artificial Sequence: Synthetic oligonucleotide
agcuaauggacaaaccucc

SEQ ID NO: 1632845 - RNA, 19 nt, Artificial Sequence
  Description of Artificial Sequence: Synthetic oligonucleotide
ugauacagaggccagaauu

SEQ ID NO: 1632846 - RNA, 19 nt, Artificial Sequence
  Description of Artificial Sequence: Synthetic oligonucleotide
aaaaguaugcuuauauuau

SEQ ID NO: 1632847 - RNA, 19 nt, Artificial Sequence
  Description of Artificial Sequence: Synthetic oligonucleotide
gcucuauuuaaccacaggg

SEQ ID NO: 1632848 - RNA, 19 nt, Artificial Sequence
  Description of Artificial Sequence: Synthetic oligonucleotide
aacagauagaucaaggcaa

SEQ ID NO: 1632849 - RNA, 19 nt, Artificial Sequence
  Description of Artificial Sequence: Synthetic oligonucleotide
agaaagaguuugcacacag

SEQ ID NO: 1632850 - RNA, 19 nt, Artificial Sequence
  Description of Artificial Sequence: Synthetic oligonucleotide
gaacagauagaucaaggca

SEQ ID NO: 1632851 - RNA, 19 nt, Artificial Sequence
  Description of Artificial Sequence: Synthetic oligonucleotide
uuauuaaugacuggccuug

SEQ ID NO: 1632852 - RNA, 19 nt, Artificial Sequence
  Description of Artificial Sequence: Synthetic oligonucleotide
gccaccuacacucagaggg

SEQ ID NO: 1632853 - RNA, 19 nt, Artificial Sequence
  Description of Artificial Sequence: Synthetic oligonucleotide
uuaucugcaaagagcgucc

SEQ ID NO: 1632854 - RNA, 19 nt, Artificial Sequence
  Description of Artificial Sequence: Synthetic oligonucleotide
aagcuaauggacaaaccuc

SEQ ID NO: 1632855 - RNA, 19 nt, Artificial Sequence
  Description of Artificial Sequence: Synthetic oligonucleotide
  modified_base (19)..(19): a, c, u, g, unknown or other
aagagcguccuccaggacn

SEQ ID NO: 1632856 - RNA, 19 nt, Artificial Sequence
  Description of Artificial Sequence: Synthetic oligonucleotide
ugcuuuaccacaacacuca

SEQ ID NO: 1632857 - RNA, 19 nt, Artificial Sequence
  Description of Artificial Sequence: Synthetic oligonucleotide
uuuacagccacgagacugc

SEQ ID NO: 1632858 - RNA, 19 nt, Artificial Sequence
  Description of Artificial Sequence: Synthetic oligonucleotide
cuuacuaguuguuaccgug

SEQ ID NO: 1632859 - RNA, 19 nt, Artificial Sequence
  Description of Artificial Sequence: Synthetic oligonucleotide
uuacuaugagggaacaaac

SEQ ID NO: 1632860 - RNA, 19 nt, Artificial Sequence
  Description of Artificial Sequence: Synthetic oligonucleotide
cuauuuaaccacagggaag

SEQ ID NO: 1632861 - RNA, 19 nt, Artificial Sequence
  Description of Artificial Sequence: Synthetic oligonucleotide
acaauauaauaaauucugg

SEQ ID NO: 1632862 - RNA, 19 nt, Artificial Sequence
  Description of Artificial Sequence: Synthetic oligonucleotide
agaaguugcgcccagcaca

SEQ ID NO: 1632863 - RNA, 19 nt, Artificial Sequence
  Description of Artificial Sequence: Synthetic oligonucleotide
cuaugagggaacaaacgag

SEQ ID NO: 1632864 - RNA, 19 nt, Artificial Sequence
  Description of Artificial Sequence: Synthetic oligonucleotide
auagaucaaggcaagccgc

SEQ ID NO: 1632865 - RNA, 19 nt, Artificial Sequence
  Description of Artificial Sequence: Synthetic oligonucleotide
ucugcaaagagcguccucc

SEQ ID NO: 1632866 - RNA, 19 nt, Artificial Sequence
  Description of Artificial Sequence: Synthetic oligonucleotide
cuugcuuacuaguuguuac

SEQ ID NO: 1632867 - RNA, 19 nt, Artificial Sequence
  Description of Artificial Sequence: Synthetic oligonucleotide
gagacugccucugaaaugc

SEQ ID NO: 1632868 - RNA, 19 nt, Artificial Sequence
  Description of Artificial Sequence: Synthetic oligonucleotide
guuguuaccguguauuuuc

SEQ ID NO: 1632869 - RNA, 19 nt, Artificial Sequence
  Description of Artificial Sequence: Synthetic oligonucleotide
uuacuggaaccuuccaggg

SEQ ID NO: 1632870 - RNA, 19 nt, Artificial Sequence
  Description of Artificial Sequence: Synthetic oligonucleotide
cagaaugacaaacucauga

SEQ ID NO: 1632871 - RNA, 19 nt, Artificial Sequence
  Description of Artificial Sequence: Synthetic oligonucleotide
ucacauggugaauuaaaga

SEQ ID NO: 1632872 - RNA, 19 nt, Artificial Sequence
  Description of Artificial Sequence: Synthetic oligonucleotide
uuaccguguauuuucagaa

SEQ ID NO: 1632873 - RNA, 19 nt, Artificial Sequence
  Description of Artificial Sequence: Synthetic oligonucleotide
ucauacagaaagaguuugc

SEQ ID NO: 1632874 - RNA, 19 nt, Artificial Sequence
  Description of Artificial Sequence: Synthetic oligonucleotide
caguuagagaaguguaugg

SEQ ID NO: 1632875 - RNA, 19 nt, Artificial Sequence
  Description of Artificial Sequence: Synthetic oligonucleotide
ugcuuacuaguuguuaccg

SEQ ID NO: 1632876 - RNA, 19 nt, Artificial Sequence
  Description of Artificial Sequence: Synthetic oligonucleotide
guuagagaaguguauggac

SEQ ID NO: 1632877 - RNA, 19 nt, Artificial Sequence
  Description of Artificial Sequence: Synthetic oligonucleotide
gaagcuaauggacaaaccu

SEQ ID NO: 1632878 - RNA, 19 nt, Artificial Sequence
  Description of Artificial Sequence: Synthetic oligonucleotide
aguguauggaccacagggc

SEQ ID NO: 1632879 - RNA, 19 nt, Artificial Sequence
  Description of Artificial Sequence: Synthetic oligonucleotide
aguugcgcccagcacaugg

SEQ ID NO: 1632880 - RNA, 19 nt, Artificial Sequence
  Description of Artificial Sequence: Synthetic oligonucleotide
ucugcaagucaaaucaaau

SEQ ID NO: 1632881 - RNA, 19 nt, Artificial Sequence
  Description of Artificial Sequence: Synthetic oligonucleotide
ucucuugcuuacuaguugu

SEQ ID NO: 1632882 - RNA, 19 nt, Artificial Sequence
  Description of Artificial Sequence: Synthetic oligonucleotide
aggcaagccgcucuauacc

SEQ ID NO: 1632883 - RNA, 19 nt, Artificial Sequence
  Description of Artificial Sequence: Synthetic oligonucleotide
aggacgacgacgcugagaa

SEQ ID NO: 1632884 - RNA, 19 nt, Artificial Sequence
  Description of Artificial Sequence: Synthetic oligonucleotide
ugagcucacuuuauucaag

SEQ ID NO: 1632885 - RNA, 19 nt, Artificial Sequence
  Description of Artificial Sequence: Synthetic oligonucleotide
aaaccaagccccaacuuug

SEQ ID NO: 1632886 - RNA, 19 nt, Artificial Sequence
  Description of Artificial Sequence: Synthetic oligonucleotide
uguauggaccacagggccc

SEQ ID NO: 1632887 - RNA, 19 nt, Artificial Sequence
  Description of Artificial Sequence: Synthetic oligonucleotide
uuacuaguuguuaccgugu

SEQ ID NO: 1632888 - RNA, 19 nt, Artificial Sequence
  Description of Artificial Sequence: Synthetic oligonucleotide
acagaaagucacugugagg

SEQ ID NO: 1632889 - RNA, 19 nt, Artificial Sequence
  Description of Artificial Sequence: Synthetic oligonucleotide
uugcuuacuaguuguuacc

SEQ ID NO: 1632890 - RNA, 19 nt, Artificial Sequence
  Description of Artificial Sequence: Synthetic oligonucleotide
gugaauuaaagacaucaaa

SEQ ID NO: 1632891 - RNA, 19 nt, Artificial Sequence
  Description of Artificial Sequence: Synthetic oligonucleotide
ugugucccauccaucagug

SEQ ID NO: 1632892 - RNA, 19 nt, Artificial Sequence
  Description of Artificial Sequence: Synthetic oligonucleotide
aagagcuaacaggacgacg

SEQ ID NO: 1632893 - RNA, 19 nt, Artificial Sequence
  Description of Artificial Sequence: Synthetic oligonucleotide
uuuaaacagaagagcuaac

SEQ ID NO: 1632894 - RNA, 19 nt, Artificial Sequence
  Description of Artificial Sequence: Synthetic oligonucleotide
gacgacgacgcugagaaac

SEQ ID NO: 1632895 - RNA, 19 nt, Artificial Sequence
  Description of Artificial Sequence: Synthetic oligonucleotide
agcucuauuuaaccacagg

SEQ ID NO: 1632896 - RNA, 19 nt, Artificial Sequence
  Description of Artificial Sequence: Synthetic oligonucleotide
cuacaagccaacagugagc

SEQ ID NO: 1632897 - RNA, 19 nt, Artificial Sequence
  Description of Artificial Sequence: Synthetic oligonucleotide
uaggcuuauuaaugacugg

SEQ ID NO: 1632898 - RNA, 19 nt, Artificial Sequence
  Description of Artificial Sequence: Synthetic oligonucleotide
ggguacaaaauccuauuag

SEQ ID NO: 1632899 - RNA, 19 nt, Artificial Sequence
  Description of Artificial Sequence: Synthetic oligonucleotide
ugacaaacucaugagugca

SEQ ID NO: 1632900 - RNA, 19 nt, Artificial Sequence
  Description of Artificial Sequence: Synthetic oligonucleotide
ucucuugcggugccgagca

SEQ ID NO: 1632901 - RNA, 19 nt, Artificial Sequence
  Description of Artificial Sequence: Synthetic oligonucleotide
guguauggaccacagggcc

SEQ ID NO: 1632902 - RNA, 19 nt, Artificial Sequence
  Description of Artificial Sequence: Synthetic oligonucleotide
aguaugcuuauauuauaaa

SEQ ID NO: 1632903 - RNA, 19 nt, Artificial Sequence
  Description of Artificial Sequence: Synthetic oligonucleotide
caggaccugagcaaaggcc

SEQ ID NO: 1632904 - RNA, 19 nt, Artificial Sequence
  Description of Artificial Sequence: Synthetic oligonucleotide
augccaagaaaucccuguc

SEQ ID NO: 1632905 - RNA, 19 nt, Artificial Sequence
  Description of Artificial Sequence: Synthetic oligonucleotide
ggacaaaccucccaggccc

SEQ ID NO: 1632906 - RNA, 19 nt, Artificial Sequence
  Description of Artificial Sequence: Synthetic oligonucleotide
aaaccucccaggcccacug

SEQ ID NO: 1632907 - RNA, 19 nt, Artificial Sequence
  Description of Artificial Sequence: Synthetic oligonucleotide
gucauacagaaagaguuug

SEQ ID NO: 1632908 - RNA, 19 nt, Artificial Sequence
  Description of Artificial Sequence: Synthetic oligonucleotide
agauacauaaccaucuguu

SEQ ID NO: 1632909 - RNA, 19 nt, Artificial Sequence
  Description of Artificial Sequence: Synthetic oligonucleotide
guuaccguguauuuucaga

SEQ ID NO: 1632910 - RNA, 19 nt, Artificial Sequence
  Description of Artificial Sequence: Synthetic oligonucleotide
aguuagagaaguguaugga

SEQ ID NO: 1632911 - RNA, 19 nt, Artificial Sequence
  Description of Artificial Sequence: Synthetic oligonucleotide
acugaacagauagaucaag

SEQ ID NO: 1632912 - RNA, 19 nt, Artificial Sequence
  Description of Artificial Sequence: Synthetic oligonucleotide
accguguauuuucagaaaa

SEQ ID NO: 1632913 - RNA, 19 nt, Artificial Sequence
  Description of Artificial Sequence: Synthetic oligonucleotide
ugccaagaaaucccugucu

SEQ ID NO: 1632914 - RNA, 19 nt, Artificial Sequence
  Description of Artificial Sequence: Synthetic oligonucleotide
agaaaaguauuaacaauau

SEQ ID NO: 1632915 - RNA, 19 nt, Artificial Sequence
  Description of Artificial Sequence: Synthetic oligonucleotide
aaagagcguccuccaggac

SEQ ID NO: 1632916 - RNA, 19 nt, Artificial Sequence
  Description of Artificial Sequence: Synthetic oligonucleotide
uguguacauuuucuugacu

SEQ ID NO: 1632917 - RNA, 19 nt, Artificial Sequence
  Description of Artificial Sequence: Synthetic oligonucleotide
aagcgggugcacuguguac

SEQ ID NO: 1632918 - RNA, 19 nt, Artificial Sequence
  Description of Artificial Sequence: Synthetic oligonucleotide
ucccauguagggagguggg

SEQ ID NO: 1632919 - RNA, 19 nt, Artificial Sequence
  Description of Artificial Sequence: Synthetic oligonucleotide
agguuaguuacuguguaca

SEQ ID NO: 1632920 - RNA, 19 nt, Artificial Sequence
  Description of Artificial Sequence: Synthetic oligonucleotide
uaauaucuacaagccaaca

SEQ ID NO: 1632921 - RNA, 19 nt, Artificial Sequence
  Description of Artificial Sequence: Synthetic oligonucleotide
uuacaaucccauguaggga

SEQ ID NO: 1632922 - RNA, 19 nt, Artificial Sequence
  Description of Artificial Sequence: Synthetic oligonucleotide
uguuaccguguauuuucag

SEQ ID NO: 1632923 - RNA, 19 nt, Artificial Sequence
  Description of Artificial Sequence: Synthetic oligonucleotide
aacaggacgacgacgcuga

SEQ ID NO: 1632924 - RNA, 19 nt, Artificial Sequence
  Description of Artificial Sequence: Synthetic oligonucleotide
guaguaaguggaacacugg

SEQ ID NO: 1632925 - RNA, 19 nt, Artificial Sequence
  Description of Artificial Sequence: Synthetic oligonucleotide
aucccauguagggaggugg

SEQ ID NO: 1632926 - RNA, 19 nt, Artificial Sequence
  Description of Artificial Sequence: Synthetic oligonucleotide
cccaacuuugauuaucugc

SEQ ID NO: 1632927 - RNA, 19 nt, Artificial Sequence
  Description of Artificial Sequence: Synthetic oligonucleotide
gcaaagagcguccuccagg

SEQ ID NO: 1632928 - RNA, 19 nt, Artificial Sequence
  Description of Artificial Sequence: Synthetic oligonucleotide
gauguguuacuaugaggga

SEQ ID NO: 1632929 - RNA, 19 nt, Artificial Sequence
  Description of Artificial Sequence: Synthetic oligonucleotide
uuguuaccguguauuuuca

SEQ ID NO: 1632930 - RNA, 19 nt, Artificial Sequence
  Description of Artificial Sequence: Synthetic oligonucleotide
caagccccaacuuugauua

SEQ ID NO: 1632931 - RNA, 19 nt, Artificial Sequence
  Description of Artificial Sequence: Synthetic oligonucleotide
gaugccaagaaaucccugu

SEQ ID NO: 1632932 - RNA, 19 nt, Artificial Sequence
  Description of Artificial Sequence: Synthetic oligonucleotide
aaagucacugugagggcug

SEQ ID NO: 1632933 - RNA, 19 nt, Artificial Sequence
  Description of Artificial Sequence: Synthetic oligonucleotide
uccguaguaaguggaacac

SEQ ID NO: 1632934 - RNA, 19 nt, Artificial Sequence
  Description of Artificial Sequence: Synthetic oligonucleotide
aaccuuccagggcaccaag

SEQ ID NO: 1632935 - RNA, 19 nt, Artificial Sequence
  Description of Artificial Sequence: Synthetic oligonucleotide
uaacaggacgacgacgcug

SEQ ID NO: 1632936 - RNA, 19 nt, Artificial Sequence
  Description of Artificial Sequence: Synthetic oligonucleotide
cucagauacauaaccaucu

SEQ ID NO: 1632937 - RNA, 19 nt, Artificial Sequence
  Description of Artificial Sequence: Synthetic oligonucleotide
acagauagaucaaggcaag

SEQ ID NO: 1632938 - RNA, 19 nt, Artificial Sequence
  Description of Artificial Sequence: Synthetic oligonucleotide
acgagacugccucugaaau

SEQ ID NO: 1632939 - RNA, 19 nt, Artificial Sequence
  Description of Artificial Sequence: Synthetic oligonucleotide
gcuaacaggacgacgacgc

SEQ ID NO: 1632940 - RNA, 19 nt, Artificial Sequence
  Description of Artificial Sequence: Synthetic oligonucleotide
agcuaacaggacgacgacg

SEQ ID NO: 1632941 - RNA, 19 nt, Artificial Sequence
  Description of Artificial Sequence: Synthetic oligonucleotide
ucaaaccaagccccaacuu

SEQ ID NO: 1632942 - RNA, 19 nt, Artificial Sequence
  Description of Artificial Sequence: Synthetic oligonucleotide
agguuuacaaucccaugua

SEQ ID NO: 1632943 - RNA, 19 nt, Artificial Sequence
  Description of Artificial Sequence: Synthetic oligonucleotide
gacgacgcugagaaacagg

SEQ ID NO: 1632944 - RNA, 19 nt, Artificial Sequence
  Description of Artificial Sequence: Synthetic oligonucleotide
acaagguuaguuacugugu

SEQ ID NO: 1632945 - RNA, 19 nt, Artificial Sequence
  Description of Artificial Sequence: Synthetic oligonucleotide
uggccuccguaguaagugg

SEQ ID NO: 1632946 - RNA, 19 nt, Artificial Sequence
  Description of Artificial Sequence: Synthetic oligonucleotide
auguguuacuaugagggaa

SEQ ID NO: 1632947 - RNA, 19 nt, Artificial Sequence
  Description of Artificial Sequence: Synthetic oligonucleotide
ucacagguccuuacucaca

SEQ ID NO: 1632948 - RNA, 19 nt, Artificial Sequence
  Description of Artificial Sequence: Synthetic oligonucleotide
aguguucacauggugaauu

SEQ ID NO: 1632949 - RNA, 19 nt, Artificial Sequence
  Description of Artificial Sequence: Synthetic oligonucleotide
  modified_base (18)..(18): a, c, u, g, unknown or other
agagcguccuccaggacng

SEQ ID NO: 1632950 - RNA, 19 nt, Artificial Sequence
  Description of Artificial Sequence: Synthetic oligonucleotide
aagacaucaaaggcaguua

SEQ ID NO: 1632951 - RNA, 19 nt, Artificial Sequence
  Description of Artificial Sequence: Synthetic oligonucleotide
uacuaguuguuaccgugua

SEQ ID NO: 1632952 - RNA, 19 nt, Artificial Sequence
  Description of Artificial Sequence: Synthetic oligonucleotide
uuuaaccacagggaagcua

SEQ ID NO: 1632953 - RNA, 19 nt, Artificial Sequence
  Description of Artificial Sequence: Synthetic oligonucleotide
auggccuccguaguaagug

SEQ ID NO: 1632954 - RNA, 19 nt, Artificial Sequence
  Description of Artificial Sequence: Synthetic oligonucleotide
augagauguguuacuauga

SEQ ID NO: 1632955 - RNA, 19 nt, Artificial Sequence
  Description of Artificial Sequence: Synthetic oligonucleotide
aggaccugagcaaaggccu

SEQ ID NO: 1632956 - RNA, 19 nt, Artificial Sequence
  Description of Artificial Sequence: Synthetic oligonucleotide
acgacgcugagaaacagga

SEQ ID NO: 1632957 - RNA, 19 nt, Artificial Sequence
  Description of Artificial Sequence: Synthetic oligonucleotide
cguaguaaguggaacacug

SEQ ID NO: 1632958 - RNA, 19 nt, Artificial Sequence
  Description of Artificial Sequence: Synthetic oligonucleotide
gccaagaaaucccugucug

SEQ ID NO: 1632959 - RNA, 19 nt, Artificial Sequence
  Description of Artificial Sequence: Synthetic oligonucleotide
aguaaguggaacacuggaa

SEQ ID NO: 1632960 - RNA, 19 nt, Artificial Sequence
  Description of Artificial Sequence: Synthetic oligonucleotide
caagccgcucuauaccaac

SEQ ID NO: 1632961 - RNA, 19 nt, Artificial Sequence
  Description of Artificial Sequence: Synthetic oligonucleotide
cagccaccuacacucagag

SEQ ID NO: 1632962 - RNA, 19 nt, Artificial Sequence
  Description of Artificial Sequence: Synthetic oligonucleotide
guccuuacucacaaaauaa

SEQ ID NO: 1632963 - RNA, 19 nt, Artificial Sequence
  Description of Artificial Sequence: Synthetic oligonucleotide
aucugcaaagagcguccuc

SEQ ID NO: 1632964 - RNA, 19 nt, Artificial Sequence
  Description of Artificial Sequence: Synthetic oligonucleotide
uaguuguuaccguguauuu

SEQ ID NO: 1632965 - RNA, 19 nt, Artificial Sequence
  Description of Artificial Sequence: Synthetic oligonucleotide
cuccguaguaaguggaaca

SEQ ID NO: 1632966 - RNA, 19 nt, Artificial Sequence
  Description of Artificial Sequence: Synthetic oligonucleotide
ucuauaccaacagcucuau

SEQ ID NO: 1632967 - RNA, 19 nt, Artificial Sequence
  Description of Artificial Sequence: Synthetic oligonucleotide
uguucacauggugaauuaa

SEQ ID NO: 1632968 - RNA, 19 nt, Artificial Sequence
  Description of Artificial Sequence: Synthetic oligonucleotide
acuaguuguuaccguguau

SEQ ID NO: 1632969 - RNA, 19 nt, Artificial Sequence
  Description of Artificial Sequence: Synthetic oligonucleotide
uaccguguauuuucagaaa

SEQ ID NO: 1632970 - RNA, 19 nt, Artificial Sequence
  Description of Artificial Sequence: Synthetic oligonucleotide
ucuugcggugccgagcaga

SEQ ID NO: 1632971 - RNA, 19 nt, Artificial Sequence
  Description of Artificial Sequence: Synthetic oligonucleotide
ggaacaaacgaguucccaa

SEQ ID NO: 1632972 - RNA, 19 nt, Artificial Sequence
  Description of Artificial Sequence: Synthetic oligonucleotide
ccaucauguacaagguuag

SEQ ID NO: 1632973 - RNA, 19 nt, Artificial Sequence
  Description of Artificial Sequence: Synthetic oligonucleotide
aguucccaagguuuacaau

SEQ ID NO: 1632974 - RNA, 19 nt, Artificial Sequence
  Description of Artificial Sequence: Synthetic oligonucleotide
ugccgagcagaagucacug

SEQ ID NO: 1632975 - RNA, 19 nt, Artificial Sequence
  Description of Artificial Sequence: Synthetic oligonucleotide
guucacauggugaauuaaa

SEQ ID NO: 1632976 - RNA, 19 nt, Artificial Sequence
  Description of Artificial Sequence: Synthetic oligonucleotide
acgcugagaaacaggaugu

SEQ ID NO: 1632977 - RNA, 19 nt, Artificial Sequence
  Description of Artificial Sequence: Synthetic oligonucleotide
gggaaguuugccucccugc

SEQ ID NO: 1632978 - RNA, 19 nt, Artificial Sequence
  Description of Artificial Sequence: Synthetic oligonucleotide
ccuauuagcuccaauuuaa

SEQ ID NO: 1632979 - RNA, 19 nt, Artificial Sequence
  Description of Artificial Sequence: Synthetic oligonucleotide
gacugccucugaaaugcag

SEQ ID NO: 1632980 - RNA, 19 nt, Artificial Sequence
  Description of Artificial Sequence: Synthetic oligonucleotide
cucuauaccaacagcucua

SEQ ID NO: 1632981 - RNA, 19 nt, Artificial Sequence
  Description of Artificial Sequence: Synthetic oligonucleotide
ggcuuauuaaugacuggcc

SEQ ID NO: 1632982 - RNA, 19 nt, Artificial Sequence
  Description of Artificial Sequence: Synthetic oligonucleotide
cuuuaccacaacacucaga

SEQ ID NO: 1632983 - RNA, 19 nt, Artificial Sequence
  Description of Artificial Sequence: Synthetic oligonucleotide
gagccuuaggcuuauuaau

SEQ ID NO: 1632984 - RNA, 19 nt, Artificial Sequence
  Description of Artificial Sequence: Synthetic oligonucleotide
gguccuuacucacaaaaua

SEQ ID NO: 1632985 - RNA, 19 nt, Artificial Sequence
  Description of Artificial Sequence: Synthetic oligonucleotide
aacagugagcucacuuuau

SEQ ID NO: 1632986 - RNA, 19 nt, Artificial Sequence
  Description of Artificial Sequence: Synthetic oligonucleotide
uguuacuaugagggaacaa

SEQ ID NO: 1632987 - RNA, 19 nt, Artificial Sequence
  Description of Artificial Sequence: Synthetic oligonucleotide
gaacaggaccugagcaaag

SEQ ID NO: 1632988 - RNA, 19 nt, Artificial Sequence
  Description of Artificial Sequence: Synthetic oligonucleotide
agggaacaaacgaguuccc

SEQ ID NO: 1632989 - RNA, 19 nt, Artificial Sequence
  Description of Artificial Sequence: Synthetic oligonucleotide
aggagccuuaggcuuauua

SEQ ID NO: 1632990 - RNA, 19 nt, Artificial Sequence
  Description of Artificial Sequence: Synthetic oligonucleotide
cuauuagcuccaauuuaaa

SEQ ID NO: 1632991 - RNA, 19 nt, Artificial Sequence
  Description of Artificial Sequence: Synthetic oligonucleotide
acgaguucccaagguuuac

SEQ ID NO: 1632992 - RNA, 19 nt, Artificial Sequence
  Description of Artificial Sequence: Synthetic oligonucleotide
cuuauuaaugacuggccuu

SEQ ID NO: 1632993 - RNA, 19 nt, Artificial Sequence
  Description of Artificial Sequence: Synthetic oligonucleotide
gauacagaggccagaauuu

SEQ ID NO: 1632994 - RNA, 19 nt, Artificial Sequence
  Description of Artificial Sequence: Synthetic oligonucleotide
ggagccuuaggcuuauuaa

SEQ ID NO: 1632995 - RNA, 19 nt, Artificial Sequence
  Description of Artificial Sequence: Synthetic oligonucleotide
caucagugcugaagaugcc

SEQ ID NO: 1632996 - RNA, 19 nt, Artificial Sequence
  Description of Artificial Sequence: Synthetic oligonucleotide
ggaaccucaccccggcuag

SEQ ID NO: 1632997 - RNA, 19 nt, Artificial Sequence
  Description of Artificial Sequence: Synthetic oligonucleotide
aacgaguucccaagguuua

SEQ ID NO: 1632998 - RNA, 19 nt, Artificial Sequence
  Description of Artificial Sequence: Synthetic oligonucleotide
gaagagcuaacaggacgac

SEQ ID NO: 1632999 - RNA, 19 nt, Artificial Sequence
  Description of Artificial Sequence: Synthetic oligonucleotide
acaaucccauguagggagg

SEQ ID NO: 1633000 - RNA, 19 nt, Artificial Sequence
  Description of Artificial Sequence: Synthetic oligonucleotide
caagguuaguuacugugua

SEQ ID NO: 1633001 - RNA, 19 nt, Artificial Sequence
  Description of Artificial Sequence: Synthetic oligonucleotide
aggaaccucaccccggcua

SEQ ID NO: 1633002 - RNA, 19 nt, Artificial Sequence
  Description of Artificial Sequence: Synthetic oligonucleotide
cucugcaagucaaaucaaa

SEQ ID NO: 1633003 - RNA, 19 nt, Artificial Sequence
  Description of Artificial Sequence: Synthetic oligonucleotide
agccaccuacacucagagg

SEQ ID NO: 1633004 - RNA, 19 nt, Artificial Sequence
  Description of Artificial Sequence: Synthetic oligonucleotide
aucuacaagccaacaguga

SEQ ID NO: 1633005 - RNA, 19 nt, Artificial Sequence
  Description of Artificial Sequence: Synthetic oligonucleotide
cagauagaucaaggcaagc

SEQ ID NO: 1633006 - RNA, 19 nt, Artificial Sequence
  Description of Artificial Sequence: Synthetic oligonucleotide
auguacaagguuaguuacu

SEQ ID NO: 1633007 - RNA, 19 nt, Artificial Sequence
  Description of Artificial Sequence: Synthetic oligonucleotide
gugcaguguucacauggug

SEQ ID NO: 1633008 - RNA, 19 nt, Artificial Sequence
  Description of Artificial Sequence: Synthetic oligonucleotide
aaaauccuauuagcuccaa

SEQ ID NO: 1633009 - RNA, 19 nt, Artificial Sequence
  Description of Artificial Sequence: Synthetic oligonucleotide
cuugacuuuacuggaaccu

SEQ ID NO: 1633010 - RNA, 19 nt, Artificial Sequence
  Description of Artificial Sequence: Synthetic oligonucleotide
guauggaccacagggccca

SEQ ID NO: 1633011 - RNA, 19 nt, Artificial Sequence
  Description of Artificial Sequence: Synthetic oligonucleotide
  modified_base (9)..(9): a, c, u, g, unknown or other
uccaggacngcagcauccu

SEQ ID NO: 1633012 - RNA, 19 nt, Artificial Sequence
  Description of Artificial Sequence: Synthetic oligonucleotide
gcuuauuaaugacuggccu

SEQ ID NO: 1633013 - RNA, 19 nt, Artificial Sequence
  Description of Artificial Sequence: Synthetic oligonucleotide
gccuuaggcuuauuaauga

SEQ ID NO: 1633014 - RNA, 19 nt, Artificial Sequence
  Description of Artificial Sequence: Synthetic oligonucleotide
caccccggcuagcagaaug

SEQ ID NO: 1633015 - RNA, 19 nt, Artificial Sequence
  Description of Artificial Sequence: Synthetic oligonucleotide
ggcuagcagaaugacaaac

SEQ ID NO: 1633016 - RNA, 19 nt, Artificial Sequence
  Description of Artificial Sequence: Synthetic oligonucleotide
ggaagcuaauggacaaacc

SEQ ID NO: 1633017 - RNA, 19 nt, Artificial Sequence
  Description of Artificial Sequence: Synthetic oligonucleotide
cuaaccacagaaagucacu

SEQ ID NO: 1633018 - RNA, 19 nt, Artificial Sequence
  Description of Artificial Sequence: Synthetic oligonucleotide
gcuuuaccacaacacucag

SEQ ID NO: 1633019 - RNA, 19 nt, Artificial Sequence
  Description of Artificial Sequence: Synthetic oligonucleotide
uaguuacuguguacauuuu

SEQ ID NO: 1633020 - RNA, 19 nt, Artificial Sequence
  Description of Artificial Sequence: Synthetic oligonucleotide
uaucugcaaagagcguccu

SEQ ID NO: 1633021 - RNA, 19 nt, Artificial Sequence
  Description of Artificial Sequence: Synthetic oligonucleotide
caacagugagcucacuuua

SEQ ID NO: 1633022 - RNA, 19 nt, Artificial Sequence
  Description of Artificial Sequence: Synthetic oligonucleotide
gcauccuuaagccuccaaa

SEQ ID NO: 1633023 - RNA, 19 nt, Artificial Sequence
  Description of Artificial Sequence: Synthetic oligonucleotide
gugucucuugcuuacuagu

SEQ ID NO: 1633024 - RNA, 19 nt, Artificial Sequence
  Description of Artificial Sequence: Synthetic oligonucleotide
uuaccacaacacucagaua

SEQ ID NO: 1633025 - RNA, 19 nt, Artificial Sequence
  Description of Artificial Sequence: Synthetic oligonucleotide
ggcaagccgcucuauacca

SEQ ID NO: 1633026 - RNA, 19 nt, Artificial Sequence
  Description of Artificial Sequence: Synthetic oligonucleotide
caaaggccucuugcuaacc

SEQ ID NO: 1633027 - RNA, 19 nt, Artificial Sequence
  Description of Artificial Sequence: Synthetic oligonucleotide
caacuuugauuaucugcaa

SEQ ID NO: 1633028 - RNA, 19 nt, Artificial Sequence
  Description of Artificial Sequence: Synthetic oligonucleotide
agguccuuacucacaaaau

SEQ ID NO: 1633029 - RNA, 19 nt, Artificial Sequence
  Description of Artificial Sequence: Synthetic oligonucleotide
cacgagacugccucugaaa

SEQ ID NO: 1633030 - RNA, 19 nt, Artificial Sequence
  Description of Artificial Sequence: Synthetic oligonucleotide
uaaccacagggaagcuaau

SEQ ID NO: 1633031 - RNA, 19 nt, Artificial Sequence
  Description of Artificial Sequence: Synthetic oligonucleotide
gcucacuuuauucaagaau

SEQ ID NO: 1633032 - RNA, 19 nt, Artificial Sequence
  Description of Artificial Sequence: Synthetic oligonucleotide
augagggaacaaacgaguu

SEQ ID NO: 1633033 - RNA, 19 nt, Artificial Sequence
  Description of Artificial Sequence: Synthetic oligonucleotide
gcuaauggacaaaccuccc

SEQ ID NO: 1633034 - RNA, 19 nt, Artificial Sequence
  Description of Artificial Sequence: Synthetic oligonucleotide
  modified_base (16)..(16): a, c, u, g, unknown or other
agcguccuccaggacngca

SEQ ID NO: 1633035 - RNA, 19 nt, Artificial Sequence
  Description of Artificial Sequence: Synthetic oligonucleotide
gccgcucuauaccaacagc

SEQ ID NO: 1633036 - RNA, 19 nt, Artificial Sequence
  Description of Artificial Sequence: Synthetic oligonucleotide
accucaccccggcuagcag

SEQ ID NO: 1633037 - RNA, 19 nt, Artificial Sequence
  Description of Artificial Sequence: Synthetic oligonucleotide
cuugcggugccgagcagaa

SEQ ID NO: 1633038 - RNA, 19 nt, Artificial Sequence
  Description of Artificial Sequence: Synthetic oligonucleotide
aagccccaacuuugauuau

SEQ ID NO: 1633039 - RNA, 19 nt, Artificial Sequence
  Description of Artificial Sequence: Synthetic oligonucleotide
gcaaaggccucuugcuaac

SEQ ID NO: 1633040 - RNA, 19 nt, Artificial Sequence
  Description of Artificial Sequence: Synthetic oligonucleotide
ccuacacucagaggggaag

SEQ ID NO: 1633041 - RNA, 19 nt, Artificial Sequence
  Description of Artificial Sequence: Synthetic oligonucleotide
cacaacacucagauacaua

SEQ ID NO: 1633042 - RNA, 19 nt, Artificial Sequence
  Description of Artificial Sequence: Synthetic oligonucleotide
uggaaccuuccagggcacc

SEQ ID NO: 1633043 - RNA, 19 nt, Artificial Sequence
  Description of Artificial Sequence: Synthetic oligonucleotide
cacuguguacagugucuca

SEQ ID NO: 1633044 - RNA, 19 nt, Artificial Sequence
  Description of Artificial Sequence: Synthetic oligonucleotide
acgacgacgcugagaaaca

SEQ ID NO: 1633045 - RNA, 19 nt, Artificial Sequence
  Description of Artificial Sequence: Synthetic oligonucleotide
gcaccaagcgggugcacug

SEQ ID NO: 1633046 - RNA, 19 nt, Artificial Sequence
  Description of Artificial Sequence: Synthetic oligonucleotide
caaaggcaguuagagaagu

SEQ ID NO: 1633047 - RNA, 19 nt, Artificial Sequence
  Description of Artificial Sequence: Synthetic oligonucleotide
gaaguugcgcccagcacau

SEQ ID NO: 1633048 - RNA, 19 nt, Artificial Sequence
  Description of Artificial Sequence: Synthetic oligonucleotide
cuggguacaaaauccuauu

SEQ ID NO: 1633049 - RNA, 19 nt, Artificial Sequence
  Description of Artificial Sequence: Synthetic oligonucleotide
ggugccgagcagaagucac

SEQ ID NO: 1633050 - RNA, 19 nt, Artificial Sequence
  Description of Artificial Sequence: Synthetic oligonucleotide
agggaagcuaauggacaaa

SEQ ID NO: 1633051 - RNA, 19 nt, Artificial Sequence
  Description of Artificial Sequence: Synthetic oligonucleotide
caagcgggugcacugugua

SEQ ID NO: 1633052 - RNA, 19 nt, Artificial Sequence
  Description of Artificial Sequence: Synthetic oligonucleotide
cccacuggagaaguugcgc

SEQ ID NO: 1633053 - RNA, 19 nt, Artificial Sequence
  Description of Artificial Sequence: Synthetic oligonucleotide
  modified_base (5)..(5): a, c, u, g, unknown or other
ggacngcagcauccucagg

SEQ ID NO: 1633054 - RNA, 19 nt, Artificial Sequence
  Description of Artificial Sequence: Synthetic oligonucleotide
accccggcuagcagaauga

SEQ ID NO: 1633055 - RNA, 19 nt, Artificial Sequence
  Description of Artificial Sequence: Synthetic oligonucleotide
gguuaguuacuguguacau

SEQ ID NO: 1633056 - RNA, 19 nt, Artificial Sequence
  Description of Artificial Sequence: Synthetic oligonucleotide
gggaacaaacgaguuccca

SEQ ID NO: 1633057 - RNA, 19 nt, Artificial Sequence
  Description of Artificial Sequence: Synthetic oligonucleotide
cgcucuauaccaacagcuc

SEQ ID NO: 1633058 - RNA, 19 nt, Artificial Sequence
  Description of Artificial Sequence: Synthetic oligonucleotide
aaguugcgcccagcacaug

SEQ ID NO: 1633059 - RNA, 19 nt, Artificial Sequence
  Description of Artificial Sequence: Synthetic oligonucleotide
cgagacugccucugaaaug

SEQ ID NO: 1633060 - RNA, 19 nt, Artificial Sequence
  Description of Artificial Sequence: Synthetic oligonucleotide
uugcggugccgagcagaag

SEQ ID NO: 1633061 - RNA, 19 nt, Artificial Sequence
  Description of Artificial Sequence: Synthetic oligonucleotide
caccuacacucagagggga

SEQ ID NO: 1633062 - RNA, 19 nt, Artificial Sequence
  Description of Artificial Sequence: Synthetic oligonucleotide
ccgagcagaagucacugaa

SEQ ID NO: 1633063 - RNA, 19 nt, Artificial Sequence
  Description of Artificial Sequence: Synthetic oligonucleotide
ccgcucuauaccaacagcu

SEQ ID NO: 1633064 - RNA, 19 nt, Artificial Sequence
  Description of Artificial Sequence: Synthetic oligonucleotide
gugcaaccugcugugucuc

SEQ ID NO: 1633065 - RNA, 19 nt, Artificial Sequence
  Description of Artificial Sequence: Synthetic oligonucleotide
gcuuacuaguuguuaccgu

SEQ ID NO: 1633066 - RNA, 19 nt, Artificial Sequence
  Description of Artificial Sequence: Synthetic oligonucleotide
accuacacucagaggggaa

SEQ ID NO: 1633067 - RNA, 19 nt, Artificial Sequence
  Description of Artificial Sequence: Synthetic oligonucleotide
  modified_base (15)..(15): a, c, u, g, unknown or other
gcguccuccaggacngcag

SEQ ID NO: 1633068 - RNA, 19 nt, Artificial Sequence
  Description of Artificial Sequence: Synthetic oligonucleotide
cuaacaggacgacgacgcu

SEQ ID NO: 1633069 - RNA, 19 nt, Artificial Sequence
  Description of Artificial Sequence: Synthetic oligonucleotide
agacugccucugaaaugca

SEQ ID NO: 1633070 - RNA, 19 nt, Artificial Sequence
  Description of Artificial Sequence: Synthetic oligonucleotide
cauuuacagccacgagacu

SEQ ID NO: 1633071 - RNA, 19 nt, Artificial Sequence
  Description of Artificial Sequence: Synthetic oligonucleotide
ccaagggcucugcaaguca

SEQ ID NO: 1633072 - RNA, 19 nt, Artificial Sequence
  Description of Artificial Sequence: Synthetic oligonucleotide
ccucaccccggcuagcaga

SEQ ID NO: 1633073 - RNA, 19 nt, Artificial Sequence
  Description of Artificial Sequence: Synthetic oligonucleotide
ccagccaccuacacucaga

SEQ ID NO: 1633074 - RNA, 19 nt, Artificial Sequence
  Description of Artificial Sequence: Synthetic oligonucleotide
gugucucacugugcugaga

SEQ ID NO: 1633075 - RNA, 19 nt, Artificial Sequence
  Description of Artificial Sequence: Synthetic oligonucleotide
cccagccaccuacacucag

SEQ ID NO: 1633076 - RNA, 19 nt, Artificial Sequence
  Description of Artificial Sequence: Synthetic oligonucleotide
gccucuugcuaaccacaga

SEQ ID NO: 1633077 - RNA, 19 nt, Artificial Sequence
  Description of Artificial Sequence: Synthetic oligonucleotide
ccaagaaaucccugucugu

SEQ ID NO: 1633078 - RNA, 19 nt, Artificial Sequence
  Description of Artificial Sequence: Synthetic oligonucleotide
guugcgcccagcacauggu

SEQ ID NO: 1633079 - RNA, 19 nt, Artificial Sequence
  Description of Artificial Sequence: Synthetic oligonucleotide
caaucccauguagggaggu

SEQ ID NO: 1633080 - RNA, 19 nt, Artificial Sequence
  Description of Artificial Sequence: Synthetic oligonucleotide
gcccuaguaggaaccucac

SEQ ID NO: 1633081 - RNA, 19 nt, Artificial Sequence
  Description of Artificial Sequence: Synthetic oligonucleotide
gccacgagacugccucuga

SEQ ID NO: 1633082 - RNA, 19 nt, Artificial Sequence
  Description of Artificial Sequence: Synthetic oligonucleotide
gcucugcaagucaaaucaa

SEQ ID NO: 1633083 - RNA, 19 nt, Artificial Sequence
  Description of Artificial Sequence: Synthetic oligonucleotide
gugccgagcagaagucacu

SEQ ID NO: 1633084 - RNA, 19 nt, Artificial Sequence
  Description of Artificial Sequence: Synthetic oligonucleotide
cuauaccaacagcucuauu

SEQ ID NO: 1633085 - RNA, 19 nt, Artificial Sequence
  Description of Artificial Sequence: Synthetic oligonucleotide
ccaagccccaacuuugauu

SEQ ID NO: 1633086 - RNA, 19 nt, Artificial Sequence
  Description of Artificial Sequence: Synthetic oligonucleotide
cgacgacgcugagaaacag

SEQ ID NO: 1633087 - RNA, 19 nt, Artificial Sequence
  Description of Artificial Sequence: Synthetic oligonucleotide
cgcugagaaacaggaugug

SEQ ID NO: 1633088 - RNA, 19 nt, Artificial Sequence
  Description of Artificial Sequence: Synthetic oligonucleotide
gccuccguaguaaguggaa

SEQ ID NO: 1633089 - RNA, 19 nt, Artificial Sequence
  Description of Artificial Sequence: Synthetic oligonucleotide
gcggugccgagcagaaguc

SEQ ID NO: 1633090 - RNA, 19 nt, Artificial Sequence
  Description of Artificial Sequence: Synthetic oligonucleotide
gcaagccgcucuauaccaa

SEQ ID NO: 1633091 - RNA, 19 nt, Artificial Sequence
  Description of Artificial Sequence: Synthetic oligonucleotide
cgaguucccaagguuuaca

SEQ ID NO: 1633092 - RNA, 19 nt, Artificial Sequence
  Description of Artificial Sequence: Synthetic oligonucleotide
caccaagcgggugcacugu

SEQ ID NO: 1633093 - RNA, 19 nt, Artificial Sequence
  Description of Artificial Sequence: Synthetic oligonucleotide
ccccggcuagcagaaugac

SEQ ID NO: 1633094 - RNA, 19 nt, Artificial Sequence
  Description of Artificial Sequence: Synthetic oligonucleotide
cagcauccuuaagccucca

SEQ ID NO: 1633095 - RNA, 19 nt, Artificial Sequence
  Description of Artificial Sequence: Synthetic oligonucleotide
ggacgacgacgcugagaaa

SEQ ID NO: 1633096 - RNA, 19 nt, Artificial Sequence
  Description of Artificial Sequence: Synthetic oligonucleotide
ccguaguaaguggaacacu

SEQ ID NO: 1633097 - RNA, 19 nt, Artificial Sequence
  Description of Artificial Sequence: Synthetic oligonucleotide
cugcucccugucagugcau

SEQ ID NO: 1633098 - RNA, 19 nt, Artificial Sequence
  Description of Artificial Sequence: Synthetic oligonucleotide
cggugccgagcagaaguca

SEQ ID NO: 1633099 - RNA, 19 nt, Artificial Sequence
  Description of Artificial Sequence: Synthetic oligonucleotide
cgacgcugagaaacaggau

SEQ ID NO: 1633100 - RNA, 19 nt, Artificial Sequence
  Description of Artificial Sequence: Synthetic oligonucleotide
caggagccuuaggcuuauu

SEQ ID NO: 1633101 - RNA, 19 nt, Artificial Sequence
  Description of Artificial Sequence: Synthetic oligonucleotide
aauguccacgucuauaucc

SEQ ID NO: 1633102 - RNA, 19 nt, Artificial Sequence
  Description of Artificial Sequence: Synthetic oligonucleotide
uucuuuaacaaacuuaugc

SEQ ID NO: 1633103 - RNA, 19 nt, Artificial Sequence
  Description of Artificial Sequence: Synthetic oligonucleotide
uuaaggaauucuacgaugg

SEQ ID NO: 1633104 - RNA, 19 nt, Artificial Sequence
  Description of Artificial Sequence: Synthetic oligonucleotide
aaaucucaaaacucuuugc

SEQ ID NO: 1633105 - RNA, 19 nt, Artificial Sequence
  Description of Artificial Sequence: Synthetic oligonucleotide
uccugauacauaaaugugg

SEQ ID NO: 1633106 - RNA, 19 nt, Artificial Sequence
  Description of Artificial Sequence: Synthetic oligonucleotide
ucuguugaaacccacacac

SEQ ID NO: 1633107 - RNA, 19 nt, Artificial Sequence
  Description of Artificial Sequence: Synthetic oligonucleotide
ugaguuauuaaccuuuucu

SEQ ID NO: 1633108 - RNA, 19 nt, Artificial Sequence
  Description of Artificial Sequence: Synthetic oligonucleotide
uuagcaaaauaaaaugagc

SEQ ID NO: 1633109 - RNA, 19 nt, Artificial Sequence
  Description of Artificial Sequence: Synthetic oligonucleotide
ucuaucaggaggaaaaugu

SEQ ID NO: 1633110 - RNA, 19 nt, Artificial Sequence
  Description of Artificial Sequence: Synthetic oligonucleotide
uuuucuaucaggaggaaaa

SEQ ID NO: 1633111 - RNA, 19 nt, Artificial Sequence
  Description of Artificial Sequence: Synthetic oligonucleotide
ucuucgaugaaccugugca

SEQ ID NO: 1633112 - RNA, 19 nt, Artificial Sequence
  Description of Artificial Sequence: Synthetic oligonucleotide
uuggauauuccccacaaug

SEQ ID NO: 1633113 - RNA, 19 nt, Artificial Sequence
  Description of Artificial Sequence: Synthetic oligonucleotide
uaauuaaggaauucuacga

SEQ ID NO: 1633114 - RNA, 19 nt, Artificial Sequence
  Description of Artificial Sequence: Synthetic oligonucleotide
uuauuaaccuuuucuauca

SEQ ID NO: 1633115 - RNA, 19 nt, Artificial Sequence
  Description of Artificial Sequence: Synthetic oligonucleotide
aacuuaugccaauagcauc

SEQ ID NO: 1633116 - RNA, 19 nt, Artificial Sequence
  Description of Artificial Sequence: Synthetic oligonucleotide
aaaugagccguuuucauau

SEQ ID NO: 1633117 - RNA, 19 nt, Artificial Sequence
  Description of Artificial Sequence: Synthetic oligonucleotide
uacuucauugccgagauag

SEQ ID NO: 1633118 - RNA, 19 nt, Artificial Sequence
  Description of Artificial Sequence: Synthetic oligonucleotide
aacuuuaaggcggagagug

SEQ ID NO: 1633119 - RNA, 19 nt, Artificial Sequence
  Description of Artificial Sequence: Synthetic oligonucleotide
augagucucaccucaauac

SEQ ID NO: 1633120 - RNA, 19 nt, Artificial Sequence
  Description of Artificial Sequence: Synthetic oligonucleotide
agaacuucuucgaugaacc

SEQ ID NO: 1633121 - RNA, 19 nt, Artificial Sequence
  Description of Artificial Sequence: Synthetic oligonucleotide
ucugcgaacucccggaugg

SEQ ID NO: 1633122 - RNA, 19 nt, Artificial Sequence
  Description of Artificial Sequence: Synthetic oligonucleotide
uuuagcuggauucaaguuc

SEQ ID NO: 1633123 - RNA, 19 nt, Artificial Sequence
  Description of Artificial Sequence: Synthetic oligonucleotide
agauaggccaccucuuucc

SEQ ID NO: 1633124 - RNA, 19 nt, Artificial Sequence
  Description of Artificial Sequence: Synthetic oligonucleotide
aaggaauucuacgauggcg

SEQ ID NO: 1633125 - RNA, 19 nt, Artificial Sequence
  Description of Artificial Sequence: Synthetic oligonucleotide
auagccaaaucucaaaacu

SEQ ID NO: 1633126 - RNA, 19 nt, Artificial Sequence
  Description of Artificial Sequence: Synthetic oligonucleotide
ugcauuugcaaauguaccc

SEQ ID NO: 1633127 - RNA, 19 nt, Artificial Sequence
  Description of Artificial Sequence: Synthetic oligonucleotide
gacgaggccguuuagcugg

SEQ ID NO: 1633128 - RNA, 19 nt, Artificial Sequence
  Description of Artificial Sequence: Synthetic oligonucleotide
caaacuuaugccaauagca

SEQ ID NO: 1633129 - RNA, 19 nt, Artificial Sequence
  Description of Artificial Sequence: Synthetic oligonucleotide
agcgggaugccuuugcugc

SEQ ID NO: 1633130 - RNA, 19 nt, Artificial Sequence
  Description of Artificial Sequence: Synthetic oligonucleotide
uguugaaacccacacacuc

SEQ ID NO: 1633131 - RNA, 19 nt, Artificial Sequence
  Description of Artificial Sequence: Synthetic oligonucleotide
cucgcauuucauaauaagc

SEQ ID NO: 1633132 - RNA, 19 nt, Artificial Sequence
  Description of Artificial Sequence: Synthetic oligonucleotide
aauuggccagucaaugucc

SEQ ID NO: 1633133 - RNA, 19 nt, Artificial Sequence
  Description of Artificial Sequence: Synthetic oligonucleotide
ucuacgauggcgucuagug

SEQ ID NO: 1633134 - RNA, 19 nt, Artificial Sequence
  Description of Artificial Sequence: Synthetic oligonucleotide
aaguaacccaucucuauca

SEQ ID NO: 1633135 - RNA, 19 nt, Artificial Sequence
  Description of Artificial Sequence: Synthetic oligonucleotide
uacgauggcgucuagugag

SEQ ID NO: 1633136 - RNA, 19 nt, Artificial Sequence
  Description of Artificial Sequence: Synthetic oligonucleotide
ugauaauuaaggaauucua

SEQ ID NO: 1633137 - RNA, 19 nt, Artificial Sequence
  Description of Artificial Sequence: Synthetic oligonucleotide
uuucacuccaucgaaacug

SEQ ID NO: 1633138 - RNA, 19 nt, Artificial Sequence
  Description of Artificial Sequence: Synthetic oligonucleotide
ucauauaacucuccauccc

SEQ ID NO: 1633139 - RNA, 19 nt, Artificial Sequence
  Description of Artificial Sequence: Synthetic oligonucleotide
uggauucaaguucaggggc

SEQ ID NO: 1633140 - RNA, 19 nt, Artificial Sequence
  Description of Artificial Sequence: Synthetic oligonucleotide
aucguaagagauuauuucu

SEQ ID NO: 1633141 - RNA, 19 nt, Artificial Sequence
  Description of Artificial Sequence: Synthetic oligonucleotide
aaauguaccccacagccuu

SEQ ID NO: 1633142 - RNA, 19 nt, Artificial Sequence
  Description of Artificial Sequence: Synthetic oligonucleotide
uguggcuuggauauucccc

SEQ ID NO: 1633143 - RNA, 19 nt, Artificial Sequence
  Description of Artificial Sequence: Synthetic oligonucleotide
caguccaacuuuaaggcgg

SEQ ID NO: 1633144 - RNA, 19 nt, Artificial Sequence
  Description of Artificial Sequence: Synthetic oligonucleotide
uaacccaucucuaucaaau

SEQ ID NO: 1633145 - RNA, 19 nt, Artificial Sequence
  Description of Artificial Sequence: Synthetic oligonucleotide
uggauauuccccacaaugu

SEQ ID NO: 1633146 - RNA, 19 nt, Artificial Sequence
  Description of Artificial Sequence: Synthetic oligonucleotide
acguuucagaacuucuucg

SEQ ID NO: 1633147 - RNA, 19 nt, Artificial Sequence
  Description of Artificial Sequence: Synthetic oligonucleotide
aguuauuaaccuuuucuau

SEQ ID NO: 1633148 - RNA, 19 nt, Artificial Sequence
  Description of Artificial Sequence: Synthetic oligonucleotide
ugagucucaccucaauacc

SEQ ID NO: 1633149 - RNA, 19 nt, Artificial Sequence
  Description of Artificial Sequence: Synthetic oligonucleotide
caucagauacuucauugcc

SEQ ID NO: 1633150 - RNA, 19 nt, Artificial Sequence
  Description of Artificial Sequence: Synthetic oligonucleotide
caucguaagagauuauuuc

SEQ ID NO: 1633151 - RNA, 19 nt, Artificial Sequence
  Description of Artificial Sequence: Synthetic oligonucleotide
uuugcucugcaauuggcca

SEQ ID NO: 1633152 - RNA, 19 nt, Artificial Sequence
  Description of Artificial Sequence: Synthetic oligonucleotide
acauaaauguggccauugg

SEQ ID NO: 1633153 - RNA, 19 nt, Artificial Sequence
  Description of Artificial Sequence: Synthetic oligonucleotide
uccaucaauauugcaaacc

SEQ ID NO: 1633154 - RNA, 19 nt, Artificial Sequence
  Description of Artificial Sequence: Synthetic oligonucleotide
uaaguaacccaucucuauc

SEQ ID NO: 1633155 - RNA, 19 nt, Artificial Sequence
  Description of Artificial Sequence: Synthetic oligonucleotide
aaaaugagccguuuucaua

SEQ ID NO: 1633156 - RNA, 19 nt, Artificial Sequence
  Description of Artificial Sequence: Synthetic oligonucleotide
ucauugccgagauaggcca

SEQ ID NO: 1633157 - RNA, 19 nt, Artificial Sequence
  Description of Artificial Sequence: Synthetic oligonucleotide
ucuagugagguagagcugu

SEQ ID NO: 1633158 - RNA, 19 nt, Artificial Sequence
  Description of Artificial Sequence: Synthetic oligonucleotide
cuuugcucugcaauuggcc

SEQ ID NO: 1633159 - RNA, 19 nt, Artificial Sequence
  Description of Artificial Sequence: Synthetic oligonucleotide
aacuucuucgaugaaccug

SEQ ID NO: 1633160 - RNA, 19 nt, Artificial Sequence
  Description of Artificial Sequence: Synthetic oligonucleotide
uauuaaccuuuucuaucag

SEQ ID NO: 1633161 - RNA, 19 nt, Artificial Sequence
  Description of Artificial Sequence: Synthetic oligonucleotide
ugagacauccaucaauauu

SEQ ID NO: 1633162 - RNA, 19 nt, Artificial Sequence
  Description of Artificial Sequence: Synthetic oligonucleotide
gucuguuuggagcaggccc

SEQ ID NO: 1633163 - RNA, 19 nt, Artificial Sequence
  Description of Artificial Sequence: Synthetic oligonucleotide
aggcccacucucuucaggc

SEQ ID NO: 1633164 - RNA, 19 nt, Artificial Sequence
  Description of Artificial Sequence: Synthetic oligonucleotide
ugugcaccgaacuguuugg

SEQ ID NO: 1633165 - RNA, 19 nt, Artificial Sequence
  Description of Artificial Sequence: Synthetic oligonucleotide
uugacaucguaagagauua

SEQ ID NO: 1633166 - RNA, 19 nt, Artificial Sequence
  Description of Artificial Sequence: Synthetic oligonucleotide
auaaaaugagccguuuuca

SEQ ID NO: 1633167 - RNA, 19 nt, Artificial Sequence
  Description of Artificial Sequence: Synthetic oligonucleotide
gaguuauuaaccuuuucua

SEQ ID NO: 1633168 - RNA, 19 nt, Artificial Sequence
  Description of Artificial Sequence: Synthetic oligonucleotide
gcaucuuugacaucguaag

SEQ ID NO: 1633169 - RNA, 19 nt, Artificial Sequence
  Description of Artificial Sequence: Synthetic oligonucleotide
aaacuuaugccaauagcau

SEQ ID NO: 1633170 - RNA, 19 nt, Artificial Sequence
  Description of Artificial Sequence: Synthetic oligonucleotide
cauugugauaauuaaggaa

SEQ ID NO: 1633171 - RNA, 19 nt, Artificial Sequence
  Description of Artificial Sequence: Synthetic oligonucleotide
uguaaguaacccaucucua

SEQ ID NO: 1633172 - RNA, 19 nt, Artificial Sequence
  Description of Artificial Sequence: Synthetic oligonucleotide
aacucuuugcucugcaauu

SEQ ID NO: 1633173 - RNA, 19 nt, Artificial Sequence
  Description of Artificial Sequence: Synthetic oligonucleotide
uaaaaugagccguuuucau

SEQ ID NO: 1633174 - RNA, 19 nt, Artificial Sequence
  Description of Artificial Sequence: Synthetic oligonucleotide
acgauggccagcuugucug

SEQ ID NO: 1633175 - RNA, 19 nt, Artificial Sequence
  Description of Artificial Sequence: Synthetic oligonucleotide
aucucuaucaaaugucuuu

SEQ ID NO: 1633176 - RNA, 19 nt, Artificial Sequence
  Description of Artificial Sequence: Synthetic oligonucleotide
ccugauacauaaauguggc

SEQ ID NO: 1633177 - RNA, 19 nt, Artificial Sequence
  Description of Artificial Sequence: Synthetic oligonucleotide
acuaaggcccacucucuuc

SEQ ID NO: 1633178 - RNA, 19 nt, Artificial Sequence
  Description of Artificial Sequence: Synthetic oligonucleotide
augaguuauuaaccuuuuc

SEQ ID NO: 1633179 - RNA, 19 nt, Artificial Sequence
  Description of Artificial Sequence: Synthetic oligonucleotide
aacggcuccacauccggga

SEQ ID NO: 1633180 - RNA, 19 nt, Artificial Sequence
  Description of Artificial Sequence: Synthetic oligonucleotide
auggcgucuagugagguag

SEQ ID NO: 1633181 - RNA, 19 nt, Artificial Sequence
  Description of Artificial Sequence: Synthetic oligonucleotide
acauccaucaauauugcaa

SEQ ID NO: 1633182 - RNA, 19 nt, Artificial Sequence
  Description of Artificial Sequence: Synthetic oligonucleotide
ucguaagagauuauuucuu

SEQ ID NO: 1633183 - RNA, 19 nt, Artificial Sequence
  Description of Artificial Sequence: Synthetic oligonucleotide
ucuuuggacguuucagaac

SEQ ID NO: 1633184 - RNA, 19 nt, Artificial Sequence
  Description of Artificial Sequence: Synthetic oligonucleotide
uggugagacauccaucaau

SEQ ID NO: 1633185 - RNA, 19 nt, Artificial Sequence
  Description of Artificial Sequence: Synthetic oligonucleotide
caauuggccagucaauguc

SEQ ID NO: 1633186 - RNA, 19 nt, Artificial Sequence
  Description of Artificial Sequence: Synthetic oligonucleotide
aauucuacgauggcgucua

SEQ ID NO: 1633187 - RNA, 19 nt, Artificial Sequence
  Description of Artificial Sequence: Synthetic oligonucleotide
ccaacuuuaaggcggagag

SEQ ID NO: 1633188 - RNA, 19 nt, Artificial Sequence
  Description of Artificial Sequence: Synthetic oligonucleotide
cauauaacucuccauccca

SEQ ID NO: 1633189 - RNA, 19 nt, Artificial Sequence
  Description of Artificial Sequence: Synthetic oligonucleotide
auuucaucguggucuguug

SEQ ID NO: 1633190 - RNA, 19 nt, Artificial Sequence
  Description of Artificial Sequence: Synthetic oligonucleotide
uggacguuucagaacuucu

SEQ ID NO: 1633191 - RNA, 19 nt, Artificial Sequence
  Description of Artificial Sequence: Synthetic oligonucleotide
cacacuaugcucagcucgc

SEQ ID NO: 1633192 - RNA, 19 nt, Artificial Sequence
  Description of Artificial Sequence: Synthetic oligonucleotide
aggaauucuacgauggcgu

SEQ ID NO: 1633193 - RNA, 19 nt, Artificial Sequence
  Description of Artificial Sequence: Synthetic oligonucleotide
ucgacgaggccguuuagcu

SEQ ID NO: 1633194 - RNA, 19 nt, Artificial Sequence
  Description of Artificial Sequence: Synthetic oligonucleotide
accucauugugauaauuaa

SEQ ID NO: 1633195 - RNA, 19 nt, Artificial Sequence
  Description of Artificial Sequence: Synthetic oligonucleotide
uauaacucuccaucccagu

SEQ ID NO: 1633196 - RNA, 19 nt, Artificial Sequence
  Description of Artificial Sequence: Synthetic oligonucleotide
uucuucgaugaaccugugc

SEQ ID NO: 1633197 - RNA, 19 nt, Artificial Sequence
  Description of Artificial Sequence: Synthetic oligonucleotide
agacauccaucaauauugc

SEQ ID NO: 1633198 - RNA, 19 nt, Artificial Sequence
  Description of Artificial Sequence: Synthetic oligonucleotide
caucgaaacugauggcgcc

SEQ ID NO: 1633199 - RNA, 19 nt, Artificial Sequence
  Description of Artificial Sequence: Synthetic oligonucleotide
gaugcggcggcuucuccag

SEQ ID NO: 1633200 - RNA, 19 nt, Artificial Sequence
  Description of Artificial Sequence: Synthetic oligonucleotide
ucguggucuguugaaaccc

SEQ ID NO: 1633201 - RNA, 19 nt, Artificial Sequence
  Description of Artificial Sequence: Synthetic oligonucleotide
cuuuggacguuucagaacu

SEQ ID NO: 1633202 - RNA, 19 nt, Artificial Sequence
  Description of Artificial Sequence: Synthetic oligonucleotide
ugcaccgaacuguuuggcc

SEQ ID NO: 1633203 - RNA, 19 nt, Artificial Sequence
  Description of Artificial Sequence: Synthetic oligonucleotide
agucucaccucaauaccac

SEQ ID NO: 1633204 - RNA, 19 nt, Artificial Sequence
  Description of Artificial Sequence: Synthetic oligonucleotide
auuugcaaauguaccccac

SEQ ID NO: 1633205 - RNA, 19 nt, Artificial Sequence
  Description of Artificial Sequence: Synthetic oligonucleotide
acuuccguuuugcagucca

SEQ ID NO: 1633206 - RNA, 19 nt, Artificial Sequence
  Description of Artificial Sequence: Synthetic oligonucleotide
ucucaccucaauaccacuu

SEQ ID NO: 1633207 - RNA, 19 nt, Artificial Sequence
  Description of Artificial Sequence: Synthetic oligonucleotide
gaugagucucaccucaaua

SEQ ID NO: 1633208 - RNA, 19 nt, Artificial Sequence
  Description of Artificial Sequence: Synthetic oligonucleotide
uccaacuuuaaggcggaga

SEQ ID NO: 1633209 - RNA, 19 nt, Artificial Sequence
  Description of Artificial Sequence: Synthetic oligonucleotide
ucaaaacucuuugcucugc

SEQ ID NO: 1633210 - RNA, 19 nt, Artificial Sequence
  Description of Artificial Sequence: Synthetic oligonucleotide
guaccccacagccuucugg

SEQ ID NO: 1633211 - RNA, 19 nt, Artificial Sequence
  Description of Artificial Sequence: Synthetic oligonucleotide
ucacgaacuccuuucugaa

SEQ ID NO: 1633212 - RNA, 19 nt, Artificial Sequence
  Description of Artificial Sequence: Synthetic oligonucleotide
cuuuaaggcggagaguguc

SEQ ID NO: 1633213 - RNA, 19 nt, Artificial Sequence
  Description of Artificial Sequence: Synthetic oligonucleotide
gucauauccuucuucucga

SEQ ID NO: 1633214 - RNA, 19 nt, Artificial Sequence
  Description of Artificial Sequence: Synthetic oligonucleotide
gauacuucauugccgagau

SEQ ID NO: 1633215 - RNA, 19 nt, Artificial Sequence
  Description of Artificial Sequence: Synthetic oligonucleotide
cuguaaguaacccaucucu

SEQ ID NO: 1633216 - RNA, 19 nt, Artificial Sequence
  Description of Artificial Sequence: Synthetic oligonucleotide
uagagcugucuuuggacgu

SEQ ID NO: 1633217 - RNA, 19 nt, Artificial Sequence
  Description of Artificial Sequence: Synthetic oligonucleotide
uuaaggcggagagugucug

SEQ ID NO: 1633218 - RNA, 19 nt, Artificial Sequence
  Description of Artificial Sequence: Synthetic oligonucleotide
gagauaggccaccucuuuc

SEQ ID NO: 1633219 - RNA, 19 nt, Artificial Sequence
  Description of Artificial Sequence: Synthetic oligonucleotide
augugcucugcgaacuccc

SEQ ID NO: 1633220 - RNA, 19 nt, Artificial Sequence
  Description of Artificial Sequence: Synthetic oligonucleotide
cucagcucgcauuucauaa

SEQ ID NO: 1633221 - RNA, 19 nt, Artificial Sequence
  Description of Artificial Sequence: Synthetic oligonucleotide
gugauaauuaaggaauucu

SEQ ID NO: 1633222 - RNA, 19 nt, Artificial Sequence
  Description of Artificial Sequence: Synthetic oligonucleotide
ggucuguugaaacccacac

SEQ ID NO: 1633223 - RNA, 19 nt, Artificial Sequence
  Description of Artificial Sequence: Synthetic oligonucleotide
uugucgacgaggccguuua

SEQ ID NO: 1633224 - RNA, 19 nt, Artificial Sequence
  Description of Artificial Sequence: Synthetic oligonucleotide
aauguaccccacagccuuc

SEQ ID NO: 1633225 - RNA, 19 nt, Artificial Sequence
  Description of Artificial Sequence: Synthetic oligonucleotide
gauggcgccucacaacaga

SEQ ID NO: 1633226 - RNA, 19 nt, Artificial Sequence
  Description of Artificial Sequence: Synthetic oligonucleotide
gcucgcauuucauaauaag

SEQ ID NO: 1633227 - RNA, 19 nt, Artificial Sequence
  Description of Artificial Sequence: Synthetic oligonucleotide
gagucucaccucaauacca

SEQ ID NO: 1633228 - RNA, 19 nt, Artificial Sequence
  Description of Artificial Sequence: Synthetic oligonucleotide
uguucuucagcgggaugcc

SEQ ID NO: 1633229 - RNA, 19 nt, Artificial Sequence
  Description of Artificial Sequence: Synthetic oligonucleotide
gcaguccaacuuuaaggcg

SEQ ID NO: 1633230 - RNA, 19 nt, Artificial Sequence
  Description of Artificial Sequence: Synthetic oligonucleotide
aguaacccaucucuaucaa

SEQ ID NO: 1633231 - RNA, 19 nt, Artificial Sequence
  Description of Artificial Sequence: Synthetic oligonucleotide
uuuuggcaugaguuauuaa

SEQ ID NO: 1633232 - RNA, 19 nt, Artificial Sequence
  Description of Artificial Sequence: Synthetic oligonucleotide
agcaucuuugacaucguaa

SEQ ID NO: 1633233 - RNA, 19 nt, Artificial Sequence
  Description of Artificial Sequence: Synthetic oligonucleotide
acgcugacuuccguuuugc

SEQ ID NO: 1633234 - RNA, 19 nt, Artificial Sequence
  Description of Artificial Sequence: Synthetic oligonucleotide
ccaaaauagccaaaucuca

SEQ ID NO: 1633235 - RNA, 19 nt, Artificial Sequence
  Description of Artificial Sequence: Synthetic oligonucleotide
cacgucuauauccacacua

SEQ ID NO: 1633236 - RNA, 19 nt, Artificial Sequence
  Description of Artificial Sequence: Synthetic oligonucleotide
acaucguaagagauuauuu

SEQ ID NO: 1633237 - RNA, 19 nt, Artificial Sequence
  Description of Artificial Sequence: Synthetic oligonucleotide
agaugcggcggcuucucca

SEQ ID NO: 1633238 - RNA, 19 nt, Artificial Sequence
  Description of Artificial Sequence: Synthetic oligonucleotide
aaugagccguuuucauaua

SEQ ID NO: 1633239 - RNA, 19 nt, Artificial Sequence
  Description of Artificial Sequence: Synthetic oligonucleotide
cagcuugucugacacgcug

SEQ ID NO: 1633240 - RNA, 19 nt, Artificial Sequence
  Description of Artificial Sequence: Synthetic oligonucleotide
gagucauauccuucuucuc

SEQ ID NO: 1633241 - RNA, 19 nt, Artificial Sequence
  Description of Artificial Sequence: Synthetic oligonucleotide
ggagcaggcccuuucugag

SEQ ID NO: 1633242 - RNA, 19 nt, Artificial Sequence
  Description of Artificial Sequence: Synthetic oligonucleotide
gaaacugauggcgccucac

SEQ ID NO: 1633243 - RNA, 19 nt, Artificial Sequence
  Description of Artificial Sequence: Synthetic oligonucleotide
caucccagucuugucgacg

SEQ ID NO: 1633244 - RNA, 19 nt, Artificial Sequence
  Description of Artificial Sequence: Synthetic oligonucleotide
uuggacguuucagaacuuc

SEQ ID NO: 1633245 - RNA, 19 nt, Artificial Sequence
  Description of Artificial Sequence: Synthetic oligonucleotide
caucaauauugcaaaccaa

SEQ ID NO: 1633246 - RNA, 19 nt, Artificial Sequence
  Description of Artificial Sequence: Synthetic oligonucleotide
cuccaucgaaacugauggc

SEQ ID NO: 1633247 - RNA, 19 nt, Artificial Sequence
  Description of Artificial Sequence: Synthetic oligonucleotide
agcaggcgucagcaggaac

SEQ ID NO: 1633248 - RNA, 19 nt, Artificial Sequence
  Description of Artificial Sequence: Synthetic oligonucleotide
ugacuuccguuuugcaguc

SEQ ID NO: 1633249 - RNA, 19 nt, Artificial Sequence
  Description of Artificial Sequence: Synthetic oligonucleotide
guaaguaacccaucucuau

SEQ ID NO: 1633250 - RNA, 19 nt, Artificial Sequence
  Description of Artificial Sequence: Synthetic oligonucleotide
agaugagucucaccucaau

SEQ ID NO: 1633251 - RNA, 19 nt, Artificial Sequence
  Description of Artificial Sequence: Synthetic oligonucleotide
uuaugccaauagcaucuuu

SEQ ID NO: 1633252 - RNA, 19 nt, Artificial Sequence
  Description of Artificial Sequence: Synthetic oligonucleotide
caacggcuccacauccggg

SEQ ID NO: 1633253 - RNA, 19 nt, Artificial Sequence
  Description of Artificial Sequence: Synthetic oligonucleotide
auguccacgucuauaucca

SEQ ID NO: 1633254 - RNA, 19 nt, Artificial Sequence
  Description of Artificial Sequence: Synthetic oligonucleotide
caucuuugacaucguaaga

SEQ ID NO: 1633255 - RNA, 19 nt, Artificial Sequence
  Description of Artificial Sequence: Synthetic oligonucleotide
aacucccggauggcucccc

SEQ ID NO: 1633256 - RNA, 19 nt, Artificial Sequence
  Description of Artificial Sequence: Synthetic oligonucleotide
uaaggcccacucucuucag

SEQ ID NO: 1633257 - RNA, 19 nt, Artificial Sequence
  Description of Artificial Sequence: Synthetic oligonucleotide
gaugaaccugugcaccgaa

SEQ ID NO: 1633258 - RNA, 19 nt, Artificial Sequence
  Description of Artificial Sequence: Synthetic oligonucleotide
ugcggcggcuucuccaggc

SEQ ID NO: 1633259 - RNA, 19 nt, Artificial Sequence
  Description of Artificial Sequence: Synthetic oligonucleotide
caccgaacuguuuggccac

SEQ ID NO: 1633260 - RNA, 19 nt, Artificial Sequence
  Description of Artificial Sequence: Synthetic oligonucleotide
cccaucucuaucaaauguc

SEQ ID NO: 1633261 - RNA, 19 nt, Artificial Sequence
  Description of Artificial Sequence: Synthetic oligonucleotide
ggagagugucuguuuggag

SEQ ID NO: 1633262 - RNA, 19 nt, Artificial Sequence
  Description of Artificial Sequence: Synthetic oligonucleotide
acauggagauguggcuugg

SEQ ID NO: 1633263 - RNA, 19 nt, Artificial Sequence
  Description of Artificial Sequence: Synthetic oligonucleotide
ugacacgcugacuuccguu

SEQ ID NO: 1633264 - RNA, 19 nt, Artificial Sequence
  Description of Artificial Sequence: Synthetic oligonucleotide
ugucgacgaggccguuuag

SEQ ID NO: 1633265 - RNA, 19 nt, Artificial Sequence
  Description of Artificial Sequence: Synthetic oligonucleotide
uucuacgauggcgucuagu

SEQ ID NO: 1633266 - RNA, 19 nt, Artificial Sequence
  Description of Artificial Sequence: Synthetic oligonucleotide
cagggcggcgcgcaggacc

SEQ ID NO: 1633267 - RNA, 19 nt, Artificial Sequence
  Description of Artificial Sequence: Synthetic oligonucleotide
aucgaaacugauggcgccu

SEQ ID NO: 1633268 - RNA, 19 nt, Artificial Sequence
  Description of Artificial Sequence: Synthetic oligonucleotide
uccagggcggcgcgcagga

SEQ ID NO: 1633269 - RNA, 19 nt, Artificial Sequence
  Description of Artificial Sequence: Synthetic oligonucleotide
ugcaaaccaaaagcuuuau

SEQ ID NO: 1633270 - RNA, 19 nt, Artificial Sequence
  Description of Artificial Sequence: Synthetic oligonucleotide
uaaggcggagagugucugu

SEQ ID NO: 1633271 - RNA, 19 nt, Artificial Sequence
  Description of Artificial Sequence: Synthetic oligonucleotide
gucgacgaggccguuuagc

SEQ ID NO: 1633272 - RNA, 19 nt, Artificial Sequence
  Description of Artificial Sequence: Synthetic oligonucleotide
guaacccaucucuaucaaa

SEQ ID NO: 1633273 - RNA, 19 nt, Artificial Sequence
  Description of Artificial Sequence: Synthetic oligonucleotide
ggugagacauccaucaaua

SEQ ID NO: 1633274 - RNA, 19 nt, Artificial Sequence
  Description of Artificial Sequence: Synthetic oligonucleotide
uuuggacguuucagaacuu

SEQ ID NO: 1633275 - RNA, 19 nt, Artificial Sequence
  Description of Artificial Sequence: Synthetic oligonucleotide
acgucuauauccacacuau

SEQ ID NO: 1633276 - RNA, 19 nt, Artificial Sequence
  Description of Artificial Sequence: Synthetic oligonucleotide
acucccggauggcuccccg

SEQ ID NO: 1633277 - RNA, 19 nt, Artificial Sequence
  Description of Artificial Sequence: Synthetic oligonucleotide
ugacaucguaagagauuau

SEQ ID NO: 1633278 - RNA, 19 nt, Artificial Sequence
  Description of Artificial Sequence: Synthetic oligonucleotide
agggcggcgcgcaggaccc

SEQ ID NO: 1633279 - RNA, 19 nt, Artificial Sequence
  Description of Artificial Sequence: Synthetic oligonucleotide
cuacgauggcgucuaguga

SEQ ID NO: 1633280 - RNA, 19 nt, Artificial Sequence
  Description of Artificial Sequence: Synthetic oligonucleotide
gcaccgaacuguuuggcca

SEQ ID NO: 1633281 - RNA, 19 nt, Artificial Sequence
  Description of Artificial Sequence: Synthetic oligonucleotide
cagucaauguccacgucua

SEQ ID NO: 1633282 - RNA, 19 nt, Artificial Sequence
  Description of Artificial Sequence: Synthetic oligonucleotide
auggcgccucacaacagag

SEQ ID NO: 1633283 - RNA, 19 nt, Artificial Sequence
  Description of Artificial Sequence: Synthetic oligonucleotide
acgauggcgucuagugagg

SEQ ID NO: 1633284 - RNA, 19 nt, Artificial Sequence
  Description of Artificial Sequence: Synthetic oligonucleotide
gacaucguaagagauuauu

SEQ ID NO: 1633285 - RNA, 19 nt, Artificial Sequence
  Description of Artificial Sequence: Synthetic oligonucleotide
ucgaaacugauggcgccuc

SEQ ID NO: 1633286 - RNA, 19 nt, Artificial Sequence
  Description of Artificial Sequence: Synthetic oligonucleotide
cacgcugacuuccguuuug

SEQ ID NO: 1633287 - RNA, 19 nt, Artificial Sequence
  Description of Artificial Sequence: Synthetic oligonucleotide
ugcgaacucccggauggcu

SEQ ID NO: 1633288 - RNA, 19 nt, Artificial Sequence
  Description of Artificial Sequence: Synthetic oligonucleotide
cauugccgagauaggccac

SEQ ID NO: 1633289 - RNA, 19 nt, Artificial Sequence
  Description of Artificial Sequence: Synthetic oligonucleotide
cagcgggaugccuuugcug

SEQ ID NO: 1633290 - RNA, 19 nt, Artificial Sequence
  Description of Artificial Sequence: Synthetic oligonucleotide
gaauucuacgauggcgucu

SEQ ID NO: 1633291 - RNA, 19 nt, Artificial Sequence
  Description of Artificial Sequence: Synthetic oligonucleotide
cacugcauuugcaaaugua

SEQ ID NO: 1633292 - RNA, 19 nt, Artificial Sequence
  Description of Artificial Sequence: Synthetic oligonucleotide
uauccacacuaugcucagc

SEQ ID NO: 1633293 - RNA, 19 nt, Artificial Sequence
  Description of Artificial Sequence: Synthetic oligonucleotide
cucugcgaacucccggaug

SEQ ID NO: 1633294 - RNA, 19 nt, Artificial Sequence
  Description of Artificial Sequence: Synthetic oligonucleotide
ggaauucuacgauggcguc

SEQ ID NO: 1633295 - RNA, 19 nt, Artificial Sequence
  Description of Artificial Sequence: Synthetic oligonucleotide
gcggagagugucuguuugg

SEQ ID NO: 1633296 - RNA, 19 nt, Artificial Sequence
  Description of Artificial Sequence: Synthetic oligonucleotide
gaacuucuucgaugaaccu

SEQ ID NO: 1633297 - RNA, 19 nt, Artificial Sequence
  Description of Artificial Sequence: Synthetic oligonucleotide
ucacuccaucgaaacugau

SEQ ID NO: 1633298 - RNA, 19 nt, Artificial Sequence
  Description of Artificial Sequence: Synthetic oligonucleotide
caaauguaccccacagccu

SEQ ID NO: 1633299 - RNA, 19 nt, Artificial Sequence
  Description of Artificial Sequence: Synthetic oligonucleotide
cucagucacuucacgaacu

SEQ ID NO: 1633300 - RNA, 19 nt, Artificial Sequence
  Description of Artificial Sequence: Synthetic oligonucleotide
acuuuaaggcggagagugu

SEQ ID NO: 1633301 - RNA, 19 nt, Artificial Sequence
  Description of Artificial Sequence: Synthetic oligonucleotide
ccaacggcuccacauccgg

SEQ ID NO: 1633302 - RNA, 19 nt, Artificial Sequence
  Description of Artificial Sequence: Synthetic oligonucleotide
gacacgcugacuuccguuu

SEQ ID NO: 1633303 - RNA, 19 nt, Artificial Sequence
  Description of Artificial Sequence: Synthetic oligonucleotide
gcuuggauauuccccacaa

SEQ ID NO: 1633304 - RNA, 19 nt, Artificial Sequence
  Description of Artificial Sequence: Synthetic oligonucleotide
auucuacgauggcgucuag

SEQ ID NO: 1633305 - RNA, 19 nt, Artificial Sequence
  Description of Artificial Sequence: Synthetic oligonucleotide
cagcgaguccaucuuccuc

SEQ ID NO: 1633306 - RNA, 19 nt, Artificial Sequence
  Description of Artificial Sequence: Synthetic oligonucleotide
gauggcgucuagugaggua

SEQ ID NO: 1633307 - RNA, 19 nt, Artificial Sequence
  Description of Artificial Sequence: Synthetic oligonucleotide
acccuguaaguaacccauc

SEQ ID NO: 1633308 - RNA, 19 nt, Artificial Sequence
  Description of Artificial Sequence: Synthetic oligonucleotide
ugucaaccucauugugaua

SEQ ID NO: 1633309 - RNA, 19 nt, Artificial Sequence
  Description of Artificial Sequence: Synthetic oligonucleotide
ccguuuagcuggauucaag

SEQ ID NO: 1633310 - RNA, 19 nt, Artificial Sequence
  Description of Artificial Sequence: Synthetic oligonucleotide
gcuugucugacacgcugac

SEQ ID NO: 1633311 - RNA, 19 nt, Artificial Sequence
  Description of Artificial Sequence: Synthetic oligonucleotide
ggccacauucucaauuuca

SEQ ID NO: 1633312 - RNA, 19 nt, Artificial Sequence
  Description of Artificial Sequence: Synthetic oligonucleotide
cuccagcgaguccaucuuc

SEQ ID NO: 1633313 - RNA, 19 nt, Artificial Sequence
  Description of Artificial Sequence: Synthetic oligonucleotide
gcgggcaccgacguggcgg

SEQ ID NO: 1633314 - RNA, 19 nt, Artificial Sequence
  Description of Artificial Sequence: Synthetic oligonucleotide
auguaccccacagccuucu

SEQ ID NO: 1633315 - RNA, 19 nt, Artificial Sequence
  Description of Artificial Sequence: Synthetic oligonucleotide
ccucacaacagagaagaca

SEQ ID NO: 1633316 - RNA, 19 nt, Artificial Sequence
  Description of Artificial Sequence: Synthetic oligonucleotide
gugcaccgaacuguuuggc

SEQ ID NO: 1633317 - RNA, 19 nt, Artificial Sequence
  Description of Artificial Sequence: Synthetic oligonucleotide
augcggcggcuucuccagg

SEQ ID NO: 1633318 - RNA, 19 nt, Artificial Sequence
  Description of Artificial Sequence: Synthetic oligonucleotide
gccgagauaggccaccucu

SEQ ID NO: 1633319 - RNA, 19 nt, Artificial Sequence
  Description of Artificial Sequence: Synthetic oligonucleotide
agagcugucuuuggacguu

SEQ ID NO: 1633320 - RNA, 19 nt, Artificial Sequence
  Description of Artificial Sequence: Synthetic oligonucleotide
cagaugcggcggcuucucc

SEQ ID NO: 1633321 - RNA, 19 nt, Artificial Sequence
  Description of Artificial Sequence: Synthetic oligonucleotide
acacuaugcucagcucgca

SEQ ID NO: 1633322 - RNA, 19 nt, Artificial Sequence
  Description of Artificial Sequence: Synthetic oligonucleotide
cuaugcucagcucgcauuu

SEQ ID NO: 1633323 - RNA, 19 nt, Artificial Sequence
  Description of Artificial Sequence: Synthetic oligonucleotide
gacuuccguuuugcagucc

SEQ ID NO: 1633324 - RNA, 19 nt, Artificial Sequence
  Description of Artificial Sequence: Synthetic oligonucleotide
gagaugagucucaccucaa

SEQ ID NO: 1633325 - RNA, 19 nt, Artificial Sequence
  Description of Artificial Sequence: Synthetic oligonucleotide
ggcuuggauauuccccaca

SEQ ID NO: 1633326 - RNA, 19 nt, Artificial Sequence
  Description of Artificial Sequence: Synthetic oligonucleotide
ccgaccaccacugcauuug

SEQ ID NO: 1633327 - RNA, 19 nt, Artificial Sequence
  Description of Artificial Sequence: Synthetic oligonucleotide
ccaucucuaucaaaugucu

SEQ ID NO: 1633328 - RNA, 19 nt, Artificial Sequence
  Description of Artificial Sequence: Synthetic oligonucleotide
ccccaacggcuccacaucc

SEQ ID NO: 1633329 - RNA, 19 nt, Artificial Sequence
  Description of Artificial Sequence: Synthetic oligonucleotide
cucugcaauuggccaguca

SEQ ID NO: 1633330 - RNA, 19 nt, Artificial Sequence
  Description of Artificial Sequence: Synthetic oligonucleotide
gcaugaguuauuaaccuuu

SEQ ID NO: 1633331 - RNA, 19 nt, Artificial Sequence
  Description of Artificial Sequence: Synthetic oligonucleotide
gugagguagagcugucuuu

SEQ ID NO: 1633332 - RNA, 19 nt, Artificial Sequence
  Description of Artificial Sequence: Synthetic oligonucleotide
gugagacauccaucaauau

SEQ ID NO: 1633333 - RNA, 19 nt, Artificial Sequence
  Description of Artificial Sequence: Synthetic oligonucleotide
cuuccguuuugcaguccaa

SEQ ID NO: 1633334 - RNA, 19 nt, Artificial Sequence
  Description of Artificial Sequence: Synthetic oligonucleotide
gucucaccucaauaccacu

SEQ ID NO: 1633335 - RNA, 19 nt, Artificial Sequence
  Description of Artificial Sequence: Synthetic oligonucleotide
cucaccucaauaccacuuu

SEQ ID NO: 1633336 - RNA, 19 nt, Artificial Sequence
  Description of Artificial Sequence: Synthetic oligonucleotide
cugcgaacucccggauggc

SEQ ID NO: 1633337 - RNA, 19 nt, Artificial Sequence
  Description of Artificial Sequence: Synthetic oligonucleotide
ggauucaaguucaggggcu

SEQ ID NO: 1633338 - RNA, 19 nt, Artificial Sequence
  Description of Artificial Sequence: Synthetic oligonucleotide
ggcuccccgaccaccacug

SEQ ID NO: 1633339 - RNA, 19 nt, Artificial Sequence
  Description of Artificial Sequence: Synthetic oligonucleotide
guccaacuuuaaggcggag

SEQ ID NO: 1633340 - RNA, 19 nt, Artificial Sequence
  Description of Artificial Sequence: Synthetic oligonucleotide
ggcaugaguuauuaaccuu

SEQ ID NO: 1633341 - RNA, 19 nt, Artificial Sequence
  Description of Artificial Sequence: Synthetic oligonucleotide
gccuuugcugccgccgcgg

SEQ ID NO: 1633342 - RNA, 19 nt, Artificial Sequence
  Description of Artificial Sequence: Synthetic oligonucleotide
gcgcgcaggacccagccaa

SEQ ID NO: 1633343 - RNA, 19 nt, Artificial Sequence
  Description of Artificial Sequence: Synthetic oligonucleotide
accgaacuguuuggccaca

SEQ ID NO: 1633344 - RNA, 19 nt, Artificial Sequence
  Description of Artificial Sequence: Synthetic oligonucleotide
cuuggauauuccccacaau

SEQ ID NO: 1633345 - RNA, 19 nt, Artificial Sequence
  Description of Artificial Sequence: Synthetic oligonucleotide
cguuuagcuggauucaagu

SEQ ID NO: 1633346 - RNA, 19 nt, Artificial Sequence
  Description of Artificial Sequence: Synthetic oligonucleotide
uggaggucagugggaugua

SEQ ID NO: 1633347 - RNA, 19 nt, Artificial Sequence
  Description of Artificial Sequence: Synthetic oligonucleotide
ggccguuuagcuggauuca

SEQ ID NO: 1633348 - RNA, 19 nt, Artificial Sequence
  Description of Artificial Sequence: Synthetic oligonucleotide
gcgaacucccggauggcuc

SEQ ID NO: 1633349 - RNA, 19 nt, Artificial Sequence
  Description of Artificial Sequence: Synthetic oligonucleotide
caacuuuaaggcggagagu

SEQ ID NO: 1633350 - RNA, 19 nt, Artificial Sequence
  Description of Artificial Sequence: Synthetic oligonucleotide
gccccaacggcuccacauc

SEQ ID NO: 1633351 - RNA, 19 nt, Artificial Sequence
  Description of Artificial Sequence: Synthetic oligonucleotide
gcgccucacaacagagaag

SEQ ID NO: 1633352 - RNA, 19 nt, Artificial Sequence
  Description of Artificial Sequence: Synthetic oligonucleotide
cccuguaaguaacccaucu

SEQ ID NO: 1633353 - RNA, 19 nt, Artificial Sequence
  Description of Artificial Sequence: Synthetic oligonucleotide
cccgccaggcgcuugaugu

SEQ ID NO: 1633354 - RNA, 19 nt, Artificial Sequence
  Description of Artificial Sequence: Synthetic oligonucleotide
ggggccggccccgggacgg

SEQ ID NO: 1633355 - RNA, 19 nt, Artificial Sequence
  Description of Artificial Sequence: Synthetic oligonucleotide
gcaccgacguggcggcccc

SEQ ID NO: 1633356 - RNA, 19 nt, Artificial Sequence
  Description of Artificial Sequence: Synthetic oligonucleotide
cagcacuaaggcccacucu

SEQ ID NO: 1633357 - RNA, 19 nt, Artificial Sequence
  Description of Artificial Sequence: Synthetic oligonucleotide
ccaucccagucuugucgac

SEQ ID NO: 1633358 - RNA, 19 nt, Artificial Sequence
  Description of Artificial Sequence: Synthetic oligonucleotide
cacuaugcucagcucgcau

SEQ ID NO: 1633359 - RNA, 19 nt, Artificial Sequence
  Description of Artificial Sequence: Synthetic oligonucleotide
gccagcacgagcgccgcca

SEQ ID NO: 1633360 - RNA, 19 nt, Artificial Sequence
  Description of Artificial Sequence: Synthetic oligonucleotide
cguaagagauuauuucuuu

SEQ ID NO: 1633361 - RNA, 19 nt, Artificial Sequence
  Description of Artificial Sequence: Synthetic oligonucleotide
caaccucauugugauaauu

SEQ ID NO: 1633362 - RNA, 19 nt, Artificial Sequence
  Description of Artificial Sequence: Synthetic oligonucleotide
gagcaggcgucagcaggaa

SEQ ID NO: 1633363 - RNA, 19 nt, Artificial Sequence
  Description of Artificial Sequence: Synthetic oligonucleotide
cguggucuguugaaaccca

SEQ ID NO: 1633364 - RNA, 19 nt, Artificial Sequence
  Description of Artificial Sequence: Synthetic oligonucleotide
cugacacgcugacuuccgu

SEQ ID NO: 1633365 - RNA, 19 nt, Artificial Sequence
  Description of Artificial Sequence: Synthetic oligonucleotide
guccgcgcggggcgggcac

SEQ ID NO: 1633366 - RNA, 19 nt, Artificial Sequence
  Description of Artificial Sequence: Synthetic oligonucleotide
gucacuucacgaacuccuu

SEQ ID NO: 1633367 - RNA, 19 nt, Artificial Sequence
  Description of Artificial Sequence: Synthetic oligonucleotide
cacuaaggcccacucucuu

SEQ ID NO: 1633368 - RNA, 19 nt, Artificial Sequence
  Description of Artificial Sequence: Synthetic oligonucleotide
ggcgggcaccgacguggcg

SEQ ID NO: 1633369 - RNA, 19 nt, Artificial Sequence
  Description of Artificial Sequence: Synthetic oligonucleotide
cuuaugccaauagcaucuu

SEQ ID NO: 1633370 - RNA, 19 nt, Artificial Sequence
  Description of Artificial Sequence: Synthetic oligonucleotide
ucuugucgacgaggccguu

SEQ ID NO: 1633371 - RNA, 19 nt, Artificial Sequence
  Description of Artificial Sequence: Synthetic oligonucleotide
cccggagcaggcgucagca

SEQ ID NO: 1633372 - RNA, 19 nt, Artificial Sequence
  Description of Artificial Sequence: Synthetic oligonucleotide
gccauuggugagacaucca

SEQ ID NO: 1633373 - RNA, 19 nt, Artificial Sequence
  Description of Artificial Sequence: Synthetic oligonucleotide
ccucaauaccacuuuucuu

SEQ ID NO: 1633374 - RNA, 19 nt, Artificial Sequence
  Description of Artificial Sequence: Synthetic oligonucleotide
cguuuugcaguccaacuuu

SEQ ID NO: 1633375 - RNA, 19 nt, Artificial Sequence
  Description of Artificial Sequence: Synthetic oligonucleotide
acgaggccguuuagcugga

SEQ ID NO: 1633376 - RNA, 19 nt, Artificial Sequence
  Description of Artificial Sequence: Synthetic oligonucleotide
gcgcaggacccagccaaug

SEQ ID NO: 1633377 - RNA, 19 nt, Artificial Sequence
  Description of Artificial Sequence: Synthetic oligonucleotide
ccagaugcggcggcuucuc

SEQ ID NO: 1633378 - RNA, 19 nt, Artificial Sequence
  Description of Artificial Sequence: Synthetic oligonucleotide
ccguuuugcaguccaacuu

SEQ ID NO: 1633379 - RNA, 19 nt, Artificial Sequence
  Description of Artificial Sequence: Synthetic oligonucleotide
cgggcaccgacguggcggc

SEQ ID NO: 1633380 - RNA, 19 nt, Artificial Sequence
  Description of Artificial Sequence: Synthetic oligonucleotide
gcacuaaggcccacucucu

SEQ ID NO: 1633381 - RNA, 19 nt, Artificial Sequence
  Description of Artificial Sequence: Synthetic oligonucleotide
ggcgcgcaggacccagcca

SEQ ID NO: 1633382 - RNA, 19 nt, Artificial Sequence
  Description of Artificial Sequence: Synthetic oligonucleotide
ccacgccgccgccccaacg

SEQ ID NO: 1633383 - RNA, 19 nt, Artificial Sequence
  Description of Artificial Sequence: Synthetic oligonucleotide
cuugucgacgaggccguuu

SEQ ID NO: 1633384 - RNA, 19 nt, Artificial Sequence
  Description of Artificial Sequence: Synthetic oligonucleotide
gccccgggacggccguccg

SEQ ID NO: 1633385 - RNA, 19 nt, Artificial Sequence
  Description of Artificial Sequence: Synthetic oligonucleotide
cggcgcgcaggacccagcc

SEQ ID NO: 1633386 - RNA, 19 nt, Artificial Sequence
  Description of Artificial Sequence: Synthetic oligonucleotide
cgaaacugauggcgccuca

SEQ ID NO: 1633387 - RNA, 19 nt, Artificial Sequence
  Description of Artificial Sequence: Synthetic oligonucleotide
gggcgggcaccgacguggc

SEQ ID NO: 1633388 - RNA, 19 nt, Artificial Sequence
  Description of Artificial Sequence: Synthetic oligonucleotide
cgaugaaccugugcaccga

SEQ ID NO: 1633389 - RNA, 19 nt, Artificial Sequence
  Description of Artificial Sequence: Synthetic oligonucleotide
gcgcggggcgggcaccgac

SEQ ID NO: 1633390 - RNA, 19 nt, Artificial Sequence
  Description of Artificial Sequence: Synthetic oligonucleotide
ccccgccaggcgcuugaug

SEQ ID NO: 1633391 - RNA, 19 nt, Artificial Sequence
  Description of Artificial Sequence: Synthetic oligonucleotide
ccgagauaggccaccucuu

SEQ ID NO: 1633392 - RNA, 19 nt, Artificial Sequence
  Description of Artificial Sequence: Synthetic oligonucleotide
cuguuuggagcaggcccuu

SEQ ID NO: 1633393 - RNA, 19 nt, Artificial Sequence
  Description of Artificial Sequence: Synthetic oligonucleotide
ccacgucuauauccacacu

SEQ ID NO: 1633394 - RNA, 19 nt, Artificial Sequence
  Description of Artificial Sequence: Synthetic oligonucleotide
cgagauaggccaccucuuu

SEQ ID NO: 1633395 - RNA, 19 nt, Artificial Sequence
  Description of Artificial Sequence: Synthetic oligonucleotide
gcggcgcgcaggacccagc

SEQ ID NO: 1633396 - RNA, 19 nt, Artificial Sequence
  Description of Artificial Sequence: Synthetic oligonucleotide
gccgccccaacggcuccac

SEQ ID NO: 1633397 - RNA, 19 nt, Artificial Sequence
  Description of Artificial Sequence: Synthetic oligonucleotide
cggcugcgcugcagcuucg

SEQ ID NO: 1633398 - RNA, 19 nt, Artificial Sequence
  Description of Artificial Sequence: Synthetic oligonucleotide
cgccccaacggcuccacau

SEQ ID NO: 1633399 - RNA, 19 nt, Artificial Sequence
  Description of Artificial Sequence: Synthetic oligonucleotide
gggcaccgacguggcggcc

SEQ ID NO: 1633400 - RNA, 19 nt, Artificial Sequence
  Description of Artificial Sequence: Synthetic oligonucleotide
ccgcgccccggcugcgcug

SEQ ID NO: 1633401 - RNA, 19 nt, Artificial Sequence
  Description of Artificial Sequence: Synthetic oligonucleotide
cccgaccaccacugcauuu

SEQ ID NO: 1633402 - RNA, 19 nt, Artificial Sequence
  Description of Artificial Sequence: Synthetic oligonucleotide
cgauggcgucuagugaggu

SEQ ID NO: 1633403 - RNA, 19 nt, Artificial Sequence
  Description of Artificial Sequence: Synthetic oligonucleotide
ccgccccaacggcuccaca

SEQ ID NO: 1633404 - RNA, 19 nt, Artificial Sequence
  Description of Artificial Sequence: Synthetic oligonucleotide
ccgccaggcgcuugauguu

SEQ ID NO: 1633405 - RNA, 19 nt, Artificial Sequence
  Description of Artificial Sequence: Synthetic oligonucleotide
ccccgaccaccacugcauu

SEQ ID NO: 1633406 - RNA, 19 nt, Artificial Sequence
  Description of Artificial Sequence: Synthetic oligonucleotide
cgcgcaggacccagccaau

SEQ ID NO: 1633407 - RNA, 19 nt, Artificial Sequence
  Description of Artificial Sequence: Synthetic oligonucleotide
aauacauuggucuucugcc

SEQ ID NO: 1633408 - RNA, 19 nt, Artificial Sequence
  Description of Artificial Sequence: Synthetic oligonucleotide
uuuacaaacuucuuucugg

SEQ ID NO: 1633409 - RNA, 19 nt, Artificial Sequence
  Description of Artificial Sequence: Synthetic oligonucleotide
auaucuauggcagacaggc

SEQ ID NO: 1633410 - RNA, 19 nt, Artificial Sequence
  Description of Artificial Sequence: Synthetic oligonucleotide
aaaugcaugugcaaggugc

SEQ ID NO: 1633411 - RNA, 19 nt, Artificial Sequence
  Description of Artificial Sequence: Synthetic oligonucleotide
aagcauugggauuuaagcg

SEQ ID NO: 1633412 - RNA, 19 nt, Artificial Sequence
  Description of Artificial Sequence: Synthetic oligonucleotide
uaagauauaguuccgggcc

SEQ ID NO: 1633413 - RNA, 19 nt, Artificial Sequence
  Description of Artificial Sequence: Synthetic oligonucleotide
aaauucagucaccagccgc

SEQ ID NO: 1633414 - RNA, 19 nt, Artificial Sequence
  Description of Artificial Sequence: Synthetic oligonucleotide
uagaacauucugcauagcg

SEQ ID NO: 1633415 - RNA, 19 nt, Artificial Sequence
  Description of Artificial Sequence: Synthetic oligonucleotide
gaagcauugggauuuaagc

SEQ ID NO: 1633416 - RNA, 19 nt, Artificial Sequence
  Description of Artificial Sequence: Synthetic oligonucleotide
gaggguuuaggcuuggagg

SEQ ID NO: 1633417 - RNA, 19 nt, Artificial Sequence
  Description of Artificial Sequence: Synthetic oligonucleotide
uucaugaucaauguuaggu

SEQ ID NO: 1633418 - RNA, 19 nt, Artificial Sequence
  Description of Artificial Sequence: Synthetic oligonucleotide
ugucauucucugcaaaggg

SEQ ID NO: 1633419 - RNA, 19 nt, Artificial Sequence
  Description of Artificial Sequence: Synthetic oligonucleotide
gaaaauucagucaccagcc

SEQ ID NO: 1633420 - RNA, 19 nt, Artificial Sequence
  Description of Artificial Sequence: Synthetic oligonucleotide
cagcguaagauauaguucc

SEQ ID NO: 1633421 - RNA, 19 nt, Artificial Sequence
  Description of Artificial Sequence: Synthetic oligonucleotide
acaugaaggagcugaauuc

SEQ ID NO: 1633422 - RNA, 19 nt, Artificial Sequence
  Description of Artificial Sequence: Synthetic oligonucleotide
uuuccgauguccugcagcg

SEQ ID NO: 1633423 - RNA, 19 nt, Artificial Sequence
  Description of Artificial Sequence: Synthetic oligonucleotide
aggguuuaggcuuggaggg

SEQ ID NO: 1633424 - RNA, 19 nt, Artificial Sequence
  Description of Artificial Sequence: Synthetic oligonucleotide
ucuuguucccacaaugccc

SEQ ID NO: 1633425 - RNA, 19 nt, Artificial Sequence
  Description of Artificial Sequence: Synthetic oligonucleotide
aaguagaacauucugcaua

SEQ ID NO: 1633426 - RNA, 19 nt, Artificial Sequence
  Description of Artificial Sequence: Synthetic oligonucleotide
aacaugaaggagcugaauu

SEQ ID NO: 1633427 - RNA, 19 nt, Artificial Sequence
  Description of Artificial Sequence: Synthetic oligonucleotide
auugauaagucagagccag

SEQ ID NO: 1633428 - RNA, 19 nt, Artificial Sequence
  Description of Artificial Sequence: Synthetic oligonucleotide
aacccguacauccuucggg

SEQ ID NO: 1633429 - RNA, 19 nt, Artificial Sequence
  Description of Artificial Sequence: Synthetic oligonucleotide
agcgucuccgcccagcucc

SEQ ID NO: 1633430 - RNA, 19 nt, Artificial Sequence
  Description of Artificial Sequence: Synthetic oligonucleotide
ucugcaaagggagacaccc

SEQ ID NO: 1633431 - RNA, 19 nt, Artificial Sequence
  Description of Artificial Sequence: Synthetic oligonucleotide
ucuguggucacacagccaa

SEQ ID NO: 1633432 - RNA, 19 nt, Artificial Sequence
  Description of Artificial Sequence: Synthetic oligonucleotide
aggccuaucagcugggugg

SEQ ID NO: 1633433 - RNA, 19 nt, Artificial Sequence
  Description of Artificial Sequence: Synthetic oligonucleotide
ucccgaaucucucugacca

SEQ ID NO: 1633434 - RNA, 19 nt, Artificial Sequence
  Description of Artificial Sequence: Synthetic oligonucleotide
ucgucauugacagucacag

SEQ ID NO: 1633435 - RNA, 19 nt, Artificial Sequence
  Description of Artificial Sequence: Synthetic oligonucleotide
aaugcaugugcaaggugcc

SEQ ID NO: 1633436 - RNA, 19 nt, Artificial Sequence
  Description of Artificial Sequence: Synthetic oligonucleotide
gauuuaagcgucuccgccc

SEQ ID NO: 1633437 - RNA, 19 nt, Artificial Sequence
  Description of Artificial Sequence: Synthetic oligonucleotide
ugggauuuaagcgucuccg

SEQ ID NO: 1633438 - RNA, 19 nt, Artificial Sequence
  Description of Artificial Sequence: Synthetic oligonucleotide
uuagguagaggguuccucc

SEQ ID NO: 1633439 - RNA, 19 nt, Artificial Sequence
  Description of Artificial Sequence: Synthetic oligonucleotide
agcauugggauuuaagcgu

SEQ ID NO: 1633440 - RNA, 19 nt, Artificial Sequence
  Description of Artificial Sequence: Synthetic oligonucleotide
ugcauagcgaagucugugg

SEQ ID NO: 1633441 - RNA, 19 nt, Artificial Sequence
  Description of Artificial Sequence: Synthetic oligonucleotide
accagaaaugugcagagga

SEQ ID NO: 1633442 - RNA, 19 nt, Artificial Sequence
  Description of Artificial Sequence: Synthetic oligonucleotide
uguagucaggggcaaauac

SEQ ID NO: 1633443 - RNA, 19 nt, Artificial Sequence
  Description of Artificial Sequence: Synthetic oligonucleotide
uuuuccgauguccugcagc

SEQ ID NO: 1633444 - RNA, 19 nt, Artificial Sequence
  Description of Artificial Sequence: Synthetic oligonucleotide
uucaugugaggguuuaggc

SEQ ID NO: 1633445 - RNA, 19 nt, Artificial Sequence
  Description of Artificial Sequence: Synthetic oligonucleotide
gaaggagcugaauuccagg

SEQ ID NO: 1633446 - RNA, 19 nt, Artificial Sequence
  Description of Artificial Sequence: Synthetic oligonucleotide
ucugguucuuguuuuaagu

SEQ ID NO: 1633447 - RNA, 19 nt, Artificial Sequence
  Description of Artificial Sequence: Synthetic oligonucleotide
ugugcaacuggucugcagu

SEQ ID NO: 1633448 - RNA, 19 nt, Artificial Sequence
  Description of Artificial Sequence: Synthetic oligonucleotide
uuacaaacuucuuucugga

SEQ ID NO: 1633449 - RNA, 19 nt, Artificial Sequence
  Description of Artificial Sequence: Synthetic oligonucleotide
ugugcagaggaguuucggg

SEQ ID NO: 1633450 - RNA, 19 nt, Artificial Sequence
  Description of Artificial Sequence: Synthetic oligonucleotide
aauguuagguagaggguuc

SEQ ID NO: 1633451 - RNA, 19 nt, Artificial Sequence
  Description of Artificial Sequence: Synthetic oligonucleotide
ugcaaugucaccuuuucuu

SEQ ID NO: 1633452 - RNA, 19 nt, Artificial Sequence
  Description of Artificial Sequence: Synthetic oligonucleotide
ugguucuuguuuuaaguga

SEQ ID NO: 1633453 - RNA, 19 nt, Artificial Sequence
  Description of Artificial Sequence: Synthetic oligonucleotide
uugauggcauauuugcccc

SEQ ID NO: 1633454 - RNA, 19 nt, Artificial Sequence
  Description of Artificial Sequence: Synthetic oligonucleotide
ugauaagucagagccagca

SEQ ID NO: 1633455 - RNA, 19 nt, Artificial Sequence
  Description of Artificial Sequence: Synthetic oligonucleotide
ucuuguuuuaagugagaca

SEQ ID NO: 1633456 - RNA, 19 nt, Artificial Sequence
  Description of Artificial Sequence: Synthetic oligonucleotide
aucagcaugccguucacug

SEQ ID NO: 1633457 - RNA, 19 nt, Artificial Sequence
  Description of Artificial Sequence: Synthetic oligonucleotide
ugaaggagcugaauuccag

SEQ ID NO: 1633458 - RNA, 19 nt, Artificial Sequence
  Description of Artificial Sequence: Synthetic oligonucleotide
aagauauaguuccgggccu

SEQ ID NO: 1633459 - RNA, 19 nt, Artificial Sequence
  Description of Artificial Sequence: Synthetic oligonucleotide
ugcaaagggagacacccca

SEQ ID NO: 1633460 - RNA, 19 nt, Artificial Sequence
  Description of Artificial Sequence: Synthetic oligonucleotide
agauaccuucuucaggguc

SEQ ID NO: 1633461 - RNA, 19 nt, Artificial Sequence
  Description of Artificial Sequence: Synthetic oligonucleotide
ucaugugaggguuuaggcu

SEQ ID NO: 1633462 - RNA, 19 nt, Artificial Sequence
  Description of Artificial Sequence: Synthetic oligonucleotide
aguacgugcagccccaucu

SEQ ID NO: 1633463 - RNA, 19 nt, Artificial Sequence
  Description of Artificial Sequence: Synthetic oligonucleotide
uccagaacaugaaggagcu

SEQ ID NO: 1633464 - RNA, 19 nt, Artificial Sequence
  Description of Artificial Sequence: Synthetic oligonucleotide
uaagugagacacuccaaca

SEQ ID NO: 1633465 - RNA, 19 nt, Artificial Sequence
  Description of Artificial Sequence: Synthetic oligonucleotide
ucaauguuagguagagggu

SEQ ID NO: 1633466 - RNA, 19 nt, Artificial Sequence
  Description of Artificial Sequence: Synthetic oligonucleotide
acuuggauaucuauggcag

SEQ ID NO: 1633467 - RNA, 19 nt, Artificial Sequence
  Description of Artificial Sequence: Synthetic oligonucleotide
gaacauucugcauagcgaa

SEQ ID NO: 1633468 - RNA, 19 nt, Artificial Sequence
  Description of Artificial Sequence: Synthetic oligonucleotide
gaagagcucacuuuaaccu

SEQ ID NO: 1633469 - RNA, 19 nt, Artificial Sequence
  Description of Artificial Sequence: Synthetic oligonucleotide
aaagggagacaccccagcu

SEQ ID NO: 1633470 - RNA, 19 nt, Artificial Sequence
  Description of Artificial Sequence: Synthetic oligonucleotide
ucagucaccagccgcacgu

SEQ ID NO: 1633471 - RNA, 19 nt, Artificial Sequence
  Description of Artificial Sequence: Synthetic oligonucleotide
augacagcguaagauauag

SEQ ID NO: 1633472 - RNA, 19 nt, Artificial Sequence
  Description of Artificial Sequence: Synthetic oligonucleotide
aguaccggaggccucgagg

SEQ ID NO: 1633473 - RNA, 19 nt, Artificial Sequence
  Description of Artificial Sequence: Synthetic oligonucleotide
ucacagauaccuucuucag

SEQ ID NO: 1633474 - RNA, 19 nt, Artificial Sequence
  Description of Artificial Sequence: Synthetic oligonucleotide
uuggaaaauucagucacca

SEQ ID NO: 1633475 - RNA, 19 nt, Artificial Sequence
  Description of Artificial Sequence: Synthetic oligonucleotide
ucaugaucaauguuaggua

SEQ ID NO: 1633476 - RNA, 19 nt, Artificial Sequence
  Description of Artificial Sequence: Synthetic oligonucleotide
cugguucuuguuuuaagug

SEQ ID NO: 1633477 - RNA, 19 nt, Artificial Sequence
  Description of Artificial Sequence: Synthetic oligonucleotide
acucgguucaugucugacg

SEQ ID NO: 1633478 - RNA, 19 nt, Artificial Sequence
  Description of Artificial Sequence: Synthetic oligonucleotide
agaacacucgguucauguc

SEQ ID NO: 1633479 - RNA, 19 nt, Artificial Sequence
  Description of Artificial Sequence: Synthetic oligonucleotide
ugauccucggucagauggg

SEQ ID NO: 1633480 - RNA, 19 nt, Artificial Sequence
  Description of Artificial Sequence: Synthetic oligonucleotide
uucuuguuuuaagugagac

SEQ ID NO: 1633481 - RNA, 19 nt, Artificial Sequence
  Description of Artificial Sequence: Synthetic oligonucleotide
cuuggaaaauucagucacc

SEQ ID NO: 1633482 - RNA, 19 nt, Artificial Sequence
  Description of Artificial Sequence: Synthetic oligonucleotide
guaccggaggccucgaggg

SEQ ID NO: 1633483 - RNA, 19 nt, Artificial Sequence
  Description of Artificial Sequence: Synthetic oligonucleotide
gauggaaaccagaaaugug

SEQ ID NO: 1633484 - RNA, 19 nt, Artificial Sequence
  Description of Artificial Sequence: Synthetic oligonucleotide
acagcguaagauauaguuc

SEQ ID NO: 1633485 - RNA, 19 nt, Artificial Sequence
  Description of Artificial Sequence: Synthetic oligonucleotide
uugaaccgcagcucguagg

SEQ ID NO: 1633486 - RNA, 19 nt, Artificial Sequence
  Description of Artificial Sequence: Synthetic oligonucleotide
uuggauaucuauggcagac

SEQ ID NO: 1633487 - RNA, 19 nt, Artificial Sequence
  Description of Artificial Sequence: Synthetic oligonucleotide
cagcuauguagucaggggc

SEQ ID NO: 1633488 - RNA, 19 nt, Artificial Sequence
  Description of Artificial Sequence: Synthetic oligonucleotide
cacagauaccuucuucagg

SEQ ID NO: 1633489 - RNA, 19 nt, Artificial Sequence
  Description of Artificial Sequence: Synthetic oligonucleotide
ccucuaauugauaagucag

SEQ ID NO: 1633490 - RNA, 19 nt, Artificial Sequence
  Description of Artificial Sequence: Synthetic oligonucleotide
uucugccucuaauugauaa

SEQ ID NO: 1633491 - RNA, 19 nt, Artificial Sequence
  Description of Artificial Sequence: Synthetic oligonucleotide
cugaccaccucccggauag

SEQ ID NO: 1633492 - RNA, 19 nt, Artificial Sequence
  Description of Artificial Sequence: Synthetic oligonucleotide
uugggauuuaagcgucucc

SEQ ID NO: 1633493 - RNA, 19 nt, Artificial Sequence
  Description of Artificial Sequence: Synthetic oligonucleotide
aaugcccacagaacacucg

SEQ ID NO: 1633494 - RNA, 19 nt, Artificial Sequence
  Description of Artificial Sequence: Synthetic oligonucleotide
auagcgaagucugugguca

SEQ ID NO: 1633495 - RNA, 19 nt, Artificial Sequence
  Description of Artificial Sequence: Synthetic oligonucleotide
aauugauaagucagagcca

SEQ ID NO: 1633496 - RNA, 19 nt, Artificial Sequence
  Description of Artificial Sequence: Synthetic oligonucleotide
ugugcaaggugccaucguc

SEQ ID NO: 1633497 - RNA, 19 nt, Artificial Sequence
  Description of Artificial Sequence: Synthetic oligonucleotide
gacguugucuugaagcagc

SEQ ID NO: 1633498 - RNA, 19 nt, Artificial Sequence
  Description of Artificial Sequence: Synthetic oligonucleotide
uugucuugaagcagccaug

SEQ ID NO: 1633499 - RNA, 19 nt, Artificial Sequence
  Description of Artificial Sequence: Synthetic oligonucleotide
aagagcucacuuuaaccuu

SEQ ID NO: 1633500 - RNA, 19 nt, Artificial Sequence
  Description of Artificial Sequence: Synthetic oligonucleotide
gauaagucagagccagcac

SEQ ID NO: 1633501 - RNA, 19 nt, Artificial Sequence
  Description of Artificial Sequence: Synthetic oligonucleotide
auuuaagcgucuccgccca

SEQ ID NO: 1633502 - RNA, 19 nt, Artificial Sequence
  Description of Artificial Sequence: Synthetic oligonucleotide
ucucugaccaccucccgga

SEQ ID NO: 1633503 - RNA, 19 nt, Artificial Sequence
  Description of Artificial Sequence: Synthetic oligonucleotide
acauccuucgggaugucac

SEQ ID NO: 1633504 - RNA, 19 nt, Artificial Sequence
  Description of Artificial Sequence: Synthetic oligonucleotide
cuucccuucugucaaucag

SEQ ID NO: 1633505 - RNA, 19 nt, Artificial Sequence
  Description of Artificial Sequence: Synthetic oligonucleotide
cuugcaaugucaccuuuuc

SEQ ID NO: 1633506 - RNA, 19 nt, Artificial Sequence
  Description of Artificial Sequence: Synthetic oligonucleotide
ucaagaaagccccggcguc

SEQ ID NO: 1633507 - RNA, 19 nt, Artificial Sequence
  Description of Artificial Sequence: Synthetic oligonucleotide
cacaacgugcuccacgggc

SEQ ID NO: 1633508 - RNA, 19 nt, Artificial Sequence
  Description of Artificial Sequence: Synthetic oligonucleotide
gacagcguaagauauaguu

SEQ ID NO: 1633509 - RNA, 19 nt, Artificial Sequence
  Description of Artificial Sequence: Synthetic oligonucleotide
ugggcagcgaguaccggag

SEQ ID NO: 1633510 - RNA, 19 nt, Artificial Sequence
  Description of Artificial Sequence: Synthetic oligonucleotide
uguggucacacagccaacc

SEQ ID NO: 1633511 - RNA, 19 nt, Artificial Sequence
  Description of Artificial Sequence: Synthetic oligonucleotide
cuccuugaaccgcagcucg

SEQ ID NO: 1633512 - RNA, 19 nt, Artificial Sequence
  Description of Artificial Sequence: Synthetic oligonucleotide
agaacauucugcauagcga

SEQ ID NO: 1633513 - RNA, 19 nt, Artificial Sequence
  Description of Artificial Sequence: Synthetic oligonucleotide
ucauugacagucacagaua

SEQ ID NO: 1633514 - RNA, 19 nt, Artificial Sequence
  Description of Artificial Sequence: Synthetic oligonucleotide
ugucuugaagcagccauga

SEQ ID NO: 1633515 - RNA, 19 nt, Artificial Sequence
  Description of Artificial Sequence: Synthetic oligonucleotide
auguuagguagaggguucc

SEQ ID NO: 1633516 - RNA, 19 nt, Artificial Sequence
  Description of Artificial Sequence: Synthetic oligonucleotide
ggauuuaagcgucuccgcc

SEQ ID NO: 1633517 - RNA, 19 nt, Artificial Sequence
  Description of Artificial Sequence: Synthetic oligonucleotide
agggcuugcaaugucaccu

SEQ ID NO: 1633518 - RNA, 19 nt, Artificial Sequence
  Description of Artificial Sequence: Synthetic oligonucleotide
ugagacacuccaacaaauu

SEQ ID NO: 1633519 - RNA, 19 nt, Artificial Sequence
  Description of Artificial Sequence: Synthetic oligonucleotide
gaagcgcugauccucgguc

SEQ ID NO: 1633520 - RNA, 19 nt, Artificial Sequence
  Description of Artificial Sequence: Synthetic oligonucleotide
guucacugccaguacgugc

SEQ ID NO: 1633521 - RNA, 19 nt, Artificial Sequence
  Description of Artificial Sequence: Synthetic oligonucleotide
ugaguggaagagcucacuu

SEQ ID NO: 1633522 - RNA, 19 nt, Artificial Sequence
  Description of Artificial Sequence: Synthetic oligonucleotide
gguucuuguuuuaagugag

SEQ ID NO: 1633523 - RNA, 19 nt, Artificial Sequence
  Description of Artificial Sequence: Synthetic oligonucleotide
uucagucaccagccgcacg

SEQ ID NO: 1633524 - RNA, 19 nt, Artificial Sequence
  Description of Artificial Sequence: Synthetic oligonucleotide
aacauucugcauagcgaag

SEQ ID NO: 1633525 - RNA, 19 nt, Artificial Sequence
  Description of Artificial Sequence: Synthetic oligonucleotide
gaacacucgguucaugucu

SEQ ID NO: 1633526 - RNA, 19 nt, Artificial Sequence
  Description of Artificial Sequence: Synthetic oligonucleotide
agggagacaccccagcuau

SEQ ID NO: 1633527 - RNA, 19 nt, Artificial Sequence
  Description of Artificial Sequence: Synthetic oligonucleotide
auugggauuuaagcgucuc

SEQ ID NO: 1633528 - RNA, 19 nt, Artificial Sequence
  Description of Artificial Sequence: Synthetic oligonucleotide
gagacccugggguugguac

SEQ ID NO: 1633529 - RNA, 19 nt, Artificial Sequence
  Description of Artificial Sequence: Synthetic oligonucleotide
uuccgggagaaaugcaugu

SEQ ID NO: 1633530 - RNA, 19 nt, Artificial Sequence
  Description of Artificial Sequence: Synthetic oligonucleotide
cucuaauugauaagucaga

SEQ ID NO: 1633531 - RNA, 19 nt, Artificial Sequence
  Description of Artificial Sequence: Synthetic oligonucleotide
uugcaaugucaccuuuucu

SEQ ID NO: 1633532 - RNA, 19 nt, Artificial Sequence
  Description of Artificial Sequence: Synthetic oligonucleotide
uucugugcaacuggucugc

SEQ ID NO: 1633533 - RNA, 19 nt, Artificial Sequence
  Description of Artificial Sequence: Synthetic oligonucleotide
aacuggucugcaguggaga

SEQ ID NO: 1633534 - RNA, 19 nt, Artificial Sequence
  Description of Artificial Sequence: Synthetic oligonucleotide
ugucccgaaucucucugac

SEQ ID NO: 1633535 - RNA, 19 nt, Artificial Sequence
  Description of Artificial Sequence: Synthetic oligonucleotide
cucucugaccaccucccgg

SEQ ID NO: 1633536 - RNA, 19 nt, Artificial Sequence
  Description of Artificial Sequence: Synthetic oligonucleotide
agucaccagccgcacguac

SEQ ID NO: 1633537 - RNA, 19 nt, Artificial Sequence
  Description of Artificial Sequence: Synthetic oligonucleotide
aacacucgguucaugucug

SEQ ID NO: 1633538 - RNA, 19 nt, Artificial Sequence
  Description of Artificial Sequence: Synthetic oligonucleotide
aagcgcugauccucgguca

SEQ ID NO: 1633539 - RNA, 19 nt, Artificial Sequence
  Description of Artificial Sequence: Synthetic oligonucleotide
aagggagacaccccagcua

SEQ ID NO: 1633540 - RNA, 19 nt, Artificial Sequence
  Description of Artificial Sequence: Synthetic oligonucleotide
acaacgugcuccacgggcg

SEQ ID NO: 1633541 - RNA, 19 nt, Artificial Sequence
  Description of Artificial Sequence: Synthetic oligonucleotide
agauauaguuccgggccuc

SEQ ID NO: 1633542 - RNA, 19 nt, Artificial Sequence
  Description of Artificial Sequence: Synthetic oligonucleotide
uugauaagucagagccagc

SEQ ID NO: 1633543 - RNA, 19 nt, Artificial Sequence
  Description of Artificial Sequence: Synthetic oligonucleotide
ugggguagucuccaguuuu

SEQ ID NO: 1633544 - RNA, 19 nt, Artificial Sequence
  Description of Artificial Sequence: Synthetic oligonucleotide
cuugucccgaaucucucug

SEQ ID NO: 1633545 - RNA, 19 nt, Artificial Sequence
  Description of Artificial Sequence: Synthetic oligonucleotide
ugacguugucuugaagcag

SEQ ID NO: 1633546 - RNA, 19 nt, Artificial Sequence
  Description of Artificial Sequence: Synthetic oligonucleotide
gaaagccccggcgucagcc

SEQ ID NO: 1633547 - RNA, 19 nt, Artificial Sequence
  Description of Artificial Sequence: Synthetic oligonucleotide
ucccggaccugcagggugg

SEQ ID NO: 1633548 - RNA, 19 nt, Artificial Sequence
  Description of Artificial Sequence: Synthetic oligonucleotide
cugcgcguggccuuguccc

SEQ ID NO: 1633549 - RNA, 19 nt, Artificial Sequence
  Description of Artificial Sequence: Synthetic oligonucleotide
cguaagauauaguuccggg

SEQ ID NO: 1633550 - RNA, 19 nt, Artificial Sequence
  Description of Artificial Sequence: Synthetic oligonucleotide
agagaauccaggggcacug

SEQ ID NO: 1633551 - RNA, 19 nt, Artificial Sequence
  Description of Artificial Sequence: Synthetic oligonucleotide
cuugugggagagucgcagc

SEQ ID NO: 1633552 - RNA, 19 nt, Artificial Sequence
  Description of Artificial Sequence: Synthetic oligonucleotide
acccguacauccuucggga

SEQ ID NO: 1633553 - RNA, 19 nt, Artificial Sequence
  Description of Artificial Sequence: Synthetic oligonucleotide
ucgaggguucagcaccuug

SEQ ID NO: 1633554 - RNA, 19 nt, Artificial Sequence
  Description of Artificial Sequence: Synthetic oligonucleotide
caaucugcuuugccuacag

SEQ ID NO: 1633555 - RNA, 19 nt, Artificial Sequence
  Description of Artificial Sequence: Synthetic oligonucleotide
aagaaagccccggcgucag

SEQ ID NO: 1633556 - RNA, 19 nt, Artificial Sequence
  Description of Artificial Sequence: Synthetic oligonucleotide
gccacaacgugcuccacgg

SEQ ID NO: 1633557 - RNA, 19 nt, Artificial Sequence
  Description of Artificial Sequence: Synthetic oligonucleotide
cauagcgaagucugugguc

SEQ ID NO: 1633558 - RNA, 19 nt, Artificial Sequence
  Description of Artificial Sequence: Synthetic oligonucleotide
gauccucggucagaugggg

SEQ ID NO: 1633559 - RNA, 19 nt, Artificial Sequence
  Description of Artificial Sequence: Synthetic oligonucleotide
acgggcgccauguuggcug

SEQ ID NO: 1633560 - RNA, 19 nt, Artificial Sequence
  Description of Artificial Sequence: Synthetic oligonucleotide
ugcaaucugcuuugccuac

SEQ ID NO: 1633561 - RNA, 19 nt, Artificial Sequence
  Description of Artificial Sequence: Synthetic oligonucleotide
uaagcgucuccgcccagcu

SEQ ID NO: 1633562 - RNA, 19 nt, Artificial Sequence
  Description of Artificial Sequence: Synthetic oligonucleotide
guugucuugaagcagccau

SEQ ID NO: 1633563 - RNA, 19 nt, Artificial Sequence
  Description of Artificial Sequence: Synthetic oligonucleotide
aagccccggcgucagccac

SEQ ID NO: 1633564 - RNA, 19 nt, Artificial Sequence
  Description of Artificial Sequence: Synthetic oligonucleotide
ucguagggcagcacugcca

SEQ ID NO: 1633565 - RNA, 19 nt, Artificial Sequence
  Description of Artificial Sequence: Synthetic oligonucleotide
ggggcaaauacauuggucu

SEQ ID NO: 1633566 - RNA, 19 nt, Artificial Sequence
  Description of Artificial Sequence: Synthetic oligonucleotide
gauaccuucuucagggucu

SEQ ID NO: 1633567 - RNA, 19 nt, Artificial Sequence
  Description of Artificial Sequence: Synthetic oligonucleotide
aggaguuucggggugcuga

SEQ ID NO: 1633568 - RNA, 19 nt, Artificial Sequence
  Description of Artificial Sequence: Synthetic oligonucleotide
uuugccuacagggcuugca

SEQ ID NO: 1633569 - RNA, 19 nt, Artificial Sequence
  Description of Artificial Sequence: Synthetic oligonucleotide
aacgugcuccacgggcgcc

SEQ ID NO: 1633570 - RNA, 19 nt, Artificial Sequence
  Description of Artificial Sequence: Synthetic oligonucleotide
uggauaucuauggcagaca

SEQ ID NO: 1633571 - RNA, 19 nt, Artificial Sequence
  Description of Artificial Sequence: Synthetic oligonucleotide
agccaugacagcguaagau

SEQ ID NO: 1633572 - RNA, 19 nt, Artificial Sequence
  Description of Artificial Sequence: Synthetic oligonucleotide
uuaagcgucuccgcccagc

SEQ ID NO: 1633573 - RNA, 19 nt, Artificial Sequence
  Description of Artificial Sequence: Synthetic oligonucleotide
augucugacguugucuuga

SEQ ID NO: 1633574 - RNA, 19 nt, Artificial Sequence
  Description of Artificial Sequence: Synthetic oligonucleotide
cccggcgucagccacaacg

SEQ ID NO: 1633575 - RNA, 19 nt, Artificial Sequence
  Description of Artificial Sequence: Synthetic oligonucleotide
agaaaugugcagaggaguu

SEQ ID NO: 1633576 - RNA, 19 nt, Artificial Sequence
  Description of Artificial Sequence: Synthetic oligonucleotide
uggccuugugggagagucg

SEQ ID NO: 1633577 - RNA, 19 nt, Artificial Sequence
  Description of Artificial Sequence: Synthetic oligonucleotide
cuucugccuggccuugugg

SEQ ID NO: 1633578 - RNA, 19 nt, Artificial Sequence
  Description of Artificial Sequence: Synthetic oligonucleotide
agcguaagauauaguuccg

SEQ ID NO: 1633579 - RNA, 19 nt, Artificial Sequence
  Description of Artificial Sequence: Synthetic oligonucleotide
cucucggaucagcaugccg

SEQ ID NO: 1633580 - RNA, 19 nt, Artificial Sequence
  Description of Artificial Sequence: Synthetic oligonucleotide
uccgggaagggcuccuuga

SEQ ID NO: 1633581 - RNA, 19 nt, Artificial Sequence
  Description of Artificial Sequence: Synthetic oligonucleotide
cuucgggaugucacacugc

SEQ ID NO: 1633582 - RNA, 19 nt, Artificial Sequence
  Description of Artificial Sequence: Synthetic oligonucleotide
ggcgcgucccucaagaaag

SEQ ID NO: 1633583 - RNA, 19 nt, Artificial Sequence
  Description of Artificial Sequence: Synthetic oligonucleotide
uuuaagcgucuccgcccag

SEQ ID NO: 1633584 - RNA, 19 nt, Artificial Sequence
  Description of Artificial Sequence: Synthetic oligonucleotide
agcucacuuuaaccuuuuc

SEQ ID NO: 1633585 - RNA, 19 nt, Artificial Sequence
  Description of Artificial Sequence: Synthetic oligonucleotide
uugucccgaaucucucuga

SEQ ID NO: 1633586 - RNA, 19 nt, Artificial Sequence
  Description of Artificial Sequence: Synthetic oligonucleotide
agcgcugauccucggucag

SEQ ID NO: 1633587 - RNA, 19 nt, Artificial Sequence
  Description of Artificial Sequence: Synthetic oligonucleotide
caacccguacauccuucgg

SEQ ID NO: 1633588 - RNA, 19 nt, Artificial Sequence
  Description of Artificial Sequence: Synthetic oligonucleotide
ccagaaaugugcagaggag

SEQ ID NO: 1633589 - RNA, 19 nt, Artificial Sequence
  Description of Artificial Sequence: Synthetic oligonucleotide
cucugcaaagggagacacc

SEQ ID NO: 1633590 - RNA, 19 nt, Artificial Sequence
  Description of Artificial Sequence: Synthetic oligonucleotide
cugcaaagggagacacccc

SEQ ID NO: 1633591 - RNA, 19 nt, Artificial Sequence
  Description of Artificial Sequence: Synthetic oligonucleotide
gugcaacuggucugcagug

SEQ ID NO: 1633592 - RNA, 19 nt, Artificial Sequence
  Description of Artificial Sequence: Synthetic oligonucleotide
gcagccaugacagcguaag

SEQ ID NO: 1633593 - RNA, 19 nt, Artificial Sequence
  Description of Artificial Sequence: Synthetic oligonucleotide
ggucuuguucccacaaugc

SEQ ID NO: 1633594 - RNA, 19 nt, Artificial Sequence
  Description of Artificial Sequence: Synthetic oligonucleotide
caacuggucugcaguggag

SEQ ID NO: 1633595 - RNA, 19 nt, Artificial Sequence
  Description of Artificial Sequence: Synthetic oligonucleotide
gggauuuaagcgucuccgc

SEQ ID NO: 1633596 - RNA, 19 nt, Artificial Sequence
  Description of Artificial Sequence: Synthetic oligonucleotide
uccgggagaaaugcaugug

SEQ ID NO: 1633597 - RNA, 19 nt, Artificial Sequence
  Description of Artificial Sequence: Synthetic oligonucleotide
ugcgcguggccuugucccg

SEQ ID NO: 1633598 - RNA, 19 nt, Artificial Sequence
  Description of Artificial Sequence: Synthetic oligonucleotide
guuccgggagaaaugcaug

SEQ ID NO: 1633599 - RNA, 19 nt, Artificial Sequence
  Description of Artificial Sequence: Synthetic oligonucleotide
agaaagccccggcgucagc

SEQ ID NO: 1633600 - RNA, 19 nt, Artificial Sequence
  Description of Artificial Sequence: Synthetic oligonucleotide
cucguagggcagcacugcc

SEQ ID NO: 1633601 - RNA, 19 nt, Artificial Sequence
  Description of Artificial Sequence: Synthetic oligonucleotide
cacuuuaaccuuuucuggu

SEQ ID NO: 1633602 - RNA, 19 nt, Artificial Sequence
  Description of Artificial Sequence: Synthetic oligonucleotide
caucgucauugacagucac

SEQ ID NO: 1633603 - RNA, 19 nt, Artificial Sequence
  Description of Artificial Sequence: Synthetic oligonucleotide
cuuggauaucuauggcaga

SEQ ID NO: 1633604 - RNA, 19 nt, Artificial Sequence
  Description of Artificial Sequence: Synthetic oligonucleotide
cugcauagcgaagucugug

SEQ ID NO: 1633605 - RNA, 19 nt, Artificial Sequence
  Description of Artificial Sequence: Synthetic oligonucleotide
ggagugggcagcgaguacc

SEQ ID NO: 1633606 - RNA, 19 nt, Artificial Sequence
  Description of Artificial Sequence: Synthetic oligonucleotide
acaccccagcuauguaguc

SEQ ID NO: 1633607 - RNA, 19 nt, Artificial Sequence
  Description of Artificial Sequence: Synthetic oligonucleotide
auauaguuccgggccucuc

SEQ ID NO: 1633608 - RNA, 19 nt, Artificial Sequence
  Description of Artificial Sequence: Synthetic oligonucleotide
ugcuccacgggcgccaugu

SEQ ID NO: 1633609 - RNA, 19 nt, Artificial Sequence
  Description of Artificial Sequence: Synthetic oligonucleotide
cgucccucaagaaagcccc

SEQ ID NO: 1633610 - RNA, 19 nt, Artificial Sequence
  Description of Artificial Sequence: Synthetic oligonucleotide
agacccugggguugguacu

SEQ ID NO: 1633611 - RNA, 19 nt, Artificial Sequence
  Description of Artificial Sequence: Synthetic oligonucleotide
aguuccgggccucucggau

SEQ ID NO: 1633612 - RNA, 19 nt, Artificial Sequence
  Description of Artificial Sequence: Synthetic oligonucleotide
uguucccacaaugcccaca

SEQ ID NO: 1633613 - RNA, 19 nt, Artificial Sequence
  Description of Artificial Sequence: Synthetic oligonucleotide
guacgugcagccccaucug

SEQ ID NO: 1633614 - RNA, 19 nt, Artificial Sequence
  Description of Artificial Sequence: Synthetic oligonucleotide
ugucugacguugucuugaa

SEQ ID NO: 1633615 - RNA, 19 nt, Artificial Sequence
  Description of Artificial Sequence: Synthetic oligonucleotide
cucgguucaugucugacgu

SEQ ID NO: 1633616 - RNA, 19 nt, Artificial Sequence
  Description of Artificial Sequence: Synthetic oligonucleotide
gaggccucgaggguucagc

SEQ ID NO: 1633617 - RNA, 19 nt, Artificial Sequence
  Description of Artificial Sequence: Synthetic oligonucleotide
cagggcuugcaaugucacc

SEQ ID NO: 1633618 - RNA, 19 nt, Artificial Sequence
  Description of Artificial Sequence: Synthetic oligonucleotide
gcguaagauauaguuccgg

SEQ ID NO: 1633619 - RNA, 19 nt, Artificial Sequence
  Description of Artificial Sequence: Synthetic oligonucleotide
ucggggugcugaguggaag

SEQ ID NO: 1633620 - RNA, 19 nt, Artificial Sequence
  Description of Artificial Sequence: Synthetic oligonucleotide
ugacagucacagauaccuu

SEQ ID NO: 1633621 - RNA, 19 nt, Artificial Sequence
  Description of Artificial Sequence: Synthetic oligonucleotide
agcucccaaggugcugucc

SEQ ID NO: 1633622 - RNA, 19 nt, Artificial Sequence
  Description of Artificial Sequence: Synthetic oligonucleotide
gggguuauccacccacccc

SEQ ID NO: 1633623 - RNA, 19 nt, Artificial Sequence
  Description of Artificial Sequence: Synthetic oligonucleotide
ccgggagaaaugcaugugc

SEQ ID NO: 1633624 - RNA, 19 nt, Artificial Sequence
  Description of Artificial Sequence: Synthetic oligonucleotide
augaaggagcugaauucca

SEQ ID NO: 1633625 - RNA, 19 nt, Artificial Sequence
  Description of Artificial Sequence: Synthetic oligonucleotide
ggaguuucggggugcugag

SEQ ID NO: 1633626 - RNA, 19 nt, Artificial Sequence
  Description of Artificial Sequence: Synthetic oligonucleotide
ugccuacagggcuugcaau

SEQ ID NO: 1633627 - RNA, 19 nt, Artificial Sequence
  Description of Artificial Sequence: Synthetic oligonucleotide
ucugaccaccucccggaua

SEQ ID NO: 1633628 - RNA, 19 nt, Artificial Sequence
  Description of Artificial Sequence: Synthetic oligonucleotide
ggguucagcaccuuggggu

SEQ ID NO: 1633629 - RNA, 19 nt, Artificial Sequence
  Description of Artificial Sequence: Synthetic oligonucleotide
aucgucauugacagucaca

SEQ ID NO: 1633630 - RNA, 19 nt, Artificial Sequence
  Description of Artificial Sequence: Synthetic oligonucleotide
cucaagaaagccccggcgu

SEQ ID NO: 1633631 - RNA, 19 nt, Artificial Sequence
  Description of Artificial Sequence: Synthetic oligonucleotide
cuggucugcaguggagacc

SEQ ID NO: 1633632 - RNA, 19 nt, Artificial Sequence
  Description of Artificial Sequence: Synthetic oligonucleotide
gcacuuggauaucuauggc

SEQ ID NO: 1633633 - RNA, 19 nt, Artificial Sequence
  Description of Artificial Sequence: Synthetic oligonucleotide
caggccuaucagcugggug

SEQ ID NO: 1633634 - RNA, 19 nt, Artificial Sequence
  Description of Artificial Sequence: Synthetic oligonucleotide
ccacaaugcccacagaaca

SEQ ID NO: 1633635 - RNA, 19 nt, Artificial Sequence
  Description of Artificial Sequence: Synthetic oligonucleotide
gucugacguugucuugaag

SEQ ID NO: 1633636 - RNA, 19 nt, Artificial Sequence
  Description of Artificial Sequence: Synthetic oligonucleotide
caacgugcuccacgggcgc

SEQ ID NO: 1633637 - RNA, 19 nt, Artificial Sequence
  Description of Artificial Sequence: Synthetic oligonucleotide
ggugcugucccggaccugc

SEQ ID NO: 1633638 - RNA, 19 nt, Artificial Sequence
  Description of Artificial Sequence: Synthetic oligonucleotide
gugggcagcgaguaccgga

SEQ ID NO: 1633639 - RNA, 19 nt, Artificial Sequence
  Description of Artificial Sequence: Synthetic oligonucleotide
cacugcuucugugcaacug

SEQ ID NO: 1633640 - RNA, 19 nt, Artificial Sequence
  Description of Artificial Sequence: Synthetic oligonucleotide
uuccgauguccugcagcgg

SEQ ID NO: 1633641 - RNA, 19 nt, Artificial Sequence
  Description of Artificial Sequence: Synthetic oligonucleotide
augccguucacugccagua

SEQ ID NO: 1633642 - RNA, 19 nt, Artificial Sequence
  Description of Artificial Sequence: Synthetic oligonucleotide
ggcgucagccacaacgugc

SEQ ID NO: 1633643 - RNA, 19 nt, Artificial Sequence
  Description of Artificial Sequence: Synthetic oligonucleotide
ggcagcgaguaccggaggc

SEQ ID NO: 1633644 - RNA, 19 nt, Artificial Sequence
  Description of Artificial Sequence: Synthetic oligonucleotide
gucccggaccugcagggug

SEQ ID NO: 1633645 - RNA, 19 nt, Artificial Sequence
  Description of Artificial Sequence: Synthetic oligonucleotide
agagcucacuuuaaccuuu

SEQ ID NO: 1633646 - RNA, 19 nt, Artificial Sequence
  Description of Artificial Sequence: Synthetic oligonucleotide
cagaggaguuucggggugc

SEQ ID NO: 1633647 - RNA, 19 nt, Artificial Sequence
  Description of Artificial Sequence: Synthetic oligonucleotide
gggguuccgggagaaaugc

SEQ ID NO: 1633648 - RNA, 19 nt, Artificial Sequence
  Description of Artificial Sequence: Synthetic oligonucleotide
ccaacccguacauccuucg

SEQ ID NO: 1633649 - RNA, 19 nt, Artificial Sequence
  Description of Artificial Sequence: Synthetic oligonucleotide
gcaguccagagaauccagg

SEQ ID NO: 1633650 - RNA, 19 nt, Artificial Sequence
  Description of Artificial Sequence: Synthetic oligonucleotide
guucuuguuuuaagugaga

SEQ ID NO: 1633651 - RNA, 19 nt, Artificial Sequence
  Description of Artificial Sequence: Synthetic oligonucleotide
caugacagcguaagauaua

SEQ ID NO: 1633652 - RNA, 19 nt, Artificial Sequence
  Description of Artificial Sequence: Synthetic oligonucleotide
agucuccaguuuucuugga

SEQ ID NO: 1633653 - RNA, 19 nt, Artificial Sequence
  Description of Artificial Sequence: Synthetic oligonucleotide
guagaacauucugcauagc

SEQ ID NO: 1633654 - RNA, 19 nt, Artificial Sequence
  Description of Artificial Sequence: Synthetic oligonucleotide
gaguaccggaggccucgag

SEQ ID NO: 1633655 - RNA, 19 nt, Artificial Sequence
  Description of Artificial Sequence: Synthetic oligonucleotide
gaguggaagagcucacuuu

SEQ ID NO: 1633656 - RNA, 19 nt, Artificial Sequence
  Description of Artificial Sequence: Synthetic oligonucleotide
uagcgaagucuguggucac

SEQ ID NO: 1633657 - RNA, 19 nt, Artificial Sequence
  Description of Artificial Sequence: Synthetic oligonucleotide
uaguuccgggccucucgga

SEQ ID NO: 1633658 - RNA, 19 nt, Artificial Sequence
  Description of Artificial Sequence: Synthetic oligonucleotide
caauguuagguagaggguu

SEQ ID NO: 1633659 - RNA, 19 nt, Artificial Sequence
  Description of Artificial Sequence: Synthetic oligonucleotide
uaccggaggccucgagggu

SEQ ID NO: 1633660 - RNA, 19 nt, Artificial Sequence
  Description of Artificial Sequence: Synthetic oligonucleotide
ccacagaacacucgguuca

SEQ ID NO: 1633661 - RNA, 19 nt, Artificial Sequence
  Description of Artificial Sequence: Synthetic oligonucleotide
gugcaaggugccaucguca

SEQ ID NO: 1633662 - RNA, 19 nt, Artificial Sequence
  Description of Artificial Sequence: Synthetic oligonucleotide
gcaacuggucugcagugga

SEQ ID NO: 1633663 - RNA, 19 nt, Artificial Sequence
  Description of Artificial Sequence: Synthetic oligonucleotide
cacguacuccgggaagggc

SEQ ID NO: 1633664 - RNA, 19 nt, Artificial Sequence
  Description of Artificial Sequence: Synthetic oligonucleotide
cuguggucacacagccaac

SEQ ID NO: 1633665 - RNA, 19 nt, Artificial Sequence
  Description of Artificial Sequence: Synthetic oligonucleotide
ggggaagcgcugauccucg

SEQ ID NO: 1633666 - RNA, 19 nt, Artificial Sequence
  Description of Artificial Sequence: Synthetic oligonucleotide
uugguacuccaggucuccu

SEQ ID NO: 1633667 - RNA, 19 nt, Artificial Sequence
  Description of Artificial Sequence: Synthetic oligonucleotide
caccucccggauaguguag

SEQ ID NO: 1633668 - RNA, 19 nt, Artificial Sequence
  Description of Artificial Sequence: Synthetic oligonucleotide
agugggcagcgaguaccgg

SEQ ID NO: 1633669 - RNA, 19 nt, Artificial Sequence
  Description of Artificial Sequence: Synthetic oligonucleotide
ggguugguacuccaggucu

SEQ ID NO: 1633670 - RNA, 19 nt, Artificial Sequence
  Description of Artificial Sequence: Synthetic oligonucleotide
ccuugugggagagucgcag

SEQ ID NO: 1633671 - RNA, 19 nt, Artificial Sequence
  Description of Artificial Sequence: Synthetic oligonucleotide
ggcagauggaaaccagaaa

SEQ ID NO: 1633672 - RNA, 19 nt, Artificial Sequence
  Description of Artificial Sequence: Synthetic oligonucleotide
ccgaaucucucugaccacc

SEQ ID NO: 1633673 - RNA, 19 nt, Artificial Sequence
  Description of Artificial Sequence: Synthetic oligonucleotide
agccaacccguacauccuu

SEQ ID NO: 1633674 - RNA, 19 nt, Artificial Sequence
  Description of Artificial Sequence: Synthetic oligonucleotide
gcauugggauuuaagcguc

SEQ ID NO: 1633675 - RNA, 19 nt, Artificial Sequence
  Description of Artificial Sequence: Synthetic oligonucleotide
agcgaagucuguggucaca

SEQ ID NO: 1633676 - RNA, 19 nt, Artificial Sequence
  Description of Artificial Sequence: Synthetic oligonucleotide
agaggaguuucggggugcu

SEQ ID NO: 1633677 - RNA, 19 nt, Artificial Sequence
  Description of Artificial Sequence: Synthetic oligonucleotide
uccagguucucaggccuau

SEQ ID NO: 1633678 - RNA, 19 nt, Artificial Sequence
  Description of Artificial Sequence: Synthetic oligonucleotide
gcgaguaccggaggccucg

SEQ ID NO: 1633679 - RNA, 19 nt, Artificial Sequence
  Description of Artificial Sequence: Synthetic oligonucleotide
ggcuggagaugucauucuc

SEQ ID NO: 1633680 - RNA, 19 nt, Artificial Sequence
  Description of Artificial Sequence: Synthetic oligonucleotide
gggguugguacuccagguc

SEQ ID NO: 1633681 - RNA, 19 nt, Artificial Sequence
  Description of Artificial Sequence: Synthetic oligonucleotide
gauauaguuccgggccucu

SEQ ID NO: 1633682 - RNA, 19 nt, Artificial Sequence
  Description of Artificial Sequence: Synthetic oligonucleotide
uuguucccacaaugcccac

SEQ ID NO: 1633683 - RNA, 19 nt, Artificial Sequence
  Description of Artificial Sequence: Synthetic oligonucleotide
ccguacauccuucgggaug

SEQ ID NO: 1633684 - RNA, 19 nt, Artificial Sequence
  Description of Artificial Sequence: Synthetic oligonucleotide
cccuuuaggagugggcagc

SEQ ID NO: 1633685 - RNA, 19 nt, Artificial Sequence
  Description of Artificial Sequence: Synthetic oligonucleotide
gucccucaagaaagccccg

SEQ ID NO: 1633686 - RNA, 19 nt, Artificial Sequence
  Description of Artificial Sequence: Synthetic oligonucleotide
aggguuccuccagaacaug

SEQ ID NO: 1633687 - RNA, 19 nt, Artificial Sequence
  Description of Artificial Sequence: Synthetic oligonucleotide
gcaaagggagacaccccag

SEQ ID NO: 1633688 - RNA, 19 nt, Artificial Sequence
  Description of Artificial Sequence: Synthetic oligonucleotide
uggaagcauugggauuuaa

SEQ ID NO: 1633689 - RNA, 19 nt, Artificial Sequence
  Description of Artificial Sequence: Synthetic oligonucleotide
agccccaucugaaguagaa

SEQ ID NO: 1633690 - RNA, 19 nt, Artificial Sequence
  Description of Artificial Sequence: Synthetic oligonucleotide
gugagacacuccaacaaau

SEQ ID NO: 1633691 - RNA, 19 nt, Artificial Sequence
  Description of Artificial Sequence: Synthetic oligonucleotide
auguagucaggggcaaaua

SEQ ID NO: 1633692 - RNA, 19 nt, Artificial Sequence
  Description of Artificial Sequence: Synthetic oligonucleotide
gcgucccucaagaaagccc

SEQ ID NO: 1633693 - RNA, 19 nt, Artificial Sequence
  Description of Artificial Sequence: Synthetic oligonucleotide
cccucaagaaagccccggc

SEQ ID NO: 1633694 - RNA, 19 nt, Artificial Sequence
  Description of Artificial Sequence: Synthetic oligonucleotide
agcgaguaccggaggccuc

SEQ ID NO: 1633695 - RNA, 19 nt, Artificial Sequence
  Description of Artificial Sequence: Synthetic oligonucleotide
ggggugcugaguggaagag

SEQ ID NO: 1633696 - RNA, 19 nt, Artificial Sequence
  Description of Artificial Sequence: Synthetic oligonucleotide
ggaucagcaugccguucac

SEQ ID NO: 1633697 - RNA, 19 nt, Artificial Sequence
  Description of Artificial Sequence: Synthetic oligonucleotide
ucggaucagcaugccguuc

SEQ ID NO: 1633698 - RNA, 19 nt, Artificial Sequence
  Description of Artificial Sequence: Synthetic oligonucleotide
caccccagcuauguaguca

SEQ ID NO: 1633699 - RNA, 19 nt, Artificial Sequence
  Description of Artificial Sequence: Synthetic oligonucleotide
gcagcgaguaccggaggcc

SEQ ID NO: 1633700 - RNA, 19 nt, Artificial Sequence
  Description of Artificial Sequence: Synthetic oligonucleotide
gcgaagucuguggucacac

SEQ ID NO: 1633701 - RNA, 19 nt, Artificial Sequence
  Description of Artificial Sequence: Synthetic oligonucleotide
gaggaguuucggggugcug

SEQ ID NO: 1633702 - RNA, 19 nt, Artificial Sequence
  Description of Artificial Sequence: Synthetic oligonucleotide
cgguucaugucugacguug

SEQ ID NO: 1633703 - RNA, 19 nt, Artificial Sequence
  Description of Artificial Sequence: Synthetic oligonucleotide
ugucccggaccugcagggu

SEQ ID NO: 1633704 - RNA, 19 nt, Artificial Sequence
  Description of Artificial Sequence: Synthetic oligonucleotide
ugccaucgucauugacagu

SEQ ID NO: 1633705 - RNA, 19 nt, Artificial Sequence
  Description of Artificial Sequence: Synthetic oligonucleotide
ggguuuaggcuuggagggc

SEQ ID NO: 1633706 - RNA, 19 nt, Artificial Sequence
  Description of Artificial Sequence: Synthetic oligonucleotide
ggccuaucagcuggguggc

SEQ ID NO: 1633707 - RNA, 19 nt, Artificial Sequence
  Description of Artificial Sequence: Synthetic oligonucleotide
gcucguagggcagcacugc

SEQ ID NO: 1633708 - RNA, 19 nt, Artificial Sequence
  Description of Artificial Sequence: Synthetic oligonucleotide
caguacgugcagccccauc

SEQ ID NO: 1633709 - RNA, 19 nt, Artificial Sequence
  Description of Artificial Sequence: Synthetic oligonucleotide
accggaggccucgaggguu

SEQ ID NO: 1633710 - RNA, 19 nt, Artificial Sequence
  Description of Artificial Sequence: Synthetic oligonucleotide
gcaccuugggguuccggga

SEQ ID NO: 1633711 - RNA, 19 nt, Artificial Sequence
  Description of Artificial Sequence: Synthetic oligonucleotide
cauugggauuuaagcgucu

SEQ ID NO: 1633712 - RNA, 19 nt, Artificial Sequence
  Description of Artificial Sequence: Synthetic oligonucleotide
acgugcagccccaucugaa

SEQ ID NO: 1633713 - RNA, 19 nt, Artificial Sequence
  Description of Artificial Sequence: Synthetic oligonucleotide
gcauagcgaagucuguggu

SEQ ID NO: 1633714 - RNA, 19 nt, Artificial Sequence
  Description of Artificial Sequence: Synthetic oligonucleotide
gaucagcaugccguucacu

SEQ ID NO: 1633715 - RNA, 19 nt, Artificial Sequence
  Description of Artificial Sequence: Synthetic oligonucleotide
cgggagaaaugcaugugca

SEQ ID NO: 1633716 - RNA, 19 nt, Artificial Sequence
  Description of Artificial Sequence: Synthetic oligonucleotide
ccugcgcguggccuugucc

SEQ ID NO: 1633717 - RNA, 19 nt, Artificial Sequence
  Description of Artificial Sequence: Synthetic oligonucleotide
ccaugacagcguaagauau

SEQ ID NO: 1633718 - RNA, 19 nt, Artificial Sequence
  Description of Artificial Sequence: Synthetic oligonucleotide
cacagccaacccguacauc

SEQ ID NO: 1633719 - RNA, 19 nt, Artificial Sequence
  Description of Artificial Sequence: Synthetic oligonucleotide
ggccucgaggguucagcac

SEQ ID NO: 1633720 - RNA, 19 nt, Artificial Sequence
  Description of Artificial Sequence: Synthetic oligonucleotide
cuuuaggagugggcagcga

SEQ ID NO: 1633721 - RNA, 19 nt, Artificial Sequence
  Description of Artificial Sequence: Synthetic oligonucleotide
gguuccgggagaaaugcau

SEQ ID NO: 1633722 - RNA, 19 nt, Artificial Sequence
  Description of Artificial Sequence: Synthetic oligonucleotide
agcaugccguucacugcca

SEQ ID NO: 1633723 - RNA, 19 nt, Artificial Sequence
  Description of Artificial Sequence: Synthetic oligonucleotide
cagccaugacagcguaaga

SEQ ID NO: 1633724 - RNA, 19 nt, Artificial Sequence
  Description of Artificial Sequence: Synthetic oligonucleotide
gggguagucuccaguuuuc

SEQ ID NO: 1633725 - RNA, 19 nt, Artificial Sequence
  Description of Artificial Sequence: Synthetic oligonucleotide
ccaaggugcugucccggac

SEQ ID NO: 1633726 - RNA, 19 nt, Artificial Sequence
  Description of Artificial Sequence: Synthetic oligonucleotide
cagauaccuucuucagggu

SEQ ID NO: 1633727 - RNA, 19 nt, Artificial Sequence
  Description of Artificial Sequence: Synthetic oligonucleotide
caugccguucacugccagu

SEQ ID NO: 1633728 - RNA, 19 nt, Artificial Sequence
  Description of Artificial Sequence: Synthetic oligonucleotide
ccaucgucauugacaguca

SEQ ID NO: 1633729 - RNA, 19 nt, Artificial Sequence
  Description of Artificial Sequence: Synthetic oligonucleotide
cccgaaucucucugaccac

SEQ ID NO: 1633730 - RNA, 19 nt, Artificial Sequence
  Description of Artificial Sequence: Synthetic oligonucleotide
gcugggguagucuccaguu

SEQ ID NO: 1633731 - RNA, 19 nt, Artificial Sequence
  Description of Artificial Sequence: Synthetic oligonucleotide
gccccaucugaaguagaac

SEQ ID NO: 1633732 - RNA, 19 nt, Artificial Sequence
  Description of Artificial Sequence: Synthetic oligonucleotide
ccacaacgugcuccacggg

SEQ ID NO: 1633733 - RNA, 19 nt, Artificial Sequence
  Description of Artificial Sequence: Synthetic oligonucleotide
gcaaucugcuuugccuaca

SEQ ID NO: 1633734 - RNA, 19 nt, Artificial Sequence
  Description of Artificial Sequence: Synthetic oligonucleotide
gugcugaguggaagagcuc

SEQ ID NO: 1633735 - RNA, 19 nt, Artificial Sequence
  Description of Artificial Sequence: Synthetic oligonucleotide
cggaucagcaugccguuca

SEQ ID NO: 1633736 - RNA, 19 nt, Artificial Sequence
  Description of Artificial Sequence: Synthetic oligonucleotide
agcagccaugacagcguaa

SEQ ID NO: 1633737 - RNA, 19 nt, Artificial Sequence
  Description of Artificial Sequence: Synthetic oligonucleotide
ccgcacguacuccgggaag

SEQ ID NO: 1633738 - RNA, 19 nt, Artificial Sequence
  Description of Artificial Sequence: Synthetic oligonucleotide
ggaagcgcugauccucggu

SEQ ID NO: 1633739 - RNA, 19 nt, Artificial Sequence
  Description of Artificial Sequence: Synthetic oligonucleotide
agccgccugcgcguggccu

SEQ ID NO: 1633740 - RNA, 19 nt, Artificial Sequence
  Description of Artificial Sequence: Synthetic oligonucleotide
caggucuccugagcagcca

SEQ ID NO: 1633741 - RNA, 19 nt, Artificial Sequence
  Description of Artificial Sequence: Synthetic oligonucleotide
gaguuucggggugcugagu

SEQ ID NO: 1633742 - RNA, 19 nt, Artificial Sequence
  Description of Artificial Sequence: Synthetic oligonucleotide
gccaguacgugcagcccca

SEQ ID NO: 1633743 - RNA, 19 nt, Artificial Sequence
  Description of Artificial Sequence: Synthetic oligonucleotide
gcgucagccacaacgugcu

SEQ ID NO: 1633744 - RNA, 19 nt, Artificial Sequence
  Description of Artificial Sequence: Synthetic oligonucleotide
cagcgaguaccggaggccu

SEQ ID NO: 1633745 - RNA, 19 nt, Artificial Sequence
  Description of Artificial Sequence: Synthetic oligonucleotide
gguucaugucugacguugu

SEQ ID NO: 1633746 - RNA, 19 nt, Artificial Sequence
  Description of Artificial Sequence: Synthetic oligonucleotide
cagcggcgcgucccucaag

SEQ ID NO: 1633747 - RNA, 19 nt, Artificial Sequence
  Description of Artificial Sequence: Synthetic oligonucleotide
gucacacagccaacccgua

SEQ ID NO: 1633748 - RNA, 19 nt, Artificial Sequence
  Description of Artificial Sequence: Synthetic oligonucleotide
cguucacugccaguacgug

SEQ ID NO: 1633749 - RNA, 19 nt, Artificial Sequence
  Description of Artificial Sequence: Synthetic oligonucleotide
ccggaggccucgaggguuc

SEQ ID NO: 1633750 - RNA, 19 nt, Artificial Sequence
  Description of Artificial Sequence: Synthetic oligonucleotide
gagcucacuuuaaccuuuu

SEQ ID NO: 1633751 - RNA, 19 nt, Artificial Sequence
  Description of Artificial Sequence: Synthetic oligonucleotide
cugggguagucuccaguuu

SEQ ID NO: 1633752 - RNA, 19 nt, Artificial Sequence
  Description of Artificial Sequence: Synthetic oligonucleotide
ccguucacugccaguacgu

SEQ ID NO: 1633753 - RNA, 19 nt, Artificial Sequence
  Description of Artificial Sequence: Synthetic oligonucleotide
ggguagucuccaguuuucu

SEQ ID NO: 1633754 - RNA, 19 nt, Artificial Sequence
  Description of Artificial Sequence: Synthetic oligonucleotide
cgcgucccucaagaaagcc

SEQ ID NO: 1633755 - RNA, 19 nt, Artificial Sequence
  Description of Artificial Sequence: Synthetic oligonucleotide
agccccggcgucagccaca

SEQ ID NO: 1633756 - RNA, 19 nt, Artificial Sequence
  Description of Artificial Sequence: Synthetic oligonucleotide
ccuugucccgaaucucucu

SEQ ID NO: 1633757 - RNA, 19 nt, Artificial Sequence
  Description of Artificial Sequence: Synthetic oligonucleotide
cggggugcugaguggaaga

SEQ ID NO: 1633758 - RNA, 19 nt, Artificial Sequence
  Description of Artificial Sequence: Synthetic oligonucleotide
ccuugaaccgcagcucgua

SEQ ID NO: 1633759 - RNA, 19 nt, Artificial Sequence
  Description of Artificial Sequence: Synthetic oligonucleotide
ccggcgucagccacaacgu

SEQ ID NO: 1633760 - RNA, 19 nt, Artificial Sequence
  Description of Artificial Sequence: Synthetic oligonucleotide
gcuugcaaugucaccuuuu

SEQ ID NO: 1633761 - RNA, 19 nt, Artificial Sequence
  Description of Artificial Sequence: Synthetic oligonucleotide
ccgggaagggcuccuugaa

SEQ ID NO: 1633762 - RNA, 19 nt, Artificial Sequence
  Description of Artificial Sequence: Synthetic oligonucleotide
ccaucugaaguagaacauu

SEQ ID NO: 1633763 - RNA, 19 nt, Artificial Sequence
  Description of Artificial Sequence: Synthetic oligonucleotide
cggauaguguagauguuuu

SEQ ID NO: 1633764 - RNA, 19 nt, Artificial Sequence
  Description of Artificial Sequence: Synthetic oligonucleotide
gccuaucagcuggguggcc

SEQ ID NO: 1633765 - RNA, 19 nt, Artificial Sequence
  Description of Artificial Sequence: Synthetic oligonucleotide
cgggccucucggaucagca

SEQ ID NO: 1633766 - RNA, 19 nt, Artificial Sequence
  Description of Artificial Sequence: Synthetic oligonucleotide
ccggauaguguagauguuu

SEQ ID NO: 1633767 - RNA, 19 nt, Artificial Sequence
  Description of Artificial Sequence: Synthetic oligonucleotide
cucugaccaccucccggau

SEQ ID NO: 1633768 - RNA, 19 nt, Artificial Sequence
  Description of Artificial Sequence: Synthetic oligonucleotide
gcagcggcgcgucccucaa

SEQ ID NO: 1633769 - RNA, 19 nt, Artificial Sequence
  Description of Artificial Sequence: Synthetic oligonucleotide
gcgucuccgcccagcuccc

SEQ ID NO: 1633770 - RNA, 19 nt, Artificial Sequence
  Description of Artificial Sequence: Synthetic oligonucleotide
cccuucugucaaucagcaa

SEQ ID NO: 1633771 - RNA, 19 nt, Artificial Sequence
  Description of Artificial Sequence: Synthetic oligonucleotide
cugcagcggcgcgucccuc

SEQ ID NO: 1633772 - RNA, 19 nt, Artificial Sequence
  Description of Artificial Sequence: Synthetic oligonucleotide
cggcgucagccacaacgug

SEQ ID NO: 1633773 - RNA, 19 nt, Artificial Sequence
  Description of Artificial Sequence: Synthetic oligonucleotide
gcgcugauccucggucaga

SEQ ID NO: 1633774 - RNA, 19 nt, Artificial Sequence
  Description of Artificial Sequence: Synthetic oligonucleotide
gcaaggugccaucgucauu

SEQ ID NO: 1633775 - RNA, 19 nt, Artificial Sequence
  Description of Artificial Sequence: Synthetic oligonucleotide
cccggaccugcaggguggc

SEQ ID NO: 1633776 - RNA, 19 nt, Artificial Sequence
  Description of Artificial Sequence: Synthetic oligonucleotide
cggcgcgucccucaagaaa

SEQ ID NO: 1633777 - RNA, 19 nt, Artificial Sequence
  Description of Artificial Sequence: Synthetic oligonucleotide
gcgcguggccuugucccga

SEQ ID NO: 1633778 - RNA, 19 nt, Artificial Sequence
  Description of Artificial Sequence: Synthetic oligonucleotide
gccugcgcguggccuuguc

SEQ ID NO: 1633779 - RNA, 19 nt, Artificial Sequence
  Description of Artificial Sequence: Synthetic oligonucleotide
cacgggcgccauguuggcu

SEQ ID NO: 1633780 - RNA, 19 nt, Artificial Sequence
  Description of Artificial Sequence: Synthetic oligonucleotide
ccaggggcacugcuucugu

SEQ ID NO: 1633781 - RNA, 19 nt, Artificial Sequence
  Description of Artificial Sequence: Synthetic oligonucleotide
cccguacauccuucgggau

SEQ ID NO: 1633782 - RNA, 19 nt, Artificial Sequence
  Description of Artificial Sequence: Synthetic oligonucleotide
gccccggcgucagccacaa

SEQ ID NO: 1633783 - RNA, 19 nt, Artificial Sequence
  Description of Artificial Sequence: Synthetic oligonucleotide
ccgccugcgcguggccuug

SEQ ID NO: 1633784 - RNA, 19 nt, Artificial Sequence
  Description of Artificial Sequence: Synthetic oligonucleotide
cccggauaguguagauguu

SEQ ID NO: 1633785 - RNA, 19 nt, Artificial Sequence
  Description of Artificial Sequence: Synthetic oligonucleotide
gccgccugcgcguggccuu

SEQ ID NO: 1633786 - RNA, 19 nt, Artificial Sequence
  Description of Artificial Sequence: Synthetic oligonucleotide
cgcugauccucggucagau

SEQ ID NO: 1633787 - RNA, 19 nt, Artificial Sequence
  Description of Artificial Sequence: Synthetic oligonucleotide
cgaguaccggaggccucga

SEQ ID NO: 1633788 - RNA, 19 nt, Artificial Sequence
  Description of Artificial Sequence: Synthetic oligonucleotide
gcguggccuugucccgaau

SEQ ID NO: 1633789 - RNA, 19 nt, Artificial Sequence
  Description of Artificial Sequence: Synthetic oligonucleotide
ccccggcgucagccacaac

SEQ ID NO: 1633790 - RNA, 19 nt, Artificial Sequence
  Description of Artificial Sequence: Synthetic oligonucleotide
ccaguacgugcagccccau

SEQ ID NO: 1633791 - RNA, 19 nt, Artificial Sequence
  Description of Artificial Sequence: Synthetic oligonucleotide
ccggaccugcaggguggcu

SEQ ID NO: 1633792 - RNA, 19 nt, Artificial Sequence
  Description of Artificial Sequence: Synthetic oligonucleotide
cgugcuccacgggcgccau

SEQ ID NO: 1633793 - RNA, 19 nt, Artificial Sequence
  Description of Artificial Sequence: Synthetic oligonucleotide
cgccugcgcguggccuugu

SEQ ID NO: 1633794 - RNA, 19 nt, Artificial Sequence
  Description of Artificial Sequence: Synthetic oligonucleotide
aaucuauuaauaaugagcc

SEQ ID NO: 1633795 - RNA, 19 nt, Artificial Sequence
  Description of Artificial Sequence: Synthetic oligonucleotide
aagauucauagcuucagcg

SEQ ID NO: 1633796 - RNA, 19 nt, Artificial Sequence
  Description of Artificial Sequence: Synthetic oligonucleotide
aguauaucacauuggagcc

SEQ ID NO: 1633797 - RNA, 19 nt, Artificial Sequence
  Description of Artificial Sequence: Synthetic oligonucleotide
uauaguuagaauaauguaa

SEQ ID NO: 1633798 - RNA, 19 nt, Artificial Sequence
  Description of Artificial Sequence: Synthetic oligonucleotide
uagaauaauguaauaauug

SEQ ID NO: 1633799 - RNA, 19 nt, Artificial Sequence
  Description of Artificial Sequence: Synthetic oligonucleotide
aauaauaugacuauaguua

SEQ ID NO: 1633800 - RNA, 19 nt, Artificial Sequence
  Description of Artificial Sequence: Synthetic oligonucleotide
aaauacagaagcaaguagg

SEQ ID NO: 1633801 - RNA, 19 nt, Artificial Sequence
  Description of Artificial Sequence: Synthetic oligonucleotide
caguauaucacauuggagc

SEQ ID NO: 1633802 - RNA, 19 nt, Artificial Sequence
  Description of Artificial Sequence: Synthetic oligonucleotide
aauaccggagaccggaggc

SEQ ID NO: 1633803 - RNA, 19 nt, Artificial Sequence
  Description of Artificial Sequence: Synthetic oligonucleotide
auugugauaauccugucag

SEQ ID NO: 1633804 - RNA, 19 nt, Artificial Sequence
  Description of Artificial Sequence: Synthetic oligonucleotide
aauaaugagccuuucuuca

SEQ ID NO: 1633805 - RNA, 19 nt, Artificial Sequence
  Description of Artificial Sequence: Synthetic oligonucleotide
aaauaauaugacuauaguu

SEQ ID NO: 1633806 - RNA, 19 nt, Artificial Sequence
  Description of Artificial Sequence: Synthetic oligonucleotide
guaauaauugucuaaagga

SEQ ID NO: 1633807 - RNA, 19 nt, Artificial Sequence
  Description of Artificial Sequence: Synthetic oligonucleotide
auaauaugacuauaguuag

SEQ ID NO: 1633808 - RNA, 19 nt, Artificial Sequence
  Description of Artificial Sequence: Synthetic oligonucleotide
uccaaucauacuuauagcc

SEQ ID NO: 1633809 - RNA, 19 nt, Artificial Sequence
  Description of Artificial Sequence: Synthetic oligonucleotide
aagccauggaccuagaaca

SEQ ID NO: 1633810 - RNA, 19 nt, Artificial Sequence
  Description of Artificial Sequence: Synthetic oligonucleotide
agucuuagaagccauggac

SEQ ID NO: 1633811 - RNA, 19 nt, Artificial Sequence
  Description of Artificial Sequence: Synthetic oligonucleotide
uauguaguaagaauauaca

SEQ ID NO: 1633812 - RNA, 19 nt, Artificial Sequence
  Description of Artificial Sequence: Synthetic oligonucleotide
cauauucaggauuuuagcc

SEQ ID NO: 1633813 - RNA, 19 nt, Artificial Sequence
  Description of Artificial Sequence: Synthetic oligonucleotide
uaauaauugucuaaaggaa

SEQ ID NO: 1633814 - RNA, 19 nt, Artificial Sequence
  Description of Artificial Sequence: Synthetic oligonucleotide
guaguaagaauauacagga

SEQ ID NO: 1633815 - RNA, 19 nt, Artificial Sequence
  Description of Artificial Sequence: Synthetic oligonucleotide
uuaauaaugagccuuucuu

SEQ ID NO: 1633816 - RNA, 19 nt, Artificial Sequence
  Description of Artificial Sequence: Synthetic oligonucleotide
uaaacuucuacugaauuca

SEQ ID NO: 1633817 - RNA, 19 nt, Artificial Sequence
  Description of Artificial Sequence: Synthetic oligonucleotide
cuggaaucuauuaauaaug

SEQ ID NO: 1633818 - RNA, 19 nt, Artificial Sequence
  Description of Artificial Sequence: Synthetic oligonucleotide
accaacaucguccugagcu

SEQ ID NO: 1633819 - RNA, 19 nt, Artificial Sequence
  Description of Artificial Sequence: Synthetic oligonucleotide
accuagaacacaccgcugc

SEQ ID NO: 1633820 - RNA, 19 nt, Artificial Sequence
  Description of Artificial Sequence: Synthetic oligonucleotide
gaaauaucaucauuggcuc

SEQ ID NO: 1633821 - RNA, 19 nt, Artificial Sequence
  Description of Artificial Sequence: Synthetic oligonucleotide
uauuagaugagggaacucc

SEQ ID NO: 1633822 - RNA, 19 nt, Artificial Sequence
  Description of Artificial Sequence: Synthetic oligonucleotide
ucuugaaacuccuugcaug

SEQ ID NO: 1633823 - RNA, 19 nt, Artificial Sequence
  Description of Artificial Sequence: Synthetic oligonucleotide
agagaaugaguggauagcc

SEQ ID NO: 1633824 - RNA, 19 nt, Artificial Sequence
  Description of Artificial Sequence: Synthetic oligonucleotide
cuuccuagaagaauugggc

SEQ ID NO: 1633825 - RNA, 19 nt, Artificial Sequence
  Description of Artificial Sequence: Synthetic oligonucleotide
cuugguaguuauuagauga

SEQ ID NO: 1633826 - RNA, 19 nt, Artificial Sequence
  Description of Artificial Sequence: Synthetic oligonucleotide
cugauuccaagauucauag

SEQ ID NO: 1633827 - RNA, 19 nt, Artificial Sequence
  Description of Artificial Sequence: Synthetic oligonucleotide
cacacuaagacacuguaac

SEQ ID NO: 1633828 - RNA, 19 nt, Artificial Sequence
  Description of Artificial Sequence: Synthetic oligonucleotide
guagaaucccauuugcucc

SEQ ID NO: 1633829 - RNA, 19 nt, Artificial Sequence
  Description of Artificial Sequence: Synthetic oligonucleotide
aguccaaugaacccaacug

SEQ ID NO: 1633830 - RNA, 19 nt, Artificial Sequence
  Description of Artificial Sequence: Synthetic oligonucleotide
uggaaucuauuaauaauga

SEQ ID NO: 1633831 - RNA, 19 nt, Artificial Sequence
  Description of Artificial Sequence: Synthetic oligonucleotide
uguagaaucccauuugcuc

SEQ ID NO: 1633832 - RNA, 19 nt, Artificial Sequence
  Description of Artificial Sequence: Synthetic oligonucleotide
ucuauuaauaaugagccuu

SEQ ID NO: 1633833 - RNA, 19 nt, Artificial Sequence
  Description of Artificial Sequence: Synthetic oligonucleotide
gaaggaucaauaguacugg

SEQ ID NO: 1633834 - RNA, 19 nt, Artificial Sequence
  Description of Artificial Sequence: Synthetic oligonucleotide
acuauaguuagaauaaugu

SEQ ID NO: 1633835 - RNA, 19 nt, Artificial Sequence
  Description of Artificial Sequence: Synthetic oligonucleotide
aauugucuaaaggaaauau

SEQ ID NO: 1633836 - RNA, 19 nt, Artificial Sequence
  Description of Artificial Sequence: Synthetic oligonucleotide
ugaccugauuccaagauuc

SEQ ID NO: 1633837 - RNA, 19 nt, Artificial Sequence
  Description of Artificial Sequence: Synthetic oligonucleotide
agaauaaacuucuacugaa

SEQ ID NO: 1633838 - RNA, 19 nt, Artificial Sequence
  Description of Artificial Sequence: Synthetic oligonucleotide
aauaauugucuaaaggaaa

SEQ ID NO: 1633839 - RNA, 19 nt, Artificial Sequence
  Description of Artificial Sequence: Synthetic oligonucleotide
auaaugagccuuucuucac

SEQ ID NO: 1633840 - RNA, 19 nt, Artificial Sequence
  Description of Artificial Sequence: Synthetic oligonucleotide
auggaccuagaacacaccg

SEQ ID NO: 1633841 - RNA, 19 nt, Artificial Sequence
  Description of Artificial Sequence: Synthetic oligonucleotide
auuaauaaugagccuuucu

SEQ ID NO: 1633842 - RNA, 19 nt, Artificial Sequence
  Description of Artificial Sequence: Synthetic oligonucleotide
aguuauuagaugagggaac

SEQ ID NO: 1633843 - RNA, 19 nt, Artificial Sequence
  Description of Artificial Sequence: Synthetic oligonucleotide
aguuagaauaauguaauaa

SEQ ID NO: 1633844 - RNA, 19 nt, Artificial Sequence
  Description of Artificial Sequence: Synthetic oligonucleotide
cacuggaccaacaucgucc

SEQ ID NO: 1633845 - RNA, 19 nt, Artificial Sequence
  Description of Artificial Sequence: Synthetic oligonucleotide
aacagcucccauuuucuca

SEQ ID NO: 1633846 - RNA, 19 nt, Artificial Sequence
  Description of Artificial Sequence: Synthetic oligonucleotide
uugguaguuauuagaugag

SEQ ID NO: 1633847 - RNA, 19 nt, Artificial Sequence
  Description of Artificial Sequence: Synthetic oligonucleotide
uuuagccaacaauuuuggg

SEQ ID NO: 1633848 - RNA, 19 nt, Artificial Sequence
  Description of Artificial Sequence: Synthetic oligonucleotide
agaucuuugcagccugccc

SEQ ID NO: 1633849 - RNA, 19 nt, Artificial Sequence
  Description of Artificial Sequence: Synthetic oligonucleotide
auguaagguuuccagacug

SEQ ID NO: 1633850 - RNA, 19 nt, Artificial Sequence
  Description of Artificial Sequence: Synthetic oligonucleotide
uguccagagggcaaaucag

SEQ ID NO: 1633851 - RNA, 19 nt, Artificial Sequence
  Description of Artificial Sequence: Synthetic oligonucleotide
gucuaaaggaaauaucauc

SEQ ID NO: 1633852 - RNA, 19 nt, Artificial Sequence
  Description of Artificial Sequence: Synthetic oligonucleotide
uaguuauuagaugagggaa

SEQ ID NO: 1633853 - RNA, 19 nt, Artificial Sequence
  Description of Artificial Sequence: Synthetic oligonucleotide
acagacgagaagucuuucg

SEQ ID NO: 1633854 - RNA, 19 nt, Artificial Sequence
  Description of Artificial Sequence: Synthetic oligonucleotide
gacuauaguuagaauaaug

SEQ ID NO: 1633855 - RNA, 19 nt, Artificial Sequence
  Description of Artificial Sequence: Synthetic oligonucleotide
auaguuagaauaauguaau

SEQ ID NO: 1633856 - RNA, 19 nt, Artificial Sequence
  Description of Artificial Sequence: Synthetic oligonucleotide
gguaguuauuagaugaggg

SEQ ID NO: 1633857 - RNA, 19 nt, Artificial Sequence
  Description of Artificial Sequence: Synthetic oligonucleotide
ucuuucguugaguagcccu

SEQ ID NO: 1633858 - RNA, 19 nt, Artificial Sequence
  Description of Artificial Sequence: Synthetic oligonucleotide
ugguaguuauuagaugagg

SEQ ID NO: 1633859 - RNA, 19 nt, Artificial Sequence
  Description of Artificial Sequence: Synthetic oligonucleotide
aaucccauuugcuccagaa

SEQ ID NO: 1633860 - RNA, 19 nt, Artificial Sequence
  Description of Artificial Sequence: Synthetic oligonucleotide
uuccuagaagaauugggcu

SEQ ID NO: 1633861 - RNA, 19 nt, Artificial Sequence
  Description of Artificial Sequence: Synthetic oligonucleotide
ugucuaaaggaaauaucau

SEQ ID NO: 1633862 - RNA, 19 nt, Artificial Sequence
  Description of Artificial Sequence: Synthetic oligonucleotide
gaucuuugcagccugccca

SEQ ID NO: 1633863 - RNA, 19 nt, Artificial Sequence
  Description of Artificial Sequence: Synthetic oligonucleotide
guaguuauuagaugaggga

SEQ ID NO: 1633864 - RNA, 19 nt, Artificial Sequence
  Description of Artificial Sequence: Synthetic oligonucleotide
ucguccugagcucauauuc

SEQ ID NO: 1633865 - RNA, 19 nt, Artificial Sequence
  Description of Artificial Sequence: Synthetic oligonucleotide
aguguggaaagcuguaaca

SEQ ID NO: 1633866 - RNA, 19 nt, Artificial Sequence
  Description of Artificial Sequence: Synthetic oligonucleotide
guuagaauaauguaauaau

SEQ ID NO: 1633867 - RNA, 19 nt, Artificial Sequence
  Description of Artificial Sequence: Synthetic oligonucleotide
caucaccccagguacaggg

SEQ ID NO: 1633868 - RNA, 19 nt, Artificial Sequence
  Description of Artificial Sequence: Synthetic oligonucleotide
gaagucuuucguugaguag

SEQ ID NO: 1633869 - RNA, 19 nt, Artificial Sequence
  Description of Artificial Sequence: Synthetic oligonucleotide
agcuucagcgguuccaauc

SEQ ID NO: 1633870 - RNA, 19 nt, Artificial Sequence
  Description of Artificial Sequence: Synthetic oligonucleotide
aagacgcuaccuguucacc

SEQ ID NO: 1633871 - RNA, 19 nt, Artificial Sequence
  Description of Artificial Sequence: Synthetic oligonucleotide
ucauacuuauagccagcag

SEQ ID NO: 1633872 - RNA, 19 nt, Artificial Sequence
  Description of Artificial Sequence: Synthetic oligonucleotide
aagcaaguagguugagugu

SEQ ID NO: 1633873 - RNA, 19 nt, Artificial Sequence
  Description of Artificial Sequence: Synthetic oligonucleotide
uccuagaagaauugggcuc

SEQ ID NO: 1633874 - RNA, 19 nt, Artificial Sequence
  Description of Artificial Sequence: Synthetic oligonucleotide
uaaugagccuuucuucacu

SEQ ID NO: 1633875 - RNA, 19 nt, Artificial Sequence
  Description of Artificial Sequence: Synthetic oligonucleotide
accgcugcaaggcuggcgg

SEQ ID NO: 1633876 - RNA, 19 nt, Artificial Sequence
  Description of Artificial Sequence: Synthetic oligonucleotide
ucaagcccugaccugauuc

SEQ ID NO: 1633877 - RNA, 19 nt, Artificial Sequence
  Description of Artificial Sequence: Synthetic oligonucleotide
auguccagagggcaaauca

SEQ ID NO: 1633878 - RNA, 19 nt, Artificial Sequence
  Description of Artificial Sequence: Synthetic oligonucleotide
uacuggaacacagacgaga

SEQ ID NO: 1633879 - RNA, 19 nt, Artificial Sequence
  Description of Artificial Sequence: Synthetic oligonucleotide
ggagcauccaugaaaacag

SEQ ID NO: 1633880 - RNA, 19 nt, Artificial Sequence
  Description of Artificial Sequence: Synthetic oligonucleotide
aggauuuuagccaacaauu

SEQ ID NO: 1633881 - RNA, 19 nt, Artificial Sequence
  Description of Artificial Sequence: Synthetic oligonucleotide
auacuuauagccagcagca

SEQ ID NO: 1633882 - RNA, 19 nt, Artificial Sequence
  Description of Artificial Sequence: Synthetic oligonucleotide
ugaguggauagccauguuu

SEQ ID NO: 1633883 - RNA, 19 nt, Artificial Sequence
  Description of Artificial Sequence: Synthetic oligonucleotide
agaacacaccgcugcaagg

SEQ ID NO: 1633884 - RNA, 19 nt, Artificial Sequence
  Description of Artificial Sequence: Synthetic oligonucleotide
agaaacaggagcauccaug

SEQ ID NO: 1633885 - RNA, 19 nt, Artificial Sequence
  Description of Artificial Sequence: Synthetic oligonucleotide
ucagcuacgucugcugggg

SEQ ID NO: 1633886 - RNA, 19 nt, Artificial Sequence
  Description of Artificial Sequence: Synthetic oligonucleotide
uccaauaccggagaccgga

SEQ ID NO: 1633887 - RNA, 19 nt, Artificial Sequence
  Description of Artificial Sequence: Synthetic oligonucleotide
ucaaaauaauaugacuaua

SEQ ID NO: 1633888 - RNA, 19 nt, Artificial Sequence
  Description of Artificial Sequence: Synthetic oligonucleotide
agcauugugauaauccugu

SEQ ID NO: 1633889 - RNA, 19 nt, Artificial Sequence
  Description of Artificial Sequence: Synthetic oligonucleotide
uucgccaugaguguuguuc

SEQ ID NO: 1633890 - RNA, 19 nt, Artificial Sequence
  Description of Artificial Sequence: Synthetic oligonucleotide
auaauugucuaaaggaaau

SEQ ID NO: 1633891 - RNA, 19 nt, Artificial Sequence
  Description of Artificial Sequence: Synthetic oligonucleotide
agauacuggaacacagacg

SEQ ID NO: 1633892 - RNA, 19 nt, Artificial Sequence
  Description of Artificial Sequence: Synthetic oligonucleotide
uuggauuccccauguuucc

SEQ ID NO: 1633893 - RNA, 19 nt, Artificial Sequence
  Description of Artificial Sequence: Synthetic oligonucleotide
uaaagaugucauucuucug

SEQ ID NO: 1633894 - RNA, 19 nt, Artificial Sequence
  Description of Artificial Sequence: Synthetic oligonucleotide
ugcagaucuuugcagccug

SEQ ID NO: 1633895 - RNA, 19 nt, Artificial Sequence
  Description of Artificial Sequence: Synthetic oligonucleotide
gaguggauagccauguuuc

SEQ ID NO: 1633896 - RNA, 19 nt, Artificial Sequence
  Description of Artificial Sequence: Synthetic oligonucleotide
aaugagccuuucuucacuu

SEQ ID NO: 1633897 - RNA, 19 nt, Artificial Sequence
  Description of Artificial Sequence: Synthetic oligonucleotide
agcaaguagguugagugug

SEQ ID NO: 1633898 - RNA, 19 nt, Artificial Sequence
  Description of Artificial Sequence: Synthetic oligonucleotide
uucguugaguagcccuugg

SEQ ID NO: 1633899 - RNA, 19 nt, Artificial Sequence
  Description of Artificial Sequence: Synthetic oligonucleotide
gaacacaccgcugcaaggc

SEQ ID NO: 1633900 - RNA, 19 nt, Artificial Sequence
  Description of Artificial Sequence: Synthetic oligonucleotide
gacgcuaccuguucaccag

SEQ ID NO: 1633901 - RNA, 19 nt, Artificial Sequence
  Description of Artificial Sequence: Synthetic oligonucleotide
gaggggcacacuaagacac

SEQ ID NO: 1633902 - RNA, 19 nt, Artificial Sequence
  Description of Artificial Sequence: Synthetic oligonucleotide
cuauaguuagaauaaugua

SEQ ID NO: 1633903 - RNA, 19 nt, Artificial Sequence
  Description of Artificial Sequence: Synthetic oligonucleotide
aucuauuaauaaugagccu

SEQ ID NO: 1633904 - RNA, 19 nt, Artificial Sequence
  Description of Artificial Sequence: Synthetic oligonucleotide
agucuuucguugaguagcc

SEQ ID NO: 1633905 - RNA, 19 nt, Artificial Sequence
  Description of Artificial Sequence: Synthetic oligonucleotide
cauuggagcccaugcaccc

SEQ ID NO: 1633906 - RNA, 19 nt, Artificial Sequence
  Description of Artificial Sequence: Synthetic oligonucleotide
gaauucauacuggugggca

SEQ ID NO: 1633907 - RNA, 19 nt, Artificial Sequence
  Description of Artificial Sequence: Synthetic oligonucleotide
gggaacuccauccaucacc

SEQ ID NO: 1633908 - RNA, 19 nt, Artificial Sequence
  Description of Artificial Sequence: Synthetic oligonucleotide
ucgccaugaguguuguucc

SEQ ID NO: 1633909 - RNA, 19 nt, Artificial Sequence
  Description of Artificial Sequence: Synthetic oligonucleotide
acacuaagacacuguaaca

SEQ ID NO: 1633910 - RNA, 19 nt, Artificial Sequence
  Description of Artificial Sequence: Synthetic oligonucleotide
uacaggguuguaaguguca

SEQ ID NO: 1633911 - RNA, 19 nt, Artificial Sequence
  Description of Artificial Sequence: Synthetic oligonucleotide
ugaauucauacuggugggc

SEQ ID NO: 1633912 - RNA, 19 nt, Artificial Sequence
  Description of Artificial Sequence: Synthetic oligonucleotide
cuaccuguucaccagcuuc

SEQ ID NO: 1633913 - RNA, 19 nt, Artificial Sequence
  Description of Artificial Sequence: Synthetic oligonucleotide
gaagacgcuaccuguucac

SEQ ID NO: 1633914 - RNA, 19 nt, Artificial Sequence
  Description of Artificial Sequence: Synthetic oligonucleotide
aacacaccgcugcaaggcu

SEQ ID NO: 1633915 - RNA, 19 nt, Artificial Sequence
  Description of Artificial Sequence: Synthetic oligonucleotide
cauuggcucugaaacaguc

SEQ ID NO: 1633916 - RNA, 19 nt, Artificial Sequence
  Description of Artificial Sequence: Synthetic oligonucleotide
ucugguucccaagugucca

SEQ ID NO: 1633917 - RNA, 19 nt, Artificial Sequence
  Description of Artificial Sequence: Synthetic oligonucleotide
agguacaggguuguaagug

SEQ ID NO: 1633918 - RNA, 19 nt, Artificial Sequence
  Description of Artificial Sequence: Synthetic oligonucleotide
gaugagggaacuccaucca

SEQ ID NO: 1633919 - RNA, 19 nt, Artificial Sequence
  Description of Artificial Sequence: Synthetic oligonucleotide
gagggaacuccauccauca

SEQ ID NO: 1633920 - RNA, 19 nt, Artificial Sequence
  Description of Artificial Sequence: Synthetic oligonucleotide
uugugauaauccugucagc

SEQ ID NO: 1633921 - RNA, 19 nt, Artificial Sequence
  Description of Artificial Sequence: Synthetic oligonucleotide
caacaauuuugggucaagc

SEQ ID NO: 1633922 - RNA, 19 nt, Artificial Sequence
  Description of Artificial Sequence: Synthetic oligonucleotide
ggagucuuagaagccaugg

SEQ ID NO: 1633923 - RNA, 19 nt, Artificial Sequence
  Description of Artificial Sequence: Synthetic oligonucleotide
cauugugauaauccuguca

SEQ ID NO: 1633924 - RNA, 19 nt, Artificial Sequence
  Description of Artificial Sequence: Synthetic oligonucleotide
ucguugaguagcccuuggc

SEQ ID NO: 1633925 - RNA, 19 nt, Artificial Sequence
  Description of Artificial Sequence: Synthetic oligonucleotide
aguggauagccauguuuca

SEQ ID NO: 1633926 - RNA, 19 nt, Artificial Sequence
  Description of Artificial Sequence: Synthetic oligonucleotide
auuagaugagggaacucca

SEQ ID NO: 1633927 - RNA, 19 nt, Artificial Sequence
  Description of Artificial Sequence: Synthetic oligonucleotide
gauuuuagccaacaauuuu

SEQ ID NO: 1633928 - RNA, 19 nt, Artificial Sequence
  Description of Artificial Sequence: Synthetic oligonucleotide
agugucacuggaccaacau

SEQ ID NO: 1633929 - RNA, 19 nt, Artificial Sequence
  Description of Artificial Sequence: Synthetic oligonucleotide
gcuuccuagaagaauuggg

SEQ ID NO: 1633930 - RNA, 19 nt, Artificial Sequence
  Description of Artificial Sequence: Synthetic oligonucleotide
uccuguauaucuggugggc

SEQ ID NO: 1633931 - RNA, 19 nt, Artificial Sequence
  Description of Artificial Sequence: Synthetic oligonucleotide
caauaccggagaccggagg

SEQ ID NO: 1633932 - RNA, 19 nt, Artificial Sequence
  Description of Artificial Sequence: Synthetic oligonucleotide
uaguuagaauaauguaaua

SEQ ID NO: 1633933 - RNA, 19 nt, Artificial Sequence
  Description of Artificial Sequence: Synthetic oligonucleotide
acgcuaccuguucaccagc

SEQ ID NO: 1633934 - RNA, 19 nt, Artificial Sequence
  Description of Artificial Sequence: Synthetic oligonucleotide
acgagaagucuuucguuga

SEQ ID NO: 1633935 - RNA, 19 nt, Artificial Sequence
  Description of Artificial Sequence: Synthetic oligonucleotide
caauuuugggucaagcccu

SEQ ID NO: 1633936 - RNA, 19 nt, Artificial Sequence
  Description of Artificial Sequence: Synthetic oligonucleotide
cagcauagaaauuuauuua

SEQ ID NO: 1633937 - RNA, 19 nt, Artificial Sequence
  Description of Artificial Sequence: Synthetic oligonucleotide
uaauugucuaaaggaaaua

SEQ ID NO: 1633938 - RNA, 19 nt, Artificial Sequence
  Description of Artificial Sequence: Synthetic oligonucleotide
aucauacuuauagccagca

SEQ ID NO: 1633939 - RNA, 19 nt, Artificial Sequence
  Description of Artificial Sequence: Synthetic oligonucleotide
uauuaauaaugagccuuuc

SEQ ID NO: 1633940 - RNA, 19 nt, Artificial Sequence
  Description of Artificial Sequence: Synthetic oligonucleotide
agacgcuaccuguucacca

SEQ ID NO: 1633941 - RNA, 19 nt, Artificial Sequence
  Description of Artificial Sequence: Synthetic oligonucleotide
uggagucuuagaagccaug

SEQ ID NO: 1633942 - RNA, 19 nt, Artificial Sequence
  Description of Artificial Sequence: Synthetic oligonucleotide
auaugacuauaguuagaau

SEQ ID NO: 1633943 - RNA, 19 nt, Artificial Sequence
  Description of Artificial Sequence: Synthetic oligonucleotide
guauaucacauuggagccc

SEQ ID NO: 1633944 - RNA, 19 nt, Artificial Sequence
  Description of Artificial Sequence: Synthetic oligonucleotide
aauuuugggucaagcccug

SEQ ID NO: 1633945 - RNA, 19 nt, Artificial Sequence
  Description of Artificial Sequence: Synthetic oligonucleotide
aacuccuugcaugcaucag

SEQ ID NO: 1633946 - RNA, 19 nt, Artificial Sequence
  Description of Artificial Sequence: Synthetic oligonucleotide
aaguagguugaguguggaa

SEQ ID NO: 1633947 - RNA, 19 nt, Artificial Sequence
  Description of Artificial Sequence: Synthetic oligonucleotide
ucaauaguacuggaaucua

SEQ ID NO: 1633948 - RNA, 19 nt, Artificial Sequence
  Description of Artificial Sequence: Synthetic oligonucleotide
cacuaagacacuguaacaa

SEQ ID NO: 1633949 - RNA, 19 nt, Artificial Sequence
  Description of Artificial Sequence: Synthetic oligonucleotide
guuguaagugucacuggac

SEQ ID NO: 1633950 - RNA, 19 nt, Artificial Sequence
  Description of Artificial Sequence: Synthetic oligonucleotide
cauggaccuagaacacacc

SEQ ID NO: 1633951 - RNA, 19 nt, Artificial Sequence
  Description of Artificial Sequence: Synthetic oligonucleotide
ccagguacaggguuguaag

SEQ ID NO: 1633952 - RNA, 19 nt, Artificial Sequence
  Description of Artificial Sequence: Synthetic oligonucleotide
cuacaccaccagaaacagg

SEQ ID NO: 1633953 - RNA, 19 nt, Artificial Sequence
  Description of Artificial Sequence: Synthetic oligonucleotide
agggcaaaucagaaggucu

SEQ ID NO: 1633954 - RNA, 19 nt, Artificial Sequence
  Description of Artificial Sequence: Synthetic oligonucleotide
ggaacuccauccaucaccc

SEQ ID NO: 1633955 - RNA, 19 nt, Artificial Sequence
  Description of Artificial Sequence: Synthetic oligonucleotide
ucacuggaccaacaucguc

SEQ ID NO: 1633956 - RNA, 19 nt, Artificial Sequence
  Description of Artificial Sequence: Synthetic oligonucleotide
ugucauucuucuggaguca

SEQ ID NO: 1633957 - RNA, 19 nt, Artificial Sequence
  Description of Artificial Sequence: Synthetic oligonucleotide
ucauagcuucagcgguucc

SEQ ID NO: 1633958 - RNA, 19 nt, Artificial Sequence
  Description of Artificial Sequence: Synthetic oligonucleotide
uuucguugaguagcccuug

SEQ ID NO: 1633959 - RNA, 19 nt, Artificial Sequence
  Description of Artificial Sequence: Synthetic oligonucleotide
uuauuagaugagggaacuc

SEQ ID NO: 1633960 - RNA, 19 nt, Artificial Sequence
  Description of Artificial Sequence: Synthetic oligonucleotide
ugacuauaguuagaauaau

SEQ ID NO: 1633961 - RNA, 19 nt, Artificial Sequence
  Description of Artificial Sequence: Synthetic oligonucleotide
ggaucaauaguacuggaau

SEQ ID NO: 1633962 - RNA, 19 nt, Artificial Sequence
  Description of Artificial Sequence: Synthetic oligonucleotide
auacuggugggcagcauug

SEQ ID NO: 1633963 - RNA, 19 nt, Artificial Sequence
  Description of Artificial Sequence: Synthetic oligonucleotide
ccaaucauacuuauagcca

SEQ ID NO: 1633964 - RNA, 19 nt, Artificial Sequence
  Description of Artificial Sequence: Synthetic oligonucleotide
cuuugcagccugcccagug

SEQ ID NO: 1633965 - RNA, 19 nt, Artificial Sequence
  Description of Artificial Sequence: Synthetic oligonucleotide
ugaaaacagcucccauuuu

SEQ ID NO: 1633966 - RNA, 19 nt, Artificial Sequence
  Description of Artificial Sequence: Synthetic oligonucleotide
ugcaccccagcaacucuug

SEQ ID NO: 1633967 - RNA, 19 nt, Artificial Sequence
  Description of Artificial Sequence: Synthetic oligonucleotide
uggauuccccauguuuccc

SEQ ID NO: 1633968 - RNA, 19 nt, Artificial Sequence
  Description of Artificial Sequence: Synthetic oligonucleotide
acgucugcuggggaagacg

SEQ ID NO: 1633969 - RNA, 19 nt, Artificial Sequence
  Description of Artificial Sequence: Synthetic oligonucleotide
aucccauuugcuccagaau

SEQ ID NO: 1633970 - RNA, 19 nt, Artificial Sequence
  Description of Artificial Sequence: Synthetic oligonucleotide
ccaaugaacccaacuggag

SEQ ID NO: 1633971 - RNA, 19 nt, Artificial Sequence
  Description of Artificial Sequence: Synthetic oligonucleotide
ugggucaagcccugaccug

SEQ ID NO: 1633972 - RNA, 19 nt, Artificial Sequence
  Description of Artificial Sequence: Synthetic oligonucleotide
caaugaacccaacuggagu

SEQ ID NO: 1633973 - RNA, 19 nt, Artificial Sequence
  Description of Artificial Sequence: Synthetic oligonucleotide
guaagugucacuggaccaa

SEQ ID NO: 1633974 - RNA, 19 nt, Artificial Sequence
  Description of Artificial Sequence: Synthetic oligonucleotide
caacuucuuuugccaauug

SEQ ID NO: 1633975 - RNA, 19 nt, Artificial Sequence
  Description of Artificial Sequence: Synthetic oligonucleotide
aggaucaauaguacuggaa

SEQ ID NO: 1633976 - RNA, 19 nt, Artificial Sequence
  Description of Artificial Sequence: Synthetic oligonucleotide
agccaacaauuuuggguca

SEQ ID NO: 1633977 - RNA, 19 nt, Artificial Sequence
  Description of Artificial Sequence: Synthetic oligonucleotide
auagcuucagcgguuccaa

SEQ ID NO: 1633978 - RNA, 19 nt, Artificial Sequence
  Description of Artificial Sequence: Synthetic oligonucleotide
aauugggcucuuggugcug

SEQ ID NO: 1633979 - RNA, 19 nt, Artificial Sequence
  Description of Artificial Sequence: Synthetic oligonucleotide
aagcccugaccugauucca

SEQ ID NO: 1633980 - RNA, 19 nt, Artificial Sequence
  Description of Artificial Sequence: Synthetic oligonucleotide
acacaucauccuguauauc

SEQ ID NO: 1633981 - RNA, 19 nt, Artificial Sequence
  Description of Artificial Sequence: Synthetic oligonucleotide
agcuacgucugcuggggaa

SEQ ID NO: 1633982 - RNA, 19 nt, Artificial Sequence
  Description of Artificial Sequence: Synthetic oligonucleotide
cuccgcgccgugaaccccg

SEQ ID NO: 1633983 - RNA, 19 nt, Artificial Sequence
  Description of Artificial Sequence: Synthetic oligonucleotide
ccaagauucauagcuucag

SEQ ID NO: 1633984 - RNA, 19 nt, Artificial Sequence
  Description of Artificial Sequence: Synthetic oligonucleotide
caggauuuuagccaacaau

SEQ ID NO: 1633985 - RNA, 19 nt, Artificial Sequence
  Description of Artificial Sequence: Synthetic oligonucleotide
ggaccuagaacacaccgcu

SEQ ID NO: 1633986 - RNA, 19 nt, Artificial Sequence
  Description of Artificial Sequence: Synthetic oligonucleotide
gauccuucgccaugagugu

SEQ ID NO: 1633987 - RNA, 19 nt, Artificial Sequence
  Description of Artificial Sequence: Synthetic oligonucleotide
guugaguguggaaagcugu

SEQ ID NO: 1633988 - RNA, 19 nt, Artificial Sequence
  Description of Artificial Sequence: Synthetic oligonucleotide
ccuugguaguuauuagaug

SEQ ID NO: 1633989 - RNA, 19 nt, Artificial Sequence
  Description of Artificial Sequence: Synthetic oligonucleotide
ggcuuccuagaagaauugg

SEQ ID NO: 1633990 - RNA, 19 nt, Artificial Sequence
  Description of Artificial Sequence: Synthetic oligonucleotide
guacuggaaucuauuaaua

SEQ ID NO: 1633991 - RNA, 19 nt, Artificial Sequence
  Description of Artificial Sequence: Synthetic oligonucleotide
ccagagggcaaaucagaag

SEQ ID NO: 1633992 - RNA, 19 nt, Artificial Sequence
  Description of Artificial Sequence: Synthetic oligonucleotide
gaauugggcucuuggugcu

SEQ ID NO: 1633993 - RNA, 19 nt, Artificial Sequence
  Description of Artificial Sequence: Synthetic oligonucleotide
cuccaauaccggagaccgg

SEQ ID NO: 1633994 - RNA, 19 nt, Artificial Sequence
  Description of Artificial Sequence: Synthetic oligonucleotide
ggauagccauguuucauaa

SEQ ID NO: 1633995 - RNA, 19 nt, Artificial Sequence
  Description of Artificial Sequence: Synthetic oligonucleotide
ggaccaacaucguccugag

SEQ ID NO: 1633996 - RNA, 19 nt, Artificial Sequence
  Description of Artificial Sequence: Synthetic oligonucleotide
uaccggagaccggaggcug

SEQ ID NO: 1633997 - RNA, 19 nt, Artificial Sequence
  Description of Artificial Sequence: Synthetic oligonucleotide
ggagaccggaggcugcucc

SEQ ID NO: 1633998 - RNA, 19 nt, Artificial Sequence
  Description of Artificial Sequence: Synthetic oligonucleotide
gaacuccauccaucacccc

SEQ ID NO: 1633999 - RNA, 19 nt, Artificial Sequence
  Description of Artificial Sequence: Synthetic oligonucleotide
cuucuacugaauucauacu

SEQ ID NO: 1634000 - RNA, 19 nt, Artificial Sequence
  Description of Artificial Sequence: Synthetic oligonucleotide
agcccaugcaccccagcaa

SEQ ID NO: 1634001 - RNA, 19 nt, Artificial Sequence
  Description of Artificial Sequence: Synthetic oligonucleotide
gaaccccgccgccucacac

SEQ ID NO: 1634002 - RNA, 19 nt, Artificial Sequence
  Description of Artificial Sequence: Synthetic oligonucleotide
ggaagacgcuaccuguuca

SEQ ID NO: 1634003 - RNA, 19 nt, Artificial Sequence
  Description of Artificial Sequence: Synthetic oligonucleotide
guacaggguuguaaguguc

SEQ ID NO: 1634004 - RNA, 19 nt, Artificial Sequence
  Description of Artificial Sequence: Synthetic oligonucleotide
ucuggugggccaggcuucc

SEQ ID NO: 1634005 - RNA, 19 nt, Artificial Sequence
  Description of Artificial Sequence: Synthetic oligonucleotide
cagacgagaagucuuucgu

SEQ ID NO: 1634006 - RNA, 19 nt, Artificial Sequence
  Description of Artificial Sequence: Synthetic oligonucleotide
gaccuagaacacaccgcug

SEQ ID NO: 1634007 - RNA, 19 nt, Artificial Sequence
  Description of Artificial Sequence: Synthetic oligonucleotide
aucguccugagcucauauu

SEQ ID NO: 1634008 - RNA, 19 nt, Artificial Sequence
  Description of Artificial Sequence: Synthetic oligonucleotide
auaccggagaccggaggcu

SEQ ID NO: 1634009 - RNA, 19 nt, Artificial Sequence
  Description of Artificial Sequence: Synthetic oligonucleotide
cauuggauuccccauguuu

SEQ ID NO: 1634010 - RNA, 19 nt, Artificial Sequence
  Description of Artificial Sequence: Synthetic oligonucleotide
gaccaacaucguccugagc

SEQ ID NO: 1634011 - RNA, 19 nt, Artificial Sequence
  Description of Artificial Sequence: Synthetic oligonucleotide
caauaguacuggaaucuau

SEQ ID NO: 1634012 - RNA, 19 nt, Artificial Sequence
  Description of Artificial Sequence: Synthetic oligonucleotide
caccagaaacaggagcauc

SEQ ID NO: 1634013 - RNA, 19 nt, Artificial Sequence
  Description of Artificial Sequence: Synthetic oligonucleotide
auacuggaacacagacgag

SEQ ID NO: 1634014 - RNA, 19 nt, Artificial Sequence
  Description of Artificial Sequence: Synthetic oligonucleotide
ugaaccccgccgccucaca

SEQ ID NO: 1634015 - RNA, 19 nt, Artificial Sequence
  Description of Artificial Sequence: Synthetic oligonucleotide
ccuguauaucuggugggcc

SEQ ID NO: 1634016 - RNA, 19 nt, Artificial Sequence
  Description of Artificial Sequence: Synthetic oligonucleotide
ugaacccaacuggagucuu

SEQ ID NO: 1634017 - RNA, 19 nt, Artificial Sequence
  Description of Artificial Sequence: Synthetic oligonucleotide
aacaucguccugagcucau

SEQ ID NO: 1634018 - RNA, 19 nt, Artificial Sequence
  Description of Artificial Sequence: Synthetic oligonucleotide
gggaagacgcuaccuguuc

SEQ ID NO: 1634019 - RNA, 19 nt, Artificial Sequence
  Description of Artificial Sequence: Synthetic oligonucleotide
gccgaccgcuccaauaccg

SEQ ID NO: 1634020 - RNA, 19 nt, Artificial Sequence
  Description of Artificial Sequence: Synthetic oligonucleotide
ccaacaucguccugagcuc

SEQ ID NO: 1634021 - RNA, 19 nt, Artificial Sequence
  Description of Artificial Sequence: Synthetic oligonucleotide
gcccugaccugauuccaag

SEQ ID NO: 1634022 - RNA, 19 nt, Artificial Sequence
  Description of Artificial Sequence: Synthetic oligonucleotide
cccaccauaaauguaaggu

SEQ ID NO: 1634023 - RNA, 19 nt, Artificial Sequence
  Description of Artificial Sequence: Synthetic oligonucleotide
cuagaacacaccgcugcaa

SEQ ID NO: 1634024 - RNA, 19 nt, Artificial Sequence
  Description of Artificial Sequence: Synthetic oligonucleotide
cuuucguugaguagcccuu

SEQ ID NO: 1634025 - RNA, 19 nt, Artificial Sequence
  Description of Artificial Sequence: Synthetic oligonucleotide
gucuuucguugaguagccc

SEQ ID NO: 1634026 - RNA, 19 nt, Artificial Sequence
  Description of Artificial Sequence: Synthetic oligonucleotide
uacgucugcuggggaagac

SEQ ID NO: 1634027 - RNA, 19 nt, Artificial Sequence
  Description of Artificial Sequence: Synthetic oligonucleotide
ugggcagcauugugauaau

SEQ ID NO: 1634028 - RNA, 19 nt, Artificial Sequence
  Description of Artificial Sequence: Synthetic oligonucleotide
ccaauaccggagaccggag

SEQ ID NO: 1634029 - RNA, 19 nt, Artificial Sequence
  Description of Artificial Sequence: Synthetic oligonucleotide
cauacuggugggcagcauu

SEQ ID NO: 1634030 - RNA, 19 nt, Artificial Sequence
  Description of Artificial Sequence: Synthetic oligonucleotide
ccgaccgcuccaauaccgg

SEQ ID NO: 1634031 - RNA, 19 nt, Artificial Sequence
  Description of Artificial Sequence: Synthetic oligonucleotide
gggucaagcccugaccuga

SEQ ID NO: 1634032 - RNA, 19 nt, Artificial Sequence
  Description of Artificial Sequence: Synthetic oligonucleotide
aucaccccagguacagggu

SEQ ID NO: 1634033 - RNA, 19 nt, Artificial Sequence
  Description of Artificial Sequence: Synthetic oligonucleotide
ccaacaauuuugggucaag

SEQ ID NO: 1634034 - RNA, 19 nt, Artificial Sequence
  Description of Artificial Sequence: Synthetic oligonucleotide
ucauacuggugggcagcau

SEQ ID NO: 1634035 - RNA, 19 nt, Artificial Sequence
  Description of Artificial Sequence: Synthetic oligonucleotide
cccucagauacuggaacac

SEQ ID NO: 1634036 - RNA, 19 nt, Artificial Sequence
  Description of Artificial Sequence: Synthetic oligonucleotide
cagguacaggguuguaagu

SEQ ID NO: 1634037 - RNA, 19 nt, Artificial Sequence
  Description of Artificial Sequence: Synthetic oligonucleotide
auccuucgccaugaguguu

SEQ ID NO: 1634038 - RNA, 19 nt, Artificial Sequence
  Description of Artificial Sequence: Synthetic oligonucleotide
cugaccugauuccaagauu

SEQ ID NO: 1634039 - RNA, 19 nt, Artificial Sequence
  Description of Artificial Sequence: Synthetic oligonucleotide
ccuagaacacaccgcugca

SEQ ID NO: 1634040 - RNA, 19 nt, Artificial Sequence
  Description of Artificial Sequence: Synthetic oligonucleotide
aggggcacacuaagacacu

SEQ ID NO: 1634041 - RNA, 19 nt, Artificial Sequence
  Description of Artificial Sequence: Synthetic oligonucleotide
caugcaccccagcaacucu

SEQ ID NO: 1634042 - RNA, 19 nt, Artificial Sequence
  Description of Artificial Sequence: Synthetic oligonucleotide
augcaccccagcaacucuu

SEQ ID NO: 1634043 - RNA, 19 nt, Artificial Sequence
  Description of Artificial Sequence: Synthetic oligonucleotide
guagcccuuggcacacauc

SEQ ID NO: 1634044 - RNA, 19 nt, Artificial Sequence
  Description of Artificial Sequence: Synthetic oligonucleotide
cccuugguaguuauuagau

SEQ ID NO: 1634045 - RNA, 19 nt, Artificial Sequence
  Description of Artificial Sequence: Synthetic oligonucleotide
cagcuccuacaccaccaga

SEQ ID NO: 1634046 - RNA, 19 nt, Artificial Sequence
  Description of Artificial Sequence: Synthetic oligonucleotide
cgcgccgugaaccccgccg

SEQ ID NO: 1634047 - RNA, 19 nt, Artificial Sequence
  Description of Artificial Sequence: Synthetic oligonucleotide
ggccgaccgcuccaauacc

SEQ ID NO: 1634048 - RNA, 19 nt, Artificial Sequence
  Description of Artificial Sequence: Synthetic oligonucleotide
gcgccgugaaccccgccgc

SEQ ID NO: 1634049 - RNA, 19 nt, Artificial Sequence
  Description of Artificial Sequence: Synthetic oligonucleotide
cuacgucugcuggggaaga

SEQ ID NO: 1634050 - RNA, 19 nt, Artificial Sequence
  Description of Artificial Sequence: Synthetic oligonucleotide
ggagcccaugcaccccagc

SEQ ID NO: 1634051 - RNA, 19 nt, Artificial Sequence
  Description of Artificial Sequence: Synthetic oligonucleotide
caucguccugagcucauau

SEQ ID NO: 1634052 - RNA, 19 nt, Artificial Sequence
  Description of Artificial Sequence: Synthetic oligonucleotide
aggcuggcggccggccgcg

SEQ ID NO: 1634053 - RNA, 19 nt, Artificial Sequence
  Description of Artificial Sequence: Synthetic oligonucleotide
acaucguccugagcucaua

SEQ ID NO: 1634054 - RNA, 19 nt, Artificial Sequence
  Description of Artificial Sequence: Synthetic oligonucleotide
gguuccaaucauacuuaua

SEQ ID NO: 1634055 - RNA, 19 nt, Artificial Sequence
  Description of Artificial Sequence: Synthetic oligonucleotide
gccauggaccuagaacaca

SEQ ID NO: 1634056 - RNA, 19 nt, Artificial Sequence
  Description of Artificial Sequence: Synthetic oligonucleotide
cggccgaccgcuccaauac

SEQ ID NO: 1634057 - RNA, 19 nt, Artificial Sequence
  Description of Artificial Sequence: Synthetic oligonucleotide
gugaaccccgccgccucac

SEQ ID NO: 1634058 - RNA, 19 nt, Artificial Sequence
  Description of Artificial Sequence: Synthetic oligonucleotide
ccaugcaccccagcaacuc

SEQ ID NO: 1634059 - RNA, 19 nt, Artificial Sequence
  Description of Artificial Sequence: Synthetic oligonucleotide
caaagggcagagucugguu

SEQ ID NO: 1634060 - RNA, 19 nt, Artificial Sequence
  Description of Artificial Sequence: Synthetic oligonucleotide
ccucagauacuggaacaca

SEQ ID NO: 1634061 - RNA, 19 nt, Artificial Sequence
  Description of Artificial Sequence: Synthetic oligonucleotide
gucacuggaccaacaucgu

SEQ ID NO: 1634062 - RNA, 19 nt, Artificial Sequence
  Description of Artificial Sequence: Synthetic oligonucleotide
cgcuccaauaccggagacc

SEQ ID NO: 1634063 - RNA, 19 nt, Artificial Sequence
  Description of Artificial Sequence: Synthetic oligonucleotide
gcgguuccaaucauacuua

SEQ ID NO: 1634064 - RNA, 19 nt, Artificial Sequence
  Description of Artificial Sequence: Synthetic oligonucleotide
gccaugaguguuguuccaa

SEQ ID NO: 1634065 - RNA, 19 nt, Artificial Sequence
  Description of Artificial Sequence: Synthetic oligonucleotide
cuguaacaggaggggcaca

SEQ ID NO: 1634066 - RNA, 19 nt, Artificial Sequence
  Description of Artificial Sequence: Synthetic oligonucleotide
cccagauccuucgccauga

SEQ ID NO: 1634067 - RNA, 19 nt, Artificial Sequence
  Description of Artificial Sequence: Synthetic oligonucleotide
gccaacaauuuugggucaa

SEQ ID NO: 1634068 - RNA, 19 nt, Artificial Sequence
  Description of Artificial Sequence: Synthetic oligonucleotide
cagcuacgucugcugggga

SEQ ID NO: 1634069 - RNA, 19 nt, Artificial Sequence
  Description of Artificial Sequence: Synthetic oligonucleotide
auaucacauuggagcccau

SEQ ID NO: 1634070 - RNA, 19 nt, Artificial Sequence
  Description of Artificial Sequence: Synthetic oligonucleotide
cccugaccugauuccaaga

SEQ ID NO: 1634071 - RNA, 19 nt, Artificial Sequence
  Description of Artificial Sequence: Synthetic oligonucleotide
cuucagcgguuccaaucau

SEQ ID NO: 1634072 - RNA, 19 nt, Artificial Sequence
  Description of Artificial Sequence: Synthetic oligonucleotide
cuucaacuccucccaccau

SEQ ID NO: 1634073 - RNA, 19 nt, Artificial Sequence
  Description of Artificial Sequence: Synthetic oligonucleotide
cugguucccaaguguccau

SEQ ID NO: 1634074 - RNA, 19 nt, Artificial Sequence
  Description of Artificial Sequence: Synthetic oligonucleotide
cccagguacaggguuguaa

SEQ ID NO: 1634075 - RNA, 19 nt, Artificial Sequence
  Description of Artificial Sequence: Synthetic oligonucleotide
ccgcuccaauaccggagac

SEQ ID NO: 1634076 - RNA, 19 nt, Artificial Sequence
  Description of Artificial Sequence: Synthetic oligonucleotide
ggccggccgcggccgaccg

SEQ ID NO: 1634077 - RNA, 19 nt, Artificial Sequence
  Description of Artificial Sequence: Synthetic oligonucleotide
ccgugaaccccgccgccuc

SEQ ID NO: 1634078 - RNA, 19 nt, Artificial Sequence
  Description of Artificial Sequence: Synthetic oligonucleotide
cgcugcaaggcuggcggcc

SEQ ID NO: 1634079 - RNA, 19 nt, Artificial Sequence
  Description of Artificial Sequence: Synthetic oligonucleotide
ccgcugcaaggcuggcggc

SEQ ID NO: 1634080 - RNA, 19 nt, Artificial Sequence
  Description of Artificial Sequence: Synthetic oligonucleotide
gcggccgaccgcuccaaua

SEQ ID NO: 1634081 - RNA, 19 nt, Artificial Sequence
  Description of Artificial Sequence: Synthetic oligonucleotide
gggcacacuaagacacugu

SEQ ID NO: 1634082 - RNA, 19 nt, Artificial Sequence
  Description of Artificial Sequence: Synthetic oligonucleotide
ccaugaaaacagcucccau

SEQ ID NO: 1634083 - RNA, 19 nt, Artificial Sequence
  Description of Artificial Sequence: Synthetic oligonucleotide
cgaccgcuccaauaccgga

SEQ ID NO: 1634084 - RNA, 19 nt, Artificial Sequence
  Description of Artificial Sequence: Synthetic oligonucleotide
gcuaccuguucaccagcuu

SEQ ID NO: 1634085 - RNA, 19 nt, Artificial Sequence
  Description of Artificial Sequence: Synthetic oligonucleotide
ggggaagacgcuaccuguu

SEQ ID NO: 1634086 - RNA, 19 nt, Artificial Sequence
  Description of Artificial Sequence: Synthetic oligonucleotide
ccuccgcgccgugaacccc

SEQ ID NO: 1634087 - RNA, 19 nt, Artificial Sequence
  Description of Artificial Sequence: Synthetic oligonucleotide
cccaugcaccccagcaacu

SEQ ID NO: 1634088 - RNA, 19 nt, Artificial Sequence
  Description of Artificial Sequence: Synthetic oligonucleotide
ggucaagcccugaccugau

SEQ ID NO: 1634089 - RNA, 19 nt, Artificial Sequence
  Description of Artificial Sequence: Synthetic oligonucleotide
gccgugaaccccgccgccu

SEQ ID NO: 1634090 - RNA, 19 nt, Artificial Sequence
  Description of Artificial Sequence: Synthetic oligonucleotide
cgugaaccccgccgccuca

SEQ ID NO: 1634091 - RNA, 19 nt, Artificial Sequence
  Description of Artificial Sequence: Synthetic oligonucleotide
cgguuccaaucauacuuau

SEQ ID NO: 1634092 - RNA, 19 nt, Artificial Sequence
  Description of Artificial Sequence: Synthetic oligonucleotide
ccccagguacaggguugua

SEQ ID NO: 1634093 - RNA, 19 nt, Artificial Sequence
  Description of Artificial Sequence: Synthetic oligonucleotide
cggccgcggccgaccgcuc

SEQ ID NO: 1634094 - RNA, 19 nt, Artificial Sequence
  Description of Artificial Sequence: Synthetic oligonucleotide
cgcggccgaccgcuccaau

SEQ ID NO: 1634095 - RNA, 19 nt, Artificial Sequence
  Description of Artificial Sequence: Synthetic oligonucleotide
acagcuaugagguaggugg

SEQ ID NO: 1634096 - RNA, 19 nt, Artificial Sequence
  Description of Artificial Sequence: Synthetic oligonucleotide
aucaaagaaacacagcucg

SEQ ID NO: 1634097 - RNA, 19 nt, Artificial Sequence
  Description of Artificial Sequence: Synthetic oligonucleotide
ucaucaaagaaacacagcu

SEQ ID NO: 1634098 - RNA, 19 nt, Artificial Sequence
  Description of Artificial Sequence: Synthetic oligonucleotide
agaaacacagcucggagcc

SEQ ID NO: 1634099 - RNA, 19 nt, Artificial Sequence
  Description of Artificial Sequence: Synthetic oligonucleotide
aguccuuagggccacaggc

SEQ ID NO: 1634100 - RNA, 19 nt, Artificial Sequence
  Description of Artificial Sequence: Synthetic oligonucleotide
acuuucuacacccuuuggc

SEQ ID NO: 1634101 - RNA, 19 nt, Artificial Sequence
  Description of Artificial Sequence: Synthetic oligonucleotide
aaagcgauucguucuugcc

SEQ ID NO: 1634102 - RNA, 19 nt, Artificial Sequence
  Description of Artificial Sequence: Synthetic oligonucleotide
cauacgacuuucuacaccc

SEQ ID NO: 1634103 - RNA, 19 nt, Artificial Sequence
  Description of Artificial Sequence: Synthetic oligonucleotide
uacaaaaugaggagcuagg

SEQ ID NO: 1634104 - RNA, 19 nt, Artificial Sequence
  Description of Artificial Sequence: Synthetic oligonucleotide
gaggauauaguagagucgg

SEQ ID NO: 1634105 - RNA, 19 nt, Artificial Sequence
  Description of Artificial Sequence: Synthetic oligonucleotide
accacauacgacuuucuac

SEQ ID NO: 1634106 - RNA, 19 nt, Artificial Sequence
  Description of Artificial Sequence: Synthetic oligonucleotide
uguugggacaccaaggccu

SEQ ID NO: 1634107 - RNA, 19 nt, Artificial Sequence
  Description of Artificial Sequence: Synthetic oligonucleotide
aaggcuacggagguagucc

SEQ ID NO: 1634108 - RNA, 19 nt, Artificial Sequence
  Description of Artificial Sequence: Synthetic oligonucleotide
agagaguagacagggagcc

SEQ ID NO: 1634109 - RNA, 19 nt, Artificial Sequence
  Description of Artificial Sequence: Synthetic oligonucleotide
uauaaagggccucaacaug

SEQ ID NO: 1634110 - RNA, 19 nt, Artificial Sequence
  Description of Artificial Sequence: Synthetic oligonucleotide
agguaugaggccuggaaac

SEQ ID NO: 1634111 - RNA, 19 nt, Artificial Sequence
  Description of Artificial Sequence: Synthetic oligonucleotide
gugaacauggccuuucucc

SEQ ID NO: 1634112 - RNA, 19 nt, Artificial Sequence
  Description of Artificial Sequence: Synthetic oligonucleotide
aguagagucgggcaugguc

SEQ ID NO: 1634113 - RNA, 19 nt, Artificial Sequence
  Description of Artificial Sequence: Synthetic oligonucleotide
uuugccagcauucgaaggu

SEQ ID NO: 1634114 - RNA, 19 nt, Artificial Sequence
  Description of Artificial Sequence: Synthetic oligonucleotide
acauacgacuuucuacacc

SEQ ID NO: 1634115 - RNA, 19 nt, Artificial Sequence
  Description of Artificial Sequence: Synthetic oligonucleotide
ucaaagaaacacagcucgg

SEQ ID NO: 1634116 - RNA, 19 nt, Artificial Sequence
  Description of Artificial Sequence: Synthetic oligonucleotide
agcuccagagaguagacag

SEQ ID NO: 1634117 - RNA, 19 nt, Artificial Sequence
  Description of Artificial Sequence: Synthetic oligonucleotide
cuggcaacgagguaugagg

SEQ ID NO: 1634118 - RNA, 19 nt, Artificial Sequence
  Description of Artificial Sequence: Synthetic oligonucleotide
ccaacuuggaacuugacag

SEQ ID NO: 1634119 - RNA, 19 nt, Artificial Sequence
  Description of Artificial Sequence: Synthetic oligonucleotide
ugaucuaagaggucuacaa

SEQ ID NO: 1634120 - RNA, 19 nt, Artificial Sequence
  Description of Artificial Sequence: Synthetic oligonucleotide
gauauaguagagucgggca

SEQ ID NO: 1634121 - RNA, 19 nt, Artificial Sequence
  Description of Artificial Sequence: Synthetic oligonucleotide
agcucgguauaguugggcc

SEQ ID NO: 1634122 - RNA, 19 nt, Artificial Sequence
  Description of Artificial Sequence: Synthetic oligonucleotide
aucuaagaggucuacaaaa

SEQ ID NO: 1634123 - RNA, 19 nt, Artificial Sequence
  Description of Artificial Sequence: Synthetic oligonucleotide
caguuggacagcuaugagg

SEQ ID NO: 1634124 - RNA, 19 nt, Artificial Sequence
  Description of Artificial Sequence: Synthetic oligonucleotide
aggucuacaaaaugaggag

SEQ ID NO: 1634125 - RNA, 19 nt, Artificial Sequence
  Description of Artificial Sequence: Synthetic oligonucleotide
ucuaagaggucuacaaaau

SEQ ID NO: 1634126 - RNA, 19 nt, Artificial Sequence
  Description of Artificial Sequence: Synthetic oligonucleotide
uggaacuugacagauggga

SEQ ID NO: 1634127 - RNA, 19 nt, Artificial Sequence
  Description of Artificial Sequence: Synthetic oligonucleotide
agcagagcgcggcauaccc

SEQ ID NO: 1634128 - RNA, 19 nt, Artificial Sequence
  Description of Artificial Sequence: Synthetic oligonucleotide
ugugccuuuggccuaguga

SEQ ID NO: 1634129 - RNA, 19 nt, Artificial Sequence
  Description of Artificial Sequence: Synthetic oligonucleotide
agccacuacaacaaagggc

SEQ ID NO: 1634130 - RNA, 19 nt, Artificial Sequence
  Description of Artificial Sequence: Synthetic oligonucleotide
gaggucuacaaaaugagga

SEQ ID NO: 1634131 - RNA, 19 nt, Artificial Sequence
  Description of Artificial Sequence: Synthetic oligonucleotide
ugggaaaagaggauauagu

SEQ ID NO: 1634132 - RNA, 19 nt, Artificial Sequence
  Description of Artificial Sequence: Synthetic oligonucleotide
cuagggaaggccgagcucg

SEQ ID NO: 1634133 - RNA, 19 nt, Artificial Sequence
  Description of Artificial Sequence: Synthetic oligonucleotide
augggaaaagaggauauag

SEQ ID NO: 1634134 - RNA, 19 nt, Artificial Sequence
  Description of Artificial Sequence: Synthetic oligonucleotide
cauggaccaaagaugugcg

SEQ ID NO: 1634135 - RNA, 19 nt, Artificial Sequence
  Description of Artificial Sequence: Synthetic oligonucleotide
gaagcgcagcuccagagag

SEQ ID NO: 1634136 - RNA, 19 nt, Artificial Sequence
  Description of Artificial Sequence: Synthetic oligonucleotide
aguuggacagcuaugaggu

SEQ ID NO: 1634137 - RNA, 19 nt, Artificial Sequence
  Description of Artificial Sequence: Synthetic oligonucleotide
caaguggacaccacauacg

SEQ ID NO: 1634138 - RNA, 19 nt, Artificial Sequence
  Description of Artificial Sequence: Synthetic oligonucleotide
gguauaaagggccucaaca

SEQ ID NO: 1634139 - RNA, 19 nt, Artificial Sequence
  Description of Artificial Sequence: Synthetic oligonucleotide
cauuggaucaugcaggaga

SEQ ID NO: 1634140 - RNA, 19 nt, Artificial Sequence
  Description of Artificial Sequence: Synthetic oligonucleotide
ugaacauggccuuucuccu

SEQ ID NO: 1634141 - RNA, 19 nt, Artificial Sequence
  Description of Artificial Sequence: Synthetic oligonucleotide
auguggacagccuccaaag

SEQ ID NO: 1634142 - RNA, 19 nt, Artificial Sequence
  Description of Artificial Sequence: Synthetic oligonucleotide
gccuguagaaagcugaggg

SEQ ID NO: 1634143 - RNA, 19 nt, Artificial Sequence
  Description of Artificial Sequence: Synthetic oligonucleotide
aagggccucaacauguagg

SEQ ID NO: 1634144 - RNA, 19 nt, Artificial Sequence
  Description of Artificial Sequence: Synthetic oligonucleotide
caacauguaggcgagcagg

SEQ ID NO: 1634145 - RNA, 19 nt, Artificial Sequence
  Description of Artificial Sequence: Synthetic oligonucleotide
aacauguaggcgagcaggg

SEQ ID NO: 1634146 - RNA, 19 nt, Artificial Sequence
  Description of Artificial Sequence: Synthetic oligonucleotide
guauaguugggccagucca

SEQ ID NO: 1634147 - RNA, 19 nt, Artificial Sequence
  Description of Artificial Sequence: Synthetic oligonucleotide
cuaagaggucuacaaaaug

SEQ ID NO: 1634148 - RNA, 19 nt, Artificial Sequence
  Description of Artificial Sequence: Synthetic oligonucleotide
uuuggccuagugacgaggc

SEQ ID NO: 1634149 - RNA, 19 nt, Artificial Sequence
  Description of Artificial Sequence: Synthetic oligonucleotide
gcuuaccugaucuaagagg

SEQ ID NO: 1634150 - RNA, 19 nt, Artificial Sequence
  Description of Artificial Sequence: Synthetic oligonucleotide
uguggacagccuccaaagg

SEQ ID NO: 1634151 - RNA, 19 nt, Artificial Sequence
  Description of Artificial Sequence: Synthetic oligonucleotide
aaagggccucaacauguag

SEQ ID NO: 1634152 - RNA, 19 nt, Artificial Sequence
  Description of Artificial Sequence: Synthetic oligonucleotide
ggaaaagaggauauaguag

SEQ ID NO: 1634153 - RNA, 19 nt, Artificial Sequence
  Description of Artificial Sequence: Synthetic oligonucleotide
agcgauucguucuugccug

SEQ ID NO: 1634154 - RNA, 19 nt, Artificial Sequence
  Description of Artificial Sequence: Synthetic oligonucleotide
guaguccccaaccaggggc

SEQ ID NO: 1634155 - RNA, 19 nt, Artificial Sequence
  Description of Artificial Sequence: Synthetic oligonucleotide
ucaacauguaggcgagcag

SEQ ID NO: 1634156 - RNA, 19 nt, Artificial Sequence
  Description of Artificial Sequence: Synthetic oligonucleotide
agaguagacagggagccuc

SEQ ID NO: 1634157 - RNA, 19 nt, Artificial Sequence
  Description of Artificial Sequence: Synthetic oligonucleotide
gugccuuuggccuagugac

SEQ ID NO: 1634158 - RNA, 19 nt, Artificial Sequence
  Description of Artificial Sequence: Synthetic oligonucleotide
cuuugccagcauucgaagg

SEQ ID NO: 1634159 - RNA, 19 nt, Artificial Sequence
  Description of Artificial Sequence: Synthetic oligonucleotide
auaaagggccucaacaugu

SEQ ID NO: 1634160 - RNA, 19 nt, Artificial Sequence
  Description of Artificial Sequence: Synthetic oligonucleotide
auauaguagagucgggcau

SEQ ID NO: 1634161 - RNA, 19 nt, Artificial Sequence
  Description of Artificial Sequence: Synthetic oligonucleotide
gguacagcaagugaggggc

SEQ ID NO: 1634162 - RNA, 19 nt, Artificial Sequence
  Description of Artificial Sequence: Synthetic oligonucleotide
cuuaccugaucuaagaggu

SEQ ID NO: 1634163 - RNA, 19 nt, Artificial Sequence
  Description of Artificial Sequence: Synthetic oligonucleotide
acagacaagggaugcaggu

SEQ ID NO: 1634164 - RNA, 19 nt, Artificial Sequence
  Description of Artificial Sequence: Synthetic oligonucleotide
uccuguagguaccaccgug

SEQ ID NO: 1634165 - RNA, 19 nt, Artificial Sequence
  Description of Artificial Sequence: Synthetic oligonucleotide
aguuccagagaucaucaaa

SEQ ID NO: 1634166 - RNA, 19 nt, Artificial Sequence
  Description of Artificial Sequence: Synthetic oligonucleotide
agguacagcaagugagggg

SEQ ID NO: 1634167 - RNA, 19 nt, Artificial Sequence
  Description of Artificial Sequence: Synthetic oligonucleotide
uggaccaaagaugugcgca

SEQ ID NO: 1634168 - RNA, 19 nt, Artificial Sequence
  Description of Artificial Sequence: Synthetic oligonucleotide
uaccugaucuaagaggucu

SEQ ID NO: 1634169 - RNA, 19 nt, Artificial Sequence
  Description of Artificial Sequence: Synthetic oligonucleotide
uagacagggagccuccagu

SEQ ID NO: 1634170 - RNA, 19 nt, Artificial Sequence
  Description of Artificial Sequence: Synthetic oligonucleotide
ggaccauuggaucaugcag

SEQ ID NO: 1634171 - RNA, 19 nt, Artificial Sequence
  Description of Artificial Sequence: Synthetic oligonucleotide
aggcuacggagguaguccc

SEQ ID NO: 1634172 - RNA, 19 nt, Artificial Sequence
  Description of Artificial Sequence: Synthetic oligonucleotide
cuagugacgaggccagugc

SEQ ID NO: 1634173 - RNA, 19 nt, Artificial Sequence
  Description of Artificial Sequence: Synthetic oligonucleotide
cuguagguugcccagccag

SEQ ID NO: 1634174 - RNA, 19 nt, Artificial Sequence
  Description of Artificial Sequence: Synthetic oligonucleotide
gaaacagagaguggccaag

SEQ ID NO: 1634175 - RNA, 19 nt, Artificial Sequence
  Description of Artificial Sequence: Synthetic oligonucleotide
aguccauggaccaaagaug

SEQ ID NO: 1634176 - RNA, 19 nt, Artificial Sequence
  Description of Artificial Sequence: Synthetic oligonucleotide
ugcagaugcagcaccggga

SEQ ID NO: 1634177 - RNA, 19 nt, Artificial Sequence
  Description of Artificial Sequence: Synthetic oligonucleotide
gauucguucuugccuggcc

SEQ ID NO: 1634178 - RNA, 19 nt, Artificial Sequence
  Description of Artificial Sequence: Synthetic oligonucleotide
cuccaaaggcccauagagc

SEQ ID NO: 1634179 - RNA, 19 nt, Artificial Sequence
  Description of Artificial Sequence: Synthetic oligonucleotide
uuccagagaucaucaaaga

SEQ ID NO: 1634180 - RNA, 19 nt, Artificial Sequence
  Description of Artificial Sequence: Synthetic oligonucleotide
gaacuugacagaugggaaa

SEQ ID NO: 1634181 - RNA, 19 nt, Artificial Sequence
  Description of Artificial Sequence: Synthetic oligonucleotide
aacuuggaacuugacagau

SEQ ID NO: 1634182 - RNA, 19 nt, Artificial Sequence
  Description of Artificial Sequence: Synthetic oligonucleotide
caaagcgauucguucuugc

SEQ ID NO: 1634183 - RNA, 19 nt, Artificial Sequence
  Description of Artificial Sequence: Synthetic oligonucleotide
uacacccuuuggcaggcag

SEQ ID NO: 1634184 - RNA, 19 nt, Artificial Sequence
  Description of Artificial Sequence: Synthetic oligonucleotide
gguguugggacaccaaggc

SEQ ID NO: 1634185 - RNA, 19 nt, Artificial Sequence
  Description of Artificial Sequence: Synthetic oligonucleotide
caggugugguauaaagggc

SEQ ID NO: 1634186 - RNA, 19 nt, Artificial Sequence
  Description of Artificial Sequence: Synthetic oligonucleotide
acgaggccagugcagguac

SEQ ID NO: 1634187 - RNA, 19 nt, Artificial Sequence
  Description of Artificial Sequence: Synthetic oligonucleotide
uaguugggccaguccaugg

SEQ ID NO: 1634188 - RNA, 19 nt, Artificial Sequence
  Description of Artificial Sequence: Synthetic oligonucleotide
accaccgugggcugugaac

SEQ ID NO: 1634189 - RNA, 19 nt, Artificial Sequence
  Description of Artificial Sequence: Synthetic oligonucleotide
ugucuggccaguacuugca

SEQ ID NO: 1634190 - RNA, 19 nt, Artificial Sequence
  Description of Artificial Sequence: Synthetic oligonucleotide
agcauucgaaggugccagc

SEQ ID NO: 1634191 - RNA, 19 nt, Artificial Sequence
  Description of Artificial Sequence: Synthetic oligonucleotide
caaaaugaggagcuaggga

SEQ ID NO: 1634192 - RNA, 19 nt, Artificial Sequence
  Description of Artificial Sequence: Synthetic oligonucleotide
agcagggguauguggacag

SEQ ID NO: 1634193 - RNA, 19 nt, Artificial Sequence
  Description of Artificial Sequence: Synthetic oligonucleotide
aaacacagcucggagcccu

SEQ ID NO: 1634194 - RNA, 19 nt, Artificial Sequence
  Description of Artificial Sequence: Synthetic oligonucleotide
ugccuuuggccuagugacg

SEQ ID NO: 1634195 - RNA, 19 nt, Artificial Sequence
  Description of Artificial Sequence: Synthetic oligonucleotide
caagaggaccauuggauca

SEQ ID NO: 1634196 - RNA, 19 nt, Artificial Sequence
  Description of Artificial Sequence: Synthetic oligonucleotide
auucgaaggugccagcaaa

SEQ ID NO: 1634197 - RNA, 19 nt, Artificial Sequence
  Description of Artificial Sequence: Synthetic oligonucleotide
augugcgcacuguagguug

SEQ ID NO: 1634198 - RNA, 19 nt, Artificial Sequence
  Description of Artificial Sequence: Synthetic oligonucleotide
cagcaggugugguauaaag

SEQ ID NO: 1634199 - RNA, 19 nt, Artificial Sequence
  Description of Artificial Sequence: Synthetic oligonucleotide
aaggcccauagagcugucc

SEQ ID NO: 1634200 - RNA, 19 nt, Artificial Sequence
  Description of Artificial Sequence: Synthetic oligonucleotide
agaugugcgcacuguaggu

SEQ ID NO: 1634201 - RNA, 19 nt, Artificial Sequence
  Description of Artificial Sequence: Synthetic oligonucleotide
guggacaccacauacgacu

SEQ ID NO: 1634202 - RNA, 19 nt, Artificial Sequence
  Description of Artificial Sequence: Synthetic oligonucleotide
cacagacaagggaugcagg

SEQ ID NO: 1634203 - RNA, 19 nt, Artificial Sequence
  Description of Artificial Sequence: Synthetic oligonucleotide
ggcaugugaggccagcagg

SEQ ID NO: 1634204 - RNA, 19 nt, Artificial Sequence
  Description of Artificial Sequence: Synthetic oligonucleotide
ggauauaguagagucgggc

SEQ ID NO: 1634205 - RNA, 19 nt, Artificial Sequence
  Description of Artificial Sequence: Synthetic oligonucleotide
gggaaaagaggauauagua

SEQ ID NO: 1634206 - RNA, 19 nt, Artificial Sequence
  Description of Artificial Sequence: Synthetic oligonucleotide
cugucuggccaguacuugc

SEQ ID NO: 1634207 - RNA, 19 nt, Artificial Sequence
  Description of Artificial Sequence: Synthetic oligonucleotide
uagugacgaggccagugca

SEQ ID NO: 1634208 - RNA, 19 nt, Artificial Sequence
  Description of Artificial Sequence: Synthetic oligonucleotide
ugcagcaagucugccaggc

SEQ ID NO: 1634209 - RNA, 19 nt, Artificial Sequence
  Description of Artificial Sequence: Synthetic oligonucleotide
cagagcgcggcauacccgc

SEQ ID NO: 1634210 - RNA, 19 nt, Artificial Sequence
  Description of Artificial Sequence: Synthetic oligonucleotide
agugcagguacagcaagug

SEQ ID NO: 1634211 - RNA, 19 nt, Artificial Sequence
  Description of Artificial Sequence: Synthetic oligonucleotide
uucguucuugccuggccug

SEQ ID NO: 1634212 - RNA, 19 nt, Artificial Sequence
  Description of Artificial Sequence: Synthetic oligonucleotide
ugugaacauggccuuucuc

SEQ ID NO: 1634213 - RNA, 19 nt, Artificial Sequence
  Description of Artificial Sequence: Synthetic oligonucleotide
cuguagguaccaccguggg

SEQ ID NO: 1634214 - RNA, 19 nt, Artificial Sequence
  Description of Artificial Sequence: Synthetic oligonucleotide
gagguaugaggccuggaaa

SEQ ID NO: 1634215 - RNA, 19 nt, Artificial Sequence
  Description of Artificial Sequence: Synthetic oligonucleotide
uggggaccaccaucuaggg

SEQ ID NO: 1634216 - RNA, 19 nt, Artificial Sequence
  Description of Artificial Sequence: Synthetic oligonucleotide
ugcccaacuuggaacuuga

SEQ ID NO: 1634217 - RNA, 19 nt, Artificial Sequence
  Description of Artificial Sequence: Synthetic oligonucleotide
cuuuggccuagugacgagg

SEQ ID NO: 1634218 - RNA, 19 nt, Artificial Sequence
  Description of Artificial Sequence: Synthetic oligonucleotide
agguguugggacaccaagg

SEQ ID NO: 1634219 - RNA, 19 nt, Artificial Sequence
  Description of Artificial Sequence: Synthetic oligonucleotide
aacgagguaugaggccugg

SEQ ID NO: 1634220 - RNA, 19 nt, Artificial Sequence
  Description of Artificial Sequence: Synthetic oligonucleotide
ccgagcucgguauaguugg

SEQ ID NO: 1634221 - RNA, 19 nt, Artificial Sequence
  Description of Artificial Sequence: Synthetic oligonucleotide
ucuagguguugggacacca

SEQ ID NO: 1634222 - RNA, 19 nt, Artificial Sequence
  Description of Artificial Sequence: Synthetic oligonucleotide
agcuagggaaggccgagcu

SEQ ID NO: 1634223 - RNA, 19 nt, Artificial Sequence
  Description of Artificial Sequence: Synthetic oligonucleotide
cauagagcuguccugccca

SEQ ID NO: 1634224 - RNA, 19 nt, Artificial Sequence
  Description of Artificial Sequence: Synthetic oligonucleotide
guauaaagggccucaacau

SEQ ID NO: 1634225 - RNA, 19 nt, Artificial Sequence
  Description of Artificial Sequence: Synthetic oligonucleotide
aggcaggaguuccagagau

SEQ ID NO: 1634226 - RNA, 19 nt, Artificial Sequence
  Description of Artificial Sequence: Synthetic oligonucleotide
cucgguauaguugggccag

SEQ ID NO: 1634227 - RNA, 19 nt, Artificial Sequence
  Description of Artificial Sequence: Synthetic oligonucleotide
ugggcgucggggcugcaag

SEQ ID NO: 1634228 - RNA, 19 nt, Artificial Sequence
  Description of Artificial Sequence: Synthetic oligonucleotide
guaugaggccuggaaacag

SEQ ID NO: 1634229 - RNA, 19 nt, Artificial Sequence
  Description of Artificial Sequence: Synthetic oligonucleotide
ggucuacaaaaugaggagc

SEQ ID NO: 1634230 - RNA, 19 nt, Artificial Sequence
  Description of Artificial Sequence: Synthetic oligonucleotide
cacaccauccaccugagcu

SEQ ID NO: 1634231 - RNA, 19 nt, Artificial Sequence
  Description of Artificial Sequence: Synthetic oligonucleotide
cuguccgcagcagagcgcg

SEQ ID NO: 1634232 - RNA, 19 nt, Artificial Sequence
  Description of Artificial Sequence: Synthetic oligonucleotide
ugugcgcacuguagguugc

SEQ ID NO: 1634233 - RNA, 19 nt, Artificial Sequence
  Description of Artificial Sequence: Synthetic oligonucleotide
augugaggccagcaggugu

SEQ ID NO: 1634234 - RNA, 19 nt, Artificial Sequence
  Description of Artificial Sequence: Synthetic oligonucleotide
gguauaguugggccagucc

SEQ ID NO: 1634235 - RNA, 19 nt, Artificial Sequence
  Description of Artificial Sequence: Synthetic oligonucleotide
cagguacagcaagugaggg

SEQ ID NO: 1634236 - RNA, 19 nt, Artificial Sequence
  Description of Artificial Sequence: Synthetic oligonucleotide
aggcccauagagcuguccu

SEQ ID NO: 1634237 - RNA, 19 nt, Artificial Sequence
  Description of Artificial Sequence: Synthetic oligonucleotide
caccaaggccuccaggccc

SEQ ID NO: 1634238 - RNA, 19 nt, Artificial Sequence
  Description of Artificial Sequence: Synthetic oligonucleotide
ucuacacccuuuggcaggc

SEQ ID NO: 1634239 - RNA, 19 nt, Artificial Sequence
  Description of Artificial Sequence: Synthetic oligonucleotide
cacuguagguugcccagcc

SEQ ID NO: 1634240 - RNA, 19 nt, Artificial Sequence
  Description of Artificial Sequence: Synthetic oligonucleotide
uacgacuuucuacacccuu

SEQ ID NO: 1634241 - RNA, 19 nt, Artificial Sequence
  Description of Artificial Sequence: Synthetic oligonucleotide
ccaaguggacaccacauac

SEQ ID NO: 1634242 - RNA, 19 nt, Artificial Sequence
  Description of Artificial Sequence: Synthetic oligonucleotide
caaagaaacacagcucgga

SEQ ID NO: 1634243 - RNA, 19 nt, Artificial Sequence
  Description of Artificial Sequence: Synthetic oligonucleotide
gggaccaccaucuagggcu

SEQ ID NO: 1634244 - RNA, 19 nt, Artificial Sequence
  Description of Artificial Sequence: Synthetic oligonucleotide
guaggccccagucagugca

SEQ ID NO: 1634245 - RNA, 19 nt, Artificial Sequence
  Description of Artificial Sequence: Synthetic oligonucleotide
aaggccgagcucgguauag

SEQ ID NO: 1634246 - RNA, 19 nt, Artificial Sequence
  Description of Artificial Sequence: Synthetic oligonucleotide
aguugggccaguccaugga

SEQ ID NO: 1634247 - RNA, 19 nt, Artificial Sequence
  Description of Artificial Sequence: Synthetic oligonucleotide
uagagucgggcaugguccc

SEQ ID NO: 1634248 - RNA, 19 nt, Artificial Sequence
  Description of Artificial Sequence: Synthetic oligonucleotide
cuagcugucuggccaguac

SEQ ID NO: 1634249 - RNA, 19 nt, Artificial Sequence
  Description of Artificial Sequence: Synthetic oligonucleotide
cacauacgacuuucuacac

SEQ ID NO: 1634250 - RNA, 19 nt, Artificial Sequence
  Description of Artificial Sequence: Synthetic oligonucleotide
ccauggaccaaagaugugc

SEQ ID NO: 1634251 - RNA, 19 nt, Artificial Sequence
  Description of Artificial Sequence: Synthetic oligonucleotide
cagcauucgaaggugccag

SEQ ID NO: 1634252 - RNA, 19 nt, Artificial Sequence
  Description of Artificial Sequence: Synthetic oligonucleotide
ccacauacgacuuucuaca

SEQ ID NO: 1634253 - RNA, 19 nt, Artificial Sequence
  Description of Artificial Sequence: Synthetic oligonucleotide
ugcaggugugcauggcaug

SEQ ID NO: 1634254 - RNA, 19 nt, Artificial Sequence
  Description of Artificial Sequence: Synthetic oligonucleotide
guagacagggagccuccag

SEQ ID NO: 1634255 - RNA, 19 nt, Artificial Sequence
  Description of Artificial Sequence: Synthetic oligonucleotide
ggcuuaccugaucuaagag

SEQ ID NO: 1634256 - RNA, 19 nt, Artificial Sequence
  Description of Artificial Sequence: Synthetic oligonucleotide
aguggccaaggccugggga

SEQ ID NO: 1634257 - RNA, 19 nt, Artificial Sequence
  Description of Artificial Sequence: Synthetic oligonucleotide
uuggccuagugacgaggcc

SEQ ID NO: 1634258 - RNA, 19 nt, Artificial Sequence
  Description of Artificial Sequence: Synthetic oligonucleotide
aggugugcauggcauguga

SEQ ID NO: 1634259 - RNA, 19 nt, Artificial Sequence
  Description of Artificial Sequence: Synthetic oligonucleotide
uacagcaagugaggggccc

SEQ ID NO: 1634260 - RNA, 19 nt, Artificial Sequence
  Description of Artificial Sequence: Synthetic oligonucleotide
uuaccugaucuaagagguc

SEQ ID NO: 1634261 - RNA, 19 nt, Artificial Sequence
  Description of Artificial Sequence: Synthetic oligonucleotide
gugccagcaaagcgauucg

SEQ ID NO: 1634262 - RNA, 19 nt, Artificial Sequence
  Description of Artificial Sequence: Synthetic oligonucleotide
ucuacaaaaugaggagcua

SEQ ID NO: 1634263 - RNA, 19 nt, Artificial Sequence
  Description of Artificial Sequence: Synthetic oligonucleotide
agcaaagcgauucguucuu

SEQ ID NO: 1634264 - RNA, 19 nt, Artificial Sequence
  Description of Artificial Sequence: Synthetic oligonucleotide
ggccucaacauguaggcga

SEQ ID NO: 1634265 - RNA, 19 nt, Artificial Sequence
  Description of Artificial Sequence: Synthetic oligonucleotide
gacagcuaugagguaggug

SEQ ID NO: 1634266 - RNA, 19 nt, Artificial Sequence
  Description of Artificial Sequence: Synthetic oligonucleotide
cucaacauguaggcgagca

SEQ ID NO: 1634267 - RNA, 19 nt, Artificial Sequence
  Description of Artificial Sequence: Synthetic oligonucleotide
gccacuacaacaaagggcu

SEQ ID NO: 1634268 - RNA, 19 nt, Artificial Sequence
  Description of Artificial Sequence: Synthetic oligonucleotide
acuugacagaugggaaaag

SEQ ID NO: 1634269 - RNA, 19 nt, Artificial Sequence
  Description of Artificial Sequence: Synthetic oligonucleotide
aagcagggguauguggaca

SEQ ID NO: 1634270 - RNA, 19 nt, Artificial Sequence
  Description of Artificial Sequence: Synthetic oligonucleotide
ucguucuugccuggccugg

SEQ ID NO: 1634271 - RNA, 19 nt, Artificial Sequence
  Description of Artificial Sequence: Synthetic oligonucleotide
cagggguauguggacagcc

SEQ ID NO: 1634272 - RNA, 19 nt, Artificial Sequence
  Description of Artificial Sequence: Synthetic oligonucleotide
ccaaccaggggcagcacgg

SEQ ID NO: 1634273 - RNA, 19 nt, Artificial Sequence
  Description of Artificial Sequence: Synthetic oligonucleotide
gugcauggcaugugaggcc

SEQ ID NO: 1634274 - RNA, 19 nt, Artificial Sequence
  Description of Artificial Sequence: Synthetic oligonucleotide
gucagugcaguguauggcu

SEQ ID NO: 1634275 - RNA, 19 nt, Artificial Sequence
  Description of Artificial Sequence: Synthetic oligonucleotide
gucuacaaaaugaggagcu

SEQ ID NO: 1634276 - RNA, 19 nt, Artificial Sequence
  Description of Artificial Sequence: Synthetic oligonucleotide
uguaggccccagucagugc

SEQ ID NO: 1634277 - RNA, 19 nt, Artificial Sequence
  Description of Artificial Sequence: Synthetic oligonucleotide
gcagguacagcaagugagg

SEQ ID NO: 1634278 - RNA, 19 nt, Artificial Sequence
  Description of Artificial Sequence: Synthetic oligonucleotide
caguagggccugcuguagg

SEQ ID NO: 1634279 - RNA, 19 nt, Artificial Sequence
  Description of Artificial Sequence: Synthetic oligonucleotide
agugacgaggccagugcag

SEQ ID NO: 1634280 - RNA, 19 nt, Artificial Sequence
  Description of Artificial Sequence: Synthetic oligonucleotide
agucgggcauggucccgcc

SEQ ID NO: 1634281 - RNA, 19 nt, Artificial Sequence
  Description of Artificial Sequence: Synthetic oligonucleotide
cacagcucggagcccuugg

SEQ ID NO: 1634282 - RNA, 19 nt, Artificial Sequence
  Description of Artificial Sequence: Synthetic oligonucleotide
cagcucggagcccuugggg

SEQ ID NO: 1634283 - RNA, 19 nt, Artificial Sequence
  Description of Artificial Sequence: Synthetic oligonucleotide
gcaguguauggcugcagcc

SEQ ID NO: 1634284 - RNA, 19 nt, Artificial Sequence
  Description of Artificial Sequence: Synthetic oligonucleotide
gcggcauacccgcaguagg

SEQ ID NO: 1634285 - RNA, 19 nt, Artificial Sequence
  Description of Artificial Sequence: Synthetic oligonucleotide
accuuugccagcauucgaa

SEQ ID NO: 1634286 - RNA, 19 nt, Artificial Sequence
  Description of Artificial Sequence: Synthetic oligonucleotide
accgggagugugccuuugg

SEQ ID NO: 1634287 - RNA, 19 nt, Artificial Sequence
  Description of Artificial Sequence: Synthetic oligonucleotide
ggaccaaagaugugcgcac

SEQ ID NO: 1634288 - RNA, 19 nt, Artificial Sequence
  Description of Artificial Sequence: Synthetic oligonucleotide
gugggcugcaaggcuacgg

SEQ ID NO: 1634289 - RNA, 19 nt, Artificial Sequence
  Description of Artificial Sequence: Synthetic oligonucleotide
cuggacacaagcaggggua

SEQ ID NO: 1634290 - RNA, 19 nt, Artificial Sequence
  Description of Artificial Sequence: Synthetic oligonucleotide
acagaugggaaaagaggau

SEQ ID NO: 1634291 - RNA, 19 nt, Artificial Sequence
  Description of Artificial Sequence: Synthetic oligonucleotide
ggcaacgagguaugaggcc

SEQ ID NO: 1634292 - RNA, 19 nt, Artificial Sequence
  Description of Artificial Sequence: Synthetic oligonucleotide
uucuugccuggccuggcua

SEQ ID NO: 1634293 - RNA, 19 nt, Artificial Sequence
  Description of Artificial Sequence: Synthetic oligonucleotide
acuguagguugcccagcca

SEQ ID NO: 1634294 - RNA, 19 nt, Artificial Sequence
  Description of Artificial Sequence: Synthetic oligonucleotide
agagaucaucaaagaaaca

SEQ ID NO: 1634295 - RNA, 19 nt, Artificial Sequence
  Description of Artificial Sequence: Synthetic oligonucleotide
caacgagguaugaggccug

SEQ ID NO: 1634296 - RNA, 19 nt, Artificial Sequence
  Description of Artificial Sequence: Synthetic oligonucleotide
gagcgcggcauacccgcag

SEQ ID NO: 1634297 - RNA, 19 nt, Artificial Sequence
  Description of Artificial Sequence: Synthetic oligonucleotide
ggcaguuggacagcuauga

SEQ ID NO: 1634298 - RNA, 19 nt, Artificial Sequence
  Description of Artificial Sequence: Synthetic oligonucleotide
cauggucccgcccgucagc

SEQ ID NO: 1634299 - RNA, 19 nt, Artificial Sequence
  Description of Artificial Sequence: Synthetic oligonucleotide
gaugggaaaagaggauaua

SEQ ID NO: 1634300 - RNA, 19 nt, Artificial Sequence
  Description of Artificial Sequence: Synthetic oligonucleotide
gggaaaggcaggaagaggu

SEQ ID NO: 1634301 - RNA, 19 nt, Artificial Sequence
  Description of Artificial Sequence: Synthetic oligonucleotide
cauggcaugugaggccagc

SEQ ID NO: 1634302 - RNA, 19 nt, Artificial Sequence
  Description of Artificial Sequence: Synthetic oligonucleotide
cccgucagcauccucuagc

SEQ ID NO: 1634303 - RNA, 19 nt, Artificial Sequence
  Description of Artificial Sequence: Synthetic oligonucleotide
gcauacccgcaguagggcc

SEQ ID NO: 1634304 - RNA, 19 nt, Artificial Sequence
  Description of Artificial Sequence: Synthetic oligonucleotide
guauggcugcagccuguag

SEQ ID NO: 1634305 - RNA, 19 nt, Artificial Sequence
  Description of Artificial Sequence: Synthetic oligonucleotide
caaggcuacggagguaguc

SEQ ID NO: 1634306 - RNA, 19 nt, Artificial Sequence
  Description of Artificial Sequence: Synthetic oligonucleotide
gcaguuggacagcuaugag

SEQ ID NO: 1634307 - RNA, 19 nt, Artificial Sequence
  Description of Artificial Sequence: Synthetic oligonucleotide
agggcucuagguguuggga

SEQ ID NO: 1634308 - RNA, 19 nt, Artificial Sequence
  Description of Artificial Sequence: Synthetic oligonucleotide
ugcgcacuguagguugccc

SEQ ID NO: 1634309 - RNA, 19 nt, Artificial Sequence
  Description of Artificial Sequence: Synthetic oligonucleotide
cagcaaagcgauucguucu

SEQ ID NO: 1634310 - RNA, 19 nt, Artificial Sequence
  Description of Artificial Sequence: Synthetic oligonucleotide
uggccaaggccuggggacc

SEQ ID NO: 1634311 - RNA, 19 nt, Artificial Sequence
  Description of Artificial Sequence: Synthetic oligonucleotide
ugccagcaaagcgauucgu

SEQ ID NO: 1634312 - RNA, 19 nt, Artificial Sequence
  Description of Artificial Sequence: Synthetic oligonucleotide
caugugaggccagcaggug

SEQ ID NO: 1634313 - RNA, 19 nt, Artificial Sequence
  Description of Artificial Sequence: Synthetic oligonucleotide
aggcccuguggcccaagug

SEQ ID NO: 1634314 - RNA, 19 nt, Artificial Sequence
  Description of Artificial Sequence: Synthetic oligonucleotide
ggugugcauggcaugugag

SEQ ID NO: 1634315 - RNA, 19 nt, Artificial Sequence
  Description of Artificial Sequence: Synthetic oligonucleotide
ggcucuagguguugggaca

SEQ ID NO: 1634316 - RNA, 19 nt, Artificial Sequence
  Description of Artificial Sequence: Synthetic oligonucleotide
gcuguaguccagccagcag

SEQ ID NO: 1634317 - RNA, 19 nt, Artificial Sequence
  Description of Artificial Sequence: Synthetic oligonucleotide
aaaggcccauagagcuguc

SEQ ID NO: 1634318 - RNA, 19 nt, Artificial Sequence
  Description of Artificial Sequence: Synthetic oligonucleotide
gggcucuagguguugggac

SEQ ID NO: 1634319 - RNA, 19 nt, Artificial Sequence
  Description of Artificial Sequence: Synthetic oligonucleotide
cagcucggggcuuaccuga

SEQ ID NO: 1634320 - RNA, 19 nt, Artificial Sequence
  Description of Artificial Sequence: Synthetic oligonucleotide
aaggucaggcacagaggau

SEQ ID NO: 1634321 - RNA, 19 nt, Artificial Sequence
  Description of Artificial Sequence: Synthetic oligonucleotide
acgacuuucuacacccuuu

SEQ ID NO: 1634322 - RNA, 19 nt, Artificial Sequence
  Description of Artificial Sequence: Synthetic oligonucleotide
guugggacaccaaggccuc

SEQ ID NO: 1634323 - RNA, 19 nt, Artificial Sequence
  Description of Artificial Sequence: Synthetic oligonucleotide
cauucgaaggugccagcaa

SEQ ID NO: 1634324 - RNA, 19 nt, Artificial Sequence
  Description of Artificial Sequence: Synthetic oligonucleotide
ggccaagaggaccauugga

SEQ ID NO: 1634325 - RNA, 19 nt, Artificial Sequence
  Description of Artificial Sequence: Synthetic oligonucleotide
agcccuuggggagcugggg

SEQ ID NO: 1634326 - RNA, 19 nt, Artificial Sequence
  Description of Artificial Sequence: Synthetic oligonucleotide
gcuggcaacgagguaugag

SEQ ID NO: 1634327 - RNA, 19 nt, Artificial Sequence
  Description of Artificial Sequence: Synthetic oligonucleotide
gcccauagagcuguccugc

SEQ ID NO: 1634328 - RNA, 19 nt, Artificial Sequence
  Description of Artificial Sequence: Synthetic oligonucleotide
cacggaagcgcagcuccag

SEQ ID NO: 1634329 - RNA, 19 nt, Artificial Sequence
  Description of Artificial Sequence: Synthetic oligonucleotide
agcgcggcauacccgcagu

SEQ ID NO: 1634330 - RNA, 19 nt, Artificial Sequence
  Description of Artificial Sequence: Synthetic oligonucleotide
gagcuagggaaggccgagc

SEQ ID NO: 1634331 - RNA, 19 nt, Artificial Sequence
  Description of Artificial Sequence: Synthetic oligonucleotide
ggaagcgcagcuccagaga

SEQ ID NO: 1634332 - RNA, 19 nt, Artificial Sequence
  Description of Artificial Sequence: Synthetic oligonucleotide
agcaccgggagugugccuu

SEQ ID NO: 1634333 - RNA, 19 nt, Artificial Sequence
  Description of Artificial Sequence: Synthetic oligonucleotide
ggcccauagagcuguccug

SEQ ID NO: 1634334 - RNA, 19 nt, Artificial Sequence
  Description of Artificial Sequence: Synthetic oligonucleotide
acagcaagugaggggccca

SEQ ID NO: 1634335 - RNA, 19 nt, Artificial Sequence
  Description of Artificial Sequence: Synthetic oligonucleotide
cucggagcccuuggggagc

SEQ ID NO: 1634336 - RNA, 19 nt, Artificial Sequence
  Description of Artificial Sequence: Synthetic oligonucleotide
caaaggcccauagagcugu

SEQ ID NO: 1634337 - RNA, 19 nt, Artificial Sequence
  Description of Artificial Sequence: Synthetic oligonucleotide
agggguauguggacagccu

SEQ ID NO: 1634338 - RNA, 19 nt, Artificial Sequence
  Description of Artificial Sequence: Synthetic oligonucleotide
ggggcuuaccugaucuaag

SEQ ID NO: 1634339 - RNA, 19 nt, Artificial Sequence
  Description of Artificial Sequence: Synthetic oligonucleotide
ggagcuagggaaggccgag

SEQ ID NO: 1634340 - RNA, 19 nt, Artificial Sequence
  Description of Artificial Sequence: Synthetic oligonucleotide
guacagcaagugaggggcc

SEQ ID NO: 1634341 - RNA, 19 nt, Artificial Sequence
  Description of Artificial Sequence: Synthetic oligonucleotide
cucggggcuuaccugaucu

SEQ ID NO: 1634342 - RNA, 19 nt, Artificial Sequence
  Description of Artificial Sequence: Synthetic oligonucleotide
cuagguguugggacaccaa

SEQ ID NO: 1634343 - RNA, 19 nt, Artificial Sequence
  Description of Artificial Sequence: Synthetic oligonucleotide
aagcgcagcuccagagagu

SEQ ID NO: 1634344 - RNA, 19 nt, Artificial Sequence
  Description of Artificial Sequence: Synthetic oligonucleotide
auacccgcaguagggccug

SEQ ID NO: 1634345 - RNA, 19 nt, Artificial Sequence
  Description of Artificial Sequence: Synthetic oligonucleotide
gcucgguauaguugggcca

SEQ ID NO: 1634346 - RNA, 19 nt, Artificial Sequence
  Description of Artificial Sequence: Synthetic oligonucleotide
aguagacagggagccucca

SEQ ID NO: 1634347 - RNA, 19 nt, Artificial Sequence
  Description of Artificial Sequence: Synthetic oligonucleotide
ucuagcugucuggccagua

SEQ ID NO: 1634348 - RNA, 19 nt, Artificial Sequence
  Description of Artificial Sequence: Synthetic oligonucleotide
ggcauacccgcaguagggc

SEQ ID NO: 1634349 - RNA, 19 nt, Artificial Sequence
  Description of Artificial Sequence: Synthetic oligonucleotide
ggggcugagccacuacaac

SEQ ID NO: 1634350 - RNA, 19 nt, Artificial Sequence
  Description of Artificial Sequence: Synthetic oligonucleotide
gccucaacauguaggcgag

SEQ ID NO: 1634351 - RNA, 19 nt, Artificial Sequence
  Description of Artificial Sequence: Synthetic oligonucleotide
cauacccgcaguagggccu

SEQ ID NO: 1634352 - RNA, 19 nt, Artificial Sequence
  Description of Artificial Sequence: Synthetic oligonucleotide
cacccuuuggcaggcagga

SEQ ID NO: 1634353 - RNA, 19 nt, Artificial Sequence
  Description of Artificial Sequence: Synthetic oligonucleotide
ggcugagccacuacaacaa

SEQ ID NO: 1634354 - RNA, 19 nt, Artificial Sequence
  Description of Artificial Sequence: Synthetic oligonucleotide
ucucagcucggggcuuacc

SEQ ID NO: 1634355 - RNA, 19 nt, Artificial Sequence
  Description of Artificial Sequence: Synthetic oligonucleotide
gcgauucguucuugccugg

SEQ ID NO: 1634356 - RNA, 19 nt, Artificial Sequence
  Description of Artificial Sequence: Synthetic oligonucleotide
cggcauacccgcaguaggg

SEQ ID NO: 1634357 - RNA, 19 nt, Artificial Sequence
  Description of Artificial Sequence: Synthetic oligonucleotide
cucuagguguugggacacc

SEQ ID NO: 1634358 - RNA, 19 nt, Artificial Sequence
  Description of Artificial Sequence: Synthetic oligonucleotide
cacggcccaguugucaguc

SEQ ID NO: 1634359 - RNA, 19 nt, Artificial Sequence
  Description of Artificial Sequence: Synthetic oligonucleotide
uaccaccgugggcugugaa

SEQ ID NO: 1634360 - RNA, 19 nt, Artificial Sequence
  Description of Artificial Sequence: Synthetic oligonucleotide
ccuagugacgaggccagug

SEQ ID NO: 1634361 - RNA, 19 nt, Artificial Sequence
  Description of Artificial Sequence: Synthetic oligonucleotide
ucggggcuuaccugaucua

SEQ ID NO: 1634362 - RNA, 19 nt, Artificial Sequence
  Description of Artificial Sequence: Synthetic oligonucleotide
acaccacauacgacuuucu

SEQ ID NO: 1634363 - RNA, 19 nt, Artificial Sequence
  Description of Artificial Sequence: Synthetic oligonucleotide
ggucccgcccgucagcauc

SEQ ID NO: 1634364 - RNA, 19 nt, Artificial Sequence
  Description of Artificial Sequence: Synthetic oligonucleotide
caccacauacgacuuucua

SEQ ID NO: 1634365 - RNA, 19 nt, Artificial Sequence
  Description of Artificial Sequence: Synthetic oligonucleotide
aggguggcucucugggcau

SEQ ID NO: 1634366 - RNA, 19 nt, Artificial Sequence
  Description of Artificial Sequence: Synthetic oligonucleotide
gcauggucccgcccgucag

SEQ ID NO: 1634367 - RNA, 19 nt, Artificial Sequence
  Description of Artificial Sequence: Synthetic oligonucleotide
cgacuuucuacacccuuug

SEQ ID NO: 1634368 - RNA, 19 nt, Artificial Sequence
  Description of Artificial Sequence: Synthetic oligonucleotide
gugugccuuuggccuagug

SEQ ID NO: 1634369 - RNA, 19 nt, Artificial Sequence
  Description of Artificial Sequence: Synthetic oligonucleotide
cagcaagugaggggcccag

SEQ ID NO: 1634370 - RNA, 19 nt, Artificial Sequence
  Description of Artificial Sequence: Synthetic oligonucleotide
auacgacuuucuacacccu

SEQ ID NO: 1634371 - RNA, 19 nt, Artificial Sequence
  Description of Artificial Sequence: Synthetic oligonucleotide
gccgagcucgguauaguug

SEQ ID NO: 1634372 - RNA, 19 nt, Artificial Sequence
  Description of Artificial Sequence: Synthetic oligonucleotide
gguaccaccgugggcugug

SEQ ID NO: 1634373 - RNA, 19 nt, Artificial Sequence
  Description of Artificial Sequence: Synthetic oligonucleotide
gaugugcgcacuguagguu

SEQ ID NO: 1634374 - RNA, 19 nt, Artificial Sequence
  Description of Artificial Sequence: Synthetic oligonucleotide
gggcucucucagcucgggg

SEQ ID NO: 1634375 - RNA, 19 nt, Artificial Sequence
  Description of Artificial Sequence: Synthetic oligonucleotide
gcugcaaggcuacggaggu

SEQ ID NO: 1634376 - RNA, 19 nt, Artificial Sequence
  Description of Artificial Sequence: Synthetic oligonucleotide
gccuuuggccuagugacga

SEQ ID NO: 1634377 - RNA, 19 nt, Artificial Sequence
  Description of Artificial Sequence: Synthetic oligonucleotide
gaaggccgagcucgguaua

SEQ ID NO: 1634378 - RNA, 19 nt, Artificial Sequence
  Description of Artificial Sequence: Synthetic oligonucleotide
gggccucaacauguaggcg

SEQ ID NO: 1634379 - RNA, 19 nt, Artificial Sequence
  Description of Artificial Sequence: Synthetic oligonucleotide
gcagagcgcggcauacccg

SEQ ID NO: 1634380 - RNA, 19 nt, Artificial Sequence
  Description of Artificial Sequence: Synthetic oligonucleotide
accacccugaggggcucuc

SEQ ID NO: 1634381 - RNA, 19 nt, Artificial Sequence
  Description of Artificial Sequence: Synthetic oligonucleotide
caguguauggcugcagccu

SEQ ID NO: 1634382 - RNA, 19 nt, Artificial Sequence
  Description of Artificial Sequence: Synthetic oligonucleotide
gaccaaagaugugcgcacu

SEQ ID NO: 1634383 - RNA, 19 nt, Artificial Sequence
  Description of Artificial Sequence: Synthetic oligonucleotide
gcauucgaaggugccagca

SEQ ID NO: 1634384 - RNA, 19 nt, Artificial Sequence
  Description of Artificial Sequence: Synthetic oligonucleotide
gucccgcccgucagcaucc

SEQ ID NO: 1634385 - RNA, 19 nt, Artificial Sequence
  Description of Artificial Sequence: Synthetic oligonucleotide
ccgggagugugccuuuggc

SEQ ID NO: 1634386 - RNA, 19 nt, Artificial Sequence
  Description of Artificial Sequence: Synthetic oligonucleotide
guauguggacagccuccaa

SEQ ID NO: 1634387 - RNA, 19 nt, Artificial Sequence
  Description of Artificial Sequence: Synthetic oligonucleotide
gugguauaaagggccucaa

SEQ ID NO: 1634388 - RNA, 19 nt, Artificial Sequence
  Description of Artificial Sequence: Synthetic oligonucleotide
guuggacagcuaugaggua

SEQ ID NO: 1634389 - RNA, 19 nt, Artificial Sequence
  Description of Artificial Sequence: Synthetic oligonucleotide
gcagcaccgggagugugcc

SEQ ID NO: 1634390 - RNA, 19 nt, Artificial Sequence
  Description of Artificial Sequence: Synthetic oligonucleotide
uaguagagucgggcauggu

SEQ ID NO: 1634391 - RNA, 19 nt, Artificial Sequence
  Description of Artificial Sequence: Synthetic oligonucleotide
accugaucuaagaggucua

SEQ ID NO: 1634392 - RNA, 19 nt, Artificial Sequence
  Description of Artificial Sequence: Synthetic oligonucleotide
gcuacggagguagucccca

SEQ ID NO: 1634393 - RNA, 19 nt, Artificial Sequence
  Description of Artificial Sequence: Synthetic oligonucleotide
gggcgucggggcugcaagg

SEQ ID NO: 1634394 - RNA, 19 nt, Artificial Sequence
  Description of Artificial Sequence: Synthetic oligonucleotide
gccaagaggaccauuggau

SEQ ID NO: 1634395 - RNA, 19 nt, Artificial Sequence
  Description of Artificial Sequence: Synthetic oligonucleotide
gucgggcauggucccgccc

SEQ ID NO: 1634396 - RNA, 19 nt, Artificial Sequence
  Description of Artificial Sequence: Synthetic oligonucleotide
ucggagcccuuggggagcu

SEQ ID NO: 1634397 - RNA, 19 nt, Artificial Sequence
  Description of Artificial Sequence: Synthetic oligonucleotide
gcuagggaaggccgagcuc

SEQ ID NO: 1634398 - RNA, 19 nt, Artificial Sequence
  Description of Artificial Sequence: Synthetic oligonucleotide
aggggcucucucagcucgg

SEQ ID NO: 1634399 - RNA, 19 nt, Artificial Sequence
  Description of Artificial Sequence: Synthetic oligonucleotide
caucagcacagagcaggca

SEQ ID NO: 1634400 - RNA, 19 nt, Artificial Sequence
  Description of Artificial Sequence: Synthetic oligonucleotide
accauccaccugagcuuuc

SEQ ID NO: 1634401 - RNA, 19 nt, Artificial Sequence
  Description of Artificial Sequence: Synthetic oligonucleotide
ccugcagaugcagcaccgg

SEQ ID NO: 1634402 - RNA, 19 nt, Artificial Sequence
  Description of Artificial Sequence: Synthetic oligonucleotide
gcgcacuguagguugccca

SEQ ID NO: 1634403 - RNA, 19 nt, Artificial Sequence
  Description of Artificial Sequence: Synthetic oligonucleotide
ccuuuggccuagugacgag

SEQ ID NO: 1634404 - RNA, 19 nt, Artificial Sequence
  Description of Artificial Sequence: Synthetic oligonucleotide
gugcgcacuguagguugcc

SEQ ID NO: 1634405 - RNA, 19 nt, Artificial Sequence
  Description of Artificial Sequence: Synthetic oligonucleotide
ccaccgugggcugugaaca

SEQ ID NO: 1634406 - RNA, 19 nt, Artificial Sequence
  Description of Artificial Sequence: Synthetic oligonucleotide
ggaaggccgagcucgguau

SEQ ID NO: 1634407 - RNA, 19 nt, Artificial Sequence
  Description of Artificial Sequence: Synthetic oligonucleotide
cagcuaugagguagguggu

SEQ ID NO: 1634408 - RNA, 19 nt, Artificial Sequence
  Description of Artificial Sequence: Synthetic oligonucleotide
gcagcuccagagaguagac

SEQ ID NO: 1634409 - RNA, 19 nt, Artificial Sequence
  Description of Artificial Sequence: Synthetic oligonucleotide
gggcaguuggacagcuaug

SEQ ID NO: 1634410 - RNA, 19 nt, Artificial Sequence
  Description of Artificial Sequence: Synthetic oligonucleotide
aacacagcucggagcccuu

SEQ ID NO: 1634411 - RNA, 19 nt, Artificial Sequence
  Description of Artificial Sequence: Synthetic oligonucleotide
aggccgagcucgguauagu

SEQ ID NO: 1634412 - RNA, 19 nt, Artificial Sequence
  Description of Artificial Sequence: Synthetic oligonucleotide
ccaguacuugcagcaaguc

SEQ ID NO: 1634413 - RNA, 19 nt, Artificial Sequence
  Description of Artificial Sequence: Synthetic oligonucleotide
ugaggggcccagggccaug

SEQ ID NO: 1634414 - RNA, 19 nt, Artificial Sequence
  Description of Artificial Sequence: Synthetic oligonucleotide
cugugaacauggccuuucu

SEQ ID NO: 1634415 - RNA, 19 nt, Artificial Sequence
  Description of Artificial Sequence: Synthetic oligonucleotide
agcuggcaacgagguauga

SEQ ID NO: 1634416 - RNA, 19 nt, Artificial Sequence
  Description of Artificial Sequence: Synthetic oligonucleotide
ggugugguauaaagggccu

SEQ ID NO: 1634417 - RNA, 19 nt, Artificial Sequence
  Description of Artificial Sequence: Synthetic oligonucleotide
gcacuguagguugcccagc

SEQ ID NO: 1634418 - RNA, 19 nt, Artificial Sequence
  Description of Artificial Sequence: Synthetic oligonucleotide
gccaguccauggaccaaag

SEQ ID NO: 1634419 - RNA, 19 nt, Artificial Sequence
  Description of Artificial Sequence: Synthetic oligonucleotide
caccaucuagggcugcccu

SEQ ID NO: 1634420 - RNA, 19 nt, Artificial Sequence
  Description of Artificial Sequence: Synthetic oligonucleotide
ggcuacggagguagucccc

SEQ ID NO: 1634421 - RNA, 19 nt, Artificial Sequence
  Description of Artificial Sequence: Synthetic oligonucleotide
cgagcucgguauaguuggg

SEQ ID NO: 1634422 - RNA, 19 nt, Artificial Sequence
  Description of Artificial Sequence: Synthetic oligonucleotide
gcccacacggaagcgcagc

SEQ ID NO: 1634423 - RNA, 19 nt, Artificial Sequence
  Description of Artificial Sequence: Synthetic oligonucleotide
ccauuggaucaugcaggag

SEQ ID NO: 1634424 - RNA, 19 nt, Artificial Sequence
  Description of Artificial Sequence: Synthetic oligonucleotide
ccaccaucuagggcugccc

SEQ ID NO: 1634425 - RNA, 19 nt, Artificial Sequence
  Description of Artificial Sequence: Synthetic oligonucleotide
ccacuacaacaaagggcuc

SEQ ID NO: 1634426 - RNA, 19 nt, Artificial Sequence
  Description of Artificial Sequence: Synthetic oligonucleotide
ggccaguccauggaccaaa

SEQ ID NO: 1634427 - RNA, 19 nt, Artificial Sequence
  Description of Artificial Sequence: Synthetic oligonucleotide
gcaggugugcauggcaugu

SEQ ID NO: 1634428 - RNA, 19 nt, Artificial Sequence
  Description of Artificial Sequence: Synthetic oligonucleotide
ggcaggaguuccagagauc

SEQ ID NO: 1634429 - RNA, 19 nt, Artificial Sequence
  Description of Artificial Sequence: Synthetic oligonucleotide
gcagggguauguggacagc

SEQ ID NO: 1634430 - RNA, 19 nt, Artificial Sequence
  Description of Artificial Sequence: Synthetic oligonucleotide
gcacaccauccaccugagc

SEQ ID NO: 1634431 - RNA, 19 nt, Artificial Sequence
  Description of Artificial Sequence: Synthetic oligonucleotide
agagcgcggcauacccgca

SEQ ID NO: 1634432 - RNA, 19 nt, Artificial Sequence
  Description of Artificial Sequence: Synthetic oligonucleotide
cgucggggcugcaagguca

SEQ ID NO: 1634433 - RNA, 19 nt, Artificial Sequence
  Description of Artificial Sequence: Synthetic oligonucleotide
uggucccgcccgucagcau

SEQ ID NO: 1634434 - RNA, 19 nt, Artificial Sequence
  Description of Artificial Sequence: Synthetic oligonucleotide
caccgggagugugccuuug

SEQ ID NO: 1634435 - RNA, 19 nt, Artificial Sequence
  Description of Artificial Sequence: Synthetic oligonucleotide
cuccuguagguaccaccgu

SEQ ID NO: 1634436 - RNA, 19 nt, Artificial Sequence
  Description of Artificial Sequence: Synthetic oligonucleotide
agcucggggcuuaccugau

SEQ ID NO: 1634437 - RNA, 19 nt, Artificial Sequence
  Description of Artificial Sequence: Synthetic oligonucleotide
gccagcaggugugguauaa

SEQ ID NO: 1634438 - RNA, 19 nt, Artificial Sequence
  Description of Artificial Sequence: Synthetic oligonucleotide
ccaguccauggaccaaaga

SEQ ID NO: 1634439 - RNA, 19 nt, Artificial Sequence
  Description of Artificial Sequence: Synthetic oligonucleotide
cgauucguucuugccuggc

SEQ ID NO: 1634440 - RNA, 19 nt, Artificial Sequence
  Description of Artificial Sequence: Synthetic oligonucleotide
ccaaggccuggggaccacc

SEQ ID NO: 1634441 - RNA, 19 nt, Artificial Sequence
  Description of Artificial Sequence: Synthetic oligonucleotide
cgcggcauacccgcaguag

SEQ ID NO: 1634442 - RNA, 19 nt, Artificial Sequence
  Description of Artificial Sequence: Synthetic oligonucleotide
cccaaguggacaccacaua

SEQ ID NO: 1634443 - RNA, 19 nt, Artificial Sequence
  Description of Artificial Sequence: Synthetic oligonucleotide
gcgucggggcugcaagguc

SEQ ID NO: 1634444 - RNA, 19 nt, Artificial Sequence
  Description of Artificial Sequence: Synthetic oligonucleotide
gcucggggcuuaccugauc

SEQ ID NO: 1634445 - RNA, 19 nt, Artificial Sequence
  Description of Artificial Sequence: Synthetic oligonucleotide
caccauccaccugagcuuu

SEQ ID NO: 1634446 - RNA, 19 nt, Artificial Sequence
  Description of Artificial Sequence: Synthetic oligonucleotide
ccgcccgucagcauccucu

SEQ ID NO: 1634447 - RNA, 19 nt, Artificial Sequence
  Description of Artificial Sequence: Synthetic oligonucleotide
gcccaacuuggaacuugac

SEQ ID NO: 1634448 - RNA, 19 nt, Artificial Sequence
  Description of Artificial Sequence: Synthetic oligonucleotide
ccaucuagggcugcccucu

SEQ ID NO: 1634449 - RNA, 19 nt, Artificial Sequence
  Description of Artificial Sequence: Synthetic oligonucleotide
gcccaguugucaguccuua

SEQ ID NO: 1634450 - RNA, 19 nt, Artificial Sequence
  Description of Artificial Sequence: Synthetic oligonucleotide
ggccgagcucgguauaguu

SEQ ID NO: 1634451 - RNA, 19 nt, Artificial Sequence
  Description of Artificial Sequence: Synthetic oligonucleotide
gccagcaaagcgauucguu

SEQ ID NO: 1634452 - RNA, 19 nt, Artificial Sequence
  Description of Artificial Sequence: Synthetic oligonucleotide
gcaggcgggccaagaggac

SEQ ID NO: 1634453 - RNA, 19 nt, Artificial Sequence
  Description of Artificial Sequence: Synthetic oligonucleotide
cuacacccuuuggcaggca

SEQ ID NO: 1634454 - RNA, 19 nt, Artificial Sequence
  Description of Artificial Sequence: Synthetic oligonucleotide
ucccgcccgucagcauccu

SEQ ID NO: 1634455 - RNA, 19 nt, Artificial Sequence
  Description of Artificial Sequence: Synthetic oligonucleotide
cgguauaguugggccaguc

SEQ ID NO: 1634456 - RNA, 19 nt, Artificial Sequence
  Description of Artificial Sequence: Synthetic oligonucleotide
cugggcgucggggcugcaa

SEQ ID NO: 1634457 - RNA, 19 nt, Artificial Sequence
  Description of Artificial Sequence: Synthetic oligonucleotide
ggcgucggggcugcaaggu

SEQ ID NO: 1634458 - RNA, 19 nt, Artificial Sequence
  Description of Artificial Sequence: Synthetic oligonucleotide
cugcaaggcuacggaggua

SEQ ID NO: 1634459 - RNA, 19 nt, Artificial Sequence
  Description of Artificial Sequence: Synthetic oligonucleotide
gcgcagcuccagagaguag

SEQ ID NO: 1634460 - RNA, 19 nt, Artificial Sequence
  Description of Artificial Sequence: Synthetic oligonucleotide
ggacagcuaugagguaggu

SEQ ID NO: 1634461 - RNA, 19 nt, Artificial Sequence
  Description of Artificial Sequence: Synthetic oligonucleotide
caugcccaacuuggaacuu

SEQ ID NO: 1634462 - RNA, 19 nt, Artificial Sequence
  Description of Artificial Sequence: Synthetic oligonucleotide
gcuguaggccccagucagu

SEQ ID NO: 1634463 - RNA, 19 nt, Artificial Sequence
  Description of Artificial Sequence: Synthetic oligonucleotide
cggggcuuaccugaucuaa

SEQ ID NO: 1634464 - RNA, 19 nt, Artificial Sequence
  Description of Artificial Sequence: Synthetic oligonucleotide
cccacacggaagcgcagcu

SEQ ID NO: 1634465 - RNA, 19 nt, Artificial Sequence
  Description of Artificial Sequence: Synthetic oligonucleotide
gcgcggcauacccgcagua

SEQ ID NO: 1634466 - RNA, 19 nt, Artificial Sequence
  Description of Artificial Sequence: Synthetic oligonucleotide
gggccugcuguaggcccca

SEQ ID NO: 1634467 - RNA, 19 nt, Artificial Sequence
  Description of Artificial Sequence: Synthetic oligonucleotide
cagcaccgggagugugccu

SEQ ID NO: 1634468 - RNA, 19 nt, Artificial Sequence
  Description of Artificial Sequence: Synthetic oligonucleotide
cgaggccagugcagguaca

SEQ ID NO: 1634469 - RNA, 19 nt, Artificial Sequence
  Description of Artificial Sequence: Synthetic oligonucleotide
cccgcccgucagcauccuc

SEQ ID NO: 1634470 - RNA, 19 nt, Artificial Sequence
  Description of Artificial Sequence: Synthetic oligonucleotide
cgcagcagagcgcggcaua

SEQ ID NO: 1634471 - RNA, 19 nt, Artificial Sequence
  Description of Artificial Sequence: Synthetic oligonucleotide
ggcccaguugucaguccuu

SEQ ID NO: 1634472 - RNA, 19 nt, Artificial Sequence
  Description of Artificial Sequence: Synthetic oligonucleotide
gcaccgggagugugccuuu

SEQ ID NO: 1634473 - RNA, 19 nt, Artificial Sequence
  Description of Artificial Sequence: Synthetic oligonucleotide
cgcccgucagcauccucua

SEQ ID NO: 1634474 - RNA, 19 nt, Artificial Sequence
  Description of Artificial Sequence: Synthetic oligonucleotide
caccacccugaggggcucu

SEQ ID NO: 1634475 - RNA, 19 nt, Artificial Sequence
  Description of Artificial Sequence: Synthetic oligonucleotide
gccuagugacgaggccagu

SEQ ID NO: 1634476 - RNA, 19 nt, Artificial Sequence
  Description of Artificial Sequence: Synthetic oligonucleotide
ggcgggccaagaggaccau

SEQ ID NO: 1634477 - RNA, 19 nt, Artificial Sequence
  Description of Artificial Sequence: Synthetic oligonucleotide
uuugauaugaccaacauuc

SEQ ID NO: 1634478 - RNA, 19 nt, Artificial Sequence
  Description of Artificial Sequence: Synthetic oligonucleotide
aauuguuugaauuauuaca

SEQ ID NO: 1634479 - RNA, 19 nt, Artificial Sequence
  Description of Artificial Sequence: Synthetic oligonucleotide
aucuauaaaaguuaggauc

SEQ ID NO: 1634480 - RNA, 19 nt, Artificial Sequence
  Description of Artificial Sequence: Synthetic oligonucleotide
uuuaaaguaacuuuggggu

SEQ ID NO: 1634481 - RNA, 19 nt, Artificial Sequence
  Description of Artificial Sequence: Synthetic oligonucleotide
gauaaaucagcacauagcc

SEQ ID NO: 1634482 - RNA, 19 nt, Artificial Sequence
  Description of Artificial Sequence: Synthetic oligonucleotide
uauauguuaaaauuguuug

SEQ ID NO: 1634483 - RNA, 19 nt, Artificial Sequence
  Description of Artificial Sequence: Synthetic oligonucleotide
caaacuauuaaacuaaacc

SEQ ID NO: 1634484 - RNA, 19 nt, Artificial Sequence
  Description of Artificial Sequence: Synthetic oligonucleotide
aaaugagaugaauuugugc

SEQ ID NO: 1634485 - RNA, 19 nt, Artificial Sequence
  Description of Artificial Sequence: Synthetic oligonucleotide
acaaauuucagaucacucc

SEQ ID NO: 1634486 - RNA, 19 nt, Artificial Sequence
  Description of Artificial Sequence: Synthetic oligonucleotide
uuaauguuugauaugacca

SEQ ID NO: 1634487 - RNA, 19 nt, Artificial Sequence
  Description of Artificial Sequence: Synthetic oligonucleotide
aaacauguuacauugagaa

SEQ ID NO: 1634488 - RNA, 19 nt, Artificial Sequence
  Description of Artificial Sequence: Synthetic oligonucleotide
aacuauuaaacuaaaccac

SEQ ID NO: 1634489 - RNA, 19 nt, Artificial Sequence
  Description of Artificial Sequence: Synthetic oligonucleotide
auaacuauucuuugaaaac

SEQ ID NO: 1634490 - RNA, 19 nt, Artificial Sequence
  Description of Artificial Sequence: Synthetic oligonucleotide
uuuaauguuugauaugacc

SEQ ID NO: 1634491 - RNA, 19 nt, Artificial Sequence
  Description of Artificial Sequence: Synthetic oligonucleotide
ugugacucagucaauagag

SEQ ID NO: 1634492 - RNA, 19 nt, Artificial Sequence
  Description of Artificial Sequence: Synthetic oligonucleotide
uauacuaauucuuaugaga

SEQ ID NO: 1634493 - RNA, 19 nt, Artificial Sequence
  Description of Artificial Sequence: Synthetic oligonucleotide
uguauuuauuguuugggag

SEQ ID NO: 1634494 - RNA, 19 nt, Artificial Sequence
  Description of Artificial Sequence: Synthetic oligonucleotide
aaugauuaggagcaguaca

SEQ ID NO: 1634495 - RNA, 19 nt, Artificial Sequence
  Description of Artificial Sequence: Synthetic oligonucleotide
cauuacaaugauuaggagc

SEQ ID NO: 1634496 - RNA, 19 nt, Artificial Sequence
  Description of Artificial Sequence: Synthetic oligonucleotide
aaacuaauguacuuuagaa

SEQ ID NO: 1634497 - RNA, 19 nt, Artificial Sequence
  Description of Artificial Sequence: Synthetic oligonucleotide
aauagcacuaguaagaaau

SEQ ID NO: 1634498 - RNA, 19 nt, Artificial Sequence
  Description of Artificial Sequence: Synthetic oligonucleotide
aaaaguuaggaucuaaauu

SEQ ID NO: 1634499 - RNA, 19 nt, Artificial Sequence
  Description of Artificial Sequence: Synthetic oligonucleotide
auaguuaaaauacauucca

SEQ ID NO: 1634500 - RNA, 19 nt, Artificial Sequence
  Description of Artificial Sequence: Synthetic oligonucleotide
uuaauaacuauucuuugaa

SEQ ID NO: 1634501 - RNA, 19 nt, Artificial Sequence
  Description of Artificial Sequence: Synthetic oligonucleotide
uacauugagaaauagcacu

SEQ ID NO: 1634502 - RNA, 19 nt, Artificial Sequence
  Description of Artificial Sequence: Synthetic oligonucleotide
auuacaaugauuaggagca

SEQ ID NO: 1634503 - RNA, 19 nt, Artificial Sequence
  Description of Artificial Sequence: Synthetic oligonucleotide
uauuaaguauaaauucacc

SEQ ID NO: 1634504 - RNA, 19 nt, Artificial Sequence
  Description of Artificial Sequence: Synthetic oligonucleotide
aacuauuuauuacauuaca

SEQ ID NO: 1634505 - RNA, 19 nt, Artificial Sequence
  Description of Artificial Sequence: Synthetic oligonucleotide
ucuaauuaauaacuauucu

SEQ ID NO: 1634506 - RNA, 19 nt, Artificial Sequence
  Description of Artificial Sequence: Synthetic oligonucleotide
uguaacuuaugacaugucu

SEQ ID NO: 1634507 - RNA, 19 nt, Artificial Sequence
  Description of Artificial Sequence: Synthetic oligonucleotide
aauuguauuugccugcuau

SEQ ID NO: 1634508 - RNA, 19 nt, Artificial Sequence
  Description of Artificial Sequence: Synthetic oligonucleotide
agguaaacauguuacauug

SEQ ID NO: 1634509 - RNA, 19 nt, Artificial Sequence
  Description of Artificial Sequence: Synthetic oligonucleotide
guuacauugagaaauagca

SEQ ID NO: 1634510 - RNA, 19 nt, Artificial Sequence
  Description of Artificial Sequence: Synthetic oligonucleotide
gagauaaaucagcacauag

SEQ ID NO: 1634511 - RNA, 19 nt, Artificial Sequence
  Description of Artificial Sequence: Synthetic oligonucleotide
ucaucuaaaaugccuacca

SEQ ID NO: 1634512 - RNA, 19 nt, Artificial Sequence
  Description of Artificial Sequence: Synthetic oligonucleotide
aaaaccggcauuucugcag

SEQ ID NO: 1634513 - RNA, 19 nt, Artificial Sequence
  Description of Artificial Sequence: Synthetic oligonucleotide
aacauuuguuuguugcuag

SEQ ID NO: 1634514 - RNA, 19 nt, Artificial Sequence
  Description of Artificial Sequence: Synthetic oligonucleotide
ugugauuuagcacugguuu

SEQ ID NO: 1634515 - RNA, 19 nt, Artificial Sequence
  Description of Artificial Sequence: Synthetic oligonucleotide
aacacucugacacagggaa

SEQ ID NO: 1634516 - RNA, 19 nt, Artificial Sequence
  Description of Artificial Sequence: Synthetic oligonucleotide
uguaguaacugaauaacau

SEQ ID NO: 1634517 - RNA, 19 nt, Artificial Sequence
  Description of Artificial Sequence: Synthetic oligonucleotide
aacuaaaccacaaaucuga

SEQ ID NO: 1634518 - RNA, 19 nt, Artificial Sequence
  Description of Artificial Sequence: Synthetic oligonucleotide
agauaaaucagcacauagc

SEQ ID NO: 1634519 - RNA, 19 nt, Artificial Sequence
  Description of Artificial Sequence: Synthetic oligonucleotide
aucagaggaauacaaaaug

SEQ ID NO: 1634520 - RNA, 19 nt, Artificial Sequence
  Description of Artificial Sequence: Synthetic oligonucleotide
auuuguuuguugcuaggac

SEQ ID NO: 1634521 - RNA, 19 nt, Artificial Sequence
  Description of Artificial Sequence: Synthetic oligonucleotide
uuuaauuaaaagagugguc

SEQ ID NO: 1634522 - RNA, 19 nt, Artificial Sequence
  Description of Artificial Sequence: Synthetic oligonucleotide
uuauacuaauucuuaugag

SEQ ID NO: 1634523 - RNA, 19 nt, Artificial Sequence
  Description of Artificial Sequence: Synthetic oligonucleotide
uagaauuccugauugaaaa

SEQ ID NO: 1634524 - RNA, 19 nt, Artificial Sequence
  Description of Artificial Sequence: Synthetic oligonucleotide
aaauacauuccagguaaac

SEQ ID NO: 1634525 - RNA, 19 nt, Artificial Sequence
  Description of Artificial Sequence: Synthetic oligonucleotide
uguuugaauuauuacaaaa

SEQ ID NO: 1634526 - RNA, 19 nt, Artificial Sequence
  Description of Artificial Sequence: Synthetic oligonucleotide
aacuaauguacuuuagaaa

SEQ ID NO: 1634527 - RNA, 19 nt, Artificial Sequence
  Description of Artificial Sequence: Synthetic oligonucleotide
uuaagcuaagaacacucug

SEQ ID NO: 1634528 - RNA, 19 nt, Artificial Sequence
  Description of Artificial Sequence: Synthetic oligonucleotide
cuuaugacaugucucacag

SEQ ID NO: 1634529 - RNA, 19 nt, Artificial Sequence
  Description of Artificial Sequence: Synthetic oligonucleotide
gcuaagaacacucugacac

SEQ ID NO: 1634530 - RNA, 19 nt, Artificial Sequence
  Description of Artificial Sequence: Synthetic oligonucleotide
ugacucagucaauagagcc

SEQ ID NO: 1634531 - RNA, 19 nt, Artificial Sequence
  Description of Artificial Sequence: Synthetic oligonucleotide
ugauaugaccaacauuccc

SEQ ID NO: 1634532 - RNA, 19 nt, Artificial Sequence
  Description of Artificial Sequence: Synthetic oligonucleotide
uuauauuugacagaauuuu

SEQ ID NO: 1634533 - RNA, 19 nt, Artificial Sequence
  Description of Artificial Sequence: Synthetic oligonucleotide
accaaauuguauuugccug

SEQ ID NO: 1634534 - RNA, 19 nt, Artificial Sequence
  Description of Artificial Sequence: Synthetic oligonucleotide
aggaauacaaaaugagaug

SEQ ID NO: 1634535 - RNA, 19 nt, Artificial Sequence
  Description of Artificial Sequence: Synthetic oligonucleotide
uuccagguaaacauguuac

SEQ ID NO: 1634536 - RNA, 19 nt, Artificial Sequence
  Description of Artificial Sequence: Synthetic oligonucleotide
aucugaaucuaauuaauaa

SEQ ID NO: 1634537 - RNA, 19 nt, Artificial Sequence
  Description of Artificial Sequence: Synthetic oligonucleotide
aauauuuaccaaauuguau

SEQ ID NO: 1634538 - RNA, 19 nt, Artificial Sequence
  Description of Artificial Sequence: Synthetic oligonucleotide
auucaucuaaaaugccuac

SEQ ID NO: 1634539 - RNA, 19 nt, Artificial Sequence
  Description of Artificial Sequence: Synthetic oligonucleotide
uuaccaaauuguauuugcc

SEQ ID NO: 1634540 - RNA, 19 nt, Artificial Sequence
  Description of Artificial Sequence: Synthetic oligonucleotide
auauguuaaaauuguuuga

SEQ ID NO: 1634541 - RNA, 19 nt, Artificial Sequence
  Description of Artificial Sequence: Synthetic oligonucleotide
acauguuacauugagaaau

SEQ ID NO: 1634542 - RNA, 19 nt, Artificial Sequence
  Description of Artificial Sequence: Synthetic oligonucleotide
agacuuaaaaguuaagcua

SEQ ID NO: 1634543 - RNA, 19 nt, Artificial Sequence
  Description of Artificial Sequence: Synthetic oligonucleotide
aauuuuacagcuacugggu

SEQ ID NO: 1634544 - RNA, 19 nt, Artificial Sequence
  Description of Artificial Sequence: Synthetic oligonucleotide
uuacauugagaaauagcac

SEQ ID NO: 1634545 - RNA, 19 nt, Artificial Sequence
  Description of Artificial Sequence: Synthetic oligonucleotide
agaaauagcacuaguaaga

SEQ ID NO: 1634546 - RNA, 19 nt, Artificial Sequence
  Description of Artificial Sequence: Synthetic oligonucleotide
uaacuauucuuugaaaacu

SEQ ID NO: 1634547 - RNA, 19 nt, Artificial Sequence
  Description of Artificial Sequence: Synthetic oligonucleotide
ugcaaacuguaacuuauga

SEQ ID NO: 1634548 - RNA, 19 nt, Artificial Sequence
  Description of Artificial Sequence: Synthetic oligonucleotide
uguugcuaggacuucuucc

SEQ ID NO: 1634549 - RNA, 19 nt, Artificial Sequence
  Description of Artificial Sequence: Synthetic oligonucleotide
auguuaaugccuaugacug

SEQ ID NO: 1634550 - RNA, 19 nt, Artificial Sequence
  Description of Artificial Sequence: Synthetic oligonucleotide
uaaaagaguggucauuuua

SEQ ID NO: 1634551 - RNA, 19 nt, Artificial Sequence
  Description of Artificial Sequence: Synthetic oligonucleotide
caugcuacccaguauuacc

SEQ ID NO: 1634552 - RNA, 19 nt, Artificial Sequence
  Description of Artificial Sequence: Synthetic oligonucleotide
ugcuauauucuucccaaga

SEQ ID NO: 1634553 - RNA, 19 nt, Artificial Sequence
  Description of Artificial Sequence: Synthetic oligonucleotide
aggaggacgauuuugugca

SEQ ID NO: 1634554 - RNA, 19 nt, Artificial Sequence
  Description of Artificial Sequence: Synthetic oligonucleotide
aagacauagacaguggaau

SEQ ID NO: 1634555 - RNA, 19 nt, Artificial Sequence
  Description of Artificial Sequence: Synthetic oligonucleotide
uaugcagugugacucaguc

SEQ ID NO: 1634556 - RNA, 19 nt, Artificial Sequence
  Description of Artificial Sequence: Synthetic oligonucleotide
ucaaacuauuaaacuaaac

SEQ ID NO: 1634557 - RNA, 19 nt, Artificial Sequence
  Description of Artificial Sequence: Synthetic oligonucleotide
agacaguggaauuggggac

SEQ ID NO: 1634558 - RNA, 19 nt, Artificial Sequence
  Description of Artificial Sequence: Synthetic oligonucleotide
uugagaaauagcacuagua

SEQ ID NO: 1634559 - RNA, 19 nt, Artificial Sequence
  Description of Artificial Sequence: Synthetic oligonucleotide
uggaucacacugcauaugu

SEQ ID NO: 1634560 - RNA, 19 nt, Artificial Sequence
  Description of Artificial Sequence: Synthetic oligonucleotide
aaacuaaaccacaaaucug

SEQ ID NO: 1634561 - RNA, 19 nt, Artificial Sequence
  Description of Artificial Sequence: Synthetic oligonucleotide
aaaugcagaaguguucuca

SEQ ID NO: 1634562 - RNA, 19 nt, Artificial Sequence
  Description of Artificial Sequence: Synthetic oligonucleotide
aagaguggucauuuuaaau

SEQ ID NO: 1634563 - RNA, 19 nt, Artificial Sequence
  Description of Artificial Sequence: Synthetic oligonucleotide
aaaagaguggucauuuuaa

SEQ ID NO: 1634564 - RNA, 19 nt, Artificial Sequence
  Description of Artificial Sequence: Synthetic oligonucleotide
uuuuacagcuacugggugu

SEQ ID NO: 1634565 - RNA, 19 nt, Artificial Sequence
  Description of Artificial Sequence: Synthetic oligonucleotide
uaugacugugauuuagcac

SEQ ID NO: 1634566 - RNA, 19 nt, Artificial Sequence
  Description of Artificial Sequence: Synthetic oligonucleotide
ugacacagggaaauuauua

SEQ ID NO: 1634567 - RNA, 19 nt, Artificial Sequence
  Description of Artificial Sequence: Synthetic oligonucleotide
uuaaaguaacuuugggguc

SEQ ID NO: 1634568 - RNA, 19 nt, Artificial Sequence
  Description of Artificial Sequence: Synthetic oligonucleotide
ucagcacaaccaaaggaug

SEQ ID NO: 1634569 - RNA, 19 nt, Artificial Sequence
  Description of Artificial Sequence: Synthetic oligonucleotide
uccugauugaaaauauuua

SEQ ID NO: 1634570 - RNA, 19 nt, Artificial Sequence
  Description of Artificial Sequence: Synthetic oligonucleotide
uaauguuugauaugaccaa

SEQ ID NO: 1634571 - RNA, 19 nt, Artificial Sequence
  Description of Artificial Sequence: Synthetic oligonucleotide
uacuccuauaaacauuuaa

SEQ ID NO: 1634572 - RNA, 19 nt, Artificial Sequence
  Description of Artificial Sequence: Synthetic oligonucleotide
uaaaguaacuuuggggucu

SEQ ID NO: 1634573 - RNA, 19 nt, Artificial Sequence
  Description of Artificial Sequence: Synthetic oligonucleotide
agaucuuuuaauaaucuau

SEQ ID NO: 1634574 - RNA, 19 nt, Artificial Sequence
  Description of Artificial Sequence: Synthetic oligonucleotide
agugcagaauucaugcuac

SEQ ID NO: 1634575 - RNA, 19 nt, Artificial Sequence
  Description of Artificial Sequence: Synthetic oligonucleotide
agaacuuguuaggaggacg

SEQ ID NO: 1634576 - RNA, 19 nt, Artificial Sequence
  Description of Artificial Sequence: Synthetic oligonucleotide
ucacagaacuuguuaggag

SEQ ID NO: 1634577 - RNA, 19 nt, Artificial Sequence
  Description of Artificial Sequence: Synthetic oligonucleotide
uuggcaagaucuuuuaaua

SEQ ID NO: 1634578 - RNA, 19 nt, Artificial Sequence
  Description of Artificial Sequence: Synthetic oligonucleotide
aaagaguggucauuuuaaa

SEQ ID NO: 1634579 - RNA, 19 nt, Artificial Sequence
  Description of Artificial Sequence: Synthetic oligonucleotide
aacuuaugacaugucucac

SEQ ID NO: 1634580 - RNA, 19 nt, Artificial Sequence
  Description of Artificial Sequence: Synthetic oligonucleotide
agaaguguucucaacauga

SEQ ID NO: 1634581 - RNA, 19 nt, Artificial Sequence
  Description of Artificial Sequence: Synthetic oligonucleotide
ucugacacagggaaauuau

SEQ ID NO: 1634582 - RNA, 19 nt, Artificial Sequence
  Description of Artificial Sequence: Synthetic oligonucleotide
acuauuaaacuaaaccaca

SEQ ID NO: 1634583 - RNA, 19 nt, Artificial Sequence
  Description of Artificial Sequence: Synthetic oligonucleotide
uguuugauaugaccaacau

SEQ ID NO: 1634584 - RNA, 19 nt, Artificial Sequence
  Description of Artificial Sequence: Synthetic oligonucleotide
auucaugcuacccaguauu

SEQ ID NO: 1634585 - RNA, 19 nt, Artificial Sequence
  Description of Artificial Sequence: Synthetic oligonucleotide
uugauaugaccaacauucc

SEQ ID NO: 1634586 - RNA, 19 nt, Artificial Sequence
  Description of Artificial Sequence: Synthetic oligonucleotide
augauuaggagcaguacag

SEQ ID NO: 1634587 - RNA, 19 nt, Artificial Sequence
  Description of Artificial Sequence: Synthetic oligonucleotide
acauagacaguggaauugg

SEQ ID NO: 1634588 - RNA, 19 nt, Artificial Sequence
  Description of Artificial Sequence: Synthetic oligonucleotide
uggagauaaaucagcacau

SEQ ID NO: 1634589 - RNA, 19 nt, Artificial Sequence
  Description of Artificial Sequence: Synthetic oligonucleotide
caccauaacuauuuauuac

SEQ ID NO: 1634590 - RNA, 19 nt, Artificial Sequence
  Description of Artificial Sequence: Synthetic oligonucleotide
auaaucuauaaaaguuagg

SEQ ID NO: 1634591 - RNA, 19 nt, Artificial Sequence
  Description of Artificial Sequence: Synthetic oligonucleotide
agugugacucagucaauag

SEQ ID NO: 1634592 - RNA, 19 nt, Artificial Sequence
  Description of Artificial Sequence: Synthetic oligonucleotide
aaacuguaacuuaugacau

SEQ ID NO: 1634593 - RNA, 19 nt, Artificial Sequence
  Description of Artificial Sequence: Synthetic oligonucleotide
uacccagaauuuauuaagu

SEQ ID NO: 1634594 - RNA, 19 nt, Artificial Sequence
  Description of Artificial Sequence: Synthetic oligonucleotide
gucaauagagccuagaauu

SEQ ID NO: 1634595 - RNA, 19 nt, Artificial Sequence
  Description of Artificial Sequence: Synthetic oligonucleotide
auuaggagcaguacagguc

SEQ ID NO: 1634596 - RNA, 19 nt, Artificial Sequence
  Description of Artificial Sequence: Synthetic oligonucleotide
ucucaacaugaagacauag

SEQ ID NO: 1634597 - RNA, 19 nt, Artificial Sequence
  Description of Artificial Sequence: Synthetic oligonucleotide
aauucaugcuacccaguau

SEQ ID NO: 1634598 - RNA, 19 nt, Artificial Sequence
  Description of Artificial Sequence: Synthetic oligonucleotide
agucaauagagccuagaau

SEQ ID NO: 1634599 - RNA, 19 nt, Artificial Sequence
  Description of Artificial Sequence: Synthetic oligonucleotide
acauuuguuuguugcuagg

SEQ ID NO: 1634600 - RNA, 19 nt, Artificial Sequence
  Description of Artificial Sequence: Synthetic oligonucleotide
aacauguuacauugagaaa

SEQ ID NO: 1634601 - RNA, 19 nt, Artificial Sequence
  Description of Artificial Sequence: Synthetic oligonucleotide
ugauuaggagcaguacagg

SEQ ID NO: 1634602 - RNA, 19 nt, Artificial Sequence
  Description of Artificial Sequence: Synthetic oligonucleotide
auauauguuaaaauuguuu

SEQ ID NO: 1634603 - RNA, 19 nt, Artificial Sequence
  Description of Artificial Sequence: Synthetic oligonucleotide
augcuacccaguauuaccc

SEQ ID NO: 1634604 - RNA, 19 nt, Artificial Sequence
  Description of Artificial Sequence: Synthetic oligonucleotide
acuuaugacaugucucaca

SEQ ID NO: 1634605 - RNA, 19 nt, Artificial Sequence
  Description of Artificial Sequence: Synthetic oligonucleotide
cagcacaaccaaaggaugg

SEQ ID NO: 1634606 - RNA, 19 nt, Artificial Sequence
  Description of Artificial Sequence: Synthetic oligonucleotide
guuaaugccuaugacugug

SEQ ID NO: 1634607 - RNA, 19 nt, Artificial Sequence
  Description of Artificial Sequence: Synthetic oligonucleotide
aaaccggcauuucugcaga

SEQ ID NO: 1634608 - RNA, 19 nt, Artificial Sequence
  Description of Artificial Sequence: Synthetic oligonucleotide
aauagagccuagaauuccu

SEQ ID NO: 1634609 - RNA, 19 nt, Artificial Sequence
  Description of Artificial Sequence: Synthetic oligonucleotide
uucaucuaaaaugccuacc

SEQ ID NO: 1634610 - RNA, 19 nt, Artificial Sequence
  Description of Artificial Sequence: Synthetic oligonucleotide
auggaguuuaaacuuuuau

SEQ ID NO: 1634611 - RNA, 19 nt, Artificial Sequence
  Description of Artificial Sequence: Synthetic oligonucleotide
augaauuugugcaaacugu

SEQ ID NO: 1634612 - RNA, 19 nt, Artificial Sequence
  Description of Artificial Sequence: Synthetic oligonucleotide
aauucuuaugagaacuuuu

SEQ ID NO: 1634613 - RNA, 19 nt, Artificial Sequence
  Description of Artificial Sequence: Synthetic oligonucleotide
ugcagaauucaugcuaccc

SEQ ID NO: 1634614 - RNA, 19 nt, Artificial Sequence
  Description of Artificial Sequence: Synthetic oligonucleotide
agaggaauacaaaaugaga

SEQ ID NO: 1634615 - RNA, 19 nt, Artificial Sequence
  Description of Artificial Sequence: Synthetic oligonucleotide
cacaauuaucaacagauua

SEQ ID NO: 1634616 - RNA, 19 nt, Artificial Sequence
  Description of Artificial Sequence: Synthetic oligonucleotide
aaaggauggagaacagcug

SEQ ID NO: 1634617 - RNA, 19 nt, Artificial Sequence
  Description of Artificial Sequence: Synthetic oligonucleotide
cuuaaggcuguaguaacug

SEQ ID NO: 1634618 - RNA, 19 nt, Artificial Sequence
  Description of Artificial Sequence: Synthetic oligonucleotide
aacuucaacaggacuuaag

SEQ ID NO: 1634619 - RNA, 19 nt, Artificial Sequence
  Description of Artificial Sequence: Synthetic oligonucleotide
guguucucaacaugaagac

SEQ ID NO: 1634620 - RNA, 19 nt, Artificial Sequence
  Description of Artificial Sequence: Synthetic oligonucleotide
uccagguaaacauguuaca

SEQ ID NO: 1634621 - RNA, 19 nt, Artificial Sequence
  Description of Artificial Sequence: Synthetic oligonucleotide
uuguuugaauuauuacaaa

SEQ ID NO: 1634622 - RNA, 19 nt, Artificial Sequence
  Description of Artificial Sequence: Synthetic oligonucleotide
ugauuuagcacugguuuuc

SEQ ID NO: 1634623 - RNA, 19 nt, Artificial Sequence
  Description of Artificial Sequence: Synthetic oligonucleotide
agggaaauuauuauacuaa

SEQ ID NO: 1634624 - RNA, 19 nt, Artificial Sequence
  Description of Artificial Sequence: Synthetic oligonucleotide
acugugauuuagcacuggu

SEQ ID NO: 1634625 - RNA, 19 nt, Artificial Sequence
  Description of Artificial Sequence: Synthetic oligonucleotide
aggacgauuuugugcauug

SEQ ID NO: 1634626 - RNA, 19 nt, Artificial Sequence
  Description of Artificial Sequence: Synthetic oligonucleotide
cuauuaaacuaaaccacaa

SEQ ID NO: 1634627 - RNA, 19 nt, Artificial Sequence
  Description of Artificial Sequence: Synthetic oligonucleotide
uggcaagaucuuuuaauaa

SEQ ID NO: 1634628 - RNA, 19 nt, Artificial Sequence
  Description of Artificial Sequence: Synthetic oligonucleotide
aguauuacccagaauuuau

SEQ ID NO: 1634629 - RNA, 19 nt, Artificial Sequence
  Description of Artificial Sequence: Synthetic oligonucleotide
auuccagguaaacauguua

SEQ ID NO: 1634630 - RNA, 19 nt, Artificial Sequence
  Description of Artificial Sequence: Synthetic oligonucleotide
ugagaugaauuugugcaaa

SEQ ID NO: 1634631 - RNA, 19 nt, Artificial Sequence
  Description of Artificial Sequence: Synthetic oligonucleotide
acgauuuugugcauuguug

SEQ ID NO: 1634632 - RNA, 19 nt, Artificial Sequence
  Description of Artificial Sequence: Synthetic oligonucleotide
aaucugaaucuaauuaaua

SEQ ID NO: 1634633 - RNA, 19 nt, Artificial Sequence
  Description of Artificial Sequence: Synthetic oligonucleotide
aaugccuaugacugugauu

SEQ ID NO: 1634634 - RNA, 19 nt, Artificial Sequence
  Description of Artificial Sequence: Synthetic oligonucleotide
uguuucaguuuacacuaua

SEQ ID NO: 1634635 - RNA, 19 nt, Artificial Sequence
  Description of Artificial Sequence: Synthetic oligonucleotide
caucuaaaaugccuaccac

SEQ ID NO: 1634636 - RNA, 19 nt, Artificial Sequence
  Description of Artificial Sequence: Synthetic oligonucleotide
auuccuaugcagugugacu

SEQ ID NO: 1634637 - RNA, 19 nt, Artificial Sequence
  Description of Artificial Sequence: Synthetic oligonucleotide
cugcauaugucccacaaaa

SEQ ID NO: 1634638 - RNA, 19 nt, Artificial Sequence
  Description of Artificial Sequence: Synthetic oligonucleotide
gauuaggagcaguacaggu

SEQ ID NO: 1634639 - RNA, 19 nt, Artificial Sequence
  Description of Artificial Sequence: Synthetic oligonucleotide
uguucucaacaugaagaca

SEQ ID NO: 1634640 - RNA, 19 nt, Artificial Sequence
  Description of Artificial Sequence: Synthetic oligonucleotide
uguauuugccugcuauauu

SEQ ID NO: 1634641 - RNA, 19 nt, Artificial Sequence
  Description of Artificial Sequence: Synthetic oligonucleotide
aauuaucaacagauuacua

SEQ ID NO: 1634642 - RNA, 19 nt, Artificial Sequence
  Description of Artificial Sequence: Synthetic oligonucleotide
cuaugacugugauuuagca

SEQ ID NO: 1634643 - RNA, 19 nt, Artificial Sequence
  Description of Artificial Sequence: Synthetic oligonucleotide
gaccuggagauaaaucagc

SEQ ID NO: 1634644 - RNA, 19 nt, Artificial Sequence
  Description of Artificial Sequence: Synthetic oligonucleotide
uacaaugauuaggagcagu

SEQ ID NO: 1634645 - RNA, 19 nt, Artificial Sequence
  Description of Artificial Sequence: Synthetic oligonucleotide
uaacauuuguuuguugcua

SEQ ID NO: 1634646 - RNA, 19 nt, Artificial Sequence
  Description of Artificial Sequence: Synthetic oligonucleotide
agagccuagaauuccugau

SEQ ID NO: 1634647 - RNA, 19 nt, Artificial Sequence
  Description of Artificial Sequence: Synthetic oligonucleotide
aacauucccuaggucagca

SEQ ID NO: 1634648 - RNA, 19 nt, Artificial Sequence
  Description of Artificial Sequence: Synthetic oligonucleotide
cuguaguaacugaauaaca

SEQ ID NO: 1634649 - RNA, 19 nt, Artificial Sequence
  Description of Artificial Sequence: Synthetic oligonucleotide
cauugagaaauagcacuag

SEQ ID NO: 1634650 - RNA, 19 nt, Artificial Sequence
  Description of Artificial Sequence: Synthetic oligonucleotide
aggacuuaaggcuguagua

SEQ ID NO: 1634651 - RNA, 19 nt, Artificial Sequence
  Description of Artificial Sequence: Synthetic oligonucleotide
uagcccacuuagcugguug

SEQ ID NO: 1634652 - RNA, 19 nt, Artificial Sequence
  Description of Artificial Sequence: Synthetic oligonucleotide
aaauuggcacucaaauaaa

SEQ ID NO: 1634653 - RNA, 19 nt, Artificial Sequence
  Description of Artificial Sequence: Synthetic oligonucleotide
acacagggaaauuauuaua

SEQ ID NO: 1634654 - RNA, 19 nt, Artificial Sequence
  Description of Artificial Sequence: Synthetic oligonucleotide
agcacauagcccacuuagc

SEQ ID NO: 1634655 - RNA, 19 nt, Artificial Sequence
  Description of Artificial Sequence: Synthetic oligonucleotide
cuaccacaucccaaacagg

SEQ ID NO: 1634656 - RNA, 19 nt, Artificial Sequence
  Description of Artificial Sequence: Synthetic oligonucleotide
guggccgggucuaaaaccg

SEQ ID NO: 1634657 - RNA, 19 nt, Artificial Sequence
  Description of Artificial Sequence: Synthetic oligonucleotide
cgauuuugugcauuguugg

SEQ ID NO: 1634658 - RNA, 19 nt, Artificial Sequence
  Description of Artificial Sequence: Synthetic oligonucleotide
cacuaguaagaaauuggca

SEQ ID NO: 1634659 - RNA, 19 nt, Artificial Sequence
  Description of Artificial Sequence: Synthetic oligonucleotide
agcccacuuagcugguugg

SEQ ID NO: 1634660 - RNA, 19 nt, Artificial Sequence
  Description of Artificial Sequence: Synthetic oligonucleotide
aucaacagauuacuacuuu

SEQ ID NO: 1634661 - RNA, 19 nt, Artificial Sequence
  Description of Artificial Sequence: Synthetic oligonucleotide
uaauucuuaugagaacuuu

SEQ ID NO: 1634662 - RNA, 19 nt, Artificial Sequence
  Description of Artificial Sequence: Synthetic oligonucleotide
agaacagcuggaucacacu

SEQ ID NO: 1634663 - RNA, 19 nt, Artificial Sequence
  Description of Artificial Sequence: Synthetic oligonucleotide
ucagaucacuccacagcac

SEQ ID NO: 1634664 - RNA, 19 nt, Artificial Sequence
  Description of Artificial Sequence: Synthetic oligonucleotide
auaugaccaacauucccua

SEQ ID NO: 1634665 - RNA, 19 nt, Artificial Sequence
  Description of Artificial Sequence: Synthetic oligonucleotide
ucccuaggucagcacaacc

SEQ ID NO: 1634666 - RNA, 19 nt, Artificial Sequence
  Description of Artificial Sequence: Synthetic oligonucleotide
uugcuaggacuucuucccc

SEQ ID NO: 1634667 - RNA, 19 nt, Artificial Sequence
  Description of Artificial Sequence: Synthetic oligonucleotide
agcuacuggguguaucugu

SEQ ID NO: 1634668 - RNA, 19 nt, Artificial Sequence
  Description of Artificial Sequence: Synthetic oligonucleotide
aaguauaaauucaccuuua

SEQ ID NO: 1634669 - RNA, 19 nt, Artificial Sequence
  Description of Artificial Sequence: Synthetic oligonucleotide
gcuguaguaacugaauaac

SEQ ID NO: 1634670 - RNA, 19 nt, Artificial Sequence
  Description of Artificial Sequence: Synthetic oligonucleotide
uacccaguauuacccagaa

SEQ ID NO: 1634671 - RNA, 19 nt, Artificial Sequence
  Description of Artificial Sequence: Synthetic oligonucleotide
gacacagggaaauuauuau

SEQ ID NO: 1634672 - RNA, 19 nt, Artificial Sequence
  Description of Artificial Sequence: Synthetic oligonucleotide
uaaugccuaugacugugau

SEQ ID NO: 1634673 - RNA, 19 nt, Artificial Sequence
  Description of Artificial Sequence: Synthetic oligonucleotide
guucucaacaugaagacau

SEQ ID NO: 1634674 - RNA, 19 nt, Artificial Sequence
  Description of Artificial Sequence: Synthetic oligonucleotide
ggaauuggggaccuggaga

SEQ ID NO: 1634675 - RNA, 19 nt, Artificial Sequence
  Description of Artificial Sequence: Synthetic oligonucleotide
uucaugcuacccaguauua

SEQ ID NO: 1634676 - RNA, 19 nt, Artificial Sequence
  Description of Artificial Sequence: Synthetic oligonucleotide
caaugauuaggagcaguac

SEQ ID NO: 1634677 - RNA, 19 nt, Artificial Sequence
  Description of Artificial Sequence: Synthetic oligonucleotide
ucagucaauagagccuaga

SEQ ID NO: 1634678 - RNA, 19 nt, Artificial Sequence
  Description of Artificial Sequence: Synthetic oligonucleotide
aaugccuaccacaucccaa

SEQ ID NO: 1634679 - RNA, 19 nt, Artificial Sequence
  Description of Artificial Sequence: Synthetic oligonucleotide
uccuaugcagugugacuca

SEQ ID NO: 1634680 - RNA, 19 nt, Artificial Sequence
  Description of Artificial Sequence: Synthetic oligonucleotide
uuguugcuaggacuucuuc

SEQ ID NO: 1634681 - RNA, 19 nt, Artificial Sequence
  Description of Artificial Sequence: Synthetic oligonucleotide
cuacacaauuaucaacaga

SEQ ID NO: 1634682 - RNA, 19 nt, Artificial Sequence
  Description of Artificial Sequence: Synthetic oligonucleotide
cuuguuaggaggacgauuu

SEQ ID NO: 1634683 - RNA, 19 nt, Artificial Sequence
  Description of Artificial Sequence: Synthetic oligonucleotide
gcacuaguaagaaauuggc

SEQ ID NO: 1634684 - RNA, 19 nt, Artificial Sequence
  Description of Artificial Sequence: Synthetic oligonucleotide
acccagaauuuauuaagua

SEQ ID NO: 1634685 - RNA, 19 nt, Artificial Sequence
  Description of Artificial Sequence: Synthetic oligonucleotide
auguuugauaugaccaaca

SEQ ID NO: 1634686 - RNA, 19 nt, Artificial Sequence
  Description of Artificial Sequence: Synthetic oligonucleotide
uuacaaugauuaggagcag

SEQ ID NO: 1634687 - RNA, 19 nt, Artificial Sequence
  Description of Artificial Sequence: Synthetic oligonucleotide
gugugacucagucaauaga

SEQ ID NO: 1634688 - RNA, 19 nt, Artificial Sequence
  Description of Artificial Sequence: Synthetic oligonucleotide
ucaugcuacccaguauuac

SEQ ID NO: 1634689 - RNA, 19 nt, Artificial Sequence
  Description of Artificial Sequence: Synthetic oligonucleotide
ccuaugacugugauuuagc

SEQ ID NO: 1634690 - RNA, 19 nt, Artificial Sequence
  Description of Artificial Sequence: Synthetic oligonucleotide
cauucccuaggucagcaca

SEQ ID NO: 1634691 - RNA, 19 nt, Artificial Sequence
  Description of Artificial Sequence: Synthetic oligonucleotide
ugcuacccaguauuaccca

SEQ ID NO: 1634692 - RNA, 19 nt, Artificial Sequence
  Description of Artificial Sequence: Synthetic oligonucleotide
acaaugauuaggagcagua

SEQ ID NO: 1634693 - RNA, 19 nt, Artificial Sequence
  Description of Artificial Sequence: Synthetic oligonucleotide
cacuuagcugguuggggug

SEQ ID NO: 1634694 - RNA, 19 nt, Artificial Sequence
  Description of Artificial Sequence: Synthetic oligonucleotide
cacuucaaacuauuaaacu

SEQ ID NO: 1634695 - RNA, 19 nt, Artificial Sequence
  Description of Artificial Sequence: Synthetic oligonucleotide
gguggccgggucuaaaacc

SEQ ID NO: 1634696 - RNA, 19 nt, Artificial Sequence
  Description of Artificial Sequence: Synthetic oligonucleotide
gauuuagcacugguuuuca

SEQ ID NO: 1634697 - RNA, 19 nt, Artificial Sequence
  Description of Artificial Sequence: Synthetic oligonucleotide
acauugagaaauagcacua

SEQ ID NO: 1634698 - RNA, 19 nt, Artificial Sequence
  Description of Artificial Sequence: Synthetic oligonucleotide
guaguaacugaauaacauu

SEQ ID NO: 1634699 - RNA, 19 nt, Artificial Sequence
  Description of Artificial Sequence: Synthetic oligonucleotide
aggcuguaguaacugaaua

SEQ ID NO: 1634700 - RNA, 19 nt, Artificial Sequence
  Description of Artificial Sequence: Synthetic oligonucleotide
aaccggcauuucugcagag

SEQ ID NO: 1634701 - RNA, 19 nt, Artificial Sequence
  Description of Artificial Sequence: Synthetic oligonucleotide
cauguuacauugagaaaua

SEQ ID NO: 1634702 - RNA, 19 nt, Artificial Sequence
  Description of Artificial Sequence: Synthetic oligonucleotide
cauuuguuuguugcuagga

SEQ ID NO: 1634703 - RNA, 19 nt, Artificial Sequence
  Description of Artificial Sequence: Synthetic oligonucleotide
aauggaguuuaaacuuuua

SEQ ID NO: 1634704 - RNA, 19 nt, Artificial Sequence
  Description of Artificial Sequence: Synthetic oligonucleotide
uggccgggucuaaaaccgg

SEQ ID NO: 1634705 - RNA, 19 nt, Artificial Sequence
  Description of Artificial Sequence: Synthetic oligonucleotide
ggcuguaguaacugaauaa

SEQ ID NO: 1634706 - RNA, 19 nt, Artificial Sequence
  Description of Artificial Sequence: Synthetic oligonucleotide
uggguguaucuguucaauu

SEQ ID NO: 1634707 - RNA, 19 nt, Artificial Sequence
  Description of Artificial Sequence: Synthetic oligonucleotide
gcuacccaguauuacccag

SEQ ID NO: 1634708 - RNA, 19 nt, Artificial Sequence
  Description of Artificial Sequence: Synthetic oligonucleotide
aacaggcacuucaaacuau

SEQ ID NO: 1634709 - RNA, 19 nt, Artificial Sequence
  Description of Artificial Sequence: Synthetic oligonucleotide
gucagcacaaccaaaggau

SEQ ID NO: 1634710 - RNA, 19 nt, Artificial Sequence
  Description of Artificial Sequence: Synthetic oligonucleotide
cuguaacuuaugacauguc

SEQ ID NO: 1634711 - RNA, 19 nt, Artificial Sequence
  Description of Artificial Sequence: Synthetic oligonucleotide
acauacuccuauaaacauu

SEQ ID NO: 1634712 - RNA, 19 nt, Artificial Sequence
  Description of Artificial Sequence: Synthetic oligonucleotide
gacgauuuugugcauuguu

SEQ ID NO: 1634713 - RNA, 19 nt, Artificial Sequence
  Description of Artificial Sequence: Synthetic oligonucleotide
cuacccaguauuacccaga

SEQ ID NO: 1634714 - RNA, 19 nt, Artificial Sequence
  Description of Artificial Sequence: Synthetic oligonucleotide
accacaaaucugaaucuaa

SEQ ID NO: 1634715 - RNA, 19 nt, Artificial Sequence
  Description of Artificial Sequence: Synthetic oligonucleotide
gacucagucaauagagccu

SEQ ID NO: 1634716 - RNA, 19 nt, Artificial Sequence
  Description of Artificial Sequence: Synthetic oligonucleotide
uguuuguugcuaggacuuc

SEQ ID NO: 1634717 - RNA, 19 nt, Artificial Sequence
  Description of Artificial Sequence: Synthetic oligonucleotide
cacauacuccuauaaacau

SEQ ID NO: 1634718 - RNA, 19 nt, Artificial Sequence
  Description of Artificial Sequence: Synthetic oligonucleotide
cuacuggguguaucuguuc

SEQ ID NO: 1634719 - RNA, 19 nt, Artificial Sequence
  Description of Artificial Sequence: Synthetic oligonucleotide
uacagcuacuggguguauc

SEQ ID NO: 1634720 - RNA, 19 nt, Artificial Sequence
  Description of Artificial Sequence: Synthetic oligonucleotide
ggacuuaaggcuguaguaa

SEQ ID NO: 1634721 - RNA, 19 nt, Artificial Sequence
  Description of Artificial Sequence: Synthetic oligonucleotide
gccuaugacugugauuuag

SEQ ID NO: 1634722 - RNA, 19 nt, Artificial Sequence
  Description of Artificial Sequence: Synthetic oligonucleotide
gggaaauuauuauacuaau

SEQ ID NO: 1634723 - RNA, 19 nt, Artificial Sequence
  Description of Artificial Sequence: Synthetic oligonucleotide
cuggaucacacugcauaug

SEQ ID NO: 1634724 - RNA, 19 nt, Artificial Sequence
  Description of Artificial Sequence: Synthetic oligonucleotide
auagcacuaguaagaaauu

SEQ ID NO: 1634725 - RNA, 19 nt, Artificial Sequence
  Description of Artificial Sequence: Synthetic oligonucleotide
guuaagcuaagaacacucu

SEQ ID NO: 1634726 - RNA, 19 nt, Artificial Sequence
  Description of Artificial Sequence: Synthetic oligonucleotide
auucccuaggucagcacaa

SEQ ID NO: 1634727 - RNA, 19 nt, Artificial Sequence
  Description of Artificial Sequence: Synthetic oligonucleotide
caggacuuaaggcuguagu

SEQ ID NO: 1634728 - RNA, 19 nt, Artificial Sequence
  Description of Artificial Sequence: Synthetic oligonucleotide
caugucucacagaacuugu

SEQ ID NO: 1634729 - RNA, 19 nt, Artificial Sequence
  Description of Artificial Sequence: Synthetic oligonucleotide
cuaauucuuaugagaacuu

SEQ ID NO: 1634730 - RNA, 19 nt, Artificial Sequence
  Description of Artificial Sequence: Synthetic oligonucleotide
cacugcauaugucccacaa

SEQ ID NO: 1634731 - RNA, 19 nt, Artificial Sequence
  Description of Artificial Sequence: Synthetic oligonucleotide
acaguggaauuggggaccu

SEQ ID NO: 1634732 - RNA, 19 nt, Artificial Sequence
  Description of Artificial Sequence: Synthetic oligonucleotide
acacaauuaucaacagauu

SEQ ID NO: 1634733 - RNA, 19 nt, Artificial Sequence
  Description of Artificial Sequence: Synthetic oligonucleotide
caguauuacccagaauuua

SEQ ID NO: 1634734 - RNA, 19 nt, Artificial Sequence
  Description of Artificial Sequence: Synthetic oligonucleotide
gagccuagaauuccugauu

SEQ ID NO: 1634735 - RNA, 19 nt, Artificial Sequence
  Description of Artificial Sequence: Synthetic oligonucleotide
uucccuaggucagcacaac

SEQ ID NO: 1634736 - RNA, 19 nt, Artificial Sequence
  Description of Artificial Sequence: Synthetic oligonucleotide
uggggaccuggagauaaau

SEQ ID NO: 1634737 - RNA, 19 nt, Artificial Sequence
  Description of Artificial Sequence: Synthetic oligonucleotide
cugcagagcacuuuauuuu

SEQ ID NO: 1634738 - RNA, 19 nt, Artificial Sequence
  Description of Artificial Sequence: Synthetic oligonucleotide
gugauuuagcacugguuuu

SEQ ID NO: 1634739 - RNA, 19 nt, Artificial Sequence
  Description of Artificial Sequence: Synthetic oligonucleotide
gguguaucuguucaauuuu

SEQ ID NO: 1634740 - RNA, 19 nt, Artificial Sequence
  Description of Artificial Sequence: Synthetic oligonucleotide
aacaggacuuaaggcugua

SEQ ID NO: 1634741 - RNA, 19 nt, Artificial Sequence
  Description of Artificial Sequence: Synthetic oligonucleotide
cccuaggucagcacaacca

SEQ ID NO: 1634742 - RNA, 19 nt, Artificial Sequence
  Description of Artificial Sequence: Synthetic oligonucleotide
ggaaauuauuauacuaauu

SEQ ID NO: 1634743 - RNA, 19 nt, Artificial Sequence
  Description of Artificial Sequence: Synthetic oligonucleotide
ggcauuucugcagagcacu

SEQ ID NO: 1634744 - RNA, 19 nt, Artificial Sequence
  Description of Artificial Sequence: Synthetic oligonucleotide
cccacuuagcugguugggg

SEQ ID NO: 1634745 - RNA, 19 nt, Artificial Sequence
  Description of Artificial Sequence: Synthetic oligonucleotide
ccuagaauuccugauugaa

SEQ ID NO: 1634746 - RNA, 19 nt, Artificial Sequence
  Description of Artificial Sequence: Synthetic oligonucleotide
acccaguauuacccagaau

SEQ ID NO: 1634747 - RNA, 19 nt, Artificial Sequence
  Description of Artificial Sequence: Synthetic oligonucleotide
gccuaccacaucccaaaca

SEQ ID NO: 1634748 - RNA, 19 nt, Artificial Sequence
  Description of Artificial Sequence: Synthetic oligonucleotide
cagugugacucagucaaua

SEQ ID NO: 1634749 - RNA, 19 nt, Artificial Sequence
  Description of Artificial Sequence: Synthetic oligonucleotide
cugugauuuagcacugguu

SEQ ID NO: 1634750 - RNA, 19 nt, Artificial Sequence
  Description of Artificial Sequence: Synthetic oligonucleotide
ugccuaugacugugauuua

SEQ ID NO: 1634751 - RNA, 19 nt, Artificial Sequence
  Description of Artificial Sequence: Synthetic oligonucleotide
ccuaggucagcacaaccaa

SEQ ID NO: 1634752 - RNA, 19 nt, Artificial Sequence
  Description of Artificial Sequence: Synthetic oligonucleotide
augucucacagaacuuguu

SEQ ID NO: 1634753 - RNA, 19 nt, Artificial Sequence
  Description of Artificial Sequence: Synthetic oligonucleotide
ggagauaaaucagcacaua

SEQ ID NO: 1634754 - RNA, 19 nt, Artificial Sequence
  Description of Artificial Sequence: Synthetic oligonucleotide
gggucuaaaaccggcauuu

SEQ ID NO: 1634755 - RNA, 19 nt, Artificial Sequence
  Description of Artificial Sequence: Synthetic oligonucleotide
uuacagcuacuggguguau

SEQ ID NO: 1634756 - RNA, 19 nt, Artificial Sequence
  Description of Artificial Sequence: Synthetic oligonucleotide
cuaugcagugugacucagu

SEQ ID NO: 1634757 - RNA, 19 nt, Artificial Sequence
  Description of Artificial Sequence: Synthetic oligonucleotide
auacuccuauaaacauuua

SEQ ID NO: 1634758 - RNA, 19 nt, Artificial Sequence
  Description of Artificial Sequence: Synthetic oligonucleotide
guugggguggccgggucua

SEQ ID NO: 1634759 - RNA, 19 nt, Artificial Sequence
  Description of Artificial Sequence: Synthetic oligonucleotide
ccaguauuacccagaauuu

SEQ ID NO: 1634760 - RNA, 19 nt, Artificial Sequence
  Description of Artificial Sequence: Synthetic oligonucleotide
ugggguggccgggucuaaa

SEQ ID NO: 1634761 - RNA, 19 nt, Artificial Sequence
  Description of Artificial Sequence: Synthetic oligonucleotide
gaggacgauuuugugcauu

SEQ ID NO: 1634762 - RNA, 19 nt, Artificial Sequence
  Description of Artificial Sequence: Synthetic oligonucleotide
auagcccacuuagcugguu

SEQ ID NO: 1634763 - RNA, 19 nt, Artificial Sequence
  Description of Artificial Sequence: Synthetic oligonucleotide
cuggguguaucuguucaau

SEQ ID NO: 1634764 - RNA, 19 nt, Artificial Sequence
  Description of Artificial Sequence: Synthetic oligonucleotide
gggguggccgggucuaaaa

SEQ ID NO: 1634765 - RNA, 19 nt, Artificial Sequence
  Description of Artificial Sequence: Synthetic oligonucleotide
ccacuuagcugguuggggu

SEQ ID NO: 1634766 - RNA, 19 nt, Artificial Sequence
  Description of Artificial Sequence: Synthetic oligonucleotide
cauagcccacuuagcuggu

SEQ ID NO: 1634767 - RNA, 19 nt, Artificial Sequence
  Description of Artificial Sequence: Synthetic oligonucleotide
gccgggucuaaaaccggca

SEQ ID NO: 1634768 - RNA, 19 nt, Artificial Sequence
  Description of Artificial Sequence: Synthetic oligonucleotide
gguugggguggccgggucu

SEQ ID NO: 1634769 - RNA, 19 nt, Artificial Sequence
  Description of Artificial Sequence: Synthetic oligonucleotide
ggacgauuuugugcauugu

SEQ ID NO: 1634770 - RNA, 19 nt, Artificial Sequence
  Description of Artificial Sequence: Synthetic oligonucleotide
ggaggacgauuuugugcau

SEQ ID NO: 1634771 - RNA, 19 nt, Artificial Sequence
  Description of Artificial Sequence: Synthetic oligonucleotide
ccgggucuaaaaccggcau

SEQ ID NO: 1634772 - RNA, 19 nt, Artificial Sequence
  Description of Artificial Sequence: Synthetic oligonucleotide
gcagugugacucagucaau

SEQ ID NO: 1634773 - RNA, 19 nt, Artificial Sequence
  Description of Artificial Sequence: Synthetic oligonucleotide
cgggucuaaaaccggcauu

SEQ ID NO: 1634774 - RNA, 19 nt, Artificial Sequence
  Description of Artificial Sequence: Synthetic oligonucleotide
aacucuaggaaacagcagc

SEQ ID NO: 1634775 - RNA, 19 nt, Artificial Sequence
  Description of Artificial Sequence: Synthetic oligonucleotide
aguaucugaaaacacauuc

SEQ ID NO: 1634776 - RNA, 19 nt, Artificial Sequence
  Description of Artificial Sequence: Synthetic oligonucleotide
aauccgauuaugcuggcac

SEQ ID NO: 1634777 - RNA, 19 nt, Artificial Sequence
  Description of Artificial Sequence: Synthetic oligonucleotide
aagguuuuggauuuggaca

SEQ ID NO: 1634778 - RNA, 19 nt, Artificial Sequence
  Description of Artificial Sequence: Synthetic oligonucleotide
agucauuacaugucgaggg

SEQ ID NO: 1634779 - RNA, 19 nt, Artificial Sequence
  Description of Artificial Sequence: Synthetic oligonucleotide
uuacugaucaguuuguuga

SEQ ID NO: 1634780 - RNA, 19 nt, Artificial Sequence
  Description of Artificial Sequence: Synthetic oligonucleotide
uuuguugagagcucgaacu

SEQ ID NO: 1634781 - RNA, 19 nt, Artificial Sequence
  Description of Artificial Sequence: Synthetic oligonucleotide
aacuguuaggaguucauug

SEQ ID NO: 1634782 - RNA, 19 nt, Artificial Sequence
  Description of Artificial Sequence: Synthetic oligonucleotide
uugaacagcuuucaugagg

SEQ ID NO: 1634783 - RNA, 19 nt, Artificial Sequence
  Description of Artificial Sequence: Synthetic oligonucleotide
ugaacucuaggaaacagca

SEQ ID NO: 1634784 - RNA, 19 nt, Artificial Sequence
  Description of Artificial Sequence: Synthetic oligonucleotide
uaaaaccucaauuuccugc

SEQ ID NO: 1634785 - RNA, 19 nt, Artificial Sequence
  Description of Artificial Sequence: Synthetic oligonucleotide
uugaagauuuucuuuuccg

SEQ ID NO: 1634786 - RNA, 19 nt, Artificial Sequence
  Description of Artificial Sequence: Synthetic oligonucleotide
agaaguguccccuuccagc

SEQ ID NO: 1634787 - RNA, 19 nt, Artificial Sequence
  Description of Artificial Sequence: Synthetic oligonucleotide
aacacgauuuuccuccuuc

SEQ ID NO: 1634788 - RNA, 19 nt, Artificial Sequence
  Description of Artificial Sequence: Synthetic oligonucleotide
gacaauuccuccuuguacc

SEQ ID NO: 1634789 - RNA, 19 nt, Artificial Sequence
  Description of Artificial Sequence: Synthetic oligonucleotide
gauuuggacacccugcugc

SEQ ID NO: 1634790 - RNA, 19 nt, Artificial Sequence
  Description of Artificial Sequence: Synthetic oligonucleotide
ucuacacagaaagugaugc

SEQ ID NO: 1634791 - RNA, 19 nt, Artificial Sequence
  Description of Artificial Sequence: Synthetic oligonucleotide
uguguuucauuucugcuca

SEQ ID NO: 1634792 - RNA, 19 nt, Artificial Sequence
  Description of Artificial Sequence: Synthetic oligonucleotide
aagauuuucuuuuccguga

SEQ ID NO: 1634793 - RNA, 19 nt, Artificial Sequence
  Description of Artificial Sequence: Synthetic oligonucleotide
aaccagucauuacaugucg

SEQ ID NO: 1634794 - RNA, 19 nt, Artificial Sequence
  Description of Artificial Sequence: Synthetic oligonucleotide
ugaacagcuuucaugaggu

SEQ ID NO: 1634795 - RNA, 19 nt, Artificial Sequence
  Description of Artificial Sequence: Synthetic oligonucleotide
gaagauuuucuuuuccgug

SEQ ID NO: 1634796 - RNA, 19 nt, Artificial Sequence
  Description of Artificial Sequence: Synthetic oligonucleotide
aaauucuggcaucagagua

SEQ ID NO: 1634797 - RNA, 19 nt, Artificial Sequence
  Description of Artificial Sequence: Synthetic oligonucleotide
ucaacuucaagguuuugga

SEQ ID NO: 1634798 - RNA, 19 nt, Artificial Sequence
  Description of Artificial Sequence: Synthetic oligonucleotide
cagaaagugaugcuggugc

SEQ ID NO: 1634799 - RNA, 19 nt, Artificial Sequence
  Description of Artificial Sequence: Synthetic oligonucleotide
agcaaaucagaucuggugu

SEQ ID NO: 1634800 - RNA, 19 nt, Artificial Sequence
  Description of Artificial Sequence: Synthetic oligonucleotide
uucacaugaacucuaggaa

SEQ ID NO: 1634801 - RNA, 19 nt, Artificial Sequence
  Description of Artificial Sequence: Synthetic oligonucleotide
aacuucaagguuuuggauu

SEQ ID NO: 1634802 - RNA, 19 nt, Artificial Sequence
  Description of Artificial Sequence: Synthetic oligonucleotide
uucuaguuccaguugaaga

SEQ ID NO: 1634803 - RNA, 19 nt, Artificial Sequence
  Description of Artificial Sequence: Synthetic oligonucleotide
ucuaguuccaguugaagau

SEQ ID NO: 1634804 - RNA, 19 nt, Artificial Sequence
  Description of Artificial Sequence: Synthetic oligonucleotide
uccacauugcguaaccgag

SEQ ID NO: 1634805 - RNA, 19 nt, Artificial Sequence
  Description of Artificial Sequence: Synthetic oligonucleotide
ugugcauuuagucgucucc

SEQ ID NO: 1634806 - RNA, 19 nt, Artificial Sequence
  Description of Artificial Sequence: Synthetic oligonucleotide
auuuagucgucucccggcc

SEQ ID NO: 1634807 - RNA, 19 nt, Artificial Sequence
  Description of Artificial Sequence: Synthetic oligonucleotide
ugcggagaugauuugcucg

SEQ ID NO: 1634808 - RNA, 19 nt, Artificial Sequence
  Description of Artificial Sequence: Synthetic oligonucleotide
uggcuagugagccauagga

SEQ ID NO: 1634809 - RNA, 19 nt, Artificial Sequence
  Description of Artificial Sequence: Synthetic oligonucleotide
aaggauccugcaguuaagc

SEQ ID NO: 1634810 - RNA, 19 nt, Artificial Sequence
  Description of Artificial Sequence: Synthetic oligonucleotide
aacaggaaccagucauuac

SEQ ID NO: 1634811 - RNA, 19 nt, Artificial Sequence
  Description of Artificial Sequence: Synthetic oligonucleotide
ugguaguucaguuccugcg

SEQ ID NO: 1634812 - RNA, 19 nt, Artificial Sequence
  Description of Artificial Sequence: Synthetic oligonucleotide
gaguugaacagcuuucaug

SEQ ID NO: 1634813 - RNA, 19 nt, Artificial Sequence
  Description of Artificial Sequence: Synthetic oligonucleotide
gaaggcacuggacaauccg

SEQ ID NO: 1634814 - RNA, 19 nt, Artificial Sequence
  Description of Artificial Sequence: Synthetic oligonucleotide
ugaaggauccugcaguuaa

SEQ ID NO: 1634815 - RNA, 19 nt, Artificial Sequence
  Description of Artificial Sequence: Synthetic oligonucleotide
gauggcaacacgauuuucc

SEQ ID NO: 1634816 - RNA, 19 nt, Artificial Sequence
  Description of Artificial Sequence: Synthetic oligonucleotide
guaccuuugagccugugug

SEQ ID NO: 1634817 - RNA, 19 nt, Artificial Sequence
  Description of Artificial Sequence: Synthetic oligonucleotide
uguuaggaguucauuguca

SEQ ID NO: 1634818 - RNA, 19 nt, Artificial Sequence
  Description of Artificial Sequence: Synthetic oligonucleotide
ugacaauuccuccuuguac

SEQ ID NO: 1634819 - RNA, 19 nt, Artificial Sequence
  Description of Artificial Sequence: Synthetic oligonucleotide
aaacacauuccuucacaug

SEQ ID NO: 1634820 - RNA, 19 nt, Artificial Sequence
  Description of Artificial Sequence: Synthetic oligonucleotide
aaccucaauuuccugccuc

SEQ ID NO: 1634821 - RNA, 19 nt, Artificial Sequence
  Description of Artificial Sequence: Synthetic oligonucleotide
accaucaacuguuaggagu

SEQ ID NO: 1634822 - RNA, 19 nt, Artificial Sequence
  Description of Artificial Sequence: Synthetic oligonucleotide
ucaguuuguugagagcucg

SEQ ID NO: 1634823 - RNA, 19 nt, Artificial Sequence
  Description of Artificial Sequence: Synthetic oligonucleotide
uuaagcugugacaauuccu

SEQ ID NO: 1634824 - RNA, 19 nt, Artificial Sequence
  Description of Artificial Sequence: Synthetic oligonucleotide
acuguuaggaguucauugu

SEQ ID NO: 1634825 - RNA, 19 nt, Artificial Sequence
  Description of Artificial Sequence: Synthetic oligonucleotide
aguuucuaguuccaguuga

SEQ ID NO: 1634826 - RNA, 19 nt, Artificial Sequence
  Description of Artificial Sequence: Synthetic oligonucleotide
ucuaggaaacagcagcuuc

SEQ ID NO: 1634827 - RNA, 19 nt, Artificial Sequence
  Description of Artificial Sequence: Synthetic oligonucleotide
cugcuuauauucuuccugc

SEQ ID NO: 1634828 - RNA, 19 nt, Artificial Sequence
  Description of Artificial Sequence: Synthetic oligonucleotide
cuucacaugaacucuagga

SEQ ID NO: 1634829 - RNA, 19 nt, Artificial Sequence
  Description of Artificial Sequence: Synthetic oligonucleotide
cugaucaguuuguugagag

SEQ ID NO: 1634830 - RNA, 19 nt, Artificial Sequence
  Description of Artificial Sequence: Synthetic oligonucleotide
aguucauugucaagggccc

SEQ ID NO: 1634831 - RNA, 19 nt, Artificial Sequence
  Description of Artificial Sequence: Synthetic oligonucleotide
cucacaaaguccagguucc

SEQ ID NO: 1634832 - RNA, 19 nt, Artificial Sequence
  Description of Artificial Sequence: Synthetic oligonucleotide
caagguuuuggauuuggac

SEQ ID NO: 1634833 - RNA, 19 nt, Artificial Sequence
  Description of Artificial Sequence: Synthetic oligonucleotide
uccacauacaguuccuuga

SEQ ID NO: 1634834 - RNA, 19 nt, Artificial Sequence
  Description of Artificial Sequence: Synthetic oligonucleotide
ucacaugaacucuaggaaa

SEQ ID NO: 1634835 - RNA, 19 nt, Artificial Sequence
  Description of Artificial Sequence: Synthetic oligonucleotide
ucuuugaggguuucuguca

SEQ ID NO: 1634836 - RNA, 19 nt, Artificial Sequence
  Description of Artificial Sequence: Synthetic oligonucleotide
augaacucuaggaaacagc

SEQ ID NO: 1634837 - RNA, 19 nt, Artificial Sequence
  Description of Artificial Sequence: Synthetic oligonucleotide
auugucaagggcccagguc

SEQ ID NO: 1634838 - RNA, 19 nt, Artificial Sequence
  Description of Artificial Sequence: Synthetic oligonucleotide
ggcaacacgauuuuccucc

SEQ ID NO: 1634839 - RNA, 19 nt, Artificial Sequence
  Description of Artificial Sequence: Synthetic oligonucleotide
cuuacugaucaguuuguug

SEQ ID NO: 1634840 - RNA, 19 nt, Artificial Sequence
  Description of Artificial Sequence: Synthetic oligonucleotide
auuaugcuggcacugugca

SEQ ID NO: 1634841 - RNA, 19 nt, Artificial Sequence
  Description of Artificial Sequence: Synthetic oligonucleotide
ucguccaucucucucacaa

SEQ ID NO: 1634842 - RNA, 19 nt, Artificial Sequence
  Description of Artificial Sequence: Synthetic oligonucleotide
auuuacacgcucaaguuca

SEQ ID NO: 1634843 - RNA, 19 nt, Artificial Sequence
  Description of Artificial Sequence: Synthetic oligonucleotide
ucugaauccccuccugggc

SEQ ID NO: 1634844 - RNA, 19 nt, Artificial Sequence
  Description of Artificial Sequence: Synthetic oligonucleotide
uuauauucuuccugcugug

SEQ ID NO: 1634845 - RNA, 19 nt, Artificial Sequence
  Description of Artificial Sequence: Synthetic oligonucleotide
uucugcaucaacagcugga

SEQ ID NO: 1634846 - RNA, 19 nt, Artificial Sequence
  Description of Artificial Sequence: Synthetic oligonucleotide
cauuuagucgucucccggc

SEQ ID NO: 1634847 - RNA, 19 nt, Artificial Sequence
  Description of Artificial Sequence: Synthetic oligonucleotide
ucgggaaaggcaaaaccac

SEQ ID NO: 1634848 - RNA, 19 nt, Artificial Sequence
  Description of Artificial Sequence: Synthetic oligonucleotide
guuaagcugugacaauucc

SEQ ID NO: 1634849 - RNA, 19 nt, Artificial Sequence
  Description of Artificial Sequence: Synthetic oligonucleotide
ucugcaagaucucccugcc

SEQ ID NO: 1634850 - RNA, 19 nt, Artificial Sequence
  Description of Artificial Sequence: Synthetic oligonucleotide
cacauugcguaaccgagcc

SEQ ID NO: 1634851 - RNA, 19 nt, Artificial Sequence
  Description of Artificial Sequence: Synthetic oligonucleotide
aauuccuccuuguaccuuu

SEQ ID NO: 1634852 - RNA, 19 nt, Artificial Sequence
  Description of Artificial Sequence: Synthetic oligonucleotide
ugugccgagcucuuccagg

SEQ ID NO: 1634853 - RNA, 19 nt, Artificial Sequence
  Description of Artificial Sequence: Synthetic oligonucleotide
gcauuccucauuuacacgc

SEQ ID NO: 1634854 - RNA, 19 nt, Artificial Sequence
  Description of Artificial Sequence: Synthetic oligonucleotide
ggugccaucuuacugauca

SEQ ID NO: 1634855 - RNA, 19 nt, Artificial Sequence
  Description of Artificial Sequence: Synthetic oligonucleotide
acgauuuuccuccuucuga

SEQ ID NO: 1634856 - RNA, 19 nt, Artificial Sequence
  Description of Artificial Sequence: Synthetic oligonucleotide
caacugacccaucugcucc

SEQ ID NO: 1634857 - RNA, 19 nt, Artificial Sequence
  Description of Artificial Sequence: Synthetic oligonucleotide
uacaugucgagggaguggc

SEQ ID NO: 1634858 - RNA, 19 nt, Artificial Sequence
  Description of Artificial Sequence: Synthetic oligonucleotide
uaaccgagccucagcaucc

SEQ ID NO: 1634859 - RNA, 19 nt, Artificial Sequence
  Description of Artificial Sequence: Synthetic oligonucleotide
aaguucaacuucaagguuu

SEQ ID NO: 1634860 - RNA, 19 nt, Artificial Sequence
  Description of Artificial Sequence: Synthetic oligonucleotide
cauuuacacgcucaaguuc

SEQ ID NO: 1634861 - RNA, 19 nt, Artificial Sequence
  Description of Artificial Sequence: Synthetic oligonucleotide
agcagcaaaucagaucugg

SEQ ID NO: 1634862 - RNA, 19 nt, Artificial Sequence
  Description of Artificial Sequence: Synthetic oligonucleotide
uuaggaguucauugucaag

SEQ ID NO: 1634863 - RNA, 19 nt, Artificial Sequence
  Description of Artificial Sequence: Synthetic oligonucleotide
guagcaguaucugaaaaca

SEQ ID NO: 1634864 - RNA, 19 nt, Artificial Sequence
  Description of Artificial Sequence: Synthetic oligonucleotide
gauuaugcuggcacugugc

SEQ ID NO: 1634865 - RNA, 19 nt, Artificial Sequence
  Description of Artificial Sequence: Synthetic oligonucleotide
agcuacgugagcuccagga

SEQ ID NO: 1634866 - RNA, 19 nt, Artificial Sequence
  Description of Artificial Sequence: Synthetic oligonucleotide
ggugcugaagcucagcuac

SEQ ID NO: 1634867 - RNA, 19 nt, Artificial Sequence
  Description of Artificial Sequence: Synthetic oligonucleotide
gguaguucaguuccugcgg

SEQ ID NO: 1634868 - RNA, 19 nt, Artificial Sequence
  Description of Artificial Sequence: Synthetic oligonucleotide
uuacaugucgagggagugg

SEQ ID NO: 1634869 - RNA, 19 nt, Artificial Sequence
  Description of Artificial Sequence: Synthetic oligonucleotide
uaagcccuggcauuccuca

SEQ ID NO: 1634870 - RNA, 19 nt, Artificial Sequence
  Description of Artificial Sequence: Synthetic oligonucleotide
ugugacaauuccuccuugu

SEQ ID NO: 1634871 - RNA, 19 nt, Artificial Sequence
  Description of Artificial Sequence: Synthetic oligonucleotide
ggacaauccgauuaugcug

SEQ ID NO: 1634872 - RNA, 19 nt, Artificial Sequence
  Description of Artificial Sequence: Synthetic oligonucleotide
gaucaguuuguugagagcu

SEQ ID NO: 1634873 - RNA, 19 nt, Artificial Sequence
  Description of Artificial Sequence: Synthetic oligonucleotide
aaaucagaucugguguucu

SEQ ID NO: 1634874 - RNA, 19 nt, Artificial Sequence
  Description of Artificial Sequence: Synthetic oligonucleotide
cucgggaaaggcaaaacca

SEQ ID NO: 1634875 - RNA, 19 nt, Artificial Sequence
  Description of Artificial Sequence: Synthetic oligonucleotide
ggauccugcaguuaagcug

SEQ ID NO: 1634876 - RNA, 19 nt, Artificial Sequence
  Description of Artificial Sequence: Synthetic oligonucleotide
cuuauauucuuccugcugu

SEQ ID NO: 1634877 - RNA, 19 nt, Artificial Sequence
  Description of Artificial Sequence: Synthetic oligonucleotide
ccuugacuuucuuugaggg

SEQ ID NO: 1634878 - RNA, 19 nt, Artificial Sequence
  Description of Artificial Sequence: Synthetic oligonucleotide
uagcaguaucugaaaacac

SEQ ID NO: 1634879 - RNA, 19 nt, Artificial Sequence
  Description of Artificial Sequence: Synthetic oligonucleotide
uaccuuugagccugugugc

SEQ ID NO: 1634880 - RNA, 19 nt, Artificial Sequence
  Description of Artificial Sequence: Synthetic oligonucleotide
cauugcguaaccgagccuc

SEQ ID NO: 1634881 - RNA, 19 nt, Artificial Sequence
  Description of Artificial Sequence: Synthetic oligonucleotide
agcaguaucugaaaacaca

SEQ ID NO: 1634882 - RNA, 19 nt, Artificial Sequence
  Description of Artificial Sequence: Synthetic oligonucleotide
ucaacuguuaggaguucau

SEQ ID NO: 1634883 - RNA, 19 nt, Artificial Sequence
  Description of Artificial Sequence: Synthetic oligonucleotide
aucagaucugguguucuuc

SEQ ID NO: 1634884 - RNA, 19 nt, Artificial Sequence
  Description of Artificial Sequence: Synthetic oligonucleotide
uaugcuggcacugugcauu

SEQ ID NO: 1634885 - RNA, 19 nt, Artificial Sequence
  Description of Artificial Sequence: Synthetic oligonucleotide
uucauugucaagggcccag

SEQ ID NO: 1634886 - RNA, 19 nt, Artificial Sequence
  Description of Artificial Sequence: Synthetic oligonucleotide
cugaauccccuccugggcc

SEQ ID NO: 1634887 - RNA, 19 nt, Artificial Sequence
  Description of Artificial Sequence: Synthetic oligonucleotide
agaugauuugcucgggaaa

SEQ ID NO: 1634888 - RNA, 19 nt, Artificial Sequence
  Description of Artificial Sequence: Synthetic oligonucleotide
guaaccgagccucagcauc

SEQ ID NO: 1634889 - RNA, 19 nt, Artificial Sequence
  Description of Artificial Sequence: Synthetic oligonucleotide
acagucguaagcccuggca

SEQ ID NO: 1634890 - RNA, 19 nt, Artificial Sequence
  Description of Artificial Sequence: Synthetic oligonucleotide
uucugcucacugaaguuuc

SEQ ID NO: 1634891 - RNA, 19 nt, Artificial Sequence
  Description of Artificial Sequence: Synthetic oligonucleotide
ugacaccaucaacuguuag

SEQ ID NO: 1634892 - RNA, 19 nt, Artificial Sequence
  Description of Artificial Sequence: Synthetic oligonucleotide
gaugcuggugccaucuuac

SEQ ID NO: 1634893 - RNA, 19 nt, Artificial Sequence
  Description of Artificial Sequence: Synthetic oligonucleotide
ucaacagcuggauggcaac

SEQ ID NO: 1634894 - RNA, 19 nt, Artificial Sequence
  Description of Artificial Sequence: Synthetic oligonucleotide
uguucucgaaguuccucca

SEQ ID NO: 1634895 - RNA, 19 nt, Artificial Sequence
  Description of Artificial Sequence: Synthetic oligonucleotide
aggaaacagcagcuucuac

SEQ ID NO: 1634896 - RNA, 19 nt, Artificial Sequence
  Description of Artificial Sequence: Synthetic oligonucleotide
ucucgaaguuccuccaccu

SEQ ID NO: 1634897 - RNA, 19 nt, Artificial Sequence
  Description of Artificial Sequence: Synthetic oligonucleotide
gaaguuucuaguuccaguu

SEQ ID NO: 1634898 - RNA, 19 nt, Artificial Sequence
  Description of Artificial Sequence: Synthetic oligonucleotide
cucauuuacacgcucaagu

SEQ ID NO: 1634899 - RNA, 19 nt, Artificial Sequence
  Description of Artificial Sequence: Synthetic oligonucleotide
auaggaaauucuggcauca

SEQ ID NO: 1634900 - RNA, 19 nt, Artificial Sequence
  Description of Artificial Sequence: Synthetic oligonucleotide
uugaggguuucugucagcu

SEQ ID NO: 1634901 - RNA, 19 nt, Artificial Sequence
  Description of Artificial Sequence: Synthetic oligonucleotide
ugaacaggaaccagucauu

SEQ ID NO: 1634902 - RNA, 19 nt, Artificial Sequence
  Description of Artificial Sequence: Synthetic oligonucleotide
aaaccucaauuuccugccu

SEQ ID NO: 1634903 - RNA, 19 nt, Artificial Sequence
  Description of Artificial Sequence: Synthetic oligonucleotide
uucugaguguggagggcag

SEQ ID NO: 1634904 - RNA, 19 nt, Artificial Sequence
  Description of Artificial Sequence: Synthetic oligonucleotide
ugaggugggcauuuuccac

SEQ ID NO: 1634905 - RNA, 19 nt, Artificial Sequence
  Description of Artificial Sequence: Synthetic oligonucleotide
agugagccauaggaaauuc

SEQ ID NO: 1634906 - RNA, 19 nt, Artificial Sequence
  Description of Artificial Sequence: Synthetic oligonucleotide
gaucugguguucuucucca

SEQ ID NO: 1634907 - RNA, 19 nt, Artificial Sequence
  Description of Artificial Sequence: Synthetic oligonucleotide
uuuuggauuuggacacccu

SEQ ID NO: 1634908 - RNA, 19 nt, Artificial Sequence
  Description of Artificial Sequence: Synthetic oligonucleotide
auuacaugucgagggagug

SEQ ID NO: 1634909 - RNA, 19 nt, Artificial Sequence
  Description of Artificial Sequence: Synthetic oligonucleotide
ugucaagggcccaggucag

SEQ ID NO: 1634910 - RNA, 19 nt, Artificial Sequence
  Description of Artificial Sequence: Synthetic oligonucleotide
uccucauuuacacgcucaa

SEQ ID NO: 1634911 - RNA, 19 nt, Artificial Sequence
  Description of Artificial Sequence: Synthetic oligonucleotide
acuguucucgaaguuccuc

SEQ ID NO: 1634912 - RNA, 19 nt, Artificial Sequence
  Description of Artificial Sequence: Synthetic oligonucleotide
uguggagggcagaaguguc

SEQ ID NO: 1634913 - RNA, 19 nt, Artificial Sequence
  Description of Artificial Sequence: Synthetic oligonucleotide
uuccgugagcuguuccagg

SEQ ID NO: 1634914 - RNA, 19 nt, Artificial Sequence
  Description of Artificial Sequence: Synthetic oligonucleotide
cuugucccgcucaugcacc

SEQ ID NO: 1634915 - RNA, 19 nt, Artificial Sequence
  Description of Artificial Sequence: Synthetic oligonucleotide
ugcguaaccgagccucagc

SEQ ID NO: 1634916 - RNA, 19 nt, Artificial Sequence
  Description of Artificial Sequence: Synthetic oligonucleotide
uccgauuaugcuggcacug

SEQ ID NO: 1634917 - RNA, 19 nt, Artificial Sequence
  Description of Artificial Sequence: Synthetic oligonucleotide
ugggcauuuuccacauaca

SEQ ID NO: 1634918 - RNA, 19 nt, Artificial Sequence
  Description of Artificial Sequence: Synthetic oligonucleotide
gaaccagucauuacauguc

SEQ ID NO: 1634919 - RNA, 19 nt, Artificial Sequence
  Description of Artificial Sequence: Synthetic oligonucleotide
ugaguugaacagcuuucau

SEQ ID NO: 1634920 - RNA, 19 nt, Artificial Sequence
  Description of Artificial Sequence: Synthetic oligonucleotide
aacugacccaucugcuccu

SEQ ID NO: 1634921 - RNA, 19 nt, Artificial Sequence
  Description of Artificial Sequence: Synthetic oligonucleotide
ugugguaguucaguuccug

SEQ ID NO: 1634922 - RNA, 19 nt, Artificial Sequence
  Description of Artificial Sequence: Synthetic oligonucleotide
ugaauccccuccugggccc

SEQ ID NO: 1634923 - RNA, 19 nt, Artificial Sequence
  Description of Artificial Sequence: Synthetic oligonucleotide
ucauugucaagggcccagg

SEQ ID NO: 1634924 - RNA, 19 nt, Artificial Sequence
  Description of Artificial Sequence: Synthetic oligonucleotide
guuuuggauuuggacaccc

SEQ ID NO: 1634925 - RNA, 19 nt, Artificial Sequence
  Description of Artificial Sequence: Synthetic oligonucleotide
augcggagaugauuugcuc

SEQ ID NO: 1634926 - RNA, 19 nt, Artificial Sequence
  Description of Artificial Sequence: Synthetic oligonucleotide
guugaacagcuuucaugag

SEQ ID NO: 1634927 - RNA, 19 nt, Artificial Sequence
  Description of Artificial Sequence: Synthetic oligonucleotide
agaguagcaguaucugaaa

SEQ ID NO: 1634928 - RNA, 19 nt, Artificial Sequence
  Description of Artificial Sequence: Synthetic oligonucleotide
guuucugucagcucugccu

SEQ ID NO: 1634929 - RNA, 19 nt, Artificial Sequence
  Description of Artificial Sequence: Synthetic oligonucleotide
auuuggacacccugcugcu

SEQ ID NO: 1634930 - RNA, 19 nt, Artificial Sequence
  Description of Artificial Sequence: Synthetic oligonucleotide
cugugcauucuccaguguc

SEQ ID NO: 1634931 - RNA, 19 nt, Artificial Sequence
  Description of Artificial Sequence: Synthetic oligonucleotide
cacauacaguuccuugagc

SEQ ID NO: 1634932 - RNA, 19 nt, Artificial Sequence
  Description of Artificial Sequence: Synthetic oligonucleotide
cuguuaggaguucauuguc

SEQ ID NO: 1634933 - RNA, 19 nt, Artificial Sequence
  Description of Artificial Sequence: Synthetic oligonucleotide
uuagucgucucccggccuc

SEQ ID NO: 1634934 - RNA, 19 nt, Artificial Sequence
  Description of Artificial Sequence: Synthetic oligonucleotide
uucaguuccugcgguagca

SEQ ID NO: 1634935 - RNA, 19 nt, Artificial Sequence
  Description of Artificial Sequence: Synthetic oligonucleotide
augucgagggaguggcuag

SEQ ID NO: 1634936 - RNA, 19 nt, Artificial Sequence
  Description of Artificial Sequence: Synthetic oligonucleotide
uuuagucgucucccggccu

SEQ ID NO: 1634937 - RNA, 19 nt, Artificial Sequence
  Description of Artificial Sequence: Synthetic oligonucleotide
cacugugcauucuccagug

SEQ ID NO: 1634938 - RNA, 19 nt, Artificial Sequence
  Description of Artificial Sequence: Synthetic oligonucleotide
aaucagaucugguguucuu

SEQ ID NO: 1634939 - RNA, 19 nt, Artificial Sequence
  Description of Artificial Sequence: Synthetic oligonucleotide
agccacuccacauugcgua

SEQ ID NO: 1634940 - RNA, 19 nt, Artificial Sequence
  Description of Artificial Sequence: Synthetic oligonucleotide
gcggagaugauuugcucgg

SEQ ID NO: 1634941 - RNA, 19 nt, Artificial Sequence
  Description of Artificial Sequence: Synthetic oligonucleotide
auuugcucgggaaaggcaa

SEQ ID NO: 1634942 - RNA, 19 nt, Artificial Sequence
  Description of Artificial Sequence: Synthetic oligonucleotide
cuuuuccgugagcuguucc

SEQ ID NO: 1634943 - RNA, 19 nt, Artificial Sequence
  Description of Artificial Sequence: Synthetic oligonucleotide
cugugugccgagcucuucc

SEQ ID NO: 1634944 - RNA, 19 nt, Artificial Sequence
  Description of Artificial Sequence: Synthetic oligonucleotide
cuggcacugugcauucucc

SEQ ID NO: 1634945 - RNA, 19 nt, Artificial Sequence
  Description of Artificial Sequence: Synthetic oligonucleotide
gaguagcaguaucugaaaa

SEQ ID NO: 1634946 - RNA, 19 nt, Artificial Sequence
  Description of Artificial Sequence: Synthetic oligonucleotide
gugguaguucaguuccugc

SEQ ID NO: 1634947 - RNA, 19 nt, Artificial Sequence
  Description of Artificial Sequence: Synthetic oligonucleotide
gugcauuuagucgucuccc

SEQ ID NO: 1634948 - RNA, 19 nt, Artificial Sequence
  Description of Artificial Sequence: Synthetic oligonucleotide
acacgauuuuccuccuucu

SEQ ID NO: 1634949 - RNA, 19 nt, Artificial Sequence
  Description of Artificial Sequence: Synthetic oligonucleotide
ucgucucccggccuccucc

SEQ ID NO: 1634950 - RNA, 19 nt, Artificial Sequence
  Description of Artificial Sequence: Synthetic oligonucleotide
ugaugcuggugccaucuua

SEQ ID NO: 1634951 - RNA, 19 nt, Artificial Sequence
  Description of Artificial Sequence: Synthetic oligonucleotide
cacauuccuucacaugaac

SEQ ID NO: 1634952 - RNA, 19 nt, Artificial Sequence
  Description of Artificial Sequence: Synthetic oligonucleotide
gcauuuagucgucucccgg

SEQ ID NO: 1634953 - RNA, 19 nt, Artificial Sequence
  Description of Artificial Sequence: Synthetic oligonucleotide
acagaaagugaugcuggug

SEQ ID NO: 1634954 - RNA, 19 nt, Artificial Sequence
  Description of Artificial Sequence: Synthetic oligonucleotide
ucagcuacgugagcuccag

SEQ ID NO: 1634955 - RNA, 19 nt, Artificial Sequence
  Description of Artificial Sequence: Synthetic oligonucleotide
cuuccaggucaaagcaggc

SEQ ID NO: 1634956 - RNA, 19 nt, Artificial Sequence
  Description of Artificial Sequence: Synthetic oligonucleotide
uucuccaacuguucucgaa

SEQ ID NO: 1634957 - RNA, 19 nt, Artificial Sequence
  Description of Artificial Sequence: Synthetic oligonucleotide
gucauuacaugucgaggga

SEQ ID NO: 1634958 - RNA, 19 nt, Artificial Sequence
  Description of Artificial Sequence: Synthetic oligonucleotide
cuggcauuccucauuuaca

SEQ ID NO: 1634959 - RNA, 19 nt, Artificial Sequence
  Description of Artificial Sequence: Synthetic oligonucleotide
uuugcucgggaaaggcaaa

SEQ ID NO: 1634960 - RNA, 19 nt, Artificial Sequence
  Description of Artificial Sequence: Synthetic oligonucleotide
aggaaccagucauuacaug

SEQ ID NO: 1634961 - RNA, 19 nt, Artificial Sequence
  Description of Artificial Sequence: Synthetic oligonucleotide
ggaaccagucauuacaugu

SEQ ID NO: 1634962 - RNA, 19 nt, Artificial Sequence
  Description of Artificial Sequence: Synthetic oligonucleotide
gaaggauccugcaguuaag

SEQ ID NO: 1634963 - RNA, 19 nt, Artificial Sequence
  Description of Artificial Sequence: Synthetic oligonucleotide
cauucugaauccccuccug

SEQ ID NO: 1634964 - RNA, 19 nt, Artificial Sequence
  Description of Artificial Sequence: Synthetic oligonucleotide
aguggcuagugagccauag

SEQ ID NO: 1634965 - RNA, 19 nt, Artificial Sequence
  Description of Artificial Sequence: Synthetic oligonucleotide
uccucucagcaccucgcug

SEQ ID NO: 1634966 - RNA, 19 nt, Artificial Sequence
  Description of Artificial Sequence: Synthetic oligonucleotide
ggcauuccucauuuacacg

SEQ ID NO: 1634967 - RNA, 19 nt, Artificial Sequence
  Description of Artificial Sequence: Synthetic oligonucleotide
gcuagugagccauaggaaa

SEQ ID NO: 1634968 - RNA, 19 nt, Artificial Sequence
  Description of Artificial Sequence: Synthetic oligonucleotide
gcucgggaaaggcaaaacc

SEQ ID NO: 1634969 - RNA, 19 nt, Artificial Sequence
  Description of Artificial Sequence: Synthetic oligonucleotide
ucugcucacugaaguuucu

SEQ ID NO: 1634970 - RNA, 19 nt, Artificial Sequence
  Description of Artificial Sequence: Synthetic oligonucleotide
aucaacuguuaggaguuca

SEQ ID NO: 1634971 - RNA, 19 nt, Artificial Sequence
  Description of Artificial Sequence: Synthetic oligonucleotide
acucuaggaaacagcagcu

SEQ ID NO: 1634972 - RNA, 19 nt, Artificial Sequence
  Description of Artificial Sequence: Synthetic oligonucleotide
cacgcucaaguucaacuuc

SEQ ID NO: 1634973 - RNA, 19 nt, Artificial Sequence
  Description of Artificial Sequence: Synthetic oligonucleotide
ccagucauuacaugucgag

SEQ ID NO: 1634974 - RNA, 19 nt, Artificial Sequence
  Description of Artificial Sequence: Synthetic oligonucleotide
cacgauuuuccuccuucug

SEQ ID NO: 1634975 - RNA, 19 nt, Artificial Sequence
  Description of Artificial Sequence: Synthetic oligonucleotide
uuuacacgcucaaguucaa

SEQ ID NO: 1634976 - RNA, 19 nt, Artificial Sequence
  Description of Artificial Sequence: Synthetic oligonucleotide
ucgagggaguggcuaguga

SEQ ID NO: 1634977 - RNA, 19 nt, Artificial Sequence
  Description of Artificial Sequence: Synthetic oligonucleotide
acuccacauugcguaaccg

SEQ ID NO: 1634978 - RNA, 19 nt, Artificial Sequence
  Description of Artificial Sequence: Synthetic oligonucleotide
auccgauuaugcuggcacu

SEQ ID NO: 1634979 - RNA, 19 nt, Artificial Sequence
  Description of Artificial Sequence: Synthetic oligonucleotide
ugacagucguaagcccugg

SEQ ID NO: 1634980 - RNA, 19 nt, Artificial Sequence
  Description of Artificial Sequence: Synthetic oligonucleotide
ucaagggcccaggucagcu

SEQ ID NO: 1634981 - RNA, 19 nt, Artificial Sequence
  Description of Artificial Sequence: Synthetic oligonucleotide
uccuuguaccuuugagccu

SEQ ID NO: 1634982 - RNA, 19 nt, Artificial Sequence
  Description of Artificial Sequence: Synthetic oligonucleotide
uccugcgguagcaggccag

SEQ ID NO: 1634983 - RNA, 19 nt, Artificial Sequence
  Description of Artificial Sequence: Synthetic oligonucleotide
uccaacuguucucgaaguu

SEQ ID NO: 1634984 - RNA, 19 nt, Artificial Sequence
  Description of Artificial Sequence: Synthetic oligonucleotide
agguucaccuucucaucca

SEQ ID NO: 1634985 - RNA, 19 nt, Artificial Sequence
  Description of Artificial Sequence: Synthetic oligonucleotide
cuaggaaacagcagcuucu

SEQ ID NO: 1634986 - RNA, 19 nt, Artificial Sequence
  Description of Artificial Sequence: Synthetic oligonucleotide
uggcaucagaguagcagua

SEQ ID NO: 1634987 - RNA, 19 nt, Artificial Sequence
  Description of Artificial Sequence: Synthetic oligonucleotide
cagaaguguccccuuccag

SEQ ID NO: 1634988 - RNA, 19 nt, Artificial Sequence
  Description of Artificial Sequence: Synthetic oligonucleotide
cuccacauugcguaaccga

SEQ ID NO: 1634989 - RNA, 19 nt, Artificial Sequence
  Description of Artificial Sequence: Synthetic oligonucleotide
ugcauucuccagugucagc

SEQ ID NO: 1634990 - RNA, 19 nt, Artificial Sequence
  Description of Artificial Sequence: Synthetic oligonucleotide
uccuugugguaguucaguu

SEQ ID NO: 1634991 - RNA, 19 nt, Artificial Sequence
  Description of Artificial Sequence: Synthetic oligonucleotide
caaaucagaucugguguuc

SEQ ID NO: 1634992 - RNA, 19 nt, Artificial Sequence
  Description of Artificial Sequence: Synthetic oligonucleotide
aguguggagggcagaagug

SEQ ID NO: 1634993 - RNA, 19 nt, Artificial Sequence
  Description of Artificial Sequence: Synthetic oligonucleotide
acugaucaguuuguugaga

SEQ ID NO: 1634994 - RNA, 19 nt, Artificial Sequence
  Description of Artificial Sequence: Synthetic oligonucleotide
acaugaacucuaggaaaca

SEQ ID NO: 1634995 - RNA, 19 nt, Artificial Sequence
  Description of Artificial Sequence: Synthetic oligonucleotide
agucguaagcccuggcauu

SEQ ID NO: 1634996 - RNA, 19 nt, Artificial Sequence
  Description of Artificial Sequence: Synthetic oligonucleotide
accgaaguccaggcucugc

SEQ ID NO: 1634997 - RNA, 19 nt, Artificial Sequence
  Description of Artificial Sequence: Synthetic oligonucleotide
agcaccucgcugcuucucu

SEQ ID NO: 1634998 - RNA, 19 nt, Artificial Sequence
  Description of Artificial Sequence: Synthetic oligonucleotide
cugcaguuaagcugugaca

SEQ ID NO: 1634999 - RNA, 19 nt, Artificial Sequence
  Description of Artificial Sequence: Synthetic oligonucleotide
gccugugacagucguaagc

SEQ ID NO: 1635000 - RNA, 19 nt, Artificial Sequence
  Description of Artificial Sequence: Synthetic oligonucleotide
caucagaguagcaguaucu

SEQ ID NO: 1635001 - RNA, 19 nt, Artificial Sequence
  Description of Artificial Sequence: Synthetic oligonucleotide
ccuggcauuccucauuuac

SEQ ID NO: 1635002 - RNA, 19 nt, Artificial Sequence
  Description of Artificial Sequence: Synthetic oligonucleotide
agggcagaguggcagucgu

SEQ ID NO: 1635003 - RNA, 19 nt, Artificial Sequence
  Description of Artificial Sequence: Synthetic oligonucleotide
gugaguugaacagcuuuca

SEQ ID NO: 1635004 - RNA, 19 nt, Artificial Sequence
  Description of Artificial Sequence: Synthetic oligonucleotide
cgauuuuccuccuucugag

SEQ ID NO: 1635005 - RNA, 19 nt, Artificial Sequence
  Description of Artificial Sequence: Synthetic oligonucleotide
ggcagaguggcagucgucc

SEQ ID NO: 1635006 - RNA, 19 nt, Artificial Sequence
  Description of Artificial Sequence: Synthetic oligonucleotide
gacagucguaagcccuggc

SEQ ID NO: 1635007 - RNA, 19 nt, Artificial Sequence
  Description of Artificial Sequence: Synthetic oligonucleotide
ucuuacugaucaguuuguu

SEQ ID NO: 1635008 - RNA, 19 nt, Artificial Sequence
  Description of Artificial Sequence: Synthetic oligonucleotide
ugcugugcauuuagucguc

SEQ ID NO: 1635009 - RNA, 19 nt, Artificial Sequence
  Description of Artificial Sequence: Synthetic oligonucleotide
uggcagucguccaucucuc

SEQ ID NO: 1635010 - RNA, 19 nt, Artificial Sequence
  Description of Artificial Sequence: Synthetic oligonucleotide
cugugcauuuagucgucuc

SEQ ID NO: 1635011 - RNA, 19 nt, Artificial Sequence
  Description of Artificial Sequence: Synthetic oligonucleotide
aucaacagcuggauggcaa

SEQ ID NO: 1635012 - RNA, 19 nt, Artificial Sequence
  Description of Artificial Sequence: Synthetic oligonucleotide
cuggauggcaacacgauuu

SEQ ID NO: 1635013 - RNA, 19 nt, Artificial Sequence
  Description of Artificial Sequence: Synthetic oligonucleotide
guucucgaaguuccuccac

SEQ ID NO: 1635014 - RNA, 19 nt, Artificial Sequence
  Description of Artificial Sequence: Synthetic oligonucleotide
ggccuugacuuucuuugag

SEQ ID NO: 1635015 - RNA, 19 nt, Artificial Sequence
  Description of Artificial Sequence: Synthetic oligonucleotide
uagugagccauaggaaauu

SEQ ID NO: 1635016 - RNA, 19 nt, Artificial Sequence
  Description of Artificial Sequence: Synthetic oligonucleotide
ccuuguaccuuugagccug

SEQ ID NO: 1635017 - RNA, 19 nt, Artificial Sequence
  Description of Artificial Sequence: Synthetic oligonucleotide
cuucuacacagaaagugau

SEQ ID NO: 1635018 - RNA, 19 nt, Artificial Sequence
  Description of Artificial Sequence: Synthetic oligonucleotide
ccacauacaguuccuugag

SEQ ID NO: 1635019 - RNA, 19 nt, Artificial Sequence
  Description of Artificial Sequence: Synthetic oligonucleotide
cugcugugcauuuagucgu

SEQ ID NO: 1635020 - RNA, 19 nt, Artificial Sequence
  Description of Artificial Sequence: Synthetic oligonucleotide
cauuacaugucgagggagu

SEQ ID NO: 1635021 - RNA, 19 nt, Artificial Sequence
  Description of Artificial Sequence: Synthetic oligonucleotide
acgcucaaguucaacuuca

SEQ ID NO: 1635022 - RNA, 19 nt, Artificial Sequence
  Description of Artificial Sequence: Synthetic oligonucleotide
cagcuggauggcaacacga

SEQ ID NO: 1635023 - RNA, 19 nt, Artificial Sequence
  Description of Artificial Sequence: Synthetic oligonucleotide
uuacacgcucaaguucaac

SEQ ID NO: 1635024 - RNA, 19 nt, Artificial Sequence
  Description of Artificial Sequence: Synthetic oligonucleotide
gagcuccaggaaccaacug

SEQ ID NO: 1635025 - RNA, 19 nt, Artificial Sequence
  Description of Artificial Sequence: Synthetic oligonucleotide
ugcucgggaaaggcaaaac

SEQ ID NO: 1635026 - RNA, 19 nt, Artificial Sequence
  Description of Artificial Sequence: Synthetic oligonucleotide
gugacaauuccuccuugua

SEQ ID NO: 1635027 - RNA, 19 nt, Artificial Sequence
  Description of Artificial Sequence: Synthetic oligonucleotide
uuccugcgguagcaggcca

SEQ ID NO: 1635028 - RNA, 19 nt, Artificial Sequence
  Description of Artificial Sequence: Synthetic oligonucleotide
cagguccugccucaccuug

SEQ ID NO: 1635029 - RNA, 19 nt, Artificial Sequence
  Description of Artificial Sequence: Synthetic oligonucleotide
ucugccugugacagucgua

SEQ ID NO: 1635030 - RNA, 19 nt, Artificial Sequence
  Description of Artificial Sequence: Synthetic oligonucleotide
guggagggcagaagugucc

SEQ ID NO: 1635031 - RNA, 19 nt, Artificial Sequence
  Description of Artificial Sequence: Synthetic oligonucleotide
cugcaucaacagcuggaug

SEQ ID NO: 1635032 - RNA, 19 nt, Artificial Sequence
  Description of Artificial Sequence: Synthetic oligonucleotide
uugucccgcucaugcacca

SEQ ID NO: 1635033 - RNA, 19 nt, Artificial Sequence
  Description of Artificial Sequence: Synthetic oligonucleotide
uugcguaaccgagccucag

SEQ ID NO: 1635034 - RNA, 19 nt, Artificial Sequence
  Description of Artificial Sequence: Synthetic oligonucleotide
cuagugagccauaggaaau

SEQ ID NO: 1635035 - RNA, 19 nt, Artificial Sequence
  Description of Artificial Sequence: Synthetic oligonucleotide
caugcggagaugauuugcu

SEQ ID NO: 1635036 - RNA, 19 nt, Artificial Sequence
  Description of Artificial Sequence: Synthetic oligonucleotide
gcuggaugacaccaucaac

SEQ ID NO: 1635037 - RNA, 19 nt, Artificial Sequence
  Description of Artificial Sequence: Synthetic oligonucleotide
agcaggccuguuccuuguc

SEQ ID NO: 1635038 - RNA, 19 nt, Artificial Sequence
  Description of Artificial Sequence: Synthetic oligonucleotide
acuuucuuugaggguuucu

SEQ ID NO: 1635039 - RNA, 19 nt, Artificial Sequence
  Description of Artificial Sequence: Synthetic oligonucleotide
uaguucaguuccugcggua

SEQ ID NO: 1635040 - RNA, 19 nt, Artificial Sequence
  Description of Artificial Sequence: Synthetic oligonucleotide
acauugcguaaccgagccu

SEQ ID NO: 1635041 - RNA, 19 nt, Artificial Sequence
  Description of Artificial Sequence: Synthetic oligonucleotide
gucguaagcccuggcauuc

SEQ ID NO: 1635042 - RNA, 19 nt, Artificial Sequence
  Description of Artificial Sequence: Synthetic oligonucleotide
gcaucagaguagcaguauc

SEQ ID NO: 1635043 - RNA, 19 nt, Artificial Sequence
  Description of Artificial Sequence: Synthetic oligonucleotide
cuuugagccugugugccga

SEQ ID NO: 1635044 - RNA, 19 nt, Artificial Sequence
  Description of Artificial Sequence: Synthetic oligonucleotide
ccacauugcguaaccgagc

SEQ ID NO: 1635045 - RNA, 19 nt, Artificial Sequence
  Description of Artificial Sequence: Synthetic oligonucleotide
accuugucccgcucaugca

SEQ ID NO: 1635046 - RNA, 19 nt, Artificial Sequence
  Description of Artificial Sequence: Synthetic oligonucleotide
ggauuuggacacccugcug

SEQ ID NO: 1635047 - RNA, 19 nt, Artificial Sequence
  Description of Artificial Sequence: Synthetic oligonucleotide
guaguucaguuccugcggu

SEQ ID NO: 1635048 - RNA, 19 nt, Artificial Sequence
  Description of Artificial Sequence: Synthetic oligonucleotide
ccuucacaugaacucuagg

SEQ ID NO: 1635049 - RNA, 19 nt, Artificial Sequence
  Description of Artificial Sequence: Synthetic oligonucleotide
ccaacuguucucgaaguuc

SEQ ID NO: 1635050 - RNA, 19 nt, Artificial Sequence
  Description of Artificial Sequence: Synthetic oligonucleotide
ggagaugauuugcucggga

SEQ ID NO: 1635051 - RNA, 19 nt, Artificial Sequence
  Description of Artificial Sequence: Synthetic oligonucleotide
aagcccuggcauuccucau

SEQ ID NO: 1635052 - RNA, 19 nt, Artificial Sequence
  Description of Artificial Sequence: Synthetic oligonucleotide
cugccugugacagucguaa

SEQ ID NO: 1635053 - RNA, 19 nt, Artificial Sequence
  Description of Artificial Sequence: Synthetic oligonucleotide
agccugugugccgagcucu

SEQ ID NO: 1635054 - RNA, 19 nt, Artificial Sequence
  Description of Artificial Sequence: Synthetic oligonucleotide
gcacuggacaauccgauua

SEQ ID NO: 1635055 - RNA, 19 nt, Artificial Sequence
  Description of Artificial Sequence: Synthetic oligonucleotide
ccgagccucagcauccucc

SEQ ID NO: 1635056 - RNA, 19 nt, Artificial Sequence
  Description of Artificial Sequence: Synthetic oligonucleotide
acaccgaaguccaggcucu

SEQ ID NO: 1635057 - RNA, 19 nt, Artificial Sequence
  Description of Artificial Sequence: Synthetic oligonucleotide
gugcugaagcucagcuacg

SEQ ID NO: 1635058 - RNA, 19 nt, Artificial Sequence
  Description of Artificial Sequence: Synthetic oligonucleotide
ucguaagcccuggcauucc

SEQ ID NO: 1635059 - RNA, 19 nt, Artificial Sequence
  Description of Artificial Sequence: Synthetic oligonucleotide
accagucauuacaugucga

SEQ ID NO: 1635060 - RNA, 19 nt, Artificial Sequence
  Description of Artificial Sequence: Synthetic oligonucleotide
gcguaaccgagccucagca

SEQ ID NO: 1635061 - RNA, 19 nt, Artificial Sequence
  Description of Artificial Sequence: Synthetic oligonucleotide
ccuugucccgcucaugcac

SEQ ID NO: 1635062 - RNA, 19 nt, Artificial Sequence
  Description of Artificial Sequence: Synthetic oligonucleotide
ggugaacaggaaccaguca

SEQ ID NO: 1635063 - RNA, 19 nt, Artificial Sequence
  Description of Artificial Sequence: Synthetic oligonucleotide
ucuuuuccgugagcuguuc

SEQ ID NO: 1635064 - RNA, 19 nt, Artificial Sequence
  Description of Artificial Sequence: Synthetic oligonucleotide
uugcucgggaaaggcaaaa

SEQ ID NO: 1635065 - RNA, 19 nt, Artificial Sequence
  Description of Artificial Sequence: Synthetic oligonucleotide
accgagccucagcauccuc

SEQ ID NO: 1635066 - RNA, 19 nt, Artificial Sequence
  Description of Artificial Sequence: Synthetic oligonucleotide
ccaacugacccaucugcuc

SEQ ID NO: 1635067 - RNA, 19 nt, Artificial Sequence
  Description of Artificial Sequence: Synthetic oligonucleotide
ugucgagggaguggcuagu

SEQ ID NO: 1635068 - RNA, 19 nt, Artificial Sequence
  Description of Artificial Sequence: Synthetic oligonucleotide
cuugagcagcaaaucagau

SEQ ID NO: 1635069 - RNA, 19 nt, Artificial Sequence
  Description of Artificial Sequence: Synthetic oligonucleotide
auugcguaaccgagccuca

SEQ ID NO: 1635070 - RNA, 19 nt, Artificial Sequence
  Description of Artificial Sequence: Synthetic oligonucleotide
cuacacagaaagugaugcu

SEQ ID NO: 1635071 - RNA, 19 nt, Artificial Sequence
  Description of Artificial Sequence: Synthetic oligonucleotide
acacauuccuucacaugaa

SEQ ID NO: 1635072 - RNA, 19 nt, Artificial Sequence
  Description of Artificial Sequence: Synthetic oligonucleotide
ccuuugagccugugugccg

SEQ ID NO: 1635073 - RNA, 19 nt, Artificial Sequence
  Description of Artificial Sequence: Synthetic oligonucleotide
cuucaagguuuuggauuug

SEQ ID NO: 1635074 - RNA, 19 nt, Artificial Sequence
  Description of Artificial Sequence: Synthetic oligonucleotide
caccucgcugcuucucuuc

SEQ ID NO: 1635075 - RNA, 19 nt, Artificial Sequence
  Description of Artificial Sequence: Synthetic oligonucleotide
gcccaggucagcuccaaga

SEQ ID NO: 1635076 - RNA, 19 nt, Artificial Sequence
  Description of Artificial Sequence: Synthetic oligonucleotide
caguuuguugagagcucga

SEQ ID NO: 1635077 - RNA, 19 nt, Artificial Sequence
  Description of Artificial Sequence: Synthetic oligonucleotide
gggugaacaggaaccaguc

SEQ ID NO: 1635078 - RNA, 19 nt, Artificial Sequence
  Description of Artificial Sequence: Synthetic oligonucleotide
aaccgagccucagcauccu

SEQ ID NO: 1635079 - RNA, 19 nt, Artificial Sequence
  Description of Artificial Sequence: Synthetic oligonucleotide
gacuuucuuugaggguuuc

SEQ ID NO: 1635080 - RNA, 19 nt, Artificial Sequence
  Description of Artificial Sequence: Synthetic oligonucleotide
ccaugcggagaugauuugc

SEQ ID NO: 1635081 - RNA, 19 nt, Artificial Sequence
  Description of Artificial Sequence: Synthetic oligonucleotide
gguuuuggauuuggacacc

SEQ ID NO: 1635082 - RNA, 19 nt, Artificial Sequence
  Description of Artificial Sequence: Synthetic oligonucleotide
uagucgucucccggccucc

SEQ ID NO: 1635083 - RNA, 19 nt, Artificial Sequence
  Description of Artificial Sequence: Synthetic oligonucleotide
caagggcccaggucagcuc

SEQ ID NO: 1635084 - RNA, 19 nt, Artificial Sequence
  Description of Artificial Sequence: Synthetic oligonucleotide
gccgagcucuuccagguca

SEQ ID NO: 1635085 - RNA, 19 nt, Artificial Sequence
  Description of Artificial Sequence: Synthetic oligonucleotide
caacuucaagguuuuggau

SEQ ID NO: 1635086 - RNA, 19 nt, Artificial Sequence
  Description of Artificial Sequence: Synthetic oligonucleotide
gucgagggaguggcuagug

SEQ ID NO: 1635087 - RNA, 19 nt, Artificial Sequence
  Description of Artificial Sequence: Synthetic oligonucleotide
ugucccgcucaugcaccag

SEQ ID NO: 1635088 - RNA, 19 nt, Artificial Sequence
  Description of Artificial Sequence: Synthetic oligonucleotide
cagcuuucaugaggugggc

SEQ ID NO: 1635089 - RNA, 19 nt, Artificial Sequence
  Description of Artificial Sequence: Synthetic oligonucleotide
gcaguaucugaaaacacau

SEQ ID NO: 1635090 - RNA, 19 nt, Artificial Sequence
  Description of Artificial Sequence: Synthetic oligonucleotide
ccggccuccuccucaaggc

SEQ ID NO: 1635091 - RNA, 19 nt, Artificial Sequence
  Description of Artificial Sequence: Synthetic oligonucleotide
caucaacuguuaggaguuc

SEQ ID NO: 1635092 - RNA, 19 nt, Artificial Sequence
  Description of Artificial Sequence: Synthetic oligonucleotide
caugucgagggaguggcua

SEQ ID NO: 1635093 - RNA, 19 nt, Artificial Sequence
  Description of Artificial Sequence: Synthetic oligonucleotide
ugccgagcucuuccagguc

SEQ ID NO: 1635094 - RNA, 19 nt, Artificial Sequence
  Description of Artificial Sequence: Synthetic oligonucleotide
cagcuacgugagcuccagg

SEQ ID NO: 1635095 - RNA, 19 nt, Artificial Sequence
  Description of Artificial Sequence: Synthetic oligonucleotide
guaagcccuggcauuccuc

SEQ ID NO: 1635096 - RNA, 19 nt, Artificial Sequence
  Description of Artificial Sequence: Synthetic oligonucleotide
guugagagcucgaacuuuu

SEQ ID NO: 1635097 - RNA, 19 nt, Artificial Sequence
  Description of Artificial Sequence: Synthetic oligonucleotide
uuguaccuuugagccugug

SEQ ID NO: 1635098 - RNA, 19 nt, Artificial Sequence
  Description of Artificial Sequence: Synthetic oligonucleotide
guucauugucaagggccca

SEQ ID NO: 1635099 - RNA, 19 nt, Artificial Sequence
  Description of Artificial Sequence: Synthetic oligonucleotide
cagucguaagcccuggcau

SEQ ID NO: 1635100 - RNA, 19 nt, Artificial Sequence
  Description of Artificial Sequence: Synthetic oligonucleotide
gcuacgugagcuccaggaa

SEQ ID NO: 1635101 - RNA, 19 nt, Artificial Sequence
  Description of Artificial Sequence: Synthetic oligonucleotide
uggugccaucuuacugauc

SEQ ID NO: 1635102 - RNA, 19 nt, Artificial Sequence
  Description of Artificial Sequence: Synthetic oligonucleotide
gugccgagcucuuccaggu

SEQ ID NO: 1635103 - RNA, 19 nt, Artificial Sequence
  Description of Artificial Sequence: Synthetic oligonucleotide
ccauaggaaauucuggcau

SEQ ID NO: 1635104 - RNA, 19 nt, Artificial Sequence
  Description of Artificial Sequence: Synthetic oligonucleotide
caauccgauuaugcuggca

SEQ ID NO: 1635105 - RNA, 19 nt, Artificial Sequence
  Description of Artificial Sequence: Synthetic oligonucleotide
caucaacagcuggauggca

SEQ ID NO: 1635106 - RNA, 19 nt, Artificial Sequence
  Description of Artificial Sequence: Synthetic oligonucleotide
cccggccuccuccucaagg

SEQ ID NO: 1635107 - RNA, 19 nt, Artificial Sequence
  Description of Artificial Sequence: Synthetic oligonucleotide
ggcuagugagccauaggaa

SEQ ID NO: 1635108 - RNA, 19 nt, Artificial Sequence
  Description of Artificial Sequence: Synthetic oligonucleotide
gcaaaucagaucugguguu

SEQ ID NO: 1635109 - RNA, 19 nt, Artificial Sequence
  Description of Artificial Sequence: Synthetic oligonucleotide
aggaaccaacugacccauc

SEQ ID NO: 1635110 - RNA, 19 nt, Artificial Sequence
  Description of Artificial Sequence: Synthetic oligonucleotide
augacaccaucaacuguua

SEQ ID NO: 1635111 - RNA, 19 nt, Artificial Sequence
  Description of Artificial Sequence: Synthetic oligonucleotide
aguuccaguugaagauuuu

SEQ ID NO: 1635112 - RNA, 19 nt, Artificial Sequence
  Description of Artificial Sequence: Synthetic oligonucleotide
gucaagggcccaggucagc

SEQ ID NO: 1635113 - RNA, 19 nt, Artificial Sequence
  Description of Artificial Sequence: Synthetic oligonucleotide
gaguggcagucguccaucu

SEQ ID NO: 1635114 - RNA, 19 nt, Artificial Sequence
  Description of Artificial Sequence: Synthetic oligonucleotide
gcgguagcaggccagggcu

SEQ ID NO: 1635115 - RNA, 19 nt, Artificial Sequence
  Description of Artificial Sequence: Synthetic oligonucleotide
caguaucugaaaacacauu

SEQ ID NO: 1635116 - RNA, 19 nt, Artificial Sequence
  Description of Artificial Sequence: Synthetic oligonucleotide
cauugucaagggcccaggu

SEQ ID NO: 1635117 - RNA, 19 nt, Artificial Sequence
  Description of Artificial Sequence: Synthetic oligonucleotide
cacuggacaauccgauuau

SEQ ID NO: 1635118 - RNA, 19 nt, Artificial Sequence
  Description of Artificial Sequence: Synthetic oligonucleotide
cuaguuccaguugaagauu

SEQ ID NO: 1635119 - RNA, 19 nt, Artificial Sequence
  Description of Artificial Sequence: Synthetic oligonucleotide
gugagccauaggaaauucu

SEQ ID NO: 1635120 - RNA, 19 nt, Artificial Sequence
  Description of Artificial Sequence: Synthetic oligonucleotide
ccaucaacuguuaggaguu

SEQ ID NO: 1635121 - RNA, 19 nt, Artificial Sequence
  Description of Artificial Sequence: Synthetic oligonucleotide
cagcuccaagagguucacc

SEQ ID NO: 1635122 - RNA, 19 nt, Artificial Sequence
  Description of Artificial Sequence: Synthetic oligonucleotide
ccgaaguccaggcucugca

SEQ ID NO: 1635123 - RNA, 19 nt, Artificial Sequence
  Description of Artificial Sequence: Synthetic oligonucleotide
gcagaguggcagucgucca

SEQ ID NO: 1635124 - RNA, 19 nt, Artificial Sequence
  Description of Artificial Sequence: Synthetic oligonucleotide
gaauccccuccugggccca

SEQ ID NO: 1635125 - RNA, 19 nt, Artificial Sequence
  Description of Artificial Sequence: Synthetic oligonucleotide
ccugcgguagcaggccagg

SEQ ID NO: 1635126 - RNA, 19 nt, Artificial Sequence
  Description of Artificial Sequence: Synthetic oligonucleotide
acaugucgagggaguggcu

SEQ ID NO: 1635127 - RNA, 19 nt, Artificial Sequence
  Description of Artificial Sequence: Synthetic oligonucleotide
ccuccugggcccaugcgga

SEQ ID NO: 1635128 - RNA, 19 nt, Artificial Sequence
  Description of Artificial Sequence: Synthetic oligonucleotide
cucugccugugacagucgu

SEQ ID NO: 1635129 - RNA, 19 nt, Artificial Sequence
  Description of Artificial Sequence: Synthetic oligonucleotide
cccaugcggagaugauuug

SEQ ID NO: 1635130 - RNA, 19 nt, Artificial Sequence
  Description of Artificial Sequence: Synthetic oligonucleotide
ccucaauuuccugccucug

SEQ ID NO: 1635131 - RNA, 19 nt, Artificial Sequence
  Description of Artificial Sequence: Synthetic oligonucleotide
cuggugccaucuuacugau

SEQ ID NO: 1635132 - RNA, 19 nt, Artificial Sequence
  Description of Artificial Sequence: Synthetic oligonucleotide
aggucaaagcaggccuguu

SEQ ID NO: 1635133 - RNA, 19 nt, Artificial Sequence
  Description of Artificial Sequence: Synthetic oligonucleotide
cugaaggauccugcaguua

SEQ ID NO: 1635134 - RNA, 19 nt, Artificial Sequence
  Description of Artificial Sequence: Synthetic oligonucleotide
caggaaccaacugacccau

SEQ ID NO: 1635135 - RNA, 19 nt, Artificial Sequence
  Description of Artificial Sequence: Synthetic oligonucleotide
gucgucucccggccuccuc

SEQ ID NO: 1635136 - RNA, 19 nt, Artificial Sequence
  Description of Artificial Sequence: Synthetic oligonucleotide
agucgucucccggccuccu

SEQ ID NO: 1635137 - RNA, 19 nt, Artificial Sequence
  Description of Artificial Sequence: Synthetic oligonucleotide
cucucacaaaguccagguu

SEQ ID NO: 1635138 - RNA, 19 nt, Artificial Sequence
  Description of Artificial Sequence: Synthetic oligonucleotide
gccacuccacauugcguaa

SEQ ID NO: 1635139 - RNA, 19 nt, Artificial Sequence
  Description of Artificial Sequence: Synthetic oligonucleotide
caacuguuaggaguucauu

SEQ ID NO: 1635140 - RNA, 19 nt, Artificial Sequence
  Description of Artificial Sequence: Synthetic oligonucleotide
gcagcaaaucagaucuggu

SEQ ID NO: 1635141 - RNA, 19 nt, Artificial Sequence
  Description of Artificial Sequence: Synthetic oligonucleotide
caaagcaggccuguuccuu

SEQ ID NO: 1635142 - RNA, 19 nt, Artificial Sequence
  Description of Artificial Sequence: Synthetic oligonucleotide
caccgaaguccaggcucug

SEQ ID NO: 1635143 - RNA, 19 nt, Artificial Sequence
  Description of Artificial Sequence: Synthetic oligonucleotide
cuuguaccuuugagccugu

SEQ ID NO: 1635144 - RNA, 19 nt, Artificial Sequence
  Description of Artificial Sequence: Synthetic oligonucleotide
aggucagcuccaagagguu

SEQ ID NO: 1635145 - RNA, 19 nt, Artificial Sequence
  Description of Artificial Sequence: Synthetic oligonucleotide
cucuaggaaacagcagcuu

SEQ ID NO: 1635146 - RNA, 19 nt, Artificial Sequence
  Description of Artificial Sequence: Synthetic oligonucleotide
ccuucucauccacaccgaa

SEQ ID NO: 1635147 - RNA, 19 nt, Artificial Sequence
  Description of Artificial Sequence: Synthetic oligonucleotide
caggucaaagcaggccugu

SEQ ID NO: 1635148 - RNA, 19 nt, Artificial Sequence
  Description of Artificial Sequence: Synthetic oligonucleotide
cucccggccuccuccucaa

SEQ ID NO: 1635149 - RNA, 19 nt, Artificial Sequence
  Description of Artificial Sequence: Synthetic oligonucleotide
cggagaugauuugcucggg

SEQ ID NO: 1635150 - RNA, 19 nt, Artificial Sequence
  Description of Artificial Sequence: Synthetic oligonucleotide
gcccaugcggagaugauuu

SEQ ID NO: 1635151 - RNA, 19 nt, Artificial Sequence
  Description of Artificial Sequence: Synthetic oligonucleotide
gucucccggccuccuccuc

SEQ ID NO: 1635152 - RNA, 19 nt, Artificial Sequence
  Description of Artificial Sequence: Synthetic oligonucleotide
ggccuucaguugcugcuua

SEQ ID NO: 1635153 - RNA, 19 nt, Artificial Sequence
  Description of Artificial Sequence: Synthetic oligonucleotide
ggcaucagaguagcaguau

SEQ ID NO: 1635154 - RNA, 19 nt, Artificial Sequence
  Description of Artificial Sequence: Synthetic oligonucleotide
gcuggccuugacuuucuuu

SEQ ID NO: 1635155 - RNA, 19 nt, Artificial Sequence
  Description of Artificial Sequence: Synthetic oligonucleotide
cgggaaaggcaaaaccacu

SEQ ID NO: 1635156 - RNA, 19 nt, Artificial Sequence
  Description of Artificial Sequence: Synthetic oligonucleotide
ccccuccugggcccaugcg

SEQ ID NO: 1635157 - RNA, 19 nt, Artificial Sequence
  Description of Artificial Sequence: Synthetic oligonucleotide
gaguggcuagugagccaua

SEQ ID NO: 1635158 - RNA, 19 nt, Artificial Sequence
  Description of Artificial Sequence: Synthetic oligonucleotide
cugggcccaugcggagaug

SEQ ID NO: 1635159 - RNA, 19 nt, Artificial Sequence
  Description of Artificial Sequence: Synthetic oligonucleotide
ucccggcacccugccuccu

SEQ ID NO: 1635160 - RNA, 19 nt, Artificial Sequence
  Description of Artificial Sequence: Synthetic oligonucleotide
ggcagucguccaucucucu

SEQ ID NO: 1635161 - RNA, 19 nt, Artificial Sequence
  Description of Artificial Sequence: Synthetic oligonucleotide
gugaugcuggugccaucuu

SEQ ID NO: 1635162 - RNA, 19 nt, Artificial Sequence
  Description of Artificial Sequence: Synthetic oligonucleotide
ccugugugccgagcucuuc

SEQ ID NO: 1635163 - RNA, 19 nt, Artificial Sequence
  Description of Artificial Sequence: Synthetic oligonucleotide
ccgagcucuuccaggucaa

SEQ ID NO: 1635164 - RNA, 19 nt, Artificial Sequence
  Description of Artificial Sequence: Synthetic oligonucleotide
gcugugcauuuagucgucu

SEQ ID NO: 1635165 - RNA, 19 nt, Artificial Sequence
  Description of Artificial Sequence: Synthetic oligonucleotide
ccugccucuguguuucauu

SEQ ID NO: 1635166 - RNA, 19 nt, Artificial Sequence
  Description of Artificial Sequence: Synthetic oligonucleotide
ccgauuaugcuggcacugu

SEQ ID NO: 1635167 - RNA, 19 nt, Artificial Sequence
  Description of Artificial Sequence: Synthetic oligonucleotide
cccggcacccugccuccuc

SEQ ID NO: 1635168 - RNA, 19 nt, Artificial Sequence
  Description of Artificial Sequence: Synthetic oligonucleotide
cguaagcccuggcauuccu

SEQ ID NO: 1635169 - RNA, 19 nt, Artificial Sequence
  Description of Artificial Sequence: Synthetic oligonucleotide
cguaaccgagccucagcau

SEQ ID NO: 1635170 - RNA, 19 nt, Artificial Sequence
  Description of Artificial Sequence: Synthetic oligonucleotide
ccccuuccagcugaaggau

SEQ ID NO: 1635171 - RNA, 19 nt, Artificial Sequence
  Description of Artificial Sequence: Synthetic oligonucleotide
gggcccaugcggagaugau

SEQ ID NO: 1635172 - RNA, 19 nt, Artificial Sequence
  Description of Artificial Sequence: Synthetic oligonucleotide
gccugugugccgagcucuu

SEQ ID NO: 1635173 - RNA, 19 nt, Artificial Sequence
  Description of Artificial Sequence: Synthetic oligonucleotide
aagacauagauuuacauag

SEQ ID NO: 1635174 - RNA, 19 nt, Artificial Sequence
  Description of Artificial Sequence: Synthetic oligonucleotide
aauaaaagcauucucuuga

SEQ ID NO: 1635175 - RNA, 19 nt, Artificial Sequence
  Description of Artificial Sequence: Synthetic oligonucleotide
gauauguuuguauacaacc

SEQ ID NO: 1635176 - RNA, 19 nt, Artificial Sequence
  Description of Artificial Sequence: Synthetic oligonucleotide
aaaggcaaauuccagccgc

SEQ ID NO: 1635177 - RNA, 19 nt, Artificial Sequence
  Description of Artificial Sequence: Synthetic oligonucleotide
uuuugaacggaaauaaaag

SEQ ID NO: 1635178 - RNA, 19 nt, Artificial Sequence
  Description of Artificial Sequence: Synthetic oligonucleotide
ucaaccaguauuuugggcg

SEQ ID NO: 1635179 - RNA, 19 nt, Artificial Sequence
  Description of Artificial Sequence: Synthetic oligonucleotide
aauaguuccggucauucuc

SEQ ID NO: 1635180 - RNA, 19 nt, Artificial Sequence
  Description of Artificial Sequence: Synthetic oligonucleotide
auaaaaguccaaugaaggc

SEQ ID NO: 1635181 - RNA, 19 nt, Artificial Sequence
  Description of Artificial Sequence: Synthetic oligonucleotide
aauccaucgauguacugac

SEQ ID NO: 1635182 - RNA, 19 nt, Artificial Sequence
  Description of Artificial Sequence: Synthetic oligonucleotide
uagauuucgguauaaaacc

SEQ ID NO: 1635183 - RNA, 19 nt, Artificial Sequence
  Description of Artificial Sequence: Synthetic oligonucleotide
cuaucaaccaguauuuugg

SEQ ID NO: 1635184 - RNA, 19 nt, Artificial Sequence
  Description of Artificial Sequence: Synthetic oligonucleotide
accuuaguaguuuauaccg

SEQ ID NO: 1635185 - RNA, 19 nt, Artificial Sequence
  Description of Artificial Sequence: Synthetic oligonucleotide
aaauuauagauuucgguau

SEQ ID NO: 1635186 - RNA, 19 nt, Artificial Sequence
  Description of Artificial Sequence: Synthetic oligonucleotide
uaaauuauagauuucggua

SEQ ID NO: 1635187 - RNA, 19 nt, Artificial Sequence
  Description of Artificial Sequence: Synthetic oligonucleotide
aauuggagcuaacucuggc

SEQ ID NO: 1635188 - RNA, 19 nt, Artificial Sequence
  Description of Artificial Sequence: Synthetic oligonucleotide
cuaaccuccaugaagagug

SEQ ID NO: 1635189 - RNA, 19 nt, Artificial Sequence
  Description of Artificial Sequence: Synthetic oligonucleotide
aauuguucaauccaucgau

SEQ ID NO: 1635190 - RNA, 19 nt, Artificial Sequence
  Description of Artificial Sequence: Synthetic oligonucleotide
aaauaaaagcauucucuug

SEQ ID NO: 1635191 - RNA, 19 nt, Artificial Sequence
  Description of Artificial Sequence: Synthetic oligonucleotide
uuaauagucuucaauugga

SEQ ID NO: 1635192 - RNA, 19 nt, Artificial Sequence
  Description of Artificial Sequence: Synthetic oligonucleotide
ucuugaauuaaauuauaga

SEQ ID NO: 1635193 - RNA, 19 nt, Artificial Sequence
  Description of Artificial Sequence: Synthetic oligonucleotide
uucgaugacauaaaaggca

SEQ ID NO: 1635194 - RNA, 19 nt, Artificial Sequence
  Description of Artificial Sequence: Synthetic oligonucleotide
auagucuucaauuggagcu

SEQ ID NO: 1635195 - RNA, 19 nt, Artificial Sequence
  Description of Artificial Sequence: Synthetic oligonucleotide
agugugaugguauggaguc

SEQ ID NO: 1635196 - RNA, 19 nt, Artificial Sequence
  Description of Artificial Sequence: Synthetic oligonucleotide
ucucuaaccuccaugaaga

SEQ ID NO: 1635197 - RNA, 19 nt, Artificial Sequence
  Description of Artificial Sequence: Synthetic oligonucleotide
guauaaaaccuucucuucg

SEQ ID NO: 1635198 - RNA, 19 nt, Artificial Sequence
  Description of Artificial Sequence: Synthetic oligonucleotide
aaguucacgauccagcgcu

SEQ ID NO: 1635199 - RNA, 19 nt, Artificial Sequence
  Description of Artificial Sequence: Synthetic oligonucleotide
uucaauuggagcuaacucu

SEQ ID NO: 1635200 - RNA, 19 nt, Artificial Sequence
  Description of Artificial Sequence: Synthetic oligonucleotide
cauuaaagagcaucgcucg

SEQ ID NO: 1635201 - RNA, 19 nt, Artificial Sequence
  Description of Artificial Sequence: Synthetic oligonucleotide
gaagaugcaugauaccacg

SEQ ID NO: 1635202 - RNA, 19 nt, Artificial Sequence
  Description of Artificial Sequence: Synthetic oligonucleotide
gcuuguaccauaaagaggg

SEQ ID NO: 1635203 - RNA, 19 nt, Artificial Sequence
  Description of Artificial Sequence: Synthetic oligonucleotide
guuauauggaaguauguac

SEQ ID NO: 1635204 - RNA, 19 nt, Artificial Sequence
  Description of Artificial Sequence: Synthetic oligonucleotide
ucaauuggagcuaacucug

SEQ ID NO: 1635205 - RNA, 19 nt, Artificial Sequence
  Description of Artificial Sequence: Synthetic oligonucleotide
uacauuauacccagcguag

SEQ ID NO: 1635206 - RNA, 19 nt, Artificial Sequence
  Description of Artificial Sequence: Synthetic oligonucleotide
uaaaaguccaaugaaggca

SEQ ID NO: 1635207 - RNA, 19 nt, Artificial Sequence
  Description of Artificial Sequence: Synthetic oligonucleotide
uuuguauacaaccuaucaa

SEQ ID NO: 1635208 - RNA, 19 nt, Artificial Sequence
  Description of Artificial Sequence: Synthetic oligonucleotide
aaaauugugacaucucauu

SEQ ID NO: 1635209 - RNA, 19 nt, Artificial Sequence
  Description of Artificial Sequence: Synthetic oligonucleotide
aaauuguucaauccaucga

SEQ ID NO: 1635210 - RNA, 19 nt, Artificial Sequence
  Description of Artificial Sequence: Synthetic oligonucleotide
ugaaguagagacaggacgu

SEQ ID NO: 1635211 - RNA, 19 nt, Artificial Sequence
  Description of Artificial Sequence: Synthetic oligonucleotide
uuacauuauacccagcgua

SEQ ID NO: 1635212 - RNA, 19 nt, Artificial Sequence
  Description of Artificial Sequence: Synthetic oligonucleotide
cuuaguaguuuauaccgcc

SEQ ID NO: 1635213 - RNA, 19 nt, Artificial Sequence
  Description of Artificial Sequence: Synthetic oligonucleotide
gagcuuguaccauaaagag

SEQ ID NO: 1635214 - RNA, 19 nt, Artificial Sequence
  Description of Artificial Sequence: Synthetic oligonucleotide
ucuuuuaauagucuucaau

SEQ ID NO: 1635215 - RNA, 19 nt, Artificial Sequence
  Description of Artificial Sequence: Synthetic oligonucleotide
acaauuugaacacauuuaa

SEQ ID NO: 1635216 - RNA, 19 nt, Artificial Sequence
  Description of Artificial Sequence: Synthetic oligonucleotide
aacggaaauaaaagcauuc

SEQ ID NO: 1635217 - RNA, 19 nt, Artificial Sequence
  Description of Artificial Sequence: Synthetic oligonucleotide
gaugguauggagucccgcg

SEQ ID NO: 1635218 - RNA, 19 nt, Artificial Sequence
  Description of Artificial Sequence: Synthetic oligonucleotide
uguaccauaaagaggguau

SEQ ID NO: 1635219 - RNA, 19 nt, Artificial Sequence
  Description of Artificial Sequence: Synthetic oligonucleotide
gguuacauuauacccagcg

SEQ ID NO: 1635220 - RNA, 19 nt, Artificial Sequence
  Description of Artificial Sequence: Synthetic oligonucleotide
cuugaauuaaauuauagau

SEQ ID NO: 1635221 - RNA, 19 nt, Artificial Sequence
  Description of Artificial Sequence: Synthetic oligonucleotide
auuaaauuauagauuucgg

SEQ ID NO: 1635222 - RNA, 19 nt, Artificial Sequence
  Description of Artificial Sequence: Synthetic oligonucleotide
gagacacuucuuuuaauag

SEQ ID NO: 1635223 - RNA, 19 nt, Artificial Sequence
  Description of Artificial Sequence: Synthetic oligonucleotide
ugaacggaaauaaaagcau

SEQ ID NO: 1635224 - RNA, 19 nt, Artificial Sequence
  Description of Artificial Sequence: Synthetic oligonucleotide
uuugcugcaaagugacgcg

SEQ ID NO: 1635225 - RNA, 19 nt, Artificial Sequence
  Description of Artificial Sequence: Synthetic oligonucleotide
aagagugugcuccaagcca

SEQ ID NO: 1635226 - RNA, 19 nt, Artificial Sequence
  Description of Artificial Sequence: Synthetic oligonucleotide
uggagcaucggaaucaggu

SEQ ID NO: 1635227 - RNA, 19 nt, Artificial Sequence
  Description of Artificial Sequence: Synthetic oligonucleotide
acauuaaagagcaucgcuc

SEQ ID NO: 1635228 - RNA, 19 nt, Artificial Sequence
  Description of Artificial Sequence: Synthetic oligonucleotide
uaccuuaguaguuuauacc

SEQ ID NO: 1635229 - RNA, 19 nt, Artificial Sequence
  Description of Artificial Sequence: Synthetic oligonucleotide
uauaaaaccuucucuucgu

SEQ ID NO: 1635230 - RNA, 19 nt, Artificial Sequence
  Description of Artificial Sequence: Synthetic oligonucleotide
auccauaauaguuccgguc

SEQ ID NO: 1635231 - RNA, 19 nt, Artificial Sequence
  Description of Artificial Sequence: Synthetic oligonucleotide
guuccggucauucucaggc

SEQ ID NO: 1635232 - RNA, 19 nt, Artificial Sequence
  Description of Artificial Sequence: Synthetic oligonucleotide
agcguagugaacucuguuc

SEQ ID NO: 1635233 - RNA, 19 nt, Artificial Sequence
  Description of Artificial Sequence: Synthetic oligonucleotide
gaugcaugauaccacgagc

SEQ ID NO: 1635234 - RNA, 19 nt, Artificial Sequence
  Description of Artificial Sequence: Synthetic oligonucleotide
acauaaagacugcuggcuc

SEQ ID NO: 1635235 - RNA, 19 nt, Artificial Sequence
  Description of Artificial Sequence: Synthetic oligonucleotide
acauccauaauaguuccgg

SEQ ID NO: 1635236 - RNA, 19 nt, Artificial Sequence
  Description of Artificial Sequence: Synthetic oligonucleotide
uuuugggcguauauaauaa

SEQ ID NO: 1635237 - RNA, 19 nt, Artificial Sequence
  Description of Artificial Sequence: Synthetic oligonucleotide
auaauaguuccggucauuc

SEQ ID NO: 1635238 - RNA, 19 nt, Artificial Sequence
  Description of Artificial Sequence: Synthetic oligonucleotide
auagauguguacuuuccca

SEQ ID NO: 1635239 - RNA, 19 nt, Artificial Sequence
  Description of Artificial Sequence: Synthetic oligonucleotide
ugaggaauagauguguacu

SEQ ID NO: 1635240 - RNA, 19 nt, Artificial Sequence
  Description of Artificial Sequence: Synthetic oligonucleotide
auaaagaggguauguguug

SEQ ID NO: 1635241 - RNA, 19 nt, Artificial Sequence
  Description of Artificial Sequence: Synthetic oligonucleotide
uggaaguauguacauguac

SEQ ID NO: 1635242 - RNA, 19 nt, Artificial Sequence
  Description of Artificial Sequence: Synthetic oligonucleotide
uuaguaguuuauaccgccc

SEQ ID NO: 1635243 - RNA, 19 nt, Artificial Sequence
  Description of Artificial Sequence: Synthetic oligonucleotide
agugacgcggcaucucucc

SEQ ID NO: 1635244 - RNA, 19 nt, Artificial Sequence
  Description of Artificial Sequence: Synthetic oligonucleotide
agcuacauagaugaaguag

SEQ ID NO: 1635245 - RNA, 19 nt, Artificial Sequence
  Description of Artificial Sequence: Synthetic oligonucleotide
cucguuauauggaaguaug

SEQ ID NO: 1635246 - RNA, 19 nt, Artificial Sequence
  Description of Artificial Sequence: Synthetic oligonucleotide
guuuguauacaaccuauca

SEQ ID NO: 1635247 - RNA, 19 nt, Artificial Sequence
  Description of Artificial Sequence: Synthetic oligonucleotide
aggcagaugguccacauca

SEQ ID NO: 1635248 - RNA, 19 nt, Artificial Sequence
  Description of Artificial Sequence: Synthetic oligonucleotide
ugagacacuucuuuuaaua

SEQ ID NO: 1635249 - RNA, 19 nt, Artificial Sequence
  Description of Artificial Sequence: Synthetic oligonucleotide
agaugcaugauaccacgag

SEQ ID NO: 1635250 - RNA, 19 nt, Artificial Sequence
  Description of Artificial Sequence: Synthetic oligonucleotide
uguacugacgcuccuugga

SEQ ID NO: 1635251 - RNA, 19 nt, Artificial Sequence
  Description of Artificial Sequence: Synthetic oligonucleotide
guauuuugggcguauauaa

SEQ ID NO: 1635252 - RNA, 19 nt, Artificial Sequence
  Description of Artificial Sequence: Synthetic oligonucleotide
gaagagugugcuccaagcc

SEQ ID NO: 1635253 - RNA, 19 nt, Artificial Sequence
  Description of Artificial Sequence: Synthetic oligonucleotide
uucgguauaaaaccuucuc

SEQ ID NO: 1635254 - RNA, 19 nt, Artificial Sequence
  Description of Artificial Sequence: Synthetic oligonucleotide
uuguucaauccaucgaugu

SEQ ID NO: 1635255 - RNA, 19 nt, Artificial Sequence
  Description of Artificial Sequence: Synthetic oligonucleotide
aaguauguacauguacuug

SEQ ID NO: 1635256 - RNA, 19 nt, Artificial Sequence
  Description of Artificial Sequence: Synthetic oligonucleotide
gagcaucggaaucaggugc

SEQ ID NO: 1635257 - RNA, 19 nt, Artificial Sequence
  Description of Artificial Sequence: Synthetic oligonucleotide
ugugcuccaagccaaguuc

SEQ ID NO: 1635258 - RNA, 19 nt, Artificial Sequence
  Description of Artificial Sequence: Synthetic oligonucleotide
aagagcaucgcucgacuga

SEQ ID NO: 1635259 - RNA, 19 nt, Artificial Sequence
  Description of Artificial Sequence: Synthetic oligonucleotide
aucacauauguacaaaaua

SEQ ID NO: 1635260 - RNA, 19 nt, Artificial Sequence
  Description of Artificial Sequence: Synthetic oligonucleotide
cucucuaaccuccaugaag

SEQ ID NO: 1635261 - RNA, 19 nt, Artificial Sequence
  Description of Artificial Sequence: Synthetic oligonucleotide
ugucaggccacucacccca

SEQ ID NO: 1635262 - RNA, 19 nt, Artificial Sequence
  Description of Artificial Sequence: Synthetic oligonucleotide
uugagcgcagacaucuucc

SEQ ID NO: 1635263 - RNA, 19 nt, Artificial Sequence
  Description of Artificial Sequence: Synthetic oligonucleotide
uguuucuggagcaucggaa

SEQ ID NO: 1635264 - RNA, 19 nt, Artificial Sequence
  Description of Artificial Sequence: Synthetic oligonucleotide
aagaggguauguguuggcg

SEQ ID NO: 1635265 - RNA, 19 nt, Artificial Sequence
  Description of Artificial Sequence: Synthetic oligonucleotide
auuuugaacggaaauaaaa

SEQ ID NO: 1635266 - RNA, 19 nt, Artificial Sequence
  Description of Artificial Sequence: Synthetic oligonucleotide
gaagccccaaagcagggag

SEQ ID NO: 1635267 - RNA, 19 nt, Artificial Sequence
  Description of Artificial Sequence: Synthetic oligonucleotide
agauauguuuguauacaac

SEQ ID NO: 1635268 - RNA, 19 nt, Artificial Sequence
  Description of Artificial Sequence: Synthetic oligonucleotide
cuucaauuggagcuaacuc

SEQ ID NO: 1635269 - RNA, 19 nt, Artificial Sequence
  Description of Artificial Sequence: Synthetic oligonucleotide
uauauggaaguauguacau

SEQ ID NO: 1635270 - RNA, 19 nt, Artificial Sequence
  Description of Artificial Sequence: Synthetic oligonucleotide
auguguacuuucccaaguc

SEQ ID NO: 1635271 - RNA, 19 nt, Artificial Sequence
  Description of Artificial Sequence: Synthetic oligonucleotide
gacaugucgcucucuaacc

SEQ ID NO: 1635272 - RNA, 19 nt, Artificial Sequence
  Description of Artificial Sequence: Synthetic oligonucleotide
agguuuacagauauguuug

SEQ ID NO: 1635273 - RNA, 19 nt, Artificial Sequence
  Description of Artificial Sequence: Synthetic oligonucleotide
aaagagcaucgcucgacug

SEQ ID NO: 1635274 - RNA, 19 nt, Artificial Sequence
  Description of Artificial Sequence: Synthetic oligonucleotide
cuguucgaugacauaaaag

SEQ ID NO: 1635275 - RNA, 19 nt, Artificial Sequence
  Description of Artificial Sequence: Synthetic oligonucleotide
uaguaguuuauaccgcccu

SEQ ID NO: 1635276 - RNA, 19 nt, Artificial Sequence
  Description of Artificial Sequence: Synthetic oligonucleotide
guucaauccaucgauguac

SEQ ID NO: 1635277 - RNA, 19 nt, Artificial Sequence
  Description of Artificial Sequence: Synthetic oligonucleotide
auauaauaaauuguucaau

SEQ ID NO: 1635278 - RNA, 19 nt, Artificial Sequence
  Description of Artificial Sequence: Synthetic oligonucleotide
aaggcauugggaaagccgu

SEQ ID NO: 1635279 - RNA, 19 nt, Artificial Sequence
  Description of Artificial Sequence: Synthetic oligonucleotide
gggcguauauaauaaauug

SEQ ID NO: 1635280 - RNA, 19 nt, Artificial Sequence
  Description of Artificial Sequence: Synthetic oligonucleotide
uaaagagcaucgcucgacu

SEQ ID NO: 1635281 - RNA, 19 nt, Artificial Sequence
  Description of Artificial Sequence: Synthetic oligonucleotide
aauaccuuaguaguuuaua

SEQ ID NO: 1635282 - RNA, 19 nt, Artificial Sequence
  Description of Artificial Sequence: Synthetic oligonucleotide
uccgcuugagcgcagacau

SEQ ID NO: 1635283 - RNA, 19 nt, Artificial Sequence
  Description of Artificial Sequence: Synthetic oligonucleotide
acccacauuaaagagcauc

SEQ ID NO: 1635284 - RNA, 19 nt, Artificial Sequence
  Description of Artificial Sequence: Synthetic oligonucleotide
uuggagcuaacucuggcau

SEQ ID NO: 1635285 - RNA, 19 nt, Artificial Sequence
  Description of Artificial Sequence: Synthetic oligonucleotide
agcgcagacaucuuccucu

SEQ ID NO: 1635286 - RNA, 19 nt, Artificial Sequence
  Description of Artificial Sequence: Synthetic oligonucleotide
uucaggucuguacaaugcu

SEQ ID NO: 1635287 - RNA, 19 nt, Artificial Sequence
  Description of Artificial Sequence: Synthetic oligonucleotide
gacugaacgguugugugcc

SEQ ID NO: 1635288 - RNA, 19 nt, Artificial Sequence
  Description of Artificial Sequence: Synthetic oligonucleotide
auuggagcuaacucuggca

SEQ ID NO: 1635289 - RNA, 19 nt, Artificial Sequence
  Description of Artificial Sequence: Synthetic oligonucleotide
cauagauuuacauaguuuu

SEQ ID NO: 1635290 - RNA, 19 nt, Artificial Sequence
  Description of Artificial Sequence: Synthetic oligonucleotide
uucacagacugggacacag

SEQ ID NO: 1635291 - RNA, 19 nt, Artificial Sequence
  Description of Artificial Sequence: Synthetic oligonucleotide
ucuguucgaugacauaaaa

SEQ ID NO: 1635292 - RNA, 19 nt, Artificial Sequence
  Description of Artificial Sequence: Synthetic oligonucleotide
uuaaagagcaucgcucgac

SEQ ID NO: 1635293 - RNA, 19 nt, Artificial Sequence
  Description of Artificial Sequence: Synthetic oligonucleotide
uucaauccaucgauguacu

SEQ ID NO: 1635294 - RNA, 19 nt, Artificial Sequence
  Description of Artificial Sequence: Synthetic oligonucleotide
acaucacauauguacaaaa

SEQ ID NO: 1635295 - RNA, 19 nt, Artificial Sequence
  Description of Artificial Sequence: Synthetic oligonucleotide
uagauguguacuuucccaa

SEQ ID NO: 1635296 - RNA, 19 nt, Artificial Sequence
  Description of Artificial Sequence: Synthetic oligonucleotide
uuucgguauaaaaccuucu

SEQ ID NO: 1635297 - RNA, 19 nt, Artificial Sequence
  Description of Artificial Sequence: Synthetic oligonucleotide
ucguuauauggaaguaugu

SEQ ID NO: 1635298 - RNA, 19 nt, Artificial Sequence
  Description of Artificial Sequence: Synthetic oligonucleotide
cuuggaauaccuuaguagu

SEQ ID NO: 1635299 - RNA, 19 nt, Artificial Sequence
  Description of Artificial Sequence: Synthetic oligonucleotide
uccacugucaggccacuca

SEQ ID NO: 1635300 - RNA, 19 nt, Artificial Sequence
  Description of Artificial Sequence: Synthetic oligonucleotide
ugggcguauauaauaaauu

SEQ ID NO: 1635301 - RNA, 19 nt, Artificial Sequence
  Description of Artificial Sequence: Synthetic oligonucleotide
auauguuuguauacaaccu

SEQ ID NO: 1635302 - RNA, 19 nt, Artificial Sequence
  Description of Artificial Sequence: Synthetic oligonucleotide
cauuauacccagcguagug

SEQ ID NO: 1635303 - RNA, 19 nt, Artificial Sequence
  Description of Artificial Sequence: Synthetic oligonucleotide
aggcauaaccaauuacaug

SEQ ID NO: 1635304 - RNA, 19 nt, Artificial Sequence
  Description of Artificial Sequence: Synthetic oligonucleotide
uuauacccagcguagugaa

SEQ ID NO: 1635305 - RNA, 19 nt, Artificial Sequence
  Description of Artificial Sequence: Synthetic oligonucleotide
aucgauguacugacgcucc

SEQ ID NO: 1635306 - RNA, 19 nt, Artificial Sequence
  Description of Artificial Sequence: Synthetic oligonucleotide
uccggucauucucaggcag

SEQ ID NO: 1635307 - RNA, 19 nt, Artificial Sequence
  Description of Artificial Sequence: Synthetic oligonucleotide
auuauacccagcguaguga

SEQ ID NO: 1635308 - RNA, 19 nt, Artificial Sequence
  Description of Artificial Sequence: Synthetic oligonucleotide
ucgacugaacgguugugug

SEQ ID NO: 1635309 - RNA, 19 nt, Artificial Sequence
  Description of Artificial Sequence: Synthetic oligonucleotide
cauggguucaggucuguac

SEQ ID NO: 1635310 - RNA, 19 nt, Artificial Sequence
  Description of Artificial Sequence: Synthetic oligonucleotide
aaggcgaucagggagcgau

SEQ ID NO: 1635311 - RNA, 19 nt, Artificial Sequence
  Description of Artificial Sequence: Synthetic oligonucleotide
gcucuuuucacagacuggg

SEQ ID NO: 1635312 - RNA, 19 nt, Artificial Sequence
  Description of Artificial Sequence: Synthetic oligonucleotide
acgguugugugccagucug

SEQ ID NO: 1635313 - RNA, 19 nt, Artificial Sequence
  Description of Artificial Sequence: Synthetic oligonucleotide
uuccaaucccaagccaugg

SEQ ID NO: 1635314 - RNA, 19 nt, Artificial Sequence
  Description of Artificial Sequence: Synthetic oligonucleotide
uguucaauccaucgaugua

SEQ ID NO: 1635315 - RNA, 19 nt, Artificial Sequence
  Description of Artificial Sequence: Synthetic oligonucleotide
agcgauuggagacacgcau

SEQ ID NO: 1635316 - RNA, 19 nt, Artificial Sequence
  Description of Artificial Sequence: Synthetic oligonucleotide
agcuuguaccauaaagagg

SEQ ID NO: 1635317 - RNA, 19 nt, Artificial Sequence
  Description of Artificial Sequence: Synthetic oligonucleotide
gauccagcgcuguagccug

SEQ ID NO: 1635318 - RNA, 19 nt, Artificial Sequence
  Description of Artificial Sequence: Synthetic oligonucleotide
auacccagcguagugaacu

SEQ ID NO: 1635319 - RNA, 19 nt, Artificial Sequence
  Description of Artificial Sequence: Synthetic oligonucleotide
aguuuauaccgcccuaaaa

SEQ ID NO: 1635320 - RNA, 19 nt, Artificial Sequence
  Description of Artificial Sequence: Synthetic oligonucleotide
uacauagaugaaguagaga

SEQ ID NO: 1635321 - RNA, 19 nt, Artificial Sequence
  Description of Artificial Sequence: Synthetic oligonucleotide
gagguuuacagauauguuu

SEQ ID NO: 1635322 - RNA, 19 nt, Artificial Sequence
  Description of Artificial Sequence: Synthetic oligonucleotide
ucaacaauuugaacacauu

SEQ ID NO: 1635323 - RNA, 19 nt, Artificial Sequence
  Description of Artificial Sequence: Synthetic oligonucleotide
agggagcucucuuuacuuc

SEQ ID NO: 1635324 - RNA, 19 nt, Artificial Sequence
  Description of Artificial Sequence: Synthetic oligonucleotide
cgcaucauccgcuugagcg

SEQ ID NO: 1635325 - RNA, 19 nt, Artificial Sequence
  Description of Artificial Sequence: Synthetic oligonucleotide
uuggaauaccuuaguaguu

SEQ ID NO: 1635326 - RNA, 19 nt, Artificial Sequence
  Description of Artificial Sequence: Synthetic oligonucleotide
accauaaagaggguaugug

SEQ ID NO: 1635327 - RNA, 19 nt, Artificial Sequence
  Description of Artificial Sequence: Synthetic oligonucleotide
agaggguauguguuggcga

SEQ ID NO: 1635328 - RNA, 19 nt, Artificial Sequence
  Description of Artificial Sequence: Synthetic oligonucleotide
caauuggagcuaacucugg

SEQ ID NO: 1635329 - RNA, 19 nt, Artificial Sequence
  Description of Artificial Sequence: Synthetic oligonucleotide
gaacucguuauauggaagu

SEQ ID NO: 1635330 - RNA, 19 nt, Artificial Sequence
  Description of Artificial Sequence: Synthetic oligonucleotide
ucuaaccuccaugaagagu

SEQ ID NO: 1635331 - RNA, 19 nt, Artificial Sequence
  Description of Artificial Sequence: Synthetic oligonucleotide
aaccuaucaaccaguauuu

SEQ ID NO: 1635332 - RNA, 19 nt, Artificial Sequence
  Description of Artificial Sequence: Synthetic oligonucleotide
uggagacacgcaucauccg

SEQ ID NO: 1635333 - RNA, 19 nt, Artificial Sequence
  Description of Artificial Sequence: Synthetic oligonucleotide
ugugccagucuguucgaug

SEQ ID NO: 1635334 - RNA, 19 nt, Artificial Sequence
  Description of Artificial Sequence: Synthetic oligonucleotide
uccuuggaauaccuuagua

SEQ ID NO: 1635335 - RNA, 19 nt, Artificial Sequence
  Description of Artificial Sequence: Synthetic oligonucleotide
acaugucgcucucuaaccu

SEQ ID NO: 1635336 - RNA, 19 nt, Artificial Sequence
  Description of Artificial Sequence: Synthetic oligonucleotide
augcaugauaccacgagcu

SEQ ID NO: 1635337 - RNA, 19 nt, Artificial Sequence
  Description of Artificial Sequence: Synthetic oligonucleotide
acucaccccaccgaagaac

SEQ ID NO: 1635338 - RNA, 19 nt, Artificial Sequence
  Description of Artificial Sequence: Synthetic oligonucleotide
agaacucguuauauggaag

SEQ ID NO: 1635339 - RNA, 19 nt, Artificial Sequence
  Description of Artificial Sequence: Synthetic oligonucleotide
uggaauaccuuaguaguuu

SEQ ID NO: 1635340 - RNA, 19 nt, Artificial Sequence
  Description of Artificial Sequence: Synthetic oligonucleotide
guucaggucuguacaaugc

SEQ ID NO: 1635341 - RNA, 19 nt, Artificial Sequence
  Description of Artificial Sequence: Synthetic oligonucleotide
ucgcucucuaaccuccaug

SEQ ID NO: 1635342 - RNA, 19 nt, Artificial Sequence
  Description of Artificial Sequence: Synthetic oligonucleotide
ucacgauccagcgcuguag

SEQ ID NO: 1635343 - RNA, 19 nt, Artificial Sequence
  Description of Artificial Sequence: Synthetic oligonucleotide
gcguagugaacucuguucc

SEQ ID NO: 1635344 - RNA, 19 nt, Artificial Sequence
  Description of Artificial Sequence: Synthetic oligonucleotide
gacguggagagggagaaga

SEQ ID NO: 1635345 - RNA, 19 nt, Artificial Sequence
  Description of Artificial Sequence: Synthetic oligonucleotide
gaaguagagacaggacgug

SEQ ID NO: 1635346 - RNA, 19 nt, Artificial Sequence
  Description of Artificial Sequence: Synthetic oligonucleotide
aacgguugugugccagucu

SEQ ID NO: 1635347 - RNA, 19 nt, Artificial Sequence
  Description of Artificial Sequence: Synthetic oligonucleotide
caucucuccacauccauaa

SEQ ID NO: 1635348 - RNA, 19 nt, Artificial Sequence
  Description of Artificial Sequence: Synthetic oligonucleotide
ccaaguucacgauccagcg

SEQ ID NO: 1635349 - RNA, 19 nt, Artificial Sequence
  Description of Artificial Sequence: Synthetic oligonucleotide
acacgcaucauccgcuuga

SEQ ID NO: 1635350 - RNA, 19 nt, Artificial Sequence
  Description of Artificial Sequence: Synthetic oligonucleotide
ucauucucaggcagauggu

SEQ ID NO: 1635351 - RNA, 19 nt, Artificial Sequence
  Description of Artificial Sequence: Synthetic oligonucleotide
cacauccauaauaguuccg

SEQ ID NO: 1635352 - RNA, 19 nt, Artificial Sequence
  Description of Artificial Sequence: Synthetic oligonucleotide
uaccauaaagaggguaugu

SEQ ID NO: 1635353 - RNA, 19 nt, Artificial Sequence
  Description of Artificial Sequence: Synthetic oligonucleotide
ugggaagaugcaugauacc

SEQ ID NO: 1635354 - RNA, 19 nt, Artificial Sequence
  Description of Artificial Sequence: Synthetic oligonucleotide
gccggguuacauuauaccc

SEQ ID NO: 1635355 - RNA, 19 nt, Artificial Sequence
  Description of Artificial Sequence: Synthetic oligonucleotide
uacaaccuaucaaccagua

SEQ ID NO: 1635356 - RNA, 19 nt, Artificial Sequence
  Description of Artificial Sequence: Synthetic oligonucleotide
ugguauggagucccgcgcu

SEQ ID NO: 1635357 - RNA, 19 nt, Artificial Sequence
  Description of Artificial Sequence: Synthetic oligonucleotide
uugcugcaaagugacgcgg

SEQ ID NO: 1635358 - RNA, 19 nt, Artificial Sequence
  Description of Artificial Sequence: Synthetic oligonucleotide
ggaauagauguguacuuuc

SEQ ID NO: 1635359 - RNA, 19 nt, Artificial Sequence
  Description of Artificial Sequence: Synthetic oligonucleotide
auuguucaauccaucgaug

SEQ ID NO: 1635360 - RNA, 19 nt, Artificial Sequence
  Description of Artificial Sequence: Synthetic oligonucleotide
uacaucacauauguacaaa

SEQ ID NO: 1635361 - RNA, 19 nt, Artificial Sequence
  Description of Artificial Sequence: Synthetic oligonucleotide
uguuggcgaugccuggagc

SEQ ID NO: 1635362 - RNA, 19 nt, Artificial Sequence
  Description of Artificial Sequence: Synthetic oligonucleotide
ucccgcgcuguaaacauaa

SEQ ID NO: 1635363 - RNA, 19 nt, Artificial Sequence
  Description of Artificial Sequence: Synthetic oligonucleotide
gcuacauagaugaaguaga

SEQ ID NO: 1635364 - RNA, 19 nt, Artificial Sequence
  Description of Artificial Sequence: Synthetic oligonucleotide
gaucagggagcgauuggag

SEQ ID NO: 1635365 - RNA, 19 nt, Artificial Sequence
  Description of Artificial Sequence: Synthetic oligonucleotide
cuugagcgcagacaucuuc

SEQ ID NO: 1635366 - RNA, 19 nt, Artificial Sequence
  Description of Artificial Sequence: Synthetic oligonucleotide
ggagcgauuggagacacgc

SEQ ID NO: 1635367 - RNA, 19 nt, Artificial Sequence
  Description of Artificial Sequence: Synthetic oligonucleotide
ggagacacgcaucauccgc

SEQ ID NO: 1635368 - RNA, 19 nt, Artificial Sequence
  Description of Artificial Sequence: Synthetic oligonucleotide
ccuaucaaccaguauuuug

SEQ ID NO: 1635369 - RNA, 19 nt, Artificial Sequence
  Description of Artificial Sequence: Synthetic oligonucleotide
ucaauccaucgauguacug

SEQ ID NO: 1635370 - RNA, 19 nt, Artificial Sequence
  Description of Artificial Sequence: Synthetic oligonucleotide
caauccaucgauguacuga

SEQ ID NO: 1635371 - RNA, 19 nt, Artificial Sequence
  Description of Artificial Sequence: Synthetic oligonucleotide
agaugaaggcgaucaggga

SEQ ID NO: 1635372 - RNA, 19 nt, Artificial Sequence
  Description of Artificial Sequence: Synthetic oligonucleotide
uggagcuaacucuggcaug

SEQ ID NO: 1635373 - RNA, 19 nt, Artificial Sequence
  Description of Artificial Sequence: Synthetic oligonucleotide
gguucaggucuguacaaug

SEQ ID NO: 1635374 - RNA, 19 nt, Artificial Sequence
  Description of Artificial Sequence: Synthetic oligonucleotide
acauagauuuacauaguuu

SEQ ID NO: 1635375 - RNA, 19 nt, Artificial Sequence
  Description of Artificial Sequence: Synthetic oligonucleotide
cugcuggcucuuuucacag

SEQ ID NO: 1635376 - RNA, 19 nt, Artificial Sequence
  Description of Artificial Sequence: Synthetic oligonucleotide
aguaguuuauaccgcccua

SEQ ID NO: 1635377 - RNA, 19 nt, Artificial Sequence
  Description of Artificial Sequence: Synthetic oligonucleotide
auaccacgagcuuguacca

SEQ ID NO: 1635378 - RNA, 19 nt, Artificial Sequence
  Description of Artificial Sequence: Synthetic oligonucleotide
gacauagauuuacauaguu

SEQ ID NO: 1635379 - RNA, 19 nt, Artificial Sequence
  Description of Artificial Sequence: Synthetic oligonucleotide
agagacaugucgcucucua

SEQ ID NO: 1635380 - RNA, 19 nt, Artificial Sequence
  Description of Artificial Sequence: Synthetic oligonucleotide
caccccaccgaagaacucg

SEQ ID NO: 1635381 - RNA, 19 nt, Artificial Sequence
  Description of Artificial Sequence: Synthetic oligonucleotide
accaugagacacuucuuuu

SEQ ID NO: 1635382 - RNA, 19 nt, Artificial Sequence
  Description of Artificial Sequence: Synthetic oligonucleotide
acucguuauauggaaguau

SEQ ID NO: 1635383 - RNA, 19 nt, Artificial Sequence
  Description of Artificial Sequence: Synthetic oligonucleotide
ugagcgcagacaucuuccu

SEQ ID NO: 1635384 - RNA, 19 nt, Artificial Sequence
  Description of Artificial Sequence: Synthetic oligonucleotide
auaguuccggucauucuca

SEQ ID NO: 1635385 - RNA, 19 nt, Artificial Sequence
  Description of Artificial Sequence: Synthetic oligonucleotide
cacgauccagcgcuguagc

SEQ ID NO: 1635386 - RNA, 19 nt, Artificial Sequence
  Description of Artificial Sequence: Synthetic oligonucleotide
uauacccagcguagugaac

SEQ ID NO: 1635387 - RNA, 19 nt, Artificial Sequence
  Description of Artificial Sequence: Synthetic oligonucleotide
guuacauuauacccagcgu

SEQ ID NO: 1635388 - RNA, 19 nt, Artificial Sequence
  Description of Artificial Sequence: Synthetic oligonucleotide
gcucucuuuacuuccaauc

SEQ ID NO: 1635389 - RNA, 19 nt, Artificial Sequence
  Description of Artificial Sequence: Synthetic oligonucleotide
caucgauguacugacgcuc

SEQ ID NO: 1635390 - RNA, 19 nt, Artificial Sequence
  Description of Artificial Sequence: Synthetic oligonucleotide
ccuuaguaguuuauaccgc

SEQ ID NO: 1635391 - RNA, 19 nt, Artificial Sequence
  Description of Artificial Sequence: Synthetic oligonucleotide
aagaugcaugauaccacga

SEQ ID NO: 1635392 - RNA, 19 nt, Artificial Sequence
  Description of Artificial Sequence: Synthetic oligonucleotide
guaccauaaagaggguaug

SEQ ID NO: 1635393 - RNA, 19 nt, Artificial Sequence
  Description of Artificial Sequence: Synthetic oligonucleotide
ugcaugauaccacgagcuu

SEQ ID NO: 1635394 - RNA, 19 nt, Artificial Sequence
  Description of Artificial Sequence: Synthetic oligonucleotide
ucguagggagcucucuuua

SEQ ID NO: 1635395 - RNA, 19 nt, Artificial Sequence
  Description of Artificial Sequence: Synthetic oligonucleotide
acugacgcuccuuggaaua

SEQ ID NO: 1635396 - RNA, 19 nt, Artificial Sequence
  Description of Artificial Sequence: Synthetic oligonucleotide
cucuaaccuccaugaagag

SEQ ID NO: 1635397 - RNA, 19 nt, Artificial Sequence
  Description of Artificial Sequence: Synthetic oligonucleotide
ugaugguauggagucccgc

SEQ ID NO: 1635398 - RNA, 19 nt, Artificial Sequence
  Description of Artificial Sequence: Synthetic oligonucleotide
ugaacgguugugugccagu

SEQ ID NO: 1635399 - RNA, 19 nt, Artificial Sequence
  Description of Artificial Sequence: Synthetic oligonucleotide
acgcaucauccgcuugagc

SEQ ID NO: 1635400 - RNA, 19 nt, Artificial Sequence
  Description of Artificial Sequence: Synthetic oligonucleotide
gcucaaucuuuauuucaag

SEQ ID NO: 1635401 - RNA, 19 nt, Artificial Sequence
  Description of Artificial Sequence: Synthetic oligonucleotide
ggagcaucggaaucaggug

SEQ ID NO: 1635402 - RNA, 19 nt, Artificial Sequence
  Description of Artificial Sequence: Synthetic oligonucleotide
caugauaccacgagcuugu

SEQ ID NO: 1635403 - RNA, 19 nt, Artificial Sequence
  Description of Artificial Sequence: Synthetic oligonucleotide
acaaccuaucaaccaguau

SEQ ID NO: 1635404 - RNA, 19 nt, Artificial Sequence
  Description of Artificial Sequence: Synthetic oligonucleotide
gggagcucucuuuacuucc

SEQ ID NO: 1635405 - RNA, 19 nt, Artificial Sequence
  Description of Artificial Sequence: Synthetic oligonucleotide
agucccgcgcuguaaacau

SEQ ID NO: 1635406 - RNA, 19 nt, Artificial Sequence
  Description of Artificial Sequence: Synthetic oligonucleotide
uucguagggagcucucuuu

SEQ ID NO: 1635407 - RNA, 19 nt, Artificial Sequence
  Description of Artificial Sequence: Synthetic oligonucleotide
uguguuggcgaugccugga

SEQ ID NO: 1635408 - RNA, 19 nt, Artificial Sequence
  Description of Artificial Sequence: Synthetic oligonucleotide
uggguucaggucuguacaa

SEQ ID NO: 1635409 - RNA, 19 nt, Artificial Sequence
  Description of Artificial Sequence: Synthetic oligonucleotide
augagacacuucuuuuaau

SEQ ID NO: 1635410 - RNA, 19 nt, Artificial Sequence
  Description of Artificial Sequence: Synthetic oligonucleotide
aagugacgcggcaucucuc

SEQ ID NO: 1635411 - RNA, 19 nt, Artificial Sequence
  Description of Artificial Sequence: Synthetic oligonucleotide
ucgcucgacugaacgguug

SEQ ID NO: 1635412 - RNA, 19 nt, Artificial Sequence
  Description of Artificial Sequence: Synthetic oligonucleotide
acauuauacccagcguagu

SEQ ID NO: 1635413 - RNA, 19 nt, Artificial Sequence
  Description of Artificial Sequence: Synthetic oligonucleotide
agggagcgauuggagacac

SEQ ID NO: 1635414 - RNA, 19 nt, Artificial Sequence
  Description of Artificial Sequence: Synthetic oligonucleotide
gcaucgcucgacugaacgg

SEQ ID NO: 1635415 - RNA, 19 nt, Artificial Sequence
  Description of Artificial Sequence: Synthetic oligonucleotide
aggaauagauguguacuuu

SEQ ID NO: 1635416 - RNA, 19 nt, Artificial Sequence
  Description of Artificial Sequence: Synthetic oligonucleotide
gcaucauccgcuugagcgc

SEQ ID NO: 1635417 - RNA, 19 nt, Artificial Sequence
  Description of Artificial Sequence: Synthetic oligonucleotide
cauaaagacugcuggcucu

SEQ ID NO: 1635418 - RNA, 19 nt, Artificial Sequence
  Description of Artificial Sequence: Synthetic oligonucleotide
ggaagaugcaugauaccac

SEQ ID NO: 1635419 - RNA, 19 nt, Artificial Sequence
  Description of Artificial Sequence: Synthetic oligonucleotide
ucuucguagggagcucucu

SEQ ID NO: 1635420 - RNA, 19 nt, Artificial Sequence
  Description of Artificial Sequence: Synthetic oligonucleotide
guaguuuauaccgcccuaa

SEQ ID NO: 1635421 - RNA, 19 nt, Artificial Sequence
  Description of Artificial Sequence: Synthetic oligonucleotide
guguuggcgaugccuggag

SEQ ID NO: 1635422 - RNA, 19 nt, Artificial Sequence
  Description of Artificial Sequence: Synthetic oligonucleotide
agacauagauuuacauagu

SEQ ID NO: 1635423 - RNA, 19 nt, Artificial Sequence
  Description of Artificial Sequence: Synthetic oligonucleotide
cauaaccaauuacaugcaa

SEQ ID NO: 1635424 - RNA, 19 nt, Artificial Sequence
  Description of Artificial Sequence: Synthetic oligonucleotide
ggcgccgucuuucauggcc

SEQ ID NO: 1635425 - RNA, 19 nt, Artificial Sequence
  Description of Artificial Sequence: Synthetic oligonucleotide
caucggaaucaggugcagg

SEQ ID NO: 1635426 - RNA, 19 nt, Artificial Sequence
  Description of Artificial Sequence: Synthetic oligonucleotide
ucgauguacugacgcuccu

SEQ ID NO: 1635427 - RNA, 19 nt, Artificial Sequence
  Description of Artificial Sequence: Synthetic oligonucleotide
uucacgauccagcgcugua

SEQ ID NO: 1635428 - RNA, 19 nt, Artificial Sequence
  Description of Artificial Sequence: Synthetic oligonucleotide
ugacgcggcaucucuccac

SEQ ID NO: 1635429 - RNA, 19 nt, Artificial Sequence
  Description of Artificial Sequence: Synthetic oligonucleotide
ggccggguuacauuauacc

SEQ ID NO: 1635430 - RNA, 19 nt, Artificial Sequence
  Description of Artificial Sequence: Synthetic oligonucleotide
ugacgcuccuuggaauacc

SEQ ID NO: 1635431 - RNA, 19 nt, Artificial Sequence
  Description of Artificial Sequence: Synthetic oligonucleotide
gacgcggcaucucuccaca

SEQ ID NO: 1635432 - RNA, 19 nt, Artificial Sequence
  Description of Artificial Sequence: Synthetic oligonucleotide
cugucaggccacucacccc

SEQ ID NO: 1635433 - RNA, 19 nt, Artificial Sequence
  Description of Artificial Sequence: Synthetic oligonucleotide
accacgagcuuguaccaua

SEQ ID NO: 1635434 - RNA, 19 nt, Artificial Sequence
  Description of Artificial Sequence: Synthetic oligonucleotide
guacugacgcuccuuggaa

SEQ ID NO: 1635435 - RNA, 19 nt, Artificial Sequence
  Description of Artificial Sequence: Synthetic oligonucleotide
guuggcgaugccuggagcu

SEQ ID NO: 1635436 - RNA, 19 nt, Artificial Sequence
  Description of Artificial Sequence: Synthetic oligonucleotide
agcaucggaaucaggugca

SEQ ID NO: 1635437 - RNA, 19 nt, Artificial Sequence
  Description of Artificial Sequence: Synthetic oligonucleotide
ugucgcucucuaaccucca

SEQ ID NO: 1635438 - RNA, 19 nt, Artificial Sequence
  Description of Artificial Sequence: Synthetic oligonucleotide
cgcgcuguaaacauaaaga

SEQ ID NO: 1635439 - RNA, 19 nt, Artificial Sequence
  Description of Artificial Sequence: Synthetic oligonucleotide
uauggagucccgcgcugua

SEQ ID NO: 1635440 - RNA, 19 nt, Artificial Sequence
  Description of Artificial Sequence: Synthetic oligonucleotide
gcuccuuggaauaccuuag

SEQ ID NO: 1635441 - RNA, 19 nt, Artificial Sequence
  Description of Artificial Sequence: Synthetic oligonucleotide
guugugugccagucuguuc

SEQ ID NO: 1635442 - RNA, 19 nt, Artificial Sequence
  Description of Artificial Sequence: Synthetic oligonucleotide
guagugaacucuguuccaa

SEQ ID NO: 1635443 - RNA, 19 nt, Artificial Sequence
  Description of Artificial Sequence: Synthetic oligonucleotide
cugaacgguugugugccag

SEQ ID NO: 1635444 - RNA, 19 nt, Artificial Sequence
  Description of Artificial Sequence: Synthetic oligonucleotide
gaacgguugugugccaguc

SEQ ID NO: 1635445 - RNA, 19 nt, Artificial Sequence
  Description of Artificial Sequence: Synthetic oligonucleotide
aggacguggagagggagaa

SEQ ID NO: 1635446 - RNA, 19 nt, Artificial Sequence
  Description of Artificial Sequence: Synthetic oligonucleotide
ugccagucuguucgaugac

SEQ ID NO: 1635447 - RNA, 19 nt, Artificial Sequence
  Description of Artificial Sequence: Synthetic oligonucleotide
agccccaaagcagggagga

SEQ ID NO: 1635448 - RNA, 19 nt, Artificial Sequence
  Description of Artificial Sequence: Synthetic oligonucleotide
gaggguauguguuggcgau

SEQ ID NO: 1635449 - RNA, 19 nt, Artificial Sequence
  Description of Artificial Sequence: Synthetic oligonucleotide
ggucuguacaaugcuugcc

SEQ ID NO: 1635450 - RNA, 19 nt, Artificial Sequence
  Description of Artificial Sequence: Synthetic oligonucleotide
cacagagacaugucgcucu

SEQ ID NO: 1635451 - RNA, 19 nt, Artificial Sequence
  Description of Artificial Sequence: Synthetic oligonucleotide
cuguuucuggagcaucgga

SEQ ID NO: 1635452 - RNA, 19 nt, Artificial Sequence
  Description of Artificial Sequence: Synthetic oligonucleotide
guagccugccccaccauga

SEQ ID NO: 1635453 - RNA, 19 nt, Artificial Sequence
  Description of Artificial Sequence: Synthetic oligonucleotide
gcuaacucuggcaugaggu

SEQ ID NO: 1635454 - RNA, 19 nt, Artificial Sequence
  Description of Artificial Sequence: Synthetic oligonucleotide
ggcguauauaauaaauugu

SEQ ID NO: 1635455 - RNA, 19 nt, Artificial Sequence
  Description of Artificial Sequence: Synthetic oligonucleotide
gagcgcagacaucuuccuc

SEQ ID NO: 1635456 - RNA, 19 nt, Artificial Sequence
  Description of Artificial Sequence: Synthetic oligonucleotide
uacccagcguagugaacuc

SEQ ID NO: 1635457 - RNA, 19 nt, Artificial Sequence
  Description of Artificial Sequence: Synthetic oligonucleotide
gauuucgguauaaaaccuu

SEQ ID NO: 1635458 - RNA, 19 nt, Artificial Sequence
  Description of Artificial Sequence: Synthetic oligonucleotide
ugggaaagccguugaucuu

SEQ ID NO: 1635459 - RNA, 19 nt, Artificial Sequence
  Description of Artificial Sequence: Synthetic oligonucleotide
gaacggaaauaaaagcauu

SEQ ID NO: 1635460 - RNA, 19 nt, Artificial Sequence
  Description of Artificial Sequence: Synthetic oligonucleotide
gagucccgcgcuguaaaca

SEQ ID NO: 1635461 - RNA, 19 nt, Artificial Sequence
  Description of Artificial Sequence: Synthetic oligonucleotide
ccgcgcuguaaacauaaag

SEQ ID NO: 1635462 - RNA, 19 nt, Artificial Sequence
  Description of Artificial Sequence: Synthetic oligonucleotide
gguauggagucccgcgcug

SEQ ID NO: 1635463 - RNA, 19 nt, Artificial Sequence
  Description of Artificial Sequence: Synthetic oligonucleotide
ggaauaccuuaguaguuua

SEQ ID NO: 1635464 - RNA, 19 nt, Artificial Sequence
  Description of Artificial Sequence: Synthetic oligonucleotide
cugacgcuccuuggaauac

SEQ ID NO: 1635465 - RNA, 19 nt, Artificial Sequence
  Description of Artificial Sequence: Synthetic oligonucleotide
ccggguuacauuauaccca

SEQ ID NO: 1635466 - RNA, 19 nt, Artificial Sequence
  Description of Artificial Sequence: Synthetic oligonucleotide
gagugugcuccaagccaag

SEQ ID NO: 1635467 - RNA, 19 nt, Artificial Sequence
  Description of Artificial Sequence: Synthetic oligonucleotide
agugugcuccaagccaagu

SEQ ID NO: 1635468 - RNA, 19 nt, Artificial Sequence
  Description of Artificial Sequence: Synthetic oligonucleotide
aggcaaauuccagccgcug

SEQ ID NO: 1635469 - RNA, 19 nt, Artificial Sequence
  Description of Artificial Sequence: Synthetic oligonucleotide
cugccccaccaugagacac

SEQ ID NO: 1635470 - RNA, 19 nt, Artificial Sequence
  Description of Artificial Sequence: Synthetic oligonucleotide
ggcucaaucuuuauuucaa

SEQ ID NO: 1635471 - RNA, 19 nt, Artificial Sequence
  Description of Artificial Sequence: Synthetic oligonucleotide
acugaacgguugugugcca

SEQ ID NO: 1635472 - RNA, 19 nt, Artificial Sequence
  Description of Artificial Sequence: Synthetic oligonucleotide
cacgcaucauccgcuugag

SEQ ID NO: 1635473 - RNA, 19 nt, Artificial Sequence
  Description of Artificial Sequence: Synthetic oligonucleotide
auccgcuugagcgcagaca

SEQ ID NO: 1635474 - RNA, 19 nt, Artificial Sequence
  Description of Artificial Sequence: Synthetic oligonucleotide
gcguauauaauaaauuguu

SEQ ID NO: 1635475 - RNA, 19 nt, Artificial Sequence
  Description of Artificial Sequence: Synthetic oligonucleotide
aggccacucaccccaccga

SEQ ID NO: 1635476 - RNA, 19 nt, Artificial Sequence
  Description of Artificial Sequence: Synthetic oligonucleotide
aucccaagccauggguuca

SEQ ID NO: 1635477 - RNA, 19 nt, Artificial Sequence
  Description of Artificial Sequence: Synthetic oligonucleotide
agccguugaucuuccugaa

SEQ ID NO: 1635478 - RNA, 19 nt, Artificial Sequence
  Description of Artificial Sequence: Synthetic oligonucleotide
gcgaucagggagcgauugg

SEQ ID NO: 1635479 - RNA, 19 nt, Artificial Sequence
  Description of Artificial Sequence: Synthetic oligonucleotide
uggcgaugccuggagcuac

SEQ ID NO: 1635480 - RNA, 19 nt, Artificial Sequence
  Description of Artificial Sequence: Synthetic oligonucleotide
caucauccgcuugagcgca

SEQ ID NO: 1635481 - RNA, 19 nt, Artificial Sequence
  Description of Artificial Sequence: Synthetic oligonucleotide
gcgcucucaggucugacuc

SEQ ID NO: 1635482 - RNA, 19 nt, Artificial Sequence
  Description of Artificial Sequence: Synthetic oligonucleotide
guacaaugcuugccaugga

SEQ ID NO: 1635483 - RNA, 19 nt, Artificial Sequence
  Description of Artificial Sequence: Synthetic oligonucleotide
ccauaaagaggguaugugu

SEQ ID NO: 1635484 - RNA, 19 nt, Artificial Sequence
  Description of Artificial Sequence: Synthetic oligonucleotide
cccagcguagugaacucug

SEQ ID NO: 1635485 - RNA, 19 nt, Artificial Sequence
  Description of Artificial Sequence: Synthetic oligonucleotide
uuggcgaugccuggagcua

SEQ ID NO: 1635486 - RNA, 19 nt, Artificial Sequence
  Description of Artificial Sequence: Synthetic oligonucleotide
ggcgaucagggagcgauug

SEQ ID NO: 1635487 - RNA, 19 nt, Artificial Sequence
  Description of Artificial Sequence: Synthetic oligonucleotide
cauccgcuugagcgcagac

SEQ ID NO: 1635488 - RNA, 19 nt, Artificial Sequence
  Description of Artificial Sequence: Synthetic oligonucleotide
gcaugagguuuacagauau

SEQ ID NO: 1635489 - RNA, 19 nt, Artificial Sequence
  Description of Artificial Sequence: Synthetic oligonucleotide
aaaguccaaugaaggcaua

SEQ ID NO: 1635490 - RNA, 19 nt, Artificial Sequence
  Description of Artificial Sequence: Synthetic oligonucleotide
gaauaccuuaguaguuuau

SEQ ID NO: 1635491 - RNA, 19 nt, Artificial Sequence
  Description of Artificial Sequence: Synthetic oligonucleotide
aaccaguauuuugggcgua

SEQ ID NO: 1635492 - RNA, 19 nt, Artificial Sequence
  Description of Artificial Sequence: Synthetic oligonucleotide
ccaggcgccgucuuucaug

SEQ ID NO: 1635493 - RNA, 19 nt, Artificial Sequence
  Description of Artificial Sequence: Synthetic oligonucleotide
cccaccaugagacacuucu

SEQ ID NO: 1635494 - RNA, 19 nt, Artificial Sequence
  Description of Artificial Sequence: Synthetic oligonucleotide
aggcgccgucuuucauggc

SEQ ID NO: 1635495 - RNA, 19 nt, Artificial Sequence
  Description of Artificial Sequence: Synthetic oligonucleotide
cuaacucuggcaugagguu

SEQ ID NO: 1635496 - RNA, 19 nt, Artificial Sequence
  Description of Artificial Sequence: Synthetic oligonucleotide
caccaugagacacuucuuu

SEQ ID NO: 1635497 - RNA, 19 nt, Artificial Sequence
  Description of Artificial Sequence: Synthetic oligonucleotide
caucgcucgacugaacggu

SEQ ID NO: 1635498 - RNA, 19 nt, Artificial Sequence
  Description of Artificial Sequence: Synthetic oligonucleotide
accuaucaaccaguauuuu

SEQ ID NO: 1635499 - RNA, 19 nt, Artificial Sequence
  Description of Artificial Sequence: Synthetic oligonucleotide
acccagcguagugaacucu

SEQ ID NO: 1635500 - RNA, 19 nt, Artificial Sequence
  Description of Artificial Sequence: Synthetic oligonucleotide
ggaagaucacacaguccca

SEQ ID NO: 1635501 - RNA, 19 nt, Artificial Sequence
  Description of Artificial Sequence: Synthetic oligonucleotide
caccgaagaacucguuaua

SEQ ID NO: 1635502 - RNA, 19 nt, Artificial Sequence
  Description of Artificial Sequence: Synthetic oligonucleotide
cucgacugaacgguugugu

SEQ ID NO: 1635503 - RNA, 19 nt, Artificial Sequence
  Description of Artificial Sequence: Synthetic oligonucleotide
ggagucccgcgcuguaaac

SEQ ID NO: 1635504 - RNA, 19 nt, Artificial Sequence
  Description of Artificial Sequence: Synthetic oligonucleotide
gugacgcggcaucucucca

SEQ ID NO: 1635505 - RNA, 19 nt, Artificial Sequence
  Description of Artificial Sequence: Synthetic oligonucleotide
cuuguaccauaaagagggu

SEQ ID NO: 1635506 - RNA, 19 nt, Artificial Sequence
  Description of Artificial Sequence: Synthetic oligonucleotide
cagggagcgauuggagaca

SEQ ID NO: 1635507 - RNA, 19 nt, Artificial Sequence
  Description of Artificial Sequence: Synthetic oligonucleotide
cacagucccaggcgccguc

SEQ ID NO: 1635508 - RNA, 19 nt, Artificial Sequence
  Description of Artificial Sequence: Synthetic oligonucleotide
auggagucccgcgcuguaa

SEQ ID NO: 1635509 - RNA, 19 nt, Artificial Sequence
  Description of Artificial Sequence: Synthetic oligonucleotide
gugugcuccaagccaaguu

SEQ ID NO: 1635510 - RNA, 19 nt, Artificial Sequence
  Description of Artificial Sequence: Synthetic oligonucleotide
ccacucaccccaccgaaga

SEQ ID NO: 1635511 - RNA, 19 nt, Artificial Sequence
  Description of Artificial Sequence: Synthetic oligonucleotide
cguuauauggaaguaugua

SEQ ID NO: 1635512 - RNA, 19 nt, Artificial Sequence
  Description of Artificial Sequence: Synthetic oligonucleotide
cguagggagcucucuuuac

SEQ ID NO: 1635513 - RNA, 19 nt, Artificial Sequence
  Description of Artificial Sequence: Synthetic oligonucleotide
gcgauuggagacacgcauc

SEQ ID NO: 1635514 - RNA, 19 nt, Artificial Sequence
  Description of Artificial Sequence: Synthetic oligonucleotide
cuccuuggaauaccuuagu

SEQ ID NO: 1635515 - RNA, 19 nt, Artificial Sequence
  Description of Artificial Sequence: Synthetic oligonucleotide
gccagucuguucgaugaca

SEQ ID NO: 1635516 - RNA, 19 nt, Artificial Sequence
  Description of Artificial Sequence: Synthetic oligonucleotide
gagcaucgcucgacugaac

SEQ ID NO: 1635517 - RNA, 19 nt, Artificial Sequence
  Description of Artificial Sequence: Synthetic oligonucleotide
cuggagcuacauagaugaa

SEQ ID NO: 1635518 - RNA, 19 nt, Artificial Sequence
  Description of Artificial Sequence: Synthetic oligonucleotide
cagucuguucgaugacaua

SEQ ID NO: 1635519 - RNA, 19 nt, Artificial Sequence
  Description of Artificial Sequence: Synthetic oligonucleotide
cuggccggguuacauuaua

SEQ ID NO: 1635520 - RNA, 19 nt, Artificial Sequence
  Description of Artificial Sequence: Synthetic oligonucleotide
gcaucggaaucaggugcag

SEQ ID NO: 1635521 - RNA, 19 nt, Artificial Sequence
  Description of Artificial Sequence: Synthetic oligonucleotide
cuucguagggagcucucuu

SEQ ID NO: 1635522 - RNA, 19 nt, Artificial Sequence
  Description of Artificial Sequence: Synthetic oligonucleotide
gauuggagacacgcaucau

SEQ ID NO: 1635523 - RNA, 19 nt, Artificial Sequence
  Description of Artificial Sequence: Synthetic oligonucleotide
gccacucaccccaccgaag

SEQ ID NO: 1635524 - RNA, 19 nt, Artificial Sequence
  Description of Artificial Sequence: Synthetic oligonucleotide
cacucaccccaccgaagaa

SEQ ID NO: 1635525 - RNA, 19 nt, Artificial Sequence
  Description of Artificial Sequence: Synthetic oligonucleotide
ggccacucaccccaccgaa

SEQ ID NO: 1635526 - RNA, 19 nt, Artificial Sequence
  Description of Artificial Sequence: Synthetic oligonucleotide
aucgcucgacugaacgguu

SEQ ID NO: 1635527 - RNA, 19 nt, Artificial Sequence
  Description of Artificial Sequence: Synthetic oligonucleotide
guauggagucccgcgcugu

SEQ ID NO: 1635528 - RNA, 19 nt, Artificial Sequence
  Description of Artificial Sequence: Synthetic oligonucleotide
ccaaucccaagccaugggu

SEQ ID NO: 1635529 - RNA, 19 nt, Artificial Sequence
  Description of Artificial Sequence: Synthetic oligonucleotide
cauaauaguuccggucauu

SEQ ID NO: 1635530 - RNA, 19 nt, Artificial Sequence
  Description of Artificial Sequence: Synthetic oligonucleotide
gcucgacugaacgguugug

SEQ ID NO: 1635531 - RNA, 19 nt, Artificial Sequence
  Description of Artificial Sequence: Synthetic oligonucleotide
cacgagcuuguaccauaaa

SEQ ID NO: 1635532 - RNA, 19 nt, Artificial Sequence
  Description of Artificial Sequence: Synthetic oligonucleotide
ggcaugagguuuacagaua

SEQ ID NO: 1635533 - RNA, 19 nt, Artificial Sequence
  Description of Artificial Sequence: Synthetic oligonucleotide
acgcggcaucucuccacau

SEQ ID NO: 1635534 - RNA, 19 nt, Artificial Sequence
  Description of Artificial Sequence: Synthetic oligonucleotide
cccaccgaagaacucguua

SEQ ID NO: 1635535 - RNA, 19 nt, Artificial Sequence
  Description of Artificial Sequence: Synthetic oligonucleotide
gggagcgauuggagacacg

SEQ ID NO: 1635536 - RNA, 19 nt, Artificial Sequence
  Description of Artificial Sequence: Synthetic oligonucleotide
cgaucagggagcgauugga

SEQ ID NO: 1635537 - RNA, 19 nt, Artificial Sequence
  Description of Artificial Sequence: Synthetic oligonucleotide
ccaucgauguacugacgcu

SEQ ID NO: 1635538 - RNA, 19 nt, Artificial Sequence
  Description of Artificial Sequence: Synthetic oligonucleotide
cagcguagugaacucuguu

SEQ ID NO: 1635539 - RNA, 19 nt, Artificial Sequence
  Description of Artificial Sequence: Synthetic oligonucleotide
gucgcucucuaaccuccau

SEQ ID NO: 1635540 - RNA, 19 nt, Artificial Sequence
  Description of Artificial Sequence: Synthetic oligonucleotide
ccauggaggaagccccaaa

SEQ ID NO: 1635541 - RNA, 19 nt, Artificial Sequence
  Description of Artificial Sequence: Synthetic oligonucleotide
ccauaauaguuccggucau

SEQ ID NO: 1635542 - RNA, 19 nt, Artificial Sequence
  Description of Artificial Sequence: Synthetic oligonucleotide
cgcuugagcgcagacaucu

SEQ ID NO: 1635543 - RNA, 19 nt, Artificial Sequence
  Description of Artificial Sequence: Synthetic oligonucleotide
ggcgaugccuggagcuaca

SEQ ID NO: 1635544 - RNA, 19 nt, Artificial Sequence
  Description of Artificial Sequence: Synthetic oligonucleotide
aggcgaucagggagcgauu

SEQ ID NO: 1635545 - RNA, 19 nt, Artificial Sequence
  Description of Artificial Sequence: Synthetic oligonucleotide
ccgcuguuucuggagcauc

SEQ ID NO: 1635546 - RNA, 19 nt, Artificial Sequence
  Description of Artificial Sequence: Synthetic oligonucleotide
cagagacaugucgcucucu

SEQ ID NO: 1635547 - RNA, 19 nt, Artificial Sequence
  Description of Artificial Sequence: Synthetic oligonucleotide
ccgcuugagcgcagacauc

SEQ ID NO: 1635548 - RNA, 19 nt, Artificial Sequence
  Description of Artificial Sequence: Synthetic oligonucleotide
ccagcguagugaacucugu

SEQ ID NO: 1635549 - RNA, 19 nt, Artificial Sequence
  Description of Artificial Sequence: Synthetic oligonucleotide
gucccgcgcuguaaacaua

SEQ ID NO: 1635550 - RNA, 19 nt, Artificial Sequence
  Description of Artificial Sequence: Synthetic oligonucleotide
cagcacgggcugcgcucuc

SEQ ID NO: 1635551 - RNA, 19 nt, Artificial Sequence
  Description of Artificial Sequence: Synthetic oligonucleotide
ccucuuugaaacccacauu

SEQ ID NO: 1635552 - RNA, 19 nt, Artificial Sequence
  Description of Artificial Sequence: Synthetic oligonucleotide
cgauccagcgcuguagccu

SEQ ID NO: 1635553 - RNA, 19 nt, Artificial Sequence
  Description of Artificial Sequence: Synthetic oligonucleotide
ccaguauuuugggcguaua

SEQ ID NO: 1635554 - RNA, 19 nt, Artificial Sequence
  Description of Artificial Sequence: Synthetic oligonucleotide
ccccaccaugagacacuuc

SEQ ID NO: 1635555 - RNA, 19 nt, Artificial Sequence
  Description of Artificial Sequence: Synthetic oligonucleotide
cgccgucuuucauggccuc

SEQ ID NO: 1635556 - RNA, 19 nt, Artificial Sequence
  Description of Artificial Sequence: Synthetic oligonucleotide
gccgucuuucauggccucu

SEQ ID NO: 1635557 - RNA, 19 nt, Artificial Sequence
  Description of Artificial Sequence: Synthetic oligonucleotide
cccgcgcuguaaacauaaa

SEQ ID NO: 1635558 - RNA, 19 nt, Artificial Sequence
  Description of Artificial Sequence: Synthetic oligonucleotide
cgcucgacugaacgguugu

SEQ ID NO: 1635559 - RNA, 19 nt, Artificial Sequence
  Description of Artificial Sequence: Synthetic oligonucleotide
ccccaaccccagaaggcau

SEQ ID NO: 1635560 - RNA, 19 nt, Artificial Sequence
  Description of Artificial Sequence: Synthetic oligonucleotide
gcuugagcgcagacaucuu

SEQ ID NO: 1635561 - RNA, 19 nt, Artificial Sequence
  Description of Artificial Sequence: Synthetic oligonucleotide
ccccaccgaagaacucguu

SEQ ID NO: 1635562 - RNA, 19 nt, Artificial Sequence
  Description of Artificial Sequence: Synthetic oligonucleotide
aauggaugcacuuuggggc

SEQ ID NO: 1635563 - RNA, 19 nt, Artificial Sequence
  Description of Artificial Sequence: Synthetic oligonucleotide
aaagcuacgagugauuucc

SEQ ID NO: 1635564 - RNA, 19 nt, Artificial Sequence
  Description of Artificial Sequence: Synthetic oligonucleotide
uguguuaccaacuuugagg

SEQ ID NO: 1635565 - RNA, 19 nt, Artificial Sequence
  Description of Artificial Sequence: Synthetic oligonucleotide
aagaguaucuucugcagac

SEQ ID NO: 1635566 - RNA, 19 nt, Artificial Sequence
  Description of Artificial Sequence: Synthetic oligonucleotide
aaugauaaaggguguuggc

SEQ ID NO: 1635567 - RNA, 19 nt, Artificial Sequence
  Description of Artificial Sequence: Synthetic oligonucleotide
ucuacuuccacuuuagggc

SEQ ID NO: 1635568 - RNA, 19 nt, Artificial Sequence
  Description of Artificial Sequence: Synthetic oligonucleotide
accauuaccucuuuaagac

SEQ ID NO: 1635569 - RNA, 19 nt, Artificial Sequence
  Description of Artificial Sequence: Synthetic oligonucleotide
agugcuacuagauuuacag

SEQ ID NO: 1635570 - RNA, 19 nt, Artificial Sequence
  Description of Artificial Sequence: Synthetic oligonucleotide
cagaauauuagugauaugc

SEQ ID NO: 1635571 - RNA, 19 nt, Artificial Sequence
  Description of Artificial Sequence: Synthetic oligonucleotide
aauauuagugauaugccag

SEQ ID NO: 1635572 - RNA, 19 nt, Artificial Sequence
  Description of Artificial Sequence: Synthetic oligonucleotide
ugcuacuagauuuacagug

SEQ ID NO: 1635573 - RNA, 19 nt, Artificial Sequence
  Description of Artificial Sequence: Synthetic oligonucleotide
uuuagugacucucuguacc

SEQ ID NO: 1635574 - RNA, 19 nt, Artificial Sequence
  Description of Artificial Sequence: Synthetic oligonucleotide
agauucacaaagccgagac

SEQ ID NO: 1635575 - RNA, 19 nt, Artificial Sequence
  Description of Artificial Sequence: Synthetic oligonucleotide
uuagugauaugccaggugu

SEQ ID NO: 1635576 - RNA, 19 nt, Artificial Sequence
  Description of Artificial Sequence: Synthetic oligonucleotide
uugguagucagccacaugu

SEQ ID NO: 1635577 - RNA, 19 nt, Artificial Sequence
  Description of Artificial Sequence: Synthetic oligonucleotide
cauuaccucuuuaagaccg

SEQ ID NO: 1635578 - RNA, 19 nt, Artificial Sequence
  Description of Artificial Sequence: Synthetic oligonucleotide
cacucaaugauaaagggug

SEQ ID NO: 1635579 - RNA, 19 nt, Artificial Sequence
  Description of Artificial Sequence: Synthetic oligonucleotide
gaggcaagcaaagaaaugg

SEQ ID NO: 1635580 - RNA, 19 nt, Artificial Sequence
  Description of Artificial Sequence: Synthetic oligonucleotide
ugcaucuuagcuaagugca

SEQ ID NO: 1635581 - RNA, 19 nt, Artificial Sequence
  Description of Artificial Sequence: Synthetic oligonucleotide
acuaccaugaugcuuuuag

SEQ ID NO: 1635582 - RNA, 19 nt, Artificial Sequence
  Description of Artificial Sequence: Synthetic oligonucleotide
aaagugauaguggucagag

SEQ ID NO: 1635583 - RNA, 19 nt, Artificial Sequence
  Description of Artificial Sequence: Synthetic oligonucleotide
cauuuaaacagcucguaag

SEQ ID NO: 1635584 - RNA, 19 nt, Artificial Sequence
  Description of Artificial Sequence: Synthetic oligonucleotide
auuaagugcuacuagauuu

SEQ ID NO: 1635585 - RNA, 19 nt, Artificial Sequence
  Description of Artificial Sequence: Synthetic oligonucleotide
agaauauuagugauaugcc

SEQ ID NO: 1635586 - RNA, 19 nt, Artificial Sequence
  Description of Artificial Sequence: Synthetic oligonucleotide
aggacugaacucuuuaggg

SEQ ID NO: 1635587 - RNA, 19 nt, Artificial Sequence
  Description of Artificial Sequence: Synthetic oligonucleotide
aucaaauuuaggaaguccg

SEQ ID NO: 1635588 - RNA, 19 nt, Artificial Sequence
  Description of Artificial Sequence: Synthetic oligonucleotide
  modified_base (9)..(9): a, c, u, g, unknown or other
  modified_base (14)..(14): a, c, u, g, unknown or other
uuugguucnggganccugc

SEQ ID NO: 1635589 - RNA, 19 nt, Artificial Sequence
  Description of Artificial Sequence: Synthetic oligonucleotide
auauuagugauaugccagg

SEQ ID NO: 1635590 - RNA, 19 nt, Artificial Sequence
  Description of Artificial Sequence: Synthetic oligonucleotide
ucuggauaaagcuacgagu

SEQ ID NO: 1635591 - RNA, 19 nt, Artificial Sequence
  Description of Artificial Sequence: Synthetic oligonucleotide
auuuaaacagcucguaagu

SEQ ID NO: 1635592 - RNA, 19 nt, Artificial Sequence
  Description of Artificial Sequence: Synthetic oligonucleotide
acuggcaaaggacacagag

SEQ ID NO: 1635593 - RNA, 19 nt, Artificial Sequence
  Description of Artificial Sequence: Synthetic oligonucleotide
uguuuacugugucuugugg

SEQ ID NO: 1635594 - RNA, 19 nt, Artificial Sequence
  Description of Artificial Sequence: Synthetic oligonucleotide
cuacgagugauuuccaggg

SEQ ID NO: 1635595 - RNA, 19 nt, Artificial Sequence
  Description of Artificial Sequence: Synthetic oligonucleotide
ugcaaauagcccaagcugu

SEQ ID NO: 1635596 - RNA, 19 nt, Artificial Sequence
  Description of Artificial Sequence: Synthetic oligonucleotide
acaaagccgagacagauga

SEQ ID NO: 1635597 - RNA, 19 nt, Artificial Sequence
  Description of Artificial Sequence: Synthetic oligonucleotide
gaauauuagugauaugcca

SEQ ID NO: 1635598 - RNA, 19 nt, Artificial Sequence
  Description of Artificial Sequence: Synthetic oligonucleotide
acgagugauuuccaggggc

SEQ ID NO: 1635599 - RNA, 19 nt, Artificial Sequence
  Description of Artificial Sequence: Synthetic oligonucleotide
agauuuacaguggucaggg

SEQ ID NO: 1635600 - RNA, 19 nt, Artificial Sequence
  Description of Artificial Sequence: Synthetic oligonucleotide
uuaccaacuuugaggaagg

SEQ ID NO: 1635601 - RNA, 19 nt, Artificial Sequence
  Description of Artificial Sequence: Synthetic oligonucleotide
cacuuuagggcauuuaaac

SEQ ID NO: 1635602 - RNA, 19 nt, Artificial Sequence
  Description of Artificial Sequence: Synthetic oligonucleotide
auuuacaguggucaggggu

SEQ ID NO: 1635603 - RNA, 19 nt, Artificial Sequence
  Description of Artificial Sequence: Synthetic oligonucleotide
uuuacugugucuuguggca

SEQ ID NO: 1635604 - RNA, 19 nt, Artificial Sequence
  Description of Artificial Sequence: Synthetic oligonucleotide
uuuaagaccgcuggcauca

SEQ ID NO: 1635605 - RNA, 19 nt, Artificial Sequence
  Description of Artificial Sequence: Synthetic oligonucleotide
uucucuauucgaccguagg

SEQ ID NO: 1635606 - RNA, 19 nt, Artificial Sequence
  Description of Artificial Sequence: Synthetic oligonucleotide
aaugcuguuuacugugucu

SEQ ID NO: 1635607 - RNA, 19 nt, Artificial Sequence
  Description of Artificial Sequence: Synthetic oligonucleotide
ucaaauuuaggaaguccga

SEQ ID NO: 1635608 - RNA, 19 nt, Artificial Sequence
  Description of Artificial Sequence: Synthetic oligonucleotide
  modified_base (3)..(3): a, c, u, g, unknown or other
  modified_base (8)..(8): a, c, u, g, unknown or other
ucnggganccugcauagca

SEQ ID NO: 1635609 - RNA, 19 nt, Artificial Sequence
  Description of Artificial Sequence: Synthetic oligonucleotide
uugauuugccucaagggaa

SEQ ID NO: 1635610 - RNA, 19 nt, Artificial Sequence
  Description of Artificial Sequence: Synthetic oligonucleotide
aguccgagaauuccugagc

SEQ ID NO: 1635611 - RNA, 19 nt, Artificial Sequence
  Description of Artificial Sequence: Synthetic oligonucleotide
guuaccaacuuugaggaag

SEQ ID NO: 1635612 - RNA, 19 nt, Artificial Sequence
  Description of Artificial Sequence: Synthetic oligonucleotide
aauuaagugcuacuagauu

SEQ ID NO: 1635613 - RNA, 19 nt, Artificial Sequence
  Description of Artificial Sequence: Synthetic oligonucleotide
  modified_base (16)..(16): a, c, u, g, unknown or other
uggucuguuugguucnggg

SEQ ID NO: 1635614 - RNA, 19 nt, Artificial Sequence
  Description of Artificial Sequence: Synthetic oligonucleotide
uuugccucaagggaaagug

SEQ ID NO: 1635615 - RNA, 19 nt, Artificial Sequence
  Description of Artificial Sequence: Synthetic oligonucleotide
aguucauuagcaggggccc

SEQ ID NO: 1635616 - RNA, 19 nt, Artificial Sequence
  Description of Artificial Sequence: Synthetic oligonucleotide
aaggacgugugcaaauagc

SEQ ID NO: 1635617 - RNA, 19 nt, Artificial Sequence
  Description of Artificial Sequence: Synthetic oligonucleotide
cacauguccauuccggugg

SEQ ID NO: 1635618 - RNA, 19 nt, Artificial Sequence
  Description of Artificial Sequence: Synthetic oligonucleotide
aaguccgagaauuccugag

SEQ ID NO: 1635619 - RNA, 19 nt, Artificial Sequence
  Description of Artificial Sequence: Synthetic oligonucleotide
ugauaaaggguguuggcuc

SEQ ID NO: 1635620 - RNA, 19 nt, Artificial Sequence
  Description of Artificial Sequence: Synthetic oligonucleotide
uguuucgucacuggcaaag

SEQ ID NO: 1635621 - RNA, 19 nt, Artificial Sequence
  Description of Artificial Sequence: Synthetic oligonucleotide
aagcugucgacuuucccug

SEQ ID NO: 1635622 - RNA, 19 nt, Artificial Sequence
  Description of Artificial Sequence: Synthetic oligonucleotide
caucuuugcgagcaaaagc

SEQ ID NO: 1635623 - RNA, 19 nt, Artificial Sequence
  Description of Artificial Sequence: Synthetic oligonucleotide
aaagccgagacagaugacu

SEQ ID NO: 1635624 - RNA, 19 nt, Artificial Sequence
  Description of Artificial Sequence: Synthetic oligonucleotide
aggacgugugcaaauagcc

SEQ ID NO: 1635625 - RNA, 19 nt, Artificial Sequence
  Description of Artificial Sequence: Synthetic oligonucleotide
acuuuagggcauuuaaaca

SEQ ID NO: 1635626 - RNA, 19 nt, Artificial Sequence
  Description of Artificial Sequence: Synthetic oligonucleotide
uuggauugcggaaggaugu

SEQ ID NO: 1635627 - RNA, 19 nt, Artificial Sequence
  Description of Artificial Sequence: Synthetic oligonucleotide
aaauagcccaagcugucga

SEQ ID NO: 1635628 - RNA, 19 nt, Artificial Sequence
  Description of Artificial Sequence: Synthetic oligonucleotide
cuugcauuucacuaccaug

SEQ ID NO: 1635629 - RNA, 19 nt, Artificial Sequence
  Description of Artificial Sequence: Synthetic oligonucleotide
  modified_base (5)..(5): a, c, u, g, unknown or other
  modified_base (10)..(10): a, c, u, g, unknown or other
guucnggganccugcauag

SEQ ID NO: 1635630 - RNA, 19 nt, Artificial Sequence
  Description of Artificial Sequence: Synthetic oligonucleotide
uuugcgagcaaaagcugug

SEQ ID NO: 1635631 - RNA, 19 nt, Artificial Sequence
  Description of Artificial Sequence: Synthetic oligonucleotide
ucucuauucgaccguaggu

SEQ ID NO: 1635632 - RNA, 19 nt, Artificial Sequence
  Description of Artificial Sequence: Synthetic oligonucleotide
ugcauagcauucaggacug

SEQ ID NO: 1635633 - RNA, 19 nt, Artificial Sequence
  Description of Artificial Sequence: Synthetic oligonucleotide
uagauuuacaguggucagg

SEQ ID NO: 1635634 - RNA, 19 nt, Artificial Sequence
  Description of Artificial Sequence: Synthetic oligonucleotide
agugauaugccagguguac

SEQ ID NO: 1635635 - RNA, 19 nt, Artificial Sequence
  Description of Artificial Sequence: Synthetic oligonucleotide
ugccucaucuaacagcuga

SEQ ID NO: 1635636 - RNA, 19 nt, Artificial Sequence
  Description of Artificial Sequence: Synthetic oligonucleotide
ucaaugauaaaggguguug

SEQ ID NO: 1635637 - RNA, 19 nt, Artificial Sequence
  Description of Artificial Sequence: Synthetic oligonucleotide
ucuuguggcaucagugagc

SEQ ID NO: 1635638 - RNA, 19 nt, Artificial Sequence
  Description of Artificial Sequence: Synthetic oligonucleotide
cugcaucuuagcuaagugc

SEQ ID NO: 1635639 - RNA, 19 nt, Artificial Sequence
  Description of Artificial Sequence: Synthetic oligonucleotide
aucuuugcgagcaaaagcu

SEQ ID NO: 1635640 - RNA, 19 nt, Artificial Sequence
  Description of Artificial Sequence: Synthetic oligonucleotide
ucaccaaucuuggauugcg

SEQ ID NO: 1635641 - RNA, 19 nt, Artificial Sequence
  Description of Artificial Sequence: Synthetic oligonucleotide
augacucugaguggcagcc

SEQ ID NO: 1635642 - RNA, 19 nt, Artificial Sequence
  Description of Artificial Sequence: Synthetic oligonucleotide
uuaagugcuacuagauuua

SEQ ID NO: 1635643 - RNA, 19 nt, Artificial Sequence
  Description of Artificial Sequence: Synthetic oligonucleotide
guguuaccaacuuugagga

SEQ ID NO: 1635644 - RNA, 19 nt, Artificial Sequence
  Description of Artificial Sequence: Synthetic oligonucleotide
cuugauuugccucaaggga

SEQ ID NO: 1635645 - RNA, 19 nt, Artificial Sequence
  Description of Artificial Sequence: Synthetic oligonucleotide
agcuguucaccugagcacc

SEQ ID NO: 1635646 - RNA, 19 nt, Artificial Sequence
  Description of Artificial Sequence: Synthetic oligonucleotide
auuagugauaugccaggug

SEQ ID NO: 1635647 - RNA, 19 nt, Artificial Sequence
  Description of Artificial Sequence: Synthetic oligonucleotide
ucaccugagcaccagacau

SEQ ID NO: 1635648 - RNA, 19 nt, Artificial Sequence
  Description of Artificial Sequence: Synthetic oligonucleotide
auagcauucaggacugaac

SEQ ID NO: 1635649 - RNA, 19 nt, Artificial Sequence
  Description of Artificial Sequence: Synthetic oligonucleotide
caaauuuaggaaguccgag

SEQ ID NO: 1635650 - RNA, 19 nt, Artificial Sequence
  Description of Artificial Sequence: Synthetic oligonucleotide
gaaggacgugugcaaauag

SEQ ID NO: 1635651 - RNA, 19 nt, Artificial Sequence
  Description of Artificial Sequence: Synthetic oligonucleotide
aaagaaauggaugcacuuu

SEQ ID NO: 1635652 - RNA, 19 nt, Artificial Sequence
  Description of Artificial Sequence: Synthetic oligonucleotide
auccacucaaugauaaagg

SEQ ID NO: 1635653 - RNA, 19 nt, Artificial Sequence
  Description of Artificial Sequence: Synthetic oligonucleotide
agcauucaggacugaacuc

SEQ ID NO: 1635654 - RNA, 19 nt, Artificial Sequence
  Description of Artificial Sequence: Synthetic oligonucleotide
agaagcgucgcucuggcaa

SEQ ID NO: 1635655 - RNA, 19 nt, Artificial Sequence
  Description of Artificial Sequence: Synthetic oligonucleotide
  modified_base (14)..(14): a, c, u, g, unknown or other
  modified_base (19)..(19): a, c, u, g, unknown or other
gucuguuugguucngggan

SEQ ID NO: 1635656 - RNA, 19 nt, Artificial Sequence
  Description of Artificial Sequence: Synthetic oligonucleotide
aguguuucgucacuggcaa

SEQ ID NO: 1635657 - RNA, 19 nt, Artificial Sequence
  Description of Artificial Sequence: Synthetic oligonucleotide
uauuucucuguugcaaggc

SEQ ID NO: 1635658 - RNA, 19 nt, Artificial Sequence
  Description of Artificial Sequence: Synthetic oligonucleotide
uuuuagugacucucuguac

SEQ ID NO: 1635659 - RNA, 19 nt, Artificial Sequence
  Description of Artificial Sequence: Synthetic oligonucleotide
uaugcucucuacuuccacu

SEQ ID NO: 1635660 - RNA, 19 nt, Artificial Sequence
  Description of Artificial Sequence: Synthetic oligonucleotide
auguguuaccaacuuugag

SEQ ID NO: 1635661 - RNA, 19 nt, Artificial Sequence
  Description of Artificial Sequence: Synthetic oligonucleotide
ucuuugcgagcaaaagcug

SEQ ID NO: 1635662 - RNA, 19 nt, Artificial Sequence
  Description of Artificial Sequence: Synthetic oligonucleotide
  modified_base (3)..(3): a, c, u, g, unknown or other
ganccugcauagcauucag

SEQ ID NO: 1635663 - RNA, 19 nt, Artificial Sequence
  Description of Artificial Sequence: Synthetic oligonucleotide
ucccuauggauauuucucu

SEQ ID NO: 1635664 - RNA, 19 nt, Artificial Sequence
  Description of Artificial Sequence: Synthetic oligonucleotide
uggauaaagcuacgaguga

SEQ ID NO: 1635665 - RNA, 19 nt, Artificial Sequence
  Description of Artificial Sequence: Synthetic oligonucleotide
uggucucgggucuugguag

SEQ ID NO: 1635666 - RNA, 19 nt, Artificial Sequence
  Description of Artificial Sequence: Synthetic oligonucleotide
uacgagugauuuccagggg

SEQ ID NO: 1635667 - RNA, 19 nt, Artificial Sequence
  Description of Artificial Sequence: Synthetic oligonucleotide
uuuugaucaggggaugugu

SEQ ID NO: 1635668 - RNA, 19 nt, Artificial Sequence
  Description of Artificial Sequence: Synthetic oligonucleotide
cucucuguaccagaggacc

SEQ ID NO: 1635669 - RNA, 19 nt, Artificial Sequence
  Description of Artificial Sequence: Synthetic oligonucleotide
caaucuuggauugcggaag

SEQ ID NO: 1635670 - RNA, 19 nt, Artificial Sequence
  Description of Artificial Sequence: Synthetic oligonucleotide
uaccagaggaccuguaggu

SEQ ID NO: 1635671 - RNA, 19 nt, Artificial Sequence
  Description of Artificial Sequence: Synthetic oligonucleotide
augauaaaggguguuggcu

SEQ ID NO: 1635672 - RNA, 19 nt, Artificial Sequence
  Description of Artificial Sequence: Synthetic oligonucleotide
agcucguaagucccauccc

SEQ ID NO: 1635673 - RNA, 19 nt, Artificial Sequence
  Description of Artificial Sequence: Synthetic oligonucleotide
agaguaucuucugcagacc

SEQ ID NO: 1635674 - RNA, 19 nt, Artificial Sequence
  Description of Artificial Sequence: Synthetic oligonucleotide
uuucgucacuggcaaagga

SEQ ID NO: 1635675 - RNA, 19 nt, Artificial Sequence
  Description of Artificial Sequence: Synthetic oligonucleotide
guggcaaggcaucuuugcg

SEQ ID NO: 1635676 - RNA, 19 nt, Artificial Sequence
  Description of Artificial Sequence: Synthetic oligonucleotide
gauugcggaaggaugucag

SEQ ID NO: 1635677 - RNA, 19 nt, Artificial Sequence
  Description of Artificial Sequence: Synthetic oligonucleotide
gaagaagcgucgcucuggc

SEQ ID NO: 1635678 - RNA, 19 nt, Artificial Sequence
  Description of Artificial Sequence: Synthetic oligonucleotide
ucgaccguagguuucugcu

SEQ ID NO: 1635679 - RNA, 19 nt, Artificial Sequence
  Description of Artificial Sequence: Synthetic oligonucleotide
agaagaagcgucgcucugg

SEQ ID NO: 1635680 - RNA, 19 nt, Artificial Sequence
  Description of Artificial Sequence: Synthetic oligonucleotide
uacucaaacuugauucgaa

SEQ ID NO: 1635681 - RNA, 19 nt, Artificial Sequence
  Description of Artificial Sequence: Synthetic oligonucleotide
accaaucuuggauugcgga

SEQ ID NO: 1635682 - RNA, 19 nt, Artificial Sequence
  Description of Artificial Sequence: Synthetic oligonucleotide
ggauguguuaccaacuuug

SEQ ID NO: 1635683 - RNA, 19 nt, Artificial Sequence
  Description of Artificial Sequence: Synthetic oligonucleotide
gcuacgagugauuuccagg

SEQ ID NO: 1635684 - RNA, 19 nt, Artificial Sequence
  Description of Artificial Sequence: Synthetic oligonucleotide
guccgagaauuccugagcc

SEQ ID NO: 1635685 - RNA, 19 nt, Artificial Sequence
  Description of Artificial Sequence: Synthetic oligonucleotide
ugauaugccagguguacuu

SEQ ID NO: 1635686 - RNA, 19 nt, Artificial Sequence
  Description of Artificial Sequence: Synthetic oligonucleotide
cucguaagucccaucccgg

SEQ ID NO: 1635687 - RNA, 19 nt, Artificial Sequence
  Description of Artificial Sequence: Synthetic oligonucleotide
ugaucaggggauguguuac

SEQ ID NO: 1635688 - RNA, 19 nt, Artificial Sequence
  Description of Artificial Sequence: Synthetic oligonucleotide
cagcucguaagucccaucc

SEQ ID NO: 1635689 - RNA, 19 nt, Artificial Sequence
  Description of Artificial Sequence: Synthetic oligonucleotide
ucuauucgaccguagguuu

SEQ ID NO: 1635690 - RNA, 19 nt, Artificial Sequence
  Description of Artificial Sequence: Synthetic oligonucleotide
uucaggacugaacucuuua

SEQ ID NO: 1635691 - RNA, 19 nt, Artificial Sequence
  Description of Artificial Sequence: Synthetic oligonucleotide
auuagcaggggcccaauua

SEQ ID NO: 1635692 - RNA, 19 nt, Artificial Sequence
  Description of Artificial Sequence: Synthetic oligonucleotide
uaacuggggcaccauuacc

SEQ ID NO: 1635693 - RNA, 19 nt, Artificial Sequence
  Description of Artificial Sequence: Synthetic oligonucleotide
cuuuuagugacucucugua

SEQ ID NO: 1635694 - RNA, 19 nt, Artificial Sequence
  Description of Artificial Sequence: Synthetic oligonucleotide
gcuaagugcaguucauuag

SEQ ID NO: 1635695 - RNA, 19 nt, Artificial Sequence
  Description of Artificial Sequence: Synthetic oligonucleotide
uuagcuaagugcaguucau

SEQ ID NO: 1635696 - RNA, 19 nt, Artificial Sequence
  Description of Artificial Sequence: Synthetic oligonucleotide
gucuuguggcaucagugag

SEQ ID NO: 1635697 - RNA, 19 nt, Artificial Sequence
  Description of Artificial Sequence: Synthetic oligonucleotide
ugcagaccccacauggaug

SEQ ID NO: 1635698 - RNA, 19 nt, Artificial Sequence
  Description of Artificial Sequence: Synthetic oligonucleotide
uuggacuugugugacuuca

SEQ ID NO: 1635699 - RNA, 19 nt, Artificial Sequence
  Description of Artificial Sequence: Synthetic oligonucleotide
ugagccaguguuucgucac

SEQ ID NO: 1635700 - RNA, 19 nt, Artificial Sequence
  Description of Artificial Sequence: Synthetic oligonucleotide
  modified_base (10)..(10): a, c, u, g, unknown or other
  modified_base (15)..(15): a, c, u, g, unknown or other
guuugguucnggganccug

SEQ ID NO: 1635701 - RNA, 19 nt, Artificial Sequence
  Description of Artificial Sequence: Synthetic oligonucleotide
uuugaucaggggauguguu

SEQ ID NO: 1635702 - RNA, 19 nt, Artificial Sequence
  Description of Artificial Sequence: Synthetic oligonucleotide
uggauauuucucuguugca

SEQ ID NO: 1635703 - RNA, 19 nt, Artificial Sequence
  Description of Artificial Sequence: Synthetic oligonucleotide
ugucgacuuucccuggcug

SEQ ID NO: 1635704 - RNA, 19 nt, Artificial Sequence
  Description of Artificial Sequence: Synthetic oligonucleotide
agcuaagugcaguucauua

SEQ ID NO: 1635705 - RNA, 19 nt, Artificial Sequence
  Description of Artificial Sequence: Synthetic oligonucleotide
gaagcgucgcucuggcaag

SEQ ID NO: 1635706 - RNA, 19 nt, Artificial Sequence
  Description of Artificial Sequence: Synthetic oligonucleotide
uguugcaaggcugugccuc

SEQ ID NO: 1635707 - RNA, 19 nt, Artificial Sequence
  Description of Artificial Sequence: Synthetic oligonucleotide
ucccgguucuggauaaagc

SEQ ID NO: 1635708 - RNA, 19 nt, Artificial Sequence
  Description of Artificial Sequence: Synthetic oligonucleotide
uuagugaggaggccaccac

SEQ ID NO: 1635709 - RNA, 19 nt, Artificial Sequence
  Description of Artificial Sequence: Synthetic oligonucleotide
uauuagugauaugccaggu

SEQ ID NO: 1635710 - RNA, 19 nt, Artificial Sequence
  Description of Artificial Sequence: Synthetic oligonucleotide
cuaacuggggcaccauuac

SEQ ID NO: 1635711 - RNA, 19 nt, Artificial Sequence
  Description of Artificial Sequence: Synthetic oligonucleotide
caaauagcccaagcugucg

SEQ ID NO: 1635712 - RNA, 19 nt, Artificial Sequence
  Description of Artificial Sequence: Synthetic oligonucleotide
gcuacuagauuuacagugg

SEQ ID NO: 1635713 - RNA, 19 nt, Artificial Sequence
  Description of Artificial Sequence: Synthetic oligonucleotide
gauucgaagcucaccaauc

SEQ ID NO: 1635714 - RNA, 19 nt, Artificial Sequence
  Description of Artificial Sequence: Synthetic oligonucleotide
ggcacucuuccuuacaaug

SEQ ID NO: 1635715 - RNA, 19 nt, Artificial Sequence
  Description of Artificial Sequence: Synthetic oligonucleotide
caccauuaccucuuuaaga

SEQ ID NO: 1635716 - RNA, 19 nt, Artificial Sequence
  Description of Artificial Sequence: Synthetic oligonucleotide
uaaagcuacgagugauuuc

SEQ ID NO: 1635717 - RNA, 19 nt, Artificial Sequence
  Description of Artificial Sequence: Synthetic oligonucleotide
ggacugaacucuuuagggc

SEQ ID NO: 1635718 - RNA, 19 nt, Artificial Sequence
  Description of Artificial Sequence: Synthetic oligonucleotide
uaccucuuuaagaccgcug

SEQ ID NO: 1635719 - RNA, 19 nt, Artificial Sequence
  Description of Artificial Sequence: Synthetic oligonucleotide
uugcgagcaaaagcugugg

SEQ ID NO: 1635720 - RNA, 19 nt, Artificial Sequence
  Description of Artificial Sequence: Synthetic oligonucleotide
gcucguaagucccaucccg

SEQ ID NO: 1635721 - RNA, 19 nt, Artificial Sequence
  Description of Artificial Sequence: Synthetic oligonucleotide
uggccuugcauuucacuac

SEQ ID NO: 1635722 - RNA, 19 nt, Artificial Sequence
  Description of Artificial Sequence: Synthetic oligonucleotide
ucacaaagccgagacagau

SEQ ID NO: 1635723 - RNA, 19 nt, Artificial Sequence
  Description of Artificial Sequence: Synthetic oligonucleotide
agcuacgagugauuuccag

SEQ ID NO: 1635724 - RNA, 19 nt, Artificial Sequence
  Description of Artificial Sequence: Synthetic oligonucleotide
cuuuagggcaggaggggug

SEQ ID NO: 1635725 - RNA, 19 nt, Artificial Sequence
  Description of Artificial Sequence: Synthetic oligonucleotide
uagcaggggcccaauuaag

SEQ ID NO: 1635726 - RNA, 19 nt, Artificial Sequence
  Description of Artificial Sequence: Synthetic oligonucleotide
ucugaguggcagccuaacu

SEQ ID NO: 1635727 - RNA, 19 nt, Artificial Sequence
  Description of Artificial Sequence: Synthetic oligonucleotide
cagguguacuuggaaaagg

SEQ ID NO: 1635728 - RNA, 19 nt, Artificial Sequence
  Description of Artificial Sequence: Synthetic oligonucleotide
auggauggguucucagcag

SEQ ID NO: 1635729 - RNA, 19 nt, Artificial Sequence
  Description of Artificial Sequence: Synthetic oligonucleotide
agugauuuccaggggcauc

SEQ ID NO: 1635730 - RNA, 19 nt, Artificial Sequence
  Description of Artificial Sequence: Synthetic oligonucleotide
  modified_base (2)..(2): a, c, u, g, unknown or other
anccugcauagcauucagg

SEQ ID NO: 1635731 - RNA, 19 nt, Artificial Sequence
  Description of Artificial Sequence: Synthetic oligonucleotide
auuccggugguggccauac

SEQ ID NO: 1635732 - RNA, 19 nt, Artificial Sequence
  Description of Artificial Sequence: Synthetic oligonucleotide
auaaagcuacgagugauuu

SEQ ID NO: 1635733 - RNA, 19 nt, Artificial Sequence
  Description of Artificial Sequence: Synthetic oligonucleotide
gaucaggggauguguuacc

SEQ ID NO: 1635734 - RNA, 19 nt, Artificial Sequence
  Description of Artificial Sequence: Synthetic oligonucleotide
aggagcagaagaagcgucg

SEQ ID NO: 1635735 - RNA, 19 nt, Artificial Sequence
  Description of Artificial Sequence: Synthetic oligonucleotide
uguccauuccggugguggc

SEQ ID NO: 1635736 - RNA, 19 nt, Artificial Sequence
  Description of Artificial Sequence: Synthetic oligonucleotide
uuuguuuaacuugcagaau

SEQ ID NO: 1635737 - RNA, 19 nt, Artificial Sequence
  Description of Artificial Sequence: Synthetic oligonucleotide
aagaccgcuggcaucaaau

SEQ ID NO: 1635738 - RNA, 19 nt, Artificial Sequence
  Description of Artificial Sequence: Synthetic oligonucleotide
uugugugacuucagagacu

SEQ ID NO: 1635739 - RNA, 19 nt, Artificial Sequence
  Description of Artificial Sequence: Synthetic oligonucleotide
ugcuguuuacugugucuug

SEQ ID NO: 1635740 - RNA, 19 nt, Artificial Sequence
  Description of Artificial Sequence: Synthetic oligonucleotide
uauucgaccguagguuucu

SEQ ID NO: 1635741 - RNA, 19 nt, Artificial Sequence
  Description of Artificial Sequence: Synthetic oligonucleotide
auuucacuaccaugaugcu

SEQ ID NO: 1635742 - RNA, 19 nt, Artificial Sequence
  Description of Artificial Sequence: Synthetic oligonucleotide
cuguuuacugugucuugug

SEQ ID NO: 1635743 - RNA, 19 nt, Artificial Sequence
  Description of Artificial Sequence: Synthetic oligonucleotide
gcuuagaggcagcagauuc

SEQ ID NO: 1635744 - RNA, 19 nt, Artificial Sequence
  Description of Artificial Sequence: Synthetic oligonucleotide
auacucaaacuugauucga

SEQ ID NO: 1635745 - RNA, 19 nt, Artificial Sequence
  Description of Artificial Sequence: Synthetic oligonucleotide
gauguguuaccaacuuuga

SEQ ID NO: 1635746 - RNA, 19 nt, Artificial Sequence
  Description of Artificial Sequence: Synthetic oligonucleotide
uaagugcuacuagauuuac

SEQ ID NO: 1635747 - RNA, 19 nt, Artificial Sequence
  Description of Artificial Sequence: Synthetic oligonucleotide
ucuuuagggcaggaggggu

SEQ ID NO: 1635748 - RNA, 19 nt, Artificial Sequence
  Description of Artificial Sequence: Synthetic oligonucleotide
uuccugagccaguguuucg

SEQ ID NO: 1635749 - RNA, 19 nt, Artificial Sequence
  Description of Artificial Sequence: Synthetic oligonucleotide
uucgaccguagguuucugc

SEQ ID NO: 1635750 - RNA, 19 nt, Artificial Sequence
  Description of Artificial Sequence: Synthetic oligonucleotide
uccgagaauuccugagcca

SEQ ID NO: 1635751 - RNA, 19 nt, Artificial Sequence
  Description of Artificial Sequence: Synthetic oligonucleotide
uggcuuagaggcagcagau

SEQ ID NO: 1635752 - RNA, 19 nt, Artificial Sequence
  Description of Artificial Sequence: Synthetic oligonucleotide
ggucuugguagucagccac

SEQ ID NO: 1635753 - RNA, 19 nt, Artificial Sequence
  Description of Artificial Sequence: Synthetic oligonucleotide
caucagugagcuguucacc

SEQ ID NO: 1635754 - RNA, 19 nt, Artificial Sequence
  Description of Artificial Sequence: Synthetic oligonucleotide
  modified_base (8)..(8): a, c, u, g, unknown or other
  modified_base (13)..(13): a, c, u, g, unknown or other
uugguucnggganccugca

SEQ ID NO: 1635755 - RNA, 19 nt, Artificial Sequence
  Description of Artificial Sequence: Synthetic oligonucleotide
auaguggucagaggggcca

SEQ ID NO: 1635756 - RNA, 19 nt, Artificial Sequence
  Description of Artificial Sequence: Synthetic oligonucleotide
gaacucuuuagggcaggag

SEQ ID NO: 1635757 - RNA, 19 nt, Artificial Sequence
  Description of Artificial Sequence: Synthetic oligonucleotide
cuauucgaccguagguuuc

SEQ ID NO: 1635758 - RNA, 19 nt, Artificial Sequence
  Description of Artificial Sequence: Synthetic oligonucleotide
ucuuagcuaagugcaguuc

SEQ ID NO: 1635759 - RNA, 19 nt, Artificial Sequence
  Description of Artificial Sequence: Synthetic oligonucleotide
gaaagugauaguggucaga

SEQ ID NO: 1635760 - RNA, 19 nt, Artificial Sequence
  Description of Artificial Sequence: Synthetic oligonucleotide
cuucucuauucgaccguag

SEQ ID NO: 1635761 - RNA, 19 nt, Artificial Sequence
  Description of Artificial Sequence: Synthetic oligonucleotide
ucguaagucccaucccggu

SEQ ID NO: 1635762 - RNA, 19 nt, Artificial Sequence
  Description of Artificial Sequence: Synthetic oligonucleotide
ugguagucagccacauguc

SEQ ID NO: 1635763 - RNA, 19 nt, Artificial Sequence
  Description of Artificial Sequence: Synthetic oligonucleotide
gcaccauuaccucuuuaag

SEQ ID NO: 1635764 - RNA, 19 nt, Artificial Sequence
  Description of Artificial Sequence: Synthetic oligonucleotide
uuucacuaccaugaugcuu

SEQ ID NO: 1635765 - RNA, 19 nt, Artificial Sequence
  Description of Artificial Sequence: Synthetic oligonucleotide
ccaauuaagugcuacuaga

SEQ ID NO: 1635766 - RNA, 19 nt, Artificial Sequence
  Description of Artificial Sequence: Synthetic oligonucleotide
uaagucccaucccgguucu

SEQ ID NO: 1635767 - RNA, 19 nt, Artificial Sequence
  Description of Artificial Sequence: Synthetic oligonucleotide
agguguacuuggaaaaggu

SEQ ID NO: 1635768 - RNA, 19 nt, Artificial Sequence
  Description of Artificial Sequence: Synthetic oligonucleotide
ucgacuuucccuggcuggc

SEQ ID NO: 1635769 - RNA, 19 nt, Artificial Sequence
  Description of Artificial Sequence: Synthetic oligonucleotide
aagcgucgcucuggcaagc

SEQ ID NO: 1635770 - RNA, 19 nt, Artificial Sequence
  Description of Artificial Sequence: Synthetic oligonucleotide
ugaaggacgugugcaaaua

SEQ ID NO: 1635771 - RNA, 19 nt, Artificial Sequence
  Description of Artificial Sequence: Synthetic oligonucleotide
cugcaugaaggacgugugc

SEQ ID NO: 1635772 - RNA, 19 nt, Artificial Sequence
  Description of Artificial Sequence: Synthetic oligonucleotide
caagcugucgacuuucccu

SEQ ID NO: 1635773 - RNA, 19 nt, Artificial Sequence
  Description of Artificial Sequence: Synthetic oligonucleotide
cccaauuaagugcuacuag

SEQ ID NO: 1635774 - RNA, 19 nt, Artificial Sequence
  Description of Artificial Sequence: Synthetic oligonucleotide
cuaugcucucuacuuccac

SEQ ID NO: 1635775 - RNA, 19 nt, Artificial Sequence
  Description of Artificial Sequence: Synthetic oligonucleotide
  modified_base (7)..(7): a, c, u, g, unknown or other
  modified_base (12)..(12): a, c, u, g, unknown or other
ugguucnggganccugcau

SEQ ID NO: 1635776 - RNA, 19 nt, Artificial Sequence
  Description of Artificial Sequence: Synthetic oligonucleotide
aagugcuacuagauuuaca

SEQ ID NO: 1635777 - RNA, 19 nt, Artificial Sequence
  Description of Artificial Sequence: Synthetic oligonucleotide
gauuugccucaagggaaag

SEQ ID NO: 1635778 - RNA, 19 nt, Artificial Sequence
  Description of Artificial Sequence: Synthetic oligonucleotide
gagcaccagacauuucauc

SEQ ID NO: 1635779 - RNA, 19 nt, Artificial Sequence
  Description of Artificial Sequence: Synthetic oligonucleotide
ugguccagagguggucucg

SEQ ID NO: 1635780 - RNA, 19 nt, Artificial Sequence
  Description of Artificial Sequence: Synthetic oligonucleotide
uuucugcuaugcucucuac

SEQ ID NO: 1635781 - RNA, 19 nt, Artificial Sequence
  Description of Artificial Sequence: Synthetic oligonucleotide
caauuaagugcuacuagau

SEQ ID NO: 1635782 - RNA, 19 nt, Artificial Sequence
  Description of Artificial Sequence: Synthetic oligonucleotide
ggaaagugauaguggucag

SEQ ID NO: 1635783 - RNA, 19 nt, Artificial Sequence
  Description of Artificial Sequence: Synthetic oligonucleotide
gaguggcagccuaacuggg

SEQ ID NO: 1635784 - RNA, 19 nt, Artificial Sequence
  Description of Artificial Sequence: Synthetic oligonucleotide
  modified_base (18)..(18): a, c, u, g, unknown or other
gauggucuguuugguucng

SEQ ID NO: 1635785 - RNA, 19 nt, Artificial Sequence
  Description of Artificial Sequence: Synthetic oligonucleotide
uguuaccaacuuugaggaa

SEQ ID NO: 1635786 - RNA, 19 nt, Artificial Sequence
  Description of Artificial Sequence: Synthetic oligonucleotide
agcugucgacuuucccugg

SEQ ID NO: 1635787 - RNA, 19 nt, Artificial Sequence
  Description of Artificial Sequence: Synthetic oligonucleotide
uccauuccggugguggcca

SEQ ID NO: 1635788 - RNA, 19 nt, Artificial Sequence
  Description of Artificial Sequence: Synthetic oligonucleotide
  modified_base (4)..(4): a, c, u, g, unknown or other
  modified_base (9)..(9): a, c, u, g, unknown or other
uucnggganccugcauagc

SEQ ID NO: 1635789 - RNA, 19 nt, Artificial Sequence
  Description of Artificial Sequence: Synthetic oligonucleotide
ggcaccauuaccucuuuaa

SEQ ID NO: 1635790 - RNA, 19 nt, Artificial Sequence
  Description of Artificial Sequence: Synthetic oligonucleotide
aaaggguguuggcuccuuu

SEQ ID NO: 1635791 - RNA, 19 nt, Artificial Sequence
  Description of Artificial Sequence: Synthetic oligonucleotide
  modified_base (11)..(11): a, c, u, g, unknown or other
  modified_base (16)..(16): a, c, u, g, unknown or other
uguuugguucnggganccu

SEQ ID NO: 1635792 - RNA, 19 nt, Artificial Sequence
  Description of Artificial Sequence: Synthetic oligonucleotide
  modified_base (6)..(6): a, c, u, g, unknown or other
  modified_base (11)..(11): a, c, u, g, unknown or other
gguucnggganccugcaua

SEQ ID NO: 1635793 - RNA, 19 nt, Artificial Sequence
  Description of Artificial Sequence: Synthetic oligonucleotide
aagaagcgucgcucuggca

SEQ ID NO: 1635794 - RNA, 19 nt, Artificial Sequence
  Description of Artificial Sequence: Synthetic oligonucleotide
uggccaacugccagauggu

SEQ ID NO: 1635795 - RNA, 19 nt, Artificial Sequence
  Description of Artificial Sequence: Synthetic oligonucleotide
uguagguucuguggccaac

SEQ ID NO: 1635796 - RNA, 19 nt, Artificial Sequence
  Description of Artificial Sequence: Synthetic oligonucleotide
agcugcaucuuagcuaagu

SEQ ID NO: 1635797 - RNA, 19 nt, Artificial Sequence
  Description of Artificial Sequence: Synthetic oligonucleotide
aacagcucguaagucccau

SEQ ID NO: 1635798 - RNA, 19 nt, Artificial Sequence
  Description of Artificial Sequence: Synthetic oligonucleotide
cuuugcgagcaaaagcugu

SEQ ID NO: 1635799 - RNA, 19 nt, Artificial Sequence
  Description of Artificial Sequence: Synthetic oligonucleotide
aggcaagcaaagaaaugga

SEQ ID NO: 1635800 - RNA, 19 nt, Artificial Sequence
  Description of Artificial Sequence: Synthetic oligonucleotide
ccauuaccucuuuaagacc

SEQ ID NO: 1635801 - RNA, 19 nt, Artificial Sequence
  Description of Artificial Sequence: Synthetic oligonucleotide
auuugccucaagggaaagu

SEQ ID NO: 1635802 - RNA, 19 nt, Artificial Sequence
  Description of Artificial Sequence: Synthetic oligonucleotide
cucaccaaucuuggauugc

SEQ ID NO: 1635803 - RNA, 19 nt, Artificial Sequence
  Description of Artificial Sequence: Synthetic oligonucleotide
auagcccaagcugucgacu

SEQ ID NO: 1635804 - RNA, 19 nt, Artificial Sequence
  Description of Artificial Sequence: Synthetic oligonucleotide
ucucgggucuugguaguca

SEQ ID NO: 1635805 - RNA, 19 nt, Artificial Sequence
  Description of Artificial Sequence: Synthetic oligonucleotide
gcaucagugagcuguucac

SEQ ID NO: 1635806 - RNA, 19 nt, Artificial Sequence
  Description of Artificial Sequence: Synthetic oligonucleotide
gcaucuuugcgagcaaaag

SEQ ID NO: 1635807 - RNA, 19 nt, Artificial Sequence
  Description of Artificial Sequence: Synthetic oligonucleotide
gcgagcaaaagcuguggug

SEQ ID NO: 1635808 - RNA, 19 nt, Artificial Sequence
  Description of Artificial Sequence: Synthetic oligonucleotide
ucgggucuugguagucagc

SEQ ID NO: 1635809 - RNA, 19 nt, Artificial Sequence
  Description of Artificial Sequence: Synthetic oligonucleotide
cuuggaaaagguucccagu

SEQ ID NO: 1635810 - RNA, 19 nt, Artificial Sequence
  Description of Artificial Sequence: Synthetic oligonucleotide
uaagaccgcuggcaucaaa

SEQ ID NO: 1635811 - RNA, 19 nt, Artificial Sequence
  Description of Artificial Sequence: Synthetic oligonucleotide
cuugguagucagccacaug

SEQ ID NO: 1635812 - RNA, 19 nt, Artificial Sequence
  Description of Artificial Sequence: Synthetic oligonucleotide
accgcuggcaucaaauuua

SEQ ID NO: 1635813 - RNA, 19 nt, Artificial Sequence
  Description of Artificial Sequence: Synthetic oligonucleotide
gcauuuaaacagcucguaa

SEQ ID NO: 1635814 - RNA, 19 nt, Artificial Sequence
  Description of Artificial Sequence: Synthetic oligonucleotide
cagaagaagcgucgcucug

SEQ ID NO: 1635815 - RNA, 19 nt, Artificial Sequence
  Description of Artificial Sequence: Synthetic oligonucleotide
guugcaaggcugugccuca

SEQ ID NO: 1635816 - RNA, 19 nt, Artificial Sequence
  Description of Artificial Sequence: Synthetic oligonucleotide
gggaugugcaaacuccgca

SEQ ID NO: 1635817 - RNA, 19 nt, Artificial Sequence
  Description of Artificial Sequence: Synthetic oligonucleotide
uggcagccuaacuggggca

SEQ ID NO: 1635818 - RNA, 19 nt, Artificial Sequence
  Description of Artificial Sequence: Synthetic oligonucleotide
agcaggggcccaauuaagu

SEQ ID NO: 1635819 - RNA, 19 nt, Artificial Sequence
  Description of Artificial Sequence: Synthetic oligonucleotide
ccgagaauuccugagccag

SEQ ID NO: 1635820 - RNA, 19 nt, Artificial Sequence
  Description of Artificial Sequence: Synthetic oligonucleotide
agaccgcuggcaucaaauu

SEQ ID NO: 1635821 - RNA, 19 nt, Artificial Sequence
  Description of Artificial Sequence: Synthetic oligonucleotide
ugucagggauccacucaau

SEQ ID NO: 1635822 - RNA, 19 nt, Artificial Sequence
  Description of Artificial Sequence: Synthetic oligonucleotide
gaccguagguuucugcuau

SEQ ID NO: 1635823 - RNA, 19 nt, Artificial Sequence
  Description of Artificial Sequence: Synthetic oligonucleotide
caaagccgagacagaugac

SEQ ID NO: 1635824 - RNA, 19 nt, Artificial Sequence
  Description of Artificial Sequence: Synthetic oligonucleotide
cuuguggcaucagugagcu

SEQ ID NO: 1635825 - RNA, 19 nt, Artificial Sequence
  Description of Artificial Sequence: Synthetic oligonucleotide
ccugcauagcauucaggac

SEQ ID NO: 1635826 - RNA, 19 nt, Artificial Sequence
  Description of Artificial Sequence: Synthetic oligonucleotide
ugcaaggcugugccucauc

SEQ ID NO: 1635827 - RNA, 19 nt, Artificial Sequence
  Description of Artificial Sequence: Synthetic oligonucleotide
uguggccaacugccagaug

SEQ ID NO: 1635828 - RNA, 19 nt, Artificial Sequence
  Description of Artificial Sequence: Synthetic oligonucleotide
  modified_base (15)..(15): a, c, u, g, unknown or other
ggucuguuugguucnggga

SEQ ID NO: 1635829 - RNA, 19 nt, Artificial Sequence
  Description of Artificial Sequence: Synthetic oligonucleotide
cauagcauucaggacugaa

SEQ ID NO: 1635830 - RNA, 19 nt, Artificial Sequence
  Description of Artificial Sequence: Synthetic oligonucleotide
uggauugcggaaggauguc

SEQ ID NO: 1635831 - RNA, 19 nt, Artificial Sequence
  Description of Artificial Sequence: Synthetic oligonucleotide
uggggauguuggacuugug

SEQ ID NO: 1635832 - RNA, 19 nt, Artificial Sequence
  Description of Artificial Sequence: Synthetic oligonucleotide
aguuggggagccgacuuuu

SEQ ID NO: 1635833 - RNA, 19 nt, Artificial Sequence
  Description of Artificial Sequence: Synthetic oligonucleotide
  modified_base (4)..(4): a, c, u, g, unknown or other
gganccugcauagcauuca

SEQ ID NO: 1635834 - RNA, 19 nt, Artificial Sequence
  Description of Artificial Sequence: Synthetic oligonucleotide
uagcuaagugcaguucauu

SEQ ID NO: 1635835 - RNA, 19 nt, Artificial Sequence
  Description of Artificial Sequence: Synthetic oligonucleotide
caugaugcuuuuagugacu

SEQ ID NO: 1635836 - RNA, 19 nt, Artificial Sequence
  Description of Artificial Sequence: Synthetic oligonucleotide
gcagaauauuagugauaug

SEQ ID NO: 1635837 - RNA, 19 nt, Artificial Sequence
  Description of Artificial Sequence: Synthetic oligonucleotide
cuauggauauuucucuguu

SEQ ID NO: 1635838 - RNA, 19 nt, Artificial Sequence
  Description of Artificial Sequence: Synthetic oligonucleotide
cacuuuggggcugccucag

SEQ ID NO: 1635839 - RNA, 19 nt, Artificial Sequence
  Description of Artificial Sequence: Synthetic oligonucleotide
aagcuacgagugauuucca

SEQ ID NO: 1635840 - RNA, 19 nt, Artificial Sequence
  Description of Artificial Sequence: Synthetic oligonucleotide
gccgagacagaugacucug

SEQ ID NO: 1635841 - RNA, 19 nt, Artificial Sequence
  Description of Artificial Sequence: Synthetic oligonucleotide
caugaaggacgugugcaaa

SEQ ID NO: 1635842 - RNA, 19 nt, Artificial Sequence
  Description of Artificial Sequence: Synthetic oligonucleotide
cuaccaugaugcuuuuagu

SEQ ID NO: 1635843 - RNA, 19 nt, Artificial Sequence
  Description of Artificial Sequence: Synthetic oligonucleotide
gccgaucuucugcaugaag

SEQ ID NO: 1635844 - RNA, 19 nt, Artificial Sequence
  Description of Artificial Sequence: Synthetic oligonucleotide
ccagguguacuuggaaaag

SEQ ID NO: 1635845 - RNA, 19 nt, Artificial Sequence
  Description of Artificial Sequence: Synthetic oligonucleotide
gaccgcuggcaucaaauuu

SEQ ID NO: 1635846 - RNA, 19 nt, Artificial Sequence
  Description of Artificial Sequence: Synthetic oligonucleotide
uaccaacuuugaggaaggu

SEQ ID NO: 1635847 - RNA, 19 nt, Artificial Sequence
  Description of Artificial Sequence: Synthetic oligonucleotide
gggauccacucaaugauaa

SEQ ID NO: 1635848 - RNA, 19 nt, Artificial Sequence
  Description of Artificial Sequence: Synthetic oligonucleotide
cucuauucgaccguagguu

SEQ ID NO: 1635849 - RNA, 19 nt, Artificial Sequence
  Description of Artificial Sequence: Synthetic oligonucleotide
ucauuagcaggggcccaau

SEQ ID NO: 1635850 - RNA, 19 nt, Artificial Sequence
  Description of Artificial Sequence: Synthetic oligonucleotide
gcugucgacuuucccuggc

SEQ ID NO: 1635851 - RNA, 19 nt, Artificial Sequence
  Description of Artificial Sequence: Synthetic oligonucleotide
  modified_base (2)..(2): a, c, u, g, unknown or other
  modified_base (7)..(7): a, c, u, g, unknown or other
cnggganccugcauagcau

SEQ ID NO: 1635852 - RNA, 19 nt, Artificial Sequence
  Description of Artificial Sequence: Synthetic oligonucleotide
guucauuagcaggggccca

SEQ ID NO: 1635853 - RNA, 19 nt, Artificial Sequence
  Description of Artificial Sequence: Synthetic oligonucleotide
ccgcuggcaucaaauuuag

SEQ ID NO: 1635854 - RNA, 19 nt, Artificial Sequence
  Description of Artificial Sequence: Synthetic oligonucleotide
acgugugcaaauagcccaa

SEQ ID NO: 1635855 - RNA, 19 nt, Artificial Sequence
  Description of Artificial Sequence: Synthetic oligonucleotide
auucgaccguagguuucug

SEQ ID NO: 1635856 - RNA, 19 nt, Artificial Sequence
  Description of Artificial Sequence: Synthetic oligonucleotide
guagguucuguggccaacu

SEQ ID NO: 1635857 - RNA, 19 nt, Artificial Sequence
  Description of Artificial Sequence: Synthetic oligonucleotide
cucaagggaaagugauagu

SEQ ID NO: 1635858 - RNA, 19 nt, Artificial Sequence
  Description of Artificial Sequence: Synthetic oligonucleotide
ccacuuuagggcauuuaaa

SEQ ID NO: 1635859 - RNA, 19 nt, Artificial Sequence
  Description of Artificial Sequence: Synthetic oligonucleotide
ggauugcggaaggauguca

SEQ ID NO: 1635860 - RNA, 19 nt, Artificial Sequence
  Description of Artificial Sequence: Synthetic oligonucleotide
agcccaagcugucgacuuu

SEQ ID NO: 1635861 - RNA, 19 nt, Artificial Sequence
  Description of Artificial Sequence: Synthetic oligonucleotide
uuaagaccgcuggcaucaa

SEQ ID NO: 1635862 - RNA, 19 nt, Artificial Sequence
  Description of Artificial Sequence: Synthetic oligonucleotide
gugauaugccagguguacu

SEQ ID NO: 1635863 - RNA, 19 nt, Artificial Sequence
  Description of Artificial Sequence: Synthetic oligonucleotide
uuccggugguggccauacu

SEQ ID NO: 1635864 - RNA, 19 nt, Artificial Sequence
  Description of Artificial Sequence: Synthetic oligonucleotide
ccacucaaugauaaagggu

SEQ ID NO: 1635865 - RNA, 19 nt, Artificial Sequence
  Description of Artificial Sequence: Synthetic oligonucleotide
  modified_base (5)..(5): a, c, u, g, unknown or other
ggganccugcauagcauuc

SEQ ID NO: 1635866 - RNA, 19 nt, Artificial Sequence
  Description of Artificial Sequence: Synthetic oligonucleotide
cccgguucuggauaaagcu

SEQ ID NO: 1635867 - RNA, 19 nt, Artificial Sequence
  Description of Artificial Sequence: Synthetic oligonucleotide
cgucgcucuggcaagcuuc

SEQ ID NO: 1635868 - RNA, 19 nt, Artificial Sequence
  Description of Artificial Sequence: Synthetic oligonucleotide
ggcagccuaacuggggcac

SEQ ID NO: 1635869 - RNA, 19 nt, Artificial Sequence
  Description of Artificial Sequence: Synthetic oligonucleotide
gggcccaauuaagugcuac

SEQ ID NO: 1635870 - RNA, 19 nt, Artificial Sequence
  Description of Artificial Sequence: Synthetic oligonucleotide
aagucccaucccgguucug

SEQ ID NO: 1635871 - RNA, 19 nt, Artificial Sequence
  Description of Artificial Sequence: Synthetic oligonucleotide
ggaugcacuuuggggcugc

SEQ ID NO: 1635872 - RNA, 19 nt, Artificial Sequence
  Description of Artificial Sequence: Synthetic oligonucleotide
cucaaugauaaaggguguu

SEQ ID NO: 1635873 - RNA, 19 nt, Artificial Sequence
  Description of Artificial Sequence: Synthetic oligonucleotide
acucugaguggcagccuaa

SEQ ID NO: 1635874 - RNA, 19 nt, Artificial Sequence
  Description of Artificial Sequence: Synthetic oligonucleotide
gcaaaagcugugguggagu

SEQ ID NO: 1635875 - RNA, 19 nt, Artificial Sequence
  Description of Artificial Sequence: Synthetic oligonucleotide
ggcccaauuaagugcuacu

SEQ ID NO: 1635876 - RNA, 19 nt, Artificial Sequence
  Description of Artificial Sequence: Synthetic oligonucleotide
uugcaaggcugugccucau

SEQ ID NO: 1635877 - RNA, 19 nt, Artificial Sequence
  Description of Artificial Sequence: Synthetic oligonucleotide
cagccuaacuggggcacca

SEQ ID NO: 1635878 - RNA, 19 nt, Artificial Sequence
  Description of Artificial Sequence: Synthetic oligonucleotide
ccgguucuggauaaagcua

SEQ ID NO: 1635879 - RNA, 19 nt, Artificial Sequence
  Description of Artificial Sequence: Synthetic oligonucleotide
gggcauuuaaacagcucgu

SEQ ID NO: 1635880 - RNA, 19 nt, Artificial Sequence
  Description of Artificial Sequence: Synthetic oligonucleotide
cugucgacuuucccuggcu

SEQ ID NO: 1635881 - RNA, 19 nt, Artificial Sequence
  Description of Artificial Sequence: Synthetic oligonucleotide
gaguuggggagccgacuuu

SEQ ID NO: 1635882 - RNA, 19 nt, Artificial Sequence
  Description of Artificial Sequence: Synthetic oligonucleotide
gaccccacauggauggguu

SEQ ID NO: 1635883 - RNA, 19 nt, Artificial Sequence
  Description of Artificial Sequence: Synthetic oligonucleotide
ccuuacaaugcuguuuacu

SEQ ID NO: 1635884 - RNA, 19 nt, Artificial Sequence
  Description of Artificial Sequence: Synthetic oligonucleotide
gcggaaggaugucagggau

SEQ ID NO: 1635885 - RNA, 19 nt, Artificial Sequence
  Description of Artificial Sequence: Synthetic oligonucleotide
gcuucucuauucgaccgua

SEQ ID NO: 1635886 - RNA, 19 nt, Artificial Sequence
  Description of Artificial Sequence: Synthetic oligonucleotide
gcccaagcugucgacuuuc

SEQ ID NO: 1635887 - RNA, 19 nt, Artificial Sequence
  Description of Artificial Sequence: Synthetic oligonucleotide
gguguacuuggaaaagguu

SEQ ID NO: 1635888 - RNA, 19 nt, Artificial Sequence
  Description of Artificial Sequence: Synthetic oligonucleotide
gucgcucuggcaagcuucu

SEQ ID NO: 1635889 - RNA, 19 nt, Artificial Sequence
  Description of Artificial Sequence: Synthetic oligonucleotide
ggccaacugccagaugguc

SEQ ID NO: 1635890 - RNA, 19 nt, Artificial Sequence
  Description of Artificial Sequence: Synthetic oligonucleotide
agccgaucuucugcaugaa

SEQ ID NO: 1635891 - RNA, 19 nt, Artificial Sequence
  Description of Artificial Sequence: Synthetic oligonucleotide
gcagccuaacuggggcacc

SEQ ID NO: 1635892 - RNA, 19 nt, Artificial Sequence
  Description of Artificial Sequence: Synthetic oligonucleotide
agccuaacuggggcaccau

SEQ ID NO: 1635893 - RNA, 19 nt, Artificial Sequence
  Description of Artificial Sequence: Synthetic oligonucleotide
gcuguucaccugagcacca

SEQ ID NO: 1635894 - RNA, 19 nt, Artificial Sequence
  Description of Artificial Sequence: Synthetic oligonucleotide
ggcaagcuucuggagccga

SEQ ID NO: 1635895 - RNA, 19 nt, Artificial Sequence
  Description of Artificial Sequence: Synthetic oligonucleotide
cuguugcaaggcugugccu

SEQ ID NO: 1635896 - RNA, 19 nt, Artificial Sequence
  Description of Artificial Sequence: Synthetic oligonucleotide
gguggucucgggucuuggu

SEQ ID NO: 1635897 - RNA, 19 nt, Artificial Sequence
  Description of Artificial Sequence: Synthetic oligonucleotide
ccugagcaccagacauuuc

SEQ ID NO: 1635898 - RNA, 19 nt, Artificial Sequence
  Description of Artificial Sequence: Synthetic oligonucleotide
ccgagacagaugacucuga

SEQ ID NO: 1635899 - RNA, 19 nt, Artificial Sequence
  Description of Artificial Sequence: Synthetic oligonucleotide
cauuagcaggggcccaauu

SEQ ID NO: 1635900 - RNA, 19 nt, Artificial Sequence
  Description of Artificial Sequence: Synthetic oligonucleotide
ccuugcauuucacuaccau

SEQ ID NO: 1635901 - RNA, 19 nt, Artificial Sequence
  Description of Artificial Sequence: Synthetic oligonucleotide
cuguggccaacugccagau

SEQ ID NO: 1635902 - RNA, 19 nt, Artificial Sequence
  Description of Artificial Sequence: Synthetic oligonucleotide
cacuaccaugaugcuuuua

SEQ ID NO: 1635903 - RNA, 19 nt, Artificial Sequence
  Description of Artificial Sequence: Synthetic oligonucleotide
cauuccggugguggccaua

SEQ ID NO: 1635904 - RNA, 19 nt, Artificial Sequence
  Description of Artificial Sequence: Synthetic oligonucleotide
gggcaccauuaccucuuua

SEQ ID NO: 1635905 - RNA, 19 nt, Artificial Sequence
  Description of Artificial Sequence: Synthetic oligonucleotide
caucccgguucuggauaaa

SEQ ID NO: 1635906 - RNA, 19 nt, Artificial Sequence
  Description of Artificial Sequence: Synthetic oligonucleotide
gcauagcauucaggacuga

SEQ ID NO: 1635907 - RNA, 19 nt, Artificial Sequence
  Description of Artificial Sequence: Synthetic oligonucleotide
cgaccguagguuucugcua

SEQ ID NO: 1635908 - RNA, 19 nt, Artificial Sequence
  Description of Artificial Sequence: Synthetic oligonucleotide
gccuaacuggggcaccauu

SEQ ID NO: 1635909 - RNA, 19 nt, Artificial Sequence
  Description of Artificial Sequence: Synthetic oligonucleotide
ccccacauggauggguucu

SEQ ID NO: 1635910 - RNA, 19 nt, Artificial Sequence
  Description of Artificial Sequence: Synthetic oligonucleotide
ccguggcuuagaggcagca

SEQ ID NO: 1635911 - RNA, 19 nt, Artificial Sequence
  Description of Artificial Sequence: Synthetic oligonucleotide
cguaagucccaucccgguu

SEQ ID NO: 1635912 - RNA, 19 nt, Artificial Sequence
  Description of Artificial Sequence: Synthetic oligonucleotide
ggggcaccauuaccucuuu

SEQ ID NO: 1635913 - RNA, 19 nt, Artificial Sequence
  Description of Artificial Sequence: Synthetic oligonucleotide
gcgucgcucuggcaagcuu

SEQ ID NO: 1635914 - RNA, 19 nt, Artificial Sequence
  Description of Artificial Sequence: Synthetic oligonucleotide
ggggcccaauuaagugcua

SEQ ID NO: 1635915 - RNA, 19 nt, Artificial Sequence
  Description of Artificial Sequence: Synthetic oligonucleotide
ccauuccggugguggccau

SEQ ID NO: 1635916 - RNA, 19 nt, Artificial Sequence
  Description of Artificial Sequence: Synthetic oligonucleotide
  modified_base (1)..(1): a, c, u, g, unknown or other
  modified_base (6)..(6): a, c, u, g, unknown or other
nggganccugcauagcauu

SEQ ID NO: 1635917 - RNA, 19 nt, Artificial Sequence
  Description of Artificial Sequence: Synthetic oligonucleotide
uauaugauccaccagacgc

SEQ ID NO: 1635918 - RNA, 19 nt, Artificial Sequence
  Description of Artificial Sequence: Synthetic oligonucleotide
gagauaaggauauuuaugc

SEQ ID NO: 1635919 - RNA, 19 nt, Artificial Sequence
  Description of Artificial Sequence: Synthetic oligonucleotide
aagacaaucaucuucuggu

SEQ ID NO: 1635920 - RNA, 19 nt, Artificial Sequence
  Description of Artificial Sequence: Synthetic oligonucleotide
auauuuaugccuuucguag

SEQ ID NO: 1635921 - RNA, 19 nt, Artificial Sequence
  Description of Artificial Sequence: Synthetic oligonucleotide
agaguuuuaaccugagccc

SEQ ID NO: 1635922 - RNA, 19 nt, Artificial Sequence
  Description of Artificial Sequence: Synthetic oligonucleotide
acuguauucgguuaaagug

SEQ ID NO: 1635923 - RNA, 19 nt, Artificial Sequence
  Description of Artificial Sequence: Synthetic oligonucleotide
uaggacaagaguuuuaacc

SEQ ID NO: 1635924 - RNA, 19 nt, Artificial Sequence
  Description of Artificial Sequence: Synthetic oligonucleotide
aacgaguugacauauucug

SEQ ID NO: 1635925 - RNA, 19 nt, Artificial Sequence
  Description of Artificial Sequence: Synthetic oligonucleotide
uguggaucuuauaugaucc

SEQ ID NO: 1635926 - RNA, 19 nt, Artificial Sequence
  Description of Artificial Sequence: Synthetic oligonucleotide
aacucuaccagcucacaac

SEQ ID NO: 1635927 - RNA, 19 nt, Artificial Sequence
  Description of Artificial Sequence: Synthetic oligonucleotide
aaaugagcaagcugcuccc

SEQ ID NO: 1635928 - RNA, 19 nt, Artificial Sequence
  Description of Artificial Sequence: Synthetic oligonucleotide
ugagauaaggauauuuaug

SEQ ID NO: 1635929 - RNA, 19 nt, Artificial Sequence
  Description of Artificial Sequence: Synthetic oligonucleotide
ucaugaaauacagaggucc

SEQ ID NO: 1635930 - RNA, 19 nt, Artificial Sequence
  Description of Artificial Sequence: Synthetic oligonucleotide
agauaaggauauuuaugcc

SEQ ID NO: 1635931 - RNA, 19 nt, Artificial Sequence
  Description of Artificial Sequence: Synthetic oligonucleotide
ugaacacuggucauacucg

SEQ ID NO: 1635932 - RNA, 19 nt, Artificial Sequence
  Description of Artificial Sequence: Synthetic oligonucleotide
aggagcaucucuuagcccg

SEQ ID NO: 1635933 - RNA, 19 nt, Artificial Sequence
  Description of Artificial Sequence: Synthetic oligonucleotide
uauucgguuaaagugaaug

SEQ ID NO: 1635934 - RNA, 19 nt, Artificial Sequence
  Description of Artificial Sequence: Synthetic oligonucleotide
ugaugugagugcuugaaga

SEQ ID NO: 1635935 - RNA, 19 nt, Artificial Sequence
  Description of Artificial Sequence: Synthetic oligonucleotide
agggugugaacgaagaugc

SEQ ID NO: 1635936 - RNA, 19 nt, Artificial Sequence
  Description of Artificial Sequence: Synthetic oligonucleotide
gauacucugcuucugaaca

SEQ ID NO: 1635937 - RNA, 19 nt, Artificial Sequence
  Description of Artificial Sequence: Synthetic oligonucleotide
uacuucagcgagcacaaag

SEQ ID NO: 1635938 - RNA, 19 nt, Artificial Sequence
  Description of Artificial Sequence: Synthetic oligonucleotide
acuaccagcacuguauucg

SEQ ID NO: 1635939 - RNA, 19 nt, Artificial Sequence
  Description of Artificial Sequence: Synthetic oligonucleotide
auuuaugccuuucguaguc

SEQ ID NO: 1635940 - RNA, 19 nt, Artificial Sequence
  Description of Artificial Sequence: Synthetic oligonucleotide
uuauaugauccaccagacg

SEQ ID NO: 1635941 - RNA, 19 nt, Artificial Sequence
  Description of Artificial Sequence: Synthetic oligonucleotide
ucuaccagcucacaacuug

SEQ ID NO: 1635942 - RNA, 19 nt, Artificial Sequence
  Description of Artificial Sequence: Synthetic oligonucleotide
ugugagugcuugaagagac

SEQ ID NO: 1635943 - RNA, 19 nt, Artificial Sequence
  Description of Artificial Sequence: Synthetic oligonucleotide
aacacuccaggaacaaucc

SEQ ID NO: 1635944 - RNA, 19 nt, Artificial Sequence
  Description of Artificial Sequence: Synthetic oligonucleotide
gaugugagugcuugaagag

SEQ ID NO: 1635945 - RNA, 19 nt, Artificial Sequence
  Description of Artificial Sequence: Synthetic oligonucleotide
uuuugugagaagccaacga

SEQ ID NO: 1635946 - RNA, 19 nt, Artificial Sequence
  Description of Artificial Sequence: Synthetic oligonucleotide
aacgaagaugcuguagugg

SEQ ID NO: 1635947 - RNA, 19 nt, Artificial Sequence
  Description of Artificial Sequence: Synthetic oligonucleotide
cauugauuuugugagaagc

SEQ ID NO: 1635948 - RNA, 19 nt, Artificial Sequence
  Description of Artificial Sequence: Synthetic oligonucleotide
uggacagugucaaagcucu

SEQ ID NO: 1635949 - RNA, 19 nt, Artificial Sequence
  Description of Artificial Sequence: Synthetic oligonucleotide
uagcccgaaacucuuagcc

SEQ ID NO: 1635950 - RNA, 19 nt, Artificial Sequence
  Description of Artificial Sequence: Synthetic oligonucleotide
aauccaagugaauggcuug

SEQ ID NO: 1635951 - RNA, 19 nt, Artificial Sequence
  Description of Artificial Sequence: Synthetic oligonucleotide
aggauauuuaugccuuucg

SEQ ID NO: 1635952 - RNA, 19 nt, Artificial Sequence
  Description of Artificial Sequence: Synthetic oligonucleotide
cacucgaguauucagagug

SEQ ID NO: 1635953 - RNA, 19 nt, Artificial Sequence
  Description of Artificial Sequence: Synthetic oligonucleotide
aaacucuuagccacauggc

SEQ ID NO: 1635954 - RNA, 19 nt, Artificial Sequence
  Description of Artificial Sequence: Synthetic oligonucleotide
gauaaggauauuuaugccu

SEQ ID NO: 1635955 - RNA, 19 nt, Artificial Sequence
  Description of Artificial Sequence: Synthetic oligonucleotide
aauaggacaagaguuuuaa

SEQ ID NO: 1635956 - RNA, 19 nt, Artificial Sequence
  Description of Artificial Sequence: Synthetic oligonucleotide
uuaaccugagcccgucugg

SEQ ID NO: 1635957 - RNA, 19 nt, Artificial Sequence
  Description of Artificial Sequence: Synthetic oligonucleotide
cuuauaugauccaccagac

SEQ ID NO: 1635958 - RNA, 19 nt, Artificial Sequence
  Description of Artificial Sequence: Synthetic oligonucleotide
ggugaauguauucugcagg

SEQ ID NO: 1635959 - RNA, 19 nt, Artificial Sequence
  Description of Artificial Sequence: Synthetic oligonucleotide
acgugugggagaucuaagc

SEQ ID NO: 1635960 - RNA, 19 nt, Artificial Sequence
  Description of Artificial Sequence: Synthetic oligonucleotide
cuaggaccaacgcauaggg

SEQ ID NO: 1635961 - RNA, 19 nt, Artificial Sequence
  Description of Artificial Sequence: Synthetic oligonucleotide
cuaggagcaucucuuagcc

SEQ ID NO: 1635962 - RNA, 19 nt, Artificial Sequence
  Description of Artificial Sequence: Synthetic oligonucleotide
ucuggugggcacuaggacc

SEQ ID NO: 1635963 - RNA, 19 nt, Artificial Sequence
  Description of Artificial Sequence: Synthetic oligonucleotide
aagcgauccugucugcuuc

SEQ ID NO: 1635964 - RNA, 19 nt, Artificial Sequence
  Description of Artificial Sequence: Synthetic oligonucleotide
cuuuguggaucuuauauga

SEQ ID NO: 1635965 - RNA, 19 nt, Artificial Sequence
  Description of Artificial Sequence: Synthetic oligonucleotide
aaaguggugcuuauuccgg

SEQ ID NO: 1635966 - RNA, 19 nt, Artificial Sequence
  Description of Artificial Sequence: Synthetic oligonucleotide
auaugauccaccagacgcc

SEQ ID NO: 1635967 - RNA, 19 nt, Artificial Sequence
  Description of Artificial Sequence: Synthetic oligonucleotide
agugaauguucuuugugga

SEQ ID NO: 1635968 - RNA, 19 nt, Artificial Sequence
  Description of Artificial Sequence: Synthetic oligonucleotide
aaacauugauuuugugaga

SEQ ID NO: 1635969 - RNA, 19 nt, Artificial Sequence
  Description of Artificial Sequence: Synthetic oligonucleotide
uccacuaccagcacuguau

SEQ ID NO: 1635970 - RNA, 19 nt, Artificial Sequence
  Description of Artificial Sequence: Synthetic oligonucleotide
gaugcaauaggacaagagu

SEQ ID NO: 1635971 - RNA, 19 nt, Artificial Sequence
  Description of Artificial Sequence: Synthetic oligonucleotide
gaugguagcugcucugaag

SEQ ID NO: 1635972 - RNA, 19 nt, Artificial Sequence
  Description of Artificial Sequence: Synthetic oligonucleotide
cugaacacuggucauacuc

SEQ ID NO: 1635973 - RNA, 19 nt, Artificial Sequence
  Description of Artificial Sequence: Synthetic oligonucleotide
auucgguuaaagugaaugu

SEQ ID NO: 1635974 - RNA, 19 nt, Artificial Sequence
  Description of Artificial Sequence: Synthetic oligonucleotide
uucuaggagcaucucuuag

SEQ ID NO: 1635975 - RNA, 19 nt, Artificial Sequence
  Description of Artificial Sequence: Synthetic oligonucleotide
agacacugagguuucuagg

SEQ ID NO: 1635976 - RNA, 19 nt, Artificial Sequence
  Description of Artificial Sequence: Synthetic oligonucleotide
uguauucgguuaaagugaa

SEQ ID NO: 1635977 - RNA, 19 nt, Artificial Sequence
  Description of Artificial Sequence: Synthetic oligonucleotide
ugaagugggagccccugag

SEQ ID NO: 1635978 - RNA, 19 nt, Artificial Sequence
  Description of Artificial Sequence: Synthetic oligonucleotide
auaggacaagaguuuuaac

SEQ ID NO: 1635979 - RNA, 19 nt, Artificial Sequence
  Description of Artificial Sequence: Synthetic oligonucleotide
aguauucagagugcaguac

SEQ ID NO: 1635980 - RNA, 19 nt, Artificial Sequence
  Description of Artificial Sequence: Synthetic oligonucleotide
ugugggagaucuaagccuc

SEQ ID NO: 1635981 - RNA, 19 nt, Artificial Sequence
  Description of Artificial Sequence: Synthetic oligonucleotide
uuccagaaaugugagaacu

SEQ ID NO: 1635982 - RNA, 19 nt, Artificial Sequence
  Description of Artificial Sequence: Synthetic oligonucleotide
ugcaauaggacaagaguuu

SEQ ID NO: 1635983 - RNA, 19 nt, Artificial Sequence
  Description of Artificial Sequence: Synthetic oligonucleotide
guugcauaggcucggauga

SEQ ID NO: 1635984 - RNA, 19 nt, Artificial Sequence
  Description of Artificial Sequence: Synthetic oligonucleotide
caacacuccaggaacaauc

SEQ ID NO: 1635985 - RNA, 19 nt, Artificial Sequence
  Description of Artificial Sequence: Synthetic oligonucleotide
uauuuaugccuuucguagu

SEQ ID NO: 1635986 - RNA, 19 nt, Artificial Sequence
  Description of Artificial Sequence: Synthetic oligonucleotide
cuguauucgguuaaaguga

SEQ ID NO: 1635987 - RNA, 19 nt, Artificial Sequence
  Description of Artificial Sequence: Synthetic oligonucleotide
augacagccaauccgggca

SEQ ID NO: 1635988 - RNA, 19 nt, Artificial Sequence
  Description of Artificial Sequence: Synthetic oligonucleotide
gaucuaagccucgagcugc

SEQ ID NO: 1635989 - RNA, 19 nt, Artificial Sequence
  Description of Artificial Sequence: Synthetic oligonucleotide
auuuugugagaagccaacg

SEQ ID NO: 1635990 - RNA, 19 nt, Artificial Sequence
  Description of Artificial Sequence: Synthetic oligonucleotide
aagacggagcacuguacug

SEQ ID NO: 1635991 - RNA, 19 nt, Artificial Sequence
  Description of Artificial Sequence: Synthetic oligonucleotide
ucggaugaaggacugcaga

SEQ ID NO: 1635992 - RNA, 19 nt, Artificial Sequence
  Description of Artificial Sequence: Synthetic oligonucleotide
aacgcauaggggccaucac

SEQ ID NO: 1635993 - RNA, 19 nt, Artificial Sequence
  Description of Artificial Sequence: Synthetic oligonucleotide
uaugccuuucguagucuag

SEQ ID NO: 1635994 - RNA, 19 nt, Artificial Sequence
  Description of Artificial Sequence: Synthetic oligonucleotide
agcgagcacaaaguggugc

SEQ ID NO: 1635995 - RNA, 19 nt, Artificial Sequence
  Description of Artificial Sequence: Synthetic oligonucleotide
uaguggaacucuaccagcu

SEQ ID NO: 1635996 - RNA, 19 nt, Artificial Sequence
  Description of Artificial Sequence: Synthetic oligonucleotide
ugugagaacucaugaaaua

SEQ ID NO: 1635997 - RNA, 19 nt, Artificial Sequence
  Description of Artificial Sequence: Synthetic oligonucleotide
acuguacugaacaauccag

SEQ ID NO: 1635998 - RNA, 19 nt, Artificial Sequence
  Description of Artificial Sequence: Synthetic oligonucleotide
uccggugaauguauucugc

SEQ ID NO: 1635999 - RNA, 19 nt, Artificial Sequence
  Description of Artificial Sequence: Synthetic oligonucleotide
gaagaugcuguaguggaac

SEQ ID NO: 1636000 - RNA, 19 nt, Artificial Sequence
  Description of Artificial Sequence: Synthetic oligonucleotide
acgaguugacauauucugc

SEQ ID NO: 1636001 - RNA, 19 nt, Artificial Sequence
  Description of Artificial Sequence: Synthetic oligonucleotide
uuugucaggacagccaaaa

SEQ ID NO: 1636002 - RNA, 19 nt, Artificial Sequence
  Description of Artificial Sequence: Synthetic oligonucleotide
aaggcgaagcgauccuguc

SEQ ID NO: 1636003 - RNA, 19 nt, Artificial Sequence
  Description of Artificial Sequence: Synthetic oligonucleotide
cuuagcccgaaacucuuag

SEQ ID NO: 1636004 - RNA, 19 nt, Artificial Sequence
  Description of Artificial Sequence: Synthetic oligonucleotide
gauuuugugagaagccaac

SEQ ID NO: 1636005 - RNA, 19 nt, Artificial Sequence
  Description of Artificial Sequence: Synthetic oligonucleotide
uuauuccgggucuuccucc

SEQ ID NO: 1636006 - RNA, 19 nt, Artificial Sequence
  Description of Artificial Sequence: Synthetic oligonucleotide
uauuccgggucuuccuccg

SEQ ID NO: 1636007 - RNA, 19 nt, Artificial Sequence
  Description of Artificial Sequence: Synthetic oligonucleotide
gugagaacucaugaaauac

SEQ ID NO: 1636008 - RNA, 19 nt, Artificial Sequence
  Description of Artificial Sequence: Synthetic oligonucleotide
guaguggaacucuaccagc

SEQ ID NO: 1636009 - RNA, 19 nt, Artificial Sequence
  Description of Artificial Sequence: Synthetic oligonucleotide
aauccgggcaguucuucca

SEQ ID NO: 1636010 - RNA, 19 nt, Artificial Sequence
  Description of Artificial Sequence: Synthetic oligonucleotide
agggaucugacauggaaaa

SEQ ID NO: 1636011 - RNA, 19 nt, Artificial Sequence
  Description of Artificial Sequence: Synthetic oligonucleotide
gaagccaacgaguugacau

SEQ ID NO: 1636012 - RNA, 19 nt, Artificial Sequence
  Description of Artificial Sequence: Synthetic oligonucleotide
cacccaucaacacuccagg

SEQ ID NO: 1636013 - RNA, 19 nt, Artificial Sequence
  Description of Artificial Sequence: Synthetic oligonucleotide
aacauccgugcagagcagg

SEQ ID NO: 1636014 - RNA, 19 nt, Artificial Sequence
  Description of Artificial Sequence: Synthetic oligonucleotide
guguagggaucugacaugg

SEQ ID NO: 1636015 - RNA, 19 nt, Artificial Sequence
  Description of Artificial Sequence: Synthetic oligonucleotide
accugagcccgucugggac

SEQ ID NO: 1636016 - RNA, 19 nt, Artificial Sequence
  Description of Artificial Sequence: Synthetic oligonucleotide
auggccaagguguagggau

SEQ ID NO: 1636017 - RNA, 19 nt, Artificial Sequence
  Description of Artificial Sequence: Synthetic oligonucleotide
agccaaaauaaucuuccau

SEQ ID NO: 1636018 - RNA, 19 nt, Artificial Sequence
  Description of Artificial Sequence: Synthetic oligonucleotide
uuuguggaucuuauaugau

SEQ ID NO: 1636019 - RNA, 19 nt, Artificial Sequence
  Description of Artificial Sequence: Synthetic oligonucleotide
uaggaccaacgcauagggg

SEQ ID NO: 1636020 - RNA, 19 nt, Artificial Sequence
  Description of Artificial Sequence: Synthetic oligonucleotide
auauucugccucugaagga

SEQ ID NO: 1636021 - RNA, 19 nt, Artificial Sequence
  Description of Artificial Sequence: Synthetic oligonucleotide
gcaacauccgugcagagca

SEQ ID NO: 1636022 - RNA, 19 nt, Artificial Sequence
  Description of Artificial Sequence: Synthetic oligonucleotide
aagcagaugguagcugcuc

SEQ ID NO: 1636023 - RNA, 19 nt, Artificial Sequence
  Description of Artificial Sequence: Synthetic oligonucleotide
guauucugcaggugaagac

SEQ ID NO: 1636024 - RNA, 19 nt, Artificial Sequence
  Description of Artificial Sequence: Synthetic oligonucleotide
uggcaugggauuucugggc

SEQ ID NO: 1636025 - RNA, 19 nt, Artificial Sequence
  Description of Artificial Sequence: Synthetic oligonucleotide
acguaaucuucaaauacug

SEQ ID NO: 1636026 - RNA, 19 nt, Artificial Sequence
  Description of Artificial Sequence: Synthetic oligonucleotide
cagagugcaguacuucagc

SEQ ID NO: 1636027 - RNA, 19 nt, Artificial Sequence
  Description of Artificial Sequence: Synthetic oligonucleotide
gacauauucugccucugaa

SEQ ID NO: 1636028 - RNA, 19 nt, Artificial Sequence
  Description of Artificial Sequence: Synthetic oligonucleotide
auaaggauauuuaugccuu

SEQ ID NO: 1636029 - RNA, 19 nt, Artificial Sequence
  Description of Artificial Sequence: Synthetic oligonucleotide
ugcacguaaucuucaaaua

SEQ ID NO: 1636030 - RNA, 19 nt, Artificial Sequence
  Description of Artificial Sequence: Synthetic oligonucleotide
agagcuuucuuugcccagg

SEQ ID NO: 1636031 - RNA, 19 nt, Artificial Sequence
  Description of Artificial Sequence: Synthetic oligonucleotide
aguugagauaaggauauuu

SEQ ID NO: 1636032 - RNA, 19 nt, Artificial Sequence
  Description of Artificial Sequence: Synthetic oligonucleotide
uggaacucuaccagcucac

SEQ ID NO: 1636033 - RNA, 19 nt, Artificial Sequence
  Description of Artificial Sequence: Synthetic oligonucleotide
gcaaucauccuuugucagg

SEQ ID NO: 1636034 - RNA, 19 nt, Artificial Sequence
  Description of Artificial Sequence: Synthetic oligonucleotide
gguugcauaggcucggaug

SEQ ID NO: 1636035 - RNA, 19 nt, Artificial Sequence
  Description of Artificial Sequence: Synthetic oligonucleotide
uucgguuaaagugaauguu

SEQ ID NO: 1636036 - RNA, 19 nt, Artificial Sequence
  Description of Artificial Sequence: Synthetic oligonucleotide
ugacagccaauccgggcag

SEQ ID NO: 1636037 - RNA, 19 nt, Artificial Sequence
  Description of Artificial Sequence: Synthetic oligonucleotide
augcaauaggacaagaguu

SEQ ID NO: 1636038 - RNA, 19 nt, Artificial Sequence
  Description of Artificial Sequence: Synthetic oligonucleotide
cacauggccaagguguagg

SEQ ID NO: 1636039 - RNA, 19 nt, Artificial Sequence
  Description of Artificial Sequence: Synthetic oligonucleotide
gcacguaaucuucaaauac

SEQ ID NO: 1636040 - RNA, 19 nt, Artificial Sequence
  Description of Artificial Sequence: Synthetic oligonucleotide
uaugauccaccagacgcca

SEQ ID NO: 1636041 - RNA, 19 nt, Artificial Sequence
  Description of Artificial Sequence: Synthetic oligonucleotide
cagggugugaacgaagaug

SEQ ID NO: 1636042 - RNA, 19 nt, Artificial Sequence
  Description of Artificial Sequence: Synthetic oligonucleotide
cuucagcgagcacaaagug

SEQ ID NO: 1636043 - RNA, 19 nt, Artificial Sequence
  Description of Artificial Sequence: Synthetic oligonucleotide
agccaauccgggcaguucu

SEQ ID NO: 1636044 - RNA, 19 nt, Artificial Sequence
  Description of Artificial Sequence: Synthetic oligonucleotide
aagccaacgaguugacaua

SEQ ID NO: 1636045 - RNA, 19 nt, Artificial Sequence
  Description of Artificial Sequence: Synthetic oligonucleotide
gaacacuggucauacucga

SEQ ID NO: 1636046 - RNA, 19 nt, Artificial Sequence
  Description of Artificial Sequence: Synthetic oligonucleotide
caggggaugcaauaggaca

SEQ ID NO: 1636047 - RNA, 19 nt, Artificial Sequence
  Description of Artificial Sequence: Synthetic oligonucleotide
acucgaguauucagagugc

SEQ ID NO: 1636048 - RNA, 19 nt, Artificial Sequence
  Description of Artificial Sequence: Synthetic oligonucleotide
uuuuaaccugagcccgucu

SEQ ID NO: 1636049 - RNA, 19 nt, Artificial Sequence
  Description of Artificial Sequence: Synthetic oligonucleotide
cuuauuccgggucuuccuc

SEQ ID NO: 1636050 - RNA, 19 nt, Artificial Sequence
  Description of Artificial Sequence: Synthetic oligonucleotide
ugggcacuaggaccaacgc

SEQ ID NO: 1636051 - RNA, 19 nt, Artificial Sequence
  Description of Artificial Sequence: Synthetic oligonucleotide
acuucagcgagcacaaagu

SEQ ID NO: 1636052 - RNA, 19 nt, Artificial Sequence
  Description of Artificial Sequence: Synthetic oligonucleotide
auccggugaauguauucug

SEQ ID NO: 1636053 - RNA, 19 nt, Artificial Sequence
  Description of Artificial Sequence: Synthetic oligonucleotide
auccgugcagagcaggacu

SEQ ID NO: 1636054 - RNA, 19 nt, Artificial Sequence
  Description of Artificial Sequence: Synthetic oligonucleotide
ugcauaggcucggaugaag

SEQ ID NO: 1636055 - RNA, 19 nt, Artificial Sequence
  Description of Artificial Sequence: Synthetic oligonucleotide
acgcauaggggccaucacu

SEQ ID NO: 1636056 - RNA, 19 nt, Artificial Sequence
  Description of Artificial Sequence: Synthetic oligonucleotide
caauccaggugacgugugg

SEQ ID NO: 1636057 - RNA, 19 nt, Artificial Sequence
  Description of Artificial Sequence: Synthetic oligonucleotide
cgaguugacauauucugcc

SEQ ID NO: 1636058 - RNA, 19 nt, Artificial Sequence
  Description of Artificial Sequence: Synthetic oligonucleotide
cucguucucggauuuccug

SEQ ID NO: 1636059 - RNA, 19 nt, Artificial Sequence
  Description of Artificial Sequence: Synthetic oligonucleotide
guuccagaaaugugagaac

SEQ ID NO: 1636060 - RNA, 19 nt, Artificial Sequence
  Description of Artificial Sequence: Synthetic oligonucleotide
guagguugcauaggcucgg

SEQ ID NO: 1636061 - RNA, 19 nt, Artificial Sequence
  Description of Artificial Sequence: Synthetic oligonucleotide
ugcuuauuccgggucuucc

SEQ ID NO: 1636062 - RNA, 19 nt, Artificial Sequence
  Description of Artificial Sequence: Synthetic oligonucleotide
caugggauuucugggcucc

SEQ ID NO: 1636063 - RNA, 19 nt, Artificial Sequence
  Description of Artificial Sequence: Synthetic oligonucleotide
ggcgaagcgauccugucug

SEQ ID NO: 1636064 - RNA, 19 nt, Artificial Sequence
  Description of Artificial Sequence: Synthetic oligonucleotide
uuuaugccuuucguagucu

SEQ ID NO: 1636065 - RNA, 19 nt, Artificial Sequence
  Description of Artificial Sequence: Synthetic oligonucleotide
uuucuaggagcaucucuua

SEQ ID NO: 1636066 - RNA, 19 nt, Artificial Sequence
  Description of Artificial Sequence: Synthetic oligonucleotide
gaguauucagagugcagua

SEQ ID NO: 1636067 - RNA, 19 nt, Artificial Sequence
  Description of Artificial Sequence: Synthetic oligonucleotide
gucugcaauacuguggcuc

SEQ ID NO: 1636068 - RNA, 19 nt, Artificial Sequence
  Description of Artificial Sequence: Synthetic oligonucleotide
uccaggugacgugugggag

SEQ ID NO: 1636069 - RNA, 19 nt, Artificial Sequence
  Description of Artificial Sequence: Synthetic oligonucleotide
gugggcacuaggaccaacg

SEQ ID NO: 1636070 - RNA, 19 nt, Artificial Sequence
  Description of Artificial Sequence: Synthetic oligonucleotide
gaagacggagcacuguacu

SEQ ID NO: 1636071 - RNA, 19 nt, Artificial Sequence
  Description of Artificial Sequence: Synthetic oligonucleotide
ugacgugugggagaucuaa

SEQ ID NO: 1636072 - RNA, 19 nt, Artificial Sequence
  Description of Artificial Sequence: Synthetic oligonucleotide
agcccgaaacucuuagcca

SEQ ID NO: 1636073 - RNA, 19 nt, Artificial Sequence
  Description of Artificial Sequence: Synthetic oligonucleotide
ggugugaacgaagaugcug

SEQ ID NO: 1636074 - RNA, 19 nt, Artificial Sequence
  Description of Artificial Sequence: Synthetic oligonucleotide
cacuguacugaacaaucca

SEQ ID NO: 1636075 - RNA, 19 nt, Artificial Sequence
  Description of Artificial Sequence: Synthetic oligonucleotide
cucggaugaaggacugcag

SEQ ID NO: 1636076 - RNA, 19 nt, Artificial Sequence
  Description of Artificial Sequence: Synthetic oligonucleotide
cacguaaucuucaaauacu

SEQ ID NO: 1636077 - RNA, 19 nt, Artificial Sequence
  Description of Artificial Sequence: Synthetic oligonucleotide
agugcacguaaucuucaaa

SEQ ID NO: 1636078 - RNA, 19 nt, Artificial Sequence
  Description of Artificial Sequence: Synthetic oligonucleotide
uuaugccuuucguagucua

SEQ ID NO: 1636079 - RNA, 19 nt, Artificial Sequence
  Description of Artificial Sequence: Synthetic oligonucleotide
gauuuccugggagccagug

SEQ ID NO: 1636080 - RNA, 19 nt, Artificial Sequence
  Description of Artificial Sequence: Synthetic oligonucleotide
ucugaagugggagccccug

SEQ ID NO: 1636081 - RNA, 19 nt, Artificial Sequence
  Description of Artificial Sequence: Synthetic oligonucleotide
agacggagcacuguacuga

SEQ ID NO: 1636082 - RNA, 19 nt, Artificial Sequence
  Description of Artificial Sequence: Synthetic oligonucleotide
ggagccaaaaugagcaagc

SEQ ID NO: 1636083 - RNA, 19 nt, Artificial Sequence
  Description of Artificial Sequence: Synthetic oligonucleotide
ggaugcaauaggacaagag

SEQ ID NO: 1636084 - RNA, 19 nt, Artificial Sequence
  Description of Artificial Sequence: Synthetic oligonucleotide
ugguagcugcucugaagug

SEQ ID NO: 1636085 - RNA, 19 nt, Artificial Sequence
  Description of Artificial Sequence: Synthetic oligonucleotide
uugacauauucugccucug

SEQ ID NO: 1636086 - RNA, 19 nt, Artificial Sequence
  Description of Artificial Sequence: Synthetic oligonucleotide
uccgugcagagcaggacuc

SEQ ID NO: 1636087 - RNA, 19 nt, Artificial Sequence
  Description of Artificial Sequence: Synthetic oligonucleotide
cugaacaauccaggugacg

SEQ ID NO: 1636088 - RNA, 19 nt, Artificial Sequence
  Description of Artificial Sequence: Synthetic oligonucleotide
gacagggugugaacgaaga

SEQ ID NO: 1636089 - RNA, 19 nt, Artificial Sequence
  Description of Artificial Sequence: Synthetic oligonucleotide
gcaucucuuagcccgaaac

SEQ ID NO: 1636090 - RNA, 19 nt, Artificial Sequence
  Description of Artificial Sequence: Synthetic oligonucleotide
augugagugcuugaagaga

SEQ ID NO: 1636091 - RNA, 19 nt, Artificial Sequence
  Description of Artificial Sequence: Synthetic oligonucleotide
cacaggggaugcaauagga

SEQ ID NO: 1636092 - RNA, 19 nt, Artificial Sequence
  Description of Artificial Sequence: Synthetic oligonucleotide
uguagggaucugacaugga

SEQ ID NO: 1636093 - RNA, 19 nt, Artificial Sequence
  Description of Artificial Sequence: Synthetic oligonucleotide
gacgugugggagaucuaag

SEQ ID NO: 1636094 - RNA, 19 nt, Artificial Sequence
  Description of Artificial Sequence: Synthetic oligonucleotide
ccaacgaguugacauauuc

SEQ ID NO: 1636095 - RNA, 19 nt, Artificial Sequence
  Description of Artificial Sequence: Synthetic oligonucleotide
auacugucugcaauacugu

SEQ ID NO: 1636096 - RNA, 19 nt, Artificial Sequence
  Description of Artificial Sequence: Synthetic oligonucleotide
gguguagggaucugacaug

SEQ ID NO: 1636097 - RNA, 19 nt, Artificial Sequence
  Description of Artificial Sequence: Synthetic oligonucleotide
uguggcucguucucggauu

SEQ ID NO: 1636098 - RNA, 19 nt, Artificial Sequence
  Description of Artificial Sequence: Synthetic oligonucleotide
acgccaggaguugagauaa

SEQ ID NO: 1636099 - RNA, 19 nt, Artificial Sequence
  Description of Artificial Sequence: Synthetic oligonucleotide
aggcgaagcgauccugucu

SEQ ID NO: 1636100 - RNA, 19 nt, Artificial Sequence
  Description of Artificial Sequence: Synthetic oligonucleotide
ccgaaggaauuucaguggc

SEQ ID NO: 1636101 - RNA, 19 nt, Artificial Sequence
  Description of Artificial Sequence: Synthetic oligonucleotide
agcucacaacuugagaaaa

SEQ ID NO: 1636102 - RNA, 19 nt, Artificial Sequence
  Description of Artificial Sequence: Synthetic oligonucleotide
aggggaugcaauaggacaa

SEQ ID NO: 1636103 - RNA, 19 nt, Artificial Sequence
  Description of Artificial Sequence: Synthetic oligonucleotide
ucuuagcccgaaacucuua

SEQ ID NO: 1636104 - RNA, 19 nt, Artificial Sequence
  Description of Artificial Sequence: Synthetic oligonucleotide
uugucaggacagccaaaau

SEQ ID NO: 1636105 - RNA, 19 nt, Artificial Sequence
  Description of Artificial Sequence: Synthetic oligonucleotide
gugugggagaucuaagccu

SEQ ID NO: 1636106 - RNA, 19 nt, Artificial Sequence
  Description of Artificial Sequence: Synthetic oligonucleotide
ucugaacacuggucauacu

SEQ ID NO: 1636107 - RNA, 19 nt, Artificial Sequence
  Description of Artificial Sequence: Synthetic oligonucleotide
cucuuagccacauggccaa

SEQ ID NO: 1636108 - RNA, 19 nt, Artificial Sequence
  Description of Artificial Sequence: Synthetic oligonucleotide
gaguugacauauucugccu

SEQ ID NO: 1636109 - RNA, 19 nt, Artificial Sequence
  Description of Artificial Sequence: Synthetic oligonucleotide
gugaagacggagcacugua

SEQ ID NO: 1636110 - RNA, 19 nt, Artificial Sequence
  Description of Artificial Sequence: Synthetic oligonucleotide
gcccgaaacucuuagccac

SEQ ID NO: 1636111 - RNA, 19 nt, Artificial Sequence
  Description of Artificial Sequence: Synthetic oligonucleotide
cgagcugcaacauccgugc

SEQ ID NO: 1636112 - RNA, 19 nt, Artificial Sequence
  Description of Artificial Sequence: Synthetic oligonucleotide
gacgccaggaguugagaua

SEQ ID NO: 1636113 - RNA, 19 nt, Artificial Sequence
  Description of Artificial Sequence: Synthetic oligonucleotide
acaaggcgaagcgauccug

SEQ ID NO: 1636114 - RNA, 19 nt, Artificial Sequence
  Description of Artificial Sequence: Synthetic oligonucleotide
ucaacacuccaggaacaau

SEQ ID NO: 1636115 - RNA, 19 nt, Artificial Sequence
  Description of Artificial Sequence: Synthetic oligonucleotide
acccaucaacacuccagga

SEQ ID NO: 1636116 - RNA, 19 nt, Artificial Sequence
  Description of Artificial Sequence: Synthetic oligonucleotide
cacacaaggcgaagcgauc

SEQ ID NO: 1636117 - RNA, 19 nt, Artificial Sequence
  Description of Artificial Sequence: Synthetic oligonucleotide
ggauauuuaugccuuucgu

SEQ ID NO: 1636118 - RNA, 19 nt, Artificial Sequence
  Description of Artificial Sequence: Synthetic oligonucleotide
aggagacuguccucucacu

SEQ ID NO: 1636119 - RNA, 19 nt, Artificial Sequence
  Description of Artificial Sequence: Synthetic oligonucleotide
ccgacuuccucuucucucc

SEQ ID NO: 1636120 - RNA, 19 nt, Artificial Sequence
  Description of Artificial Sequence: Synthetic oligonucleotide
ugggagaucuaagccucga

SEQ ID NO: 1636121 - RNA, 19 nt, Artificial Sequence
  Description of Artificial Sequence: Synthetic oligonucleotide
agaugguagcugcucugaa

SEQ ID NO: 1636122 - RNA, 19 nt, Artificial Sequence
  Description of Artificial Sequence: Synthetic oligonucleotide
gagggucaggccuuuucaa

SEQ ID NO: 1636123 - RNA, 19 nt, Artificial Sequence
  Description of Artificial Sequence: Synthetic oligonucleotide
gacggagcacuguacugaa

SEQ ID NO: 1636124 - RNA, 19 nt, Artificial Sequence
  Description of Artificial Sequence: Synthetic oligonucleotide
cuuccaauccggugaaugu

SEQ ID NO: 1636125 - RNA, 19 nt, Artificial Sequence
  Description of Artificial Sequence: Synthetic oligonucleotide
aguuuuaaccugagcccgu

SEQ ID NO: 1636126 - RNA, 19 nt, Artificial Sequence
  Description of Artificial Sequence: Synthetic oligonucleotide
augaaauacagagguccuu

SEQ ID NO: 1636127 - RNA, 19 nt, Artificial Sequence
  Description of Artificial Sequence: Synthetic oligonucleotide
caacgaguugacauauucu

SEQ ID NO: 1636128 - RNA, 19 nt, Artificial Sequence
  Description of Artificial Sequence: Synthetic oligonucleotide
cacuaccagcacuguauuc

SEQ ID NO: 1636129 - RNA, 19 nt, Artificial Sequence
  Description of Artificial Sequence: Synthetic oligonucleotide
ggaauuucaguggccagga

SEQ ID NO: 1636130 - RNA, 19 nt, Artificial Sequence
  Description of Artificial Sequence: Synthetic oligonucleotide
ugucugcaauacuguggcu

SEQ ID NO: 1636131 - RNA, 19 nt, Artificial Sequence
  Description of Artificial Sequence: Synthetic oligonucleotide
gggagaucuaagccucgag

SEQ ID NO: 1636132 - RNA, 19 nt, Artificial Sequence
  Description of Artificial Sequence: Synthetic oligonucleotide
guuuuaaccugagcccguc

SEQ ID NO: 1636133 - RNA, 19 nt, Artificial Sequence
  Description of Artificial Sequence: Synthetic oligonucleotide
caauaggacaagaguuuua

SEQ ID NO: 1636134 - RNA, 19 nt, Artificial Sequence
  Description of Artificial Sequence: Synthetic oligonucleotide
agccaacgaguugacauau

SEQ ID NO: 1636135 - RNA, 19 nt, Artificial Sequence
  Description of Artificial Sequence: Synthetic oligonucleotide
gagugcacguaaucuucaa

SEQ ID NO: 1636136 - RNA, 19 nt, Artificial Sequence
  Description of Artificial Sequence: Synthetic oligonucleotide
ggaguugagauaaggauau

SEQ ID NO: 1636137 - RNA, 19 nt, Artificial Sequence
  Description of Artificial Sequence: Synthetic oligonucleotide
caucucuuagcccgaaacu

SEQ ID NO: 1636138 - RNA, 19 nt, Artificial Sequence
  Description of Artificial Sequence: Synthetic oligonucleotide
uguugccaugcagccgaag

SEQ ID NO: 1636139 - RNA, 19 nt, Artificial Sequence
  Description of Artificial Sequence: Synthetic oligonucleotide
ggaccaacgcauaggggcc

SEQ ID NO: 1636140 - RNA, 19 nt, Artificial Sequence
  Description of Artificial Sequence: Synthetic oligonucleotide
gucuccuuuuaaagcaauc

SEQ ID NO: 1636141 - RNA, 19 nt, Artificial Sequence
  Description of Artificial Sequence: Synthetic oligonucleotide
ggcaagacagggugugaac

SEQ ID NO: 1636142 - RNA, 19 nt, Artificial Sequence
  Description of Artificial Sequence: Synthetic oligonucleotide
agccccugagcggcaagac

SEQ ID NO: 1636143 - RNA, 19 nt, Artificial Sequence
  Description of Artificial Sequence: Synthetic oligonucleotide
agaagccaacgaguugaca

SEQ ID NO: 1636144 - RNA, 19 nt, Artificial Sequence
  Description of Artificial Sequence: Synthetic oligonucleotide
cauccgugcagagcaggac

SEQ ID NO: 1636145 - RNA, 19 nt, Artificial Sequence
  Description of Artificial Sequence: Synthetic oligonucleotide
gaauuucaguggccaggaa

SEQ ID NO: 1636146 - RNA, 19 nt, Artificial Sequence
  Description of Artificial Sequence: Synthetic oligonucleotide
gcugcaacauccgugcaga

SEQ ID NO: 1636147 - RNA, 19 nt, Artificial Sequence
  Description of Artificial Sequence: Synthetic oligonucleotide
caacgcauaggggccauca

SEQ ID NO: 1636148 - RNA, 19 nt, Artificial Sequence
  Description of Artificial Sequence: Synthetic oligonucleotide
gacuguccucucacuggag

SEQ ID NO: 1636149 - RNA, 19 nt, Artificial Sequence
  Description of Artificial Sequence: Synthetic oligonucleotide
ucucacuggagugcacgua

SEQ ID NO: 1636150 - RNA, 19 nt, Artificial Sequence
  Description of Artificial Sequence: Synthetic oligonucleotide
gcagccgaaggaauuucag

SEQ ID NO: 1636151 - RNA, 19 nt, Artificial Sequence
  Description of Artificial Sequence: Synthetic oligonucleotide
ggcacuaggaccaacgcau

SEQ ID NO: 1636152 - RNA, 19 nt, Artificial Sequence
  Description of Artificial Sequence: Synthetic oligonucleotide
ccucucacuggagugcacg

SEQ ID NO: 1636153 - RNA, 19 nt, Artificial Sequence
  Description of Artificial Sequence: Synthetic oligonucleotide
cguucucggauuuccuggg

SEQ ID NO: 1636154 - RNA, 19 nt, Artificial Sequence
  Description of Artificial Sequence: Synthetic oligonucleotide
ggugacgugugggagaucu

SEQ ID NO: 1636155 - RNA, 19 nt, Artificial Sequence
  Description of Artificial Sequence: Synthetic oligonucleotide
agguugcauaggcucggau

SEQ ID NO: 1636156 - RNA, 19 nt, Artificial Sequence
  Description of Artificial Sequence: Synthetic oligonucleotide
gcaauacuguggcucguuc

SEQ ID NO: 1636157 - RNA, 19 nt, Artificial Sequence
  Description of Artificial Sequence: Synthetic oligonucleotide
ggggaugcaauaggacaag

SEQ ID NO: 1636158 - RNA, 19 nt, Artificial Sequence
  Description of Artificial Sequence: Synthetic oligonucleotide
agcaucucuuagcccgaaa

SEQ ID NO: 1636159 - RNA, 19 nt, Artificial Sequence
  Description of Artificial Sequence: Synthetic oligonucleotide
uccucucacuggagugcac

SEQ ID NO: 1636160 - RNA, 19 nt, Artificial Sequence
  Description of Artificial Sequence: Synthetic oligonucleotide
cagaugguagcugcucuga

SEQ ID NO: 1636161 - RNA, 19 nt, Artificial Sequence
  Description of Artificial Sequence: Synthetic oligonucleotide
cagaaaugugagaacucau

SEQ ID NO: 1636162 - RNA, 19 nt, Artificial Sequence
  Description of Artificial Sequence: Synthetic oligonucleotide
gagccaaaaugagcaagcu

SEQ ID NO: 1636163 - RNA, 19 nt, Artificial Sequence
  Description of Artificial Sequence: Synthetic oligonucleotide
acggagcacuguacugaac

SEQ ID NO: 1636164 - RNA, 19 nt, Artificial Sequence
  Description of Artificial Sequence: Synthetic oligonucleotide
gugcaguacuucagcgagc

SEQ ID NO: 1636165 - RNA, 19 nt, Artificial Sequence
  Description of Artificial Sequence: Synthetic oligonucleotide
ccugagcccgucugggacc

SEQ ID NO: 1636166 - RNA, 19 nt, Artificial Sequence
  Description of Artificial Sequence: Synthetic oligonucleotide
cagcgagcacaaaguggug

SEQ ID NO: 1636167 - RNA, 19 nt, Artificial Sequence
  Description of Artificial Sequence: Synthetic oligonucleotide
ccucgagcugcaacauccg

SEQ ID NO: 1636168 - RNA, 19 nt, Artificial Sequence
  Description of Artificial Sequence: Synthetic oligonucleotide
gaccaacgcauaggggcca

SEQ ID NO: 1636169 - RNA, 19 nt, Artificial Sequence
  Description of Artificial Sequence: Synthetic oligonucleotide
cuggagugcacguaaucuu

SEQ ID NO: 1636170 - RNA, 19 nt, Artificial Sequence
  Description of Artificial Sequence: Synthetic oligonucleotide
gagccaguggcaugggauu

SEQ ID NO: 1636171 - RNA, 19 nt, Artificial Sequence
  Description of Artificial Sequence: Synthetic oligonucleotide
ggagugcacguaaucuuca

SEQ ID NO: 1636172 - RNA, 19 nt, Artificial Sequence
  Description of Artificial Sequence: Synthetic oligonucleotide
ccuuucguagucuagcuuu

SEQ ID NO: 1636173 - RNA, 19 nt, Artificial Sequence
  Description of Artificial Sequence: Synthetic oligonucleotide
ucuaagccucgagcugcaa

SEQ ID NO: 1636174 - RNA, 19 nt, Artificial Sequence
  Description of Artificial Sequence: Synthetic oligonucleotide
caccagacgccaggaguug

SEQ ID NO: 1636175 - RNA, 19 nt, Artificial Sequence
  Description of Artificial Sequence: Synthetic oligonucleotide
cuuucguagucuagcuuuu

SEQ ID NO: 1636176 - RNA, 19 nt, Artificial Sequence
  Description of Artificial Sequence: Synthetic oligonucleotide
gcuuauuccgggucuuccu

SEQ ID NO: 1636177 - RNA, 19 nt, Artificial Sequence
  Description of Artificial Sequence: Synthetic oligonucleotide
cagccaauccgggcaguuc

SEQ ID NO: 1636178 - RNA, 19 nt, Artificial Sequence
  Description of Artificial Sequence: Synthetic oligonucleotide
augaaggacugcagagcuu

SEQ ID NO: 1636179 - RNA, 19 nt, Artificial Sequence
  Description of Artificial Sequence: Synthetic oligonucleotide
gcaugggauuucugggcuc

SEQ ID NO: 1636180 - RNA, 19 nt, Artificial Sequence
  Description of Artificial Sequence: Synthetic oligonucleotide
cucucacuggagugcacgu

SEQ ID NO: 1636181 - RNA, 19 nt, Artificial Sequence
  Description of Artificial Sequence: Synthetic oligonucleotide
gugcuuauuccgggucuuc

SEQ ID NO: 1636182 - RNA, 19 nt, Artificial Sequence
  Description of Artificial Sequence: Synthetic oligonucleotide
gcgagcacaaaguggugcu

SEQ ID NO: 1636183 - RNA, 19 nt, Artificial Sequence
  Description of Artificial Sequence: Synthetic oligonucleotide
cugagcggcaagacagggu

SEQ ID NO: 1636184 - RNA, 19 nt, Artificial Sequence
  Description of Artificial Sequence: Synthetic oligonucleotide
ccgcacaggggcaucucug

SEQ ID NO: 1636185 - RNA, 19 nt, Artificial Sequence
  Description of Artificial Sequence: Synthetic oligonucleotide
ggacagccaaaauaaucuu

SEQ ID NO: 1636186 - RNA, 19 nt, Artificial Sequence
  Description of Artificial Sequence: Synthetic oligonucleotide
caugcagccgaaggaauuu

SEQ ID NO: 1636187 - RNA, 19 nt, Artificial Sequence
  Description of Artificial Sequence: Synthetic oligonucleotide
cacaaggcgaagcgauccu

SEQ ID NO: 1636188 - RNA, 19 nt, Artificial Sequence
  Description of Artificial Sequence: Synthetic oligonucleotide
gcgaagcgauccugucugc

SEQ ID NO: 1636189 - RNA, 19 nt, Artificial Sequence
  Description of Artificial Sequence: Synthetic oligonucleotide
cucgagcugcaacauccgu

SEQ ID NO: 1636190 - RNA, 19 nt, Artificial Sequence
  Description of Artificial Sequence: Synthetic oligonucleotide
gcaauaggacaagaguuuu

SEQ ID NO: 1636191 - RNA, 19 nt, Artificial Sequence
  Description of Artificial Sequence: Synthetic oligonucleotide
accaacgcauaggggccau

SEQ ID NO: 1636192 - RNA, 19 nt, Artificial Sequence
  Description of Artificial Sequence: Synthetic oligonucleotide
ccaagguguagggaucuga

SEQ ID NO: 1636193 - RNA, 19 nt, Artificial Sequence
  Description of Artificial Sequence: Synthetic oligonucleotide
ccgagggucaggccuuuuc

SEQ ID NO: 1636194 - RNA, 19 nt, Artificial Sequence
  Description of Artificial Sequence: Synthetic oligonucleotide
uggcucguucucggauuuc

SEQ ID NO: 1636195 - RNA, 19 nt, Artificial Sequence
  Description of Artificial Sequence: Synthetic oligonucleotide
cgaguauucagagugcagu

SEQ ID NO: 1636196 - RNA, 19 nt, Artificial Sequence
  Description of Artificial Sequence: Synthetic oligonucleotide
gcacacaaggcgaagcgau

SEQ ID NO: 1636197 - RNA, 19 nt, Artificial Sequence
  Description of Artificial Sequence: Synthetic oligonucleotide
gagcaucucuuagcccgaa

SEQ ID NO: 1636198 - RNA, 19 nt, Artificial Sequence
  Description of Artificial Sequence: Synthetic oligonucleotide
gaccgcacaggggcaucuc

SEQ ID NO: 1636199 - RNA, 19 nt, Artificial Sequence
  Description of Artificial Sequence: Synthetic oligonucleotide
aggugacgugugggagauc

SEQ ID NO: 1636200 - RNA, 19 nt, Artificial Sequence
  Description of Artificial Sequence: Synthetic oligonucleotide
cccgaaacucuuagccaca

SEQ ID NO: 1636201 - RNA, 19 nt, Artificial Sequence
  Description of Artificial Sequence: Synthetic oligonucleotide
cgagggucaggccuuuuca

SEQ ID NO: 1636202 - RNA, 19 nt, Artificial Sequence
  Description of Artificial Sequence: Synthetic oligonucleotide
cgaaacucuuagccacaug

SEQ ID NO: 1636203 - RNA, 19 nt, Artificial Sequence
  Description of Artificial Sequence: Synthetic oligonucleotide
caggggcaucucugccuuc

SEQ ID NO: 1636204 - RNA, 19 nt, Artificial Sequence
  Description of Artificial Sequence: Synthetic oligonucleotide
ccaauccgggcaguucuuc

SEQ ID NO: 1636205 - RNA, 19 nt, Artificial Sequence
  Description of Artificial Sequence: Synthetic oligonucleotide
caggugacgugugggagau

SEQ ID NO: 1636206 - RNA, 19 nt, Artificial Sequence
  Description of Artificial Sequence: Synthetic oligonucleotide
cucugaagugggagccccu

SEQ ID NO: 1636207 - RNA, 19 nt, Artificial Sequence
  Description of Artificial Sequence: Synthetic oligonucleotide
ccgugcagagcaggacucc

SEQ ID NO: 1636208 - RNA, 19 nt, Artificial Sequence
  Description of Artificial Sequence: Synthetic oligonucleotide
guauucgguuaaagugaau

SEQ ID NO: 1636209 - RNA, 19 nt, Artificial Sequence
  Description of Artificial Sequence: Synthetic oligonucleotide
ccaccagacgccaggaguu

SEQ ID NO: 1636210 - RNA, 19 nt, Artificial Sequence
  Description of Artificial Sequence: Synthetic oligonucleotide
auguugccaugcagccgaa

SEQ ID NO: 1636211 - RNA, 19 nt, Artificial Sequence
  Description of Artificial Sequence: Synthetic oligonucleotide
gggguagguugcauaggcu

SEQ ID NO: 1636212 - RNA, 19 nt, Artificial Sequence
  Description of Artificial Sequence: Synthetic oligonucleotide
uccgagggucaggccuuuu

SEQ ID NO: 1636213 - RNA, 19 nt, Artificial Sequence
  Description of Artificial Sequence: Synthetic oligonucleotide
cauccacuaccagcacugu

SEQ ID NO: 1636214 - RNA, 19 nt, Artificial Sequence
  Description of Artificial Sequence: Synthetic oligonucleotide
gugacgugugggagaucua

SEQ ID NO: 1636215 - RNA, 19 nt, Artificial Sequence
  Description of Artificial Sequence: Synthetic oligonucleotide
ggugcuuauuccgggucuu

SEQ ID NO: 1636216 - RNA, 19 nt, Artificial Sequence
  Description of Artificial Sequence: Synthetic oligonucleotide
cugcaauacuguggcucgu

SEQ ID NO: 1636217 - RNA, 19 nt, Artificial Sequence
  Description of Artificial Sequence: Synthetic oligonucleotide
cugagguuucuaggagcau

SEQ ID NO: 1636218 - RNA, 19 nt, Artificial Sequence
  Description of Artificial Sequence: Synthetic oligonucleotide
gggugugaacgaagaugcu

SEQ ID NO: 1636219 - RNA, 19 nt, Artificial Sequence
  Description of Artificial Sequence: Synthetic oligonucleotide
ggaccgcacaggggcaucu

SEQ ID NO: 1636220 - RNA, 19 nt, Artificial Sequence
  Description of Artificial Sequence: Synthetic oligonucleotide
ccacuaccagcacuguauu

SEQ ID NO: 1636221 - RNA, 19 nt, Artificial Sequence
  Description of Artificial Sequence: Synthetic oligonucleotide
ccaacgcauaggggccauc

SEQ ID NO: 1636222 - RNA, 19 nt, Artificial Sequence
  Description of Artificial Sequence: Synthetic oligonucleotide
cggcaagacagggugugaa

SEQ ID NO: 1636223 - RNA, 19 nt, Artificial Sequence
  Description of Artificial Sequence: Synthetic oligonucleotide
ggauuuccugggagccagu

SEQ ID NO: 1636224 - RNA, 19 nt, Artificial Sequence
  Description of Artificial Sequence: Synthetic oligonucleotide
ccgaaacucuuagccacau

SEQ ID NO: 1636225 - RNA, 19 nt, Artificial Sequence
  Description of Artificial Sequence: Synthetic oligonucleotide
cgaagcgauccugucugcu

SEQ ID NO: 1636226 - RNA, 19 nt, Artificial Sequence
  Description of Artificial Sequence: Synthetic oligonucleotide
gccaacgaguugacauauu

SEQ ID NO: 1636227 - RNA, 19 nt, Artificial Sequence
  Description of Artificial Sequence: Synthetic oligonucleotide
gccaauccgggcaguucuu

SEQ ID NO: 1636228 - RNA, 19 nt, Artificial Sequence
  Description of Artificial Sequence: Synthetic oligonucleotide
gcgauccugucugcuucau

SEQ ID NO: 1636229 - RNA, 19 nt, Artificial Sequence
  Description of Artificial Sequence: Synthetic oligonucleotide
cuccgagggucaggccuuu

SEQ ID NO: 1636230 - RNA, 19 nt, Artificial Sequence
  Description of Artificial Sequence: Synthetic oligonucleotide
aaauucauuguauucaagc

SEQ ID NO: 1636231 - RNA, 19 nt, Artificial Sequence
  Description of Artificial Sequence: Synthetic oligonucleotide
uuagaagagaaauucauug

SEQ ID NO: 1636232 - RNA, 19 nt, Artificial Sequence
  Description of Artificial Sequence: Synthetic oligonucleotide
ugcuuaaugacauuagaag

SEQ ID NO: 1636233 - RNA, 19 nt, Artificial Sequence
  Description of Artificial Sequence: Synthetic oligonucleotide
uuauaugucaucucuuuag

SEQ ID NO: 1636234 - RNA, 19 nt, Artificial Sequence
  Description of Artificial Sequence: Synthetic oligonucleotide
cuuaaugacauuagaagag

SEQ ID NO: 1636235 - RNA, 19 nt, Artificial Sequence
  Description of Artificial Sequence: Synthetic oligonucleotide
uguucgaucagugugauug

SEQ ID NO: 1636236 - RNA, 19 nt, Artificial Sequence
  Description of Artificial Sequence: Synthetic oligonucleotide
aauucauuguauucaagca

SEQ ID NO: 1636237 - RNA, 19 nt, Artificial Sequence
  Description of Artificial Sequence: Synthetic oligonucleotide
gaauaaggaaaauacgagc

SEQ ID NO: 1636238 - RNA, 19 nt, Artificial Sequence
  Description of Artificial Sequence: Synthetic oligonucleotide
aagaauaaggaaaauacga

SEQ ID NO: 1636239 - RNA, 19 nt, Artificial Sequence
  Description of Artificial Sequence: Synthetic oligonucleotide
aauacgagcagccaaucca

SEQ ID NO: 1636240 - RNA, 19 nt, Artificial Sequence
  Description of Artificial Sequence: Synthetic oligonucleotide
aauaaggaaaauacgagca

SEQ ID NO: 1636241 - RNA, 19 nt, Artificial Sequence
  Description of Artificial Sequence: Synthetic oligonucleotide
aaauacgagcagccaaucc

SEQ ID NO: 1636242 - RNA, 19 nt, Artificial Sequence
  Description of Artificial Sequence: Synthetic oligonucleotide
agaauggucaacucuagag

SEQ ID NO: 1636243 - RNA, 19 nt, Artificial Sequence
  Description of Artificial Sequence: Synthetic oligonucleotide
ugccaaaucggguagaaag

SEQ ID NO: 1636244 - RNA, 19 nt, Artificial Sequence
  Description of Artificial Sequence: Synthetic oligonucleotide
uuguauucaagcauuagaa

SEQ ID NO: 1636245 - RNA, 19 nt, Artificial Sequence
  Description of Artificial Sequence: Synthetic oligonucleotide
aagacugcugugcugagag

SEQ ID NO: 1636246 - RNA, 19 nt, Artificial Sequence
  Description of Artificial Sequence: Synthetic oligonucleotide
aagaacacaauucuugaau

SEQ ID NO: 1636247 - RNA, 19 nt, Artificial Sequence
  Description of Artificial Sequence: Synthetic oligonucleotide
aacaagaauggucaacucu

SEQ ID NO: 1636248 - RNA, 19 nt, Artificial Sequence
  Description of Artificial Sequence: Synthetic oligonucleotide
gucuuuaucagugugcugg

SEQ ID NO: 1636249 - RNA, 19 nt, Artificial Sequence
  Description of Artificial Sequence: Synthetic oligonucleotide
gagaguuaaaaugaggggc

SEQ ID NO: 1636250 - RNA, 19 nt, Artificial Sequence
  Description of Artificial Sequence: Synthetic oligonucleotide
aaaugcccgaggcagagag

SEQ ID NO: 1636251 - RNA, 19 nt, Artificial Sequence
  Description of Artificial Sequence: Synthetic oligonucleotide
aguuggaaaugcccgaggc

SEQ ID NO: 1636252 - RNA, 19 nt, Artificial Sequence
  Description of Artificial Sequence: Synthetic oligonucleotide
uccucguccaaguacaggg

SEQ ID NO: 1636253 - RNA, 19 nt, Artificial Sequence
  Description of Artificial Sequence: Synthetic oligonucleotide
agagaguuaaaaugagggg

SEQ ID NO: 1636254 - RNA, 19 nt, Artificial Sequence
  Description of Artificial Sequence: Synthetic oligonucleotide
auuguauucaagcauuaga

SEQ ID NO: 1636255 - RNA, 19 nt, Artificial Sequence
  Description of Artificial Sequence: Synthetic oligonucleotide
cagaaaaucggcaccacgg

SEQ ID NO: 1636256 - RNA, 19 nt, Artificial Sequence
  Description of Artificial Sequence: Synthetic oligonucleotide
uugccauuggcuuagcucc

SEQ ID NO: 1636257 - RNA, 19 nt, Artificial Sequence
  Description of Artificial Sequence: Synthetic oligonucleotide
caagaguuggaaaugcccg

SEQ ID NO: 1636258 - RNA, 19 nt, Artificial Sequence
  Description of Artificial Sequence: Synthetic oligonucleotide
uauaugucaucucuuuagc

SEQ ID NO: 1636259 - RNA, 19 nt, Artificial Sequence
  Description of Artificial Sequence: Synthetic oligonucleotide
agaguuaaaaugaggggcc

SEQ ID NO: 1636260 - RNA, 19 nt, Artificial Sequence
  Description of Artificial Sequence: Synthetic oligonucleotide
gaugguagcauacauaaua

SEQ ID NO: 1636261 - RNA, 19 nt, Artificial Sequence
  Description of Artificial Sequence: Synthetic oligonucleotide
aaaaugaggggccaggcua

SEQ ID NO: 1636262 - RNA, 19 nt, Artificial Sequence
  Description of Artificial Sequence: Synthetic oligonucleotide
agugugauugaaccuugcc

SEQ ID NO: 1636263 - RNA, 19 nt, Artificial Sequence
  Description of Artificial Sequence: Synthetic oligonucleotide
ucugcaaacugucaccgug

SEQ ID NO: 1636264 - RNA, 19 nt, Artificial Sequence
  Description of Artificial Sequence: Synthetic oligonucleotide
agggugaaauucuccagcc

SEQ ID NO: 1636265 - RNA, 19 nt, Artificial Sequence
  Description of Artificial Sequence: Synthetic oligonucleotide
aacucuagagaauacuuuu

SEQ ID NO: 1636266 - RNA, 19 nt, Artificial Sequence
  Description of Artificial Sequence: Synthetic oligonucleotide
uugaaauaacaaaauguua

SEQ ID NO: 1636267 - RNA, 19 nt, Artificial Sequence
  Description of Artificial Sequence: Synthetic oligonucleotide
uagagaauacuuuugcauc

SEQ ID NO: 1636268 - RNA, 19 nt, Artificial Sequence
  Description of Artificial Sequence: Synthetic oligonucleotide
caggcuagcagaaaaucgg

SEQ ID NO: 1636269 - RNA, 19 nt, Artificial Sequence
  Description of Artificial Sequence: Synthetic oligonucleotide
uuggaaaugcccgaggcag

SEQ ID NO: 1636270 - RNA, 19 nt, Artificial Sequence
  Description of Artificial Sequence: Synthetic oligonucleotide
ucucccugaagcuuaagug

SEQ ID NO: 1636271 - RNA, 19 nt, Artificial Sequence
  Description of Artificial Sequence: Synthetic oligonucleotide
aggaccagcguacagucac

SEQ ID NO: 1636272 - RNA, 19 nt, Artificial Sequence
  Description of Artificial Sequence: Synthetic oligonucleotide
aacacaauucuugaaucug

SEQ ID NO: 1636273 - RNA, 19 nt, Artificial Sequence
  Description of Artificial Sequence: Synthetic oligonucleotide
uucgccaagaacacaauuc

SEQ ID NO: 1636274 - RNA, 19 nt, Artificial Sequence
  Description of Artificial Sequence: Synthetic oligonucleotide
ucucuuuagccucaguagu

SEQ ID NO: 1636275 - RNA, 19 nt, Artificial Sequence
  Description of Artificial Sequence: Synthetic oligonucleotide
agaagagacgcauggcgcg

SEQ ID NO: 1636276 - RNA, 19 nt, Artificial Sequence
  Description of Artificial Sequence: Synthetic oligonucleotide
ucuagagaauacuuuugca

SEQ ID NO: 1636277 - RNA, 19 nt, Artificial Sequence
  Description of Artificial Sequence: Synthetic oligonucleotide
gaagcuuaagugcggcugg

SEQ ID NO: 1636278 - RNA, 19 nt, Artificial Sequence
  Description of Artificial Sequence: Synthetic oligonucleotide
agagaauacuuuugcaucu

SEQ ID NO: 1636279 - RNA, 19 nt, Artificial Sequence
  Description of Artificial Sequence: Synthetic oligonucleotide
uuagcuccuugaaauaaca

SEQ ID NO: 1636280 - RNA, 19 nt, Artificial Sequence
  Description of Artificial Sequence: Synthetic oligonucleotide
caguaguucgccaagaaca

SEQ ID NO: 1636281 - RNA, 19 nt, Artificial Sequence
  Description of Artificial Sequence: Synthetic oligonucleotide
ugcaucugcaaacugucac

SEQ ID NO: 1636282 - RNA, 19 nt, Artificial Sequence
  Description of Artificial Sequence: Synthetic oligonucleotide
uguauucaagcauuagaaa

SEQ ID NO: 1636283 - RNA, 19 nt, Artificial Sequence
  Description of Artificial Sequence: Synthetic oligonucleotide
caauccacggucuuuauca

SEQ ID NO: 1636284 - RNA, 19 nt, Artificial Sequence
  Description of Artificial Sequence: Synthetic oligonucleotide
ucuuguccuggaaucagcc

SEQ ID NO: 1636285 - RNA, 19 nt, Artificial Sequence
  Description of Artificial Sequence: Synthetic oligonucleotide
aaaauacgagcagccaauc

SEQ ID NO: 1636286 - RNA, 19 nt, Artificial Sequence
  Description of Artificial Sequence: Synthetic oligonucleotide
ucgccaagaacacaauucu

SEQ ID NO: 1636287 - RNA, 19 nt, Artificial Sequence
  Description of Artificial Sequence: Synthetic oligonucleotide
aaguacagggccccaaccu

SEQ ID NO: 1636288 - RNA, 19 nt, Artificial Sequence
  Description of Artificial Sequence: Synthetic oligonucleotide
agcaccacuugccaccagc

SEQ ID NO: 1636289 - RNA, 19 nt, Artificial Sequence
  Description of Artificial Sequence: Synthetic oligonucleotide
uuuauaugucaucucuuua

SEQ ID NO: 1636290 - RNA, 19 nt, Artificial Sequence
  Description of Artificial Sequence: Synthetic oligonucleotide
acagucacuaccauuuggg

SEQ ID NO: 1636291 - RNA, 19 nt, Artificial Sequence
  Description of Artificial Sequence: Synthetic oligonucleotide
ucaccgugaaaacacauuu

SEQ ID NO: 1636292 - RNA, 19 nt, Artificial Sequence
  Description of Artificial Sequence: Synthetic oligonucleotide
acacauuuauaugucaucu

SEQ ID NO: 1636293 - RNA, 19 nt, Artificial Sequence
  Description of Artificial Sequence: Synthetic oligonucleotide
ugaagcuuaagugcggcug

SEQ ID NO: 1636294 - RNA, 19 nt, Artificial Sequence
  Description of Artificial Sequence: Synthetic oligonucleotide
aagaguuggaaaugcccga

SEQ ID NO: 1636295 - RNA, 19 nt, Artificial Sequence
  Description of Artificial Sequence: Synthetic oligonucleotide
ugagaggcauccaacgcca

SEQ ID NO: 1636296 - RNA, 19 nt, Artificial Sequence
  Description of Artificial Sequence: Synthetic oligonucleotide
aaaaucggcaccacggggu

SEQ ID NO: 1636297 - RNA, 19 nt, Artificial Sequence
  Description of Artificial Sequence: Synthetic oligonucleotide
uuuagccucaguaguucgc

SEQ ID NO: 1636298 - RNA, 19 nt, Artificial Sequence
  Description of Artificial Sequence: Synthetic oligonucleotide
aaucggguagaaagacugc

SEQ ID NO: 1636299 - RNA, 19 nt, Artificial Sequence
  Description of Artificial Sequence: Synthetic oligonucleotide
aauccacggucuuuaucag

SEQ ID NO: 1636300 - RNA, 19 nt, Artificial Sequence
  Description of Artificial Sequence: Synthetic oligonucleotide
uaaaaugaggggccaggcu

SEQ ID NO: 1636301 - RNA, 19 nt, Artificial Sequence
  Description of Artificial Sequence: Synthetic oligonucleotide
accgugaaaacacauuuau

SEQ ID NO: 1636302 - RNA, 19 nt, Artificial Sequence
  Description of Artificial Sequence: Synthetic oligonucleotide
cuugccauuggcuuagcuc

SEQ ID NO: 1636303 - RNA, 19 nt, Artificial Sequence
  Description of Artificial Sequence: Synthetic oligonucleotide
uuaaaaugaggggccaggc

SEQ ID NO: 1636304 - RNA, 19 nt, Artificial Sequence
  Description of Artificial Sequence: Synthetic oligonucleotide
ugaaccuugccauuggcuu

SEQ ID NO: 1636305 - RNA, 19 nt, Artificial Sequence
  Description of Artificial Sequence: Synthetic oligonucleotide
uggcuuagcuccuugaaau

SEQ ID NO: 1636306 - RNA, 19 nt, Artificial Sequence
  Description of Artificial Sequence: Synthetic oligonucleotide
agacugucggugcuguugg

SEQ ID NO: 1636307 - RNA, 19 nt, Artificial Sequence
  Description of Artificial Sequence: Synthetic oligonucleotide
aagaauggucaacucuaga

SEQ ID NO: 1636308 - RNA, 19 nt, Artificial Sequence
  Description of Artificial Sequence: Synthetic oligonucleotide
cuugaaauaacaaaauguu

SEQ ID NO: 1636309 - RNA, 19 nt, Artificial Sequence
  Description of Artificial Sequence: Synthetic oligonucleotide
aguaguucgccaagaacac

SEQ ID NO: 1636310 - RNA, 19 nt, Artificial Sequence
  Description of Artificial Sequence: Synthetic oligonucleotide
cuuguaagucggcauugcg

SEQ ID NO: 1636311 - RNA, 19 nt, Artificial Sequence
  Description of Artificial Sequence: Synthetic oligonucleotide
cuuuagccucaguaguucg

SEQ ID NO: 1636312 - RNA, 19 nt, Artificial Sequence
  Description of Artificial Sequence: Synthetic oligonucleotide
uccguugguccucagcugc

SEQ ID NO: 1636313 - RNA, 19 nt, Artificial Sequence
  Description of Artificial Sequence: Synthetic oligonucleotide
uccauaagguccugggaca

SEQ ID NO: 1636314 - RNA, 19 nt, Artificial Sequence
  Description of Artificial Sequence: Synthetic oligonucleotide
ucagugugauugaaccuug

SEQ ID NO: 1636315 - RNA, 19 nt, Artificial Sequence
  Description of Artificial Sequence: Synthetic oligonucleotide
aaaucggcaccacggggug

SEQ ID NO: 1636316 - RNA, 19 nt, Artificial Sequence
  Description of Artificial Sequence: Synthetic oligonucleotide
aagaggaccagcguacagu

SEQ ID NO: 1636317 - RNA, 19 nt, Artificial Sequence
  Description of Artificial Sequence: Synthetic oligonucleotide
cucucaguccggaugguag

SEQ ID NO: 1636318 - RNA, 19 nt, Artificial Sequence
  Description of Artificial Sequence: Synthetic oligonucleotide
uuaagugcggcugggacuc

SEQ ID NO: 1636319 - RNA, 19 nt, Artificial Sequence
  Description of Artificial Sequence: Synthetic oligonucleotide
cauuuggucagcugguguc

SEQ ID NO: 1636320 - RNA, 19 nt, Artificial Sequence
  Description of Artificial Sequence: Synthetic oligonucleotide
aaaugaggggccaggcuag

SEQ ID NO: 1636321 - RNA, 19 nt, Artificial Sequence
  Description of Artificial Sequence: Synthetic oligonucleotide
ggggacuugagacugucgg

SEQ ID NO: 1636322 - RNA, 19 nt, Artificial Sequence
  Description of Artificial Sequence: Synthetic oligonucleotide
ggcguugucucccugaagc

SEQ ID NO: 1636323 - RNA, 19 nt, Artificial Sequence
  Description of Artificial Sequence: Synthetic oligonucleotide
gguuuagaaaauccauaag

SEQ ID NO: 1636324 - RNA, 19 nt, Artificial Sequence
  Description of Artificial Sequence: Synthetic oligonucleotide
acgagcagccaauccacgg

SEQ ID NO: 1636325 - RNA, 19 nt, Artificial Sequence
  Description of Artificial Sequence: Synthetic oligonucleotide
ucuauaccugucugguuga

SEQ ID NO: 1636326 - RNA, 19 nt, Artificial Sequence
  Description of Artificial Sequence: Synthetic oligonucleotide
cacgggaucuccacgagug

SEQ ID NO: 1636327 - RNA, 19 nt, Artificial Sequence
  Description of Artificial Sequence: Synthetic oligonucleotide
uuagccucaguaguucgcc

SEQ ID NO: 1636328 - RNA, 19 nt, Artificial Sequence
  Description of Artificial Sequence: Synthetic oligonucleotide
auacgagcagccaauccac

SEQ ID NO: 1636329 - RNA, 19 nt, Artificial Sequence
  Description of Artificial Sequence: Synthetic oligonucleotide
agugcccggccccagagag

SEQ ID NO: 1636330 - RNA, 19 nt, Artificial Sequence
  Description of Artificial Sequence: Synthetic oligonucleotide
acggucuuuaucagugugc

SEQ ID NO: 1636331 - RNA, 19 nt, Artificial Sequence
  Description of Artificial Sequence: Synthetic oligonucleotide
gagagggcccauuugguca

SEQ ID NO: 1636332 - RNA, 19 nt, Artificial Sequence
  Description of Artificial Sequence: Synthetic oligonucleotide
ucgaucagugugauugaac

SEQ ID NO: 1636333 - RNA, 19 nt, Artificial Sequence
  Description of Artificial Sequence: Synthetic oligonucleotide
gaagccacccacacggugc

SEQ ID NO: 1636334 - RNA, 19 nt, Artificial Sequence
  Description of Artificial Sequence: Synthetic oligonucleotide
uacgagcagccaauccacg

SEQ ID NO: 1636335 - RNA, 19 nt, Artificial Sequence
  Description of Artificial Sequence: Synthetic oligonucleotide
agcuacagugccaaaucgg

SEQ ID NO: 1636336 - RNA, 19 nt, Artificial Sequence
  Description of Artificial Sequence: Synthetic oligonucleotide
agucacuaccauuuggguu

SEQ ID NO: 1636337 - RNA, 19 nt, Artificial Sequence
  Description of Artificial Sequence: Synthetic oligonucleotide
accagcacgggaucuccac

SEQ ID NO: 1636338 - RNA, 19 nt, Artificial Sequence
  Description of Artificial Sequence: Synthetic oligonucleotide
aggcuagcagaaaaucggc

SEQ ID NO: 1636339 - RNA, 19 nt, Artificial Sequence
  Description of Artificial Sequence: Synthetic oligonucleotide
ucucaguccggaugguagc

SEQ ID NO: 1636340 - RNA, 19 nt, Artificial Sequence
  Description of Artificial Sequence: Synthetic oligonucleotide
cugggacauguuuaaaauc

SEQ ID NO: 1636341 - RNA, 19 nt, Artificial Sequence
  Description of Artificial Sequence: Synthetic oligonucleotide
cucguccaaguacagggcc

SEQ ID NO: 1636342 - RNA, 19 nt, Artificial Sequence
  Description of Artificial Sequence: Synthetic oligonucleotide
aggcagagaguuaaaauga

SEQ ID NO: 1636343 - RNA, 19 nt, Artificial Sequence
  Description of Artificial Sequence: Synthetic oligonucleotide
aaugaggggccaggcuagc

SEQ ID NO: 1636344 - RNA, 19 nt, Artificial Sequence
  Description of Artificial Sequence: Synthetic oligonucleotide
guaguacuccucuucccgc

SEQ ID NO: 1636345 - RNA, 19 nt, Artificial Sequence
  Description of Artificial Sequence: Synthetic oligonucleotide
guagaagaggaccagcgua

SEQ ID NO: 1636346 - RNA, 19 nt, Artificial Sequence
  Description of Artificial Sequence: Synthetic oligonucleotide
auguuagggacagcuacag

SEQ ID NO: 1636347 - RNA, 19 nt, Artificial Sequence
  Description of Artificial Sequence: Synthetic oligonucleotide
cgaucagugugauugaacc

SEQ ID NO: 1636348 - RNA, 19 nt, Artificial Sequence
  Description of Artificial Sequence: Synthetic oligonucleotide
gcuacagugccaaaucggg

SEQ ID NO: 1636349 - RNA, 19 nt, Artificial Sequence
  Description of Artificial Sequence: Synthetic oligonucleotide
agggccccaaccuggagag

SEQ ID NO: 1636350 - RNA, 19 nt, Artificial Sequence
  Description of Artificial Sequence: Synthetic oligonucleotide
cuagagaauacuuuugcau

SEQ ID NO: 1636351 - RNA, 19 nt, Artificial Sequence
  Description of Artificial Sequence: Synthetic oligonucleotide
ucuuuagccucaguaguuc

SEQ ID NO: 1636352 - RNA, 19 nt, Artificial Sequence
  Description of Artificial Sequence: Synthetic oligonucleotide
ugguagcauacauaauaaa

SEQ ID NO: 1636353 - RNA, 19 nt, Artificial Sequence
  Description of Artificial Sequence: Synthetic oligonucleotide
aguuaaaaugaggggccag

SEQ ID NO: 1636354 - RNA, 19 nt, Artificial Sequence
  Description of Artificial Sequence: Synthetic oligonucleotide
aucagugugauugaaccuu

SEQ ID NO: 1636355 - RNA, 19 nt, Artificial Sequence
  Description of Artificial Sequence: Synthetic oligonucleotide
uuccuuguaagucggcauu

SEQ ID NO: 1636356 - RNA, 19 nt, Artificial Sequence
  Description of Artificial Sequence: Synthetic oligonucleotide
caaguacagggccccaacc

SEQ ID NO: 1636357 - RNA, 19 nt, Artificial Sequence
  Description of Artificial Sequence: Synthetic oligonucleotide
gcuagcagaaaaucggcac

SEQ ID NO: 1636358 - RNA, 19 nt, Artificial Sequence
  Description of Artificial Sequence: Synthetic oligonucleotide
ccaggcuagcagaaaaucg

SEQ ID NO: 1636359 - RNA, 19 nt, Artificial Sequence
  Description of Artificial Sequence: Synthetic oligonucleotide
cacauuccucuccucacag

SEQ ID NO: 1636360 - RNA, 19 nt, Artificial Sequence
  Description of Artificial Sequence: Synthetic oligonucleotide
cuaccauuuggguuuagaa

SEQ ID NO: 1636361 - RNA, 19 nt, Artificial Sequence
  Description of Artificial Sequence: Synthetic oligonucleotide
ggaaaauacgagcagccaa

SEQ ID NO: 1636362 - RNA, 19 nt, Artificial Sequence
  Description of Artificial Sequence: Synthetic oligonucleotide
aagcuuaagugcggcuggg

SEQ ID NO: 1636363 - RNA, 19 nt, Artificial Sequence
  Description of Artificial Sequence: Synthetic oligonucleotide
gugucucuacucugcaugc

SEQ ID NO: 1636364 - RNA, 19 nt, Artificial Sequence
  Description of Artificial Sequence: Synthetic oligonucleotide
aagagacgcauggcgcgcg

SEQ ID NO: 1636365 - RNA, 19 nt, Artificial Sequence
  Description of Artificial Sequence: Synthetic oligonucleotide
acgggaucuccacgagugc

SEQ ID NO: 1636366 - RNA, 19 nt, Artificial Sequence
  Description of Artificial Sequence: Synthetic oligonucleotide
uccacgagugcccggcccc

SEQ ID NO: 1636367 - RNA, 19 nt, Artificial Sequence
  Description of Artificial Sequence: Synthetic oligonucleotide
uccuuguaagucggcauug

SEQ ID NO: 1636368 - RNA, 19 nt, Artificial Sequence
  Description of Artificial Sequence: Synthetic oligonucleotide
uccccuuuagcugugucuc

SEQ ID NO: 1636369 - RNA, 19 nt, Artificial Sequence
  Description of Artificial Sequence: Synthetic oligonucleotide
acaaaauguuagggacagc

SEQ ID NO: 1636370 - RNA, 19 nt, Artificial Sequence
  Description of Artificial Sequence: Synthetic oligonucleotide
ugcagcgcgaagaggcucu

SEQ ID NO: 1636371 - RNA, 19 nt, Artificial Sequence
  Description of Artificial Sequence: Synthetic oligonucleotide
guuggaaaugcccgaggca

SEQ ID NO: 1636372 - RNA, 19 nt, Artificial Sequence
  Description of Artificial Sequence: Synthetic oligonucleotide
ccagcguacagucacuacc

SEQ ID NO: 1636373 - RNA, 19 nt, Artificial Sequence
  Description of Artificial Sequence: Synthetic oligonucleotide
augguagcauacauaauaa

SEQ ID NO: 1636374 - RNA, 19 nt, Artificial Sequence
  Description of Artificial Sequence: Synthetic oligonucleotide
acuuccuuguaagucggca

SEQ ID NO: 1636375 - RNA, 19 nt, Artificial Sequence
  Description of Artificial Sequence: Synthetic oligonucleotide
acuugagacugucggugcu

SEQ ID NO: 1636376 - RNA, 19 nt, Artificial Sequence
  Description of Artificial Sequence: Synthetic oligonucleotide
gaaaauacgagcagccaau

SEQ ID NO: 1636377 - RNA, 19 nt, Artificial Sequence
  Description of Artificial Sequence: Synthetic oligonucleotide
cacggucuuuaucagugug

SEQ ID NO: 1636378 - RNA, 19 nt, Artificial Sequence
  Description of Artificial Sequence: Synthetic oligonucleotide
uccgggaagccacccacac

SEQ ID NO: 1636379 - RNA, 19 nt, Artificial Sequence
  Description of Artificial Sequence: Synthetic oligonucleotide
ugugcugcaggugccgucu

SEQ ID NO: 1636380 - RNA, 19 nt, Artificial Sequence
  Description of Artificial Sequence: Synthetic oligonucleotide
gaaucaccgacagcaccag

SEQ ID NO: 1636381 - RNA, 19 nt, Artificial Sequence
  Description of Artificial Sequence: Synthetic oligonucleotide
caguguucgaucaguguga

SEQ ID NO: 1636382 - RNA, 19 nt, Artificial Sequence
  Description of Artificial Sequence: Synthetic oligonucleotide
cucggcgcuccguuggucc

SEQ ID NO: 1636383 - RNA, 19 nt, Artificial Sequence
  Description of Artificial Sequence: Synthetic oligonucleotide
gaagagacgcauggcgcgc

SEQ ID NO: 1636384 - RNA, 19 nt, Artificial Sequence
  Description of Artificial Sequence: Synthetic oligonucleotide
gucucuacucugcaugcuc

SEQ ID NO: 1636385 - RNA, 19 nt, Artificial Sequence
  Description of Artificial Sequence: Synthetic oligonucleotide
uggggagagggcccauuug

SEQ ID NO: 1636386 - RNA, 19 nt, Artificial Sequence
  Description of Artificial Sequence: Synthetic oligonucleotide
agagucuccaguguucgau

SEQ ID NO: 1636387 - RNA, 19 nt, Artificial Sequence
  Description of Artificial Sequence: Synthetic oligonucleotide
gcuccuugaaauaacaaaa

SEQ ID NO: 1636388 - RNA, 19 nt, Artificial Sequence
  Description of Artificial Sequence: Synthetic oligonucleotide
ggcguaguacuccucuucc

SEQ ID NO: 1636389 - RNA, 19 nt, Artificial Sequence
  Description of Artificial Sequence: Synthetic oligonucleotide
acuaccauuuggguuuaga

SEQ ID NO: 1636390 - RNA, 19 nt, Artificial Sequence
  Description of Artificial Sequence: Synthetic oligonucleotide
ucuacucugcaugcuccug

SEQ ID NO: 1636391 - RNA, 19 nt, Artificial Sequence
  Description of Artificial Sequence: Synthetic oligonucleotide
ugcccggccccagagaggc

SEQ ID NO: 1636392 - RNA, 19 nt, Artificial Sequence
  Description of Artificial Sequence: Synthetic oligonucleotide
gagucuccaguguucgauc

SEQ ID NO: 1636393 - RNA, 19 nt, Artificial Sequence
  Description of Artificial Sequence: Synthetic oligonucleotide
guacagucacuaccauuug

SEQ ID NO: 1636394 - RNA, 19 nt, Artificial Sequence
  Description of Artificial Sequence: Synthetic oligonucleotide
cguaguacuccucuucccg

SEQ ID NO: 1636395 - RNA, 19 nt, Artificial Sequence
  Description of Artificial Sequence: Synthetic oligonucleotide
cagugugauugaaccuugc

SEQ ID NO: 1636396 - RNA, 19 nt, Artificial Sequence
  Description of Artificial Sequence: Synthetic oligonucleotide
guaagucggcauugcgggc

SEQ ID NO: 1636397 - RNA, 19 nt, Artificial Sequence
  Description of Artificial Sequence: Synthetic oligonucleotide
gaguuaaaaugaggggcca

SEQ ID NO: 1636398 - RNA, 19 nt, Artificial Sequence
  Description of Artificial Sequence: Synthetic oligonucleotide
aggcucggcguaguacucc

SEQ ID NO: 1636399 - RNA, 19 nt, Artificial Sequence
  Description of Artificial Sequence: Synthetic oligonucleotide
cacggugcagcgcgaagag

SEQ ID NO: 1636400 - RNA, 19 nt, Artificial Sequence
  Description of Artificial Sequence: Synthetic oligonucleotide
uugagacugucggugcugu

SEQ ID NO: 1636401 - RNA, 19 nt, Artificial Sequence
  Description of Artificial Sequence: Synthetic oligonucleotide
gaaccuugccauuggcuua

SEQ ID NO: 1636402 - RNA, 19 nt, Artificial Sequence
  Description of Artificial Sequence: Synthetic oligonucleotide
auccacggucuuuaucagu

SEQ ID NO: 1636403 - RNA, 19 nt, Artificial Sequence
  Description of Artificial Sequence: Synthetic oligonucleotide
gaucuccacgagugcccgg

SEQ ID NO: 1636404 - RNA, 19 nt, Artificial Sequence
  Description of Artificial Sequence: Synthetic oligonucleotide
agcacgggaucuccacgag

SEQ ID NO: 1636405 - RNA, 19 nt, Artificial Sequence
  Description of Artificial Sequence: Synthetic oligonucleotide
ggaaucaccgacagcacca

SEQ ID NO: 1636406 - RNA, 19 nt, Artificial Sequence
  Description of Artificial Sequence: Synthetic oligonucleotide
uucgaucagugugauugaa

SEQ ID NO: 1636407 - RNA, 19 nt, Artificial Sequence
  Description of Artificial Sequence: Synthetic oligonucleotide
cuuaagugcggcugggacu

SEQ ID NO: 1636408 - RNA, 19 nt, Artificial Sequence
  Description of Artificial Sequence: Synthetic oligonucleotide
uuuggucagcuggugucac

SEQ ID NO: 1636409 - RNA, 19 nt, Artificial Sequence
  Description of Artificial Sequence: Synthetic oligonucleotide
ggccccaaccuggagagcg

SEQ ID NO: 1636410 - RNA, 19 nt, Artificial Sequence
  Description of Artificial Sequence: Synthetic oligonucleotide
uggagagcggggucaggcu

SEQ ID NO: 1636411 - RNA, 19 nt, Artificial Sequence
  Description of Artificial Sequence: Synthetic oligonucleotide
agccucaguaguucgccaa

SEQ ID NO: 1636412 - RNA, 19 nt, Artificial Sequence
  Description of Artificial Sequence: Synthetic oligonucleotide
acacggugcagcgcgaaga

SEQ ID NO: 1636413 - RNA, 19 nt, Artificial Sequence
  Description of Artificial Sequence: Synthetic oligonucleotide
guucgaucagugugauuga

SEQ ID NO: 1636414 - RNA, 19 nt, Artificial Sequence
  Description of Artificial Sequence: Synthetic oligonucleotide
ccaaaucggguagaaagac

SEQ ID NO: 1636415 - RNA, 19 nt, Artificial Sequence
  Description of Artificial Sequence: Synthetic oligonucleotide
cccggaaucaccgacagca

SEQ ID NO: 1636416 - RNA, 19 nt, Artificial Sequence
  Description of Artificial Sequence: Synthetic oligonucleotide
uugccaccagcagaagaga

SEQ ID NO: 1636417 - RNA, 19 nt, Artificial Sequence
  Description of Artificial Sequence: Synthetic oligonucleotide
ugucucuacucugcaugcu

SEQ ID NO: 1636418 - RNA, 19 nt, Artificial Sequence
  Description of Artificial Sequence: Synthetic oligonucleotide
ccuggaaucagccaccgaa

SEQ ID NO: 1636419 - RNA, 19 nt, Artificial Sequence
  Description of Artificial Sequence: Synthetic oligonucleotide
ucgguggcgaccggcucgg

SEQ ID NO: 1636420 - RNA, 19 nt, Artificial Sequence
  Description of Artificial Sequence: Synthetic oligonucleotide
agcacuuuccuugcuuaau

SEQ ID NO: 1636421 - RNA, 19 nt, Artificial Sequence
  Description of Artificial Sequence: Synthetic oligonucleotide
cuccuugaaauaacaaaau

SEQ ID NO: 1636422 - RNA, 19 nt, Artificial Sequence
  Description of Artificial Sequence: Synthetic oligonucleotide
agccaccgaaugcucucag

SEQ ID NO: 1636423 - RNA, 19 nt, Artificial Sequence
  Description of Artificial Sequence: Synthetic oligonucleotide
cuccguugguccucagcug

SEQ ID NO: 1636424 - RNA, 19 nt, Artificial Sequence
  Description of Artificial Sequence: Synthetic oligonucleotide
caaaucggguagaaagacu

SEQ ID NO: 1636425 - RNA, 19 nt, Artificial Sequence
  Description of Artificial Sequence: Synthetic oligonucleotide
ugucggugcuguuggcauc

SEQ ID NO: 1636426 - RNA, 19 nt, Artificial Sequence
  Description of Artificial Sequence: Synthetic oligonucleotide
cucaguaguucgccaagaa

SEQ ID NO: 1636427 - RNA, 19 nt, Artificial Sequence
  Description of Artificial Sequence: Synthetic oligonucleotide
cuccacgagugcccggccc

SEQ ID NO: 1636428 - RNA, 19 nt, Artificial Sequence
  Description of Artificial Sequence: Synthetic oligonucleotide
uccaaguacagggccccaa

SEQ ID NO: 1636429 - RNA, 19 nt, Artificial Sequence
  Description of Artificial Sequence: Synthetic oligonucleotide
cagcacgggaucuccacga

SEQ ID NO: 1636430 - RNA, 19 nt, Artificial Sequence
  Description of Artificial Sequence: Synthetic oligonucleotide
ggagagggcccauuugguc

SEQ ID NO: 1636431 - RNA, 19 nt, Artificial Sequence
  Description of Artificial Sequence: Synthetic oligonucleotide
accacgggguguagaagag

SEQ ID NO: 1636432 - RNA, 19 nt, Artificial Sequence
  Description of Artificial Sequence: Synthetic oligonucleotide
acgggguguagaagaggac

SEQ ID NO: 1636433 - RNA, 19 nt, Artificial Sequence
  Description of Artificial Sequence: Synthetic oligonucleotide
gaccggcucggccuccgcc

SEQ ID NO: 1636434 - RNA, 19 nt, Artificial Sequence
  Description of Artificial Sequence: Synthetic oligonucleotide
gacugucggugcuguuggc

SEQ ID NO: 1636435 - RNA, 19 nt, Artificial Sequence
  Description of Artificial Sequence: Synthetic oligonucleotide
cggaugguagcauacauaa

SEQ ID NO: 1636436 - RNA, 19 nt, Artificial Sequence
  Description of Artificial Sequence: Synthetic oligonucleotide
ugcaaccuccaggccgcgg

SEQ ID NO: 1636437 - RNA, 19 nt, Artificial Sequence
  Description of Artificial Sequence: Synthetic oligonucleotide
aaugcccgaggcagagagu

SEQ ID NO: 1636438 - RNA, 19 nt, Artificial Sequence
  Description of Artificial Sequence: Synthetic oligonucleotide
cagugugcugcaggugccg

SEQ ID NO: 1636439 - RNA, 19 nt, Artificial Sequence
  Description of Artificial Sequence: Synthetic oligonucleotide
ggucuuuaucagugugcug

SEQ ID NO: 1636440 - RNA, 19 nt, Artificial Sequence
  Description of Artificial Sequence: Synthetic oligonucleotide
cacacggugcagcgcgaag

SEQ ID NO: 1636441 - RNA, 19 nt, Artificial Sequence
  Description of Artificial Sequence: Synthetic oligonucleotide
aaucggcaccacggggugu

SEQ ID NO: 1636442 - RNA, 19 nt, Artificial Sequence
  Description of Artificial Sequence: Synthetic oligonucleotide
gccucaguaguucgccaag

SEQ ID NO: 1636443 - RNA, 19 nt, Artificial Sequence
  Description of Artificial Sequence: Synthetic oligonucleotide
ucggcauugcgggcguugu

SEQ ID NO: 1636444 - RNA, 19 nt, Artificial Sequence
  Description of Artificial Sequence: Synthetic oligonucleotide
guaguucgccaagaacaca

SEQ ID NO: 1636445 - RNA, 19 nt, Artificial Sequence
  Description of Artificial Sequence: Synthetic oligonucleotide
caccgugaaaacacauuua

SEQ ID NO: 1636446 - RNA, 19 nt, Artificial Sequence
  Description of Artificial Sequence: Synthetic oligonucleotide
cagggccccaaccuggaga

SEQ ID NO: 1636447 - RNA, 19 nt, Artificial Sequence
  Description of Artificial Sequence: Synthetic oligonucleotide
gcuuagcuccuugaaauaa

SEQ ID NO: 1636448 - RNA, 19 nt, Artificial Sequence
  Description of Artificial Sequence: Synthetic oligonucleotide
gcuccguugguccucagcu

SEQ ID NO: 1636449 - RNA, 19 nt, Artificial Sequence
  Description of Artificial Sequence: Synthetic oligonucleotide
cgggguguagaagaggacc

SEQ ID NO: 1636450 - RNA, 19 nt, Artificial Sequence
  Description of Artificial Sequence: Synthetic oligonucleotide
gccaagaguuggaaaugcc

SEQ ID NO: 1636451 - RNA, 19 nt, Artificial Sequence
  Description of Artificial Sequence: Synthetic oligonucleotide
cuacagugccaaaucgggu

SEQ ID NO: 1636452 - RNA, 19 nt, Artificial Sequence
  Description of Artificial Sequence: Synthetic oligonucleotide
ucggcgcuccguugguccu

SEQ ID NO: 1636453 - RNA, 19 nt, Artificial Sequence
  Description of Artificial Sequence: Synthetic oligonucleotide
agugugcugcaggugccgu

SEQ ID NO: 1636454 - RNA, 19 nt, Artificial Sequence
  Description of Artificial Sequence: Synthetic oligonucleotide
agcagccaauccacggucu

SEQ ID NO: 1636455 - RNA, 19 nt, Artificial Sequence
  Description of Artificial Sequence: Synthetic oligonucleotide
ucggcguaguacuccucuu

SEQ ID NO: 1636456 - RNA, 19 nt, Artificial Sequence
  Description of Artificial Sequence: Synthetic oligonucleotide
gaaaugcccgaggcagaga

SEQ ID NO: 1636457 - RNA, 19 nt, Artificial Sequence
  Description of Artificial Sequence: Synthetic oligonucleotide
gcuucuauaccugucuggu

SEQ ID NO: 1636458 - RNA, 19 nt, Artificial Sequence
  Description of Artificial Sequence: Synthetic oligonucleotide
guggcgaccggcucggccu

SEQ ID NO: 1636459 - RNA, 19 nt, Artificial Sequence
  Description of Artificial Sequence: Synthetic oligonucleotide
cucaguccggaugguagca

SEQ ID NO: 1636460 - RNA, 19 nt, Artificial Sequence
  Description of Artificial Sequence: Synthetic oligonucleotide
gguggcgaccggcucggcc

SEQ ID NO: 1636461 - RNA, 19 nt, Artificial Sequence
  Description of Artificial Sequence: Synthetic oligonucleotide
ggucaacucuagagaauac

SEQ ID NO: 1636462 - RNA, 19 nt, Artificial Sequence
  Description of Artificial Sequence: Synthetic oligonucleotide
cggaaucaccgacagcacc

SEQ ID NO: 1636463 - RNA, 19 nt, Artificial Sequence
  Description of Artificial Sequence: Synthetic oligonucleotide
ccagugugcugcaggugcc

SEQ ID NO: 1636464 - RNA, 19 nt, Artificial Sequence
  Description of Artificial Sequence: Synthetic oligonucleotide
ccgaaugcucucaguccgg

SEQ ID NO: 1636465 - RNA, 19 nt, Artificial Sequence
  Description of Artificial Sequence: Synthetic oligonucleotide
cuccccuuuagcugugucu

SEQ ID NO: 1636466 - RNA, 19 nt, Artificial Sequence
  Description of Artificial Sequence: Synthetic oligonucleotide
ccuuguaagucggcauugc

SEQ ID NO: 1636467 - RNA, 19 nt, Artificial Sequence
  Description of Artificial Sequence: Synthetic oligonucleotide
cuggaaucagccaccgaau

SEQ ID NO: 1636468 - RNA, 19 nt, Artificial Sequence
  Description of Artificial Sequence: Synthetic oligonucleotide
cagucacuaccauuugggu

SEQ ID NO: 1636469 - RNA, 19 nt, Artificial Sequence
  Description of Artificial Sequence: Synthetic oligonucleotide
ggcuagcagaaaaucggca

SEQ ID NO: 1636470 - RNA, 19 nt, Artificial Sequence
  Description of Artificial Sequence: Synthetic oligonucleotide
caggcucggcguaguacuc

SEQ ID NO: 1636471 - RNA, 19 nt, Artificial Sequence
  Description of Artificial Sequence: Synthetic oligonucleotide
cguacagucacuaccauuu

SEQ ID NO: 1636472 - RNA, 19 nt, Artificial Sequence
  Description of Artificial Sequence: Synthetic oligonucleotide
cucggcguaguacuccucu

SEQ ID NO: 1636473 - RNA, 19 nt, Artificial Sequence
  Description of Artificial Sequence: Synthetic oligonucleotide
cccucuccuguccaggaug

SEQ ID NO: 1636474 - RNA, 19 nt, Artificial Sequence
  Description of Artificial Sequence: Synthetic oligonucleotide
ccaauccacggucuuuauc

SEQ ID NO: 1636475 - RNA, 19 nt, Artificial Sequence
  Description of Artificial Sequence: Synthetic oligonucleotide
aguucgccaagaacacaau

SEQ ID NO: 1636476 - RNA, 19 nt, Artificial Sequence
  Description of Artificial Sequence: Synthetic oligonucleotide
ucacuaccauuuggguuua

SEQ ID NO: 1636477 - RNA, 19 nt, Artificial Sequence
  Description of Artificial Sequence: Synthetic oligonucleotide
cagcuggugucaccaccac

SEQ ID NO: 1636478 - RNA, 19 nt, Artificial Sequence
  Description of Artificial Sequence: Synthetic oligonucleotide
aucggcaccacggggugua

SEQ ID NO: 1636479 - RNA, 19 nt, Artificial Sequence
  Description of Artificial Sequence: Synthetic oligonucleotide
ugagacugucggugcuguu

SEQ ID NO: 1636480 - RNA, 19 nt, Artificial Sequence
  Description of Artificial Sequence: Synthetic oligonucleotide
gaccagcguacagucacua

SEQ ID NO: 1636481 - RNA, 19 nt, Artificial Sequence
  Description of Artificial Sequence: Synthetic oligonucleotide
acacggccacucuccucug

SEQ ID NO: 1636482 - RNA, 19 nt, Artificial Sequence
  Description of Artificial Sequence: Synthetic oligonucleotide
ggugccgucucgggccucg

SEQ ID NO: 1636483 - RNA, 19 nt, Artificial Sequence
  Description of Artificial Sequence: Synthetic oligonucleotide
ggcuuagcuccuugaaaua

SEQ ID NO: 1636484 - RNA, 19 nt, Artificial Sequence
  Description of Artificial Sequence: Synthetic oligonucleotide
uaagugcggcugggacucc

SEQ ID NO: 1636485 - RNA, 19 nt, Artificial Sequence
  Description of Artificial Sequence: Synthetic oligonucleotide
cagcccggucacauuccuc

SEQ ID NO: 1636486 - RNA, 19 nt, Artificial Sequence
  Description of Artificial Sequence: Synthetic oligonucleotide
cugucggugcuguuggcau

SEQ ID NO: 1636487 - RNA, 19 nt, Artificial Sequence
  Description of Artificial Sequence: Synthetic oligonucleotide
gcgcccacagcaccacuug

SEQ ID NO: 1636488 - RNA, 19 nt, Artificial Sequence
  Description of Artificial Sequence: Synthetic oligonucleotide
ccgggaagccacccacacg

SEQ ID NO: 1636489 - RNA, 19 nt, Artificial Sequence
  Description of Artificial Sequence: Synthetic oligonucleotide
gugcagcgcgaagaggcuc

SEQ ID NO: 1636490 - RNA, 19 nt, Artificial Sequence
  Description of Artificial Sequence: Synthetic oligonucleotide
gcgcgaagaggcucuccug

SEQ ID NO: 1636491 - RNA, 19 nt, Artificial Sequence
  Description of Artificial Sequence: Synthetic oligonucleotide
ccggaaucaccgacagcac

SEQ ID NO: 1636492 - RNA, 19 nt, Artificial Sequence
  Description of Artificial Sequence: Synthetic oligonucleotide
cuucuauaccugucugguu

SEQ ID NO: 1636493 - RNA, 19 nt, Artificial Sequence
  Description of Artificial Sequence: Synthetic oligonucleotide
gugcccggccccagagagg

SEQ ID NO: 1636494 - RNA, 19 nt, Artificial Sequence
  Description of Artificial Sequence: Synthetic oligonucleotide
ccacgggguguagaagagg

SEQ ID NO: 1636495 - RNA, 19 nt, Artificial Sequence
  Description of Artificial Sequence: Synthetic oligonucleotide
ccgucucgggccucggcgc

SEQ ID NO: 1636496 - RNA, 19 nt, Artificial Sequence
  Description of Artificial Sequence: Synthetic oligonucleotide
ucggcaccacgggguguag

SEQ ID NO: 1636497 - RNA, 19 nt, Artificial Sequence
  Description of Artificial Sequence: Synthetic oligonucleotide
cagcgcgaagaggcucucc

SEQ ID NO: 1636498 - RNA, 19 nt, Artificial Sequence
  Description of Artificial Sequence: Synthetic oligonucleotide
ccaggcucggcguaguacu

SEQ ID NO: 1636499 - RNA, 19 nt, Artificial Sequence
  Description of Artificial Sequence: Synthetic oligonucleotide
gagaggccucggccggcuc

SEQ ID NO: 1636500 - RNA, 19 nt, Artificial Sequence
  Description of Artificial Sequence: Synthetic oligonucleotide
cacuaccauuuggguuuag

SEQ ID NO: 1636501 - RNA, 19 nt, Artificial Sequence
  Description of Artificial Sequence: Synthetic oligonucleotide
cacgagugcccggccccag

SEQ ID NO: 1636502 - RNA, 19 nt, Artificial Sequence
  Description of Artificial Sequence: Synthetic oligonucleotide
gcgggcguugucucccuga

SEQ ID NO: 1636503 - RNA, 19 nt, Artificial Sequence
  Description of Artificial Sequence: Synthetic oligonucleotide
gccggaaggcccagcgccc

SEQ ID NO: 1636504 - RNA, 19 nt, Artificial Sequence
  Description of Artificial Sequence: Synthetic oligonucleotide
cgagugcccggccccagag

SEQ ID NO: 1636505 - RNA, 19 nt, Artificial Sequence
  Description of Artificial Sequence: Synthetic oligonucleotide
guccaaguacagggcccca

SEQ ID NO: 1636506 - RNA, 19 nt, Artificial Sequence
  Description of Artificial Sequence: Synthetic oligonucleotide
ccaccgcccucuccugucc

SEQ ID NO: 1636507 - RNA, 19 nt, Artificial Sequence
  Description of Artificial Sequence: Synthetic oligonucleotide
gcguugucucccugaagcu

SEQ ID NO: 1636508 - RNA, 19 nt, Artificial Sequence
  Description of Artificial Sequence: Synthetic oligonucleotide
ccucaguaguucgccaaga

SEQ ID NO: 1636509 - RNA, 19 nt, Artificial Sequence
  Description of Artificial Sequence: Synthetic oligonucleotide
cgaggcagagaguuaaaau

SEQ ID NO: 1636510 - RNA, 19 nt, Artificial Sequence
  Description of Artificial Sequence: Synthetic oligonucleotide
caccgcccucuccugucca

SEQ ID NO: 1636511 - RNA, 19 nt, Artificial Sequence
  Description of Artificial Sequence: Synthetic oligonucleotide
gugccgucucgggccucgg

SEQ ID NO: 1636512 - RNA, 19 nt, Artificial Sequence
  Description of Artificial Sequence: Synthetic oligonucleotide
gggccucggcgcuccguug

SEQ ID NO: 1636513 - RNA, 19 nt, Artificial Sequence
  Description of Artificial Sequence: Synthetic oligonucleotide
aggugccgucucgggccuc

SEQ ID NO: 1636514 - RNA, 19 nt, Artificial Sequence
  Description of Artificial Sequence: Synthetic oligonucleotide
gggagagggcccauuuggu

SEQ ID NO: 1636515 - RNA, 19 nt, Artificial Sequence
  Description of Artificial Sequence: Synthetic oligonucleotide
ccgaggcagagaguuaaaa

SEQ ID NO: 1636516 - RNA, 19 nt, Artificial Sequence
  Description of Artificial Sequence: Synthetic oligonucleotide
ccccggaaucaccgacagc

SEQ ID NO: 1636517 - RNA, 19 nt, Artificial Sequence
  Description of Artificial Sequence: Synthetic oligonucleotide
ggaugguagcauacauaau

SEQ ID NO: 1636518 - RNA, 19 nt, Artificial Sequence
  Description of Artificial Sequence: Synthetic oligonucleotide
ggugcagcgcgaagaggcu

SEQ ID NO: 1636519 - RNA, 19 nt, Artificial Sequence
  Description of Artificial Sequence: Synthetic oligonucleotide
guguucgaucagugugauu

SEQ ID NO: 1636520 - RNA, 19 nt, Artificial Sequence
  Description of Artificial Sequence: Synthetic oligonucleotide
gcgaccggcucggccuccg

SEQ ID NO: 1636521 - RNA, 19 nt, Artificial Sequence
  Description of Artificial Sequence: Synthetic oligonucleotide
gcucucaguccggauggua

SEQ ID NO: 1636522 - RNA, 19 nt, Artificial Sequence
  Description of Artificial Sequence: Synthetic oligonucleotide
ggcgcuccguugguccuca

SEQ ID NO: 1636523 - RNA, 19 nt, Artificial Sequence
  Description of Artificial Sequence: Synthetic oligonucleotide
cccuuuagcugugucucua

SEQ ID NO: 1636524 - RNA, 19 nt, Artificial Sequence
  Description of Artificial Sequence: Synthetic oligonucleotide
caggugccgucucgggccu

SEQ ID NO: 1636525 - RNA, 19 nt, Artificial Sequence
  Description of Artificial Sequence: Synthetic oligonucleotide
ggccaggcuagcagaaaau

SEQ ID NO: 1636526 - RNA, 19 nt, Artificial Sequence
  Description of Artificial Sequence: Synthetic oligonucleotide
cgaaugcucucaguccgga

SEQ ID NO: 1636527 - RNA, 19 nt, Artificial Sequence
  Description of Artificial Sequence: Synthetic oligonucleotide
ggaccagcguacagucacu

SEQ ID NO: 1636528 - RNA, 19 nt, Artificial Sequence
  Description of Artificial Sequence: Synthetic oligonucleotide
agucggcauugcgggcguu

SEQ ID NO: 1636529 - RNA, 19 nt, Artificial Sequence
  Description of Artificial Sequence: Synthetic oligonucleotide
ccacggucuuuaucagugu

SEQ ID NO: 1636530 - RNA, 19 nt, Artificial Sequence
  Description of Artificial Sequence: Synthetic oligonucleotide
ccgccacacacggccacuc

SEQ ID NO: 1636531 - RNA, 19 nt, Artificial Sequence
  Description of Artificial Sequence: Synthetic oligonucleotide
ccauaagguccugggacau

SEQ ID NO: 1636532 - RNA, 19 nt, Artificial Sequence
  Description of Artificial Sequence: Synthetic oligonucleotide
gcucggcguaguacuccuc

SEQ ID NO: 1636533 - RNA, 19 nt, Artificial Sequence
  Description of Artificial Sequence: Synthetic oligonucleotide
gcagcgcgaagaggcucuc

SEQ ID NO: 1636534 - RNA, 19 nt, Artificial Sequence
  Description of Artificial Sequence: Synthetic oligonucleotide
cccacacggugcagcgcga

SEQ ID NO: 1636535 - RNA, 19 nt, Artificial Sequence
  Description of Artificial Sequence: Synthetic oligonucleotide
cgggcguugucucccugaa

SEQ ID NO: 1636536 - RNA, 19 nt, Artificial Sequence
  Description of Artificial Sequence: Synthetic oligonucleotide
ccggaaggcccagcgccca

SEQ ID NO: 1636537 - RNA, 19 nt, Artificial Sequence
  Description of Artificial Sequence: Synthetic oligonucleotide
cgccaagaacacaauucuu

SEQ ID NO: 1636538 - RNA, 19 nt, Artificial Sequence
  Description of Artificial Sequence: Synthetic oligonucleotide
gcgcuccguugguccucag

SEQ ID NO: 1636539 - RNA, 19 nt, Artificial Sequence
  Description of Artificial Sequence: Synthetic oligonucleotide
ccacgagugcccggcccca

SEQ ID NO: 1636540 - RNA, 19 nt, Artificial Sequence
  Description of Artificial Sequence: Synthetic oligonucleotide
ccacacggugcagcgcgaa

SEQ ID NO: 1636541 - RNA, 19 nt, Artificial Sequence
  Description of Artificial Sequence: Synthetic oligonucleotide
gcgggccggaaggcccagc

SEQ ID NO: 1636542 - RNA, 19 nt, Artificial Sequence
  Description of Artificial Sequence: Synthetic oligonucleotide
cggcgcuccguugguccuc

SEQ ID NO: 1636543 - RNA, 19 nt, Artificial Sequence
  Description of Artificial Sequence: Synthetic oligonucleotide
cgguggcgaccggcucggc

SEQ ID NO: 1636544 - RNA, 19 nt, Artificial Sequence
  Description of Artificial Sequence: Synthetic oligonucleotide
aauuuauuaacuucauccc

SEQ ID NO: 1636545 - RNA, 19 nt, Artificial Sequence
  Description of Artificial Sequence: Synthetic oligonucleotide
uuaaguuuugguuuuaggg

SEQ ID NO: 1636546 - RNA, 19 nt, Artificial Sequence
  Description of Artificial Sequence: Synthetic oligonucleotide
auaguagcgaacuucaugc

SEQ ID NO: 1636547 - RNA, 19 nt, Artificial Sequence
  Description of Artificial Sequence: Synthetic oligonucleotide
auuaacuucaucccagucc

SEQ ID NO: 1636548 - RNA, 19 nt, Artificial Sequence
  Description of Artificial Sequence: Synthetic oligonucleotide
  modified_base (16)..(16): a, c, u, g, unknown or other
caacucuugaccuaunucg

SEQ ID NO: 1636549 - RNA, 19 nt, Artificial Sequence
  Description of Artificial Sequence: Synthetic oligonucleotide
auuaugggcauacucaggc

SEQ ID NO: 1636550 - RNA, 19 nt, Artificial Sequence
  Description of Artificial Sequence: Synthetic oligonucleotide
aaugaccucauucucguac

SEQ ID NO: 1636551 - RNA, 19 nt, Artificial Sequence
  Description of Artificial Sequence: Synthetic oligonucleotide
uauacaacccauauaguag

SEQ ID NO: 1636552 - RNA, 19 nt, Artificial Sequence
  Description of Artificial Sequence: Synthetic oligonucleotide
agaauugaaauaaaacucc

SEQ ID NO: 1636553 - RNA, 19 nt, Artificial Sequence
  Description of Artificial Sequence: Synthetic oligonucleotide
uuugauaaugaucaugaac

SEQ ID NO: 1636554 - RNA, 19 nt, Artificial Sequence
  Description of Artificial Sequence: Synthetic oligonucleotide
cuuccguucauucugaacg

SEQ ID NO: 1636555 - RNA, 19 nt, Artificial Sequence
  Description of Artificial Sequence: Synthetic oligonucleotide
uccucuucggcaauuaugg

SEQ ID NO: 1636556 - RNA, 19 nt, Artificial Sequence
  Description of Artificial Sequence: Synthetic oligonucleotide
ugaucaugaacauucaaca

SEQ ID NO: 1636557 - RNA, 19 nt, Artificial Sequence
  Description of Artificial Sequence: Synthetic oligonucleotide
ucaacauuuccucuaauac

SEQ ID NO: 1636558 - RNA, 19 nt, Artificial Sequence
  Description of Artificial Sequence: Synthetic oligonucleotide
aaggcuuuugcuuugauuu

SEQ ID NO: 1636559 - RNA, 19 nt, Artificial Sequence
  Description of Artificial Sequence: Synthetic oligonucleotide
aaguugucaguccuccucc

SEQ ID NO: 1636560 - RNA, 19 nt, Artificial Sequence
  Description of Artificial Sequence: Synthetic oligonucleotide
gaagugauaaguuucauua

SEQ ID NO: 1636561 - RNA, 19 nt, Artificial Sequence
  Description of Artificial Sequence: Synthetic oligonucleotide
uaaguuuugguuuuagggu

SEQ ID NO: 1636562 - RNA, 19 nt, Artificial Sequence
  Description of Artificial Sequence: Synthetic oligonucleotide
gacuuaucagcugagauag

SEQ ID NO: 1636563 - RNA, 19 nt, Artificial Sequence
  Description of Artificial Sequence: Synthetic oligonucleotide
ugaacguuaccucugcucc

SEQ ID NO: 1636564 - RNA, 19 nt, Artificial Sequence
  Description of Artificial Sequence: Synthetic oligonucleotide
aagugauaaguuucauuac

SEQ ID NO: 1636565 - RNA, 19 nt, Artificial Sequence
  Description of Artificial Sequence: Synthetic oligonucleotide
uucagggcgacucugaucu

SEQ ID NO: 1636566 - RNA, 19 nt, Artificial Sequence
  Description of Artificial Sequence: Synthetic oligonucleotide
ugauaaguuucauuacacg

SEQ ID NO: 1636567 - RNA, 19 nt, Artificial Sequence
  Description of Artificial Sequence: Synthetic oligonucleotide
ugcuccaaaacuauguucu

SEQ ID NO: 1636568 - RNA, 19 nt, Artificial Sequence
  Description of Artificial Sequence: Synthetic oligonucleotide
aauugaaauaaaacuccac

SEQ ID NO: 1636569 - RNA, 19 nt, Artificial Sequence
  Description of Artificial Sequence: Synthetic oligonucleotide
aauagcgccaggccagagc

SEQ ID NO: 1636570 - RNA, 19 nt, Artificial Sequence
  Description of Artificial Sequence: Synthetic oligonucleotide
uuauacaacccauauagua

SEQ ID NO: 1636571 - RNA, 19 nt, Artificial Sequence
  Description of Artificial Sequence: Synthetic oligonucleotide
ucuucggcaauuaugggca

SEQ ID NO: 1636572 - RNA, 19 nt, Artificial Sequence
  Description of Artificial Sequence: Synthetic oligonucleotide
ucauuacacgaucacuugg

SEQ ID NO: 1636573 - RNA, 19 nt, Artificial Sequence
  Description of Artificial Sequence: Synthetic oligonucleotide
ucuaauacaucagaaguga

SEQ ID NO: 1636574 - RNA, 19 nt, Artificial Sequence
  Description of Artificial Sequence: Synthetic oligonucleotide
aaaccuguucuucuguaag

SEQ ID NO: 1636575 - RNA, 19 nt, Artificial Sequence
  Description of Artificial Sequence: Synthetic oligonucleotide
agcugcguguuauacaacc

SEQ ID NO: 1636576 - RNA, 19 nt, Artificial Sequence
  Description of Artificial Sequence: Synthetic oligonucleotide
  modified_base (7)..(7): a, c, u, g, unknown or other
accuaunucgggcucuccc

SEQ ID NO: 1636577 - RNA, 19 nt, Artificial Sequence
  Description of Artificial Sequence: Synthetic oligonucleotide
uuuagggucggauucuucc

SEQ ID NO: 1636578 - RNA, 19 nt, Artificial Sequence
  Description of Artificial Sequence: Synthetic oligonucleotide
ugugcauuuaucaagucuu

SEQ ID NO: 1636579 - RNA, 19 nt, Artificial Sequence
  Description of Artificial Sequence: Synthetic oligonucleotide
ugggcaacagcugaaaagg

SEQ ID NO: 1636580 - RNA, 19 nt, Artificial Sequence
  Description of Artificial Sequence: Synthetic oligonucleotide
agugauaaguuucauuaca

SEQ ID NO: 1636581 - RNA, 19 nt, Artificial Sequence
  Description of Artificial Sequence: Synthetic oligonucleotide
aguuucauuacacgaucac

SEQ ID NO: 1636582 - RNA, 19 nt, Artificial Sequence
  Description of Artificial Sequence: Synthetic oligonucleotide
uuugggucacuucaguuug

SEQ ID NO: 1636583 - RNA, 19 nt, Artificial Sequence
  Description of Artificial Sequence: Synthetic oligonucleotide
acaugaaagcagcuugggc

SEQ ID NO: 1636584 - RNA, 19 nt, Artificial Sequence
  Description of Artificial Sequence: Synthetic oligonucleotide
cuggcaucgacuuaucagc

SEQ ID NO: 1636585 - RNA, 19 nt, Artificial Sequence
  Description of Artificial Sequence: Synthetic oligonucleotide
cauuuaucaagucuugcug

SEQ ID NO: 1636586 - RNA, 19 nt, Artificial Sequence
  Description of Artificial Sequence: Synthetic oligonucleotide
aacuauguucuuaauguug

SEQ ID NO: 1636587 - RNA, 19 nt, Artificial Sequence
  Description of Artificial Sequence: Synthetic oligonucleotide
cucuaauacaucagaagug

SEQ ID NO: 1636588 - RNA, 19 nt, Artificial Sequence
  Description of Artificial Sequence: Synthetic oligonucleotide
agagcuaaagccucuuuug

SEQ ID NO: 1636589 - RNA, 19 nt, Artificial Sequence
  Description of Artificial Sequence: Synthetic oligonucleotide
caauuaugggcauacucag

SEQ ID NO: 1636590 - RNA, 19 nt, Artificial Sequence
  Description of Artificial Sequence: Synthetic oligonucleotide
ucgaagauuccugaaaaug

SEQ ID NO: 1636591 - RNA, 19 nt, Artificial Sequence
  Description of Artificial Sequence: Synthetic oligonucleotide
agaaaugaccucauucucg

SEQ ID NO: 1636592 - RNA, 19 nt, Artificial Sequence
  Description of Artificial Sequence: Synthetic oligonucleotide
uaucaagucuugcugaaau

SEQ ID NO: 1636593 - RNA, 19 nt, Artificial Sequence
  Description of Artificial Sequence: Synthetic oligonucleotide
uucauucugaacguuaccu

SEQ ID NO: 1636594 - RNA, 19 nt, Artificial Sequence
  Description of Artificial Sequence: Synthetic oligonucleotide
aaguuuggcuuggcgaugc

SEQ ID NO: 1636595 - RNA, 19 nt, Artificial Sequence
  Description of Artificial Sequence: Synthetic oligonucleotide
aaagcucagaauugaaaua

SEQ ID NO: 1636596 - RNA, 19 nt, Artificial Sequence
  Description of Artificial Sequence: Synthetic oligonucleotide
ucugcuucgcugaaguugu

SEQ ID NO: 1636597 - RNA, 19 nt, Artificial Sequence
  Description of Artificial Sequence: Synthetic oligonucleotide
uguugaugcuccaaaacua

SEQ ID NO: 1636598 - RNA, 19 nt, Artificial Sequence
  Description of Artificial Sequence: Synthetic oligonucleotide
auacaacccauauaguaga

SEQ ID NO: 1636599 - RNA, 19 nt, Artificial Sequence
  Description of Artificial Sequence: Synthetic oligonucleotide
cauucucguacguuggucc

SEQ ID NO: 1636600 - RNA, 19 nt, Artificial Sequence
  Description of Artificial Sequence: Synthetic oligonucleotide
aagauaguagcgaacuuca

SEQ ID NO: 1636601 - RNA, 19 nt, Artificial Sequence
  Description of Artificial Sequence: Synthetic oligonucleotide
  modified_base (15)..(15): a, c, u, g, unknown or other
aacucuugaccuaunucgg

SEQ ID NO: 1636602 - RNA, 19 nt, Artificial Sequence
  Description of Artificial Sequence: Synthetic oligonucleotide
cuacaugaaagcagcuugg

SEQ ID NO: 1636603 - RNA, 19 nt, Artificial Sequence
  Description of Artificial Sequence: Synthetic oligonucleotide
uccugcucagaacaaacca

SEQ ID NO: 1636604 - RNA, 19 nt, Artificial Sequence
  Description of Artificial Sequence: Synthetic oligonucleotide
uucauuacacgaucacuug

SEQ ID NO: 1636605 - RNA, 19 nt, Artificial Sequence
  Description of Artificial Sequence: Synthetic oligonucleotide
uaagaaagcucagaauuga

SEQ ID NO: 1636606 - RNA, 19 nt, Artificial Sequence
  Description of Artificial Sequence: Synthetic oligonucleotide
gaagauaguagcgaacuuc

SEQ ID NO: 1636607 - RNA, 19 nt, Artificial Sequence
  Description of Artificial Sequence: Synthetic oligonucleotide
ucaaguuuggcuuggcgau

SEQ ID NO: 1636608 - RNA, 19 nt, Artificial Sequence
  Description of Artificial Sequence: Synthetic oligonucleotide
aauuaugggcauacucagg

SEQ ID NO: 1636609 - RNA, 19 nt, Artificial Sequence
  Description of Artificial Sequence: Synthetic oligonucleotide
augcugugcauuuaucaag

SEQ ID NO: 1636610 - RNA, 19 nt, Artificial Sequence
  Description of Artificial Sequence: Synthetic oligonucleotide
ugguuuuagggucggauuc

SEQ ID NO: 1636611 - RNA, 19 nt, Artificial Sequence
  Description of Artificial Sequence: Synthetic oligonucleotide
  modified_base (13)..(13): a, c, u, g, unknown or other
cucuugaccuaunucgggc

SEQ ID NO: 1636612 - RNA, 19 nt, Artificial Sequence
  Description of Artificial Sequence: Synthetic oligonucleotide
auuccugaaaaugaaggcu

SEQ ID NO: 1636613 - RNA, 19 nt, Artificial Sequence
  Description of Artificial Sequence: Synthetic oligonucleotide
uuuugggucacuucaguuu

SEQ ID NO: 1636614 - RNA, 19 nt, Artificial Sequence
  Description of Artificial Sequence: Synthetic oligonucleotide
uuggaagguguauggaggc

SEQ ID NO: 1636615 - RNA, 19 nt, Artificial Sequence
  Description of Artificial Sequence: Synthetic oligonucleotide
uccgcgaaguccucgaagc

SEQ ID NO: 1636616 - RNA, 19 nt, Artificial Sequence
  Description of Artificial Sequence: Synthetic oligonucleotide
uuuggcuuggcgaugccuc

SEQ ID NO: 1636617 - RNA, 19 nt, Artificial Sequence
  Description of Artificial Sequence: Synthetic oligonucleotide
ggguccuuaaacuuuuggg

SEQ ID NO: 1636618 - RNA, 19 nt, Artificial Sequence
  Description of Artificial Sequence: Synthetic oligonucleotide
uaaugaucaugaacauuca

SEQ ID NO: 1636619 - RNA, 19 nt, Artificial Sequence
  Description of Artificial Sequence: Synthetic oligonucleotide
ucgacuuaucagcugagau

SEQ ID NO: 1636620 - RNA, 19 nt, Artificial Sequence
  Description of Artificial Sequence: Synthetic oligonucleotide
guaagaaagcucagaauug

SEQ ID NO: 1636621 - RNA, 19 nt, Artificial Sequence
  Description of Artificial Sequence: Synthetic oligonucleotide
agucaaguuuggcuuggcg

SEQ ID NO: 1636622 - RNA, 19 nt, Artificial Sequence
  Description of Artificial Sequence: Synthetic oligonucleotide
uaugggcauacucaggcau

SEQ ID NO: 1636623 - RNA, 19 nt, Artificial Sequence
  Description of Artificial Sequence: Synthetic oligonucleotide
aaccuguucuucuguaaga

SEQ ID NO: 1636624 - RNA, 19 nt, Artificial Sequence
  Description of Artificial Sequence: Synthetic oligonucleotide
uacaugaaagcagcuuggg

SEQ ID NO: 1636625 - RNA, 19 nt, Artificial Sequence
  Description of Artificial Sequence: Synthetic oligonucleotide
cuuccuuccguucauucug

SEQ ID NO: 1636626 - RNA, 19 nt, Artificial Sequence
  Description of Artificial Sequence: Synthetic oligonucleotide
ugcagugaacucugcuucg

SEQ ID NO: 1636627 - RNA, 19 nt, Artificial Sequence
  Description of Artificial Sequence: Synthetic oligonucleotide
ugcgucgaaaugcugugca

SEQ ID NO: 1636628 - RNA, 19 nt, Artificial Sequence
  Description of Artificial Sequence: Synthetic oligonucleotide
ugauaaugaucaugaacau

SEQ ID NO: 1636629 - RNA, 19 nt, Artificial Sequence
  Description of Artificial Sequence: Synthetic oligonucleotide
gucaaguuuggcuuggcga

SEQ ID NO: 1636630 - RNA, 19 nt, Artificial Sequence
  Description of Artificial Sequence: Synthetic oligonucleotide
auaaguuucauuacacgau

SEQ ID NO: 1636631 - RNA, 19 nt, Artificial Sequence
  Description of Artificial Sequence: Synthetic oligonucleotide
guccuuaaacuuuuggguc

SEQ ID NO: 1636632 - RNA, 19 nt, Artificial Sequence
  Description of Artificial Sequence: Synthetic oligonucleotide
uucugaacguuaccucugc

SEQ ID NO: 1636633 - RNA, 19 nt, Artificial Sequence
  Description of Artificial Sequence: Synthetic oligonucleotide
uggacuuggaugccugggc

SEQ ID NO: 1636634 - RNA, 19 nt, Artificial Sequence
  Description of Artificial Sequence: Synthetic oligonucleotide
ucauucugaacguuaccuc

SEQ ID NO: 1636635 - RNA, 19 nt, Artificial Sequence
  Description of Artificial Sequence: Synthetic oligonucleotide
  modified_base (12)..(12): a, c, u, g, unknown or other
ucuugaccuaunucgggcu

SEQ ID NO: 1636636 - RNA, 19 nt, Artificial Sequence
  Description of Artificial Sequence: Synthetic oligonucleotide
gauagcacgcuucauauuu

SEQ ID NO: 1636637 - RNA, 19 nt, Artificial Sequence
  Description of Artificial Sequence: Synthetic oligonucleotide
cucgcagucggucugcaag

SEQ ID NO: 1636638 - RNA, 19 nt, Artificial Sequence
  Description of Artificial Sequence: Synthetic oligonucleotide
gaagcggcugagcagcgcc

SEQ ID NO: 1636639 - RNA, 19 nt, Artificial Sequence
  Description of Artificial Sequence: Synthetic oligonucleotide
acucugaucuuuuguuuug

SEQ ID NO: 1636640 - RNA, 19 nt, Artificial Sequence
  Description of Artificial Sequence: Synthetic oligonucleotide
acagaagauaguagcgaac

SEQ ID NO: 1636641 - RNA, 19 nt, Artificial Sequence
  Description of Artificial Sequence: Synthetic oligonucleotide
uuuugauaaugaucaugaa

SEQ ID NO: 1636642 - RNA, 19 nt, Artificial Sequence
  Description of Artificial Sequence: Synthetic oligonucleotide
gugauaaguuucauuacac

SEQ ID NO: 1636643 - RNA, 19 nt, Artificial Sequence
  Description of Artificial Sequence: Synthetic oligonucleotide
agggcuuugucuggcaucg

SEQ ID NO: 1636644 - RNA, 19 nt, Artificial Sequence
  Description of Artificial Sequence: Synthetic oligonucleotide
uuugguuuuagggucggau

SEQ ID NO: 1636645 - RNA, 19 nt, Artificial Sequence
  Description of Artificial Sequence: Synthetic oligonucleotide
uuacacgaucacuuggguc

SEQ ID NO: 1636646 - RNA, 19 nt, Artificial Sequence
  Description of Artificial Sequence: Synthetic oligonucleotide
ucucguacguugguccucg

SEQ ID NO: 1636647 - RNA, 19 nt, Artificial Sequence
  Description of Artificial Sequence: Synthetic oligonucleotide
cuuaucagcugagauagca

SEQ ID NO: 1636648 - RNA, 19 nt, Artificial Sequence
  Description of Artificial Sequence: Synthetic oligonucleotide
aagccucuuuuguaaacau

SEQ ID NO: 1636649 - RNA, 19 nt, Artificial Sequence
  Description of Artificial Sequence: Synthetic oligonucleotide
aaguuucauuacacgauca

SEQ ID NO: 1636650 - RNA, 19 nt, Artificial Sequence
  Description of Artificial Sequence: Synthetic oligonucleotide
ucagaguccgaagagucaa

SEQ ID NO: 1636651 - RNA, 19 nt, Artificial Sequence
  Description of Artificial Sequence: Synthetic oligonucleotide
auacaucagaagugauaag

SEQ ID NO: 1636652 - RNA, 19 nt, Artificial Sequence
  Description of Artificial Sequence: Synthetic oligonucleotide
ugcguguuauacaacccau

SEQ ID NO: 1636653 - RNA, 19 nt, Artificial Sequence
  Description of Artificial Sequence: Synthetic oligonucleotide
uuagggucggauucuuccu

SEQ ID NO: 1636654 - RNA, 19 nt, Artificial Sequence
  Description of Artificial Sequence: Synthetic oligonucleotide
gcauaaagacuucucuucc

SEQ ID NO: 1636655 - RNA, 19 nt, Artificial Sequence
  Description of Artificial Sequence: Synthetic oligonucleotide
uuaugggcauacucaggca

SEQ ID NO: 1636656 - RNA, 19 nt, Artificial Sequence
  Description of Artificial Sequence: Synthetic oligonucleotide
aacguuaccucugcuccug

SEQ ID NO: 1636657 - RNA, 19 nt, Artificial Sequence
  Description of Artificial Sequence: Synthetic oligonucleotide
uguccagucgaagauuccu

SEQ ID NO: 1636658 - RNA, 19 nt, Artificial Sequence
  Description of Artificial Sequence: Synthetic oligonucleotide
uagggucggauucuuccug

SEQ ID NO: 1636659 - RNA, 19 nt, Artificial Sequence
  Description of Artificial Sequence: Synthetic oligonucleotide
uagcacgcuucauauuuug

SEQ ID NO: 1636660 - RNA, 19 nt, Artificial Sequence
  Description of Artificial Sequence: Synthetic oligonucleotide
uuaaacuuuugggucacuu

SEQ ID NO: 1636661 - RNA, 19 nt, Artificial Sequence
  Description of Artificial Sequence: Synthetic oligonucleotide
uugguuuuagggucggauu

SEQ ID NO: 1636662 - RNA, 19 nt, Artificial Sequence
  Description of Artificial Sequence: Synthetic oligonucleotide
guucauucugaacguuacc

SEQ ID NO: 1636663 - RNA, 19 nt, Artificial Sequence
  Description of Artificial Sequence: Synthetic oligonucleotide
  modified_base (10)..(10): a, c, u, g, unknown or other
uugaccuaunucgggcucu

SEQ ID NO: 1636664 - RNA, 19 nt, Artificial Sequence
  Description of Artificial Sequence: Synthetic oligonucleotide
uagcgaacuucaugcugcg

SEQ ID NO: 1636665 - RNA, 19 nt, Artificial Sequence
  Description of Artificial Sequence: Synthetic oligonucleotide
gcaauuaugggcauacuca

SEQ ID NO: 1636666 - RNA, 19 nt, Artificial Sequence
  Description of Artificial Sequence: Synthetic oligonucleotide
acacagcugcguguuauac

SEQ ID NO: 1636667 - RNA, 19 nt, Artificial Sequence
  Description of Artificial Sequence: Synthetic oligonucleotide
uugcccuuguccagacccg

SEQ ID NO: 1636668 - RNA, 19 nt, Artificial Sequence
  Description of Artificial Sequence: Synthetic oligonucleotide
uuccguucauucugaacgu

SEQ ID NO: 1636669 - RNA, 19 nt, Artificial Sequence
  Description of Artificial Sequence: Synthetic oligonucleotide
ggcaauuaugggcauacuc

SEQ ID NO: 1636670 - RNA, 19 nt, Artificial Sequence
  Description of Artificial Sequence: Synthetic oligonucleotide
uggcaucgacuuaucagcu

SEQ ID NO: 1636671 - RNA, 19 nt, Artificial Sequence
  Description of Artificial Sequence: Synthetic oligonucleotide
gagauagcacgcuucauau

SEQ ID NO: 1636672 - RNA, 19 nt, Artificial Sequence
  Description of Artificial Sequence: Synthetic oligonucleotide
cagucggucugcaagccug

SEQ ID NO: 1636673 - RNA, 19 nt, Artificial Sequence
  Description of Artificial Sequence: Synthetic oligonucleotide
gugaacucugcuucgcuga

SEQ ID NO: 1636674 - RNA, 19 nt, Artificial Sequence
  Description of Artificial Sequence: Synthetic oligonucleotide
ucgcagucggucugcaagc

SEQ ID NO: 1636675 - RNA, 19 nt, Artificial Sequence
  Description of Artificial Sequence: Synthetic oligonucleotide
uucuacaugaaagcagcuu

SEQ ID NO: 1636676 - RNA, 19 nt, Artificial Sequence
  Description of Artificial Sequence: Synthetic oligonucleotide
uuuuagggucggauucuuc

SEQ ID NO: 1636677 - RNA, 19 nt, Artificial Sequence
  Description of Artificial Sequence: Synthetic oligonucleotide
uacaacccauauaguagau

SEQ ID NO: 1636678 - RNA, 19 nt, Artificial Sequence
  Description of Artificial Sequence: Synthetic oligonucleotide
aguagauacaaagcaccaa

SEQ ID NO: 1636679 - RNA, 19 nt, Artificial Sequence
  Description of Artificial Sequence: Synthetic oligonucleotide
uuuaccaggcugagggcuu

SEQ ID NO: 1636680 - RNA, 19 nt, Artificial Sequence
  Description of Artificial Sequence: Synthetic oligonucleotide
gcuaaagccucuuuuguaa

SEQ ID NO: 1636681 - RNA, 19 nt, Artificial Sequence
  Description of Artificial Sequence: Synthetic oligonucleotide
agcugagauagcacgcuuc

SEQ ID NO: 1636682 - RNA, 19 nt, Artificial Sequence
  Description of Artificial Sequence: Synthetic oligonucleotide
gaucaugaacauucaacau

SEQ ID NO: 1636683 - RNA, 19 nt, Artificial Sequence
  Description of Artificial Sequence: Synthetic oligonucleotide
aaaugaaggcugcgucgaa

SEQ ID NO: 1636684 - RNA, 19 nt, Artificial Sequence
  Description of Artificial Sequence: Synthetic oligonucleotide
gcuucgcugaaguugucag

SEQ ID NO: 1636685 - RNA, 19 nt, Artificial Sequence
  Description of Artificial Sequence: Synthetic oligonucleotide
cauucugaacguuaccucu

SEQ ID NO: 1636686 - RNA, 19 nt, Artificial Sequence
  Description of Artificial Sequence: Synthetic oligonucleotide
agaagauaguagcgaacuu

SEQ ID NO: 1636687 - RNA, 19 nt, Artificial Sequence
  Description of Artificial Sequence: Synthetic oligonucleotide
  modified_base (3)..(3): a, c, u, g, unknown or other
aunucgggcucucccauuu

SEQ ID NO: 1636688 - RNA, 19 nt, Artificial Sequence
  Description of Artificial Sequence: Synthetic oligonucleotide
cuguugaugcuccaaaacu

SEQ ID NO: 1636689 - RNA, 19 nt, Artificial Sequence
  Description of Artificial Sequence: Synthetic oligonucleotide
uuggcuuggcgaugccucc

SEQ ID NO: 1636690 - RNA, 19 nt, Artificial Sequence
  Description of Artificial Sequence: Synthetic oligonucleotide
uggcgaugccuccuggacu

SEQ ID NO: 1636691 - RNA, 19 nt, Artificial Sequence
  Description of Artificial Sequence: Synthetic oligonucleotide
caucgacuuaucagcugag

SEQ ID NO: 1636692 - RNA, 19 nt, Artificial Sequence
  Description of Artificial Sequence: Synthetic oligonucleotide
gaaaugcugugcauuuauc

SEQ ID NO: 1636693 - RNA, 19 nt, Artificial Sequence
  Description of Artificial Sequence: Synthetic oligonucleotide
ucgcugaaguugucagucc

SEQ ID NO: 1636694 - RNA, 19 nt, Artificial Sequence
  Description of Artificial Sequence: Synthetic oligonucleotide
ucauucucguacguugguc

SEQ ID NO: 1636695 - RNA, 19 nt, Artificial Sequence
  Description of Artificial Sequence: Synthetic oligonucleotide
ucuugggugcagugaacuc

SEQ ID NO: 1636696 - RNA, 19 nt, Artificial Sequence
  Description of Artificial Sequence: Synthetic oligonucleotide
uuaucaagucuugcugaaa

SEQ ID NO: 1636697 - RNA, 19 nt, Artificial Sequence
  Description of Artificial Sequence: Synthetic oligonucleotide
uggaagcggcugagcagcg

SEQ ID NO: 1636698 - RNA, 19 nt, Artificial Sequence
  Description of Artificial Sequence: Synthetic oligonucleotide
ugcgccagagcuccgcgaa

SEQ ID NO: 1636699 - RNA, 19 nt, Artificial Sequence
  Description of Artificial Sequence: Synthetic oligonucleotide
ugcuucgcugaaguuguca

SEQ ID NO: 1636700 - RNA, 19 nt, Artificial Sequence
  Description of Artificial Sequence: Synthetic oligonucleotide
  modified_base (11)..(11): a, c, u, g, unknown or other
cuugaccuaunucgggcuc

SEQ ID NO: 1636701 - RNA, 19 nt, Artificial Sequence
  Description of Artificial Sequence: Synthetic oligonucleotide
ucguacguugguccucgcu

SEQ ID NO: 1636702 - RNA, 19 nt, Artificial Sequence
  Description of Artificial Sequence: Synthetic oligonucleotide
aggacuccgcucuuucaca

SEQ ID NO: 1636703 - RNA, 19 nt, Artificial Sequence
  Description of Artificial Sequence: Synthetic oligonucleotide
agaguccgaagagucaagu

SEQ ID NO: 1636704 - RNA, 19 nt, Artificial Sequence
  Description of Artificial Sequence: Synthetic oligonucleotide
ucaugcugcgccagagcuc

SEQ ID NO: 1636705 - RNA, 19 nt, Artificial Sequence
  Description of Artificial Sequence: Synthetic oligonucleotide
ugacacagcugcguguuau

SEQ ID NO: 1636706 - RNA, 19 nt, Artificial Sequence
  Description of Artificial Sequence: Synthetic oligonucleotide
gcaucgacuuaucagcuga

SEQ ID NO: 1636707 - RNA, 19 nt, Artificial Sequence
  Description of Artificial Sequence: Synthetic oligonucleotide
aaaugaccucauucucgua

SEQ ID NO: 1636708 - RNA, 19 nt, Artificial Sequence
  Description of Artificial Sequence: Synthetic oligonucleotide
gaacuucaugcugcgccag

SEQ ID NO: 1636709 - RNA, 19 nt, Artificial Sequence
  Description of Artificial Sequence: Synthetic oligonucleotide
cuaaagccucuuuuguaaa

SEQ ID NO: 1636710 - RNA, 19 nt, Artificial Sequence
  Description of Artificial Sequence: Synthetic oligonucleotide
aguugucaguccuccuccu

SEQ ID NO: 1636711 - RNA, 19 nt, Artificial Sequence
  Description of Artificial Sequence: Synthetic oligonucleotide
acaaagcaccaacucugau

SEQ ID NO: 1636712 - RNA, 19 nt, Artificial Sequence
  Description of Artificial Sequence: Synthetic oligonucleotide
cacgggacgggucccggcg

SEQ ID NO: 1636713 - RNA, 19 nt, Artificial Sequence
  Description of Artificial Sequence: Synthetic oligonucleotide
ccucauucucguacguugg

SEQ ID NO: 1636714 - RNA, 19 nt, Artificial Sequence
  Description of Artificial Sequence: Synthetic oligonucleotide
acguugguccucgcuggcc

SEQ ID NO: 1636715 - RNA, 19 nt, Artificial Sequence
  Description of Artificial Sequence: Synthetic oligonucleotide
agcgcuuucuuuuccucuu

SEQ ID NO: 1636716 - RNA, 19 nt, Artificial Sequence
  Description of Artificial Sequence: Synthetic oligonucleotide
  modified_base (4)..(4): a, c, u, g, unknown or other
uaunucgggcucucccauu

SEQ ID NO: 1636717 - RNA, 19 nt, Artificial Sequence
  Description of Artificial Sequence: Synthetic oligonucleotide
ggaaggcucuguccagucg

SEQ ID NO: 1636718 - RNA, 19 nt, Artificial Sequence
  Description of Artificial Sequence: Synthetic oligonucleotide
agggucggauucuuccugu

SEQ ID NO: 1636719 - RNA, 19 nt, Artificial Sequence
  Description of Artificial Sequence: Synthetic oligonucleotide
cgaagauuccugaaaauga

SEQ ID NO: 1636720 - RNA, 19 nt, Artificial Sequence
  Description of Artificial Sequence: Synthetic oligonucleotide
cuccgcgaaguccucgaag

SEQ ID NO: 1636721 - RNA, 19 nt, Artificial Sequence
  Description of Artificial Sequence: Synthetic oligonucleotide
uggucagcgcuuucuuuuc

SEQ ID NO: 1636722 - RNA, 19 nt, Artificial Sequence
  Description of Artificial Sequence: Synthetic oligonucleotide
cauaaagacuucucuuccu

SEQ ID NO: 1636723 - RNA, 19 nt, Artificial Sequence
  Description of Artificial Sequence: Synthetic oligonucleotide
cuguccagucgaagauucc

SEQ ID NO: 1636724 - RNA, 19 nt, Artificial Sequence
  Description of Artificial Sequence: Synthetic oligonucleotide
uccucgcuggccagccucc

SEQ ID NO: 1636725 - RNA, 19 nt, Artificial Sequence
  Description of Artificial Sequence: Synthetic oligonucleotide
acguuaccucugcuccugg

SEQ ID NO: 1636726 - RNA, 19 nt, Artificial Sequence
  Description of Artificial Sequence: Synthetic oligonucleotide
guccagucgaagauuccug

SEQ ID NO: 1636727 - RNA, 19 nt, Artificial Sequence
  Description of Artificial Sequence: Synthetic oligonucleotide
aucgacuuaucagcugaga

SEQ ID NO: 1636728 - RNA, 19 nt, Artificial Sequence
  Description of Artificial Sequence: Synthetic oligonucleotide
agauagcacgcuucauauu

SEQ ID NO: 1636729 - RNA, 19 nt, Artificial Sequence
  Description of Artificial Sequence: Synthetic oligonucleotide
ucggauucuuccugucuuu

SEQ ID NO: 1636730 - RNA, 19 nt, Artificial Sequence
  Description of Artificial Sequence: Synthetic oligonucleotide
cagucgaagauuccugaaa

SEQ ID NO: 1636731 - RNA, 19 nt, Artificial Sequence
  Description of Artificial Sequence: Synthetic oligonucleotide
cugcaagcguccccgcgcc

SEQ ID NO: 1636732 - RNA, 19 nt, Artificial Sequence
  Description of Artificial Sequence: Synthetic oligonucleotide
agcgccucgcagucggucu

SEQ ID NO: 1636733 - RNA, 19 nt, Artificial Sequence
  Description of Artificial Sequence: Synthetic oligonucleotide
aggcuuuugcuuugauuuu

SEQ ID NO: 1636734 - RNA, 19 nt, Artificial Sequence
  Description of Artificial Sequence: Synthetic oligonucleotide
ggcucuguccagucgaaga

SEQ ID NO: 1636735 - RNA, 19 nt, Artificial Sequence
  Description of Artificial Sequence: Synthetic oligonucleotide
cggucugcaagccuggcgg

SEQ ID NO: 1636736 - RNA, 19 nt, Artificial Sequence
  Description of Artificial Sequence: Synthetic oligonucleotide
uuuugguuuuagggucgga

SEQ ID NO: 1636737 - RNA, 19 nt, Artificial Sequence
  Description of Artificial Sequence: Synthetic oligonucleotide
cguucauucugaacguuac

SEQ ID NO: 1636738 - RNA, 19 nt, Artificial Sequence
  Description of Artificial Sequence: Synthetic oligonucleotide
ggcuuugucuggcaucgac

SEQ ID NO: 1636739 - RNA, 19 nt, Artificial Sequence
  Description of Artificial Sequence: Synthetic oligonucleotide
  modified_base (9)..(9): a, c, u, g, unknown or other
ugaccuaunucgggcucuc

SEQ ID NO: 1636740 - RNA, 19 nt, Artificial Sequence
  Description of Artificial Sequence: Synthetic oligonucleotide
  modified_base (2)..(2): a, c, u, g, unknown or other
unucgggcucucccauuuc

SEQ ID NO: 1636741 - RNA, 19 nt, Artificial Sequence
  Description of Artificial Sequence: Synthetic oligonucleotide
agcuccgcgaaguccucga

SEQ ID NO: 1636742 - RNA, 19 nt, Artificial Sequence
  Description of Artificial Sequence: Synthetic oligonucleotide
acucaggcauaaagacuuc

SEQ ID NO: 1636743 - RNA, 19 nt, Artificial Sequence
  Description of Artificial Sequence: Synthetic oligonucleotide
caaguuuggcuuggcgaug

SEQ ID NO: 1636744 - RNA, 19 nt, Artificial Sequence
  Description of Artificial Sequence: Synthetic oligonucleotide
ugucuggcaucgacuuauc

SEQ ID NO: 1636745 - RNA, 19 nt, Artificial Sequence
  Description of Artificial Sequence: Synthetic oligonucleotide
acaacccauauaguagaua

SEQ ID NO: 1636746 - RNA, 19 nt, Artificial Sequence
  Description of Artificial Sequence: Synthetic oligonucleotide
guugaugcuccaaaacuau

SEQ ID NO: 1636747 - RNA, 19 nt, Artificial Sequence
  Description of Artificial Sequence: Synthetic oligonucleotide
ggcaucgacuuaucagcug

SEQ ID NO: 1636748 - RNA, 19 nt, Artificial Sequence
  Description of Artificial Sequence: Synthetic oligonucleotide
  modified_base (17)..(17): a, c, u, g, unknown or other
ccaacucuugaccuaunuc

SEQ ID NO: 1636749 - RNA, 19 nt, Artificial Sequence
  Description of Artificial Sequence: Synthetic oligonucleotide
ucgaaaugcugugcauuua

SEQ ID NO: 1636750 - RNA, 19 nt, Artificial Sequence
  Description of Artificial Sequence: Synthetic oligonucleotide
cugaaaaugaaggcugcgu

SEQ ID NO: 1636751 - RNA, 19 nt, Artificial Sequence
  Description of Artificial Sequence: Synthetic oligonucleotide
ggcauugcugugaagugga

SEQ ID NO: 1636752 - RNA, 19 nt, Artificial Sequence
  Description of Artificial Sequence: Synthetic oligonucleotide
gucgaaaugcugugcauuu

SEQ ID NO: 1636753 - RNA, 19 nt, Artificial Sequence
  Description of Artificial Sequence: Synthetic oligonucleotide
agcgccaggccagagcuaa

SEQ ID NO: 1636754 - RNA, 19 nt, Artificial Sequence
  Description of Artificial Sequence: Synthetic oligonucleotide
gagucaaguuuggcuuggc

SEQ ID NO: 1636755 - RNA, 19 nt, Artificial Sequence
  Description of Artificial Sequence: Synthetic oligonucleotide
gaacguuaccucugcuccu

SEQ ID NO: 1636756 - RNA, 19 nt, Artificial Sequence
  Description of Artificial Sequence: Synthetic oligonucleotide
cuuuaccaggcugagggcu

SEQ ID NO: 1636757 - RNA, 19 nt, Artificial Sequence
  Description of Artificial Sequence: Synthetic oligonucleotide
agcacgcuucauauuuuga

SEQ ID NO: 1636758 - RNA, 19 nt, Artificial Sequence
  Description of Artificial Sequence: Synthetic oligonucleotide
agcucagaauugaaauaaa

SEQ ID NO: 1636759 - RNA, 19 nt, Artificial Sequence
  Description of Artificial Sequence: Synthetic oligonucleotide
ccugcaagcguccccgcgc

SEQ ID NO: 1636760 - RNA, 19 nt, Artificial Sequence
  Description of Artificial Sequence: Synthetic oligonucleotide
uucucguacguugguccuc

SEQ ID NO: 1636761 - RNA, 19 nt, Artificial Sequence
  Description of Artificial Sequence: Synthetic oligonucleotide
agcgcacgcuguccagcuc

SEQ ID NO: 1636762 - RNA, 19 nt, Artificial Sequence
  Description of Artificial Sequence: Synthetic oligonucleotide
ggucagcgcuuucuuuucc

SEQ ID NO: 1636763 - RNA, 19 nt, Artificial Sequence
  Description of Artificial Sequence: Synthetic oligonucleotide
cugcgucgaaaugcugugc

SEQ ID NO: 1636764 - RNA, 19 nt, Artificial Sequence
  Description of Artificial Sequence: Synthetic oligonucleotide
  modified_base (6)..(6): a, c, u, g, unknown or other
ccuaunucgggcucuccca

SEQ ID NO: 1636765 - RNA, 19 nt, Artificial Sequence
  Description of Artificial Sequence: Synthetic oligonucleotide
uccuuccguucauucugaa

SEQ ID NO: 1636766 - RNA, 19 nt, Artificial Sequence
  Description of Artificial Sequence: Synthetic oligonucleotide
  modified_base (8)..(8): a, c, u, g, unknown or other
gaccuaunucgggcucucc

SEQ ID NO: 1636767 - RNA, 19 nt, Artificial Sequence
  Description of Artificial Sequence: Synthetic oligonucleotide
gucggauucuuccugucuu

SEQ ID NO: 1636768 - RNA, 19 nt, Artificial Sequence
  Description of Artificial Sequence: Synthetic oligonucleotide
gucgaagauuccugaaaau

SEQ ID NO: 1636769 - RNA, 19 nt, Artificial Sequence
  Description of Artificial Sequence: Synthetic oligonucleotide
uucggcaauuaugggcaua

SEQ ID NO: 1636770 - RNA, 19 nt, Artificial Sequence
  Description of Artificial Sequence: Synthetic oligonucleotide
acacgaucacuuggguccu

SEQ ID NO: 1636771 - RNA, 19 nt, Artificial Sequence
  Description of Artificial Sequence: Synthetic oligonucleotide
ccggaaucagaguccgaag

SEQ ID NO: 1636772 - RNA, 19 nt, Artificial Sequence
  Description of Artificial Sequence: Synthetic oligonucleotide
auagcacgcuucauauuuu

SEQ ID NO: 1636773 - RNA, 19 nt, Artificial Sequence
  Description of Artificial Sequence: Synthetic oligonucleotide
uccguucauucugaacguu

SEQ ID NO: 1636774 - RNA, 19 nt, Artificial Sequence
  Description of Artificial Sequence: Synthetic oligonucleotide
ccuuaaacuuuugggucac

SEQ ID NO: 1636775 - RNA, 19 nt, Artificial Sequence
  Description of Artificial Sequence: Synthetic oligonucleotide
cagcugcguguuauacaac

SEQ ID NO: 1636776 - RNA, 19 nt, Artificial Sequence
  Description of Artificial Sequence: Synthetic oligonucleotide
ggcucucccauuucacaga

SEQ ID NO: 1636777 - RNA, 19 nt, Artificial Sequence
  Description of Artificial Sequence: Synthetic oligonucleotide
gaguccgaagagucaaguu

SEQ ID NO: 1636778 - RNA, 19 nt, Artificial Sequence
  Description of Artificial Sequence: Synthetic oligonucleotide
cugugaaguggaaggcucu

SEQ ID NO: 1636779 - RNA, 19 nt, Artificial Sequence
  Description of Artificial Sequence: Synthetic oligonucleotide
gggcaacagcugaaaaggc

SEQ ID NO: 1636780 - RNA, 19 nt, Artificial Sequence
  Description of Artificial Sequence: Synthetic oligonucleotide
  modified_base (5)..(5): a, c, u, g, unknown or other
cuaunucgggcucucccau

SEQ ID NO: 1636781 - RNA, 19 nt, Artificial Sequence
  Description of Artificial Sequence: Synthetic oligonucleotide
gccugcaagcguccccgcg

SEQ ID NO: 1636782 - RNA, 19 nt, Artificial Sequence
  Description of Artificial Sequence: Synthetic oligonucleotide
cuuggaugccugggcaaca

SEQ ID NO: 1636783 - RNA, 19 nt, Artificial Sequence
  Description of Artificial Sequence: Synthetic oligonucleotide
ggcaacagcugaaaaggcu

SEQ ID NO: 1636784 - RNA, 19 nt, Artificial Sequence
  Description of Artificial Sequence: Synthetic oligonucleotide
uuaccaggcugagggcuuu

SEQ ID NO: 1636785 - RNA, 19 nt, Artificial Sequence
  Description of Artificial Sequence: Synthetic oligonucleotide
gguccccgcgccugcaagc

SEQ ID NO: 1636786 - RNA, 19 nt, Artificial Sequence
  Description of Artificial Sequence: Synthetic oligonucleotide
caagcguccccgcgcccac

SEQ ID NO: 1636787 - RNA, 19 nt, Artificial Sequence
  Description of Artificial Sequence: Synthetic oligonucleotide
cggaaucagaguccgaaga

SEQ ID NO: 1636788 - RNA, 19 nt, Artificial Sequence
  Description of Artificial Sequence: Synthetic oligonucleotide
acgggacgggucccggcgu

SEQ ID NO: 1636789 - RNA, 19 nt, Artificial Sequence
  Description of Artificial Sequence: Synthetic oligonucleotide
cucguacguugguccucgc

SEQ ID NO: 1636790 - RNA, 19 nt, Artificial Sequence
  Description of Artificial Sequence: Synthetic oligonucleotide
ccgcgaaguccucgaagcg

SEQ ID NO: 1636791 - RNA, 19 nt, Artificial Sequence
  Description of Artificial Sequence: Synthetic oligonucleotide
ggcuuggcgaugccuccug

SEQ ID NO: 1636792 - RNA, 19 nt, Artificial Sequence
  Description of Artificial Sequence: Synthetic oligonucleotide
cucauucucguacguuggu

SEQ ID NO: 1636793 - RNA, 19 nt, Artificial Sequence
  Description of Artificial Sequence: Synthetic oligonucleotide
ccgaagagucaaguuuggc

SEQ ID NO: 1636794 - RNA, 19 nt, Artificial Sequence
  Description of Artificial Sequence: Synthetic oligonucleotide
acgaucacuuggguccuua

SEQ ID NO: 1636795 - RNA, 19 nt, Artificial Sequence
  Description of Artificial Sequence: Synthetic oligonucleotide
cugcaagccuggcgggguc

SEQ ID NO: 1636796 - RNA, 19 nt, Artificial Sequence
  Description of Artificial Sequence: Synthetic oligonucleotide
gguuuuagggucggauucu

SEQ ID NO: 1636797 - RNA, 19 nt, Artificial Sequence
  Description of Artificial Sequence: Synthetic oligonucleotide
cgacuuaucagcugagaua

SEQ ID NO: 1636798 - RNA, 19 nt, Artificial Sequence
  Description of Artificial Sequence: Synthetic oligonucleotide
accaggcugagggcuuugu

SEQ ID NO: 1636799 - RNA, 19 nt, Artificial Sequence
  Description of Artificial Sequence: Synthetic oligonucleotide
gcgacucugaucuuuuguu

SEQ ID NO: 1636800 - RNA, 19 nt, Artificial Sequence
  Description of Artificial Sequence: Synthetic oligonucleotide
uccccgcgccugcaagcgu

SEQ ID NO: 1636801 - RNA, 19 nt, Artificial Sequence
  Description of Artificial Sequence: Synthetic oligonucleotide
gucggucugcaagccuggc

SEQ ID NO: 1636802 - RNA, 19 nt, Artificial Sequence
  Description of Artificial Sequence: Synthetic oligonucleotide
ggguccccgcgccugcaag

SEQ ID NO: 1636803 - RNA, 19 nt, Artificial Sequence
  Description of Artificial Sequence: Synthetic oligonucleotide
cgaacuucaugcugcgcca

SEQ ID NO: 1636804 - RNA, 19 nt, Artificial Sequence
  Description of Artificial Sequence: Synthetic oligonucleotide
agggcgacucugaucuuuu

SEQ ID NO: 1636805 - RNA, 19 nt, Artificial Sequence
  Description of Artificial Sequence: Synthetic oligonucleotide
ggcgaugccuccuggacuu

SEQ ID NO: 1636806 - RNA, 19 nt, Artificial Sequence
  Description of Artificial Sequence: Synthetic oligonucleotide
gggcgacucugaucuuuug

SEQ ID NO: 1636807 - RNA, 19 nt, Artificial Sequence
  Description of Artificial Sequence: Synthetic oligonucleotide
ccguucauucugaacguua

SEQ ID NO: 1636808 - RNA, 19 nt, Artificial Sequence
  Description of Artificial Sequence: Synthetic oligonucleotide
ucagggcgacucugaucuu

SEQ ID NO: 1636809 - RNA, 19 nt, Artificial Sequence
  Description of Artificial Sequence: Synthetic oligonucleotide
ggacgggucccggcguccg

SEQ ID NO: 1636810 - RNA, 19 nt, Artificial Sequence
  Description of Artificial Sequence: Synthetic oligonucleotide
ccagucgaagauuccugaa

SEQ ID NO: 1636811 - RNA, 19 nt, Artificial Sequence
  Description of Artificial Sequence: Synthetic oligonucleotide
guuuuagggucggauucuu

SEQ ID NO: 1636812 - RNA, 19 nt, Artificial Sequence
  Description of Artificial Sequence: Synthetic oligonucleotide
caagccuggcggggucccc

SEQ ID NO: 1636813 - RNA, 19 nt, Artificial Sequence
  Description of Artificial Sequence: Synthetic oligonucleotide
cccggaaucagaguccgaa

SEQ ID NO: 1636814 - RNA, 19 nt, Artificial Sequence
  Description of Artificial Sequence: Synthetic oligonucleotide
cugcgccagagcuccgcga

SEQ ID NO: 1636815 - RNA, 19 nt, Artificial Sequence
  Description of Artificial Sequence: Synthetic oligonucleotide
cagcgccucgcagucgguc

SEQ ID NO: 1636816 - RNA, 19 nt, Artificial Sequence
  Description of Artificial Sequence: Synthetic oligonucleotide
ggacuccgcucuuucacau

SEQ ID NO: 1636817 - RNA, 19 nt, Artificial Sequence
  Description of Artificial Sequence: Synthetic oligonucleotide
ggcugacacagcugcgugu

SEQ ID NO: 1636818 - RNA, 19 nt, Artificial Sequence
  Description of Artificial Sequence: Synthetic oligonucleotide
cuuaaacuuuugggucacu

SEQ ID NO: 1636819 - RNA, 19 nt, Artificial Sequence
  Description of Artificial Sequence: Synthetic oligonucleotide
gcguguuauacaacccaua

SEQ ID NO: 1636820 - RNA, 19 nt, Artificial Sequence
  Description of Artificial Sequence: Synthetic oligonucleotide
gcgcacgcuguccagcucu

SEQ ID NO: 1636821 - RNA, 19 nt, Artificial Sequence
  Description of Artificial Sequence: Synthetic oligonucleotide
cguugguccucgcuggcca

SEQ ID NO: 1636822 - RNA, 19 nt, Artificial Sequence
  Description of Artificial Sequence: Synthetic oligonucleotide
gcaagccuggcgggguccc

SEQ ID NO: 1636823 - RNA, 19 nt, Artificial Sequence
  Description of Artificial Sequence: Synthetic oligonucleotide
cuucggcaauuaugggcau

SEQ ID NO: 1636824 - RNA, 19 nt, Artificial Sequence
  Description of Artificial Sequence: Synthetic oligonucleotide
ccacgggacgggucccggc

SEQ ID NO: 1636825 - RNA, 19 nt, Artificial Sequence
  Description of Artificial Sequence: Synthetic oligonucleotide
cccgcgccugcaagcgucc

SEQ ID NO: 1636826 - RNA, 19 nt, Artificial Sequence
  Description of Artificial Sequence: Synthetic oligonucleotide
gcagucggucugcaagccu

SEQ ID NO: 1636827 - RNA, 19 nt, Artificial Sequence
  Description of Artificial Sequence: Synthetic oligonucleotide
ggcgggguccccgcgccug

SEQ ID NO: 1636828 - RNA, 19 nt, Artificial Sequence
  Description of Artificial Sequence: Synthetic oligonucleotide
gggacgggucccggcgucc

SEQ ID NO: 1636829 - RNA, 19 nt, Artificial Sequence
  Description of Artificial Sequence: Synthetic oligonucleotide
ggcguccgcagcggucucc

SEQ ID NO: 1636830 - RNA, 19 nt, Artificial Sequence
  Description of Artificial Sequence: Synthetic oligonucleotide
cagggcgacucugaucuuu

SEQ ID NO: 1636831 - RNA, 19 nt, Artificial Sequence
  Description of Artificial Sequence: Synthetic oligonucleotide
gcgucgaaaugcugugcau

SEQ ID NO: 1636832 - RNA, 19 nt, Artificial Sequence
  Description of Artificial Sequence: Synthetic oligonucleotide
gcuccgcgaaguccucgaa

SEQ ID NO: 1636833 - RNA, 19 nt, Artificial Sequence
  Description of Artificial Sequence: Synthetic oligonucleotide
gcguccccgcgcccacggg

SEQ ID NO: 1636834 - RNA, 19 nt, Artificial Sequence
  Description of Artificial Sequence: Synthetic oligonucleotide
gcauugcugugaaguggaa

SEQ ID NO: 1636835 - RNA, 19 nt, Artificial Sequence
  Description of Artificial Sequence: Synthetic oligonucleotide
gcgggguccccgcgccugc

SEQ ID NO: 1636836 - RNA, 19 nt, Artificial Sequence
  Description of Artificial Sequence: Synthetic oligonucleotide
cccacgggacgggucccgg

SEQ ID NO: 1636837 - RNA, 19 nt, Artificial Sequence
  Description of Artificial Sequence: Synthetic oligonucleotide
gggguccccgcgccugcaa

SEQ ID NO: 1636838 - RNA, 19 nt, Artificial Sequence
  Description of Artificial Sequence: Synthetic oligonucleotide
cguccccgcgcccacggga

SEQ ID NO: 1636839 - RNA, 19 nt, Artificial Sequence
  Description of Artificial Sequence: Synthetic oligonucleotide
cgucgaaaugcugugcauu

SEQ ID NO: 1636840 - RNA, 19 nt, Artificial Sequence
  Description of Artificial Sequence: Synthetic oligonucleotide
cccgcgcccacgggacggg

SEQ ID NO: 1636841 - RNA, 19 nt, Artificial Sequence
  Description of Artificial Sequence: Synthetic oligonucleotide
ccucgcagucggucugcaa

SEQ ID NO: 1636842 - RNA, 19 nt, Artificial Sequence
  Description of Artificial Sequence: Synthetic oligonucleotide
cgggacgggucccggcguc

SEQ ID NO: 1636843 - RNA, 19 nt, Artificial Sequence
  Description of Artificial Sequence: Synthetic oligonucleotide
ccgcgccugcaagcguccc

SEQ ID NO: 1636844 - RNA, 19 nt, Artificial Sequence
  Description of Artificial Sequence: Synthetic oligonucleotide
cacgaucacuuggguccuu

SEQ ID NO: 1636845 - RNA, 19 nt, Artificial Sequence
  Description of Artificial Sequence: Synthetic oligonucleotide
gcagcgccucgcagucggu

SEQ ID NO: 1636846 - RNA, 19 nt, Artificial Sequence
  Description of Artificial Sequence: Synthetic oligonucleotide
aaauacucagcauuggucc

SEQ ID NO: 1636847 - RNA, 19 nt, Artificial Sequence
  Description of Artificial Sequence: Synthetic oligonucleotide
aacugaacgacauaguugg

SEQ ID NO: 1636848 - RNA, 19 nt, Artificial Sequence
  Description of Artificial Sequence: Synthetic oligonucleotide
auauucugaggucagagcg

SEQ ID NO: 1636849 - RNA, 19 nt, Artificial Sequence
  Description of Artificial Sequence: Synthetic oligonucleotide
uauuuuacgaucucaaugu

SEQ ID NO: 1636850 - RNA, 19 nt, Artificial Sequence
  Description of Artificial Sequence: Synthetic oligonucleotide
gagaaugugguacagacgc

SEQ ID NO: 1636851 - RNA, 19 nt, Artificial Sequence
  Description of Artificial Sequence: Synthetic oligonucleotide
aauuucgaaaccccgaugu

SEQ ID NO: 1636852 - RNA, 19 nt, Artificial Sequence
  Description of Artificial Sequence: Synthetic oligonucleotide
aauguaauucucauagucg

SEQ ID NO: 1636853 - RNA, 19 nt, Artificial Sequence
  Description of Artificial Sequence: Synthetic oligonucleotide
uacucaaccccguugaugg

SEQ ID NO: 1636854 - RNA, 19 nt, Artificial Sequence
  Description of Artificial Sequence: Synthetic oligonucleotide
auugaaggggaccugauag

SEQ ID NO: 1636855 - RNA, 19 nt, Artificial Sequence
  Description of Artificial Sequence: Synthetic oligonucleotide
ugagugaacaucuauuagc

SEQ ID NO: 1636856 - RNA, 19 nt, Artificial Sequence
  Description of Artificial Sequence: Synthetic oligonucleotide
auagaugcaagucacccgg

SEQ ID NO: 1636857 - RNA, 19 nt, Artificial Sequence
  Description of Artificial Sequence: Synthetic oligonucleotide
agaauaaacaucucgggca

SEQ ID NO: 1636858 - RNA, 19 nt, Artificial Sequence
  Description of Artificial Sequence: Synthetic oligonucleotide
ucaucuucccguaauacgc

SEQ ID NO: 1636859 - RNA, 19 nt, Artificial Sequence
  Description of Artificial Sequence: Synthetic oligonucleotide
uagaauaaacaucucgggc

SEQ ID NO: 1636860 - RNA, 19 nt, Artificial Sequence
  Description of Artificial Sequence: Synthetic oligonucleotide
guauuuuacgaucucaaug

SEQ ID NO: 1636861 - RNA, 19 nt, Artificial Sequence
  Description of Artificial Sequence: Synthetic oligonucleotide
ucaucaguaaauuccaaac

SEQ ID NO: 1636862 - RNA, 19 nt, Artificial Sequence
  Description of Artificial Sequence: Synthetic oligonucleotide
guagaauaaacaucucggg

SEQ ID NO: 1636863 - RNA, 19 nt, Artificial Sequence
  Description of Artificial Sequence: Synthetic oligonucleotide
aagaagacauaagaugcac

SEQ ID NO: 1636864 - RNA, 19 nt, Artificial Sequence
  Description of Artificial Sequence: Synthetic oligonucleotide
agggaaauucuguauugcc

SEQ ID NO: 1636865 - RNA, 19 nt, Artificial Sequence
  Description of Artificial Sequence: Synthetic oligonucleotide
cuuucaacucuucuggagg

SEQ ID NO: 1636866 - RNA, 19 nt, Artificial Sequence
  Description of Artificial Sequence: Synthetic oligonucleotide
cuugaauuucgaaaccccg

SEQ ID NO: 1636867 - RNA, 19 nt, Artificial Sequence
  Description of Artificial Sequence: Synthetic oligonucleotide
aguaccacggaacccaggg

SEQ ID NO: 1636868 - RNA, 19 nt, Artificial Sequence
  Description of Artificial Sequence: Synthetic oligonucleotide
cuugcaaaggccaacccag

SEQ ID NO: 1636869 - RNA, 19 nt, Artificial Sequence
  Description of Artificial Sequence: Synthetic oligonucleotide
aauacgccaucuucugugg

SEQ ID NO: 1636870 - RNA, 19 nt, Artificial Sequence
  Description of Artificial Sequence: Synthetic oligonucleotide
ucuugaauuucgaaacccc

SEQ ID NO: 1636871 - RNA, 19 nt, Artificial Sequence
  Description of Artificial Sequence: Synthetic oligonucleotide
ugcucuuuguauauaggcc

SEQ ID NO: 1636872 - RNA, 19 nt, Artificial Sequence
  Description of Artificial Sequence: Synthetic oligonucleotide
uaauacgccaucuucugug

SEQ ID NO: 1636873 - RNA, 19 nt, Artificial Sequence
  Description of Artificial Sequence: Synthetic oligonucleotide
gguagaauaaacaucucgg

SEQ ID NO: 1636874 - RNA, 19 nt, Artificial Sequence
  Description of Artificial Sequence: Synthetic oligonucleotide
uauucugaggucagagcgg

SEQ ID NO: 1636875 - RNA, 19 nt, Artificial Sequence
  Description of Artificial Sequence: Synthetic oligonucleotide
ucuugcucuuuguauauag

SEQ ID NO: 1636876 - RNA, 19 nt, Artificial Sequence
  Description of Artificial Sequence: Synthetic oligonucleotide
auguaauucucauagucgu

SEQ ID NO: 1636877 - RNA, 19 nt, Artificial Sequence
  Description of Artificial Sequence: Synthetic oligonucleotide
aacaucuauuagcuuaugu

SEQ ID NO: 1636878 - RNA, 19 nt, Artificial Sequence
  Description of Artificial Sequence: Synthetic oligonucleotide
uguuugaugacauggccgu

SEQ ID NO: 1636879 - RNA, 19 nt, Artificial Sequence
  Description of Artificial Sequence: Synthetic oligonucleotide
auaagaugcacacgcguag

SEQ ID NO: 1636880 - RNA, 19 nt, Artificial Sequence
  Description of Artificial Sequence: Synthetic oligonucleotide
aacgacauaguuggggcac

SEQ ID NO: 1636881 - RNA, 19 nt, Artificial Sequence
  Description of Artificial Sequence: Synthetic oligonucleotide
ugagaaugugguacagacg

SEQ ID NO: 1636882 - RNA, 19 nt, Artificial Sequence
  Description of Artificial Sequence: Synthetic oligonucleotide
gacauggccguauauuucc

SEQ ID NO: 1636883 - RNA, 19 nt, Artificial Sequence
  Description of Artificial Sequence: Synthetic oligonucleotide
ucacauauaggguucugug

SEQ ID NO: 1636884 - RNA, 19 nt, Artificial Sequence
  Description of Artificial Sequence: Synthetic oligonucleotide
cuaagguagcccaacacug

SEQ ID NO: 1636885 - RNA, 19 nt, Artificial Sequence
  Description of Artificial Sequence: Synthetic oligonucleotide
aguguacccuuucaugucg

SEQ ID NO: 1636886 - RNA, 19 nt, Artificial Sequence
  Description of Artificial Sequence: Synthetic oligonucleotide
auggccguauauuuccacc

SEQ ID NO: 1636887 - RNA, 19 nt, Artificial Sequence
  Description of Artificial Sequence: Synthetic oligonucleotide
uucuccugcaagaagacau

SEQ ID NO: 1636888 - RNA, 19 nt, Artificial Sequence
  Description of Artificial Sequence: Synthetic oligonucleotide
uugaauuucgaaaccccga

SEQ ID NO: 1636889 - RNA, 19 nt, Artificial Sequence
  Description of Artificial Sequence: Synthetic oligonucleotide
gacauuguuuuauuccggc

SEQ ID NO: 1636890 - RNA, 19 nt, Artificial Sequence
  Description of Artificial Sequence: Synthetic oligonucleotide
uacaguaugugggaagggg

SEQ ID NO: 1636891 - RNA, 19 nt, Artificial Sequence
  Description of Artificial Sequence: Synthetic oligonucleotide
cuuguuugaugacauggcc

SEQ ID NO: 1636892 - RNA, 19 nt, Artificial Sequence
  Description of Artificial Sequence: Synthetic oligonucleotide
agacaacugaacgacauag

SEQ ID NO: 1636893 - RNA, 19 nt, Artificial Sequence
  Description of Artificial Sequence: Synthetic oligonucleotide
uuauguccagugaaggcug

SEQ ID NO: 1636894 - RNA, 19 nt, Artificial Sequence
  Description of Artificial Sequence: Synthetic oligonucleotide
agcucuacauauucugagg

SEQ ID NO: 1636895 - RNA, 19 nt, Artificial Sequence
  Description of Artificial Sequence: Synthetic oligonucleotide
cuugaagauacaaugugga

SEQ ID NO: 1636896 - RNA, 19 nt, Artificial Sequence
  Description of Artificial Sequence: Synthetic oligonucleotide
cauaguuggggcacaacag

SEQ ID NO: 1636897 - RNA, 19 nt, Artificial Sequence
  Description of Artificial Sequence: Synthetic oligonucleotide
uuucaacucuucuggaggc

SEQ ID NO: 1636898 - RNA, 19 nt, Artificial Sequence
  Description of Artificial Sequence: Synthetic oligonucleotide
aacggcauugaaggggacc

SEQ ID NO: 1636899 - RNA, 19 nt, Artificial Sequence
  Description of Artificial Sequence: Synthetic oligonucleotide
caucagcuggcuaagguag

SEQ ID NO: 1636900 - RNA, 19 nt, Artificial Sequence
  Description of Artificial Sequence: Synthetic oligonucleotide
aggccguccucuuucaccc

SEQ ID NO: 1636901 - RNA, 19 nt, Artificial Sequence
  Description of Artificial Sequence: Synthetic oligonucleotide
uauuagcuuauguccagug

SEQ ID NO: 1636902 - RNA, 19 nt, Artificial Sequence
  Description of Artificial Sequence: Synthetic oligonucleotide
ugaauuucgaaaccccgau

SEQ ID NO: 1636903 - RNA, 19 nt, Artificial Sequence
  Description of Artificial Sequence: Synthetic oligonucleotide
augaguggggacucccucc

SEQ ID NO: 1636904 - RNA, 19 nt, Artificial Sequence
  Description of Artificial Sequence: Synthetic oligonucleotide
uacgaucucaauguaauuc

SEQ ID NO: 1636905 - RNA, 19 nt, Artificial Sequence
  Description of Artificial Sequence: Synthetic oligonucleotide
gcaagaagacauaagaugc

SEQ ID NO: 1636906 - RNA, 19 nt, Artificial Sequence
  Description of Artificial Sequence: Synthetic oligonucleotide
guaauucucauagucguug

SEQ ID NO: 1636907 - RNA, 19 nt, Artificial Sequence
  Description of Artificial Sequence: Synthetic oligonucleotide
ugugacaacucaucuuccc

SEQ ID NO: 1636908 - RNA, 19 nt, Artificial Sequence
  Description of Artificial Sequence: Synthetic oligonucleotide
ugaacaucuauuagcuuau

SEQ ID NO: 1636909 - RNA, 19 nt, Artificial Sequence
  Description of Artificial Sequence: Synthetic oligonucleotide
caacugaacgacauaguug

SEQ ID NO: 1636910 - RNA, 19 nt, Artificial Sequence
  Description of Artificial Sequence: Synthetic oligonucleotide
cauauucugaggucagagc

SEQ ID NO: 1636911 - RNA, 19 nt, Artificial Sequence
  Description of Artificial Sequence: Synthetic oligonucleotide
aguaaauacucagcauugg

SEQ ID NO: 1636912 - RNA, 19 nt, Artificial Sequence
  Description of Artificial Sequence: Synthetic oligonucleotide
uuuucucaggcucugggua

SEQ ID NO: 1636913 - RNA, 19 nt, Artificial Sequence
  Description of Artificial Sequence: Synthetic oligonucleotide
caaacuaucuccaaauucu

SEQ ID NO: 1636914 - RNA, 19 nt, Artificial Sequence
  Description of Artificial Sequence: Synthetic oligonucleotide
caugaagucuacagcagac

SEQ ID NO: 1636915 - RNA, 19 nt, Artificial Sequence
  Description of Artificial Sequence: Synthetic oligonucleotide
uaggcguggguguagguag

SEQ ID NO: 1636916 - RNA, 19 nt, Artificial Sequence
  Description of Artificial Sequence: Synthetic oligonucleotide
ucuuucacccagcccauug

SEQ ID NO: 1636917 - RNA, 19 nt, Artificial Sequence
  Description of Artificial Sequence: Synthetic oligonucleotide
aacacguauuuuacgaucu

SEQ ID NO: 1636918 - RNA, 19 nt, Artificial Sequence
  Description of Artificial Sequence: Synthetic oligonucleotide
uaccacggaacccagggga

SEQ ID NO: 1636919 - RNA, 19 nt, Artificial Sequence
  Description of Artificial Sequence: Synthetic oligonucleotide
guagguagaauaaacaucu

SEQ ID NO: 1636920 - RNA, 19 nt, Artificial Sequence
  Description of Artificial Sequence: Synthetic oligonucleotide
gugaacaucuauuagcuua

SEQ ID NO: 1636921 - RNA, 19 nt, Artificial Sequence
  Description of Artificial Sequence: Synthetic oligonucleotide
acauaagaugcacacgcgu

SEQ ID NO: 1636922 - RNA, 19 nt, Artificial Sequence
  Description of Artificial Sequence: Synthetic oligonucleotide
agcaacggcauugaagggg

SEQ ID NO: 1636923 - RNA, 19 nt, Artificial Sequence
  Description of Artificial Sequence: Synthetic oligonucleotide
ucguccacgaucuugcaaa

SEQ ID NO: 1636924 - RNA, 19 nt, Artificial Sequence
  Description of Artificial Sequence: Synthetic oligonucleotide
ucuguauugcccaguuucu

SEQ ID NO: 1636925 - RNA, 19 nt, Artificial Sequence
  Description of Artificial Sequence: Synthetic oligonucleotide
aucccacuaaaaguaaaac

SEQ ID NO: 1636926 - RNA, 19 nt, Artificial Sequence
  Description of Artificial Sequence: Synthetic oligonucleotide
uagucguugugacaacuca

SEQ ID NO: 1636927 - RNA, 19 nt, Artificial Sequence
  Description of Artificial Sequence: Synthetic oligonucleotide
auaguuggggcacaacagu

SEQ ID NO: 1636928 - RNA, 19 nt, Artificial Sequence
  Description of Artificial Sequence: Synthetic oligonucleotide
uugaugaugaguggggacu

SEQ ID NO: 1636929 - RNA, 19 nt, Artificial Sequence
  Description of Artificial Sequence: Synthetic oligonucleotide
aguucacagcuuucaacuc

SEQ ID NO: 1636930 - RNA, 19 nt, Artificial Sequence
  Description of Artificial Sequence: Synthetic oligonucleotide
uuucgaaaccccgaugucu

SEQ ID NO: 1636931 - RNA, 19 nt, Artificial Sequence
  Description of Artificial Sequence: Synthetic oligonucleotide
cugaacgacauaguugggg

SEQ ID NO: 1636932 - RNA, 19 nt, Artificial Sequence
  Description of Artificial Sequence: Synthetic oligonucleotide
uacccuuucaugucgucca

SEQ ID NO: 1636933 - RNA, 19 nt, Artificial Sequence
  Description of Artificial Sequence: Synthetic oligonucleotide
auuucgaaaccccgauguc

SEQ ID NO: 1636934 - RNA, 19 nt, Artificial Sequence
  Description of Artificial Sequence: Synthetic oligonucleotide
agcccagacagucacauau

SEQ ID NO: 1636935 - RNA, 19 nt, Artificial Sequence
  Description of Artificial Sequence: Synthetic oligonucleotide
gaaugugguacagacgcug

SEQ ID NO: 1636936 - RNA, 19 nt, Artificial Sequence
  Description of Artificial Sequence: Synthetic oligonucleotide
augucguccacgaucuugc

SEQ ID NO: 1636937 - RNA, 19 nt, Artificial Sequence
  Description of Artificial Sequence: Synthetic oligonucleotide
uucgaaaccccgaugucuc

SEQ ID NO: 1636938 - RNA, 19 nt, Artificial Sequence
  Description of Artificial Sequence: Synthetic oligonucleotide
guuggggcacaacagucgg

SEQ ID NO: 1636939 - RNA, 19 nt, Artificial Sequence
  Description of Artificial Sequence: Synthetic oligonucleotide
uaaaacccuccccgguugg

SEQ ID NO: 1636940 - RNA, 19 nt, Artificial Sequence
  Description of Artificial Sequence: Synthetic oligonucleotide
uauaggguucugugcaagc

SEQ ID NO: 1636941 - RNA, 19 nt, Artificial Sequence
  Description of Artificial Sequence: Synthetic oligonucleotide
ucguugugacaacucaucu

SEQ ID NO: 1636942 - RNA, 19 nt, Artificial Sequence
  Description of Artificial Sequence: Synthetic oligonucleotide
agagcccggaucucucucc

SEQ ID NO: 1636943 - RNA, 19 nt, Artificial Sequence
  Description of Artificial Sequence: Synthetic oligonucleotide
ggaaauucuguauugccca

SEQ ID NO: 1636944 - RNA, 19 nt, Artificial Sequence
  Description of Artificial Sequence: Synthetic oligonucleotide
gucggcaugagugauccgg

SEQ ID NO: 1636945 - RNA, 19 nt, Artificial Sequence
  Description of Artificial Sequence: Synthetic oligonucleotide
acgucggcaugagugaucc

SEQ ID NO: 1636946 - RNA, 19 nt, Artificial Sequence
  Description of Artificial Sequence: Synthetic oligonucleotide
aaucccggaacacguauuu

SEQ ID NO: 1636947 - RNA, 19 nt, Artificial Sequence
  Description of Artificial Sequence: Synthetic oligonucleotide
auuccggccagacaacuga

SEQ ID NO: 1636948 - RNA, 19 nt, Artificial Sequence
  Description of Artificial Sequence: Synthetic oligonucleotide
uuuauuccggccagacaac

SEQ ID NO: 1636949 - RNA, 19 nt, Artificial Sequence
  Description of Artificial Sequence: Synthetic oligonucleotide
ugcuucuugaagauacaau

SEQ ID NO: 1636950 - RNA, 19 nt, Artificial Sequence
  Description of Artificial Sequence: Synthetic oligonucleotide
uaauucucauagucguugu

SEQ ID NO: 1636951 - RNA, 19 nt, Artificial Sequence
  Description of Artificial Sequence: Synthetic oligonucleotide
guauauaggccaucuguga

SEQ ID NO: 1636952 - RNA, 19 nt, Artificial Sequence
  Description of Artificial Sequence: Synthetic oligonucleotide
aaaacccuccccgguuggc

SEQ ID NO: 1636953 - RNA, 19 nt, Artificial Sequence
  Description of Artificial Sequence: Synthetic oligonucleotide
cauccagucucaugugagg

SEQ ID NO: 1636954 - RNA, 19 nt, Artificial Sequence
  Description of Artificial Sequence: Synthetic oligonucleotide
ugauccggagagcaacggc

SEQ ID NO: 1636955 - RNA, 19 nt, Artificial Sequence
  Description of Artificial Sequence: Synthetic oligonucleotide
uggguacucaaccccguug

SEQ ID NO: 1636956 - RNA, 19 nt, Artificial Sequence
  Description of Artificial Sequence: Synthetic oligonucleotide
uucacggcguacaguaugu

SEQ ID NO: 1636957 - RNA, 19 nt, Artificial Sequence
  Description of Artificial Sequence: Synthetic oligonucleotide
cacggcguacaguaugugg

SEQ ID NO: 1636958 - RNA, 19 nt, Artificial Sequence
  Description of Artificial Sequence: Synthetic oligonucleotide
auacgccaucuucuguggc

SEQ ID NO: 1636959 - RNA, 19 nt, Artificial Sequence
  Description of Artificial Sequence: Synthetic oligonucleotide
guucacggcguacaguaug

SEQ ID NO: 1636960 - RNA, 19 nt, Artificial Sequence
  Description of Artificial Sequence: Synthetic oligonucleotide
caucuucccguaauacgcc

SEQ ID NO: 1636961 - RNA, 19 nt, Artificial Sequence
  Description of Artificial Sequence: Synthetic oligonucleotide
uuucugucauccagucuca

SEQ ID NO: 1636962 - RNA, 19 nt, Artificial Sequence
  Description of Artificial Sequence: Synthetic oligonucleotide
gagggaaauucuguauugc

SEQ ID NO: 1636963 - RNA, 19 nt, Artificial Sequence
  Description of Artificial Sequence: Synthetic oligonucleotide
uguaauucucauagucguu

SEQ ID NO: 1636964 - RNA, 19 nt, Artificial Sequence
  Description of Artificial Sequence: Synthetic oligonucleotide
uuccaccuggccauagaug

SEQ ID NO: 1636965 - RNA, 19 nt, Artificial Sequence
  Description of Artificial Sequence: Synthetic oligonucleotide
agcaguaccacggaaccca

SEQ ID NO: 1636966 - RNA, 19 nt, Artificial Sequence
  Description of Artificial Sequence: Synthetic oligonucleotide
acacguauuuuacgaucuc

SEQ ID NO: 1636967 - RNA, 19 nt, Artificial Sequence
  Description of Artificial Sequence: Synthetic oligonucleotide
uuugaugacauggccguau

SEQ ID NO: 1636968 - RNA, 19 nt, Artificial Sequence
  Description of Artificial Sequence: Synthetic oligonucleotide
aagaugcacacgcguagaa

SEQ ID NO: 1636969 - RNA, 19 nt, Artificial Sequence
  Description of Artificial Sequence: Synthetic oligonucleotide
uggccguauauuuccaccu

SEQ ID NO: 1636970 - RNA, 19 nt, Artificial Sequence
  Description of Artificial Sequence: Synthetic oligonucleotide
uccgcauaggaguauucuc

SEQ ID NO: 1636971 - RNA, 19 nt, Artificial Sequence
  Description of Artificial Sequence: Synthetic oligonucleotide
gcggacauuguuuuauucc

SEQ ID NO: 1636972 - RNA, 19 nt, Artificial Sequence
  Description of Artificial Sequence: Synthetic oligonucleotide
auagucguugugacaacuc

SEQ ID NO: 1636973 - RNA, 19 nt, Artificial Sequence
  Description of Artificial Sequence: Synthetic oligonucleotide
cuaguguacccuuucaugu

SEQ ID NO: 1636974 - RNA, 19 nt, Artificial Sequence
  Description of Artificial Sequence: Synthetic oligonucleotide
ucccggaacacguauuuua

SEQ ID NO: 1636975 - RNA, 19 nt, Artificial Sequence
  Description of Artificial Sequence: Synthetic oligonucleotide
ucuacagcagacguccgaa

SEQ ID NO: 1636976 - RNA, 19 nt, Artificial Sequence
  Description of Artificial Sequence: Synthetic oligonucleotide
cugugagcucuacauauuc

SEQ ID NO: 1636977 - RNA, 19 nt, Artificial Sequence
  Description of Artificial Sequence: Synthetic oligonucleotide
auauaggguucugugcaag

SEQ ID NO: 1636978 - RNA, 19 nt, Artificial Sequence
  Description of Artificial Sequence: Synthetic oligonucleotide
gauccggagagcaacggca

SEQ ID NO: 1636979 - RNA, 19 nt, Artificial Sequence
  Description of Artificial Sequence: Synthetic oligonucleotide
ugaguggggacucccuccu

SEQ ID NO: 1636980 - RNA, 19 nt, Artificial Sequence
  Description of Artificial Sequence: Synthetic oligonucleotide
guggaaugggaauggcacc

SEQ ID NO: 1636981 - RNA, 19 nt, Artificial Sequence
  Description of Artificial Sequence: Synthetic oligonucleotide
gagugaacaucuauuagcu

SEQ ID NO: 1636982 - RNA, 19 nt, Artificial Sequence
  Description of Artificial Sequence: Synthetic oligonucleotide
uaagaugcacacgcguaga

SEQ ID NO: 1636983 - RNA, 19 nt, Artificial Sequence
  Description of Artificial Sequence: Synthetic oligonucleotide
guaaauacucagcauuggu

SEQ ID NO: 1636984 - RNA, 19 nt, Artificial Sequence
  Description of Artificial Sequence: Synthetic oligonucleotide
uaguguacccuuucauguc

SEQ ID NO: 1636985 - RNA, 19 nt, Artificial Sequence
  Description of Artificial Sequence: Synthetic oligonucleotide
gguagcccaacacugccag

SEQ ID NO: 1636986 - RNA, 19 nt, Artificial Sequence
  Description of Artificial Sequence: Synthetic oligonucleotide
agcuggcuaagguagccca

SEQ ID NO: 1636987 - RNA, 19 nt, Artificial Sequence
  Description of Artificial Sequence: Synthetic oligonucleotide
cauaagaugcacacgcgua

SEQ ID NO: 1636988 - RNA, 19 nt, Artificial Sequence
  Description of Artificial Sequence: Synthetic oligonucleotide
agaugcaagucacccggca

SEQ ID NO: 1636989 - RNA, 19 nt, Artificial Sequence
  Description of Artificial Sequence: Synthetic oligonucleotide
guguagguagaauaaacau

SEQ ID NO: 1636990 - RNA, 19 nt, Artificial Sequence
  Description of Artificial Sequence: Synthetic oligonucleotide
gagcaacggcauugaaggg

SEQ ID NO: 1636991 - RNA, 19 nt, Artificial Sequence
  Description of Artificial Sequence: Synthetic oligonucleotide
caggccguccucuuucacc

SEQ ID NO: 1636992 - RNA, 19 nt, Artificial Sequence
  Description of Artificial Sequence: Synthetic oligonucleotide
cacgcguagaagcucauga

SEQ ID NO: 1636993 - RNA, 19 nt, Artificial Sequence
  Description of Artificial Sequence: Synthetic oligonucleotide
cggacauuguuuuauuccg

SEQ ID NO: 1636994 - RNA, 19 nt, Artificial Sequence
  Description of Artificial Sequence: Synthetic oligonucleotide
gaucccacuaaaaguaaaa

SEQ ID NO: 1636995 - RNA, 19 nt, Artificial Sequence
  Description of Artificial Sequence: Synthetic oligonucleotide
caugucguccacgaucuug

SEQ ID NO: 1636996 - RNA, 19 nt, Artificial Sequence
  Description of Artificial Sequence: Synthetic oligonucleotide
auuuuacgaucucaaugua

SEQ ID NO: 1636997 - RNA, 19 nt, Artificial Sequence
  Description of Artificial Sequence: Synthetic oligonucleotide
agugauccggagagcaacg

SEQ ID NO: 1636998 - RNA, 19 nt, Artificial Sequence
  Description of Artificial Sequence: Synthetic oligonucleotide
gagucaggcugugcaaagg

SEQ ID NO: 1636999 - RNA, 19 nt, Artificial Sequence
  Description of Artificial Sequence: Synthetic oligonucleotide
agggguaagcggcccuggc

SEQ ID NO: 1637000 - RNA, 19 nt, Artificial Sequence
  Description of Artificial Sequence: Synthetic oligonucleotide
acucccuccuguaaucccg

SEQ ID NO: 1637001 - RNA, 19 nt, Artificial Sequence
  Description of Artificial Sequence: Synthetic oligonucleotide
uuauuccggccagacaacu

SEQ ID NO: 1637002 - RNA, 19 nt, Artificial Sequence
  Description of Artificial Sequence: Synthetic oligonucleotide
uagaugcaagucacccggc

SEQ ID NO: 1637003 - RNA, 19 nt, Artificial Sequence
  Description of Artificial Sequence: Synthetic oligonucleotide
ccgcauaggaguauucucc

SEQ ID NO: 1637004 - RNA, 19 nt, Artificial Sequence
  Description of Artificial Sequence: Synthetic oligonucleotide
auucugaggucagagcgga

SEQ ID NO: 1637005 - RNA, 19 nt, Artificial Sequence
  Description of Artificial Sequence: Synthetic oligonucleotide
gaugggaccccuaguguac

SEQ ID NO: 1637006 - RNA, 19 nt, Artificial Sequence
  Description of Artificial Sequence: Synthetic oligonucleotide
gaacgacauaguuggggca

SEQ ID NO: 1637007 - RNA, 19 nt, Artificial Sequence
  Description of Artificial Sequence: Synthetic oligonucleotide
ccuaguguacccuuucaug

SEQ ID NO: 1637008 - RNA, 19 nt, Artificial Sequence
  Description of Artificial Sequence: Synthetic oligonucleotide
gccguauauuuccaccugg

SEQ ID NO: 1637009 - RNA, 19 nt, Artificial Sequence
  Description of Artificial Sequence: Synthetic oligonucleotide
uggcuaagguagcccaaca

SEQ ID NO: 1637010 - RNA, 19 nt, Artificial Sequence
  Description of Artificial Sequence: Synthetic oligonucleotide
agagcggacauuguuuuau

SEQ ID NO: 1637011 - RNA, 19 nt, Artificial Sequence
  Description of Artificial Sequence: Synthetic oligonucleotide
ucugugagcucuacauauu

SEQ ID NO: 1637012 - RNA, 19 nt, Artificial Sequence
  Description of Artificial Sequence: Synthetic oligonucleotide
aacgucggcaugagugauc

SEQ ID NO: 1637013 - RNA, 19 nt, Artificial Sequence
  Description of Artificial Sequence: Synthetic oligonucleotide
gaagucuacagcagacguc

SEQ ID NO: 1637014 - RNA, 19 nt, Artificial Sequence
  Description of Artificial Sequence: Synthetic oligonucleotide
ucgggugagugucuucuuc

SEQ ID NO: 1637015 - RNA, 19 nt, Artificial Sequence
  Description of Artificial Sequence: Synthetic oligonucleotide
gguguagguagaauaaaca

SEQ ID NO: 1637016 - RNA, 19 nt, Artificial Sequence
  Description of Artificial Sequence: Synthetic oligonucleotide
accccuaguguacccuuuc

SEQ ID NO: 1637017 - RNA, 19 nt, Artificial Sequence
  Description of Artificial Sequence: Synthetic oligonucleotide
ccauagaugcaagucaccc

SEQ ID NO: 1637018 - RNA, 19 nt, Artificial Sequence
  Description of Artificial Sequence: Synthetic oligonucleotide
caguuucugucauccaguc

SEQ ID NO: 1637019 - RNA, 19 nt, Artificial Sequence
  Description of Artificial Sequence: Synthetic oligonucleotide
aacagucggaucaggucca

SEQ ID NO: 1637020 - RNA, 19 nt, Artificial Sequence
  Description of Artificial Sequence: Synthetic oligonucleotide
acggcauugaaggggaccu

SEQ ID NO: 1637021 - RNA, 19 nt, Artificial Sequence
  Description of Artificial Sequence: Synthetic oligonucleotide
cacaggcggcaucagcugg

SEQ ID NO: 1637022 - RNA, 19 nt, Artificial Sequence
  Description of Artificial Sequence: Synthetic oligonucleotide
uguuguauuuggcccuauu

SEQ ID NO: 1637023 - RNA, 19 nt, Artificial Sequence
  Description of Artificial Sequence: Synthetic oligonucleotide
gugcaagcaggaugggacc

SEQ ID NO: 1637024 - RNA, 19 nt, Artificial Sequence
  Description of Artificial Sequence: Synthetic oligonucleotide
uugaugacauggccguaua

SEQ ID NO: 1637025 - RNA, 19 nt, Artificial Sequence
  Description of Artificial Sequence: Synthetic oligonucleotide
uauuuccaccuggccauag

SEQ ID NO: 1637026 - RNA, 19 nt, Artificial Sequence
  Description of Artificial Sequence: Synthetic oligonucleotide
cauggccguauauuuccac

SEQ ID NO: 1637027 - RNA, 19 nt, Artificial Sequence
  Description of Artificial Sequence: Synthetic oligonucleotide
guacucaaccccguugaug

SEQ ID NO: 1637028 - RNA, 19 nt, Artificial Sequence
  Description of Artificial Sequence: Synthetic oligonucleotide
guacaguaugugggaaggg

SEQ ID NO: 1637029 - RNA, 19 nt, Artificial Sequence
  Description of Artificial Sequence: Synthetic oligonucleotide
cuacagcagacguccgaag

SEQ ID NO: 1637030 - RNA, 19 nt, Artificial Sequence
  Description of Artificial Sequence: Synthetic oligonucleotide
agcagacguccgaagcugc

SEQ ID NO: 1637031 - RNA, 19 nt, Artificial Sequence
  Description of Artificial Sequence: Synthetic oligonucleotide
aaggcgugagaauguggua

SEQ ID NO: 1637032 - RNA, 19 nt, Artificial Sequence
  Description of Artificial Sequence: Synthetic oligonucleotide
uggggcacaacagucggau

SEQ ID NO: 1637033 - RNA, 19 nt, Artificial Sequence
  Description of Artificial Sequence: Synthetic oligonucleotide
cccguugauggucagguag

SEQ ID NO: 1637034 - RNA, 19 nt, Artificial Sequence
  Description of Artificial Sequence: Synthetic oligonucleotide
agugaacaucuauuagcuu

SEQ ID NO: 1637035 - RNA, 19 nt, Artificial Sequence
  Description of Artificial Sequence: Synthetic oligonucleotide
caugucaaugccucugcaa

SEQ ID NO: 1637036 - RNA, 19 nt, Artificial Sequence
  Description of Artificial Sequence: Synthetic oligonucleotide
gucguugugacaacucauc

SEQ ID NO: 1637037 - RNA, 19 nt, Artificial Sequence
  Description of Artificial Sequence: Synthetic oligonucleotide
ccggccagacaacugaacg

SEQ ID NO: 1637038 - RNA, 19 nt, Artificial Sequence
  Description of Artificial Sequence: Synthetic oligonucleotide
uggguguagguagaauaaa

SEQ ID NO: 1637039 - RNA, 19 nt, Artificial Sequence
  Description of Artificial Sequence: Synthetic oligonucleotide
uggcguucacggcguacag

SEQ ID NO: 1637040 - RNA, 19 nt, Artificial Sequence
  Description of Artificial Sequence: Synthetic oligonucleotide
gacaacucaucuucccgua

SEQ ID NO: 1637041 - RNA, 19 nt, Artificial Sequence
  Description of Artificial Sequence: Synthetic oligonucleotide
gaucuugcucuuuguauau

SEQ ID NO: 1637042 - RNA, 19 nt, Artificial Sequence
  Description of Artificial Sequence: Synthetic oligonucleotide
ggguaagcggcccuggcac

SEQ ID NO: 1637043 - RNA, 19 nt, Artificial Sequence
  Description of Artificial Sequence: Synthetic oligonucleotide
cuguauugcccaguuucug

SEQ ID NO: 1637044 - RNA, 19 nt, Artificial Sequence
  Description of Artificial Sequence: Synthetic oligonucleotide
acaacucaucuucccguaa

SEQ ID NO: 1637045 - RNA, 19 nt, Artificial Sequence
  Description of Artificial Sequence: Synthetic oligonucleotide
acgcguagaagcucaugaa

SEQ ID NO: 1637046 - RNA, 19 nt, Artificial Sequence
  Description of Artificial Sequence: Synthetic oligonucleotide
gaagcucaugaagucuaca

SEQ ID NO: 1637047 - RNA, 19 nt, Artificial Sequence
  Description of Artificial Sequence: Synthetic oligonucleotide
uccggccagacaacugaac

SEQ ID NO: 1637048 - RNA, 19 nt, Artificial Sequence
  Description of Artificial Sequence: Synthetic oligonucleotide
ucacccggcagaucccacu

SEQ ID NO: 1637049 - RNA, 19 nt, Artificial Sequence
  Description of Artificial Sequence: Synthetic oligonucleotide
uuggggcacaacagucgga

SEQ ID NO: 1637050 - RNA, 19 nt, Artificial Sequence
  Description of Artificial Sequence: Synthetic oligonucleotide
gaguauucuccugcaagaa

SEQ ID NO: 1637051 - RNA, 19 nt, Artificial Sequence
  Description of Artificial Sequence: Synthetic oligonucleotide
ggguguagguagaauaaac

SEQ ID NO: 1637052 - RNA, 19 nt, Artificial Sequence
  Description of Artificial Sequence: Synthetic oligonucleotide
gcagaucccacuaaaagua

SEQ ID NO: 1637053 - RNA, 19 nt, Artificial Sequence
  Description of Artificial Sequence: Synthetic oligonucleotide
ccguauauuuccaccuggc

SEQ ID NO: 1637054 - RNA, 19 nt, Artificial Sequence
  Description of Artificial Sequence: Synthetic oligonucleotide
gccucugcaaaugccaaag

SEQ ID NO: 1637055 - RNA, 19 nt, Artificial Sequence
  Description of Artificial Sequence: Synthetic oligonucleotide
caugagugauccggagagc

SEQ ID NO: 1637056 - RNA, 19 nt, Artificial Sequence
  Description of Artificial Sequence: Synthetic oligonucleotide
ggcuaagguagcccaacac

SEQ ID NO: 1637057 - RNA, 19 nt, Artificial Sequence
  Description of Artificial Sequence: Synthetic oligonucleotide
gcuaagguagcccaacacu

SEQ ID NO: 1637058 - RNA, 19 nt, Artificial Sequence
  Description of Artificial Sequence: Synthetic oligonucleotide
gcguacaguaugugggaag

SEQ ID NO: 1637059 - RNA, 19 nt, Artificial Sequence
  Description of Artificial Sequence: Synthetic oligonucleotide
guaagcggcccuggcacag

SEQ ID NO: 1637060 - RNA, 19 nt, Artificial Sequence
  Description of Artificial Sequence: Synthetic oligonucleotide
cucaaccccguugaugguc

SEQ ID NO: 1637061 - RNA, 19 nt, Artificial Sequence
  Description of Artificial Sequence: Synthetic oligonucleotide
cauauaggguucugugcaa

SEQ ID NO: 1637062 - RNA, 19 nt, Artificial Sequence
  Description of Artificial Sequence: Synthetic oligonucleotide
cguaauacgccaucuucug

SEQ ID NO: 1637063 - RNA, 19 nt, Artificial Sequence
  Description of Artificial Sequence: Synthetic oligonucleotide
cuggcuaagguagcccaac

SEQ ID NO: 1637064 - RNA, 19 nt, Artificial Sequence
  Description of Artificial Sequence: Synthetic oligonucleotide
ucccguaauacgccaucuu

SEQ ID NO: 1637065 - RNA, 19 nt, Artificial Sequence
  Description of Artificial Sequence: Synthetic oligonucleotide
gucuacagcagacguccga

SEQ ID NO: 1637066 - RNA, 19 nt, Artificial Sequence
  Description of Artificial Sequence: Synthetic oligonucleotide
ccggaacacguauuuuacg

SEQ ID NO: 1637067 - RNA, 19 nt, Artificial Sequence
  Description of Artificial Sequence: Synthetic oligonucleotide
ugcaagucacccggcagau

SEQ ID NO: 1637068 - RNA, 19 nt, Artificial Sequence
  Description of Artificial Sequence: Synthetic oligonucleotide
acugaacgacauaguuggg

SEQ ID NO: 1637069 - RNA, 19 nt, Artificial Sequence
  Description of Artificial Sequence: Synthetic oligonucleotide
agucguugugacaacucau

SEQ ID NO: 1637070 - RNA, 19 nt, Artificial Sequence
  Description of Artificial Sequence: Synthetic oligonucleotide
ugccucugcaaaugccaaa

SEQ ID NO: 1637071 - RNA, 19 nt, Artificial Sequence
  Description of Artificial Sequence: Synthetic oligonucleotide
ugcacacgcguagaagcuc

SEQ ID NO: 1637072 - RNA, 19 nt, Artificial Sequence
  Description of Artificial Sequence: Synthetic oligonucleotide
gaaggggaccugauaggga

SEQ ID NO: 1637073 - RNA, 19 nt, Artificial Sequence
  Description of Artificial Sequence: Synthetic oligonucleotide
cccguaauacgccaucuuc

SEQ ID NO: 1637074 - RNA, 19 nt, Artificial Sequence
  Description of Artificial Sequence: Synthetic oligonucleotide
agaucccacuaaaaguaaa

SEQ ID NO: 1637075 - RNA, 19 nt, Artificial Sequence
  Description of Artificial Sequence: Synthetic oligonucleotide
gaaggggcaacgucggcau

SEQ ID NO: 1637076 - RNA, 19 nt, Artificial Sequence
  Description of Artificial Sequence: Synthetic oligonucleotide
ccaaauucuugaauuucga

SEQ ID NO: 1637077 - RNA, 19 nt, Artificial Sequence
  Description of Artificial Sequence: Synthetic oligonucleotide
guaauacgccaucuucugu

SEQ ID NO: 1637078 - RNA, 19 nt, Artificial Sequence
  Description of Artificial Sequence: Synthetic oligonucleotide
cccggaacacguauuuuac

SEQ ID NO: 1637079 - RNA, 19 nt, Artificial Sequence
  Description of Artificial Sequence: Synthetic oligonucleotide
gcaacgucggcaugaguga

SEQ ID NO: 1637080 - RNA, 19 nt, Artificial Sequence
  Description of Artificial Sequence: Synthetic oligonucleotide
augcacacgcguagaagcu

SEQ ID NO: 1637081 - RNA, 19 nt, Artificial Sequence
  Description of Artificial Sequence: Synthetic oligonucleotide
agucucaugugaggcuuga

SEQ ID NO: 1637082 - RNA, 19 nt, Artificial Sequence
  Description of Artificial Sequence: Synthetic oligonucleotide
ggccguauauuuccaccug

SEQ ID NO: 1637083 - RNA, 19 nt, Artificial Sequence
  Description of Artificial Sequence: Synthetic oligonucleotide
guacagacgcugguccaug

SEQ ID NO: 1637084 - RNA, 19 nt, Artificial Sequence
  Description of Artificial Sequence: Synthetic oligonucleotide
agucuacagcagacguccg

SEQ ID NO: 1637085 - RNA, 19 nt, Artificial Sequence
  Description of Artificial Sequence: Synthetic oligonucleotide
cggaacacguauuuuacga

SEQ ID NO: 1637086 - RNA, 19 nt, Artificial Sequence
  Description of Artificial Sequence: Synthetic oligonucleotide
auugguccgcauaggagua

SEQ ID NO: 1637087 - RNA, 19 nt, Artificial Sequence
  Description of Artificial Sequence: Synthetic oligonucleotide
cagcaguaccacggaaccc

SEQ ID NO: 1637088 - RNA, 19 nt, Artificial Sequence
  Description of Artificial Sequence: Synthetic oligonucleotide
ggcgugagaaugugguaca

SEQ ID NO: 1637089 - RNA, 19 nt, Artificial Sequence
  Description of Artificial Sequence: Synthetic oligonucleotide
gucacauauaggguucugu

SEQ ID NO: 1637090 - RNA, 19 nt, Artificial Sequence
  Description of Artificial Sequence: Synthetic oligonucleotide
ggaugggaccccuagugua

SEQ ID NO: 1637091 - RNA, 19 nt, Artificial Sequence
  Description of Artificial Sequence: Synthetic oligonucleotide
cggcagaucccacuaaaag

SEQ ID NO: 1637092 - RNA, 19 nt, Artificial Sequence
  Description of Artificial Sequence: Synthetic oligonucleotide
ggaauggcaccaaccagca

SEQ ID NO: 1637093 - RNA, 19 nt, Artificial Sequence
  Description of Artificial Sequence: Synthetic oligonucleotide
acucaaccccguugauggu

SEQ ID NO: 1637094 - RNA, 19 nt, Artificial Sequence
  Description of Artificial Sequence: Synthetic oligonucleotide
agcaggccguccucuuuca

SEQ ID NO: 1637095 - RNA, 19 nt, Artificial Sequence
  Description of Artificial Sequence: Synthetic oligonucleotide
cagcuggcuaagguagccc

SEQ ID NO: 1637096 - RNA, 19 nt, Artificial Sequence
  Description of Artificial Sequence: Synthetic oligonucleotide
gcguucacggcguacagua

SEQ ID NO: 1637097 - RNA, 19 nt, Artificial Sequence
  Description of Artificial Sequence: Synthetic oligonucleotide
gacguccgaagcugcucca

SEQ ID NO: 1637098 - RNA, 19 nt, Artificial Sequence
  Description of Artificial Sequence: Synthetic oligonucleotide
acguccgaagcugcuccag

SEQ ID NO: 1637099 - RNA, 19 nt, Artificial Sequence
  Description of Artificial Sequence: Synthetic oligonucleotide
acacgcguagaagcucaug

SEQ ID NO: 1637100 - RNA, 19 nt, Artificial Sequence
  Description of Artificial Sequence: Synthetic oligonucleotide
cuggcguucacggcguaca

SEQ ID NO: 1637101 - RNA, 19 nt, Artificial Sequence
  Description of Artificial Sequence: Synthetic oligonucleotide
gaguggggacucccuccug

SEQ ID NO: 1637102 - RNA, 19 nt, Artificial Sequence
  Description of Artificial Sequence: Synthetic oligonucleotide
acgacauaguuggggcaca

SEQ ID NO: 1637103 - RNA, 19 nt, Artificial Sequence
  Description of Artificial Sequence: Synthetic oligonucleotide
guaggcguggguguaggua

SEQ ID NO: 1637104 - RNA, 19 nt, Artificial Sequence
  Description of Artificial Sequence: Synthetic oligonucleotide
gggacucccuccuguaauc

SEQ ID NO: 1637105 - RNA, 19 nt, Artificial Sequence
  Description of Artificial Sequence: Synthetic oligonucleotide
acauggccguauauuucca

SEQ ID NO: 1637106 - RNA, 19 nt, Artificial Sequence
  Description of Artificial Sequence: Synthetic oligonucleotide
cagacguccgaagcugcuc

SEQ ID NO: 1637107 - RNA, 19 nt, Artificial Sequence
  Description of Artificial Sequence: Synthetic oligonucleotide
cuuucacccagcccauugu

SEQ ID NO: 1637108 - RNA, 19 nt, Artificial Sequence
  Description of Artificial Sequence: Synthetic oligonucleotide
ggacucccuccuguaaucc

SEQ ID NO: 1637109 - RNA, 19 nt, Artificial Sequence
  Description of Artificial Sequence: Synthetic oligonucleotide
ugguccgcauaggaguauu

SEQ ID NO: 1637110 - RNA, 19 nt, Artificial Sequence
  Description of Artificial Sequence: Synthetic oligonucleotide
cagacaacugaacgacaua

SEQ ID NO: 1637111 - RNA, 19 nt, Artificial Sequence
  Description of Artificial Sequence: Synthetic oligonucleotide
cuccugcaagaagacauaa

SEQ ID NO: 1637112 - RNA, 19 nt, Artificial Sequence
  Description of Artificial Sequence: Synthetic oligonucleotide
caacggcauugaaggggac

SEQ ID NO: 1637113 - RNA, 19 nt, Artificial Sequence
  Description of Artificial Sequence: Synthetic oligonucleotide
gccauagaugcaagucacc

SEQ ID NO: 1637114 - RNA, 19 nt, Artificial Sequence
  Description of Artificial Sequence: Synthetic oligonucleotide
agcccggaucucucuccug

SEQ ID NO: 1637115 - RNA, 19 nt, Artificial Sequence
  Description of Artificial Sequence: Synthetic oligonucleotide
ccggagagcaacggcauug

SEQ ID NO: 1637116 - RNA, 19 nt, Artificial Sequence
  Description of Artificial Sequence: Synthetic oligonucleotide
uccucgggugagugucuuc

SEQ ID NO: 1637117 - RNA, 19 nt, Artificial Sequence
  Description of Artificial Sequence: Synthetic oligonucleotide
uugguccgcauaggaguau

SEQ ID NO: 1637118 - RNA, 19 nt, Artificial Sequence
  Description of Artificial Sequence: Synthetic oligonucleotide
uuguuguauuuggcccuau

SEQ ID NO: 1637119 - RNA, 19 nt, Artificial Sequence
  Description of Artificial Sequence: Synthetic oligonucleotide
caaccccguugauggucag

SEQ ID NO: 1637120 - RNA, 19 nt, Artificial Sequence
  Description of Artificial Sequence: Synthetic oligonucleotide
cagucggaucagguccacc

SEQ ID NO: 1637121 - RNA, 19 nt, Artificial Sequence
  Description of Artificial Sequence: Synthetic oligonucleotide
guccgcauaggaguauucu

SEQ ID NO: 1637122 - RNA, 19 nt, Artificial Sequence
  Description of Artificial Sequence: Synthetic oligonucleotide
ccguaauacgccaucuucu

SEQ ID NO: 1637123 - RNA, 19 nt, Artificial Sequence
  Description of Artificial Sequence: Synthetic oligonucleotide
ggggaccugauagggaguc

SEQ ID NO: 1637124 - RNA, 19 nt, Artificial Sequence
  Description of Artificial Sequence: Synthetic oligonucleotide
gguaagcggcccuggcaca

SEQ ID NO: 1637125 - RNA, 19 nt, Artificial Sequence
  Description of Artificial Sequence: Synthetic oligonucleotide
gcgugagaaugugguacag

SEQ ID NO: 1637126 - RNA, 19 nt, Artificial Sequence
  Description of Artificial Sequence: Synthetic oligonucleotide
gcacacgcguagaagcuca

SEQ ID NO: 1637127 - RNA, 19 nt, Artificial Sequence
  Description of Artificial Sequence: Synthetic oligonucleotide
gccaucugugagcucuaca

SEQ ID NO: 1637128 - RNA, 19 nt, Artificial Sequence
  Description of Artificial Sequence: Synthetic oligonucleotide
gagcccggaucucucuccu

SEQ ID NO: 1637129 - RNA, 19 nt, Artificial Sequence
  Description of Artificial Sequence: Synthetic oligonucleotide
acccggcagaucccacuaa

SEQ ID NO: 1637130 - RNA, 19 nt, Artificial Sequence
  Description of Artificial Sequence: Synthetic oligonucleotide
aucccggaacacguauuuu

SEQ ID NO: 1637131 - RNA, 19 nt, Artificial Sequence
  Description of Artificial Sequence: Synthetic oligonucleotide
ggucagagcggacauuguu

SEQ ID NO: 1637132 - RNA, 19 nt, Artificial Sequence
  Description of Artificial Sequence: Synthetic oligonucleotide
cuggcacaggcggcaucag

SEQ ID NO: 1637133 - RNA, 19 nt, Artificial Sequence
  Description of Artificial Sequence: Synthetic oligonucleotide
cguccacgaucuugcaaag

SEQ ID NO: 1637134 - RNA, 19 nt, Artificial Sequence
  Description of Artificial Sequence: Synthetic oligonucleotide
gggugagugucuucuuccu

SEQ ID NO: 1637135 - RNA, 19 nt, Artificial Sequence
  Description of Artificial Sequence: Synthetic oligonucleotide
cacccggcagaucccacua

SEQ ID NO: 1637136 - RNA, 19 nt, Artificial Sequence
  Description of Artificial Sequence: Synthetic oligonucleotide
ccguccucuuucacccagc

SEQ ID NO: 1637137 - RNA, 19 nt, Artificial Sequence
  Description of Artificial Sequence: Synthetic oligonucleotide
cguccgaagcugcuccagc

SEQ ID NO: 1637138 - RNA, 19 nt, Artificial Sequence
  Description of Artificial Sequence: Synthetic oligonucleotide
ggcguacaguaugugggaa

SEQ ID NO: 1637139 - RNA, 19 nt, Artificial Sequence
  Description of Artificial Sequence: Synthetic oligonucleotide
gguccgcauaggaguauuc

SEQ ID NO: 1637140 - RNA, 19 nt, Artificial Sequence
  Description of Artificial Sequence: Synthetic oligonucleotide
ggggacucccuccuguaau

SEQ ID NO: 1637141 - RNA, 19 nt, Artificial Sequence
  Description of Artificial Sequence: Synthetic oligonucleotide
gucacccggcagaucccac

SEQ ID NO: 1637142 - RNA, 19 nt, Artificial Sequence
  Description of Artificial Sequence: Synthetic oligonucleotide
gccagacaacugaacgaca

SEQ ID NO: 1637143 - RNA, 19 nt, Artificial Sequence
  Description of Artificial Sequence: Synthetic oligonucleotide
cggccagacaacugaacga

SEQ ID NO: 1637144 - RNA, 19 nt, Artificial Sequence
  Description of Artificial Sequence: Synthetic oligonucleotide
gcaggccguccucuuucac

SEQ ID NO: 1637145 - RNA, 19 nt, Artificial Sequence
  Description of Artificial Sequence: Synthetic oligonucleotide
caccaaccagcagacaguu

SEQ ID NO: 1637146 - RNA, 19 nt, Artificial Sequence
  Description of Artificial Sequence: Synthetic oligonucleotide
gguacagacgcugguccau

SEQ ID NO: 1637147 - RNA, 19 nt, Artificial Sequence
  Description of Artificial Sequence: Synthetic oligonucleotide
gcuggcguucacggcguac

SEQ ID NO: 1637148 - RNA, 19 nt, Artificial Sequence
  Description of Artificial Sequence: Synthetic oligonucleotide
ccccuaguguacccuuuca

SEQ ID NO: 1637149 - RNA, 19 nt, Artificial Sequence
  Description of Artificial Sequence: Synthetic oligonucleotide
gcuggcuaagguagcccaa

SEQ ID NO: 1637150 - RNA, 19 nt, Artificial Sequence
  Description of Artificial Sequence: Synthetic oligonucleotide
cccggcagaucccacuaaa

SEQ ID NO: 1637151 - RNA, 19 nt, Artificial Sequence
  Description of Artificial Sequence: Synthetic oligonucleotide
cgcauaggaguauucuccu

SEQ ID NO: 1637152 - RNA, 19 nt, Artificial Sequence
  Description of Artificial Sequence: Synthetic oligonucleotide
gguaggcguggguguaggu

SEQ ID NO: 1637153 - RNA, 19 nt, Artificial Sequence
  Description of Artificial Sequence: Synthetic oligonucleotide
caacgucggcaugagugau

SEQ ID NO: 1637154 - RNA, 19 nt, Artificial Sequence
  Description of Artificial Sequence: Synthetic oligonucleotide
cggcguacaguauguggga

SEQ ID NO: 1637155 - RNA, 19 nt, Artificial Sequence
  Description of Artificial Sequence: Synthetic oligonucleotide
cuggguacucaaccccguu

SEQ ID NO: 1637156 - RNA, 19 nt, Artificial Sequence
  Description of Artificial Sequence: Synthetic oligonucleotide
gaccccuaguguacccuuu

SEQ ID NO: 1637157 - RNA, 19 nt, Artificial Sequence
  Description of Artificial Sequence: Synthetic oligonucleotide
gcaagucacccggcagauc

SEQ ID NO: 1637158 - RNA, 19 nt, Artificial Sequence
  Description of Artificial Sequence: Synthetic oligonucleotide
gccaacccagcuggcguuc

SEQ ID NO: 1637159 - RNA, 19 nt, Artificial Sequence
  Description of Artificial Sequence: Synthetic oligonucleotide
ggaccccuaguguacccuu

SEQ ID NO: 1637160 - RNA, 19 nt, Artificial Sequence
  Description of Artificial Sequence: Synthetic oligonucleotide
cccuaguguacccuuucau

SEQ ID NO: 1637161 - RNA, 19 nt, Artificial Sequence
  Description of Artificial Sequence: Synthetic oligonucleotide
ggcguggguguagguagaa

SEQ ID NO: 1637162 - RNA, 19 nt, Artificial Sequence
  Description of Artificial Sequence: Synthetic oligonucleotide
ggccguccucuuucaccca

SEQ ID NO: 1637163 - RNA, 19 nt, Artificial Sequence
  Description of Artificial Sequence: Synthetic oligonucleotide
cacacgcguagaagcucau

SEQ ID NO: 1637164 - RNA, 19 nt, Artificial Sequence
  Description of Artificial Sequence: Synthetic oligonucleotide
cucgggugagugucuucuu

SEQ ID NO: 1637165 - RNA, 19 nt, Artificial Sequence
  Description of Artificial Sequence: Synthetic oligonucleotide
cgucggcaugagugauccg

SEQ ID NO: 1637166 - RNA, 19 nt, Artificial Sequence
  Description of Artificial Sequence: Synthetic oligonucleotide
gcagacguccgaagcugcu

SEQ ID NO: 1637167 - RNA, 19 nt, Artificial Sequence
  Description of Artificial Sequence: Synthetic oligonucleotide
ccagucucaugugaggcuu

SEQ ID NO: 1637168 - RNA, 19 nt, Artificial Sequence
  Description of Artificial Sequence: Synthetic oligonucleotide
ggccaacccagcuggcguu

SEQ ID NO: 1637169 - RNA, 19 nt, Artificial Sequence
  Description of Artificial Sequence: Synthetic oligonucleotide
cggcauugaaggggaccug

SEQ ID NO: 1637170 - RNA, 19 nt, Artificial Sequence
  Description of Artificial Sequence: Synthetic oligonucleotide
cuccucgggugagugucuu

SEQ ID NO: 1637171 - RNA, 19 nt, Artificial Sequence
  Description of Artificial Sequence: Synthetic oligonucleotide
cccuccccgguuggcagca

SEQ ID NO: 1637172 - RNA, 19 nt, Artificial Sequence
  Description of Artificial Sequence: Synthetic oligonucleotide
cgacauaguuggggcacaa

SEQ ID NO: 1637173 - RNA, 19 nt, Artificial Sequence
  Description of Artificial Sequence: Synthetic oligonucleotide
ccccguugauggucaggua

SEQ ID NO: 1637174 - RNA, 19 nt, Artificial Sequence
  Description of Artificial Sequence: Synthetic oligonucleotide
ccuccucgggugagugucu

SEQ ID NO: 1637175 - RNA, 19 nt, Artificial Sequence
  Description of Artificial Sequence: Synthetic oligonucleotide
cguucacggcguacaguau

SEQ ID NO: 1637176 - RNA, 19 nt, Artificial Sequence
  Description of Artificial Sequence: Synthetic oligonucleotide
gcgcggcccgagcccaggu

SEQ ID NO: 1637177 - RNA, 19 nt, Artificial Sequence
  Description of Artificial Sequence: Synthetic oligonucleotide
aaaguuucggcguaguggc

SEQ ID NO: 1637178 - RNA, 19 nt, Artificial Sequence
  Description of Artificial Sequence: Synthetic oligonucleotide
ugagauugcucaaucaccg

SEQ ID NO: 1637179 - RNA, 19 nt, Artificial Sequence
  Description of Artificial Sequence: Synthetic oligonucleotide
uguauuucucucaagccug

SEQ ID NO: 1637180 - RNA, 19 nt, Artificial Sequence
  Description of Artificial Sequence: Synthetic oligonucleotide
ucacgcuuuaguuugagug

SEQ ID NO: 1637181 - RNA, 19 nt, Artificial Sequence
  Description of Artificial Sequence: Synthetic oligonucleotide
uacgguaucacccgagagg

SEQ ID NO: 1637182 - RNA, 19 nt, Artificial Sequence
  Description of Artificial Sequence: Synthetic oligonucleotide
auguacagcgcucagaaug

SEQ ID NO: 1637183 - RNA, 19 nt, Artificial Sequence
  Description of Artificial Sequence: Synthetic oligonucleotide
uggcauuccaagcauaggc

SEQ ID NO: 1637184 - RNA, 19 nt, Artificial Sequence
  Description of Artificial Sequence: Synthetic oligonucleotide
agugucaugccacacagca

SEQ ID NO: 1637185 - RNA, 19 nt, Artificial Sequence
  Description of Artificial Sequence: Synthetic oligonucleotide
gucacgugcagcuugaagc

SEQ ID NO: 1637186 - RNA, 19 nt, Artificial Sequence
  Description of Artificial Sequence: Synthetic oligonucleotide
auuucucucaagccugcgc

SEQ ID NO: 1637187 - RNA, 19 nt, Artificial Sequence
  Description of Artificial Sequence: Synthetic oligonucleotide
uuucucucaagccugcgca

SEQ ID NO: 1637188 - RNA, 19 nt, Artificial Sequence
  Description of Artificial Sequence: Synthetic oligonucleotide
caaaguuucggcguagugg

SEQ ID NO: 1637189 - RNA, 19 nt, Artificial Sequence
  Description of Artificial Sequence: Synthetic oligonucleotide
aaggggugcgauguggugc

SEQ ID NO: 1637190 - RNA, 19 nt, Artificial Sequence
  Description of Artificial Sequence: Synthetic oligonucleotide
ugaugguucauauuccagu

SEQ ID NO: 1637191 - RNA, 19 nt, Artificial Sequence
  Description of Artificial Sequence: Synthetic oligonucleotide
uuugaugguucauauucca

SEQ ID NO: 1637192 - RNA, 19 nt, Artificial Sequence
  Description of Artificial Sequence: Synthetic oligonucleotide
ucuaugaacuccccaagaa

SEQ ID NO: 1637193 - RNA, 19 nt, Artificial Sequence
  Description of Artificial Sequence: Synthetic oligonucleotide
caguuaguaguucaguggc

SEQ ID NO: 1637194 - RNA, 19 nt, Artificial Sequence
  Description of Artificial Sequence: Synthetic oligonucleotide
ugcaggacgcgcauuacag

SEQ ID NO: 1637195 - RNA, 19 nt, Artificial Sequence
  Description of Artificial Sequence: Synthetic oligonucleotide
uccaagggcgcuuaggugu

SEQ ID NO: 1637196 - RNA, 19 nt, Artificial Sequence
  Description of Artificial Sequence: Synthetic oligonucleotide
auugcucaaucaccgcacc

SEQ ID NO: 1637197 - RNA, 19 nt, Artificial Sequence
  Description of Artificial Sequence: Synthetic oligonucleotide
agcaguuaguaguucagug

SEQ ID NO: 1637198 - RNA, 19 nt, Artificial Sequence
  Description of Artificial Sequence: Synthetic oligonucleotide
ugaaugugguucaggcagg

SEQ ID NO: 1637199 - RNA, 19 nt, Artificial Sequence
  Description of Artificial Sequence: Synthetic oligonucleotide
uugaugguucauauuccag

SEQ ID NO: 1637200 - RNA, 19 nt, Artificial Sequence
  Description of Artificial Sequence: Synthetic oligonucleotide
ggucucaccacgcagaagc

SEQ ID NO: 1637201 - RNA, 19 nt, Artificial Sequence
  Description of Artificial Sequence: Synthetic oligonucleotide
uguacagcgcucagaaugu

SEQ ID NO: 1637202 - RNA, 19 nt, Artificial Sequence
  Description of Artificial Sequence: Synthetic oligonucleotide
ugagccgcuccgcagacag

SEQ ID NO: 1637203 - RNA, 19 nt, Artificial Sequence
  Description of Artificial Sequence: Synthetic oligonucleotide
gaaaagcggcuuuucuccg

SEQ ID NO: 1637204 - RNA, 19 nt, Artificial Sequence
  Description of Artificial Sequence: Synthetic oligonucleotide
uucacuagugcaugguugu

SEQ ID NO: 1637205 - RNA, 19 nt, Artificial Sequence
  Description of Artificial Sequence: Synthetic oligonucleotide
uagagcggugugcagcucg

SEQ ID NO: 1637206 - RNA, 19 nt, Artificial Sequence
  Description of Artificial Sequence: Synthetic oligonucleotide
ugaugcuagugucaugcca

SEQ ID NO: 1637207 - RNA, 19 nt, Artificial Sequence
  Description of Artificial Sequence: Synthetic oligonucleotide
uugaguguguagcugcgca

SEQ ID NO: 1637208 - RNA, 19 nt, Artificial Sequence
  Description of Artificial Sequence: Synthetic oligonucleotide
uucuccguggcauuccaag

SEQ ID NO: 1637209 - RNA, 19 nt, Artificial Sequence
  Description of Artificial Sequence: Synthetic oligonucleotide
caagaacagggcuagccgc

SEQ ID NO: 1637210 - RNA, 19 nt, Artificial Sequence
  Description of Artificial Sequence: Synthetic oligonucleotide
gaugcuagugucaugccac

SEQ ID NO: 1637211 - RNA, 19 nt, Artificial Sequence
  Description of Artificial Sequence: Synthetic oligonucleotide
uguagggcaagcagcgcag

SEQ ID NO: 1637212 - RNA, 19 nt, Artificial Sequence
  Description of Artificial Sequence: Synthetic oligonucleotide
agauugcucaaucaccgca

SEQ ID NO: 1637213 - RNA, 19 nt, Artificial Sequence
  Description of Artificial Sequence: Synthetic oligonucleotide
gaagcaguguauuucucuc

SEQ ID NO: 1637214 - RNA, 19 nt, Artificial Sequence
  Description of Artificial Sequence: Synthetic oligonucleotide
agcgcucagaaugucaugg

SEQ ID NO: 1637215 - RNA, 19 nt, Artificial Sequence
  Description of Artificial Sequence: Synthetic oligonucleotide
cuuuaguuugaguguguag

SEQ ID NO: 1637216 - RNA, 19 nt, Artificial Sequence
  Description of Artificial Sequence: Synthetic oligonucleotide
ugcaaaaggggugcgaugu

SEQ ID NO: 1637217 - RNA, 19 nt, Artificial Sequence
  Description of Artificial Sequence: Synthetic oligonucleotide
ugaagcaccagcgugucgu

SEQ ID NO: 1637218 - RNA, 19 nt, Artificial Sequence
  Description of Artificial Sequence: Synthetic oligonucleotide
aguguguagcugcgcaggc

SEQ ID NO: 1637219 - RNA, 19 nt, Artificial Sequence
  Description of Artificial Sequence: Synthetic oligonucleotide
aguuucggcguaguggcgc

SEQ ID NO: 1637220 - RNA, 19 nt, Artificial Sequence
  Description of Artificial Sequence: Synthetic oligonucleotide
cucguuuggaagugcaggc

SEQ ID NO: 1637221 - RNA, 19 nt, Artificial Sequence
  Description of Artificial Sequence: Synthetic oligonucleotide
aaagcggcuuuucuccgug

SEQ ID NO: 1637222 - RNA, 19 nt, Artificial Sequence
  Description of Artificial Sequence: Synthetic oligonucleotide
aagcgcacuggcccuacgg

SEQ ID NO: 1637223 - RNA, 19 nt, Artificial Sequence
  Description of Artificial Sequence: Synthetic oligonucleotide
ugggcaggccuccaaaagc

SEQ ID NO: 1637224 - RNA, 19 nt, Artificial Sequence
  Description of Artificial Sequence: Synthetic oligonucleotide
uggaagugcaggcucuagc

SEQ ID NO: 1637225 - RNA, 19 nt, Artificial Sequence
  Description of Artificial Sequence: Synthetic oligonucleotide
ucacgugcagcuugaagca

SEQ ID NO: 1637226 - RNA, 19 nt, Artificial Sequence
  Description of Artificial Sequence: Synthetic oligonucleotide
ugcucaaucaccgcaccag

SEQ ID NO: 1637227 - RNA, 19 nt, Artificial Sequence
  Description of Artificial Sequence: Synthetic oligonucleotide
acuagugcaugguugucca

SEQ ID NO: 1637228 - RNA, 19 nt, Artificial Sequence
  Description of Artificial Sequence: Synthetic oligonucleotide
agucgugguguuugguugg

SEQ ID NO: 1637229 - RNA, 19 nt, Artificial Sequence
  Description of Artificial Sequence: Synthetic oligonucleotide
agauugugaaugugguuca

SEQ ID NO: 1637230 - RNA, 19 nt, Artificial Sequence
  Description of Artificial Sequence: Synthetic oligonucleotide
ucuagagcggugugcagcu

SEQ ID NO: 1637231 - RNA, 19 nt, Artificial Sequence
  Description of Artificial Sequence: Synthetic oligonucleotide
ggugagauugcucaaucac

SEQ ID NO: 1637232 - RNA, 19 nt, Artificial Sequence
  Description of Artificial Sequence: Synthetic oligonucleotide
cugcucacgcuuuaguuug

SEQ ID NO: 1637233 - RNA, 19 nt, Artificial Sequence
  Description of Artificial Sequence: Synthetic oligonucleotide
ucguccaguguguagggca

SEQ ID NO: 1637234 - RNA, 19 nt, Artificial Sequence
  Description of Artificial Sequence: Synthetic oligonucleotide
aaaagcggcuuuucuccgu

SEQ ID NO: 1637235 - RNA, 19 nt, Artificial Sequence
  Description of Artificial Sequence: Synthetic oligonucleotide
ugaguguguagcugcgcag

SEQ ID NO: 1637236 - RNA, 19 nt, Artificial Sequence
  Description of Artificial Sequence: Synthetic oligonucleotide
uacagccucguuuggaagu

SEQ ID NO: 1637237 - RNA, 19 nt, Artificial Sequence
  Description of Artificial Sequence: Synthetic oligonucleotide
gaguguguagcugcgcagg

SEQ ID NO: 1637238 - RNA, 19 nt, Artificial Sequence
  Description of Artificial Sequence: Synthetic oligonucleotide
aaagacugcggagcucggg

SEQ ID NO: 1637239 - RNA, 19 nt, Artificial Sequence
  Description of Artificial Sequence: Synthetic oligonucleotide
aggaaaagacugcggagcu

SEQ ID NO: 1637240 - RNA, 19 nt, Artificial Sequence
  Description of Artificial Sequence: Synthetic oligonucleotide
gugagauugcucaaucacc

SEQ ID NO: 1637241 - RNA, 19 nt, Artificial Sequence
  Description of Artificial Sequence: Synthetic oligonucleotide
caaaaggggugcgaugugg

SEQ ID NO: 1637242 - RNA, 19 nt, Artificial Sequence
  Description of Artificial Sequence: Synthetic oligonucleotide
gagaaggccccgugaaucc

SEQ ID NO: 1637243 - RNA, 19 nt, Artificial Sequence
  Description of Artificial Sequence: Synthetic oligonucleotide
uuacagccucguuuggaag

SEQ ID NO: 1637244 - RNA, 19 nt, Artificial Sequence
  Description of Artificial Sequence: Synthetic oligonucleotide
uuaggugugggcaggccuc

SEQ ID NO: 1637245 - RNA, 19 nt, Artificial Sequence
  Description of Artificial Sequence: Synthetic oligonucleotide
ucggaaaagcggcuuuucu

SEQ ID NO: 1637246 - RNA, 19 nt, Artificial Sequence
  Description of Artificial Sequence: Synthetic oligonucleotide
agaucacggaagaugagug

SEQ ID NO: 1637247 - RNA, 19 nt, Artificial Sequence
  Description of Artificial Sequence: Synthetic oligonucleotide
aggggugcgauguggugcg

SEQ ID NO: 1637248 - RNA, 19 nt, Artificial Sequence
  Description of Artificial Sequence: Synthetic oligonucleotide
agaggcagaucacggaaga

SEQ ID NO: 1637249 - RNA, 19 nt, Artificial Sequence
  Description of Artificial Sequence: Synthetic oligonucleotide
auauaggguggcaacaggu

SEQ ID NO: 1637250 - RNA, 19 nt, Artificial Sequence
  Description of Artificial Sequence: Synthetic oligonucleotide
ugcagacucuggcaacugc

SEQ ID NO: 1637251 - RNA, 19 nt, Artificial Sequence
  Description of Artificial Sequence: Synthetic oligonucleotide
agucacgugcagcuugaag

SEQ ID NO: 1637252 - RNA, 19 nt, Artificial Sequence
  Description of Artificial Sequence: Synthetic oligonucleotide
ugcacgcuguucacuagug

SEQ ID NO: 1637253 - RNA, 19 nt, Artificial Sequence
  Description of Artificial Sequence: Synthetic oligonucleotide
uaguucaguggcugcucgg

SEQ ID NO: 1637254 - RNA, 19 nt, Artificial Sequence
  Description of Artificial Sequence: Synthetic oligonucleotide
ccagcaucggaaaagcggc

SEQ ID NO: 1637255 - RNA, 19 nt, Artificial Sequence
  Description of Artificial Sequence: Synthetic oligonucleotide
ugcagcacggucccugaga

SEQ ID NO: 1637256 - RNA, 19 nt, Artificial Sequence
  Description of Artificial Sequence: Synthetic oligonucleotide
agcaguguauuucucucaa

SEQ ID NO: 1637257 - RNA, 19 nt, Artificial Sequence
  Description of Artificial Sequence: Synthetic oligonucleotide
uucucucaagccugcgcag

SEQ ID NO: 1637258 - RNA, 19 nt, Artificial Sequence
  Description of Artificial Sequence: Synthetic oligonucleotide
ucgaagucgugguguuugg

SEQ ID NO: 1637259 - RNA, 19 nt, Artificial Sequence
  Description of Artificial Sequence: Synthetic oligonucleotide
ugcagcucgguggaagcgg

SEQ ID NO: 1637260 - RNA, 19 nt, Artificial Sequence
  Description of Artificial Sequence: Synthetic oligonucleotide
ugaggagugccugugcaac

SEQ ID NO: 1637261 - RNA, 19 nt, Artificial Sequence
  Description of Artificial Sequence: Synthetic oligonucleotide
uauuucucucaagccugcg

SEQ ID NO: 1637262 - RNA, 19 nt, Artificial Sequence
  Description of Artificial Sequence: Synthetic oligonucleotide
ugagugccaacacuuccuc

SEQ ID NO: 1637263 - RNA, 19 nt, Artificial Sequence
  Description of Artificial Sequence: Synthetic oligonucleotide
aggcagaucacggaagaug

SEQ ID NO: 1637264 - RNA, 19 nt, Artificial Sequence
  Description of Artificial Sequence: Synthetic oligonucleotide
uugcaggacgcgcauuaca

SEQ ID NO: 1637265 - RNA, 19 nt, Artificial Sequence
  Description of Artificial Sequence: Synthetic oligonucleotide
ucaccacgcagaagcagug

SEQ ID NO: 1637266 - RNA, 19 nt, Artificial Sequence
  Description of Artificial Sequence: Synthetic oligonucleotide
cagcgugucguccagugug

SEQ ID NO: 1637267 - RNA, 19 nt, Artificial Sequence
  Description of Artificial Sequence: Synthetic oligonucleotide
cucuagagcggugugcagc

SEQ ID NO: 1637268 - RNA, 19 nt, Artificial Sequence
  Description of Artificial Sequence: Synthetic oligonucleotide
cacgcuguucacuagugca

SEQ ID NO: 1637269 - RNA, 19 nt, Artificial Sequence
  Description of Artificial Sequence: Synthetic oligonucleotide
agagcaguuaguaguucag

SEQ ID NO: 1637270 - RNA, 19 nt, Artificial Sequence
  Description of Artificial Sequence: Synthetic oligonucleotide
cacuagugcaugguugucc

SEQ ID NO: 1637271 - RNA, 19 nt, Artificial Sequence
  Description of Artificial Sequence: Synthetic oligonucleotide
ugugcaacuugcugagguc

SEQ ID NO: 1637272 - RNA, 19 nt, Artificial Sequence
  Description of Artificial Sequence: Synthetic oligonucleotide
cauuccaagcauaggccuc

SEQ ID NO: 1637273 - RNA, 19 nt, Artificial Sequence
  Description of Artificial Sequence: Synthetic oligonucleotide
cucaagccugcgcagcgcg

SEQ ID NO: 1637274 - RNA, 19 nt, Artificial Sequence
  Description of Artificial Sequence: Synthetic oligonucleotide
gaagcacuguggucuauga

SEQ ID NO: 1637275 - RNA, 19 nt, Artificial Sequence
  Description of Artificial Sequence: Synthetic oligonucleotide
cuacgguaucacccgagag

SEQ ID NO: 1637276 - RNA, 19 nt, Artificial Sequence
  Description of Artificial Sequence: Synthetic oligonucleotide
aagaacagggcuagccgcu

SEQ ID NO: 1637277 - RNA, 19 nt, Artificial Sequence
  Description of Artificial Sequence: Synthetic oligonucleotide
cucgaagucgugguguuug

SEQ ID NO: 1637278 - RNA, 19 nt, Artificial Sequence
  Description of Artificial Sequence: Synthetic oligonucleotide
gaagugcaggcucuagcuc

SEQ ID NO: 1637279 - RNA, 19 nt, Artificial Sequence
  Description of Artificial Sequence: Synthetic oligonucleotide
gccagcaucggaaaagcgg

SEQ ID NO: 1637280 - RNA, 19 nt, Artificial Sequence
  Description of Artificial Sequence: Synthetic oligonucleotide
acaacugaugcuaguguca

SEQ ID NO: 1637281 - RNA, 19 nt, Artificial Sequence
  Description of Artificial Sequence: Synthetic oligonucleotide
guuucggcguaguggcgcg

SEQ ID NO: 1637282 - RNA, 19 nt, Artificial Sequence
  Description of Artificial Sequence: Synthetic oligonucleotide
acgagcaucuucggggcac

SEQ ID NO: 1637283 - RNA, 19 nt, Artificial Sequence
  Description of Artificial Sequence: Synthetic oligonucleotide
uuggugagccgcuccgcag

SEQ ID NO: 1637284 - RNA, 19 nt, Artificial Sequence
  Description of Artificial Sequence: Synthetic oligonucleotide
uggugagccgcuccgcaga

SEQ ID NO: 1637285 - RNA, 19 nt, Artificial Sequence
  Description of Artificial Sequence: Synthetic oligonucleotide
agaugagugccaacacuuc

SEQ ID NO: 1637286 - RNA, 19 nt, Artificial Sequence
  Description of Artificial Sequence: Synthetic oligonucleotide
aguggcgcgcagcgaagcg

SEQ ID NO: 1637287 - RNA, 19 nt, Artificial Sequence
  Description of Artificial Sequence: Synthetic oligonucleotide
agcuuacagucacaacuga

SEQ ID NO: 1637288 - RNA, 19 nt, Artificial Sequence
  Description of Artificial Sequence: Synthetic oligonucleotide
auguugcccaggcuucauc

SEQ ID NO: 1637289 - RNA, 19 nt, Artificial Sequence
  Description of Artificial Sequence: Synthetic oligonucleotide
acgcuuuaguuugagugug

SEQ ID NO: 1637290 - RNA, 19 nt, Artificial Sequence
  Description of Artificial Sequence: Synthetic oligonucleotide
gucuaugaacuccccaaga

SEQ ID NO: 1637291 - RNA, 19 nt, Artificial Sequence
  Description of Artificial Sequence: Synthetic oligonucleotide
accagcgugucguccagug

SEQ ID NO: 1637292 - RNA, 19 nt, Artificial Sequence
  Description of Artificial Sequence: Synthetic oligonucleotide
gaugcugcucacgcuuuag

SEQ ID NO: 1637293 - RNA, 19 nt, Artificial Sequence
  Description of Artificial Sequence: Synthetic oligonucleotide
cagagcaguuaguaguuca

SEQ ID NO: 1637294 - RNA, 19 nt, Artificial Sequence
  Description of Artificial Sequence: Synthetic oligonucleotide
agggcuagccgcugaggag

SEQ ID NO: 1637295 - RNA, 19 nt, Artificial Sequence
  Description of Artificial Sequence: Synthetic oligonucleotide
ucucucaagccugcgcagc

SEQ ID NO: 1637296 - RNA, 19 nt, Artificial Sequence
  Description of Artificial Sequence: Synthetic oligonucleotide
agucacaacugaugcuagu

SEQ ID NO: 1637297 - RNA, 19 nt, Artificial Sequence
  Description of Artificial Sequence: Synthetic oligonucleotide
uuccaguccuuagauugug

SEQ ID NO: 1637298 - RNA, 19 nt, Artificial Sequence
  Description of Artificial Sequence: Synthetic oligonucleotide
aucuucggggcacgcgcac

SEQ ID NO: 1637299 - RNA, 19 nt, Artificial Sequence
  Description of Artificial Sequence: Synthetic oligonucleotide
ggacauauaggguggcaac

SEQ ID NO: 1637300 - RNA, 19 nt, Artificial Sequence
  Description of Artificial Sequence: Synthetic oligonucleotide
uagugucaugccacacagc

SEQ ID NO: 1637301 - RNA, 19 nt, Artificial Sequence
  Description of Artificial Sequence: Synthetic oligonucleotide
cuagccgcugaggagugcc

SEQ ID NO: 1637302 - RNA, 19 nt, Artificial Sequence
  Description of Artificial Sequence: Synthetic oligonucleotide
ggcgcgcaaaguuucggcg

SEQ ID NO: 1637303 - RNA, 19 nt, Artificial Sequence
  Description of Artificial Sequence: Synthetic oligonucleotide
cuucggggcacgcgcaccg

SEQ ID NO: 1637304 - RNA, 19 nt, Artificial Sequence
  Description of Artificial Sequence: Synthetic oligonucleotide
caccgcaccagcgugggcc

SEQ ID NO: 1637305 - RNA, 19 nt, Artificial Sequence
  Description of Artificial Sequence: Synthetic oligonucleotide
ugccaacacuuccucuggc

SEQ ID NO: 1637306 - RNA, 19 nt, Artificial Sequence
  Description of Artificial Sequence: Synthetic oligonucleotide
aguuccagcgcggcaggcg

SEQ ID NO: 1637307 - RNA, 19 nt, Artificial Sequence
  Description of Artificial Sequence: Synthetic oligonucleotide
agggcgcuuaggugugggc

SEQ ID NO: 1637308 - RNA, 19 nt, Artificial Sequence
  Description of Artificial Sequence: Synthetic oligonucleotide
ugugggcaggccuccaaaa

SEQ ID NO: 1637309 - RNA, 19 nt, Artificial Sequence
  Description of Artificial Sequence: Synthetic oligonucleotide
cugaugcuagugucaugcc

SEQ ID NO: 1637310 - RNA, 19 nt, Artificial Sequence
  Description of Artificial Sequence: Synthetic oligonucleotide
ggugcaguuggugagccgc

SEQ ID NO: 1637311 - RNA, 19 nt, Artificial Sequence
  Description of Artificial Sequence: Synthetic oligonucleotide
uuccagcuuacagucacaa

SEQ ID NO: 1637312 - RNA, 19 nt, Artificial Sequence
  Description of Artificial Sequence: Synthetic oligonucleotide
agcggugugcagcucggug

SEQ ID NO: 1637313 - RNA, 19 nt, Artificial Sequence
  Description of Artificial Sequence: Synthetic oligonucleotide
ggcauuccaagcauaggcc

SEQ ID NO: 1637314 - RNA, 19 nt, Artificial Sequence
  Description of Artificial Sequence: Synthetic oligonucleotide
gcggugugcagcucggugg

SEQ ID NO: 1637315 - RNA, 19 nt, Artificial Sequence
  Description of Artificial Sequence: Synthetic oligonucleotide
ucguuuggaagugcaggcu

SEQ ID NO: 1637316 - RNA, 19 nt, Artificial Sequence
  Description of Artificial Sequence: Synthetic oligonucleotide
accgcagugccaggagugc

SEQ ID NO: 1637317 - RNA, 19 nt, Artificial Sequence
  Description of Artificial Sequence: Synthetic oligonucleotide
uccauggagcccgggacug

SEQ ID NO: 1637318 - RNA, 19 nt, Artificial Sequence
  Description of Artificial Sequence: Synthetic oligonucleotide
guauuucucucaagccugc

SEQ ID NO: 1637319 - RNA, 19 nt, Artificial Sequence
  Description of Artificial Sequence: Synthetic oligonucleotide
aaguuucggcguaguggcg

SEQ ID NO: 1637320 - RNA, 19 nt, Artificial Sequence
  Description of Artificial Sequence: Synthetic oligonucleotide
cgugaauccauggagcccg

SEQ ID NO: 1637321 - RNA, 19 nt, Artificial Sequence
  Description of Artificial Sequence: Synthetic oligonucleotide
ggcguaguggcgcgcagcg

SEQ ID NO: 1637322 - RNA, 19 nt, Artificial Sequence
  Description of Artificial Sequence: Synthetic oligonucleotide
gacgcagcacagccacggg

SEQ ID NO: 1637323 - RNA, 19 nt, Artificial Sequence
  Description of Artificial Sequence: Synthetic oligonucleotide
ucgagggcgcgcaaaguuu

SEQ ID NO: 1637324 - RNA, 19 nt, Artificial Sequence
  Description of Artificial Sequence: Synthetic oligonucleotide
accagcgugggccgccagg

SEQ ID NO: 1637325 - RNA, 19 nt, Artificial Sequence
  Description of Artificial Sequence: Synthetic oligonucleotide
gcaucuucggggcacgcgc

SEQ ID NO: 1637326 - RNA, 19 nt, Artificial Sequence
  Description of Artificial Sequence: Synthetic oligonucleotide
guggcauuccaagcauagg

SEQ ID NO: 1637327 - RNA, 19 nt, Artificial Sequence
  Description of Artificial Sequence: Synthetic oligonucleotide
guccccgagaagcacugug

SEQ ID NO: 1637328 - RNA, 19 nt, Artificial Sequence
  Description of Artificial Sequence: Synthetic oligonucleotide
agcaucuucggggcacgcg

SEQ ID NO: 1637329 - RNA, 19 nt, Artificial Sequence
  Description of Artificial Sequence: Synthetic oligonucleotide
ucaagccugcgcagcgcgc

SEQ ID NO: 1637330 - RNA, 19 nt, Artificial Sequence
  Description of Artificial Sequence: Synthetic oligonucleotide
caccgcagugccaggagug

SEQ ID NO: 1637331 - RNA, 19 nt, Artificial Sequence
  Description of Artificial Sequence: Synthetic oligonucleotide
ggcccuacgguaucacccg

SEQ ID NO: 1637332 - RNA, 19 nt, Artificial Sequence
  Description of Artificial Sequence: Synthetic oligonucleotide
ggcagaucacggaagauga

SEQ ID NO: 1637333 - RNA, 19 nt, Artificial Sequence
  Description of Artificial Sequence: Synthetic oligonucleotide
cgcauuacagccucguuug

SEQ ID NO: 1637334 - RNA, 19 nt, Artificial Sequence
  Description of Artificial Sequence: Synthetic oligonucleotide
agcgcacuggcccuacggu

SEQ ID NO: 1637335 - RNA, 19 nt, Artificial Sequence
  Description of Artificial Sequence: Synthetic oligonucleotide
aucaccgcaccagcguggg

SEQ ID NO: 1637336 - RNA, 19 nt, Artificial Sequence
  Description of Artificial Sequence: Synthetic oligonucleotide
gcggaaggcguccaguacc

SEQ ID NO: 1637337 - RNA, 19 nt, Artificial Sequence
  Description of Artificial Sequence: Synthetic oligonucleotide
gugcaaaaggggugcgaug

SEQ ID NO: 1637338 - RNA, 19 nt, Artificial Sequence
  Description of Artificial Sequence: Synthetic oligonucleotide
guccaggaaaagacugcgg

SEQ ID NO: 1637339 - RNA, 19 nt, Artificial Sequence
  Description of Artificial Sequence: Synthetic oligonucleotide
gagugccugugcaacuugc

SEQ ID NO: 1637340 - RNA, 19 nt, Artificial Sequence
  Description of Artificial Sequence: Synthetic oligonucleotide
accgcaccagcgugggccg

SEQ ID NO: 1637341 - RNA, 19 nt, Artificial Sequence
  Description of Artificial Sequence: Synthetic oligonucleotide
aguggugagauugcucaau

SEQ ID NO: 1637342 - RNA, 19 nt, Artificial Sequence
  Description of Artificial Sequence: Synthetic oligonucleotide
guccaagggcgcuuaggug

SEQ ID NO: 1637343 - RNA, 19 nt, Artificial Sequence
  Description of Artificial Sequence: Synthetic oligonucleotide
ucgagauggugcaguuggu

SEQ ID NO: 1637344 - RNA, 19 nt, Artificial Sequence
  Description of Artificial Sequence: Synthetic oligonucleotide
gacagcauguacagcgcuc

SEQ ID NO: 1637345 - RNA, 19 nt, Artificial Sequence
  Description of Artificial Sequence: Synthetic oligonucleotide
accacgcagaagcagugua

SEQ ID NO: 1637346 - RNA, 19 nt, Artificial Sequence
  Description of Artificial Sequence: Synthetic oligonucleotide
ugcugguugcaggacgcgc

SEQ ID NO: 1637347 - RNA, 19 nt, Artificial Sequence
  Description of Artificial Sequence: Synthetic oligonucleotide
ugguguuugguuggccaga

SEQ ID NO: 1637348 - RNA, 19 nt, Artificial Sequence
  Description of Artificial Sequence: Synthetic oligonucleotide
ccaacacuuccucuggcag

SEQ ID NO: 1637349 - RNA, 19 nt, Artificial Sequence
  Description of Artificial Sequence: Synthetic oligonucleotide
augcuagugucaugccaca

SEQ ID NO: 1637350 - RNA, 19 nt, Artificial Sequence
  Description of Artificial Sequence: Synthetic oligonucleotide
cuccguggcauuccaagca

SEQ ID NO: 1637351 - RNA, 19 nt, Artificial Sequence
  Description of Artificial Sequence: Synthetic oligonucleotide
cuggcccuacgguaucacc

SEQ ID NO: 1637352 - RNA, 19 nt, Artificial Sequence
  Description of Artificial Sequence: Synthetic oligonucleotide
cuugaagcaccagcguguc

SEQ ID NO: 1637353 - RNA, 19 nt, Artificial Sequence
  Description of Artificial Sequence: Synthetic oligonucleotide
guaccgagggucucaccac

SEQ ID NO: 1637354 - RNA, 19 nt, Artificial Sequence
  Description of Artificial Sequence: Synthetic oligonucleotide
cucgguggaagcggaggcg

SEQ ID NO: 1637355 - RNA, 19 nt, Artificial Sequence
  Description of Artificial Sequence: Synthetic oligonucleotide
cuagugcaugguuguccag

SEQ ID NO: 1637356 - RNA, 19 nt, Artificial Sequence
  Description of Artificial Sequence: Synthetic oligonucleotide
aggccccgugaauccaugg

SEQ ID NO: 1637357 - RNA, 19 nt, Artificial Sequence
  Description of Artificial Sequence: Synthetic oligonucleotide
agcauguacagcgcucaga

SEQ ID NO: 1637358 - RNA, 19 nt, Artificial Sequence
  Description of Artificial Sequence: Synthetic oligonucleotide
ggcgcuuaggugugggcag

SEQ ID NO: 1637359 - RNA, 19 nt, Artificial Sequence
  Description of Artificial Sequence: Synthetic oligonucleotide
gcuagugucaugccacaca

SEQ ID NO: 1637360 - RNA, 19 nt, Artificial Sequence
  Description of Artificial Sequence: Synthetic oligonucleotide
cacgcuuuaguuugagugu

SEQ ID NO: 1637361 - RNA, 19 nt, Artificial Sequence
  Description of Artificial Sequence: Synthetic oligonucleotide
uuucuccguggcauuccaa

SEQ ID NO: 1637362 - RNA, 19 nt, Artificial Sequence
  Description of Artificial Sequence: Synthetic oligonucleotide
accgagggucucaccacgc

SEQ ID NO: 1637363 - RNA, 19 nt, Artificial Sequence
  Description of Artificial Sequence: Synthetic oligonucleotide
cccgugaauccauggagcc

SEQ ID NO: 1637364 - RNA, 19 nt, Artificial Sequence
  Description of Artificial Sequence: Synthetic oligonucleotide
gccccgugaauccauggag

SEQ ID NO: 1637365 - RNA, 19 nt, Artificial Sequence
  Description of Artificial Sequence: Synthetic oligonucleotide
ggaagugcaggcucuagcu

SEQ ID NO: 1637366 - RNA, 19 nt, Artificial Sequence
  Description of Artificial Sequence: Synthetic oligonucleotide
uaucacccgagagguugag

SEQ ID NO: 1637367 - RNA, 19 nt, Artificial Sequence
  Description of Artificial Sequence: Synthetic oligonucleotide
guuccagcgcggcaggcga

SEQ ID NO: 1637368 - RNA, 19 nt, Artificial Sequence
  Description of Artificial Sequence: Synthetic oligonucleotide
gcaaaguuucggcguagug

SEQ ID NO: 1637369 - RNA, 19 nt, Artificial Sequence
  Description of Artificial Sequence: Synthetic oligonucleotide
augucauggccagcaucgg

SEQ ID NO: 1637370 - RNA, 19 nt, Artificial Sequence
  Description of Artificial Sequence: Synthetic oligonucleotide
ucccugagaggcagaucac

SEQ ID NO: 1637371 - RNA, 19 nt, Artificial Sequence
  Description of Artificial Sequence: Synthetic oligonucleotide
guagcugcgcaggcgcggg

SEQ ID NO: 1637372 - RNA, 19 nt, Artificial Sequence
  Description of Artificial Sequence: Synthetic oligonucleotide
agguugagacgcagcacag

SEQ ID NO: 1637373 - RNA, 19 nt, Artificial Sequence
  Description of Artificial Sequence: Synthetic oligonucleotide
gcaggcgacagacuggcca

SEQ ID NO: 1637374 - RNA, 19 nt, Artificial Sequence
  Description of Artificial Sequence: Synthetic oligonucleotide
cccaagaacagggcuagcc

SEQ ID NO: 1637375 - RNA, 19 nt, Artificial Sequence
  Description of Artificial Sequence: Synthetic oligonucleotide
gagggcgcgcaaaguuucg

SEQ ID NO: 1637376 - RNA, 19 nt, Artificial Sequence
  Description of Artificial Sequence: Synthetic oligonucleotide
agcgugggccgccagggau

SEQ ID NO: 1637377 - RNA, 19 nt, Artificial Sequence
  Description of Artificial Sequence: Synthetic oligonucleotide
gccgccagcuccucuagag

SEQ ID NO: 1637378 - RNA, 19 nt, Artificial Sequence
  Description of Artificial Sequence: Synthetic oligonucleotide
uuuggaagugcaggcucua

SEQ ID NO: 1637379 - RNA, 19 nt, Artificial Sequence
  Description of Artificial Sequence: Synthetic oligonucleotide
ggccagagcaguuaguagu

SEQ ID NO: 1637380 - RNA, 19 nt, Artificial Sequence
  Description of Artificial Sequence: Synthetic oligonucleotide
gcaguguauuucucucaag

SEQ ID NO: 1637381 - RNA, 19 nt, Artificial Sequence
  Description of Artificial Sequence: Synthetic oligonucleotide
ucuucggggcacgcgcacc

SEQ ID NO: 1637382 - RNA, 19 nt, Artificial Sequence
  Description of Artificial Sequence: Synthetic oligonucleotide
cucaccacgcagaagcagu

SEQ ID NO: 1637383 - RNA, 19 nt, Artificial Sequence
  Description of Artificial Sequence: Synthetic oligonucleotide
acgcgcaccgcagugccag

SEQ ID NO: 1637384 - RNA, 19 nt, Artificial Sequence
  Description of Artificial Sequence: Synthetic oligonucleotide
cugugcaacuugcugaggu

SEQ ID NO: 1637385 - RNA, 19 nt, Artificial Sequence
  Description of Artificial Sequence: Synthetic oligonucleotide
gagcccgggacuggucugg

SEQ ID NO: 1637386 - RNA, 19 nt, Artificial Sequence
  Description of Artificial Sequence: Synthetic oligonucleotide
cagggcuagccgcugagga

SEQ ID NO: 1637387 - RNA, 19 nt, Artificial Sequence
  Description of Artificial Sequence: Synthetic oligonucleotide
uaguggcgcgcagcgaagc

SEQ ID NO: 1637388 - RNA, 19 nt, Artificial Sequence
  Description of Artificial Sequence: Synthetic oligonucleotide
uccaagcauaggccucgaa

SEQ ID NO: 1637389 - RNA, 19 nt, Artificial Sequence
  Description of Artificial Sequence: Synthetic oligonucleotide
cuuaggugugggcaggccu

SEQ ID NO: 1637390 - RNA, 19 nt, Artificial Sequence
  Description of Artificial Sequence: Synthetic oligonucleotide
ccccgugaauccauggagc

SEQ ID NO: 1637391 - RNA, 19 nt, Artificial Sequence
  Description of Artificial Sequence: Synthetic oligonucleotide
gcauuacagccucguuugg

SEQ ID NO: 1637392 - RNA, 19 nt, Artificial Sequence
  Description of Artificial Sequence: Synthetic oligonucleotide
cacggucccugagaggcag

SEQ ID NO: 1637393 - RNA, 19 nt, Artificial Sequence
  Description of Artificial Sequence: Synthetic oligonucleotide
ucggcguaguggcgcgcag

SEQ ID NO: 1637394 - RNA, 19 nt, Artificial Sequence
  Description of Artificial Sequence: Synthetic oligonucleotide
ucggggcacgcgcaccgca

SEQ ID NO: 1637395 - RNA, 19 nt, Artificial Sequence
  Description of Artificial Sequence: Synthetic oligonucleotide
gcucgguggaagcggaggc

SEQ ID NO: 1637396 - RNA, 19 nt, Artificial Sequence
  Description of Artificial Sequence: Synthetic oligonucleotide
ccgcagacagcauguacag

SEQ ID NO: 1637397 - RNA, 19 nt, Artificial Sequence
  Description of Artificial Sequence: Synthetic oligonucleotide
gguggcgggaacucaaugu

SEQ ID NO: 1637398 - RNA, 19 nt, Artificial Sequence
  Description of Artificial Sequence: Synthetic oligonucleotide
gaagcggaggcgcgcaccu

SEQ ID NO: 1637399 - RNA, 19 nt, Artificial Sequence
  Description of Artificial Sequence: Synthetic oligonucleotide
gguugcaggacgcgcauua

SEQ ID NO: 1637400 - RNA, 19 nt, Artificial Sequence
  Description of Artificial Sequence: Synthetic oligonucleotide
guaguggcgcgcagcgaag

SEQ ID NO: 1637401 - RNA, 19 nt, Artificial Sequence
  Description of Artificial Sequence: Synthetic oligonucleotide
cagaucacggaagaugagu

SEQ ID NO: 1637402 - RNA, 19 nt, Artificial Sequence
  Description of Artificial Sequence: Synthetic oligonucleotide
gacgcgcauuacagccucg

SEQ ID NO: 1637403 - RNA, 19 nt, Artificial Sequence
  Description of Artificial Sequence: Synthetic oligonucleotide
agcgcaggucgagauggug

SEQ ID NO: 1637404 - RNA, 19 nt, Artificial Sequence
  Description of Artificial Sequence: Synthetic oligonucleotide
cucggggcagucacgugca

SEQ ID NO: 1637405 - RNA, 19 nt, Artificial Sequence
  Description of Artificial Sequence: Synthetic oligonucleotide
cagcacggucccugagagg

SEQ ID NO: 1637406 - RNA, 19 nt, Artificial Sequence
  Description of Artificial Sequence: Synthetic oligonucleotide
aggucgagauggugcaguu

SEQ ID NO: 1637407 - RNA, 19 nt, Artificial Sequence
  Description of Artificial Sequence: Synthetic oligonucleotide
cgcucagaaugucauggcc

SEQ ID NO: 1637408 - RNA, 19 nt, Artificial Sequence
  Description of Artificial Sequence: Synthetic oligonucleotide
acgcuguucacuagugcau

SEQ ID NO: 1637409 - RNA, 19 nt, Artificial Sequence
  Description of Artificial Sequence: Synthetic oligonucleotide
gagcaguuaguaguucagu

SEQ ID NO: 1637410 - RNA, 19 nt, Artificial Sequence
  Description of Artificial Sequence: Synthetic oligonucleotide
gcaaaaggggugcgaugug

SEQ ID NO: 1637411 - RNA, 19 nt, Artificial Sequence
  Description of Artificial Sequence: Synthetic oligonucleotide
gaugcccucagaggcccca

SEQ ID NO: 1637412 - RNA, 19 nt, Artificial Sequence
  Description of Artificial Sequence: Synthetic oligonucleotide
gugaauccauggagcccgg

SEQ ID NO: 1637413 - RNA, 19 nt, Artificial Sequence
  Description of Artificial Sequence: Synthetic oligonucleotide
cugaggagugccugugcaa

SEQ ID NO: 1637414 - RNA, 19 nt, Artificial Sequence
  Description of Artificial Sequence: Synthetic oligonucleotide
cccugagaggcagaucacg

SEQ ID NO: 1637415 - RNA, 19 nt, Artificial Sequence
  Description of Artificial Sequence: Synthetic oligonucleotide
gcacgcuguucacuagugc

SEQ ID NO: 1637416 - RNA, 19 nt, Artificial Sequence
  Description of Artificial Sequence: Synthetic oligonucleotide
agccucguuuggaagugca

SEQ ID NO: 1637417 - RNA, 19 nt, Artificial Sequence
  Description of Artificial Sequence: Synthetic oligonucleotide
gggcgcgcaaaguuucggc

SEQ ID NO: 1637418 - RNA, 19 nt, Artificial Sequence
  Description of Artificial Sequence: Synthetic oligonucleotide
ugcaguccaagggcgcuua

SEQ ID NO: 1637419 - RNA, 19 nt, Artificial Sequence
  Description of Artificial Sequence: Synthetic oligonucleotide
caucuucggggcacgcgca

SEQ ID NO: 1637420 - RNA, 19 nt, Artificial Sequence
  Description of Artificial Sequence: Synthetic oligonucleotide
uuccagcgcggcaggcgac

SEQ ID NO: 1637421 - RNA, 19 nt, Artificial Sequence
  Description of Artificial Sequence: Synthetic oligonucleotide
ugcccucagaggccccagu

SEQ ID NO: 1637422 - RNA, 19 nt, Artificial Sequence
  Description of Artificial Sequence: Synthetic oligonucleotide
caguaccgagggucucacc

SEQ ID NO: 1637423 - RNA, 19 nt, Artificial Sequence
  Description of Artificial Sequence: Synthetic oligonucleotide
gcgcacgagcaucuucggg

SEQ ID NO: 1637424 - RNA, 19 nt, Artificial Sequence
  Description of Artificial Sequence: Synthetic oligonucleotide
cggaaggcguccaguaccg

SEQ ID NO: 1637425 - RNA, 19 nt, Artificial Sequence
  Description of Artificial Sequence: Synthetic oligonucleotide
ggacgcgcauuacagccuc

SEQ ID NO: 1637426 - RNA, 19 nt, Artificial Sequence
  Description of Artificial Sequence: Synthetic oligonucleotide
aguggcugcucggcggcug

SEQ ID NO: 1637427 - RNA, 19 nt, Artificial Sequence
  Description of Artificial Sequence: Synthetic oligonucleotide
cauaggccucgaagucgug

SEQ ID NO: 1637428 - RNA, 19 nt, Artificial Sequence
  Description of Artificial Sequence: Synthetic oligonucleotide
cacgugcagcuugaagcac

SEQ ID NO: 1637429 - RNA, 19 nt, Artificial Sequence
  Description of Artificial Sequence: Synthetic oligonucleotide
aggacgcgcauuacagccu

SEQ ID NO: 1637430 - RNA, 19 nt, Artificial Sequence
  Description of Artificial Sequence: Synthetic oligonucleotide
gucguccaguguguagggc

SEQ ID NO: 1637431 - RNA, 19 nt, Artificial Sequence
  Description of Artificial Sequence: Synthetic oligonucleotide
cccgggacuggucuggaug

SEQ ID NO: 1637432 - RNA, 19 nt, Artificial Sequence
  Description of Artificial Sequence: Synthetic oligonucleotide
acgcgcauuacagccucgu

SEQ ID NO: 1637433 - RNA, 19 nt, Artificial Sequence
  Description of Artificial Sequence: Synthetic oligonucleotide
ggggcagucacgugcagcu

SEQ ID NO: 1637434 - RNA, 19 nt, Artificial Sequence
  Description of Artificial Sequence: Synthetic oligonucleotide
agcgugucguccagugugu

SEQ ID NO: 1637435 - RNA, 19 nt, Artificial Sequence
  Description of Artificial Sequence: Synthetic oligonucleotide
gcgcucagaaugucauggc

SEQ ID NO: 1637436 - RNA, 19 nt, Artificial Sequence
  Description of Artificial Sequence: Synthetic oligonucleotide
ucaccgcaccagcgugggc

SEQ ID NO: 1637437 - RNA, 19 nt, Artificial Sequence
  Description of Artificial Sequence: Synthetic oligonucleotide
cauggccagcaucggaaaa

SEQ ID NO: 1637438 - RNA, 19 nt, Artificial Sequence
  Description of Artificial Sequence: Synthetic oligonucleotide
uuucggcguaguggcgcgc

SEQ ID NO: 1637439 - RNA, 19 nt, Artificial Sequence
  Description of Artificial Sequence: Synthetic oligonucleotide
guggcgggaacucaauguu

SEQ ID NO: 1637440 - RNA, 19 nt, Artificial Sequence
  Description of Artificial Sequence: Synthetic oligonucleotide
agcucggggcagucacgug

SEQ ID NO: 1637441 - RNA, 19 nt, Artificial Sequence
  Description of Artificial Sequence: Synthetic oligonucleotide
gcagcgaagcgcacuggcc

SEQ ID NO: 1637442 - RNA, 19 nt, Artificial Sequence
  Description of Artificial Sequence: Synthetic oligonucleotide
gcagaucacggaagaugag

SEQ ID NO: 1637443 - RNA, 19 nt, Artificial Sequence
  Description of Artificial Sequence: Synthetic oligonucleotide
ccaagggcgcuuaggugug

SEQ ID NO: 1637444 - RNA, 19 nt, Artificial Sequence
  Description of Artificial Sequence: Synthetic oligonucleotide
caagggcgcuuaggugugg

SEQ ID NO: 1637445 - RNA, 19 nt, Artificial Sequence
  Description of Artificial Sequence: Synthetic oligonucleotide
gaggccccaguccccgaga

SEQ ID NO: 1637446 - RNA, 19 nt, Artificial Sequence
  Description of Artificial Sequence: Synthetic oligonucleotide
ggaagcggaggcgcgcacc

SEQ ID NO: 1637447 - RNA, 19 nt, Artificial Sequence
  Description of Artificial Sequence: Synthetic oligonucleotide
gagcaucuucggggcacgc

SEQ ID NO: 1637448 - RNA, 19 nt, Artificial Sequence
  Description of Artificial Sequence: Synthetic oligonucleotide
cccuacgguaucacccgag

SEQ ID NO: 1637449 - RNA, 19 nt, Artificial Sequence
  Description of Artificial Sequence: Synthetic oligonucleotide
ggucgagauggugcaguug

SEQ ID NO: 1637450 - RNA, 19 nt, Artificial Sequence
  Description of Artificial Sequence: Synthetic oligonucleotide
ccgagaagcacuguggucu

SEQ ID NO: 1637451 - RNA, 19 nt, Artificial Sequence
  Description of Artificial Sequence: Synthetic oligonucleotide
gcuccucuagagcggugug

SEQ ID NO: 1637452 - RNA, 19 nt, Artificial Sequence
  Description of Artificial Sequence: Synthetic oligonucleotide
ggugagccgcuccgcagac

SEQ ID NO: 1637453 - RNA, 19 nt, Artificial Sequence
  Description of Artificial Sequence: Synthetic oligonucleotide
ggccccgugaauccaugga

SEQ ID NO: 1637454 - RNA, 19 nt, Artificial Sequence
  Description of Artificial Sequence: Synthetic oligonucleotide
ggcagugcgcgcggaaggc

SEQ ID NO: 1637455 - RNA, 19 nt, Artificial Sequence
  Description of Artificial Sequence: Synthetic oligonucleotide
caacugaugcuagugucau

SEQ ID NO: 1637456 - RNA, 19 nt, Artificial Sequence
  Description of Artificial Sequence: Synthetic oligonucleotide
uucggggcacgcgcaccgc

SEQ ID NO: 1637457 - RNA, 19 nt, Artificial Sequence
  Description of Artificial Sequence: Synthetic oligonucleotide
ggagcccgggacuggucug

SEQ ID NO: 1637458 - RNA, 19 nt, Artificial Sequence
  Description of Artificial Sequence: Synthetic oligonucleotide
gugcgauguggugcgguca

SEQ ID NO: 1637459 - RNA, 19 nt, Artificial Sequence
  Description of Artificial Sequence: Synthetic oligonucleotide
gggcgcuuaggugugggca

SEQ ID NO: 1637460 - RNA, 19 nt, Artificial Sequence
  Description of Artificial Sequence: Synthetic oligonucleotide
ccgugaauccauggagccc

SEQ ID NO: 1637461 - RNA, 19 nt, Artificial Sequence
  Description of Artificial Sequence: Synthetic oligonucleotide
gccucguuuggaagugcag

SEQ ID NO: 1637462 - RNA, 19 nt, Artificial Sequence
  Description of Artificial Sequence: Synthetic oligonucleotide
cucgagggcgcgcaaaguu

SEQ ID NO: 1637463 - RNA, 19 nt, Artificial Sequence
  Description of Artificial Sequence: Synthetic oligonucleotide
ccuacgguaucacccgaga

SEQ ID NO: 1637464 - RNA, 19 nt, Artificial Sequence
  Description of Artificial Sequence: Synthetic oligonucleotide
cccgagaagcacugugguc

SEQ ID NO: 1637465 - RNA, 19 nt, Artificial Sequence
  Description of Artificial Sequence: Synthetic oligonucleotide
gugcaugguuguccaggaa

SEQ ID NO: 1637466 - RNA, 19 nt, Artificial Sequence
  Description of Artificial Sequence: Synthetic oligonucleotide
gggucuuggaguggugaga

SEQ ID NO: 1637467 - RNA, 19 nt, Artificial Sequence
  Description of Artificial Sequence: Synthetic oligonucleotide
gcgcauuacagccucguuu

SEQ ID NO: 1637468 - RNA, 19 nt, Artificial Sequence
  Description of Artificial Sequence: Synthetic oligonucleotide
gcgcuuaggugugggcagg

SEQ ID NO: 1637469 - RNA, 19 nt, Artificial Sequence
  Description of Artificial Sequence: Synthetic oligonucleotide
ggucuuggaguggugagau

SEQ ID NO: 1637470 - RNA, 19 nt, Artificial Sequence
  Description of Artificial Sequence: Synthetic oligonucleotide
gcgucuuugaugguucaua

SEQ ID NO: 1637471 - RNA, 19 nt, Artificial Sequence
  Description of Artificial Sequence: Synthetic oligonucleotide
cgagggcgcgcaaaguuuc

SEQ ID NO: 1637472 - RNA, 19 nt, Artificial Sequence
  Description of Artificial Sequence: Synthetic oligonucleotide
ccgccagcuccucuagagc

SEQ ID NO: 1637473 - RNA, 19 nt, Artificial Sequence
  Description of Artificial Sequence: Synthetic oligonucleotide
ggcacgcgcaccgcagugc

SEQ ID NO: 1637474 - RNA, 19 nt, Artificial Sequence
  Description of Artificial Sequence: Synthetic oligonucleotide
gcccucagaggccccaguc

SEQ ID NO: 1637475 - RNA, 19 nt, Artificial Sequence
  Description of Artificial Sequence: Synthetic oligonucleotide
cacgagcaucuucggggca

SEQ ID NO: 1637476 - RNA, 19 nt, Artificial Sequence
  Description of Artificial Sequence: Synthetic oligonucleotide
gggcacgcgcaccgcagug

SEQ ID NO: 1637477 - RNA, 19 nt, Artificial Sequence
  Description of Artificial Sequence: Synthetic oligonucleotide
gcaguccaagggcgcuuag

SEQ ID NO: 1637478 - RNA, 19 nt, Artificial Sequence
  Description of Artificial Sequence: Synthetic oligonucleotide
cuagagcggugugcagcuc

SEQ ID NO: 1637479 - RNA, 19 nt, Artificial Sequence
  Description of Artificial Sequence: Synthetic oligonucleotide
cguaguggcgcgcagcgaa

SEQ ID NO: 1637480 - RNA, 19 nt, Artificial Sequence
  Description of Artificial Sequence: Synthetic oligonucleotide
ggggcgcacgagcaucuuc

SEQ ID NO: 1637481 - RNA, 19 nt, Artificial Sequence
  Description of Artificial Sequence: Synthetic oligonucleotide
gugcgcgcggaaggcgucc

SEQ ID NO: 1637482 - RNA, 19 nt, Artificial Sequence
  Description of Artificial Sequence: Synthetic oligonucleotide
gaggcagaucacggaagau

SEQ ID NO: 1637483 - RNA, 19 nt, Artificial Sequence
  Description of Artificial Sequence: Synthetic oligonucleotide
cggagcucggggcagucac

SEQ ID NO: 1637484 - RNA, 19 nt, Artificial Sequence
  Description of Artificial Sequence: Synthetic oligonucleotide
cagugcgcgcggaaggcgu

SEQ ID NO: 1637485 - RNA, 19 nt, Artificial Sequence
  Description of Artificial Sequence: Synthetic oligonucleotide
cacgcagaagcaguguauu

SEQ ID NO: 1637486 - RNA, 19 nt, Artificial Sequence
  Description of Artificial Sequence: Synthetic oligonucleotide
gggcuagccgcugaggagu

SEQ ID NO: 1637487 - RNA, 19 nt, Artificial Sequence
  Description of Artificial Sequence: Synthetic oligonucleotide
ccgagagguugagacgcag

SEQ ID NO: 1637488 - RNA, 19 nt, Artificial Sequence
  Description of Artificial Sequence: Synthetic oligonucleotide
gcauaggccucgaagucgu

SEQ ID NO: 1637489 - RNA, 19 nt, Artificial Sequence
  Description of Artificial Sequence: Synthetic oligonucleotide
gcgcaaaguuucggcguag

SEQ ID NO: 1637490 - RNA, 19 nt, Artificial Sequence
  Description of Artificial Sequence: Synthetic oligonucleotide
cagcaucggaaaagcggcu

SEQ ID NO: 1637491 - RNA, 19 nt, Artificial Sequence
  Description of Artificial Sequence: Synthetic oligonucleotide
gaggggcgcacgagcaucu

SEQ ID NO: 1637492 - RNA, 19 nt, Artificial Sequence
  Description of Artificial Sequence: Synthetic oligonucleotide
gcagguggacauauagggu

SEQ ID NO: 1637493 - RNA, 19 nt, Artificial Sequence
  Description of Artificial Sequence: Synthetic oligonucleotide
ggcggcugggcgucuuuga

SEQ ID NO: 1637494 - RNA, 19 nt, Artificial Sequence
  Description of Artificial Sequence: Synthetic oligonucleotide
gcgcgcaaaguuucggcgu

SEQ ID NO: 1637495 - RNA, 19 nt, Artificial Sequence
  Description of Artificial Sequence: Synthetic oligonucleotide
gcgugggccgccagggaug

SEQ ID NO: 1637496 - RNA, 19 nt, Artificial Sequence
  Description of Artificial Sequence: Synthetic oligonucleotide
ccaguguguagggcaagca

SEQ ID NO: 1637497 - RNA, 19 nt, Artificial Sequence
  Description of Artificial Sequence: Synthetic oligonucleotide
cugguugcaggacgcgcau

SEQ ID NO: 1637498 - RNA, 19 nt, Artificial Sequence
  Description of Artificial Sequence: Synthetic oligonucleotide
caccagcgugggccgccag

SEQ ID NO: 1637499 - RNA, 19 nt, Artificial Sequence
  Description of Artificial Sequence: Synthetic oligonucleotide
caucggaaaagcggcuuuu

SEQ ID NO: 1637500 - RNA, 19 nt, Artificial Sequence
  Description of Artificial Sequence: Synthetic oligonucleotide
gcaucggaaaagcggcuuu

SEQ ID NO: 1637501 - RNA, 19 nt, Artificial Sequence
  Description of Artificial Sequence: Synthetic oligonucleotide
ggacuggucuggaugcccu

SEQ ID NO: 1637502 - RNA, 19 nt, Artificial Sequence
  Description of Artificial Sequence: Synthetic oligonucleotide
cgcggaaggcguccaguac

SEQ ID NO: 1637503 - RNA, 19 nt, Artificial Sequence
  Description of Artificial Sequence: Synthetic oligonucleotide
agcccgggacuggucugga

SEQ ID NO: 1637504 - RNA, 19 nt, Artificial Sequence
  Description of Artificial Sequence: Synthetic oligonucleotide
gcccuacgguaucacccga

SEQ ID NO: 1637505 - RNA, 19 nt, Artificial Sequence
  Description of Artificial Sequence: Synthetic oligonucleotide
guggugcggucagcaguuc

SEQ ID NO: 1637506 - RNA, 19 nt, Artificial Sequence
  Description of Artificial Sequence: Synthetic oligonucleotide
gcaccgcagugccaggagu

SEQ ID NO: 1637507 - RNA, 19 nt, Artificial Sequence
  Description of Artificial Sequence: Synthetic oligonucleotide
cccaggguggcgggaacuc

SEQ ID NO: 1637508 - RNA, 19 nt, Artificial Sequence
  Description of Artificial Sequence: Synthetic oligonucleotide
ccgagggucucaccacgca

SEQ ID NO: 1637509 - RNA, 19 nt, Artificial Sequence
  Description of Artificial Sequence: Synthetic oligonucleotide
caccucgagggcgcgcaaa

SEQ ID NO: 1637510 - RNA, 19 nt, Artificial Sequence
  Description of Artificial Sequence: Synthetic oligonucleotide
caccacgcagaagcagugu

SEQ ID NO: 1637511 - RNA, 19 nt, Artificial Sequence
  Description of Artificial Sequence: Synthetic oligonucleotide
cggggcacgcgcaccgcag

SEQ ID NO: 1637512 - RNA, 19 nt, Artificial Sequence
  Description of Artificial Sequence: Synthetic oligonucleotide
ggggugcgauguggugcgg

SEQ ID NO: 1637513 - RNA, 19 nt, Artificial Sequence
  Description of Artificial Sequence: Synthetic oligonucleotide
gccgcugaggagugccugu

SEQ ID NO: 1637514 - RNA, 19 nt, Artificial Sequence
  Description of Artificial Sequence: Synthetic oligonucleotide
ggcaggcgacagacuggcc

SEQ ID NO: 1637515 - RNA, 19 nt, Artificial Sequence
  Description of Artificial Sequence: Synthetic oligonucleotide
ccacgcagaagcaguguau

SEQ ID NO: 1637516 - RNA, 19 nt, Artificial Sequence
  Description of Artificial Sequence: Synthetic oligonucleotide
cgggcagugcgcgcggaag

SEQ ID NO: 1637517 - RNA, 19 nt, Artificial Sequence
  Description of Artificial Sequence: Synthetic oligonucleotide
cccgagagguugagacgca

SEQ ID NO: 1637518 - RNA, 19 nt, Artificial Sequence
  Description of Artificial Sequence: Synthetic oligonucleotide
ccguggcauuccaagcaua

SEQ ID NO: 1637519 - RNA, 19 nt, Artificial Sequence
  Description of Artificial Sequence: Synthetic oligonucleotide
gcggcugggcgucuuugau

SEQ ID NO: 1637520 - RNA, 19 nt, Artificial Sequence
  Description of Artificial Sequence: Synthetic oligonucleotide
ccaggguggcgggaacuca

SEQ ID NO: 1637521 - RNA, 19 nt, Artificial Sequence
  Description of Artificial Sequence: Synthetic oligonucleotide
cgcgcaaaguuucggcgua

SEQ ID NO: 1637522 - RNA, 19 nt, Artificial Sequence
  Description of Artificial Sequence: Synthetic oligonucleotide
gcgcaccgcagugccagga

SEQ ID NO: 1637523 - RNA, 19 nt, Artificial Sequence
  Description of Artificial Sequence: Synthetic oligonucleotide
cggcguaguggcgcgcagc

SEQ ID NO: 1637524 - RNA, 19 nt, Artificial Sequence
  Description of Artificial Sequence: Synthetic oligonucleotide
ggggcacgcgcaccgcagu

SEQ ID NO: 1637525 - RNA, 19 nt, Artificial Sequence
  Description of Artificial Sequence: Synthetic oligonucleotide
ggugugcagcucgguggaa

SEQ ID NO: 1637526 - RNA, 19 nt, Artificial Sequence
  Description of Artificial Sequence: Synthetic oligonucleotide
gcacggucccugagaggca

SEQ ID NO: 1637527 - RNA, 19 nt, Artificial Sequence
  Description of Artificial Sequence: Synthetic oligonucleotide
gcguaguggcgcgcagcga

SEQ ID NO: 1637528 - RNA, 19 nt, Artificial Sequence
  Description of Artificial Sequence: Synthetic oligonucleotide
gcggagcucggggcaguca

SEQ ID NO: 1637529 - RNA, 19 nt, Artificial Sequence
  Description of Artificial Sequence: Synthetic oligonucleotide
gcgggcagugcgcgcggaa

SEQ ID NO: 1637530 - RNA, 19 nt, Artificial Sequence
  Description of Artificial Sequence: Synthetic oligonucleotide
gcuccgcagacagcaugua

SEQ ID NO: 1637531 - RNA, 19 nt, Artificial Sequence
  Description of Artificial Sequence: Synthetic oligonucleotide
ccagcgugucguccagugu

SEQ ID NO: 1637532 - RNA, 19 nt, Artificial Sequence
  Description of Artificial Sequence: Synthetic oligonucleotide
gcaccagcgugggccgcca

SEQ ID NO: 1637533 - RNA, 19 nt, Artificial Sequence
  Description of Artificial Sequence: Synthetic oligonucleotide
gcaccucgagggcgcgcaa

SEQ ID NO: 1637534 - RNA, 19 nt, Artificial Sequence
  Description of Artificial Sequence: Synthetic oligonucleotide
ggcaggccuccaaaagcuu

SEQ ID NO: 1637535 - RNA, 19 nt, Artificial Sequence
  Description of Artificial Sequence: Synthetic oligonucleotide
gcgugucguccagugugua

SEQ ID NO: 1637536 - RNA, 19 nt, Artificial Sequence
  Description of Artificial Sequence: Synthetic oligonucleotide
gcgaagcgcacuggcccua

SEQ ID NO: 1637537 - RNA, 19 nt, Artificial Sequence
  Description of Artificial Sequence: Synthetic oligonucleotide
caccagcgugucguccagu

SEQ ID NO: 1637538 - RNA, 19 nt, Artificial Sequence
  Description of Artificial Sequence: Synthetic oligonucleotide
cgcaaaguuucggcguagu

SEQ ID NO: 1637539 - RNA, 19 nt, Artificial Sequence
  Description of Artificial Sequence: Synthetic oligonucleotide
ccgcaccagcgugggccgc

SEQ ID NO: 1637540 - RNA, 19 nt, Artificial Sequence
  Description of Artificial Sequence: Synthetic oligonucleotide
ccucgagggcgcgcaaagu

SEQ ID NO: 1637541 - RNA, 19 nt, Artificial Sequence
  Description of Artificial Sequence: Synthetic oligonucleotide
gcccgggacuggucuggau

SEQ ID NO: 1637542 - RNA, 19 nt, Artificial Sequence
  Description of Artificial Sequence: Synthetic oligonucleotide
cgcgcauuacagccucguu

SEQ ID NO: 1637543 - RNA, 19 nt, Artificial Sequence
  Description of Artificial Sequence: Synthetic oligonucleotide
gccgcuccgcagacagcau

SEQ ID NO: 1637544 - RNA, 19 nt, Artificial Sequence
  Description of Artificial Sequence: Synthetic oligonucleotide
auaauguugaccuugaacc

SEQ ID NO: 1637545 - RNA, 19 nt, Artificial Sequence
  Description of Artificial Sequence: Synthetic oligonucleotide
aacgauagucauuaaagcc

SEQ ID NO: 1637546 - RNA, 19 nt, Artificial Sequence
  Description of Artificial Sequence: Synthetic oligonucleotide
ucaacgauagucauuaaag

SEQ ID NO: 1637547 - RNA, 19 nt, Artificial Sequence
  Description of Artificial Sequence: Synthetic oligonucleotide
ucuuacaugaguuaggaca

SEQ ID NO: 1637548 - RNA, 19 nt, Artificial Sequence
  Description of Artificial Sequence: Synthetic oligonucleotide
ucuauaacuauauaaugcc

SEQ ID NO: 1637549 - RNA, 19 nt, Artificial Sequence
  Description of Artificial Sequence: Synthetic oligonucleotide
uuuaagacauagaucauag

SEQ ID NO: 1637550 - RNA, 19 nt, Artificial Sequence
  Description of Artificial Sequence: Synthetic oligonucleotide
aauacuuauccuuuaggug

SEQ ID NO: 1637551 - RNA, 19 nt, Artificial Sequence
  Description of Artificial Sequence: Synthetic oligonucleotide
aacacuauguuuuccauca

SEQ ID NO: 1637552 - RNA, 19 nt, Artificial Sequence
  Description of Artificial Sequence: Synthetic oligonucleotide
uaguaaauggcaaacagcu

SEQ ID NO: 1637553 - RNA, 19 nt, Artificial Sequence
  Description of Artificial Sequence: Synthetic oligonucleotide
aagcacauaauguugaccu

SEQ ID NO: 1637554 - RNA, 19 nt, Artificial Sequence
  Description of Artificial Sequence: Synthetic oligonucleotide
acuucgagcauuuagagcu

SEQ ID NO: 1637555 - RNA, 19 nt, Artificial Sequence
  Description of Artificial Sequence: Synthetic oligonucleotide
aguacuauuauauuaugcu

SEQ ID NO: 1637556 - RNA, 19 nt, Artificial Sequence
  Description of Artificial Sequence: Synthetic oligonucleotide
cucuauaacuauauaaugc

SEQ ID NO: 1637557 - RNA, 19 nt, Artificial Sequence
  Description of Artificial Sequence: Synthetic oligonucleotide
agcauuuagagcuaucuuc

SEQ ID NO: 1637558 - RNA, 19 nt, Artificial Sequence
  Description of Artificial Sequence: Synthetic oligonucleotide
aguggagcaagucugcugc

SEQ ID NO: 1637559 - RNA, 19 nt, Artificial Sequence
  Description of Artificial Sequence: Synthetic oligonucleotide
aagcagauuauuucauuac

SEQ ID NO: 1637560 - RNA, 19 nt, Artificial Sequence
  Description of Artificial Sequence: Synthetic oligonucleotide
auacuuauccuuuaggugu

SEQ ID NO: 1637561 - RNA, 19 nt, Artificial Sequence
  Description of Artificial Sequence: Synthetic oligonucleotide
uauauaaugccucugucaa

SEQ ID NO: 1637562 - RNA, 19 nt, Artificial Sequence
  Description of Artificial Sequence: Synthetic oligonucleotide
ugaauacuuauccuuuagg

SEQ ID NO: 1637563 - RNA, 19 nt, Artificial Sequence
  Description of Artificial Sequence: Synthetic oligonucleotide
uucauuuauuuuaagacau

SEQ ID NO: 1637564 - RNA, 19 nt, Artificial Sequence
  Description of Artificial Sequence: Synthetic oligonucleotide
aagagaagagaagaugcgc

SEQ ID NO: 1637565 - RNA, 19 nt, Artificial Sequence
  Description of Artificial Sequence: Synthetic oligonucleotide
aacuucgagcauuuagagc

SEQ ID NO: 1637566 - RNA, 19 nt, Artificial Sequence
  Description of Artificial Sequence: Synthetic oligonucleotide
uuuaaucagaacuacuccu

SEQ ID NO: 1637567 - RNA, 19 nt, Artificial Sequence
  Description of Artificial Sequence: Synthetic oligonucleotide
ugaguuaggacagaaaucu

SEQ ID NO: 1637568 - RNA, 19 nt, Artificial Sequence
  Description of Artificial Sequence: Synthetic oligonucleotide
uauaacuauauaaugccuc

SEQ ID NO: 1637569 - RNA, 19 nt, Artificial Sequence
  Description of Artificial Sequence: Synthetic oligonucleotide
uaugcaauugcguuggaca

SEQ ID NO: 1637570 - RNA, 19 nt, Artificial Sequence
  Description of Artificial Sequence: Synthetic oligonucleotide
aaaucuagaagggagaaau

SEQ ID NO: 1637571 - RNA, 19 nt, Artificial Sequence
  Description of Artificial Sequence: Synthetic oligonucleotide
aauauagugauguccacua

SEQ ID NO: 1637572 - RNA, 19 nt, Artificial Sequence
  Description of Artificial Sequence: Synthetic oligonucleotide
uacuccugaauacuuaucc

SEQ ID NO: 1637573 - RNA, 19 nt, Artificial Sequence
  Description of Artificial Sequence: Synthetic oligonucleotide
caucuuugacccuacaugg

SEQ ID NO: 1637574 - RNA, 19 nt, Artificial Sequence
  Description of Artificial Sequence: Synthetic oligonucleotide
aacgaaauugcucuuguau

SEQ ID NO: 1637575 - RNA, 19 nt, Artificial Sequence
  Description of Artificial Sequence: Synthetic oligonucleotide
aaacacuauguuuuccauc

SEQ ID NO: 1637576 - RNA, 19 nt, Artificial Sequence
  Description of Artificial Sequence: Synthetic oligonucleotide
agacacugucuguagaucc

SEQ ID NO: 1637577 - RNA, 19 nt, Artificial Sequence
  Description of Artificial Sequence: Synthetic oligonucleotide
aaacucuaagcaaaacccc

SEQ ID NO: 1637578 - RNA, 19 nt, Artificial Sequence
  Description of Artificial Sequence: Synthetic oligonucleotide
acauacaugguacagacau

SEQ ID NO: 1637579 - RNA, 19 nt, Artificial Sequence
  Description of Artificial Sequence: Synthetic oligonucleotide
ugcucuuguaucaucauca

SEQ ID NO: 1637580 - RNA, 19 nt, Artificial Sequence
  Description of Artificial Sequence: Synthetic oligonucleotide
aauguaucaggcugcagcu

SEQ ID NO: 1637581 - RNA, 19 nt, Artificial Sequence
  Description of Artificial Sequence: Synthetic oligonucleotide
gaguauaccaggcugcucc

SEQ ID NO: 1637582 - RNA, 19 nt, Artificial Sequence
  Description of Artificial Sequence: Synthetic oligonucleotide
cucaaaacggcucugaauc

SEQ ID NO: 1637583 - RNA, 19 nt, Artificial Sequence
  Description of Artificial Sequence: Synthetic oligonucleotide
uaguacuauuauauuaugc

SEQ ID NO: 1637584 - RNA, 19 nt, Artificial Sequence
  Description of Artificial Sequence: Synthetic oligonucleotide
uuuccaucaacgauaguca

SEQ ID NO: 1637585 - RNA, 19 nt, Artificial Sequence
  Description of Artificial Sequence: Synthetic oligonucleotide
cagauuauuucauuacucc

SEQ ID NO: 1637586 - RNA, 19 nt, Artificial Sequence
  Description of Artificial Sequence: Synthetic oligonucleotide
agcaguuaagaacaauuuc

SEQ ID NO: 1637587 - RNA, 19 nt, Artificial Sequence
  Description of Artificial Sequence: Synthetic oligonucleotide
guaaauggcaaacagcuca

SEQ ID NO: 1637588 - RNA, 19 nt, Artificial Sequence
  Description of Artificial Sequence: Synthetic oligonucleotide
aagaccacaguguuguaug

SEQ ID NO: 1637589 - RNA, 19 nt, Artificial Sequence
  Description of Artificial Sequence: Synthetic oligonucleotide
acgaaauugcucuuguauc

SEQ ID NO: 1637590 - RNA, 19 nt, Artificial Sequence
  Description of Artificial Sequence: Synthetic oligonucleotide
acaggcaaaacucauaaau

SEQ ID NO: 1637591 - RNA, 19 nt, Artificial Sequence
  Description of Artificial Sequence: Synthetic oligonucleotide
gguacagacauacacaggc

SEQ ID NO: 1637592 - RNA, 19 nt, Artificial Sequence
  Description of Artificial Sequence: Synthetic oligonucleotide
cuuaaauucccaaauacaa

SEQ ID NO: 1637593 - RNA, 19 nt, Artificial Sequence
  Description of Artificial Sequence: Synthetic oligonucleotide
aaagcagauuauuucauua

SEQ ID NO: 1637594 - RNA, 19 nt, Artificial Sequence
  Description of Artificial Sequence: Synthetic oligonucleotide
augguacagacauacacag

SEQ ID NO: 1637595 - RNA, 19 nt, Artificial Sequence
  Description of Artificial Sequence: Synthetic oligonucleotide
auuaaagccagccuauaga

SEQ ID NO: 1637596 - RNA, 19 nt, Artificial Sequence
  Description of Artificial Sequence: Synthetic oligonucleotide
acaaccauauauuacucca

SEQ ID NO: 1637597 - RNA, 19 nt, Artificial Sequence
  Description of Artificial Sequence: Synthetic oligonucleotide
uaguugcuaagucugaugu

SEQ ID NO: 1637598 - RNA, 19 nt, Artificial Sequence
  Description of Artificial Sequence: Synthetic oligonucleotide
uccacaaacucuauagugu

SEQ ID NO: 1637599 - RNA, 19 nt, Artificial Sequence
  Description of Artificial Sequence: Synthetic oligonucleotide
uaauguugggaagagaaga

SEQ ID NO: 1637600 - RNA, 19 nt, Artificial Sequence
  Description of Artificial Sequence: Synthetic oligonucleotide
gagaacuucgagcauuuag

SEQ ID NO: 1637601 - RNA, 19 nt, Artificial Sequence
  Description of Artificial Sequence: Synthetic oligonucleotide
acuauauaaugccucuguc

SEQ ID NO: 1637602 - RNA, 19 nt, Artificial Sequence
  Description of Artificial Sequence: Synthetic oligonucleotide
uucucaaaacccauauggc

SEQ ID NO: 1637603 - RNA, 19 nt, Artificial Sequence
  Description of Artificial Sequence: Synthetic oligonucleotide
uacaagcacauaauguuga

SEQ ID NO: 1637604 - RNA, 19 nt, Artificial Sequence
  Description of Artificial Sequence: Synthetic oligonucleotide
ucuaguaugcaauugcguu

SEQ ID NO: 1637605 - RNA, 19 nt, Artificial Sequence
  Description of Artificial Sequence: Synthetic oligonucleotide
uuucuuccuaguaaauggc

SEQ ID NO: 1637606 - RNA, 19 nt, Artificial Sequence
  Description of Artificial Sequence: Synthetic oligonucleotide
gcaccagacacauacaugg

SEQ ID NO: 1637607 - RNA, 19 nt, Artificial Sequence
  Description of Artificial Sequence: Synthetic oligonucleotide
uacucugaguacugcaugg

SEQ ID NO: 1637608 - RNA, 19 nt, Artificial Sequence
  Description of Artificial Sequence: Synthetic oligonucleotide
aggaccccauaauacaagc

SEQ ID NO: 1637609 - RNA, 19 nt, Artificial Sequence
  Description of Artificial Sequence: Synthetic oligonucleotide
uuaacagaauuuuccuuug

SEQ ID NO: 1637610 - RNA, 19 nt, Artificial Sequence
  Description of Artificial Sequence: Synthetic oligonucleotide
gaacuucgagcauuuagag

SEQ ID NO: 1637611 - RNA, 19 nt, Artificial Sequence
  Description of Artificial Sequence: Synthetic oligonucleotide
uuaguacuauuauauuaug

SEQ ID NO: 1637612 - RNA, 19 nt, Artificial Sequence
  Description of Artificial Sequence: Synthetic oligonucleotide
uuaagacauagaucauagg

SEQ ID NO: 1637613 - RNA, 19 nt, Artificial Sequence
  Description of Artificial Sequence: Synthetic oligonucleotide
cuuuaaacgaaauugcucu

SEQ ID NO: 1637614 - RNA, 19 nt, Artificial Sequence
  Description of Artificial Sequence: Synthetic oligonucleotide
caacgauagucauuaaagc

SEQ ID NO: 1637615 - RNA, 19 nt, Artificial Sequence
  Description of Artificial Sequence: Synthetic oligonucleotide
uauaccaggcugcuccagg

SEQ ID NO: 1637616 - RNA, 19 nt, Artificial Sequence
  Description of Artificial Sequence: Synthetic oligonucleotide
ucuuugacccuacauggac

SEQ ID NO: 1637617 - RNA, 19 nt, Artificial Sequence
  Description of Artificial Sequence: Synthetic oligonucleotide
uaagcaaaaccccugucau

SEQ ID NO: 1637618 - RNA, 19 nt, Artificial Sequence
  Description of Artificial Sequence: Synthetic oligonucleotide
auggacuaauguaucaggc

SEQ ID NO: 1637619 - RNA, 19 nt, Artificial Sequence
  Description of Artificial Sequence: Synthetic oligonucleotide
ucugcugcgaccaugccau

SEQ ID NO: 1637620 - RNA, 19 nt, Artificial Sequence
  Description of Artificial Sequence: Synthetic oligonucleotide
gaauacuuauccuuuaggu

SEQ ID NO: 1637621 - RNA, 19 nt, Artificial Sequence
  Description of Artificial Sequence: Synthetic oligonucleotide
gaccccauaauacaagcac

SEQ ID NO: 1637622 - RNA, 19 nt, Artificial Sequence
  Description of Artificial Sequence: Synthetic oligonucleotide
cuucagagaacuucgagca

SEQ ID NO: 1637623 - RNA, 19 nt, Artificial Sequence
  Description of Artificial Sequence: Synthetic oligonucleotide
uuuagguguaguugcuaag

SEQ ID NO: 1637624 - RNA, 19 nt, Artificial Sequence
  Description of Artificial Sequence: Synthetic oligonucleotide
uuaaacgaaauugcucuug

SEQ ID NO: 1637625 - RNA, 19 nt, Artificial Sequence
  Description of Artificial Sequence: Synthetic oligonucleotide
agucauuaaagccagccua

SEQ ID NO: 1637626 - RNA, 19 nt, Artificial Sequence
  Description of Artificial Sequence: Synthetic oligonucleotide
aauugcucuuguaucauca

SEQ ID NO: 1637627 - RNA, 19 nt, Artificial Sequence
  Description of Artificial Sequence: Synthetic oligonucleotide
uauguaauguugggaagag

SEQ ID NO: 1637628 - RNA, 19 nt, Artificial Sequence
  Description of Artificial Sequence: Synthetic oligonucleotide
cauauguaauguugggaag

SEQ ID NO: 1637629 - RNA, 19 nt, Artificial Sequence
  Description of Artificial Sequence: Synthetic oligonucleotide
agcagauuauuucauuacu

SEQ ID NO: 1637630 - RNA, 19 nt, Artificial Sequence
  Description of Artificial Sequence: Synthetic oligonucleotide
gaagguacuaucacucugc

SEQ ID NO: 1637631 - RNA, 19 nt, Artificial Sequence
  Description of Artificial Sequence: Synthetic oligonucleotide
aacucacaaccauauauua

SEQ ID NO: 1637632 - RNA, 19 nt, Artificial Sequence
  Description of Artificial Sequence: Synthetic oligonucleotide
auuacuccagucccagggg

SEQ ID NO: 1637633 - RNA, 19 nt, Artificial Sequence
  Description of Artificial Sequence: Synthetic oligonucleotide
ucagaacuacuccugaaua

SEQ ID NO: 1637634 - RNA, 19 nt, Artificial Sequence
  Description of Artificial Sequence: Synthetic oligonucleotide
auagugauguccacuacuc

SEQ ID NO: 1637635 - RNA, 19 nt, Artificial Sequence
  Description of Artificial Sequence: Synthetic oligonucleotide
uccaacucaaaacggcucu

SEQ ID NO: 1637636 - RNA, 19 nt, Artificial Sequence
  Description of Artificial Sequence: Synthetic oligonucleotide
uccacaucuuacaugaguu

SEQ ID NO: 1637637 - RNA, 19 nt, Artificial Sequence
  Description of Artificial Sequence: Synthetic oligonucleotide
uuugacccuacauggacac

SEQ ID NO: 1637638 - RNA, 19 nt, Artificial Sequence
  Description of Artificial Sequence: Synthetic oligonucleotide
uucuuccuaguaaauggca

SEQ ID NO: 1637639 - RNA, 19 nt, Artificial Sequence
  Description of Artificial Sequence: Synthetic oligonucleotide
cuuggcuuuaaucagaacu

SEQ ID NO: 1637640 - RNA, 19 nt, Artificial Sequence
  Description of Artificial Sequence: Synthetic oligonucleotide
uucuaguaugcaauugcgu

SEQ ID NO: 1637641 - RNA, 19 nt, Artificial Sequence
  Description of Artificial Sequence: Synthetic oligonucleotide
aaauuuugcuuuaaacgaa

SEQ ID NO: 1637642 - RNA, 19 nt, Artificial Sequence
  Description of Artificial Sequence: Synthetic oligonucleotide
acgauagucauuaaagcca

SEQ ID NO: 1637643 - RNA, 19 nt, Artificial Sequence
  Description of Artificial Sequence: Synthetic oligonucleotide
acuauuauauuaugcuaau

SEQ ID NO: 1637644 - RNA, 19 nt, Artificial Sequence
  Description of Artificial Sequence: Synthetic oligonucleotide
agaaauccuguugcaaugg

SEQ ID NO: 1637645 - RNA, 19 nt, Artificial Sequence
  Description of Artificial Sequence: Synthetic oligonucleotide
cacaaccauauauuacucc

SEQ ID NO: 1637646 - RNA, 19 nt, Artificial Sequence
  Description of Artificial Sequence: Synthetic oligonucleotide
gcaaccuuggcuuuaauca

SEQ ID NO: 1637647 - RNA, 19 nt, Artificial Sequence
  Description of Artificial Sequence: Synthetic oligonucleotide
uggacuaauguaucaggcu

SEQ ID NO: 1637648 - RNA, 19 nt, Artificial Sequence
  Description of Artificial Sequence: Synthetic oligonucleotide
aacucuaagcaaaaccccu

SEQ ID NO: 1637649 - RNA, 19 nt, Artificial Sequence
  Description of Artificial Sequence: Synthetic oligonucleotide
aaaacggcucugaaucuuc

SEQ ID NO: 1637650 - RNA, 19 nt, Artificial Sequence
  Description of Artificial Sequence: Synthetic oligonucleotide
uuagguguaguugcuaagu

SEQ ID NO: 1637651 - RNA, 19 nt, Artificial Sequence
  Description of Artificial Sequence: Synthetic oligonucleotide
gucaauauagugaugucca

SEQ ID NO: 1637652 - RNA, 19 nt, Artificial Sequence
  Description of Artificial Sequence: Synthetic oligonucleotide
acacaggcaaaacucauaa

SEQ ID NO: 1637653 - RNA, 19 nt, Artificial Sequence
  Description of Artificial Sequence: Synthetic oligonucleotide
aagguacuuaaauucccaa

SEQ ID NO: 1637654 - RNA, 19 nt, Artificial Sequence
  Description of Artificial Sequence: Synthetic oligonucleotide
auauguaauguugggaaga

SEQ ID NO: 1637655 - RNA, 19 nt, Artificial Sequence
  Description of Artificial Sequence: Synthetic oligonucleotide
agaacuucgagcauuuaga

SEQ ID NO: 1637656 - RNA, 19 nt, Artificial Sequence
  Description of Artificial Sequence: Synthetic oligonucleotide
gcuguuuucauccaacuca

SEQ ID NO: 1637657 - RNA, 19 nt, Artificial Sequence
  Description of Artificial Sequence: Synthetic oligonucleotide
uacugcauggacuaaugua

SEQ ID NO: 1637658 - RNA, 19 nt, Artificial Sequence
  Description of Artificial Sequence: Synthetic oligonucleotide
aucaacgauagucauuaaa

SEQ ID NO: 1637659 - RNA, 19 nt, Artificial Sequence
  Description of Artificial Sequence: Synthetic oligonucleotide
cuaagcaaaaccccuguca

SEQ ID NO: 1637660 - RNA, 19 nt, Artificial Sequence
  Description of Artificial Sequence: Synthetic oligonucleotide
aucuuacaugaguuaggac

SEQ ID NO: 1637661 - RNA, 19 nt, Artificial Sequence
  Description of Artificial Sequence: Synthetic oligonucleotide
ugacugccaacaaggagug

SEQ ID NO: 1637662 - RNA, 19 nt, Artificial Sequence
  Description of Artificial Sequence: Synthetic oligonucleotide
caugguacagacauacaca

SEQ ID NO: 1637663 - RNA, 19 nt, Artificial Sequence
  Description of Artificial Sequence: Synthetic oligonucleotide
aguugcuaagucugauguc

SEQ ID NO: 1637664 - RNA, 19 nt, Artificial Sequence
  Description of Artificial Sequence: Synthetic oligonucleotide
cagaacuacuccugaauac

SEQ ID NO: 1637665 - RNA, 19 nt, Artificial Sequence
  Description of Artificial Sequence: Synthetic oligonucleotide
ugguacagacauacacagg

SEQ ID NO: 1637666 - RNA, 19 nt, Artificial Sequence
  Description of Artificial Sequence: Synthetic oligonucleotide
aguucugcgccacacugug

SEQ ID NO: 1637667 - RNA, 19 nt, Artificial Sequence
  Description of Artificial Sequence: Synthetic oligonucleotide
agagaaagucccggguucc

SEQ ID NO: 1637668 - RNA, 19 nt, Artificial Sequence
  Description of Artificial Sequence: Synthetic oligonucleotide
ucauuggaaugccaccugu

SEQ ID NO: 1637669 - RNA, 19 nt, Artificial Sequence
  Description of Artificial Sequence: Synthetic oligonucleotide
uucauuggaaugccaccug

SEQ ID NO: 1637670 - RNA, 19 nt, Artificial Sequence
  Description of Artificial Sequence: Synthetic oligonucleotide
uguaucaggcugcagcuuu

SEQ ID NO: 1637671 - RNA, 19 nt, Artificial Sequence
  Description of Artificial Sequence: Synthetic oligonucleotide
agaacuacuccugaauacu

SEQ ID NO: 1637672 - RNA, 19 nt, Artificial Sequence
  Description of Artificial Sequence: Synthetic oligonucleotide
uagagcuaucuucugaguu

SEQ ID NO: 1637673 - RNA, 19 nt, Artificial Sequence
  Description of Artificial Sequence: Synthetic oligonucleotide
caaccauauauuacuccag

SEQ ID NO: 1637674 - RNA, 19 nt, Artificial Sequence
  Description of Artificial Sequence: Synthetic oligonucleotide
aucagaacuacuccugaau

SEQ ID NO: 1637675 - RNA, 19 nt, Artificial Sequence
  Description of Artificial Sequence: Synthetic oligonucleotide
agguguaguugcuaagucu

SEQ ID NO: 1637676 - RNA, 19 nt, Artificial Sequence
  Description of Artificial Sequence: Synthetic oligonucleotide
gacuaauguaucaggcugc

SEQ ID NO: 1637677 - RNA, 19 nt, Artificial Sequence
  Description of Artificial Sequence: Synthetic oligonucleotide
ugcacagccagcauaugua

SEQ ID NO: 1637678 - RNA, 19 nt, Artificial Sequence
  Description of Artificial Sequence: Synthetic oligonucleotide
cagcauauguaauguuggg

SEQ ID NO: 1637679 - RNA, 19 nt, Artificial Sequence
  Description of Artificial Sequence: Synthetic oligonucleotide
uccugaauacuuauccuuu

SEQ ID NO: 1637680 - RNA, 19 nt, Artificial Sequence
  Description of Artificial Sequence: Synthetic oligonucleotide
gaagagaagaugcgcuuca

SEQ ID NO: 1637681 - RNA, 19 nt, Artificial Sequence
  Description of Artificial Sequence: Synthetic oligonucleotide
ccagcauauguaauguugg

SEQ ID NO: 1637682 - RNA, 19 nt, Artificial Sequence
  Description of Artificial Sequence: Synthetic oligonucleotide
ugcaaccuuggcuuuaauc

SEQ ID NO: 1637683 - RNA, 19 nt, Artificial Sequence
  Description of Artificial Sequence: Synthetic oligonucleotide
uugaaccuguuccacaguu

SEQ ID NO: 1637684 - RNA, 19 nt, Artificial Sequence
  Description of Artificial Sequence: Synthetic oligonucleotide
cauaggugacuucugagga

SEQ ID NO: 1637685 - RNA, 19 nt, Artificial Sequence
  Description of Artificial Sequence: Synthetic oligonucleotide
acccuacauggacacaaac

SEQ ID NO: 1637686 - RNA, 19 nt, Artificial Sequence
  Description of Artificial Sequence: Synthetic oligonucleotide
agagaagagaagaugcgcu

SEQ ID NO: 1637687 - RNA, 19 nt, Artificial Sequence
  Description of Artificial Sequence: Synthetic oligonucleotide
ucaaaacggcucugaaucu

SEQ ID NO: 1637688 - RNA, 19 nt, Artificial Sequence
  Description of Artificial Sequence: Synthetic oligonucleotide
cauacacaggcaaaacuca

SEQ ID NO: 1637689 - RNA, 19 nt, Artificial Sequence
  Description of Artificial Sequence: Synthetic oligonucleotide
aacucaaaacggcucugaa

SEQ ID NO: 1637690 - RNA, 19 nt, Artificial Sequence
  Description of Artificial Sequence: Synthetic oligonucleotide
aucaucuuugacccuacau

SEQ ID NO: 1637691 - RNA, 19 nt, Artificial Sequence
  Description of Artificial Sequence: Synthetic oligonucleotide
auuucagaacgaguuuuag

SEQ ID NO: 1637692 - RNA, 19 nt, Artificial Sequence
  Description of Artificial Sequence: Synthetic oligonucleotide
ucuaagcaaaaccccuguc

SEQ ID NO: 1637693 - RNA, 19 nt, Artificial Sequence
  Description of Artificial Sequence: Synthetic oligonucleotide
agguacuuaaauucccaaa

SEQ ID NO: 1637694 - RNA, 19 nt, Artificial Sequence
  Description of Artificial Sequence: Synthetic oligonucleotide
uaacuauauaaugccucug

SEQ ID NO: 1637695 - RNA, 19 nt, Artificial Sequence
  Description of Artificial Sequence: Synthetic oligonucleotide
gcauauguaauguugggaa

SEQ ID NO: 1637696 - RNA, 19 nt, Artificial Sequence
  Description of Artificial Sequence: Synthetic oligonucleotide
aaagucccggguuccacau

SEQ ID NO: 1637697 - RNA, 19 nt, Artificial Sequence
  Description of Artificial Sequence: Synthetic oligonucleotide
uuuaaacgaaauugcucuu

SEQ ID NO: 1637698 - RNA, 19 nt, Artificial Sequence
  Description of Artificial Sequence: Synthetic oligonucleotide
aguaaauggcaaacagcuc

SEQ ID NO: 1637699 - RNA, 19 nt, Artificial Sequence
  Description of Artificial Sequence: Synthetic oligonucleotide
uucugaggaagguacuauc

SEQ ID NO: 1637700 - RNA, 19 nt, Artificial Sequence
  Description of Artificial Sequence: Synthetic oligonucleotide
agcauauguaauguuggga

SEQ ID NO: 1637701 - RNA, 19 nt, Artificial Sequence
  Description of Artificial Sequence: Synthetic oligonucleotide
ugacccuacauggacacaa

SEQ ID NO: 1637702 - RNA, 19 nt, Artificial Sequence
  Description of Artificial Sequence: Synthetic oligonucleotide
aaccccugucauuucauuu

SEQ ID NO: 1637703 - RNA, 19 nt, Artificial Sequence
  Description of Artificial Sequence: Synthetic oligonucleotide
agaaaucuagaagggagaa

SEQ ID NO: 1637704 - RNA, 19 nt, Artificial Sequence
  Description of Artificial Sequence: Synthetic oligonucleotide
ccucuauaacuauauaaug

SEQ ID NO: 1637705 - RNA, 19 nt, Artificial Sequence
  Description of Artificial Sequence: Synthetic oligonucleotide
augcaauugcguuggacaa

SEQ ID NO: 1637706 - RNA, 19 nt, Artificial Sequence
  Description of Artificial Sequence: Synthetic oligonucleotide
gcuuuaaucagaacuacuc

SEQ ID NO: 1637707 - RNA, 19 nt, Artificial Sequence
  Description of Artificial Sequence: Synthetic oligonucleotide
cuacucugaguacugcaug

SEQ ID NO: 1637708 - RNA, 19 nt, Artificial Sequence
  Description of Artificial Sequence: Synthetic oligonucleotide
cauuggaaugccaccugug

SEQ ID NO: 1637709 - RNA, 19 nt, Artificial Sequence
  Description of Artificial Sequence: Synthetic oligonucleotide
aaacgaaauugcucuugua

SEQ ID NO: 1637710 - RNA, 19 nt, Artificial Sequence
  Description of Artificial Sequence: Synthetic oligonucleotide
gaguggagcaagucugcug

SEQ ID NO: 1637711 - RNA, 19 nt, Artificial Sequence
  Description of Artificial Sequence: Synthetic oligonucleotide
uuggaacacucuccuggcc

SEQ ID NO: 1637712 - RNA, 19 nt, Artificial Sequence
  Description of Artificial Sequence: Synthetic oligonucleotide
cuuuagguguaguugcuaa

SEQ ID NO: 1637713 - RNA, 19 nt, Artificial Sequence
  Description of Artificial Sequence: Synthetic oligonucleotide
agccuauagaauguuuucu

SEQ ID NO: 1637714 - RNA, 19 nt, Artificial Sequence
  Description of Artificial Sequence: Synthetic oligonucleotide
uacuuauccuuuaggugua

SEQ ID NO: 1637715 - RNA, 19 nt, Artificial Sequence
  Description of Artificial Sequence: Synthetic oligonucleotide
uccuguugcaauggguagc

SEQ ID NO: 1637716 - RNA, 19 nt, Artificial Sequence
  Description of Artificial Sequence: Synthetic oligonucleotide
guugcuaagucugaugucu

SEQ ID NO: 1637717 - RNA, 19 nt, Artificial Sequence
  Description of Artificial Sequence: Synthetic oligonucleotide
cagccuauagaauguuuuc

SEQ ID NO: 1637718 - RNA, 19 nt, Artificial Sequence
  Description of Artificial Sequence: Synthetic oligonucleotide
ugcgaccaugccauaggug

SEQ ID NO: 1637719 - RNA, 19 nt, Artificial Sequence
  Description of Artificial Sequence: Synthetic oligonucleotide
auccaacucaaaacggcuc

SEQ ID NO: 1637720 - RNA, 19 nt, Artificial Sequence
  Description of Artificial Sequence: Synthetic oligonucleotide
caggggauuuggaacacuc

SEQ ID NO: 1637721 - RNA, 19 nt, Artificial Sequence
  Description of Artificial Sequence: Synthetic oligonucleotide
caggaccccauaauacaag

SEQ ID NO: 1637722 - RNA, 19 nt, Artificial Sequence
  Description of Artificial Sequence: Synthetic oligonucleotide
ugcgccacacugugcacag

SEQ ID NO: 1637723 - RNA, 19 nt, Artificial Sequence
  Description of Artificial Sequence: Synthetic oligonucleotide
aguacugcauggacuaaug

SEQ ID NO: 1637724 - RNA, 19 nt, Artificial Sequence
  Description of Artificial Sequence: Synthetic oligonucleotide
gaaagucccggguuccaca

SEQ ID NO: 1637725 - RNA, 19 nt, Artificial Sequence
  Description of Artificial Sequence: Synthetic oligonucleotide
cagagaaagucccggguuc

SEQ ID NO: 1637726 - RNA, 19 nt, Artificial Sequence
  Description of Artificial Sequence: Synthetic oligonucleotide
cucugaguacugcauggac

SEQ ID NO: 1637727 - RNA, 19 nt, Artificial Sequence
  Description of Artificial Sequence: Synthetic oligonucleotide
uccaucaacgauagucauu

SEQ ID NO: 1637728 - RNA, 19 nt, Artificial Sequence
  Description of Artificial Sequence: Synthetic oligonucleotide
gacauaggaggguauauuu

SEQ ID NO: 1637729 - RNA, 19 nt, Artificial Sequence
  Description of Artificial Sequence: Synthetic oligonucleotide
cuauaacuauauaaugccu

SEQ ID NO: 1637730 - RNA, 19 nt, Artificial Sequence
  Description of Artificial Sequence: Synthetic oligonucleotide
uggcuuuaaucagaacuac

SEQ ID NO: 1637731 - RNA, 19 nt, Artificial Sequence
  Description of Artificial Sequence: Synthetic oligonucleotide
gcgaccaugccauagguga

SEQ ID NO: 1637732 - RNA, 19 nt, Artificial Sequence
  Description of Artificial Sequence: Synthetic oligonucleotide
gguacuuaaauucccaaau

SEQ ID NO: 1637733 - RNA, 19 nt, Artificial Sequence
  Description of Artificial Sequence: Synthetic oligonucleotide
cuuugacccuacauggaca

SEQ ID NO: 1637734 - RNA, 19 nt, Artificial Sequence
  Description of Artificial Sequence: Synthetic oligonucleotide
gucccaggggauuuggaac

SEQ ID NO: 1637735 - RNA, 19 nt, Artificial Sequence
  Description of Artificial Sequence: Synthetic oligonucleotide
acugugcacagccagcaua

SEQ ID NO: 1637736 - RNA, 19 nt, Artificial Sequence
  Description of Artificial Sequence: Synthetic oligonucleotide
uucaacacacaaggcucag

SEQ ID NO: 1637737 - RNA, 19 nt, Artificial Sequence
  Description of Artificial Sequence: Synthetic oligonucleotide
auauaaugccucugucaau

SEQ ID NO: 1637738 - RNA, 19 nt, Artificial Sequence
  Description of Artificial Sequence: Synthetic oligonucleotide
auauauuacuccaguccca

SEQ ID NO: 1637739 - RNA, 19 nt, Artificial Sequence
  Description of Artificial Sequence: Synthetic oligonucleotide
acuaauguaucaggcugca

SEQ ID NO: 1637740 - RNA, 19 nt, Artificial Sequence
  Description of Artificial Sequence: Synthetic oligonucleotide
ugcagcucuaaguuuucua

SEQ ID NO: 1637741 - RNA, 19 nt, Artificial Sequence
  Description of Artificial Sequence: Synthetic oligonucleotide
cuucaacacacaaggcuca

SEQ ID NO: 1637742 - RNA, 19 nt, Artificial Sequence
  Description of Artificial Sequence: Synthetic oligonucleotide
uuccaucaacgauagucau

SEQ ID NO: 1637743 - RNA, 19 nt, Artificial Sequence
  Description of Artificial Sequence: Synthetic oligonucleotide
cacaaacucuauaguguuc

SEQ ID NO: 1637744 - RNA, 19 nt, Artificial Sequence
  Description of Artificial Sequence: Synthetic oligonucleotide
ucuugacauaggaggguau

SEQ ID NO: 1637745 - RNA, 19 nt, Artificial Sequence
  Description of Artificial Sequence: Synthetic oligonucleotide
cacauaauguugaccuuga

SEQ ID NO: 1637746 - RNA, 19 nt, Artificial Sequence
  Description of Artificial Sequence: Synthetic oligonucleotide
aguauaccaggcugcucca

SEQ ID NO: 1637747 - RNA, 19 nt, Artificial Sequence
  Description of Artificial Sequence: Synthetic oligonucleotide
ccuauagaauguuuucuuc

SEQ ID NO: 1637748 - RNA, 19 nt, Artificial Sequence
  Description of Artificial Sequence: Synthetic oligonucleotide
ugaaccuguuccacaguuu

SEQ ID NO: 1637749 - RNA, 19 nt, Artificial Sequence
  Description of Artificial Sequence: Synthetic oligonucleotide
acucuaagcaaaaccccug

SEQ ID NO: 1637750 - RNA, 19 nt, Artificial Sequence
  Description of Artificial Sequence: Synthetic oligonucleotide
cauaggguuggauggcuca

SEQ ID NO: 1637751 - RNA, 19 nt, Artificial Sequence
  Description of Artificial Sequence: Synthetic oligonucleotide
uucagagaacuucgagcau

SEQ ID NO: 1637752 - RNA, 19 nt, Artificial Sequence
  Description of Artificial Sequence: Synthetic oligonucleotide
aagucccggguuccacauc

SEQ ID NO: 1637753 - RNA, 19 nt, Artificial Sequence
  Description of Artificial Sequence: Synthetic oligonucleotide
gcuuuaaacgaaauugcuc

SEQ ID NO: 1637754 - RNA, 19 nt, Artificial Sequence
  Description of Artificial Sequence: Synthetic oligonucleotide
agucugcugcgaccaugcc

SEQ ID NO: 1637755 - RNA, 19 nt, Artificial Sequence
  Description of Artificial Sequence: Synthetic oligonucleotide
aagccagccuauagaaugu

SEQ ID NO: 1637756 - RNA, 19 nt, Artificial Sequence
  Description of Artificial Sequence: Synthetic oligonucleotide
gcacauaauguugaccuug

SEQ ID NO: 1637757 - RNA, 19 nt, Artificial Sequence
  Description of Artificial Sequence: Synthetic oligonucleotide
ugacauaggaggguauauu

SEQ ID NO: 1637758 - RNA, 19 nt, Artificial Sequence
  Description of Artificial Sequence: Synthetic oligonucleotide
aacuacuccugaauacuua

SEQ ID NO: 1637759 - RNA, 19 nt, Artificial Sequence
  Description of Artificial Sequence: Synthetic oligonucleotide
gugauguccacuacucuga

SEQ ID NO: 1637760 - RNA, 19 nt, Artificial Sequence
  Description of Artificial Sequence: Synthetic oligonucleotide
ccuucauuggaaugccacc

SEQ ID NO: 1637761 - RNA, 19 nt, Artificial Sequence
  Description of Artificial Sequence: Synthetic oligonucleotide
gcaacucacaaccauauau

SEQ ID NO: 1637762 - RNA, 19 nt, Artificial Sequence
  Description of Artificial Sequence: Synthetic oligonucleotide
ugcugcgaccaugccauag

SEQ ID NO: 1637763 - RNA, 19 nt, Artificial Sequence
  Description of Artificial Sequence: Synthetic oligonucleotide
caguaaacaccagcucugc

SEQ ID NO: 1637764 - RNA, 19 nt, Artificial Sequence
  Description of Artificial Sequence: Synthetic oligonucleotide
gcugcgaccaugccauagg

SEQ ID NO: 1637765 - RNA, 19 nt, Artificial Sequence
  Description of Artificial Sequence: Synthetic oligonucleotide
agucugaugucuugacaua

SEQ ID NO: 1637766 - RNA, 19 nt, Artificial Sequence
  Description of Artificial Sequence: Synthetic oligonucleotide
gauuucagaacgaguuuua

SEQ ID NO: 1637767 - RNA, 19 nt, Artificial Sequence
  Description of Artificial Sequence: Synthetic oligonucleotide
guaugcaauugcguuggac

SEQ ID NO: 1637768 - RNA, 19 nt, Artificial Sequence
  Description of Artificial Sequence: Synthetic oligonucleotide
uugcuaagucugaugucuu

SEQ ID NO: 1637769 - RNA, 19 nt, Artificial Sequence
  Description of Artificial Sequence: Synthetic oligonucleotide
auagaucauaggguuggau

SEQ ID NO: 1637770 - RNA, 19 nt, Artificial Sequence
  Description of Artificial Sequence: Synthetic oligonucleotide
auuuugcuuuaaacgaaau

SEQ ID NO: 1637771 - RNA, 19 nt, Artificial Sequence
  Description of Artificial Sequence: Synthetic oligonucleotide
ucauuaaagccagccuaua

SEQ ID NO: 1637772 - RNA, 19 nt, Artificial Sequence
  Description of Artificial Sequence: Synthetic oligonucleotide
uuacaugaguuaggacaga

SEQ ID NO: 1637773 - RNA, 19 nt, Artificial Sequence
  Description of Artificial Sequence: Synthetic oligonucleotide
ugcaauugcguuggacaaa

SEQ ID NO: 1637774 - RNA, 19 nt, Artificial Sequence
  Description of Artificial Sequence: Synthetic oligonucleotide
cagacacauacaugguaca

SEQ ID NO: 1637775 - RNA, 19 nt, Artificial Sequence
  Description of Artificial Sequence: Synthetic oligonucleotide
acagacauacacaggcaaa

SEQ ID NO: 1637776 - RNA, 19 nt, Artificial Sequence
  Description of Artificial Sequence: Synthetic oligonucleotide
agcacauaauguugaccuu

SEQ ID NO: 1637777 - RNA, 19 nt, Artificial Sequence
  Description of Artificial Sequence: Synthetic oligonucleotide
cuaauguaucaggcugcag

SEQ ID NO: 1637778 - RNA, 19 nt, Artificial Sequence
  Description of Artificial Sequence: Synthetic oligonucleotide
acauaggaggguauauuuu

SEQ ID NO: 1637779 - RNA, 19 nt, Artificial Sequence
  Description of Artificial Sequence: Synthetic oligonucleotide
gucuguagauccuguucuc

SEQ ID NO: 1637780 - RNA, 19 nt, Artificial Sequence
  Description of Artificial Sequence: Synthetic oligonucleotide
cacaguuuaacagaauuuu

SEQ ID NO: 1637781 - RNA, 19 nt, Artificial Sequence
  Description of Artificial Sequence: Synthetic oligonucleotide
acuuauccuuuagguguag

SEQ ID NO: 1637782 - RNA, 19 nt, Artificial Sequence
  Description of Artificial Sequence: Synthetic oligonucleotide
ggauuuggaacacucuccu

SEQ ID NO: 1637783 - RNA, 19 nt, Artificial Sequence
  Description of Artificial Sequence: Synthetic oligonucleotide
acucugaguacugcaugga

SEQ ID NO: 1637784 - RNA, 19 nt, Artificial Sequence
  Description of Artificial Sequence: Synthetic oligonucleotide
auguaauguugggaagaga

SEQ ID NO: 1637785 - RNA, 19 nt, Artificial Sequence
  Description of Artificial Sequence: Synthetic oligonucleotide
aucuuugacccuacaugga

SEQ ID NO: 1637786 - RNA, 19 nt, Artificial Sequence
  Description of Artificial Sequence: Synthetic oligonucleotide
ggagcaagucugcugcgac

SEQ ID NO: 1637787 - RNA, 19 nt, Artificial Sequence
  Description of Artificial Sequence: Synthetic oligonucleotide
caguguuguaugcagcucu

SEQ ID NO: 1637788 - RNA, 19 nt, Artificial Sequence
  Description of Artificial Sequence: Synthetic oligonucleotide
caauauagugauguccacu

SEQ ID NO: 1637789 - RNA, 19 nt, Artificial Sequence
  Description of Artificial Sequence: Synthetic oligonucleotide
ucccggguuccacaucuua

SEQ ID NO: 1637790 - RNA, 19 nt, Artificial Sequence
  Description of Artificial Sequence: Synthetic oligonucleotide
gaagaccacaguguuguau

SEQ ID NO: 1637791 - RNA, 19 nt, Artificial Sequence
  Description of Artificial Sequence: Synthetic oligonucleotide
aguaugcaauugcguugga

SEQ ID NO: 1637792 - RNA, 19 nt, Artificial Sequence
  Description of Artificial Sequence: Synthetic oligonucleotide
cuugacauaggaggguaua

SEQ ID NO: 1637793 - RNA, 19 nt, Artificial Sequence
  Description of Artificial Sequence: Synthetic oligonucleotide
gugcacagccagcauaugu

SEQ ID NO: 1637794 - RNA, 19 nt, Artificial Sequence
  Description of Artificial Sequence: Synthetic oligonucleotide
ucugcgccacacugugcac

SEQ ID NO: 1637795 - RNA, 19 nt, Artificial Sequence
  Description of Artificial Sequence: Synthetic oligonucleotide
caacucaaaacggcucuga

SEQ ID NO: 1637796 - RNA, 19 nt, Artificial Sequence
  Description of Artificial Sequence: Synthetic oligonucleotide
ugaguacugcauggacuaa

SEQ ID NO: 1637797 - RNA, 19 nt, Artificial Sequence
  Description of Artificial Sequence: Synthetic oligonucleotide
cucuaagcaaaaccccugu

SEQ ID NO: 1637798 - RNA, 19 nt, Artificial Sequence
  Description of Artificial Sequence: Synthetic oligonucleotide
gauguccacuacucugagu

SEQ ID NO: 1637799 - RNA, 19 nt, Artificial Sequence
  Description of Artificial Sequence: Synthetic oligonucleotide
agccagcauauguaauguu

SEQ ID NO: 1637800 - RNA, 19 nt, Artificial Sequence
  Description of Artificial Sequence: Synthetic oligonucleotide
guacugcauggacuaaugu

SEQ ID NO: 1637801 - RNA, 19 nt, Artificial Sequence
  Description of Artificial Sequence: Synthetic oligonucleotide
gcaauugcguuggacaaaa

SEQ ID NO: 1637802 - RNA, 19 nt, Artificial Sequence
  Description of Artificial Sequence: Synthetic oligonucleotide
gacugccaacaaggagugg

SEQ ID NO: 1637803 - RNA, 19 nt, Artificial Sequence
  Description of Artificial Sequence: Synthetic oligonucleotide
uugacccuacauggacaca

SEQ ID NO: 1637804 - RNA, 19 nt, Artificial Sequence
  Description of Artificial Sequence: Synthetic oligonucleotide
ggguuggauggcucagcag

SEQ ID NO: 1637805 - RNA, 19 nt, Artificial Sequence
  Description of Artificial Sequence: Synthetic oligonucleotide
aguguuguaugcagcucua

SEQ ID NO: 1637806 - RNA, 19 nt, Artificial Sequence
  Description of Artificial Sequence: Synthetic oligonucleotide
cacaggcaaaacucauaaa

SEQ ID NO: 1637807 - RNA, 19 nt, Artificial Sequence
  Description of Artificial Sequence: Synthetic oligonucleotide
uguugaccuugaaccuguu

SEQ ID NO: 1637808 - RNA, 19 nt, Artificial Sequence
  Description of Artificial Sequence: Synthetic oligonucleotide
augcagcucuaaguuuucu

SEQ ID NO: 1637809 - RNA, 19 nt, Artificial Sequence
  Description of Artificial Sequence: Synthetic oligonucleotide
cagcucuaaguuuucuagu

SEQ ID NO: 1637810 - RNA, 19 nt, Artificial Sequence
  Description of Artificial Sequence: Synthetic oligonucleotide
gaguacugcauggacuaau

SEQ ID NO: 1637811 - RNA, 19 nt, Artificial Sequence
  Description of Artificial Sequence: Synthetic oligonucleotide
guccacuacucugaguacu

SEQ ID NO: 1637812 - RNA, 19 nt, Artificial Sequence
  Description of Artificial Sequence: Synthetic oligonucleotide
cauagaucauaggguugga

SEQ ID NO: 1637813 - RNA, 19 nt, Artificial Sequence
  Description of Artificial Sequence: Synthetic oligonucleotide
gaccaugccauaggugacu

SEQ ID NO: 1637814 - RNA, 19 nt, Artificial Sequence
  Description of Artificial Sequence: Synthetic oligonucleotide
accaugccauaggugacuu

SEQ ID NO: 1637815 - RNA, 19 nt, Artificial Sequence
  Description of Artificial Sequence: Synthetic oligonucleotide
guucugcgccacacugugc

SEQ ID NO: 1637816 - RNA, 19 nt, Artificial Sequence
  Description of Artificial Sequence: Synthetic oligonucleotide
gacccuacauggacacaaa

SEQ ID NO: 1637817 - RNA, 19 nt, Artificial Sequence
  Description of Artificial Sequence: Synthetic oligonucleotide
cagagaacuucgagcauuu

SEQ ID NO: 1637818 - RNA, 19 nt, Artificial Sequence
  Description of Artificial Sequence: Synthetic oligonucleotide
cagccagcauauguaaugu

SEQ ID NO: 1637819 - RNA, 19 nt, Artificial Sequence
  Description of Artificial Sequence: Synthetic oligonucleotide
ggcuuuaaucagaacuacu

SEQ ID NO: 1637820 - RNA, 19 nt, Artificial Sequence
  Description of Artificial Sequence: Synthetic oligonucleotide
cugcgccacacugugcaca

SEQ ID NO: 1637821 - RNA, 19 nt, Artificial Sequence
  Description of Artificial Sequence: Synthetic oligonucleotide
cuugaaccuguuccacagu

SEQ ID NO: 1637822 - RNA, 19 nt, Artificial Sequence
  Description of Artificial Sequence: Synthetic oligonucleotide
agagaacuucgagcauuua

SEQ ID NO: 1637823 - RNA, 19 nt, Artificial Sequence
  Description of Artificial Sequence: Synthetic oligonucleotide
caucaacgauagucauuaa

SEQ ID NO: 1637824 - RNA, 19 nt, Artificial Sequence
  Description of Artificial Sequence: Synthetic oligonucleotide
agccagccuauagaauguu

SEQ ID NO: 1637825 - RNA, 19 nt, Artificial Sequence
  Description of Artificial Sequence: Synthetic oligonucleotide
caaaacggcucugaaucuu

SEQ ID NO: 1637826 - RNA, 19 nt, Artificial Sequence
  Description of Artificial Sequence: Synthetic oligonucleotide
cugcgaccaugccauaggu

SEQ ID NO: 1637827 - RNA, 19 nt, Artificial Sequence
  Description of Artificial Sequence: Synthetic oligonucleotide
ggcaacucacaaccauaua

SEQ ID NO: 1637828 - RNA, 19 nt, Artificial Sequence
  Description of Artificial Sequence: Synthetic oligonucleotide
gaacacucuccuggccucu

SEQ ID NO: 1637829 - RNA, 19 nt, Artificial Sequence
  Description of Artificial Sequence: Synthetic oligonucleotide
ccaacaaggaguggagcaa

SEQ ID NO: 1637830 - RNA, 19 nt, Artificial Sequence
  Description of Artificial Sequence: Synthetic oligonucleotide
ccccauaauacaagcacau

SEQ ID NO: 1637831 - RNA, 19 nt, Artificial Sequence
  Description of Artificial Sequence: Synthetic oligonucleotide
cgagcauuuagagcuaucu

SEQ ID NO: 1637832 - RNA, 19 nt, Artificial Sequence
  Description of Artificial Sequence: Synthetic oligonucleotide
guaucaggcugcagcuuuu

SEQ ID NO: 1637833 - RNA, 19 nt, Artificial Sequence
  Description of Artificial Sequence: Synthetic oligonucleotide
ggcucagcacugacugcca

SEQ ID NO: 1637834 - RNA, 19 nt, Artificial Sequence
  Description of Artificial Sequence: Synthetic oligonucleotide
gcgcuucagagaacuucga

SEQ ID NO: 1637835 - RNA, 19 nt, Artificial Sequence
  Description of Artificial Sequence: Synthetic oligonucleotide
gccagccuauagaauguuu

SEQ ID NO: 1637836 - RNA, 19 nt, Artificial Sequence
  Description of Artificial Sequence: Synthetic oligonucleotide
cugcaaccuuggcuuuaau

SEQ ID NO: 1637837 - RNA, 19 nt, Artificial Sequence
  Description of Artificial Sequence: Synthetic oligonucleotide
cugcugcgaccaugccaua

SEQ ID NO: 1637838 - RNA, 19 nt, Artificial Sequence
  Description of Artificial Sequence: Synthetic oligonucleotide
aauagaaagaauuuggcgg

SEQ ID NO: 1637839 - RNA, 19 nt, Artificial Sequence
  Description of Artificial Sequence: Synthetic oligonucleotide
aaauagaaagaauuuggcg

SEQ ID NO: 1637840 - RNA, 19 nt, Artificial Sequence
  Description of Artificial Sequence: Synthetic oligonucleotide
ugucaaauaaauaagcagc

SEQ ID NO: 1637841 - RNA, 19 nt, Artificial Sequence
  Description of Artificial Sequence: Synthetic oligonucleotide
uaaaaugauacugaggugg

SEQ ID NO: 1637842 - RNA, 19 nt, Artificial Sequence
  Description of Artificial Sequence: Synthetic oligonucleotide
aauguuucaauuccuguuc

SEQ ID NO: 1637843 - RNA, 19 nt, Artificial Sequence
  Description of Artificial Sequence: Synthetic oligonucleotide
acuaguauaccacugacuc

SEQ ID NO: 1637844 - RNA, 19 nt, Artificial Sequence
  Description of Artificial Sequence: Synthetic oligonucleotide
aauaaucaguucuacaaug

SEQ ID NO: 1637845 - RNA, 19 nt, Artificial Sequence
  Description of Artificial Sequence: Synthetic oligonucleotide
uguguaaauaaucaguucu

SEQ ID NO: 1637846 - RNA, 19 nt, Artificial Sequence
  Description of Artificial Sequence: Synthetic oligonucleotide
aaccauaucagcuguaauc

SEQ ID NO: 1637847 - RNA, 19 nt, Artificial Sequence
  Description of Artificial Sequence: Synthetic oligonucleotide
uguaggaucuugaacauag

SEQ ID NO: 1637848 - RNA, 19 nt, Artificial Sequence
  Description of Artificial Sequence: Synthetic oligonucleotide
uuacauggcaccaauuugg

SEQ ID NO: 1637849 - RNA, 19 nt, Artificial Sequence
  Description of Artificial Sequence: Synthetic oligonucleotide
uuuguuuuaacauuacgga

SEQ ID NO: 1637850 - RNA, 19 nt, Artificial Sequence
  Description of Artificial Sequence: Synthetic oligonucleotide
uguuuuaacauuacggaca

SEQ ID NO: 1637851 - RNA, 19 nt, Artificial Sequence
  Description of Artificial Sequence: Synthetic oligonucleotide
uaguaaaugaugcucuugg

SEQ ID NO: 1637852 - RNA, 19 nt, Artificial Sequence
  Description of Artificial Sequence: Synthetic oligonucleotide
uaacaaggaauccauaaag

SEQ ID NO: 1637853 - RNA, 19 nt, Artificial Sequence
  Description of Artificial Sequence: Synthetic oligonucleotide
gauaauaucugccagcuga

SEQ ID NO: 1637854 - RNA, 19 nt, Artificial Sequence
  Description of Artificial Sequence: Synthetic oligonucleotide
uauaucauuaaauaugaau

SEQ ID NO: 1637855 - RNA, 19 nt, Artificial Sequence
  Description of Artificial Sequence: Synthetic oligonucleotide
uuuagaaugagcucacugc

SEQ ID NO: 1637856 - RNA, 19 nt, Artificial Sequence
  Description of Artificial Sequence: Synthetic oligonucleotide
uugucaaauaaauaagcag

SEQ ID NO: 1637857 - RNA, 19 nt, Artificial Sequence
  Description of Artificial Sequence: Synthetic oligonucleotide
aacauacuauaugugauac

SEQ ID NO: 1637858 - RNA, 19 nt, Artificial Sequence
  Description of Artificial Sequence: Synthetic oligonucleotide
uuaaauaugaauucuucau

SEQ ID NO: 1637859 - RNA, 19 nt, Artificial Sequence
  Description of Artificial Sequence: Synthetic oligonucleotide
ugauaugaaauccaucuac

SEQ ID NO: 1637860 - RNA, 19 nt, Artificial Sequence
  Description of Artificial Sequence: Synthetic oligonucleotide
uaaaaguuccuccugagaa

SEQ ID NO: 1637861 - RNA, 19 nt, Artificial Sequence
  Description of Artificial Sequence: Synthetic oligonucleotide
uugaacauaguugauaccc

SEQ ID NO: 1637862 - RNA, 19 nt, Artificial Sequence
  Description of Artificial Sequence: Synthetic oligonucleotide
aauaccugcagccacuaug

SEQ ID NO: 1637863 - RNA, 19 nt, Artificial Sequence
  Description of Artificial Sequence: Synthetic oligonucleotide
gaaaacauacuauauguga

SEQ ID NO: 1637864 - RNA, 19 nt, Artificial Sequence
  Description of Artificial Sequence: Synthetic oligonucleotide
agaauuguuauccaaauua

SEQ ID NO: 1637865 - RNA, 19 nt, Artificial Sequence
  Description of Artificial Sequence: Synthetic oligonucleotide
uguagaaauaaauagcuuu

SEQ ID NO: 1637866 - RNA, 19 nt, Artificial Sequence
  Description of Artificial Sequence: Synthetic oligonucleotide
ugauacuuagguuauguca

SEQ ID NO: 1637867 - RNA, 19 nt, Artificial Sequence
  Description of Artificial Sequence: Synthetic oligonucleotide
ucucccacuaaaaugauac

SEQ ID NO: 1637868 - RNA, 19 nt, Artificial Sequence
  Description of Artificial Sequence: Synthetic oligonucleotide
aacauuacggacaaauauc

SEQ ID NO: 1637869 - RNA, 19 nt, Artificial Sequence
  Description of Artificial Sequence: Synthetic oligonucleotide
aaaucuacuaacaaggaau

SEQ ID NO: 1637870 - RNA, 19 nt, Artificial Sequence
  Description of Artificial Sequence: Synthetic oligonucleotide
gaugauaugaaauccaucu

SEQ ID NO: 1637871 - RNA, 19 nt, Artificial Sequence
  Description of Artificial Sequence: Synthetic oligonucleotide
auauuguucuuucaucaac

SEQ ID NO: 1637872 - RNA, 19 nt, Artificial Sequence
  Description of Artificial Sequence: Synthetic oligonucleotide
uguucuuuugaugauauga

SEQ ID NO: 1637873 - RNA, 19 nt, Artificial Sequence
  Description of Artificial Sequence: Synthetic oligonucleotide
aauaagaauuguuauccaa

SEQ ID NO: 1637874 - RNA, 19 nt, Artificial Sequence
  Description of Artificial Sequence: Synthetic oligonucleotide
uguucaauugaucagugau

SEQ ID NO: 1637875 - RNA, 19 nt, Artificial Sequence
  Description of Artificial Sequence: Synthetic oligonucleotide
ucuuuugaugauaugaaau

SEQ ID NO: 1637876 - RNA, 19 nt, Artificial Sequence
  Description of Artificial Sequence: Synthetic oligonucleotide
aaaguuccuccugagaaac

SEQ ID NO: 1637877 - RNA, 19 nt, Artificial Sequence
  Description of Artificial Sequence: Synthetic oligonucleotide
aauccaugauuucacaccu

SEQ ID NO: 1637878 - RNA, 19 nt, Artificial Sequence
  Description of Artificial Sequence: Synthetic oligonucleotide
uaacauuacggacaaauau

SEQ ID NO: 1637879 - RNA, 19 nt, Artificial Sequence
  Description of Artificial Sequence: Synthetic oligonucleotide
ucuacaucuuuucucuggg

SEQ ID NO: 1637880 - RNA, 19 nt, Artificial Sequence
  Description of Artificial Sequence: Synthetic oligonucleotide
acauuacggacaaauaucc

SEQ ID NO: 1637881 - RNA, 19 nt, Artificial Sequence
  Description of Artificial Sequence: Synthetic oligonucleotide
uauuguucuuucaucaaca

SEQ ID NO: 1637882 - RNA, 19 nt, Artificial Sequence
  Description of Artificial Sequence: Synthetic oligonucleotide
uuuacauggcaccaauuug

SEQ ID NO: 1637883 - RNA, 19 nt, Artificial Sequence
  Description of Artificial Sequence: Synthetic oligonucleotide
augauaauggcuucauguc

SEQ ID NO: 1637884 - RNA, 19 nt, Artificial Sequence
  Description of Artificial Sequence: Synthetic oligonucleotide
ugaaaacauacuauaugug

SEQ ID NO: 1637885 - RNA, 19 nt, Artificial Sequence
  Description of Artificial Sequence: Synthetic oligonucleotide
auaugugauacuuagguua

SEQ ID NO: 1637886 - RNA, 19 nt, Artificial Sequence
  Description of Artificial Sequence: Synthetic oligonucleotide
aaaaucuacuaacaaggaa

SEQ ID NO: 1637887 - RNA, 19 nt, Artificial Sequence
  Description of Artificial Sequence: Synthetic oligonucleotide
uagcuuuguaggaaaauag

SEQ ID NO: 1637888 - RNA, 19 nt, Artificial Sequence
  Description of Artificial Sequence: Synthetic oligonucleotide
ucuccaacuaauuucgucu

SEQ ID NO: 1637889 - RNA, 19 nt, Artificial Sequence
  Description of Artificial Sequence: Synthetic oligonucleotide
aguaaaugaugcucuuggc

SEQ ID NO: 1637890 - RNA, 19 nt, Artificial Sequence
  Description of Artificial Sequence: Synthetic oligonucleotide
caaggaauccauaaaguug

SEQ ID NO: 1637891 - RNA, 19 nt, Artificial Sequence
  Description of Artificial Sequence: Synthetic oligonucleotide
aaucuacuaacaaggaauc

SEQ ID NO: 1637892 - RNA, 19 nt, Artificial Sequence
  Description of Artificial Sequence: Synthetic oligonucleotide
aaauguuucaauuccuguu

SEQ ID NO: 1637893 - RNA, 19 nt, Artificial Sequence
  Description of Artificial Sequence: Synthetic oligonucleotide
ucuacuaacaaggaaucca

SEQ ID NO: 1637894 - RNA, 19 nt, Artificial Sequence
  Description of Artificial Sequence: Synthetic oligonucleotide
aauuguuauccaaauuauc

SEQ ID NO: 1637895 - RNA, 19 nt, Artificial Sequence
  Description of Artificial Sequence: Synthetic oligonucleotide
ucuuguuccugacauaggu

SEQ ID NO: 1637896 - RNA, 19 nt, Artificial Sequence
  Description of Artificial Sequence: Synthetic oligonucleotide
uaucuuguuccugacauag

SEQ ID NO: 1637897 - RNA, 19 nt, Artificial Sequence
  Description of Artificial Sequence: Synthetic oligonucleotide
accacugacucuugggucc

SEQ ID NO: 1637898 - RNA, 19 nt, Artificial Sequence
  Description of Artificial Sequence: Synthetic oligonucleotide
ugauuucacaccuugcugu

SEQ ID NO: 1637899 - RNA, 19 nt, Artificial Sequence
  Description of Artificial Sequence: Synthetic oligonucleotide
auagaaagaauuuggcggu

SEQ ID NO: 1637900 - RNA, 19 nt, Artificial Sequence
  Description of Artificial Sequence: Synthetic oligonucleotide
aauuucgucuuuccaguug

SEQ ID NO: 1637901 - RNA, 19 nt, Artificial Sequence
  Description of Artificial Sequence: Synthetic oligonucleotide
auaugaauucuucauuugu

SEQ ID NO: 1637902 - RNA, 19 nt, Artificial Sequence
  Description of Artificial Sequence: Synthetic oligonucleotide
ucugggaauaccugcagcc

SEQ ID NO: 1637903 - RNA, 19 nt, Artificial Sequence
  Description of Artificial Sequence: Synthetic oligonucleotide
uucaauugaucagugaugu

SEQ ID NO: 1637904 - RNA, 19 nt, Artificial Sequence
  Description of Artificial Sequence: Synthetic oligonucleotide
aguucuacaaugauuccac

SEQ ID NO: 1637905 - RNA, 19 nt, Artificial Sequence
  Description of Artificial Sequence: Synthetic oligonucleotide
ugucaucuaguaaaugaug

SEQ ID NO: 1637906 - RNA, 19 nt, Artificial Sequence
  Description of Artificial Sequence: Synthetic oligonucleotide
aaaaugauacugagguggg

SEQ ID NO: 1637907 - RNA, 19 nt, Artificial Sequence
  Description of Artificial Sequence: Synthetic oligonucleotide
uuguuuuaacauuacggac

SEQ ID NO: 1637908 - RNA, 19 nt, Artificial Sequence
  Description of Artificial Sequence: Synthetic oligonucleotide
aucuacaucuuuucucugg

SEQ ID NO: 1637909 - RNA, 19 nt, Artificial Sequence
  Description of Artificial Sequence: Synthetic oligonucleotide
acuaacaaggaauccauaa

SEQ ID NO: 1637910 - RNA, 19 nt, Artificial Sequence
  Description of Artificial Sequence: Synthetic oligonucleotide
uuacaguuuacauggcacc

SEQ ID NO: 1637911 - RNA, 19 nt, Artificial Sequence
  Description of Artificial Sequence: Synthetic oligonucleotide
auuacggacaaauauccau

SEQ ID NO: 1637912 - RNA, 19 nt, Artificial Sequence
  Description of Artificial Sequence: Synthetic oligonucleotide
cauuuguuuuaacauuacg

SEQ ID NO: 1637913 - RNA, 19 nt, Artificial Sequence
  Description of Artificial Sequence: Synthetic oligonucleotide
uucaguuguucucugggug

SEQ ID NO: 1637914 - RNA, 19 nt, Artificial Sequence
  Description of Artificial Sequence: Synthetic oligonucleotide
uuaucauuguaauugcuuu

SEQ ID NO: 1637915 - RNA, 19 nt, Artificial Sequence
  Description of Artificial Sequence: Synthetic oligonucleotide
ucuaaaaguuccuccugag

SEQ ID NO: 1637916 - RNA, 19 nt, Artificial Sequence
  Description of Artificial Sequence: Synthetic oligonucleotide
ucucuaaccauaucagcug

SEQ ID NO: 1637917 - RNA, 19 nt, Artificial Sequence
  Description of Artificial Sequence: Synthetic oligonucleotide
uccauguucaauugaucag

SEQ ID NO: 1637918 - RNA, 19 nt, Artificial Sequence
  Description of Artificial Sequence: Synthetic oligonucleotide
gaucagugaugucuaaaag

SEQ ID NO: 1637919 - RNA, 19 nt, Artificial Sequence
  Description of Artificial Sequence: Synthetic oligonucleotide
aacuaauuucgucuuucca

SEQ ID NO: 1637920 - RNA, 19 nt, Artificial Sequence
  Description of Artificial Sequence: Synthetic oligonucleotide
uugauacccacaucaauga

SEQ ID NO: 1637921 - RNA, 19 nt, Artificial Sequence
  Description of Artificial Sequence: Synthetic oligonucleotide
accgucaugggucccacgc

SEQ ID NO: 1637922 - RNA, 19 nt, Artificial Sequence
  Description of Artificial Sequence: Synthetic oligonucleotide
cauagguguggcuugcugg

SEQ ID NO: 1637923 - RNA, 19 nt, Artificial Sequence
  Description of Artificial Sequence: Synthetic oligonucleotide
uaagcagcacuauuuguug

SEQ ID NO: 1637924 - RNA, 19 nt, Artificial Sequence
  Description of Artificial Sequence: Synthetic oligonucleotide
acaucuccaacuaauuucg

SEQ ID NO: 1637925 - RNA, 19 nt, Artificial Sequence
  Description of Artificial Sequence: Synthetic oligonucleotide
uaucauuguaauugcuuug

SEQ ID NO: 1637926 - RNA, 19 nt, Artificial Sequence
  Description of Artificial Sequence: Synthetic oligonucleotide
ucuuggaucuuccugccac

SEQ ID NO: 1637927 - RNA, 19 nt, Artificial Sequence
  Description of Artificial Sequence: Synthetic oligonucleotide
gauaccuacagccgaagca

SEQ ID NO: 1637928 - RNA, 19 nt, Artificial Sequence
  Description of Artificial Sequence: Synthetic oligonucleotide
cacuaaaaugauacugagg

SEQ ID NO: 1637929 - RNA, 19 nt, Artificial Sequence
  Description of Artificial Sequence: Synthetic oligonucleotide
auagguguggcuugcuggg

SEQ ID NO: 1637930 - RNA, 19 nt, Artificial Sequence
  Description of Artificial Sequence: Synthetic oligonucleotide
cuaugauaauaucugccag

SEQ ID NO: 1637931 - RNA, 19 nt, Artificial Sequence
  Description of Artificial Sequence: Synthetic oligonucleotide
ugaucagugaugucuaaaa

SEQ ID NO: 1637932 - RNA, 19 nt, Artificial Sequence
  Description of Artificial Sequence: Synthetic oligonucleotide
aagagcaauccaugauuuc

SEQ ID NO: 1637933 - RNA, 19 nt, Artificial Sequence
  Description of Artificial Sequence: Synthetic oligonucleotide
uguaaauaaucaguucuac

SEQ ID NO: 1637934 - RNA, 19 nt, Artificial Sequence
  Description of Artificial Sequence: Synthetic oligonucleotide
agauaccuacagccgaagc

SEQ ID NO: 1637935 - RNA, 19 nt, Artificial Sequence
  Description of Artificial Sequence: Synthetic oligonucleotide
aucuccaacuaauuucguc

SEQ ID NO: 1637936 - RNA, 19 nt, Artificial Sequence
  Description of Artificial Sequence: Synthetic oligonucleotide
guaaaugaugcucuuggca

SEQ ID NO: 1637937 - RNA, 19 nt, Artificial Sequence
  Description of Artificial Sequence: Synthetic oligonucleotide
aacaaggaauccauaaagu

SEQ ID NO: 1637938 - RNA, 19 nt, Artificial Sequence
  Description of Artificial Sequence: Synthetic oligonucleotide
auaucagcuguaaucaauc

SEQ ID NO: 1637939 - RNA, 19 nt, Artificial Sequence
  Description of Artificial Sequence: Synthetic oligonucleotide
uaugugauacuuagguuau

SEQ ID NO: 1637940 - RNA, 19 nt, Artificial Sequence
  Description of Artificial Sequence: Synthetic oligonucleotide
ugaguguggaccuucaguu

SEQ ID NO: 1637941 - RNA, 19 nt, Artificial Sequence
  Description of Artificial Sequence: Synthetic oligonucleotide
ugugauacuuagguuaugu

SEQ ID NO: 1637942 - RNA, 19 nt, Artificial Sequence
  Description of Artificial Sequence: Synthetic oligonucleotide
ugcagauaccuacagccga

SEQ ID NO: 1637943 - RNA, 19 nt, Artificial Sequence
  Description of Artificial Sequence: Synthetic oligonucleotide
uggcuuuagaaugagcuca

SEQ ID NO: 1637944 - RNA, 19 nt, Artificial Sequence
  Description of Artificial Sequence: Synthetic oligonucleotide
augauuucacaccuugcug

SEQ ID NO: 1637945 - RNA, 19 nt, Artificial Sequence
  Description of Artificial Sequence: Synthetic oligonucleotide
auuucgucuuuccaguugu

SEQ ID NO: 1637946 - RNA, 19 nt, Artificial Sequence
  Description of Artificial Sequence: Synthetic oligonucleotide
uccaucuacaucuuuucuc

SEQ ID NO: 1637947 - RNA, 19 nt, Artificial Sequence
  Description of Artificial Sequence: Synthetic oligonucleotide
acaaggaauccauaaaguu

SEQ ID NO: 1637948 - RNA, 19 nt, Artificial Sequence
  Description of Artificial Sequence: Synthetic oligonucleotide
acauaguugauacccacau

SEQ ID NO: 1637949 - RNA, 19 nt, Artificial Sequence
  Description of Artificial Sequence: Synthetic oligonucleotide
auaccuacagccgaagcag

SEQ ID NO: 1637950 - RNA, 19 nt, Artificial Sequence
  Description of Artificial Sequence: Synthetic oligonucleotide
gaaguguauucuucagaag

SEQ ID NO: 1637951 - RNA, 19 nt, Artificial Sequence
  Description of Artificial Sequence: Synthetic oligonucleotide
cuauaugugauacuuaggu

SEQ ID NO: 1637952 - RNA, 19 nt, Artificial Sequence
  Description of Artificial Sequence: Synthetic oligonucleotide
guaaauaaucaguucuaca

SEQ ID NO: 1637953 - RNA, 19 nt, Artificial Sequence
  Description of Artificial Sequence: Synthetic oligonucleotide
gaacuaguauaccacugac

SEQ ID NO: 1637954 - RNA, 19 nt, Artificial Sequence
  Description of Artificial Sequence: Synthetic oligonucleotide
accauaucagcuguaauca

SEQ ID NO: 1637955 - RNA, 19 nt, Artificial Sequence
  Description of Artificial Sequence: Synthetic oligonucleotide
uuacggacaaauauccaua

SEQ ID NO: 1637956 - RNA, 19 nt, Artificial Sequence
  Description of Artificial Sequence: Synthetic oligonucleotide
ugcauauuguucuuucauc

SEQ ID NO: 1637957 - RNA, 19 nt, Artificial Sequence
  Description of Artificial Sequence: Synthetic oligonucleotide
gaagggguagcugaacuag

SEQ ID NO: 1637958 - RNA, 19 nt, Artificial Sequence
  Description of Artificial Sequence: Synthetic oligonucleotide
uuauccaaauuaucauugu

SEQ ID NO: 1637959 - RNA, 19 nt, Artificial Sequence
  Description of Artificial Sequence: Synthetic oligonucleotide
gaacauaguugauacccac

SEQ ID NO: 1637960 - RNA, 19 nt, Artificial Sequence
  Description of Artificial Sequence: Synthetic oligonucleotide
aagaauuguuauccaaauu

SEQ ID NO: 1637961 - RNA, 19 nt, Artificial Sequence
  Description of Artificial Sequence: Synthetic oligonucleotide
uauccaaauuaucauugua

SEQ ID NO: 1637962 - RNA, 19 nt, Artificial Sequence
  Description of Artificial Sequence: Synthetic oligonucleotide
uccauaaaauaagaauugu

SEQ ID NO: 1637963 - RNA, 19 nt, Artificial Sequence
  Description of Artificial Sequence: Synthetic oligonucleotide
aauuuggcgguugucaaau

SEQ ID NO: 1637964 - RNA, 19 nt, Artificial Sequence
  Description of Artificial Sequence: Synthetic oligonucleotide
uuuggcgguugucaaauaa

SEQ ID NO: 1637965 - RNA, 19 nt, Artificial Sequence
  Description of Artificial Sequence: Synthetic oligonucleotide
aguuccugagaugauaaug

SEQ ID NO: 1637966 - RNA, 19 nt, Artificial Sequence
  Description of Artificial Sequence: Synthetic oligonucleotide
uccugagaugauaauggcu

SEQ ID NO: 1637967 - RNA, 19 nt, Artificial Sequence
  Description of Artificial Sequence: Synthetic oligonucleotide
aguguggaccuucaguugu

SEQ ID NO: 1637968 - RNA, 19 nt, Artificial Sequence
  Description of Artificial Sequence: Synthetic oligonucleotide
aauuuggcugacaaaaguu

SEQ ID NO: 1637969 - RNA, 19 nt, Artificial Sequence
  Description of Artificial Sequence: Synthetic oligonucleotide
aucuacuaacaaggaaucc

SEQ ID NO: 1637970 - RNA, 19 nt, Artificial Sequence
  Description of Artificial Sequence: Synthetic oligonucleotide
gauaauggcuucaugucuc

SEQ ID NO: 1637971 - RNA, 19 nt, Artificial Sequence
  Description of Artificial Sequence: Synthetic oligonucleotide
augcucuccauccgugugc

SEQ ID NO: 1637972 - RNA, 19 nt, Artificial Sequence
  Description of Artificial Sequence: Synthetic oligonucleotide
augauaauaucugccagcu

SEQ ID NO: 1637973 - RNA, 19 nt, Artificial Sequence
  Description of Artificial Sequence: Synthetic oligonucleotide
uauugucacuguugcauca

SEQ ID NO: 1637974 - RNA, 19 nt, Artificial Sequence
  Description of Artificial Sequence: Synthetic oligonucleotide
agcugcgccuucucuaacc

SEQ ID NO: 1637975 - RNA, 19 nt, Artificial Sequence
  Description of Artificial Sequence: Synthetic oligonucleotide
gacucuuggguccauguuc

SEQ ID NO: 1637976 - RNA, 19 nt, Artificial Sequence
  Description of Artificial Sequence: Synthetic oligonucleotide
agcauggcgaucggcaugc

SEQ ID NO: 1637977 - RNA, 19 nt, Artificial Sequence
  Description of Artificial Sequence: Synthetic oligonucleotide
agcugaacuaguauaccac

SEQ ID NO: 1637978 - RNA, 19 nt, Artificial Sequence
  Description of Artificial Sequence: Synthetic oligonucleotide
uguaucugugugcuauugu

SEQ ID NO: 1637979 - RNA, 19 nt, Artificial Sequence
  Description of Artificial Sequence: Synthetic oligonucleotide
uaguauaccacugacucuu

SEQ ID NO: 1637980 - RNA, 19 nt, Artificial Sequence
  Description of Artificial Sequence: Synthetic oligonucleotide
guaucugugugcuauuguc

SEQ ID NO: 1637981 - RNA, 19 nt, Artificial Sequence
  Description of Artificial Sequence: Synthetic oligonucleotide
agcacuauuuguugugugu

SEQ ID NO: 1637982 - RNA, 19 nt, Artificial Sequence
  Description of Artificial Sequence: Synthetic oligonucleotide
caucuaguaaaugaugcuc

SEQ ID NO: 1637983 - RNA, 19 nt, Artificial Sequence
  Description of Artificial Sequence: Synthetic oligonucleotide
auaagaauuguuauccaaa

SEQ ID NO: 1637984 - RNA, 19 nt, Artificial Sequence
  Description of Artificial Sequence: Synthetic oligonucleotide
cuugaacauaguugauacc

SEQ ID NO: 1637985 - RNA, 19 nt, Artificial Sequence
  Description of Artificial Sequence: Synthetic oligonucleotide
gucaaauaaauaagcagca

SEQ ID NO: 1637986 - RNA, 19 nt, Artificial Sequence
  Description of Artificial Sequence: Synthetic oligonucleotide
aauagcuuuguaggaaaau

SEQ ID NO: 1637987 - RNA, 19 nt, Artificial Sequence
  Description of Artificial Sequence: Synthetic oligonucleotide
caacuaauuucgucuuucc

SEQ ID NO: 1637988 - RNA, 19 nt, Artificial Sequence
  Description of Artificial Sequence: Synthetic oligonucleotide
cugaacuaguauaccacug

SEQ ID NO: 1637989 - RNA, 19 nt, Artificial Sequence
  Description of Artificial Sequence: Synthetic oligonucleotide
auugcauauuguucuuuca

SEQ ID NO: 1637990 - RNA, 19 nt, Artificial Sequence
  Description of Artificial Sequence: Synthetic oligonucleotide
aucauuguaauugcuuugu

SEQ ID NO: 1637991 - RNA, 19 nt, Artificial Sequence
  Description of Artificial Sequence: Synthetic oligonucleotide
ugucacuguugcaucaccu

SEQ ID NO: 1637992 - RNA, 19 nt, Artificial Sequence
  Description of Artificial Sequence: Synthetic oligonucleotide
guuuuaacauuacggacaa

SEQ ID NO: 1637993 - RNA, 19 nt, Artificial Sequence
  Description of Artificial Sequence: Synthetic oligonucleotide
guucaauugaucagugaug

SEQ ID NO: 1637994 - RNA, 19 nt, Artificial Sequence
  Description of Artificial Sequence: Synthetic oligonucleotide
ugggacuggagugaugaag

SEQ ID NO: 1637995 - RNA, 19 nt, Artificial Sequence
  Description of Artificial Sequence: Synthetic oligonucleotide
aacuaguauaccacugacu

SEQ ID NO: 1637996 - RNA, 19 nt, Artificial Sequence
  Description of Artificial Sequence: Synthetic oligonucleotide
uuucaauuccuguucuuuu

SEQ ID NO: 1637997 - RNA, 19 nt, Artificial Sequence
  Description of Artificial Sequence: Synthetic oligonucleotide
uggguugucucccacuaaa

SEQ ID NO: 1637998 - RNA, 19 nt, Artificial Sequence
  Description of Artificial Sequence: Synthetic oligonucleotide
uacaguuuacauggcacca

SEQ ID NO: 1637999 - RNA, 19 nt, Artificial Sequence
  Description of Artificial Sequence: Synthetic oligonucleotide
ucaguucuacaaugauucc

SEQ ID NO: 1638000 - RNA, 19 nt, Artificial Sequence
  Description of Artificial Sequence: Synthetic oligonucleotide
ugggaauaccugcagccac

SEQ ID NO: 1638001 - RNA, 19 nt, Artificial Sequence
  Description of Artificial Sequence: Synthetic oligonucleotide
aucuaguaaaugaugcucu

SEQ ID NO: 1638002 - RNA, 19 nt, Artificial Sequence
  Description of Artificial Sequence: Synthetic oligonucleotide
cugcagauaccuacagccg

SEQ ID NO: 1638003 - RNA, 19 nt, Artificial Sequence
  Description of Artificial Sequence: Synthetic oligonucleotide
uacggacaaauauccauaa

SEQ ID NO: 1638004 - RNA, 19 nt, Artificial Sequence
  Description of Artificial Sequence: Synthetic oligonucleotide
auuaucauuguaauugcuu

SEQ ID NO: 1638005 - RNA, 19 nt, Artificial Sequence
  Description of Artificial Sequence: Synthetic oligonucleotide
aguugauacccacaucaau

SEQ ID NO: 1638006 - RNA, 19 nt, Artificial Sequence
  Description of Artificial Sequence: Synthetic oligonucleotide
uucgucuuuccaguuguag

SEQ ID NO: 1638007 - RNA, 19 nt, Artificial Sequence
  Description of Artificial Sequence: Synthetic oligonucleotide
auggccaccgucauggguc

SEQ ID NO: 1638008 - RNA, 19 nt, Artificial Sequence
  Description of Artificial Sequence: Synthetic oligonucleotide
ugauaauaucugccagcug

SEQ ID NO: 1638009 - RNA, 19 nt, Artificial Sequence
  Description of Artificial Sequence: Synthetic oligonucleotide
aauugaucagugaugucua

SEQ ID NO: 1638010 - RNA, 19 nt, Artificial Sequence
  Description of Artificial Sequence: Synthetic oligonucleotide
uuggcgguugucaaauaaa

SEQ ID NO: 1638011 - RNA, 19 nt, Artificial Sequence
  Description of Artificial Sequence: Synthetic oligonucleotide
acguucuuggaucuuccug

SEQ ID NO: 1638012 - RNA, 19 nt, Artificial Sequence
  Description of Artificial Sequence: Synthetic oligonucleotide
gcauauuguucuuucauca

SEQ ID NO: 1638013 - RNA, 19 nt, Artificial Sequence
  Description of Artificial Sequence: Synthetic oligonucleotide
ugauacccacaucaaugac

SEQ ID NO: 1638014 - RNA, 19 nt, Artificial Sequence
  Description of Artificial Sequence: Synthetic oligonucleotide
guauaccacugacucuugg

SEQ ID NO: 1638015 - RNA, 19 nt, Artificial Sequence
  Description of Artificial Sequence: Synthetic oligonucleotide
cuuuuaucuuguuccugac

SEQ ID NO: 1638016 - RNA, 19 nt, Artificial Sequence
  Description of Artificial Sequence: Synthetic oligonucleotide
uggcgguugucaaauaaau

SEQ ID NO: 1638017 - RNA, 19 nt, Artificial Sequence
  Description of Artificial Sequence: Synthetic oligonucleotide
guuccugacauaggugugg

SEQ ID NO: 1638018 - RNA, 19 nt, Artificial Sequence
  Description of Artificial Sequence: Synthetic oligonucleotide
uugucacuguugcaucacc

SEQ ID NO: 1638019 - RNA, 19 nt, Artificial Sequence
  Description of Artificial Sequence: Synthetic oligonucleotide
acuauuuguuguguguacu

SEQ ID NO: 1638020 - RNA, 19 nt, Artificial Sequence
  Description of Artificial Sequence: Synthetic oligonucleotide
gucuaaaaguuccuccuga

SEQ ID NO: 1638021 - RNA, 19 nt, Artificial Sequence
  Description of Artificial Sequence: Synthetic oligonucleotide
uuggguccauguucaauug

SEQ ID NO: 1638022 - RNA, 19 nt, Artificial Sequence
  Description of Artificial Sequence: Synthetic oligonucleotide
cacuauuuguuguguguac

SEQ ID NO: 1638023 - RNA, 19 nt, Artificial Sequence
  Description of Artificial Sequence: Synthetic oligonucleotide
cuaacaaggaauccauaaa

SEQ ID NO: 1638024 - RNA, 19 nt, Artificial Sequence
  Description of Artificial Sequence: Synthetic oligonucleotide
cuaguaaaugaugcucuug

SEQ ID NO: 1638025 - RNA, 19 nt, Artificial Sequence
  Description of Artificial Sequence: Synthetic oligonucleotide
uaguugauacccacaucaa

SEQ ID NO: 1638026 - RNA, 19 nt, Artificial Sequence
  Description of Artificial Sequence: Synthetic oligonucleotide
uguaaucaaucugggaaua

SEQ ID NO: 1638027 - RNA, 19 nt, Artificial Sequence
  Description of Artificial Sequence: Synthetic oligonucleotide
caauugaucagugaugucu

SEQ ID NO: 1638028 - RNA, 19 nt, Artificial Sequence
  Description of Artificial Sequence: Synthetic oligonucleotide
ucccaagagcaauccauga

SEQ ID NO: 1638029 - RNA, 19 nt, Artificial Sequence
  Description of Artificial Sequence: Synthetic oligonucleotide
auccauaaaguuguguaaa

SEQ ID NO: 1638030 - RNA, 19 nt, Artificial Sequence
  Description of Artificial Sequence: Synthetic oligonucleotide
ugcgccuucucuaaccaua

SEQ ID NO: 1638031 - RNA, 19 nt, Artificial Sequence
  Description of Artificial Sequence: Synthetic oligonucleotide
acauagguguggcuugcug

SEQ ID NO: 1638032 - RNA, 19 nt, Artificial Sequence
  Description of Artificial Sequence: Synthetic oligonucleotide
uuguuguguguacuccacu

SEQ ID NO: 1638033 - RNA, 19 nt, Artificial Sequence
  Description of Artificial Sequence: Synthetic oligonucleotide
ccuucucuaaccauaucag

SEQ ID NO: 1638034 - RNA, 19 nt, Artificial Sequence
  Description of Artificial Sequence: Synthetic oligonucleotide
ugaugucuaaaaguuccuc

SEQ ID NO: 1638035 - RNA, 19 nt, Artificial Sequence
  Description of Artificial Sequence: Synthetic oligonucleotide
agcaauccaugauuucaca

SEQ ID NO: 1638036 - RNA, 19 nt, Artificial Sequence
  Description of Artificial Sequence: Synthetic oligonucleotide
guucuuggaucuuccugcc

SEQ ID NO: 1638037 - RNA, 19 nt, Artificial Sequence
  Description of Artificial Sequence: Synthetic oligonucleotide
uaucugccagcugagugug

SEQ ID NO: 1638038 - RNA, 19 nt, Artificial Sequence
  Description of Artificial Sequence: Synthetic oligonucleotide
cuaaaaguuccuccugaga

SEQ ID NO: 1638039 - RNA, 19 nt, Artificial Sequence
  Description of Artificial Sequence: Synthetic oligonucleotide
auaccugcagccacuauga

SEQ ID NO: 1638040 - RNA, 19 nt, Artificial Sequence
  Description of Artificial Sequence: Synthetic oligonucleotide
gagcaauccaugauuucac

SEQ ID NO: 1638041 - RNA, 19 nt, Artificial Sequence
  Description of Artificial Sequence: Synthetic oligonucleotide
uggguccauguucaauuga

SEQ ID NO: 1638042 - RNA, 19 nt, Artificial Sequence
  Description of Artificial Sequence: Synthetic oligonucleotide
caugauuucacaccuugcu

SEQ ID NO: 1638043 - RNA, 19 nt, Artificial Sequence
  Description of Artificial Sequence: Synthetic oligonucleotide
uaccacugacucuuggguc

SEQ ID NO: 1638044 - RNA, 19 nt, Artificial Sequence
  Description of Artificial Sequence: Synthetic oligonucleotide
gacuggagugaugaagcug

SEQ ID NO: 1638045 - RNA, 19 nt, Artificial Sequence
  Description of Artificial Sequence: Synthetic oligonucleotide
uaccuacagccgaagcagc

SEQ ID NO: 1638046 - RNA, 19 nt, Artificial Sequence
  Description of Artificial Sequence: Synthetic oligonucleotide
cauacuauaugugauacuu

SEQ ID NO: 1638047 - RNA, 19 nt, Artificial Sequence
  Description of Artificial Sequence: Synthetic oligonucleotide
cagugaugucuaaaaguuc

SEQ ID NO: 1638048 - RNA, 19 nt, Artificial Sequence
  Description of Artificial Sequence: Synthetic oligonucleotide
gugauacuuagguuauguc

SEQ ID NO: 1638049 - RNA, 19 nt, Artificial Sequence
  Description of Artificial Sequence: Synthetic oligonucleotide
uugaucagugaugucuaaa

SEQ ID NO: 1638050 - RNA, 19 nt, Artificial Sequence
  Description of Artificial Sequence: Synthetic oligonucleotide
ucugugugcuauugucacu

SEQ ID NO: 1638051 - RNA, 19 nt, Artificial Sequence
  Description of Artificial Sequence: Synthetic oligonucleotide
ggcuucaugucuccugccg

SEQ ID NO: 1638052 - RNA, 19 nt, Artificial Sequence
  Description of Artificial Sequence: Synthetic oligonucleotide
cugagaugauaauggcuuc

SEQ ID NO: 1638053 - RNA, 19 nt, Artificial Sequence
  Description of Artificial Sequence: Synthetic oligonucleotide
cauaguugauacccacauc

SEQ ID NO: 1638054 - RNA, 19 nt, Artificial Sequence
  Description of Artificial Sequence: Synthetic oligonucleotide
augauuccacucaugaaaa

SEQ ID NO: 1638055 - RNA, 19 nt, Artificial Sequence
  Description of Artificial Sequence: Synthetic oligonucleotide
auggcgaucggcaugccca

SEQ ID NO: 1638056 - RNA, 19 nt, Artificial Sequence
  Description of Artificial Sequence: Synthetic oligonucleotide
cauauuguucuuucaucaa

SEQ ID NO: 1638057 - RNA, 19 nt, Artificial Sequence
  Description of Artificial Sequence: Synthetic oligonucleotide
ugcuauugucacuguugca

SEQ ID NO: 1638058 - RNA, 19 nt, Artificial Sequence
  Description of Artificial Sequence: Synthetic oligonucleotide
ucaauugaucagugauguc

SEQ ID NO: 1638059 - RNA, 19 nt, Artificial Sequence
  Description of Artificial Sequence: Synthetic oligonucleotide
gaaagaauuuggcgguugu

SEQ ID NO: 1638060 - RNA, 19 nt, Artificial Sequence
  Description of Artificial Sequence: Synthetic oligonucleotide
gggacuggagugaugaagc

SEQ ID NO: 1638061 - RNA, 19 nt, Artificial Sequence
  Description of Artificial Sequence: Synthetic oligonucleotide
uuaucuuguuccugacaua

SEQ ID NO: 1638062 - RNA, 19 nt, Artificial Sequence
  Description of Artificial Sequence: Synthetic oligonucleotide
gaauuuggcgguugucaaa

SEQ ID NO: 1638063 - RNA, 19 nt, Artificial Sequence
  Description of Artificial Sequence: Synthetic oligonucleotide
ucaugcucuccauccgugu

SEQ ID NO: 1638064 - RNA, 19 nt, Artificial Sequence
  Description of Artificial Sequence: Synthetic oligonucleotide
ggcaugcccacguucuugg

SEQ ID NO: 1638065 - RNA, 19 nt, Artificial Sequence
  Description of Artificial Sequence: Synthetic oligonucleotide
gcaauccaugauuucacac

SEQ ID NO: 1638066 - RNA, 19 nt, Artificial Sequence
  Description of Artificial Sequence: Synthetic oligonucleotide
guaaucaaucugggaauac

SEQ ID NO: 1638067 - RNA, 19 nt, Artificial Sequence
  Description of Artificial Sequence: Synthetic oligonucleotide
caugcucuccauccgugug

SEQ ID NO: 1638068 - RNA, 19 nt, Artificial Sequence
  Description of Artificial Sequence: Synthetic oligonucleotide
ccacuaugauaauaucugc

SEQ ID NO: 1638069 - RNA, 19 nt, Artificial Sequence
  Description of Artificial Sequence: Synthetic oligonucleotide
gcucacugcagauaccuac

SEQ ID NO: 1638070 - RNA, 19 nt, Artificial Sequence
  Description of Artificial Sequence: Synthetic oligonucleotide
uaauuucgucuuuccaguu

SEQ ID NO: 1638071 - RNA, 19 nt, Artificial Sequence
  Description of Artificial Sequence: Synthetic oligonucleotide
uguuucaauuccuguucuu

SEQ ID NO: 1638072 - RNA, 19 nt, Artificial Sequence
  Description of Artificial Sequence: Synthetic oligonucleotide
ugacauagguguggcuugc

SEQ ID NO: 1638073 - RNA, 19 nt, Artificial Sequence
  Description of Artificial Sequence: Synthetic oligonucleotide
acucuuggguccauguuca

SEQ ID NO: 1638074 - RNA, 19 nt, Artificial Sequence
  Description of Artificial Sequence: Synthetic oligonucleotide
uccaacuaauuucgucuuu

SEQ ID NO: 1638075 - RNA, 19 nt, Artificial Sequence
  Description of Artificial Sequence: Synthetic oligonucleotide
uaauaucugccagcugagu

SEQ ID NO: 1638076 - RNA, 19 nt, Artificial Sequence
  Description of Artificial Sequence: Synthetic oligonucleotide
cauuacggacaaauaucca

SEQ ID NO: 1638077 - RNA, 19 nt, Artificial Sequence
  Description of Artificial Sequence: Synthetic oligonucleotide
acauggcaccaauuuggcu

SEQ ID NO: 1638078 - RNA, 19 nt, Artificial Sequence
  Description of Artificial Sequence: Synthetic oligonucleotide
caguucuacaaugauucca

SEQ ID NO: 1638079 - RNA, 19 nt, Artificial Sequence
  Description of Artificial Sequence: Synthetic oligonucleotide
caauuuggcugacaaaagu

SEQ ID NO: 1638080 - RNA, 19 nt, Artificial Sequence
  Description of Artificial Sequence: Synthetic oligonucleotide
ugggucccacgccuccugg

SEQ ID NO: 1638081 - RNA, 19 nt, Artificial Sequence
  Description of Artificial Sequence: Synthetic oligonucleotide
acagcugcgccuucucuaa

SEQ ID NO: 1638082 - RNA, 19 nt, Artificial Sequence
  Description of Artificial Sequence: Synthetic oligonucleotide
ccaauuuggcugacaaaag

SEQ ID NO: 1638083 - RNA, 19 nt, Artificial Sequence
  Description of Artificial Sequence: Synthetic oligonucleotide
auugaucagugaugucuaa

SEQ ID NO: 1638084 - RNA, 19 nt, Artificial Sequence
  Description of Artificial Sequence: Synthetic oligonucleotide
cauggcgaucggcaugccc

SEQ ID NO: 1638085 - RNA, 19 nt, Artificial Sequence
  Description of Artificial Sequence: Synthetic oligonucleotide
cuguucccaagagcaaucc

SEQ ID NO: 1638086 - RNA, 19 nt, Artificial Sequence
  Description of Artificial Sequence: Synthetic oligonucleotide
gaucggcaugcccacguuc

SEQ ID NO: 1638087 - RNA, 19 nt, Artificial Sequence
  Description of Artificial Sequence: Synthetic oligonucleotide
cagcacuauuuguugugug

SEQ ID NO: 1638088 - RNA, 19 nt, Artificial Sequence
  Description of Artificial Sequence: Synthetic oligonucleotide
ugacucuuggguccauguu

SEQ ID NO: 1638089 - RNA, 19 nt, Artificial Sequence
  Description of Artificial Sequence: Synthetic oligonucleotide
guguaaauaaucaguucua

SEQ ID NO: 1638090 - RNA, 19 nt, Artificial Sequence
  Description of Artificial Sequence: Synthetic oligonucleotide
gauacugagguggggccuc

SEQ ID NO: 1638091 - RNA, 19 nt, Artificial Sequence
  Description of Artificial Sequence: Synthetic oligonucleotide
cuacuaacaaggaauccau

SEQ ID NO: 1638092 - RNA, 19 nt, Artificial Sequence
  Description of Artificial Sequence: Synthetic oligonucleotide
guguaucugugugcuauug

SEQ ID NO: 1638093 - RNA, 19 nt, Artificial Sequence
  Description of Artificial Sequence: Synthetic oligonucleotide
cauaucagcuguaaucaau

SEQ ID NO: 1638094 - RNA, 19 nt, Artificial Sequence
  Description of Artificial Sequence: Synthetic oligonucleotide
aagcgcgcucggccacucc

SEQ ID NO: 1638095 - RNA, 19 nt, Artificial Sequence
  Description of Artificial Sequence: Synthetic oligonucleotide
ugugugcuauugucacugu

SEQ ID NO: 1638096 - RNA, 19 nt, Artificial Sequence
  Description of Artificial Sequence: Synthetic oligonucleotide
ugucucccacuaaaaugau

SEQ ID NO: 1638097 - RNA, 19 nt, Artificial Sequence
  Description of Artificial Sequence: Synthetic oligonucleotide
cuaaccauaucagcuguaa

SEQ ID NO: 1638098 - RNA, 19 nt, Artificial Sequence
  Description of Artificial Sequence: Synthetic oligonucleotide
aagggguagcugaacuagu

SEQ ID NO: 1638099 - RNA, 19 nt, Artificial Sequence
  Description of Artificial Sequence: Synthetic oligonucleotide
acggacaaauauccauaaa

SEQ ID NO: 1638100 - RNA, 19 nt, Artificial Sequence
  Description of Artificial Sequence: Synthetic oligonucleotide
uucacaccuugcuguauuu

SEQ ID NO: 1638101 - RNA, 19 nt, Artificial Sequence
  Description of Artificial Sequence: Synthetic oligonucleotide
ugcucuccauccgugugca

SEQ ID NO: 1638102 - RNA, 19 nt, Artificial Sequence
  Description of Artificial Sequence: Synthetic oligonucleotide
cuuggguccauguucaauu

SEQ ID NO: 1638103 - RNA, 19 nt, Artificial Sequence
  Description of Artificial Sequence: Synthetic oligonucleotide
auauaucauuaaauaugaa

SEQ ID NO: 1638104 - RNA, 19 nt, Artificial Sequence
  Description of Artificial Sequence: Synthetic oligonucleotide
cuucagaagcauggccacc

SEQ ID NO: 1638105 - RNA, 19 nt, Artificial Sequence
  Description of Artificial Sequence: Synthetic oligonucleotide
ugcccacguucuuggaucu

SEQ ID NO: 1638106 - RNA, 19 nt, Artificial Sequence
  Description of Artificial Sequence: Synthetic oligonucleotide
cuuggcagccagaagugua

SEQ ID NO: 1638107 - RNA, 19 nt, Artificial Sequence
  Description of Artificial Sequence: Synthetic oligonucleotide
acaguuuacauggcaccaa

SEQ ID NO: 1638108 - RNA, 19 nt, Artificial Sequence
  Description of Artificial Sequence: Synthetic oligonucleotide
ccaugauuucacaccuugc

SEQ ID NO: 1638109 - RNA, 19 nt, Artificial Sequence
  Description of Artificial Sequence: Synthetic oligonucleotide
cuuccugccacaaccacau

SEQ ID NO: 1638110 - RNA, 19 nt, Artificial Sequence
  Description of Artificial Sequence: Synthetic oligonucleotide
ucacaccuugcuguauuuc

SEQ ID NO: 1638111 - RNA, 19 nt, Artificial Sequence
  Description of Artificial Sequence: Synthetic oligonucleotide
cacaccuugcuguauuucu

SEQ ID NO: 1638112 - RNA, 19 nt, Artificial Sequence
  Description of Artificial Sequence: Synthetic oligonucleotide
uuucgucuuuccaguugua

SEQ ID NO: 1638113 - RNA, 19 nt, Artificial Sequence
  Description of Artificial Sequence: Synthetic oligonucleotide
cacuccaggggcccucgcc

SEQ ID NO: 1638114 - RNA, 19 nt, Artificial Sequence
  Description of Artificial Sequence: Synthetic oligonucleotide
cagauaccuacagccgaag

SEQ ID NO: 1638115 - RNA, 19 nt, Artificial Sequence
  Description of Artificial Sequence: Synthetic oligonucleotide
agcgcgcucggccacucca

SEQ ID NO: 1638116 - RNA, 19 nt, Artificial Sequence
  Description of Artificial Sequence: Synthetic oligonucleotide
ggguagcugaacuaguaua

SEQ ID NO: 1638117 - RNA, 19 nt, Artificial Sequence
  Description of Artificial Sequence: Synthetic oligonucleotide
guaggaaaauagaaagaau

SEQ ID NO: 1638118 - RNA, 19 nt, Artificial Sequence
  Description of Artificial Sequence: Synthetic oligonucleotide
gcaccaauuuggcugacaa

SEQ ID NO: 1638119 - RNA, 19 nt, Artificial Sequence
  Description of Artificial Sequence: Synthetic oligonucleotide
uguggaccuucaguuguuc

SEQ ID NO: 1638120 - RNA, 19 nt, Artificial Sequence
  Description of Artificial Sequence: Synthetic oligonucleotide
gaaugagcucacugcagau

SEQ ID NO: 1638121 - RNA, 19 nt, Artificial Sequence
  Description of Artificial Sequence: Synthetic oligonucleotide
ccaacuaauuucgucuuuc

SEQ ID NO: 1638122 - RNA, 19 nt, Artificial Sequence
  Description of Artificial Sequence: Synthetic oligonucleotide
gcuauugucacuguugcau

SEQ ID NO: 1638123 - RNA, 19 nt, Artificial Sequence
  Description of Artificial Sequence: Synthetic oligonucleotide
gguguggcuugcuggguug

SEQ ID NO: 1638124 - RNA, 19 nt, Artificial Sequence
  Description of Artificial Sequence: Synthetic oligonucleotide
cuccaggggcccucgccgg

SEQ ID NO: 1638125 - RNA, 19 nt, Artificial Sequence
  Description of Artificial Sequence: Synthetic oligonucleotide
cgaagccccgccaagcgcg

SEQ ID NO: 1638126 - RNA, 19 nt, Artificial Sequence
  Description of Artificial Sequence: Synthetic oligonucleotide
augggucccacgccuccug

SEQ ID NO: 1638127 - RNA, 19 nt, Artificial Sequence
  Description of Artificial Sequence: Synthetic oligonucleotide
aguauaccacugacucuug

SEQ ID NO: 1638128 - RNA, 19 nt, Artificial Sequence
  Description of Artificial Sequence: Synthetic oligonucleotide
cucuaaccauaucagcugu

SEQ ID NO: 1638129 - RNA, 19 nt, Artificial Sequence
  Description of Artificial Sequence: Synthetic oligonucleotide
cgguccuaggcccaggccg

SEQ ID NO: 1638130 - RNA, 19 nt, Artificial Sequence
  Description of Artificial Sequence: Synthetic oligonucleotide
augugauacuuagguuaug

SEQ ID NO: 1638131 - RNA, 19 nt, Artificial Sequence
  Description of Artificial Sequence: Synthetic oligonucleotide
gcugaacuaguauaccacu

SEQ ID NO: 1638132 - RNA, 19 nt, Artificial Sequence
  Description of Artificial Sequence: Synthetic oligonucleotide
guguguaucugugugcuau

SEQ ID NO: 1638133 - RNA, 19 nt, Artificial Sequence
  Description of Artificial Sequence: Synthetic oligonucleotide
uggcgaucggcaugcccac

SEQ ID NO: 1638134 - RNA, 19 nt, Artificial Sequence
  Description of Artificial Sequence: Synthetic oligonucleotide
uacagccgaagcagcuuuu

SEQ ID NO: 1638135 - RNA, 19 nt, Artificial Sequence
  Description of Artificial Sequence: Synthetic oligonucleotide
accuacagccgaagcagcu

SEQ ID NO: 1638136 - RNA, 19 nt, Artificial Sequence
  Description of Artificial Sequence: Synthetic oligonucleotide
ucggccacuccaggggccc

SEQ ID NO: 1638137 - RNA, 19 nt, Artificial Sequence
  Description of Artificial Sequence: Synthetic oligonucleotide
cugggaauaccugcagcca

SEQ ID NO: 1638138 - RNA, 19 nt, Artificial Sequence
  Description of Artificial Sequence: Synthetic oligonucleotide
ccuguucccaagagcaauc

SEQ ID NO: 1638139 - RNA, 19 nt, Artificial Sequence
  Description of Artificial Sequence: Synthetic oligonucleotide
ucuuuucucuggggcaauu

SEQ ID NO: 1638140 - RNA, 19 nt, Artificial Sequence
  Description of Artificial Sequence: Synthetic oligonucleotide
aagaagccgcgggcccgcg

SEQ ID NO: 1638141 - RNA, 19 nt, Artificial Sequence
  Description of Artificial Sequence: Synthetic oligonucleotide
auuuggcgguugucaaaua

SEQ ID NO: 1638142 - RNA, 19 nt, Artificial Sequence
  Description of Artificial Sequence: Synthetic oligonucleotide
ccacguucuuggaucuucc

SEQ ID NO: 1638143 - RNA, 19 nt, Artificial Sequence
  Description of Artificial Sequence: Synthetic oligonucleotide
gccuccuguucccaagagc

SEQ ID NO: 1638144 - RNA, 19 nt, Artificial Sequence
  Description of Artificial Sequence: Synthetic oligonucleotide
uaccugcagccacuaugau

SEQ ID NO: 1638145 - RNA, 19 nt, Artificial Sequence
  Description of Artificial Sequence: Synthetic oligonucleotide
ggcuuuagaaugagcucac

SEQ ID NO: 1638146 - RNA, 19 nt, Artificial Sequence
  Description of Artificial Sequence: Synthetic oligonucleotide
cugacucuuggguccaugu

SEQ ID NO: 1638147 - RNA, 19 nt, Artificial Sequence
  Description of Artificial Sequence: Synthetic oligonucleotide
agggguagcugaacuagua

SEQ ID NO: 1638148 - RNA, 19 nt, Artificial Sequence
  Description of Artificial Sequence: Synthetic oligonucleotide
gguugucucccacuaaaau

SEQ ID NO: 1638149 - RNA, 19 nt, Artificial Sequence
  Description of Artificial Sequence: Synthetic oligonucleotide
uccaggggcccucgccggu

SEQ ID NO: 1638150 - RNA, 19 nt, Artificial Sequence
  Description of Artificial Sequence: Synthetic oligonucleotide
guuguucucugggugugua

SEQ ID NO: 1638151 - RNA, 19 nt, Artificial Sequence
  Description of Artificial Sequence: Synthetic oligonucleotide
gguccuaggcccaggccgc

SEQ ID NO: 1638152 - RNA, 19 nt, Artificial Sequence
  Description of Artificial Sequence: Synthetic oligonucleotide
gcugcgccuucucuaacca

SEQ ID NO: 1638153 - RNA, 19 nt, Artificial Sequence
  Description of Artificial Sequence: Synthetic oligonucleotide
uguggcuugcuggguuguc

SEQ ID NO: 1638154 - RNA, 19 nt, Artificial Sequence
  Description of Artificial Sequence: Synthetic oligonucleotide
gggucccacgccuccuggg

SEQ ID NO: 1638155 - RNA, 19 nt, Artificial Sequence
  Description of Artificial Sequence: Synthetic oligonucleotide
acagccgaagcagcuuuua

SEQ ID NO: 1638156 - RNA, 19 nt, Artificial Sequence
  Description of Artificial Sequence: Synthetic oligonucleotide
caguuuacauggcaccaau

SEQ ID NO: 1638157 - RNA, 19 nt, Artificial Sequence
  Description of Artificial Sequence: Synthetic oligonucleotide
cuccaacuaauuucgucuu

SEQ ID NO: 1638158 - RNA, 19 nt, Artificial Sequence
  Description of Artificial Sequence: Synthetic oligonucleotide
ucgccaugccucgccgccc

SEQ ID NO: 1638159 - RNA, 19 nt, Artificial Sequence
  Description of Artificial Sequence: Synthetic oligonucleotide
ccucgccgguccuaggccc

SEQ ID NO: 1638160 - RNA, 19 nt, Artificial Sequence
  Description of Artificial Sequence: Synthetic oligonucleotide
acauggucuggaaggggua

SEQ ID NO: 1638161 - RNA, 19 nt, Artificial Sequence
  Description of Artificial Sequence: Synthetic oligonucleotide
aucuuuucucuggggcaau

SEQ ID NO: 1638162 - RNA, 19 nt, Artificial Sequence
  Description of Artificial Sequence: Synthetic oligonucleotide
ggaccuucaguuguucucu

SEQ ID NO: 1638163 - RNA, 19 nt, Artificial Sequence
  Description of Artificial Sequence: Synthetic oligonucleotide
cuccuguucccaagagcaa

SEQ ID NO: 1638164 - RNA, 19 nt, Artificial Sequence
  Description of Artificial Sequence: Synthetic oligonucleotide
gcgcucggccacuccaggg

SEQ ID NO: 1638165 - RNA, 19 nt, Artificial Sequence
  Description of Artificial Sequence: Synthetic oligonucleotide
ggucccacgccuccuggga

SEQ ID NO: 1638166 - RNA, 19 nt, Artificial Sequence
  Description of Artificial Sequence: Synthetic oligonucleotide
cucccacuaaaaugauacu

SEQ ID NO: 1638167 - RNA, 19 nt, Artificial Sequence
  Description of Artificial Sequence: Synthetic oligonucleotide
ggcgcucaugcucuccauc

SEQ ID NO: 1638168 - RNA, 19 nt, Artificial Sequence
  Description of Artificial Sequence: Synthetic oligonucleotide
caggggcccucgccggucc

SEQ ID NO: 1638169 - RNA, 19 nt, Artificial Sequence
  Description of Artificial Sequence: Synthetic oligonucleotide
cugggcgcucaugcucucc

SEQ ID NO: 1638170 - RNA, 19 nt, Artificial Sequence
  Description of Artificial Sequence: Synthetic oligonucleotide
gcccucgccgguccuaggc

SEQ ID NO: 1638171 - RNA, 19 nt, Artificial Sequence
  Description of Artificial Sequence: Synthetic oligonucleotide
ccgccaagcgcgcucggcc

SEQ ID NO: 1638172 - RNA, 19 nt, Artificial Sequence
  Description of Artificial Sequence: Synthetic oligonucleotide
gucaugggucccacgccuc

SEQ ID NO: 1638173 - RNA, 19 nt, Artificial Sequence
  Description of Artificial Sequence: Synthetic oligonucleotide
gucucccacuaaaaugaua

SEQ ID NO: 1638174 - RNA, 19 nt, Artificial Sequence
  Description of Artificial Sequence: Synthetic oligonucleotide
gcagauaccuacagccgaa

SEQ ID NO: 1638175 - RNA, 19 nt, Artificial Sequence
  Description of Artificial Sequence: Synthetic oligonucleotide
ggcgguugucaaauaaaua

SEQ ID NO: 1638176 - RNA, 19 nt, Artificial Sequence
  Description of Artificial Sequence: Synthetic oligonucleotide
ccgucaugggucccacgcc

SEQ ID NO: 1638177 - RNA, 19 nt, Artificial Sequence
  Description of Artificial Sequence: Synthetic oligonucleotide
cagcugcgccuucucuaac

SEQ ID NO: 1638178 - RNA, 19 nt, Artificial Sequence
  Description of Artificial Sequence: Synthetic oligonucleotide
guaggaucuugaacauagu

SEQ ID NO: 1638179 - RNA, 19 nt, Artificial Sequence
  Description of Artificial Sequence: Synthetic oligonucleotide
gccccggagcagcaagaag

SEQ ID NO: 1638180 - RNA, 19 nt, Artificial Sequence
  Description of Artificial Sequence: Synthetic oligonucleotide
cccacguucuuggaucuuc

SEQ ID NO: 1638181 - RNA, 19 nt, Artificial Sequence
  Description of Artificial Sequence: Synthetic oligonucleotide
caucuccaacuaauuucgu

SEQ ID NO: 1638182 - RNA, 19 nt, Artificial Sequence
  Description of Artificial Sequence: Synthetic oligonucleotide
cccgcgucgccaugccucg

SEQ ID NO: 1638183 - RNA, 19 nt, Artificial Sequence
  Description of Artificial Sequence: Synthetic oligonucleotide
ucgccgguccuaggcccag

SEQ ID NO: 1638184 - RNA, 19 nt, Artificial Sequence
  Description of Artificial Sequence: Synthetic oligonucleotide
caugccucgccgcccaccu

SEQ ID NO: 1638185 - RNA, 19 nt, Artificial Sequence
  Description of Artificial Sequence: Synthetic oligonucleotide
gccgguccuaggcccaggc

SEQ ID NO: 1638186 - RNA, 19 nt, Artificial Sequence
  Description of Artificial Sequence: Synthetic oligonucleotide
ccgaagccccgccaagcgc

SEQ ID NO: 1638187 - RNA, 19 nt, Artificial Sequence
  Description of Artificial Sequence: Synthetic oligonucleotide
cucgccgguccuaggccca

SEQ ID NO: 1638188 - RNA, 19 nt, Artificial Sequence
  Description of Artificial Sequence: Synthetic oligonucleotide
gugugcuauugucacuguu

SEQ ID NO: 1638189 - RNA, 19 nt, Artificial Sequence
  Description of Artificial Sequence: Synthetic oligonucleotide
gggguagcugaacuaguau

SEQ ID NO: 1638190 - RNA, 19 nt, Artificial Sequence
  Description of Artificial Sequence: Synthetic oligonucleotide
cacguucuuggaucuuccu

SEQ ID NO: 1638191 - RNA, 19 nt, Artificial Sequence
  Description of Artificial Sequence: Synthetic oligonucleotide
ccauaucagcuguaaucaa

SEQ ID NO: 1638192 - RNA, 19 nt, Artificial Sequence
  Description of Artificial Sequence: Synthetic oligonucleotide
gacauagguguggcuugcu

SEQ ID NO: 1638193 - RNA, 19 nt, Artificial Sequence
  Description of Artificial Sequence: Synthetic oligonucleotide
ggacuggagugaugaagcu

SEQ ID NO: 1638194 - RNA, 19 nt, Artificial Sequence
  Description of Artificial Sequence: Synthetic oligonucleotide
ggaauaccugcagccacua

SEQ ID NO: 1638195 - RNA, 19 nt, Artificial Sequence
  Description of Artificial Sequence: Synthetic oligonucleotide
cacgccuccugggacugga

SEQ ID NO: 1638196 - RNA, 19 nt, Artificial Sequence
  Description of Artificial Sequence: Synthetic oligonucleotide
gggaauaccugcagccacu

SEQ ID NO: 1638197 - RNA, 19 nt, Artificial Sequence
  Description of Artificial Sequence: Synthetic oligonucleotide
gguguguaucugugugcua

SEQ ID NO: 1638198 - RNA, 19 nt, Artificial Sequence
  Description of Artificial Sequence: Synthetic oligonucleotide
ggcgaucggcaugcccacg

SEQ ID NO: 1638199 - RNA, 19 nt, Artificial Sequence
  Description of Artificial Sequence: Synthetic oligonucleotide
ccggagcagcaagaagccg

SEQ ID NO: 1638200 - RNA, 19 nt, Artificial Sequence
  Description of Artificial Sequence: Synthetic oligonucleotide
uggcaccaauuuggcugac

SEQ ID NO: 1638201 - RNA, 19 nt, Artificial Sequence
  Description of Artificial Sequence: Synthetic oligonucleotide
ccugacauagguguggcuu

SEQ ID NO: 1638202 - RNA, 19 nt, Artificial Sequence
  Description of Artificial Sequence: Synthetic oligonucleotide
caagcgcgcucggccacuc

SEQ ID NO: 1638203 - RNA, 19 nt, Artificial Sequence
  Description of Artificial Sequence: Synthetic oligonucleotide
gccaagcgcgcucggccac

SEQ ID NO: 1638204 - RNA, 19 nt, Artificial Sequence
  Description of Artificial Sequence: Synthetic oligonucleotide
gcgaucggcaugcccacgu

SEQ ID NO: 1638205 - RNA, 19 nt, Artificial Sequence
  Description of Artificial Sequence: Synthetic oligonucleotide
ccgcccaccuccgaggguc

SEQ ID NO: 1638206 - RNA, 19 nt, Artificial Sequence
  Description of Artificial Sequence: Synthetic oligonucleotide
gcccgcgucgccaugccuc

SEQ ID NO: 1638207 - RNA, 19 nt, Artificial Sequence
  Description of Artificial Sequence: Synthetic oligonucleotide
ccacugugucaucuaguaa

SEQ ID NO: 1638208 - RNA, 19 nt, Artificial Sequence
  Description of Artificial Sequence: Synthetic oligonucleotide
gccccgccaagcgcgcucg

SEQ ID NO: 1638209 - RNA, 19 nt, Artificial Sequence
  Description of Artificial Sequence: Synthetic oligonucleotide
aggggcccucgccgguccu

SEQ ID NO: 1638210 - RNA, 19 nt, Artificial Sequence
  Description of Artificial Sequence: Synthetic oligonucleotide
ccacaucuccaacuaauuu

SEQ ID NO: 1638211 - RNA, 19 nt, Artificial Sequence
  Description of Artificial Sequence: Synthetic oligonucleotide
gggcccucgccgguccuag

SEQ ID NO: 1638212 - RNA, 19 nt, Artificial Sequence
  Description of Artificial Sequence: Synthetic oligonucleotide
cgcgucgccaugccucgcc

SEQ ID NO: 1638213 - RNA, 19 nt, Artificial Sequence
  Description of Artificial Sequence: Synthetic oligonucleotide
cgcgcucggccacuccagg

SEQ ID NO: 1638214 - RNA, 19 nt, Artificial Sequence
  Description of Artificial Sequence: Synthetic oligonucleotide
gcgcgcucggccacuccag

SEQ ID NO: 1638215 - RNA, 19 nt, Artificial Sequence
  Description of Artificial Sequence: Synthetic oligonucleotide
gggcccgcgucgccaugcc

SEQ ID NO: 1638216 - RNA, 19 nt, Artificial Sequence
  Description of Artificial Sequence: Synthetic oligonucleotide
cugcgccuucucuaaccau

SEQ ID NO: 1638217 - RNA, 19 nt, Artificial Sequence
  Description of Artificial Sequence: Synthetic oligonucleotide
cgucaugggucccacgccu

SEQ ID NO: 1638218 - RNA, 19 nt, Artificial Sequence
  Description of Artificial Sequence: Synthetic oligonucleotide
gcgccuucucuaaccauau

SEQ ID NO: 1638219 - RNA, 19 nt, Artificial Sequence
  Description of Artificial Sequence: Synthetic oligonucleotide
gcauggcgaucggcaugcc

SEQ ID NO: 1638220 - RNA, 19 nt, Artificial Sequence
  Description of Artificial Sequence: Synthetic oligonucleotide
cgccaagcgcgcucggcca

SEQ ID NO: 1638221 - RNA, 19 nt, Artificial Sequence
  Description of Artificial Sequence: Synthetic oligonucleotide
cgcccaccuccgagggucc

SEQ ID NO: 1638222 - RNA, 19 nt, Artificial Sequence
  Description of Artificial Sequence: Synthetic oligonucleotide
ggccaccgucauggguccc

SEQ ID NO: 1638223 - RNA, 19 nt, Artificial Sequence
  Description of Artificial Sequence: Synthetic oligonucleotide
ccuacagccgaagcagcuu

SEQ ID NO: 1638224 - RNA, 19 nt, Artificial Sequence
  Description of Artificial Sequence: Synthetic oligonucleotide
ccgaagcagcuuuuaucuu

SEQ ID NO: 1638225 - RNA, 19 nt, Artificial Sequence
  Description of Artificial Sequence: Synthetic oligonucleotide
gggcgcucaugcucuccau

SEQ ID NO: 1638226 - RNA, 19 nt, Artificial Sequence
  Description of Artificial Sequence: Synthetic oligonucleotide
cgccaugccucgccgccca

SEQ ID NO: 1638227 - RNA, 19 nt, Artificial Sequence
  Description of Artificial Sequence: Synthetic oligonucleotide
ccgcgucgccaugccucgc

SEQ ID NO: 1638228 - RNA, 19 nt, Artificial Sequence
  Description of Artificial Sequence: Synthetic oligonucleotide
cgccgguccuaggcccagg

SEQ ID NO: 1638229 - RNA, 19 nt, Artificial Sequence
  Description of Artificial Sequence: Synthetic oligonucleotide
ggggcccucgccgguccua

SEQ ID NO: 1638230 - RNA, 19 nt, Artificial Sequence
  Description of Artificial Sequence: Synthetic oligonucleotide
gccgcccaccuccgagggu

SEQ ID NO: 1638231 - RNA, 19 nt, Artificial Sequence
  Description of Artificial Sequence: Synthetic oligonucleotide
ccucgccgcccaccuccga

SEQ ID NO: 1638232 - RNA, 19 nt, Artificial Sequence
  Description of Artificial Sequence: Synthetic oligonucleotide
ccaagcgcgcucggccacu

SEQ ID NO: 1638233 - RNA, 19 nt, Artificial Sequence
  Description of Artificial Sequence: Synthetic oligonucleotide
cgaucggcaugcccacguu

SEQ ID NO: 1638234 - RNA, 19 nt, Artificial Sequence
  Description of Artificial Sequence: Synthetic oligonucleotide
gcccacguucuuggaucuu

SEQ ID NO: 1638235 - RNA, 19 nt, Artificial Sequence
  Description of Artificial Sequence: Synthetic oligonucleotide
aaaucaguugccuccaauc

SEQ ID NO: 1638236 - RNA, 19 nt, Artificial Sequence
  Description of Artificial Sequence: Synthetic oligonucleotide
aaucaguugccuccaaucg

SEQ ID NO: 1638237 - RNA, 19 nt, Artificial Sequence
  Description of Artificial Sequence: Synthetic oligonucleotide
aguguugcagucuugagag

SEQ ID NO: 1638238 - RNA, 19 nt, Artificial Sequence
  Description of Artificial Sequence: Synthetic oligonucleotide
uuugcacucucuuugaggc

SEQ ID NO: 1638239 - RNA, 19 nt, Artificial Sequence
  Description of Artificial Sequence: Synthetic oligonucleotide
gaucugacagggcugaugg

SEQ ID NO: 1638240 - RNA, 19 nt, Artificial Sequence
  Description of Artificial Sequence: Synthetic oligonucleotide
aauacacugagugcaggcc

SEQ ID NO: 1638241 - RNA, 19 nt, Artificial Sequence
  Description of Artificial Sequence: Synthetic oligonucleotide
uauacuccaugccagcagg

SEQ ID NO: 1638242 - RNA, 19 nt, Artificial Sequence
  Description of Artificial Sequence: Synthetic oligonucleotide
aaaacagccuucugagggg

SEQ ID NO: 1638243 - RNA, 19 nt, Artificial Sequence
  Description of Artificial Sequence: Synthetic oligonucleotide
aacauucggagcucuguac

SEQ ID NO: 1638244 - RNA, 19 nt, Artificial Sequence
  Description of Artificial Sequence: Synthetic oligonucleotide
aaugaauguccacuuccuc

SEQ ID NO: 1638245 - RNA, 19 nt, Artificial Sequence
  Description of Artificial Sequence: Synthetic oligonucleotide
uauacgacagagccauugg

SEQ ID NO: 1638246 - RNA, 19 nt, Artificial Sequence
  Description of Artificial Sequence: Synthetic oligonucleotide
ucucuaggaacugaugucg

SEQ ID NO: 1638247 - RNA, 19 nt, Artificial Sequence
  Description of Artificial Sequence: Synthetic oligonucleotide
gauuuucccuccuucagcc

SEQ ID NO: 1638248 - RNA, 19 nt, Artificial Sequence
  Description of Artificial Sequence: Synthetic oligonucleotide
gaugucuuugcaaucaggc

SEQ ID NO: 1638249 - RNA, 19 nt, Artificial Sequence
  Description of Artificial Sequence: Synthetic oligonucleotide
uccgcugaggcacacacag

SEQ ID NO: 1638250 - RNA, 19 nt, Artificial Sequence
  Description of Artificial Sequence: Synthetic oligonucleotide
ugcaagggcacacgcaugg

SEQ ID NO: 1638251 - RNA, 19 nt, Artificial Sequence
  Description of Artificial Sequence: Synthetic oligonucleotide
aaguguugcagucuugaga

SEQ ID NO: 1638252 - RNA, 19 nt, Artificial Sequence
  Description of Artificial Sequence: Synthetic oligonucleotide
uccuuauacuccaugccag

SEQ ID NO: 1638253 - RNA, 19 nt, Artificial Sequence
  Description of Artificial Sequence: Synthetic oligonucleotide
cucacagugguuauauacc

SEQ ID NO: 1638254 - RNA, 19 nt, Artificial Sequence
  Description of Artificial Sequence: Synthetic oligonucleotide
acugaugucggacuccauc

SEQ ID NO: 1638255 - RNA, 19 nt, Artificial Sequence
  Description of Artificial Sequence: Synthetic oligonucleotide
cuuacagucucccacuuug

SEQ ID NO: 1638256 - RNA, 19 nt, Artificial Sequence
  Description of Artificial Sequence: Synthetic oligonucleotide
uuauacuccaugccagcag

SEQ ID NO: 1638257 - RNA, 19 nt, Artificial Sequence
  Description of Artificial Sequence: Synthetic oligonucleotide
acauucggagcucuguacg

SEQ ID NO: 1638258 - RNA, 19 nt, Artificial Sequence
  Description of Artificial Sequence: Synthetic oligonucleotide
ugcacacaagaacauucgg

SEQ ID NO: 1638259 - RNA, 19 nt, Artificial Sequence
  Description of Artificial Sequence: Synthetic oligonucleotide
uucacugauaggcaggcuc

SEQ ID NO: 1638260 - RNA, 19 nt, Artificial Sequence
  Description of Artificial Sequence: Synthetic oligonucleotide
cacuuugacauacugcagc

SEQ ID NO: 1638261 - RNA, 19 nt, Artificial Sequence
  Description of Artificial Sequence: Synthetic oligonucleotide
ugguuauauaccagggaug

SEQ ID NO: 1638262 - RNA, 19 nt, Artificial Sequence
  Description of Artificial Sequence: Synthetic oligonucleotide
guuugcacucucuuugagg

SEQ ID NO: 1638263 - RNA, 19 nt, Artificial Sequence
  Description of Artificial Sequence: Synthetic oligonucleotide
uaaugaauguccacuuccu

SEQ ID NO: 1638264 - RNA, 19 nt, Artificial Sequence
  Description of Artificial Sequence: Synthetic oligonucleotide
acuccauccuccccaauac

SEQ ID NO: 1638265 - RNA, 19 nt, Artificial Sequence
  Description of Artificial Sequence: Synthetic oligonucleotide
auugcugcagauccacagg

SEQ ID NO: 1638266 - RNA, 19 nt, Artificial Sequence
  Description of Artificial Sequence: Synthetic oligonucleotide
ucauacucugggcagcacc

SEQ ID NO: 1638267 - RNA, 19 nt, Artificial Sequence
  Description of Artificial Sequence: Synthetic oligonucleotide
aacaccgaggcacucuuca

SEQ ID NO: 1638268 - RNA, 19 nt, Artificial Sequence
  Description of Artificial Sequence: Synthetic oligonucleotide
ucacagugguuauauacca

SEQ ID NO: 1638269 - RNA, 19 nt, Artificial Sequence
  Description of Artificial Sequence: Synthetic oligonucleotide
agauguacuccccuaguug

SEQ ID NO: 1638270 - RNA, 19 nt, Artificial Sequence
  Description of Artificial Sequence: Synthetic oligonucleotide
cugaugucggacuccaucc

SEQ ID NO: 1638271 - RNA, 19 nt, Artificial Sequence
  Description of Artificial Sequence: Synthetic oligonucleotide
agaugcaaguguugcaguc

SEQ ID NO: 1638272 - RNA, 19 nt, Artificial Sequence
  Description of Artificial Sequence: Synthetic oligonucleotide
ugucaauggaguacacggc

SEQ ID NO: 1638273 - RNA, 19 nt, Artificial Sequence
  Description of Artificial Sequence: Synthetic oligonucleotide
uuggcaacgaugucuuugc

SEQ ID NO: 1638274 - RNA, 19 nt, Artificial Sequence
  Description of Artificial Sequence: Synthetic oligonucleotide
aaaaggcucgggauccacc

SEQ ID NO: 1638275 - RNA, 19 nt, Artificial Sequence
  Description of Artificial Sequence: Synthetic oligonucleotide
ggugcaaggagacacacac

SEQ ID NO: 1638276 - RNA, 19 nt, Artificial Sequence
  Description of Artificial Sequence: Synthetic oligonucleotide
agcgggcaaacaccgaggc

SEQ ID NO: 1638277 - RNA, 19 nt, Artificial Sequence
  Description of Artificial Sequence: Synthetic oligonucleotide
ggucaguccagccauacag

SEQ ID NO: 1638278 - RNA, 19 nt, Artificial Sequence
  Description of Artificial Sequence: Synthetic oligonucleotide
ugguauacgacagagccau

SEQ ID NO: 1638279 - RNA, 19 nt, Artificial Sequence
  Description of Artificial Sequence: Synthetic oligonucleotide
cacuccuuauacuccaugc

SEQ ID NO: 1638280 - RNA, 19 nt, Artificial Sequence
  Description of Artificial Sequence: Synthetic oligonucleotide
caauacacugagugcaggc

SEQ ID NO: 1638281 - RNA, 19 nt, Artificial Sequence
  Description of Artificial Sequence: Synthetic oligonucleotide
ugucacaacaggugcccgg

SEQ ID NO: 1638282 - RNA, 19 nt, Artificial Sequence
  Description of Artificial Sequence: Synthetic oligonucleotide
uuuucucccagauguacuc

SEQ ID NO: 1638283 - RNA, 19 nt, Artificial Sequence
  Description of Artificial Sequence: Synthetic oligonucleotide
ggagcaauguugcugcacg

SEQ ID NO: 1638284 - RNA, 19 nt, Artificial Sequence
  Description of Artificial Sequence: Synthetic oligonucleotide
ucccacuuugacauacugc

SEQ ID NO: 1638285 - RNA, 19 nt, Artificial Sequence
  Description of Artificial Sequence: Synthetic oligonucleotide
cagacaccugcguucaucg

SEQ ID NO: 1638286 - RNA, 19 nt, Artificial Sequence
  Description of Artificial Sequence: Synthetic oligonucleotide
aggaacugaugucggacuc

SEQ ID NO: 1638287 - RNA, 19 nt, Artificial Sequence
  Description of Artificial Sequence: Synthetic oligonucleotide
guacacaaagucuucucac

SEQ ID NO: 1638288 - RNA, 19 nt, Artificial Sequence
  Description of Artificial Sequence: Synthetic oligonucleotide
agggugggcagccugugac

SEQ ID NO: 1638289 - RNA, 19 nt, Artificial Sequence
  Description of Artificial Sequence: Synthetic oligonucleotide
agugcaagggcacacgcau

SEQ ID NO: 1638290 - RNA, 19 nt, Artificial Sequence
  Description of Artificial Sequence: Synthetic oligonucleotide
cucaaugucaauggaguac

SEQ ID NO: 1638291 - RNA, 19 nt, Artificial Sequence
  Description of Artificial Sequence: Synthetic oligonucleotide
acgauuuucccuccuucag

SEQ ID NO: 1638292 - RNA, 19 nt, Artificial Sequence
  Description of Artificial Sequence: Synthetic oligonucleotide
caugcugggugacaggcgc

SEQ ID NO: 1638293 - RNA, 19 nt, Artificial Sequence
  Description of Artificial Sequence: Synthetic oligonucleotide
uucuggugcaaggagacac

SEQ ID NO: 1638294 - RNA, 19 nt, Artificial Sequence
  Description of Artificial Sequence: Synthetic oligonucleotide
uucacaugggccacacgug

SEQ ID NO: 1638295 - RNA, 19 nt, Artificial Sequence
  Description of Artificial Sequence: Synthetic oligonucleotide
cacacacuccuuauacucc

SEQ ID NO: 1638296 - RNA, 19 nt, Artificial Sequence
  Description of Artificial Sequence: Synthetic oligonucleotide
augaccucgugguauacga

SEQ ID NO: 1638297 - RNA, 19 nt, Artificial Sequence
  Description of Artificial Sequence: Synthetic oligonucleotide
auacacugagugcaggccu

SEQ ID NO: 1638298 - RNA, 19 nt, Artificial Sequence
  Description of Artificial Sequence: Synthetic oligonucleotide
gaggguaccgcuucccagc

SEQ ID NO: 1638299 - RNA, 19 nt, Artificial Sequence
  Description of Artificial Sequence: Synthetic oligonucleotide
ucuugggacuuacagucuc

SEQ ID NO: 1638300 - RNA, 19 nt, Artificial Sequence
  Description of Artificial Sequence: Synthetic oligonucleotide
aaucgacacaccugggcau

SEQ ID NO: 1638301 - RNA, 19 nt, Artificial Sequence
  Description of Artificial Sequence: Synthetic oligonucleotide
cacaaaaggcucgggaucc

SEQ ID NO: 1638302 - RNA, 19 nt, Artificial Sequence
  Description of Artificial Sequence: Synthetic oligonucleotide
cugggcacgacauagcaca

SEQ ID NO: 1638303 - RNA, 19 nt, Artificial Sequence
  Description of Artificial Sequence: Synthetic oligonucleotide
ugggcuccguccucgaggg

SEQ ID NO: 1638304 - RNA, 19 nt, Artificial Sequence
  Description of Artificial Sequence: Synthetic oligonucleotide
uucaucgaagggugggcag

SEQ ID NO: 1638305 - RNA, 19 nt, Artificial Sequence
  Description of Artificial Sequence: Synthetic oligonucleotide
ucugacagggcugaugguc

SEQ ID NO: 1638306 - RNA, 19 nt, Artificial Sequence
  Description of Artificial Sequence: Synthetic oligonucleotide
cucuaggaacugaugucgg

SEQ ID NO: 1638307 - RNA, 19 nt, Artificial Sequence
  Description of Artificial Sequence: Synthetic oligonucleotide
guauacgacagagccauug

SEQ ID NO: 1638308 - RNA, 19 nt, Artificial Sequence
  Description of Artificial Sequence: Synthetic oligonucleotide
uaguaguguucccaucaca

SEQ ID NO: 1638309 - RNA, 19 nt, Artificial Sequence
  Description of Artificial Sequence: Synthetic oligonucleotide
uccccaauacacugagugc

SEQ ID NO: 1638310 - RNA, 19 nt, Artificial Sequence
  Description of Artificial Sequence: Synthetic oligonucleotide
uccucuugggacuuacagu

SEQ ID NO: 1638311 - RNA, 19 nt, Artificial Sequence
  Description of Artificial Sequence: Synthetic oligonucleotide
augucuuugcaaucaggcu

SEQ ID NO: 1638312 - RNA, 19 nt, Artificial Sequence
  Description of Artificial Sequence: Synthetic oligonucleotide
auugaugaccucgugguau

SEQ ID NO: 1638313 - RNA, 19 nt, Artificial Sequence
  Description of Artificial Sequence: Synthetic oligonucleotide
cagcaugcacacaagaaca

SEQ ID NO: 1638314 - RNA, 19 nt, Artificial Sequence
  Description of Artificial Sequence: Synthetic oligonucleotide
ugcccuggcaguaaugaau

SEQ ID NO: 1638315 - RNA, 19 nt, Artificial Sequence
  Description of Artificial Sequence: Synthetic oligonucleotide
uucauugcugcagauccac

SEQ ID NO: 1638316 - RNA, 19 nt, Artificial Sequence
  Description of Artificial Sequence: Synthetic oligonucleotide
cuuggcaacgaugucuuug

SEQ ID NO: 1638317 - RNA, 19 nt, Artificial Sequence
  Description of Artificial Sequence: Synthetic oligonucleotide
cauucggagcucuguacgc

SEQ ID NO: 1638318 - RNA, 19 nt, Artificial Sequence
  Description of Artificial Sequence: Synthetic oligonucleotide
uggaguacacggcuuugcu

SEQ ID NO: 1638319 - RNA, 19 nt, Artificial Sequence
  Description of Artificial Sequence: Synthetic oligonucleotide
aggagcucucccucagggc

SEQ ID NO: 1638320 - RNA, 19 nt, Artificial Sequence
  Description of Artificial Sequence: Synthetic oligonucleotide
cucgugguauacgacagag

SEQ ID NO: 1638321 - RNA, 19 nt, Artificial Sequence
  Description of Artificial Sequence: Synthetic oligonucleotide
gcucacagugguuauauac

SEQ ID NO: 1638322 - RNA, 19 nt, Artificial Sequence
  Description of Artificial Sequence: Synthetic oligonucleotide
ucuggugcaaggagacaca

SEQ ID NO: 1638323 - RNA, 19 nt, Artificial Sequence
  Description of Artificial Sequence: Synthetic oligonucleotide
augucggacuccauccucc

SEQ ID NO: 1638324 - RNA, 19 nt, Artificial Sequence
  Description of Artificial Sequence: Synthetic oligonucleotide
augcacacaagaacauucg

SEQ ID NO: 1638325 - RNA, 19 nt, Artificial Sequence
  Description of Artificial Sequence: Synthetic oligonucleotide
aauggaguacacggcuuug

SEQ ID NO: 1638326 - RNA, 19 nt, Artificial Sequence
  Description of Artificial Sequence: Synthetic oligonucleotide
gaccucgugguauacgaca

SEQ ID NO: 1638327 - RNA, 19 nt, Artificial Sequence
  Description of Artificial Sequence: Synthetic oligonucleotide
cuugggacuuacagucucc

SEQ ID NO: 1638328 - RNA, 19 nt, Artificial Sequence
  Description of Artificial Sequence: Synthetic oligonucleotide
uucggagcucuguacgcag

SEQ ID NO: 1638329 - RNA, 19 nt, Artificial Sequence
  Description of Artificial Sequence: Synthetic oligonucleotide
agcaggagcaauguugcug

SEQ ID NO: 1638330 - RNA, 19 nt, Artificial Sequence
  Description of Artificial Sequence: Synthetic oligonucleotide
auacgacagagccauuggu

SEQ ID NO: 1638331 - RNA, 19 nt, Artificial Sequence
  Description of Artificial Sequence: Synthetic oligonucleotide
aggggugaucaccacagga

SEQ ID NO: 1638332 - RNA, 19 nt, Artificial Sequence
  Description of Artificial Sequence: Synthetic oligonucleotide
ugcgcagugcaguuggccu

SEQ ID NO: 1638333 - RNA, 19 nt, Artificial Sequence
  Description of Artificial Sequence: Synthetic oligonucleotide
agagccacaaaaggcucgg

SEQ ID NO: 1638334 - RNA, 19 nt, Artificial Sequence
  Description of Artificial Sequence: Synthetic oligonucleotide
uguacuccccuaguuggcc

SEQ ID NO: 1638335 - RNA, 19 nt, Artificial Sequence
  Description of Artificial Sequence: Synthetic oligonucleotide
cacaagaacauucggagcu

SEQ ID NO: 1638336 - RNA, 19 nt, Artificial Sequence
  Description of Artificial Sequence: Synthetic oligonucleotide
aggagcuaguaguguuccc

SEQ ID NO: 1638337 - RNA, 19 nt, Artificial Sequence
  Description of Artificial Sequence: Synthetic oligonucleotide
uccgggcguacucaaggag

SEQ ID NO: 1638338 - RNA, 19 nt, Artificial Sequence
  Description of Artificial Sequence: Synthetic oligonucleotide
ugcguucaucgaagggugg

SEQ ID NO: 1638339 - RNA, 19 nt, Artificial Sequence
  Description of Artificial Sequence: Synthetic oligonucleotide
ugggacccaggucucuagg

SEQ ID NO: 1638340 - RNA, 19 nt, Artificial Sequence
  Description of Artificial Sequence: Synthetic oligonucleotide
agcaauguugcugcacguc

SEQ ID NO: 1638341 - RNA, 19 nt, Artificial Sequence
  Description of Artificial Sequence: Synthetic oligonucleotide
cuccuuauacuccaugcca

SEQ ID NO: 1638342 - RNA, 19 nt, Artificial Sequence
  Description of Artificial Sequence: Synthetic oligonucleotide
acaagaacauucggagcuc

SEQ ID NO: 1638343 - RNA, 19 nt, Artificial Sequence
  Description of Artificial Sequence: Synthetic oligonucleotide
cugcguucaucgaagggug

SEQ ID NO: 1638344 - RNA, 19 nt, Artificial Sequence
  Description of Artificial Sequence: Synthetic oligonucleotide
caaucgacacaccugggca

SEQ ID NO: 1638345 - RNA, 19 nt, Artificial Sequence
  Description of Artificial Sequence: Synthetic oligonucleotide
ggcacucuucaguagcugg

SEQ ID NO: 1638346 - RNA, 19 nt, Artificial Sequence
  Description of Artificial Sequence: Synthetic oligonucleotide
ucgugguauacgacagagc

SEQ ID NO: 1638347 - RNA, 19 nt, Artificial Sequence
  Description of Artificial Sequence: Synthetic oligonucleotide
agcuaguaguguucccauc

SEQ ID NO: 1638348 - RNA, 19 nt, Artificial Sequence
  Description of Artificial Sequence: Synthetic oligonucleotide
gugguuauauaccagggau

SEQ ID NO: 1638349 - RNA, 19 nt, Artificial Sequence
  Description of Artificial Sequence: Synthetic oligonucleotide
ugaggcgagccacuucaca

SEQ ID NO: 1638350 - RNA, 19 nt, Artificial Sequence
  Description of Artificial Sequence: Synthetic oligonucleotide
agccacaaaaggcucggga

SEQ ID NO: 1638351 - RNA, 19 nt, Artificial Sequence
  Description of Artificial Sequence: Synthetic oligonucleotide
gcaauguugcugcacgucc

SEQ ID NO: 1638352 - RNA, 19 nt, Artificial Sequence
  Description of Artificial Sequence: Synthetic oligonucleotide
ugaugucggacuccauccu

SEQ ID NO: 1638353 - RNA, 19 nt, Artificial Sequence
  Description of Artificial Sequence: Synthetic oligonucleotide
ucgaagggugggcagccug

SEQ ID NO: 1638354 - RNA, 19 nt, Artificial Sequence
  Description of Artificial Sequence: Synthetic oligonucleotide
ugaucaccacaggagcuag

SEQ ID NO: 1638355 - RNA, 19 nt, Artificial Sequence
  Description of Artificial Sequence: Synthetic oligonucleotide
gggacuuacagucucccac

SEQ ID NO: 1638356 - RNA, 19 nt, Artificial Sequence
  Description of Artificial Sequence: Synthetic oligonucleotide
ggugcccggaauuuucacg

SEQ ID NO: 1638357 - RNA, 19 nt, Artificial Sequence
  Description of Artificial Sequence: Synthetic oligonucleotide
accugcguucaucgaaggg

SEQ ID NO: 1638358 - RNA, 19 nt, Artificial Sequence
  Description of Artificial Sequence: Synthetic oligonucleotide
cacagaucugacagggcug

SEQ ID NO: 1638359 - RNA, 19 nt, Artificial Sequence
  Description of Artificial Sequence: Synthetic oligonucleotide
gacccaggucucuaggaac

SEQ ID NO: 1638360 - RNA, 19 nt, Artificial Sequence
  Description of Artificial Sequence: Synthetic oligonucleotide
uacacggcuuugcuggcac

SEQ ID NO: 1638361 - RNA, 19 nt, Artificial Sequence
  Description of Artificial Sequence: Synthetic oligonucleotide
acagccguccacacauugc

SEQ ID NO: 1638362 - RNA, 19 nt, Artificial Sequence
  Description of Artificial Sequence: Synthetic oligonucleotide
gacaccugcguucaucgaa

SEQ ID NO: 1638363 - RNA, 19 nt, Artificial Sequence
  Description of Artificial Sequence: Synthetic oligonucleotide
ucaucgaagggugggcagc

SEQ ID NO: 1638364 - RNA, 19 nt, Artificial Sequence
  Description of Artificial Sequence: Synthetic oligonucleotide
cuucccagcaugcacacaa

SEQ ID NO: 1638365 - RNA, 19 nt, Artificial Sequence
  Description of Artificial Sequence: Synthetic oligonucleotide
ugcagugcaagggcacacg

SEQ ID NO: 1638366 - RNA, 19 nt, Artificial Sequence
  Description of Artificial Sequence: Synthetic oligonucleotide
gcuaguaguguucccauca

SEQ ID NO: 1638367 - RNA, 19 nt, Artificial Sequence
  Description of Artificial Sequence: Synthetic oligonucleotide
gaugucggacuccauccuc

SEQ ID NO: 1638368 - RNA, 19 nt, Artificial Sequence
  Description of Artificial Sequence: Synthetic oligonucleotide
acacuccuuauacuccaug

SEQ ID NO: 1638369 - RNA, 19 nt, Artificial Sequence
  Description of Artificial Sequence: Synthetic oligonucleotide
cuuugcuggcacacuugcc

SEQ ID NO: 1638370 - RNA, 19 nt, Artificial Sequence
  Description of Artificial Sequence: Synthetic oligonucleotide
caccaucccuuccugggcg

SEQ ID NO: 1638371 - RNA, 19 nt, Artificial Sequence
  Description of Artificial Sequence: Synthetic oligonucleotide
gugcccggaauuuucacga

SEQ ID NO: 1638372 - RNA, 19 nt, Artificial Sequence
  Description of Artificial Sequence: Synthetic oligonucleotide
ccagcaugcacacaagaac

SEQ ID NO: 1638373 - RNA, 19 nt, Artificial Sequence
  Description of Artificial Sequence: Synthetic oligonucleotide
agccugugacccuuuucuc

SEQ ID NO: 1638374 - RNA, 19 nt, Artificial Sequence
  Description of Artificial Sequence: Synthetic oligonucleotide
aggugcccggaauuuucac

SEQ ID NO: 1638375 - RNA, 19 nt, Artificial Sequence
  Description of Artificial Sequence: Synthetic oligonucleotide
auguacuccccuaguuggc

SEQ ID NO: 1638376 - RNA, 19 nt, Artificial Sequence
  Description of Artificial Sequence: Synthetic oligonucleotide
uuucacgauuuucccuccu

SEQ ID NO: 1638377 - RNA, 19 nt, Artificial Sequence
  Description of Artificial Sequence: Synthetic oligonucleotide
uugcaaucaggcuccucac

SEQ ID NO: 1638378 - RNA, 19 nt, Artificial Sequence
  Description of Artificial Sequence: Synthetic oligonucleotide
guugccuccaaucgacaca

SEQ ID NO: 1638379 - RNA, 19 nt, Artificial Sequence
  Description of Artificial Sequence: Synthetic oligonucleotide
gguaccgcuucccagcaug

SEQ ID NO: 1638380 - RNA, 19 nt, Artificial Sequence
  Description of Artificial Sequence: Synthetic oligonucleotide
gggugaucaccacaggagc

SEQ ID NO: 1638381 - RNA, 19 nt, Artificial Sequence
  Description of Artificial Sequence: Synthetic oligonucleotide
ugcaaguguugcagucuug

SEQ ID NO: 1638382 - RNA, 19 nt, Artificial Sequence
  Description of Artificial Sequence: Synthetic oligonucleotide
cagagagccacaaaaggcu

SEQ ID NO: 1638383 - RNA, 19 nt, Artificial Sequence
  Description of Artificial Sequence: Synthetic oligonucleotide
gucaauggaguacacggcu

SEQ ID NO: 1638384 - RNA, 19 nt, Artificial Sequence
  Description of Artificial Sequence: Synthetic oligonucleotide
uacuccccuaguuggccag

SEQ ID NO: 1638385 - RNA, 19 nt, Artificial Sequence
  Description of Artificial Sequence: Synthetic oligonucleotide
ggcguacucaaggagggcg

SEQ ID NO: 1638386 - RNA, 19 nt, Artificial Sequence
  Description of Artificial Sequence: Synthetic oligonucleotide
cuucagccagacaccugcg

SEQ ID NO: 1638387 - RNA, 19 nt, Artificial Sequence
  Description of Artificial Sequence: Synthetic oligonucleotide
agggcacacgcaugggcuc

SEQ ID NO: 1638388 - RNA, 19 nt, Artificial Sequence
  Description of Artificial Sequence: Synthetic oligonucleotide
guacauguacacaaagucu

SEQ ID NO: 1638389 - RNA, 19 nt, Artificial Sequence
  Description of Artificial Sequence: Synthetic oligonucleotide
uugaugaccucgugguaua

SEQ ID NO: 1638390 - RNA, 19 nt, Artificial Sequence
  Description of Artificial Sequence: Synthetic oligonucleotide
cccaguaguacauguacac

SEQ ID NO: 1638391 - RNA, 19 nt, Artificial Sequence
  Description of Artificial Sequence: Synthetic oligonucleotide
gaacauucggagcucugua

SEQ ID NO: 1638392 - RNA, 19 nt, Artificial Sequence
  Description of Artificial Sequence: Synthetic oligonucleotide
uggugcaaggagacacaca

SEQ ID NO: 1638393 - RNA, 19 nt, Artificial Sequence
  Description of Artificial Sequence: Synthetic oligonucleotide
cuaguuggccaggucacac

SEQ ID NO: 1638394 - RNA, 19 nt, Artificial Sequence
  Description of Artificial Sequence: Synthetic oligonucleotide
caggagcuaguaguguucc

SEQ ID NO: 1638395 - RNA, 19 nt, Artificial Sequence
  Description of Artificial Sequence: Synthetic oligonucleotide
agaucugacagggcugaug

SEQ ID NO: 1638396 - RNA, 19 nt, Artificial Sequence
  Description of Artificial Sequence: Synthetic oligonucleotide
ugucggacuccauccuccc

SEQ ID NO: 1638397 - RNA, 19 nt, Artificial Sequence
  Description of Artificial Sequence: Synthetic oligonucleotide
aggcgagccacuucacaug

SEQ ID NO: 1638398 - RNA, 19 nt, Artificial Sequence
  Description of Artificial Sequence: Synthetic oligonucleotide
ugaccucgugguauacgac

SEQ ID NO: 1638399 - RNA, 19 nt, Artificial Sequence
  Description of Artificial Sequence: Synthetic oligonucleotide
aggagacacacacuccuua

SEQ ID NO: 1638400 - RNA, 19 nt, Artificial Sequence
  Description of Artificial Sequence: Synthetic oligonucleotide
aagaacauucggagcucug

SEQ ID NO: 1638401 - RNA, 19 nt, Artificial Sequence
  Description of Artificial Sequence: Synthetic oligonucleotide
gacuccauccuccccaaua

SEQ ID NO: 1638402 - RNA, 19 nt, Artificial Sequence
  Description of Artificial Sequence: Synthetic oligonucleotide
gguggcagcgggcaaacac

SEQ ID NO: 1638403 - RNA, 19 nt, Artificial Sequence
  Description of Artificial Sequence: Synthetic oligonucleotide
cacgauuuucccuccuuca

SEQ ID NO: 1638404 - RNA, 19 nt, Artificial Sequence
  Description of Artificial Sequence: Synthetic oligonucleotide
agcaccgguuugcacucuc

SEQ ID NO: 1638405 - RNA, 19 nt, Artificial Sequence
  Description of Artificial Sequence: Synthetic oligonucleotide
cagauccacaggcuguuuc

SEQ ID NO: 1638406 - RNA, 19 nt, Artificial Sequence
  Description of Artificial Sequence: Synthetic oligonucleotide
ggcugcgcagugcaguugg

SEQ ID NO: 1638407 - RNA, 19 nt, Artificial Sequence
  Description of Artificial Sequence: Synthetic oligonucleotide
ccaggucacacucacacuc

SEQ ID NO: 1638408 - RNA, 19 nt, Artificial Sequence
  Description of Artificial Sequence: Synthetic oligonucleotide
accgaggcacucuucagua

SEQ ID NO: 1638409 - RNA, 19 nt, Artificial Sequence
  Description of Artificial Sequence: Synthetic oligonucleotide
ggaguacacggcuuugcug

SEQ ID NO: 1638410 - RNA, 19 nt, Artificial Sequence
  Description of Artificial Sequence: Synthetic oligonucleotide
acaggcgcuguggucaguc

SEQ ID NO: 1638411 - RNA, 19 nt, Artificial Sequence
  Description of Artificial Sequence: Synthetic oligonucleotide
cagcgggcaaacaccgagg

SEQ ID NO: 1638412 - RNA, 19 nt, Artificial Sequence
  Description of Artificial Sequence: Synthetic oligonucleotide
ugggacuuacagucuccca

SEQ ID NO: 1638413 - RNA, 19 nt, Artificial Sequence
  Description of Artificial Sequence: Synthetic oligonucleotide
ugcagucuugagagaggga

SEQ ID NO: 1638414 - RNA, 19 nt, Artificial Sequence
  Description of Artificial Sequence: Synthetic oligonucleotide
caaggagacacacacuccu

SEQ ID NO: 1638415 - RNA, 19 nt, Artificial Sequence
  Description of Artificial Sequence: Synthetic oligonucleotide
cuuauacuccaugccagca

SEQ ID NO: 1638416 - RNA, 19 nt, Artificial Sequence
  Description of Artificial Sequence: Synthetic oligonucleotide
guggcagcgggcaaacacc

SEQ ID NO: 1638417 - RNA, 19 nt, Artificial Sequence
  Description of Artificial Sequence: Synthetic oligonucleotide
aaacaccgaggcacucuuc

SEQ ID NO: 1638418 - RNA, 19 nt, Artificial Sequence
  Description of Artificial Sequence: Synthetic oligonucleotide
aagggugggcagccuguga

SEQ ID NO: 1638419 - RNA, 19 nt, Artificial Sequence
  Description of Artificial Sequence: Synthetic oligonucleotide
gacagggcugauggucugg

SEQ ID NO: 1638420 - RNA, 19 nt, Artificial Sequence
  Description of Artificial Sequence: Synthetic oligonucleotide
caguuggccuuccuuccgc

SEQ ID NO: 1638421 - RNA, 19 nt, Artificial Sequence
  Description of Artificial Sequence: Synthetic oligonucleotide
aggcucgggauccaccaga

SEQ ID NO: 1638422 - RNA, 19 nt, Artificial Sequence
  Description of Artificial Sequence: Synthetic oligonucleotide
augcucacagugguuauau

SEQ ID NO: 1638423 - RNA, 19 nt, Artificial Sequence
  Description of Artificial Sequence: Synthetic oligonucleotide
gccguccacacauugcugc

SEQ ID NO: 1638424 - RNA, 19 nt, Artificial Sequence
  Description of Artificial Sequence: Synthetic oligonucleotide
cacagccguccacacauug

SEQ ID NO: 1638425 - RNA, 19 nt, Artificial Sequence
  Description of Artificial Sequence: Synthetic oligonucleotide
cacaagugucacaacaggu

SEQ ID NO: 1638426 - RNA, 19 nt, Artificial Sequence
  Description of Artificial Sequence: Synthetic oligonucleotide
auacuccaugccagcaggg

SEQ ID NO: 1638427 - RNA, 19 nt, Artificial Sequence
  Description of Artificial Sequence: Synthetic oligonucleotide
ccuuauacuccaugccagc

SEQ ID NO: 1638428 - RNA, 19 nt, Artificial Sequence
  Description of Artificial Sequence: Synthetic oligonucleotide
guacgcagcggucuucauc

SEQ ID NO: 1638429 - RNA, 19 nt, Artificial Sequence
  Description of Artificial Sequence: Synthetic oligonucleotide
cacucauacucugggcagc

SEQ ID NO: 1638430 - RNA, 19 nt, Artificial Sequence
  Description of Artificial Sequence: Synthetic oligonucleotide
caccacaggagcuaguagu

SEQ ID NO: 1638431 - RNA, 19 nt, Artificial Sequence
  Description of Artificial Sequence: Synthetic oligonucleotide
caucgaagggugggcagcc

SEQ ID NO: 1638432 - RNA, 19 nt, Artificial Sequence
  Description of Artificial Sequence: Synthetic oligonucleotide
ccgguuugcacucucuuug

SEQ ID NO: 1638433 - RNA, 19 nt, Artificial Sequence
  Description of Artificial Sequence: Synthetic oligonucleotide
gagacacacacuccuuaua

SEQ ID NO: 1638434 - RNA, 19 nt, Artificial Sequence
  Description of Artificial Sequence: Synthetic oligonucleotide
gucucccacuuugacauac

SEQ ID NO: 1638435 - RNA, 19 nt, Artificial Sequence
  Description of Artificial Sequence: Synthetic oligonucleotide
gaugcaaguguugcagucu

SEQ ID NO: 1638436 - RNA, 19 nt, Artificial Sequence
  Description of Artificial Sequence: Synthetic oligonucleotide
aguuggccuuccuuccgcu

SEQ ID NO: 1638437 - RNA, 19 nt, Artificial Sequence
  Description of Artificial Sequence: Synthetic oligonucleotide
ccgggcguacucaaggagg

SEQ ID NO: 1638438 - RNA, 19 nt, Artificial Sequence
  Description of Artificial Sequence: Synthetic oligonucleotide
gguucuggugcaaggagac

SEQ ID NO: 1638439 - RNA, 19 nt, Artificial Sequence
  Description of Artificial Sequence: Synthetic oligonucleotide
uggcaacgaugucuuugca

SEQ ID NO: 1638440 - RNA, 19 nt, Artificial Sequence
  Description of Artificial Sequence: Synthetic oligonucleotide
cuccucacaagugucacaa

SEQ ID NO: 1638441 - RNA, 19 nt, Artificial Sequence
  Description of Artificial Sequence: Synthetic oligonucleotide
aucaccacaggagcuagua

SEQ ID NO: 1638442 - RNA, 19 nt, Artificial Sequence
  Description of Artificial Sequence: Synthetic oligonucleotide
caccugcguucaucgaagg

SEQ ID NO: 1638443 - RNA, 19 nt, Artificial Sequence
  Description of Artificial Sequence: Synthetic oligonucleotide
ggcacgacauagcacaaaa

SEQ ID NO: 1638444 - RNA, 19 nt, Artificial Sequence
  Description of Artificial Sequence: Synthetic oligonucleotide
guacucaaggagggcgggg

SEQ ID NO: 1638445 - RNA, 19 nt, Artificial Sequence
  Description of Artificial Sequence: Synthetic oligonucleotide
gcaaucaggcuccucacaa

SEQ ID NO: 1638446 - RNA, 19 nt, Artificial Sequence
  Description of Artificial Sequence: Synthetic oligonucleotide
ggagcuaguaguguuccca

SEQ ID NO: 1638447 - RNA, 19 nt, Artificial Sequence
  Description of Artificial Sequence: Synthetic oligonucleotide
accgguuugcacucucuuu

SEQ ID NO: 1638448 - RNA, 19 nt, Artificial Sequence
  Description of Artificial Sequence: Synthetic oligonucleotide
uuccgcugaggcacacaca

SEQ ID NO: 1638449 - RNA, 19 nt, Artificial Sequence
  Description of Artificial Sequence: Synthetic oligonucleotide
gcaacgaugucuuugcaau

SEQ ID NO: 1638450 - RNA, 19 nt, Artificial Sequence
  Description of Artificial Sequence: Synthetic oligonucleotide
acuuacagucucccacuuu

SEQ ID NO: 1638451 - RNA, 19 nt, Artificial Sequence
  Description of Artificial Sequence: Synthetic oligonucleotide
agcucuguacgcagcgguc

SEQ ID NO: 1638452 - RNA, 19 nt, Artificial Sequence
  Description of Artificial Sequence: Synthetic oligonucleotide
cuggugcaaggagacacac

SEQ ID NO: 1638453 - RNA, 19 nt, Artificial Sequence
  Description of Artificial Sequence: Synthetic oligonucleotide
acucauacucugggcagca

SEQ ID NO: 1638454 - RNA, 19 nt, Artificial Sequence
  Description of Artificial Sequence: Synthetic oligonucleotide
guucaucgaagggugggca

SEQ ID NO: 1638455 - RNA, 19 nt, Artificial Sequence
  Description of Artificial Sequence: Synthetic oligonucleotide
cugggacccaggucucuag

SEQ ID NO: 1638456 - RNA, 19 nt, Artificial Sequence
  Description of Artificial Sequence: Synthetic oligonucleotide
ucccagauguacuccccua

SEQ ID NO: 1638457 - RNA, 19 nt, Artificial Sequence
  Description of Artificial Sequence: Synthetic oligonucleotide
acccaggucucuaggaacu

SEQ ID NO: 1638458 - RNA, 19 nt, Artificial Sequence
  Description of Artificial Sequence: Synthetic oligonucleotide
aggguaccgcuucccagca

SEQ ID NO: 1638459 - RNA, 19 nt, Artificial Sequence
  Description of Artificial Sequence: Synthetic oligonucleotide
ggaacugaugucggacucc

SEQ ID NO: 1638460 - RNA, 19 nt, Artificial Sequence
  Description of Artificial Sequence: Synthetic oligonucleotide
caaaaggcucgggauccac

SEQ ID NO: 1638461 - RNA, 19 nt, Artificial Sequence
  Description of Artificial Sequence: Synthetic oligonucleotide
ucuuugaggcgagccacuu

SEQ ID NO: 1638462 - RNA, 19 nt, Artificial Sequence
  Description of Artificial Sequence: Synthetic oligonucleotide
guaguguucccaucacagu

SEQ ID NO: 1638463 - RNA, 19 nt, Artificial Sequence
  Description of Artificial Sequence: Synthetic oligonucleotide
gugguauacgacagagcca

SEQ ID NO: 1638464 - RNA, 19 nt, Artificial Sequence
  Description of Artificial Sequence: Synthetic oligonucleotide
agcaugcacacaagaacau

SEQ ID NO: 1638465 - RNA, 19 nt, Artificial Sequence
  Description of Artificial Sequence: Synthetic oligonucleotide
ggcaacgaugucuuugcaa

SEQ ID NO: 1638466 - RNA, 19 nt, Artificial Sequence
  Description of Artificial Sequence: Synthetic oligonucleotide
ccacaaaaggcucgggauc

SEQ ID NO: 1638467 - RNA, 19 nt, Artificial Sequence
  Description of Artificial Sequence: Synthetic oligonucleotide
cacggcuuugcuggcacac

SEQ ID NO: 1638468 - RNA, 19 nt, Artificial Sequence
  Description of Artificial Sequence: Synthetic oligonucleotide
gagcucuguacgcagcggu

SEQ ID NO: 1638469 - RNA, 19 nt, Artificial Sequence
  Description of Artificial Sequence: Synthetic oligonucleotide
ugggcacgacauagcacaa

SEQ ID NO: 1638470 - RNA, 19 nt, Artificial Sequence
  Description of Artificial Sequence: Synthetic oligonucleotide
gcaaguguugcagucuuga

SEQ ID NO: 1638471 - RNA, 19 nt, Artificial Sequence
  Description of Artificial Sequence: Synthetic oligonucleotide
cugcgcagugcaguuggcc

SEQ ID NO: 1638472 - RNA, 19 nt, Artificial Sequence
  Description of Artificial Sequence: Synthetic oligonucleotide
uguggucaguccagccaua

SEQ ID NO: 1638473 - RNA, 19 nt, Artificial Sequence
  Description of Artificial Sequence: Synthetic oligonucleotide
gcguucaucgaaggguggg

SEQ ID NO: 1638474 - RNA, 19 nt, Artificial Sequence
  Description of Artificial Sequence: Synthetic oligonucleotide
guacuccccuaguuggcca

SEQ ID NO: 1638475 - RNA, 19 nt, Artificial Sequence
  Description of Artificial Sequence: Synthetic oligonucleotide
ggcagcaccgguuugcacu

SEQ ID NO: 1638476 - RNA, 19 nt, Artificial Sequence
  Description of Artificial Sequence: Synthetic oligonucleotide
gugccgagggcagccaugc

SEQ ID NO: 1638477 - RNA, 19 nt, Artificial Sequence
  Description of Artificial Sequence: Synthetic oligonucleotide
agcuuggcaacgaugucuu

SEQ ID NO: 1638478 - RNA, 19 nt, Artificial Sequence
  Description of Artificial Sequence: Synthetic oligonucleotide
agacaccugcguucaucga

SEQ ID NO: 1638479 - RNA, 19 nt, Artificial Sequence
  Description of Artificial Sequence: Synthetic oligonucleotide
ggcuccguccucgagggcc

SEQ ID NO: 1638480 - RNA, 19 nt, Artificial Sequence
  Description of Artificial Sequence: Synthetic oligonucleotide
ccaauacacugagugcagg

SEQ ID NO: 1638481 - RNA, 19 nt, Artificial Sequence
  Description of Artificial Sequence: Synthetic oligonucleotide
aucccuuccugggcgcagg

SEQ ID NO: 1638482 - RNA, 19 nt, Artificial Sequence
  Description of Artificial Sequence: Synthetic oligonucleotide
cccagauguacuccccuag

SEQ ID NO: 1638483 - RNA, 19 nt, Artificial Sequence
  Description of Artificial Sequence: Synthetic oligonucleotide
auggcugcgcagugcaguu

SEQ ID NO: 1638484 - RNA, 19 nt, Artificial Sequence
  Description of Artificial Sequence: Synthetic oligonucleotide
agcccucacuugcugcacu

SEQ ID NO: 1638485 - RNA, 19 nt, Artificial Sequence
  Description of Artificial Sequence: Synthetic oligonucleotide
ucuguacgcagcggucuuc

SEQ ID NO: 1638486 - RNA, 19 nt, Artificial Sequence
  Description of Artificial Sequence: Synthetic oligonucleotide
ccacuuugacauacugcag

SEQ ID NO: 1638487 - RNA, 19 nt, Artificial Sequence
  Description of Artificial Sequence: Synthetic oligonucleotide
gucggacuccauccucccc

SEQ ID NO: 1638488 - RNA, 19 nt, Artificial Sequence
  Description of Artificial Sequence: Synthetic oligonucleotide
guggucaguccagccauac

SEQ ID NO: 1638489 - RNA, 19 nt, Artificial Sequence
  Description of Artificial Sequence: Synthetic oligonucleotide
cagugcaagggcacacgca

SEQ ID NO: 1638490 - RNA, 19 nt, Artificial Sequence
  Description of Artificial Sequence: Synthetic oligonucleotide
caugggcuccguccucgag

SEQ ID NO: 1638491 - RNA, 19 nt, Artificial Sequence
  Description of Artificial Sequence: Synthetic oligonucleotide
guaccgcuucccagcaugc

SEQ ID NO: 1638492 - RNA, 19 nt, Artificial Sequence
  Description of Artificial Sequence: Synthetic oligonucleotide
gagcuaguaguguucccau

SEQ ID NO: 1638493 - RNA, 19 nt, Artificial Sequence
  Description of Artificial Sequence: Synthetic oligonucleotide
ugcucacagugguuauaua

SEQ ID NO: 1638494 - RNA, 19 nt, Artificial Sequence
  Description of Artificial Sequence: Synthetic oligonucleotide
gcguacucaaggagggcgg

SEQ ID NO: 1638495 - RNA, 19 nt, Artificial Sequence
  Description of Artificial Sequence: Synthetic oligonucleotide
acgcaugggcuccguccuc

SEQ ID NO: 1638496 - RNA, 19 nt, Artificial Sequence
  Description of Artificial Sequence: Synthetic oligonucleotide
caauguugcugcacguccu

SEQ ID NO: 1638497 - RNA, 19 nt, Artificial Sequence
  Description of Artificial Sequence: Synthetic oligonucleotide
caggaggguaccgcuuccc

SEQ ID NO: 1638498 - RNA, 19 nt, Artificial Sequence
  Description of Artificial Sequence: Synthetic oligonucleotide
cccuaguuggccaggucac

SEQ ID NO: 1638499 - RNA, 19 nt, Artificial Sequence
  Description of Artificial Sequence: Synthetic oligonucleotide
caguaaugaauguccacuu

SEQ ID NO: 1638500 - RNA, 19 nt, Artificial Sequence
  Description of Artificial Sequence: Synthetic oligonucleotide
cacucuucaguagcuggca

SEQ ID NO: 1638501 - RNA, 19 nt, Artificial Sequence
  Description of Artificial Sequence: Synthetic oligonucleotide
acuccccuaguuggccagg

SEQ ID NO: 1638502 - RNA, 19 nt, Artificial Sequence
  Description of Artificial Sequence: Synthetic oligonucleotide
gugaucaccacaggagcua

SEQ ID NO: 1638503 - RNA, 19 nt, Artificial Sequence
  Description of Artificial Sequence: Synthetic oligonucleotide
gugggacauggcugcgcag

SEQ ID NO: 1638504 - RNA, 19 nt, Artificial Sequence
  Description of Artificial Sequence: Synthetic oligonucleotide
caggugcccggaauuuuca

SEQ ID NO: 1638505 - RNA, 19 nt, Artificial Sequence
  Description of Artificial Sequence: Synthetic oligonucleotide
ggacuuacagucucccacu

SEQ ID NO: 1638506 - RNA, 19 nt, Artificial Sequence
  Description of Artificial Sequence: Synthetic oligonucleotide
ggagcucuguacgcagcgg

SEQ ID NO: 1638507 - RNA, 19 nt, Artificial Sequence
  Description of Artificial Sequence: Synthetic oligonucleotide
agccuucugaggggugauc

SEQ ID NO: 1638508 - RNA, 19 nt, Artificial Sequence
  Description of Artificial Sequence: Synthetic oligonucleotide
uccccuaguuggccagguc

SEQ ID NO: 1638509 - RNA, 19 nt, Artificial Sequence
  Description of Artificial Sequence: Synthetic oligonucleotide
gagcaauguugcugcacgu

SEQ ID NO: 1638510 - RNA, 19 nt, Artificial Sequence
  Description of Artificial Sequence: Synthetic oligonucleotide
ugcccggaauuuucacgau

SEQ ID NO: 1638511 - RNA, 19 nt, Artificial Sequence
  Description of Artificial Sequence: Synthetic oligonucleotide
guccgggcguacucaagga

SEQ ID NO: 1638512 - RNA, 19 nt, Artificial Sequence
  Description of Artificial Sequence: Synthetic oligonucleotide
cagccguccacacauugcu

SEQ ID NO: 1638513 - RNA, 19 nt, Artificial Sequence
  Description of Artificial Sequence: Synthetic oligonucleotide
ucuuugcaaucaggcuccu

SEQ ID NO: 1638514 - RNA, 19 nt, Artificial Sequence
  Description of Artificial Sequence: Synthetic oligonucleotide
aucgacacaccugggcauu

SEQ ID NO: 1638515 - RNA, 19 nt, Artificial Sequence
  Description of Artificial Sequence: Synthetic oligonucleotide
ggcgcuguggucaguccag

SEQ ID NO: 1638516 - RNA, 19 nt, Artificial Sequence
  Description of Artificial Sequence: Synthetic oligonucleotide
ggacccaggucucuaggaa

SEQ ID NO: 1638517 - RNA, 19 nt, Artificial Sequence
  Description of Artificial Sequence: Synthetic oligonucleotide
cagagccauuggugcagug

SEQ ID NO: 1638518 - RNA, 19 nt, Artificial Sequence
  Description of Artificial Sequence: Synthetic oligonucleotide
acacggcuuugcuggcaca

SEQ ID NO: 1638519 - RNA, 19 nt, Artificial Sequence
  Description of Artificial Sequence: Synthetic oligonucleotide
cuguacgcagcggucuuca

SEQ ID NO: 1638520 - RNA, 19 nt, Artificial Sequence
  Description of Artificial Sequence: Synthetic oligonucleotide
gccacaaaaggcucgggau

SEQ ID NO: 1638521 - RNA, 19 nt, Artificial Sequence
  Description of Artificial Sequence: Synthetic oligonucleotide
cggaauuuucacgauuuuc

SEQ ID NO: 1638522 - RNA, 19 nt, Artificial Sequence
  Description of Artificial Sequence: Synthetic oligonucleotide
cuuugcaaucaggcuccuc

SEQ ID NO: 1638523 - RNA, 19 nt, Artificial Sequence
  Description of Artificial Sequence: Synthetic oligonucleotide
caugagcacucuggcccag

SEQ ID NO: 1638524 - RNA, 19 nt, Artificial Sequence
  Description of Artificial Sequence: Synthetic oligonucleotide
guguugcagucuugagaga

SEQ ID NO: 1638525 - RNA, 19 nt, Artificial Sequence
  Description of Artificial Sequence: Synthetic oligonucleotide
cacaggagcuaguaguguu

SEQ ID NO: 1638526 - RNA, 19 nt, Artificial Sequence
  Description of Artificial Sequence: Synthetic oligonucleotide
ucgacacaccugggcauuc

SEQ ID NO: 1638527 - RNA, 19 nt, Artificial Sequence
  Description of Artificial Sequence: Synthetic oligonucleotide
cucauacucugggcagcac

SEQ ID NO: 1638528 - RNA, 19 nt, Artificial Sequence
  Description of Artificial Sequence: Synthetic oligonucleotide
ccccuaguuggccagguca

SEQ ID NO: 1638529 - RNA, 19 nt, Artificial Sequence
  Description of Artificial Sequence: Synthetic oligonucleotide
gaggcacucuucaguagcu

SEQ ID NO: 1638530 - RNA, 19 nt, Artificial Sequence
  Description of Artificial Sequence: Synthetic oligonucleotide
ggcucgggauccaccagag

SEQ ID NO: 1638531 - RNA, 19 nt, Artificial Sequence
  Description of Artificial Sequence: Synthetic oligonucleotide
caguugccuccaaucgaca

SEQ ID NO: 1638532 - RNA, 19 nt, Artificial Sequence
  Description of Artificial Sequence: Synthetic oligonucleotide
gaggguggcagcgggcaaa

SEQ ID NO: 1638533 - RNA, 19 nt, Artificial Sequence
  Description of Artificial Sequence: Synthetic oligonucleotide
uggcugcgcagugcaguug

SEQ ID NO: 1638534 - RNA, 19 nt, Artificial Sequence
  Description of Artificial Sequence: Synthetic oligonucleotide
agcugccuuccagcaugac

SEQ ID NO: 1638535 - RNA, 19 nt, Artificial Sequence
  Description of Artificial Sequence: Synthetic oligonucleotide
agccguccacacauugcug

SEQ ID NO: 1638536 - RNA, 19 nt, Artificial Sequence
  Description of Artificial Sequence: Synthetic oligonucleotide
cugcacuucuggggagagc

SEQ ID NO: 1638537 - RNA, 19 nt, Artificial Sequence
  Description of Artificial Sequence: Synthetic oligonucleotide
cugugacccuuuucuccca

SEQ ID NO: 1638538 - RNA, 19 nt, Artificial Sequence
  Description of Artificial Sequence: Synthetic oligonucleotide
gccuccaaucgacacaccu

SEQ ID NO: 1638539 - RNA, 19 nt, Artificial Sequence
  Description of Artificial Sequence: Synthetic oligonucleotide
ggacauggcugcgcagugc

SEQ ID NO: 1638540 - RNA, 19 nt, Artificial Sequence
  Description of Artificial Sequence: Synthetic oligonucleotide
guugcugcacguccucaau

SEQ ID NO: 1638541 - RNA, 19 nt, Artificial Sequence
  Description of Artificial Sequence: Synthetic oligonucleotide
cggagcucuguacgcagcg

SEQ ID NO: 1638542 - RNA, 19 nt, Artificial Sequence
  Description of Artificial Sequence: Synthetic oligonucleotide
cacacuugcccuggcagua

SEQ ID NO: 1638543 - RNA, 19 nt, Artificial Sequence
  Description of Artificial Sequence: Synthetic oligonucleotide
cagauguacuccccuaguu

SEQ ID NO: 1638544 - RNA, 19 nt, Artificial Sequence
  Description of Artificial Sequence: Synthetic oligonucleotide
caaacaccgaggcacucuu

SEQ ID NO: 1638545 - RNA, 19 nt, Artificial Sequence
  Description of Artificial Sequence: Synthetic oligonucleotide
caccgaggcacucuucagu

SEQ ID NO: 1638546 - RNA, 19 nt, Artificial Sequence
  Description of Artificial Sequence: Synthetic oligonucleotide
guacacggcuuugcuggca

SEQ ID NO: 1638547 - RNA, 19 nt, Artificial Sequence
  Description of Artificial Sequence: Synthetic oligonucleotide
cauggcugcgcagugcagu

SEQ ID NO: 1638548 - RNA, 19 nt, Artificial Sequence
  Description of Artificial Sequence: Synthetic oligonucleotide
cacgcaugggcuccguccu

SEQ ID NO: 1638549 - RNA, 19 nt, Artificial Sequence
  Description of Artificial Sequence: Synthetic oligonucleotide
gauccaccagaggguggca

SEQ ID NO: 1638550 - RNA, 19 nt, Artificial Sequence
  Description of Artificial Sequence: Synthetic oligonucleotide
ccugcguucaucgaagggu

SEQ ID NO: 1638551 - RNA, 19 nt, Artificial Sequence
  Description of Artificial Sequence: Synthetic oligonucleotide
cacaacaggugcccggaau

SEQ ID NO: 1638552 - RNA, 19 nt, Artificial Sequence
  Description of Artificial Sequence: Synthetic oligonucleotide
aucgaagggugggcagccu

SEQ ID NO: 1638553 - RNA, 19 nt, Artificial Sequence
  Description of Artificial Sequence: Synthetic oligonucleotide
cguucaucgaagggugggc

SEQ ID NO: 1638554 - RNA, 19 nt, Artificial Sequence
  Description of Artificial Sequence: Synthetic oligonucleotide
gcugggcacgacauagcac

SEQ ID NO: 1638555 - RNA, 19 nt, Artificial Sequence
  Description of Artificial Sequence: Synthetic oligonucleotide
caugcucacagugguuaua

SEQ ID NO: 1638556 - RNA, 19 nt, Artificial Sequence
  Description of Artificial Sequence: Synthetic oligonucleotide
acgcagcggucuucaucca

SEQ ID NO: 1638557 - RNA, 19 nt, Artificial Sequence
  Description of Artificial Sequence: Synthetic oligonucleotide
gcugugggacauggcugcg

SEQ ID NO: 1638558 - RNA, 19 nt, Artificial Sequence
  Description of Artificial Sequence: Synthetic oligonucleotide
gggcacacgcaugggcucc

SEQ ID NO: 1638559 - RNA, 19 nt, Artificial Sequence
  Description of Artificial Sequence: Synthetic oligonucleotide
cguacucaaggagggcggg

SEQ ID NO: 1638560 - RNA, 19 nt, Artificial Sequence
  Description of Artificial Sequence: Synthetic oligonucleotide
uccuuccgcugaggcacac

SEQ ID NO: 1638561 - RNA, 19 nt, Artificial Sequence
  Description of Artificial Sequence: Synthetic oligonucleotide
ccgcuucccagcaugcaca

SEQ ID NO: 1638562 - RNA, 19 nt, Artificial Sequence
  Description of Artificial Sequence: Synthetic oligonucleotide
ccaucacagugccgagggc

SEQ ID NO: 1638563 - RNA, 19 nt, Artificial Sequence
  Description of Artificial Sequence: Synthetic oligonucleotide
caaggagggcggggcauga

SEQ ID NO: 1638564 - RNA, 19 nt, Artificial Sequence
  Description of Artificial Sequence: Synthetic oligonucleotide
cccggaauuuucacgauuu

SEQ ID NO: 1638565 - RNA, 19 nt, Artificial Sequence
  Description of Artificial Sequence: Synthetic oligonucleotide
gcuccguccucgagggccc

SEQ ID NO: 1638566 - RNA, 19 nt, Artificial Sequence
  Description of Artificial Sequence: Synthetic oligonucleotide
gcaaacaccgaggcacucu

SEQ ID NO: 1638567 - RNA, 19 nt, Artificial Sequence
  Description of Artificial Sequence: Synthetic oligonucleotide
gcgagccacuucacauggg

SEQ ID NO: 1638568 - RNA, 19 nt, Artificial Sequence
  Description of Artificial Sequence: Synthetic oligonucleotide
gcgggcaaacaccgaggca

SEQ ID NO: 1638569 - RNA, 19 nt, Artificial Sequence
  Description of Artificial Sequence: Synthetic oligonucleotide
ggcaaacaccgaggcacuc

SEQ ID NO: 1638570 - RNA, 19 nt, Artificial Sequence
  Description of Artificial Sequence: Synthetic oligonucleotide
gugcaaggagacacacacu

SEQ ID NO: 1638571 - RNA, 19 nt, Artificial Sequence
  Description of Artificial Sequence: Synthetic oligonucleotide
cucugggcagcaccgguuu

SEQ ID NO: 1638572 - RNA, 19 nt, Artificial Sequence
  Description of Artificial Sequence: Synthetic oligonucleotide
cgcagcggucuucauccag

SEQ ID NO: 1638573 - RNA, 19 nt, Artificial Sequence
  Description of Artificial Sequence: Synthetic oligonucleotide
gggcguacucaaggagggc

SEQ ID NO: 1638574 - RNA, 19 nt, Artificial Sequence
  Description of Artificial Sequence: Synthetic oligonucleotide
ggaugcugggcacgacaua

SEQ ID NO: 1638575 - RNA, 19 nt, Artificial Sequence
  Description of Artificial Sequence: Synthetic oligonucleotide
gcucuguacgcagcggucu

SEQ ID NO: 1638576 - RNA, 19 nt, Artificial Sequence
  Description of Artificial Sequence: Synthetic oligonucleotide
ccucacuugcugcacuucu

SEQ ID NO: 1638577 - RNA, 19 nt, Artificial Sequence
  Description of Artificial Sequence: Synthetic oligonucleotide
cgggauccaccagagggug

SEQ ID NO: 1638578 - RNA, 19 nt, Artificial Sequence
  Description of Artificial Sequence: Synthetic oligonucleotide
gcggggcaugagcacucug

SEQ ID NO: 1638579 - RNA, 19 nt, Artificial Sequence
  Description of Artificial Sequence: Synthetic oligonucleotide
ccagauguacuccccuagu

SEQ ID NO: 1638580 - RNA, 19 nt, Artificial Sequence
  Description of Artificial Sequence: Synthetic oligonucleotide
ccucgugguauacgacaga

SEQ ID NO: 1638581 - RNA, 19 nt, Artificial Sequence
  Description of Artificial Sequence: Synthetic oligonucleotide
cucuguacgcagcggucuu

SEQ ID NO: 1638582 - RNA, 19 nt, Artificial Sequence
  Description of Artificial Sequence: Synthetic oligonucleotide
gggaugcugggcacgacau

SEQ ID NO: 1638583 - RNA, 19 nt, Artificial Sequence
  Description of Artificial Sequence: Synthetic oligonucleotide
caccgguuugcacucucuu

SEQ ID NO: 1638584 - RNA, 19 nt, Artificial Sequence
  Description of Artificial Sequence: Synthetic oligonucleotide
gcgcuguggucaguccagc

SEQ ID NO: 1638585 - RNA, 19 nt, Artificial Sequence
  Description of Artificial Sequence: Synthetic oligonucleotide
ggccacacgugggagcucu

SEQ ID NO: 1638586 - RNA, 19 nt, Artificial Sequence
  Description of Artificial Sequence: Synthetic oligonucleotide
ccuaguuggccaggucaca

SEQ ID NO: 1638587 - RNA, 19 nt, Artificial Sequence
  Description of Artificial Sequence: Synthetic oligonucleotide
cacuugcccuggcaguaau

SEQ ID NO: 1638588 - RNA, 19 nt, Artificial Sequence
  Description of Artificial Sequence: Synthetic oligonucleotide
cuggcagguucuggugcaa

SEQ ID NO: 1638589 - RNA, 19 nt, Artificial Sequence
  Description of Artificial Sequence: Synthetic oligonucleotide
gggcacgacauagcacaaa

SEQ ID NO: 1638590 - RNA, 19 nt, Artificial Sequence
  Description of Artificial Sequence: Synthetic oligonucleotide
gcaugggcuccguccucga

SEQ ID NO: 1638591 - RNA, 19 nt, Artificial Sequence
  Description of Artificial Sequence: Synthetic oligonucleotide
cgcagguccgggcguacuc

SEQ ID NO: 1638592 - RNA, 19 nt, Artificial Sequence
  Description of Artificial Sequence: Synthetic oligonucleotide
gcccggaauuuucacgauu

SEQ ID NO: 1638593 - RNA, 19 nt, Artificial Sequence
  Description of Artificial Sequence: Synthetic oligonucleotide
gggcaaacaccgaggcacu

SEQ ID NO: 1638594 - RNA, 19 nt, Artificial Sequence
  Description of Artificial Sequence: Synthetic oligonucleotide
cuccccuaguuggccaggu

SEQ ID NO: 1638595 - RNA, 19 nt, Artificial Sequence
  Description of Artificial Sequence: Synthetic oligonucleotide
gcugauggucugggaccca

SEQ ID NO: 1638596 - RNA, 19 nt, Artificial Sequence
  Description of Artificial Sequence: Synthetic oligonucleotide
gggcuccguccucgagggc

SEQ ID NO: 1638597 - RNA, 19 nt, Artificial Sequence
  Description of Artificial Sequence: Synthetic oligonucleotide
cacugagugcaggccuccu

SEQ ID NO: 1638598 - RNA, 19 nt, Artificial Sequence
  Description of Artificial Sequence: Synthetic oligonucleotide
cagugccgagggcagccau

SEQ ID NO: 1638599 - RNA, 19 nt, Artificial Sequence
  Description of Artificial Sequence: Synthetic oligonucleotide
gcgcagugcaguuggccuu

SEQ ID NO: 1638600 - RNA, 19 nt, Artificial Sequence
  Description of Artificial Sequence: Synthetic oligonucleotide
ccaugcucacagugguuau

SEQ ID NO: 1638601 - RNA, 19 nt, Artificial Sequence
  Description of Artificial Sequence: Synthetic oligonucleotide
gacaggcgcuguggucagu

SEQ ID NO: 1638602 - RNA, 19 nt, Artificial Sequence
  Description of Artificial Sequence: Synthetic oligonucleotide
cuggcacugcucccacauu

SEQ ID NO: 1638603 - RNA, 19 nt, Artificial Sequence
  Description of Artificial Sequence: Synthetic oligonucleotide
gcaccgguuugcacucucu

SEQ ID NO: 1638604 - RNA, 19 nt, Artificial Sequence
  Description of Artificial Sequence: Synthetic oligonucleotide
gccacacgugggagcucug

SEQ ID NO: 1638605 - RNA, 19 nt, Artificial Sequence
  Description of Artificial Sequence: Synthetic oligonucleotide
cgagggcccgcagcaggag

SEQ ID NO: 1638606 - RNA, 19 nt, Artificial Sequence
  Description of Artificial Sequence: Synthetic oligonucleotide
ccggaauuuucacgauuuu

SEQ ID NO: 1638607 - RNA, 19 nt, Artificial Sequence
  Description of Artificial Sequence: Synthetic oligonucleotide
ccaucccuuccugggcgca

SEQ ID NO: 1638608 - RNA, 19 nt, Artificial Sequence
  Description of Artificial Sequence: Synthetic oligonucleotide
gguauacgacagagccauu

SEQ ID NO: 1638609 - RNA, 19 nt, Artificial Sequence
  Description of Artificial Sequence: Synthetic oligonucleotide
gcgcagguccgggcguacu

SEQ ID NO: 1638610 - RNA, 19 nt, Artificial Sequence
  Description of Artificial Sequence: Synthetic oligonucleotide
cgacacaccugggcauucu

SEQ ID NO: 1638611 - RNA, 19 nt, Artificial Sequence
  Description of Artificial Sequence: Synthetic oligonucleotide
ccacagccguccacacauu

SEQ ID NO: 1638612 - RNA, 19 nt, Artificial Sequence
  Description of Artificial Sequence: Synthetic oligonucleotide
ccgcagcaggagcaauguu

SEQ ID NO: 1638613 - RNA, 19 nt, Artificial Sequence
  Description of Artificial Sequence: Synthetic oligonucleotide
uucaguaacuuccugagcg

SEQ ID NO: 1638614 - RNA, 19 nt, Artificial Sequence
  Description of Artificial Sequence: Synthetic oligonucleotide
uguucguacaaucugauca

SEQ ID NO: 1638615 - RNA, 19 nt, Artificial Sequence
  Description of Artificial Sequence: Synthetic oligonucleotide
aagucgauggucuuugccc

SEQ ID NO: 1638616 - RNA, 19 nt, Artificial Sequence
  Description of Artificial Sequence: Synthetic oligonucleotide
uuugaugggcaccugaugg

SEQ ID NO: 1638617 - RNA, 19 nt, Artificial Sequence
  Description of Artificial Sequence: Synthetic oligonucleotide
aagacugauucuuagcaac

SEQ ID NO: 1638618 - RNA, 19 nt, Artificial Sequence
  Description of Artificial Sequence: Synthetic oligonucleotide
aagaggauuuuguagcccc

SEQ ID NO: 1638619 - RNA, 19 nt, Artificial Sequence
  Description of Artificial Sequence: Synthetic oligonucleotide
gauuugaaagaacuguugg

SEQ ID NO: 1638620 - RNA, 19 nt, Artificial Sequence
  Description of Artificial Sequence: Synthetic oligonucleotide
aaggaguguaaccauacgg

SEQ ID NO: 1638621 - RNA, 19 nt, Artificial Sequence
  Description of Artificial Sequence: Synthetic oligonucleotide
aaaaugaagccaccgcggc

SEQ ID NO: 1638622 - RNA, 19 nt, Artificial Sequence
  Description of Artificial Sequence: Synthetic oligonucleotide
uuugaaagaacuguugggg

SEQ ID NO: 1638623 - RNA, 19 nt, Artificial Sequence
  Description of Artificial Sequence: Synthetic oligonucleotide
agauccacgacauauagug

SEQ ID NO: 1638624 - RNA, 19 nt, Artificial Sequence
  Description of Artificial Sequence: Synthetic oligonucleotide
uuuguacugaacaagcuca

SEQ ID NO: 1638625 - RNA, 19 nt, Artificial Sequence
  Description of Artificial Sequence: Synthetic oligonucleotide
agcaucuacaaacaggaac

SEQ ID NO: 1638626 - RNA, 19 nt, Artificial Sequence
  Description of Artificial Sequence: Synthetic oligonucleotide
uuugcguccagccaaauga

SEQ ID NO: 1638627 - RNA, 19 nt, Artificial Sequence
  Description of Artificial Sequence: Synthetic oligonucleotide
auugaaaucccuuaauucu

SEQ ID NO: 1638628 - RNA, 19 nt, Artificial Sequence
  Description of Artificial Sequence: Synthetic oligonucleotide
uuguuuaagagaauggcca

SEQ ID NO: 1638629 - RNA, 19 nt, Artificial Sequence
  Description of Artificial Sequence: Synthetic oligonucleotide
aaucccuuaauucuuucag

SEQ ID NO: 1638630 - RNA, 19 nt, Artificial Sequence
  Description of Artificial Sequence: Synthetic oligonucleotide
uuuaaugugcuugaacgcg

SEQ ID NO: 1638631 - RNA, 19 nt, Artificial Sequence
  Description of Artificial Sequence: Synthetic oligonucleotide
gggauuauuacacaagucg

SEQ ID NO: 1638632 - RNA, 19 nt, Artificial Sequence
  Description of Artificial Sequence: Synthetic oligonucleotide
acuuguuuaagagaauggc

SEQ ID NO: 1638633 - RNA, 19 nt, Artificial Sequence
  Description of Artificial Sequence: Synthetic oligonucleotide
aguagucuaaaucaauuug

SEQ ID NO: 1638634 - RNA, 19 nt, Artificial Sequence
  Description of Artificial Sequence: Synthetic oligonucleotide
augauuaucgguugggcuc

SEQ ID NO: 1638635 - RNA, 19 nt, Artificial Sequence
  Description of Artificial Sequence: Synthetic oligonucleotide
cuuguuuaagagaauggcc

SEQ ID NO: 1638636 - RNA, 19 nt, Artificial Sequence
  Description of Artificial Sequence: Synthetic oligonucleotide
cuuagaagcaucaucgcac

SEQ ID NO: 1638637 - RNA, 19 nt, Artificial Sequence
  Description of Artificial Sequence: Synthetic oligonucleotide
gauugaaaucccuuaauuc

SEQ ID NO: 1638638 - RNA, 19 nt, Artificial Sequence
  Description of Artificial Sequence: Synthetic oligonucleotide
gaacuugucaaccaccagc

SEQ ID NO: 1638639 - RNA, 19 nt, Artificial Sequence
  Description of Artificial Sequence: Synthetic oligonucleotide
cauguaagguauaaacucc

SEQ ID NO: 1638640 - RNA, 19 nt, Artificial Sequence
  Description of Artificial Sequence: Synthetic oligonucleotide
aaugugugcucuuggaugu

SEQ ID NO: 1638641 - RNA, 19 nt, Artificial Sequence
  Description of Artificial Sequence: Synthetic oligonucleotide
ugauaugauauuugcgucc

SEQ ID NO: 1638642 - RNA, 19 nt, Artificial Sequence
  Description of Artificial Sequence: Synthetic oligonucleotide
uuagucaugggauuauuac

SEQ ID NO: 1638643 - RNA, 19 nt, Artificial Sequence
  Description of Artificial Sequence: Synthetic oligonucleotide
ucagauccacgacauauag

SEQ ID NO: 1638644 - RNA, 19 nt, Artificial Sequence
  Description of Artificial Sequence: Synthetic oligonucleotide
aaugacuggcccaguaucc

SEQ ID NO: 1638645 - RNA, 19 nt, Artificial Sequence
  Description of Artificial Sequence: Synthetic oligonucleotide
aacuugucaaccaccagcg

SEQ ID NO: 1638646 - RNA, 19 nt, Artificial Sequence
  Description of Artificial Sequence: Synthetic oligonucleotide
agucaugggauuauuacac

SEQ ID NO: 1638647 - RNA, 19 nt, Artificial Sequence
  Description of Artificial Sequence: Synthetic oligonucleotide
ucuaccuuugaacaccaca

SEQ ID NO: 1638648 - RNA, 19 nt, Artificial Sequence
  Description of Artificial Sequence: Synthetic oligonucleotide
uauuugcuggccauguaag

SEQ ID NO: 1638649 - RNA, 19 nt, Artificial Sequence
  Description of Artificial Sequence: Synthetic oligonucleotide
ugucuucuaccuuugaaca

SEQ ID NO: 1638650 - RNA, 19 nt, Artificial Sequence
  Description of Artificial Sequence: Synthetic oligonucleotide
cuugucaaccaccagcggg

SEQ ID NO: 1638651 - RNA, 19 nt, Artificial Sequence
  Description of Artificial Sequence: Synthetic oligonucleotide
uaaggaaggacaugguggc

SEQ ID NO: 1638652 - RNA, 19 nt, Artificial Sequence
  Description of Artificial Sequence: Synthetic oligonucleotide
acugaacaagcucauacug

SEQ ID NO: 1638653 - RNA, 19 nt, Artificial Sequence
  Description of Artificial Sequence: Synthetic oligonucleotide
agucuaaaucaauuugauc

SEQ ID NO: 1638654 - RNA, 19 nt, Artificial Sequence
  Description of Artificial Sequence: Synthetic oligonucleotide
aaccauacggggcaccauc

SEQ ID NO: 1638655 - RNA, 19 nt, Artificial Sequence
  Description of Artificial Sequence: Synthetic oligonucleotide
ucuaaaucaauuugaucuc

SEQ ID NO: 1638656 - RNA, 19 nt, Artificial Sequence
  Description of Artificial Sequence: Synthetic oligonucleotide
uuggaugaagcaucugccg

SEQ ID NO: 1638657 - RNA, 19 nt, Artificial Sequence
  Description of Artificial Sequence: Synthetic oligonucleotide
uggaaaaugaagccaccgc

SEQ ID NO: 1638658 - RNA, 19 nt, Artificial Sequence
  Description of Artificial Sequence: Synthetic oligonucleotide
uagugcacugauaugauau

SEQ ID NO: 1638659 - RNA, 19 nt, Artificial Sequence
  Description of Artificial Sequence: Synthetic oligonucleotide
ugauucuuagcaacugagc

SEQ ID NO: 1638660 - RNA, 19 nt, Artificial Sequence
  Description of Artificial Sequence: Synthetic oligonucleotide
cugaacaagcucauacugg

SEQ ID NO: 1638661 - RNA, 19 nt, Artificial Sequence
  Description of Artificial Sequence: Synthetic oligonucleotide
cuuugaacaccacaaacuc

SEQ ID NO: 1638662 - RNA, 19 nt, Artificial Sequence
  Description of Artificial Sequence: Synthetic oligonucleotide
gauauuugcguccagccaa

SEQ ID NO: 1638663 - RNA, 19 nt, Artificial Sequence
  Description of Artificial Sequence: Synthetic oligonucleotide
aguguaaccauacggggca

SEQ ID NO: 1638664 - RNA, 19 nt, Artificial Sequence
  Description of Artificial Sequence: Synthetic oligonucleotide
ucauagucuugccacucgg

SEQ ID NO: 1638665 - RNA, 19 nt, Artificial Sequence
  Description of Artificial Sequence: Synthetic oligonucleotide
uagaccuugaggcauggac

SEQ ID NO: 1638666 - RNA, 19 nt, Artificial Sequence
  Description of Artificial Sequence: Synthetic oligonucleotide
guacugaacaagcucauac

SEQ ID NO: 1638667 - RNA, 19 nt, Artificial Sequence
  Description of Artificial Sequence: Synthetic oligonucleotide
ugcuggaaaaugaagccac

SEQ ID NO: 1638668 - RNA, 19 nt, Artificial Sequence
  Description of Artificial Sequence: Synthetic oligonucleotide
guauaaacuccuuaaaugu

SEQ ID NO: 1638669 - RNA, 19 nt, Artificial Sequence
  Description of Artificial Sequence: Synthetic oligonucleotide
gaucuguucguacaaucug

SEQ ID NO: 1638670 - RNA, 19 nt, Artificial Sequence
  Description of Artificial Sequence: Synthetic oligonucleotide
uuugaacaccacaaacucu

SEQ ID NO: 1638671 - RNA, 19 nt, Artificial Sequence
  Description of Artificial Sequence: Synthetic oligonucleotide
uaugauauuugcguccagc

SEQ ID NO: 1638672 - RNA, 19 nt, Artificial Sequence
  Description of Artificial Sequence: Synthetic oligonucleotide
uuaaugugcuugaacgcga

SEQ ID NO: 1638673 - RNA, 19 nt, Artificial Sequence
  Description of Artificial Sequence: Synthetic oligonucleotide
ggugcaguagucuaaauca

SEQ ID NO: 1638674 - RNA, 19 nt, Artificial Sequence
  Description of Artificial Sequence: Synthetic oligonucleotide
agucgauggucuuugcccg

SEQ ID NO: 1638675 - RNA, 19 nt, Artificial Sequence
  Description of Artificial Sequence: Synthetic oligonucleotide
aacgcgaucuggcauguga

SEQ ID NO: 1638676 - RNA, 19 nt, Artificial Sequence
  Description of Artificial Sequence: Synthetic oligonucleotide
caugggauuauuacacaag

SEQ ID NO: 1638677 - RNA, 19 nt, Artificial Sequence
  Description of Artificial Sequence: Synthetic oligonucleotide
ugauauuugcguccagcca

SEQ ID NO: 1638678 - RNA, 19 nt, Artificial Sequence
  Description of Artificial Sequence: Synthetic oligonucleotide
uuugucuucuaccuuugaa

SEQ ID NO: 1638679 - RNA, 19 nt, Artificial Sequence
  Description of Artificial Sequence: Synthetic oligonucleotide
agcgacaauguuuaaugug

SEQ ID NO: 1638680 - RNA, 19 nt, Artificial Sequence
  Description of Artificial Sequence: Synthetic oligonucleotide
aagguauaaacuccuuaaa

SEQ ID NO: 1638681 - RNA, 19 nt, Artificial Sequence
  Description of Artificial Sequence: Synthetic oligonucleotide
cacugauaugauauuugcg

SEQ ID NO: 1638682 - RNA, 19 nt, Artificial Sequence
  Description of Artificial Sequence: Synthetic oligonucleotide
uugucaaccaccagcggga

SEQ ID NO: 1638683 - RNA, 19 nt, Artificial Sequence
  Description of Artificial Sequence: Synthetic oligonucleotide
cuucugcuaucacagaaag

SEQ ID NO: 1638684 - RNA, 19 nt, Artificial Sequence
  Description of Artificial Sequence: Synthetic oligonucleotide
auuacacaagucgaugguc

SEQ ID NO: 1638685 - RNA, 19 nt, Artificial Sequence
  Description of Artificial Sequence: Synthetic oligonucleotide
cuaaaucaauuugaucucc

SEQ ID NO: 1638686 - RNA, 19 nt, Artificial Sequence
  Description of Artificial Sequence: Synthetic oligonucleotide
guucguacaaucugaucag

SEQ ID NO: 1638687 - RNA, 19 nt, Artificial Sequence
  Description of Artificial Sequence: Synthetic oligonucleotide
acaugauuaucgguugggc

SEQ ID NO: 1638688 - RNA, 19 nt, Artificial Sequence
  Description of Artificial Sequence: Synthetic oligonucleotide
uuuagucaugggauuauua

SEQ ID NO: 1638689 - RNA, 19 nt, Artificial Sequence
  Description of Artificial Sequence: Synthetic oligonucleotide
uaaugcuugggaagagacc

SEQ ID NO: 1638690 - RNA, 19 nt, Artificial Sequence
  Description of Artificial Sequence: Synthetic oligonucleotide
agauugaaaucccuuaauu

SEQ ID NO: 1638691 - RNA, 19 nt, Artificial Sequence
  Description of Artificial Sequence: Synthetic oligonucleotide
ugggcucaauucaacaaug

SEQ ID NO: 1638692 - RNA, 19 nt, Artificial Sequence
  Description of Artificial Sequence: Synthetic oligonucleotide
uacuggaaguuguauuugc

SEQ ID NO: 1638693 - RNA, 19 nt, Artificial Sequence
  Description of Artificial Sequence: Synthetic oligonucleotide
ugaggcauggaccuuggau

SEQ ID NO: 1638694 - RNA, 19 nt, Artificial Sequence
  Description of Artificial Sequence: Synthetic oligonucleotide
uugaacgcgaucuggcaug

SEQ ID NO: 1638695 - RNA, 19 nt, Artificial Sequence
  Description of Artificial Sequence: Synthetic oligonucleotide
aagggagucccagaagauc

SEQ ID NO: 1638696 - RNA, 19 nt, Artificial Sequence
  Description of Artificial Sequence: Synthetic oligonucleotide
ucguacaaucugaucagca

SEQ ID NO: 1638697 - RNA, 19 nt, Artificial Sequence
  Description of Artificial Sequence: Synthetic oligonucleotide
ucggggacgauucgcacag

SEQ ID NO: 1638698 - RNA, 19 nt, Artificial Sequence
  Description of Artificial Sequence: Synthetic oligonucleotide
uacugaacaagcucauacu

SEQ ID NO: 1638699 - RNA, 19 nt, Artificial Sequence
  Description of Artificial Sequence: Synthetic oligonucleotide
ucaugggauuauuacacaa

SEQ ID NO: 1638700 - RNA, 19 nt, Artificial Sequence
  Description of Artificial Sequence: Synthetic oligonucleotide
aaugugcuugaacgcgauc

SEQ ID NO: 1638701 - RNA, 19 nt, Artificial Sequence
  Description of Artificial Sequence: Synthetic oligonucleotide
cugauaugauauuugcguc

SEQ ID NO: 1638702 - RNA, 19 nt, Artificial Sequence
  Description of Artificial Sequence: Synthetic oligonucleotide
ugcuugaacgcgaucuggc

SEQ ID NO: 1638703 - RNA, 19 nt, Artificial Sequence
  Description of Artificial Sequence: Synthetic oligonucleotide
uuucaguaacuuccugagc

SEQ ID NO: 1638704 - RNA, 19 nt, Artificial Sequence
  Description of Artificial Sequence: Synthetic oligonucleotide
guagucuaaaucaauuuga

SEQ ID NO: 1638705 - RNA, 19 nt, Artificial Sequence
  Description of Artificial Sequence: Synthetic oligonucleotide
ucaaccaccagcgggaaaa

SEQ ID NO: 1638706 - RNA, 19 nt, Artificial Sequence
  Description of Artificial Sequence: Synthetic oligonucleotide
uccugagcgacaauguuua

SEQ ID NO: 1638707 - RNA, 19 nt, Artificial Sequence
  Description of Artificial Sequence: Synthetic oligonucleotide
aucgguugggcucaauuca

SEQ ID NO: 1638708 - RNA, 19 nt, Artificial Sequence
  Description of Artificial Sequence: Synthetic oligonucleotide
ggaguguaaccauacgggg

SEQ ID NO: 1638709 - RNA, 19 nt, Artificial Sequence
  Description of Artificial Sequence: Synthetic oligonucleotide
gaaaggaguguaaccauac

SEQ ID NO: 1638710 - RNA, 19 nt, Artificial Sequence
  Description of Artificial Sequence: Synthetic oligonucleotide
uugggcucaauucaacaau

SEQ ID NO: 1638711 - RNA, 19 nt, Artificial Sequence
  Description of Artificial Sequence: Synthetic oligonucleotide
uaucgguugggcucaauuc

SEQ ID NO: 1638712 - RNA, 19 nt, Artificial Sequence
  Description of Artificial Sequence: Synthetic oligonucleotide
gauaugauauuugcgucca

SEQ ID NO: 1638713 - RNA, 19 nt, Artificial Sequence
  Description of Artificial Sequence: Synthetic oligonucleotide
ccauguaagguauaaacuc

SEQ ID NO: 1638714 - RNA, 19 nt, Artificial Sequence
  Description of Artificial Sequence: Synthetic oligonucleotide
aaucuugaucaagauuuga

SEQ ID NO: 1638715 - RNA, 19 nt, Artificial Sequence
  Description of Artificial Sequence: Synthetic oligonucleotide
aauucaacaaugagccuaa

SEQ ID NO: 1638716 - RNA, 19 nt, Artificial Sequence
  Description of Artificial Sequence: Synthetic oligonucleotide
gaaguuguauuugcuggcc

SEQ ID NO: 1638717 - RNA, 19 nt, Artificial Sequence
  Description of Artificial Sequence: Synthetic oligonucleotide
uuagccccaaagauccagc

SEQ ID NO: 1638718 - RNA, 19 nt, Artificial Sequence
  Description of Artificial Sequence: Synthetic oligonucleotide
aacaaugagccuaaugcuu

SEQ ID NO: 1638719 - RNA, 19 nt, Artificial Sequence
  Description of Artificial Sequence: Synthetic oligonucleotide
gauccagcacccacuaggg

SEQ ID NO: 1638720 - RNA, 19 nt, Artificial Sequence
  Description of Artificial Sequence: Synthetic oligonucleotide
ugggauuauuacacaaguc

SEQ ID NO: 1638721 - RNA, 19 nt, Artificial Sequence
  Description of Artificial Sequence: Synthetic oligonucleotide
cuggaaaaugaagccaccg

SEQ ID NO: 1638722 - RNA, 19 nt, Artificial Sequence
  Description of Artificial Sequence: Synthetic oligonucleotide
cauauagugcacugauaug

SEQ ID NO: 1638723 - RNA, 19 nt, Artificial Sequence
  Description of Artificial Sequence: Synthetic oligonucleotide
uuuaagagaauggccaauu

SEQ ID NO: 1638724 - RNA, 19 nt, Artificial Sequence
  Description of Artificial Sequence: Synthetic oligonucleotide
aucgcaccacgucucacac

SEQ ID NO: 1638725 - RNA, 19 nt, Artificial Sequence
  Description of Artificial Sequence: Synthetic oligonucleotide
cuaccuuugaacaccacaa

SEQ ID NO: 1638726 - RNA, 19 nt, Artificial Sequence
  Description of Artificial Sequence: Synthetic oligonucleotide
auuugaugggcaccugaug

SEQ ID NO: 1638727 - RNA, 19 nt, Artificial Sequence
  Description of Artificial Sequence: Synthetic oligonucleotide
gcaccaaagacucaguuuc

SEQ ID NO: 1638728 - RNA, 19 nt, Artificial Sequence
  Description of Artificial Sequence: Synthetic oligonucleotide
cuuagcaacugagccaacc

SEQ ID NO: 1638729 - RNA, 19 nt, Artificial Sequence
  Description of Artificial Sequence: Synthetic oligonucleotide
acgucucacaccaccagcc

SEQ ID NO: 1638730 - RNA, 19 nt, Artificial Sequence
  Description of Artificial Sequence: Synthetic oligonucleotide
gaguguaaccauacggggc

SEQ ID NO: 1638731 - RNA, 19 nt, Artificial Sequence
  Description of Artificial Sequence: Synthetic oligonucleotide
ucagaccuugguacugucc

SEQ ID NO: 1638732 - RNA, 19 nt, Artificial Sequence
  Description of Artificial Sequence: Synthetic oligonucleotide
cuccugaucauagucuugc

SEQ ID NO: 1638733 - RNA, 19 nt, Artificial Sequence
  Description of Artificial Sequence: Synthetic oligonucleotide
uagcaacugagccaacccu

SEQ ID NO: 1638734 - RNA, 19 nt, Artificial Sequence
  Description of Artificial Sequence: Synthetic oligonucleotide
cugagguacaaauccaaca

SEQ ID NO: 1638735 - RNA, 19 nt, Artificial Sequence
  Description of Artificial Sequence: Synthetic oligonucleotide
uuaucgguugggcucaauu

SEQ ID NO: 1638736 - RNA, 19 nt, Artificial Sequence
  Description of Artificial Sequence: Synthetic oligonucleotide
ucuuucaauugcugccacc

SEQ ID NO: 1638737 - RNA, 19 nt, Artificial Sequence
  Description of Artificial Sequence: Synthetic oligonucleotide
ugauuaucgguugggcuca

SEQ ID NO: 1638738 - RNA, 19 nt, Artificial Sequence
  Description of Artificial Sequence: Synthetic oligonucleotide
aagacucaguuucuuucaa

SEQ ID NO: 1638739 - RNA, 19 nt, Artificial Sequence
  Description of Artificial Sequence: Synthetic oligonucleotide
ggacgauucgcacagcagc

SEQ ID NO: 1638740 - RNA, 19 nt, Artificial Sequence
  Description of Artificial Sequence: Synthetic oligonucleotide
cauggaccuuggaugaagc

SEQ ID NO: 1638741 - RNA, 19 nt, Artificial Sequence
  Description of Artificial Sequence: Synthetic oligonucleotide
uuuuguagccccagaugau

SEQ ID NO: 1638742 - RNA, 19 nt, Artificial Sequence
  Description of Artificial Sequence: Synthetic oligonucleotide
gaagacugauucuuagcaa

SEQ ID NO: 1638743 - RNA, 19 nt, Artificial Sequence
  Description of Artificial Sequence: Synthetic oligonucleotide
auuugcguccagccaaaug

SEQ ID NO: 1638744 - RNA, 19 nt, Artificial Sequence
  Description of Artificial Sequence: Synthetic oligonucleotide
agccccaaagauccagcac

SEQ ID NO: 1638745 - RNA, 19 nt, Artificial Sequence
  Description of Artificial Sequence: Synthetic oligonucleotide
gcgacaauguuuaaugugc

SEQ ID NO: 1638746 - RNA, 19 nt, Artificial Sequence
  Description of Artificial Sequence: Synthetic oligonucleotide
cuuucaauugcugccacca

SEQ ID NO: 1638747 - RNA, 19 nt, Artificial Sequence
  Description of Artificial Sequence: Synthetic oligonucleotide
uucagauccacgacauaua

SEQ ID NO: 1638748 - RNA, 19 nt, Artificial Sequence
  Description of Artificial Sequence: Synthetic oligonucleotide
caguuugggcucuuuaguc

SEQ ID NO: 1638749 - RNA, 19 nt, Artificial Sequence
  Description of Artificial Sequence: Synthetic oligonucleotide
uguaagguauaaacuccuu

SEQ ID NO: 1638750 - RNA, 19 nt, Artificial Sequence
  Description of Artificial Sequence: Synthetic oligonucleotide
accgcggccauuuguacug

SEQ ID NO: 1638751 - RNA, 19 nt, Artificial Sequence
  Description of Artificial Sequence: Synthetic oligonucleotide
cacgacauauagugcacug

SEQ ID NO: 1638752 - RNA, 19 nt, Artificial Sequence
  Description of Artificial Sequence: Synthetic oligonucleotide
guaagguauaaacuccuua

SEQ ID NO: 1638753 - RNA, 19 nt, Artificial Sequence
  Description of Artificial Sequence: Synthetic oligonucleotide
agaucuguucguacaaucu

SEQ ID NO: 1638754 - RNA, 19 nt, Artificial Sequence
  Description of Artificial Sequence: Synthetic oligonucleotide
caauucaacaaugagccua

SEQ ID NO: 1638755 - RNA, 19 nt, Artificial Sequence
  Description of Artificial Sequence: Synthetic oligonucleotide
agccuuagccccaaagauc

SEQ ID NO: 1638756 - RNA, 19 nt, Artificial Sequence
  Description of Artificial Sequence: Synthetic oligonucleotide
uggaccuuggaugaagcau

SEQ ID NO: 1638757 - RNA, 19 nt, Artificial Sequence
  Description of Artificial Sequence: Synthetic oligonucleotide
acuugucaaccaccagcgg

SEQ ID NO: 1638758 - RNA, 19 nt, Artificial Sequence
  Description of Artificial Sequence: Synthetic oligonucleotide
accauacggggcaccaucc

SEQ ID NO: 1638759 - RNA, 19 nt, Artificial Sequence
  Description of Artificial Sequence: Synthetic oligonucleotide
augagccuaaugcuuggga

SEQ ID NO: 1638760 - RNA, 19 nt, Artificial Sequence
  Description of Artificial Sequence: Synthetic oligonucleotide
cuugaggcauggaccuugg

SEQ ID NO: 1638761 - RNA, 19 nt, Artificial Sequence
  Description of Artificial Sequence: Synthetic oligonucleotide
cugauggaucauguuauug

SEQ ID NO: 1638762 - RNA, 19 nt, Artificial Sequence
  Description of Artificial Sequence: Synthetic oligonucleotide
ugacucagaccuugguacu

SEQ ID NO: 1638763 - RNA, 19 nt, Artificial Sequence
  Description of Artificial Sequence: Synthetic oligonucleotide
cagguaaacugagguaagg

SEQ ID NO: 1638764 - RNA, 19 nt, Artificial Sequence
  Description of Artificial Sequence: Synthetic oligonucleotide
ggauuauuacacaagucga

SEQ ID NO: 1638765 - RNA, 19 nt, Artificial Sequence
  Description of Artificial Sequence: Synthetic oligonucleotide
uuguacugaacaagcucau

SEQ ID NO: 1638766 - RNA, 19 nt, Artificial Sequence
  Description of Artificial Sequence: Synthetic oligonucleotide
aagaucagccaugugucuu

SEQ ID NO: 1638767 - RNA, 19 nt, Artificial Sequence
  Description of Artificial Sequence: Synthetic oligonucleotide
guugggcucaauucaacaa

SEQ ID NO: 1638768 - RNA, 19 nt, Artificial Sequence
  Description of Artificial Sequence: Synthetic oligonucleotide
gugagaaguccucauaacu

SEQ ID NO: 1638769 - RNA, 19 nt, Artificial Sequence
  Description of Artificial Sequence: Synthetic oligonucleotide
guuauugggcaaaucuuga

SEQ ID NO: 1638770 - RNA, 19 nt, Artificial Sequence
  Description of Artificial Sequence: Synthetic oligonucleotide
gaggauuuuguagccccag

SEQ ID NO: 1638771 - RNA, 19 nt, Artificial Sequence
  Description of Artificial Sequence: Synthetic oligonucleotide
uaaugugcuugaacgcgau

SEQ ID NO: 1638772 - RNA, 19 nt, Artificial Sequence
  Description of Artificial Sequence: Synthetic oligonucleotide
uugcguccagccaaaugac

SEQ ID NO: 1638773 - RNA, 19 nt, Artificial Sequence
  Description of Artificial Sequence: Synthetic oligonucleotide
uucguacaaucugaucagc

SEQ ID NO: 1638774 - RNA, 19 nt, Artificial Sequence
  Description of Artificial Sequence: Synthetic oligonucleotide
auaugauauuugcguccag

SEQ ID NO: 1638775 - RNA, 19 nt, Artificial Sequence
  Description of Artificial Sequence: Synthetic oligonucleotide
aucuguucguacaaucuga

SEQ ID NO: 1638776 - RNA, 19 nt, Artificial Sequence
  Description of Artificial Sequence: Synthetic oligonucleotide
acucggggacgauucgcac

SEQ ID NO: 1638777 - RNA, 19 nt, Artificial Sequence
  Description of Artificial Sequence: Synthetic oligonucleotide
agggauuugaugggcaccu

SEQ ID NO: 1638778 - RNA, 19 nt, Artificial Sequence
  Description of Artificial Sequence: Synthetic oligonucleotide
ucgguugggcucaauucaa

SEQ ID NO: 1638779 - RNA, 19 nt, Artificial Sequence
  Description of Artificial Sequence: Synthetic oligonucleotide
gauccacgacauauagugc

SEQ ID NO: 1638780 - RNA, 19 nt, Artificial Sequence
  Description of Artificial Sequence: Synthetic oligonucleotide
agcaacugagccaacccug

SEQ ID NO: 1638781 - RNA, 19 nt, Artificial Sequence
  Description of Artificial Sequence: Synthetic oligonucleotide
aaccgguagccauccauuu

SEQ ID NO: 1638782 - RNA, 19 nt, Artificial Sequence
  Description of Artificial Sequence: Synthetic oligonucleotide
uagaagcaucaucgcacca

SEQ ID NO: 1638783 - RNA, 19 nt, Artificial Sequence
  Description of Artificial Sequence: Synthetic oligonucleotide
caccacgucucacaccacc

SEQ ID NO: 1638784 - RNA, 19 nt, Artificial Sequence
  Description of Artificial Sequence: Synthetic oligonucleotide
gauucgcacagcagcuucc

SEQ ID NO: 1638785 - RNA, 19 nt, Artificial Sequence
  Description of Artificial Sequence: Synthetic oligonucleotide
uguauuugcuggccaugua

SEQ ID NO: 1638786 - RNA, 19 nt, Artificial Sequence
  Description of Artificial Sequence: Synthetic oligonucleotide
caccagcgggaaaagcacg

SEQ ID NO: 1638787 - RNA, 19 nt, Artificial Sequence
  Description of Artificial Sequence: Synthetic oligonucleotide
gcaucugccgugcagcgag

SEQ ID NO: 1638788 - RNA, 19 nt, Artificial Sequence
  Description of Artificial Sequence: Synthetic oligonucleotide
caucaucgcaccacgucuc

SEQ ID NO: 1638789 - RNA, 19 nt, Artificial Sequence
  Description of Artificial Sequence: Synthetic oligonucleotide
caccagccacuccugaggg

SEQ ID NO: 1638790 - RNA, 19 nt, Artificial Sequence
  Description of Artificial Sequence: Synthetic oligonucleotide
uagccccaaagauccagca

SEQ ID NO: 1638791 - RNA, 19 nt, Artificial Sequence
  Description of Artificial Sequence: Synthetic oligonucleotide
gacucaguuucuuucaauu

SEQ ID NO: 1638792 - RNA, 19 nt, Artificial Sequence
  Description of Artificial Sequence: Synthetic oligonucleotide
ccugaagacugauucuuag

SEQ ID NO: 1638793 - RNA, 19 nt, Artificial Sequence
  Description of Artificial Sequence: Synthetic oligonucleotide
gugaagggagucccagaag

SEQ ID NO: 1638794 - RNA, 19 nt, Artificial Sequence
  Description of Artificial Sequence: Synthetic oligonucleotide
accuuccagacauuuggaa

SEQ ID NO: 1638795 - RNA, 19 nt, Artificial Sequence
  Description of Artificial Sequence: Synthetic oligonucleotide
aggacaugguggcuuuucu

SEQ ID NO: 1638796 - RNA, 19 nt, Artificial Sequence
  Description of Artificial Sequence: Synthetic oligonucleotide
ugcguccagccaaaugacu

SEQ ID NO: 1638797 - RNA, 19 nt, Artificial Sequence
  Description of Artificial Sequence: Synthetic oligonucleotide
guaacuuccugagcgacaa

SEQ ID NO: 1638798 - RNA, 19 nt, Artificial Sequence
  Description of Artificial Sequence: Synthetic oligonucleotide
agcagcuauuuuccuaaau

SEQ ID NO: 1638799 - RNA, 19 nt, Artificial Sequence
  Description of Artificial Sequence: Synthetic oligonucleotide
auagugcacugauaugaua

SEQ ID NO: 1638800 - RNA, 19 nt, Artificial Sequence
  Description of Artificial Sequence: Synthetic oligonucleotide
gugcuugaacgcgaucugg

SEQ ID NO: 1638801 - RNA, 19 nt, Artificial Sequence
  Description of Artificial Sequence: Synthetic oligonucleotide
agugcacugauaugauauu

SEQ ID NO: 1638802 - RNA, 19 nt, Artificial Sequence
  Description of Artificial Sequence: Synthetic oligonucleotide
agacucaguuucuuucaau

SEQ ID NO: 1638803 - RNA, 19 nt, Artificial Sequence
  Description of Artificial Sequence: Synthetic oligonucleotide
auggaccuuggaugaagca

SEQ ID NO: 1638804 - RNA, 19 nt, Artificial Sequence
  Description of Artificial Sequence: Synthetic oligonucleotide
caugauuaucgguugggcu

SEQ ID NO: 1638805 - RNA, 19 nt, Artificial Sequence
  Description of Artificial Sequence: Synthetic oligonucleotide
gggauccugacucagaccu

SEQ ID NO: 1638806 - RNA, 19 nt, Artificial Sequence
  Description of Artificial Sequence: Synthetic oligonucleotide
uccugacuuccagaaccgg

SEQ ID NO: 1638807 - RNA, 19 nt, Artificial Sequence
  Description of Artificial Sequence: Synthetic oligonucleotide
gaacuguuggggauccuga

SEQ ID NO: 1638808 - RNA, 19 nt, Artificial Sequence
  Description of Artificial Sequence: Synthetic oligonucleotide
agaaccuuccagacauuug

SEQ ID NO: 1638809 - RNA, 19 nt, Artificial Sequence
  Description of Artificial Sequence: Synthetic oligonucleotide
gggugcaguagucuaaauc

SEQ ID NO: 1638810 - RNA, 19 nt, Artificial Sequence
  Description of Artificial Sequence: Synthetic oligonucleotide
gaucuggcaugugagaagu

SEQ ID NO: 1638811 - RNA, 19 nt, Artificial Sequence
  Description of Artificial Sequence: Synthetic oligonucleotide
cuguucguacaaucugauc

SEQ ID NO: 1638812 - RNA, 19 nt, Artificial Sequence
  Description of Artificial Sequence: Synthetic oligonucleotide
caccugauggaucauguua

SEQ ID NO: 1638813 - RNA, 19 nt, Artificial Sequence
  Description of Artificial Sequence: Synthetic oligonucleotide
aacccucacccaagccacc

SEQ ID NO: 1638814 - RNA, 19 nt, Artificial Sequence
  Description of Artificial Sequence: Synthetic oligonucleotide
aucaucgcaccacgucuca

SEQ ID NO: 1638815 - RNA, 19 nt, Artificial Sequence
  Description of Artificial Sequence: Synthetic oligonucleotide
ucauguuauugggcaaauc

SEQ ID NO: 1638816 - RNA, 19 nt, Artificial Sequence
  Description of Artificial Sequence: Synthetic oligonucleotide
agcgggaaaagcacgucca

SEQ ID NO: 1638817 - RNA, 19 nt, Artificial Sequence
  Description of Artificial Sequence: Synthetic oligonucleotide
gguugggcucaauucaaca

SEQ ID NO: 1638818 - RNA, 19 nt, Artificial Sequence
  Description of Artificial Sequence: Synthetic oligonucleotide
uagggugcaguagucuaaa

SEQ ID NO: 1638819 - RNA, 19 nt, Artificial Sequence
  Description of Artificial Sequence: Synthetic oligonucleotide
ggauuugaugggcaccuga

SEQ ID NO: 1638820 - RNA, 19 nt, Artificial Sequence
  Description of Artificial Sequence: Synthetic oligonucleotide
cauaacuagaaaacuuguu

SEQ ID NO: 1638821 - RNA, 19 nt, Artificial Sequence
  Description of Artificial Sequence: Synthetic oligonucleotide
guaaccauacggggcacca

SEQ ID NO: 1638822 - RNA, 19 nt, Artificial Sequence
  Description of Artificial Sequence: Synthetic oligonucleotide
guagccauccauuucucuu

SEQ ID NO: 1638823 - RNA, 19 nt, Artificial Sequence
  Description of Artificial Sequence: Synthetic oligonucleotide
ucucugucugcuggaaaau

SEQ ID NO: 1638824 - RNA, 19 nt, Artificial Sequence
  Description of Artificial Sequence: Synthetic oligonucleotide
ugggcaccaaagacucagu

SEQ ID NO: 1638825 - RNA, 19 nt, Artificial Sequence
  Description of Artificial Sequence: Synthetic oligonucleotide
ugaacgcgaucuggcaugu

SEQ ID NO: 1638826 - RNA, 19 nt, Artificial Sequence
  Description of Artificial Sequence: Synthetic oligonucleotide
acgcgaucuggcaugugag

SEQ ID NO: 1638827 - RNA, 19 nt, Artificial Sequence
  Description of Artificial Sequence: Synthetic oligonucleotide
cuagggugcaguagucuaa

SEQ ID NO: 1638828 - RNA, 19 nt, Artificial Sequence
  Description of Artificial Sequence: Synthetic oligonucleotide
caugugagaaguccucaua

SEQ ID NO: 1638829 - RNA, 19 nt, Artificial Sequence
  Description of Artificial Sequence: Synthetic oligonucleotide
guccagccaaaugacuggc

SEQ ID NO: 1638830 - RNA, 19 nt, Artificial Sequence
  Description of Artificial Sequence: Synthetic oligonucleotide
gauuugaugggcaccugau

SEQ ID NO: 1638831 - RNA, 19 nt, Artificial Sequence
  Description of Artificial Sequence: Synthetic oligonucleotide
caguauccugacuuccaga

SEQ ID NO: 1638832 - RNA, 19 nt, Artificial Sequence
  Description of Artificial Sequence: Synthetic oligonucleotide
ucgauggucuuugcccgcu

SEQ ID NO: 1638833 - RNA, 19 nt, Artificial Sequence
  Description of Artificial Sequence: Synthetic oligonucleotide
gacgauucgcacagcagcu

SEQ ID NO: 1638834 - RNA, 19 nt, Artificial Sequence
  Description of Artificial Sequence: Synthetic oligonucleotide
cucggggacgauucgcaca

SEQ ID NO: 1638835 - RNA, 19 nt, Artificial Sequence
  Description of Artificial Sequence: Synthetic oligonucleotide
cuuugcccgcuucuuagaa

SEQ ID NO: 1638836 - RNA, 19 nt, Artificial Sequence
  Description of Artificial Sequence: Synthetic oligonucleotide
acccacuagggugcaguag

SEQ ID NO: 1638837 - RNA, 19 nt, Artificial Sequence
  Description of Artificial Sequence: Synthetic oligonucleotide
agccccagaugauccgcug

SEQ ID NO: 1638838 - RNA, 19 nt, Artificial Sequence
  Description of Artificial Sequence: Synthetic oligonucleotide
accagcgggaaaagcacgu

SEQ ID NO: 1638839 - RNA, 19 nt, Artificial Sequence
  Description of Artificial Sequence: Synthetic oligonucleotide
aagcaucaucgcaccacgu

SEQ ID NO: 1638840 - RNA, 19 nt, Artificial Sequence
  Description of Artificial Sequence: Synthetic oligonucleotide
ccaacccucacccaagcca

SEQ ID NO: 1638841 - RNA, 19 nt, Artificial Sequence
  Description of Artificial Sequence: Synthetic oligonucleotide
ccccaaagauccagcaccc

SEQ ID NO: 1638842 - RNA, 19 nt, Artificial Sequence
  Description of Artificial Sequence: Synthetic oligonucleotide
auauuugcguccagccaaa

SEQ ID NO: 1638843 - RNA, 19 nt, Artificial Sequence
  Description of Artificial Sequence: Synthetic oligonucleotide
gaacaagcucauacuggaa

SEQ ID NO: 1638844 - RNA, 19 nt, Artificial Sequence
  Description of Artificial Sequence: Synthetic oligonucleotide
cccuuaauucuuucagauc

SEQ ID NO: 1638845 - RNA, 19 nt, Artificial Sequence
  Description of Artificial Sequence: Synthetic oligonucleotide
gcauggaccuuggaugaag

SEQ ID NO: 1638846 - RNA, 19 nt, Artificial Sequence
  Description of Artificial Sequence: Synthetic oligonucleotide
ccaccagcgggaaaagcac

SEQ ID NO: 1638847 - RNA, 19 nt, Artificial Sequence
  Description of Artificial Sequence: Synthetic oligonucleotide
gcagguaaacugagguaag

SEQ ID NO: 1638848 - RNA, 19 nt, Artificial Sequence
  Description of Artificial Sequence: Synthetic oligonucleotide
uggccauguaagguauaaa

SEQ ID NO: 1638849 - RNA, 19 nt, Artificial Sequence
  Description of Artificial Sequence: Synthetic oligonucleotide
ugccgggccugaccugugc

SEQ ID NO: 1638850 - RNA, 19 nt, Artificial Sequence
  Description of Artificial Sequence: Synthetic oligonucleotide
gcuugaacgcgaucuggca

SEQ ID NO: 1638851 - RNA, 19 nt, Artificial Sequence
  Description of Artificial Sequence: Synthetic oligonucleotide
agccaccgcggccauuugu

SEQ ID NO: 1638852 - RNA, 19 nt, Artificial Sequence
  Description of Artificial Sequence: Synthetic oligonucleotide
cuugaacgcgaucuggcau

SEQ ID NO: 1638853 - RNA, 19 nt, Artificial Sequence
  Description of Artificial Sequence: Synthetic oligonucleotide
ucaucgcaccacgucucac

SEQ ID NO: 1638854 - RNA, 19 nt, Artificial Sequence
  Description of Artificial Sequence: Synthetic oligonucleotide
gggcaucugccgugcagcg

SEQ ID NO: 1638855 - RNA, 19 nt, Artificial Sequence
  Description of Artificial Sequence: Synthetic oligonucleotide
gcaucaucgcaccacgucu

SEQ ID NO: 1638856 - RNA, 19 nt, Artificial Sequence
  Description of Artificial Sequence: Synthetic oligonucleotide
ggggacgauucgcacagca

SEQ ID NO: 1638857 - RNA, 19 nt, Artificial Sequence
  Description of Artificial Sequence: Synthetic oligonucleotide
ugucaaccaccagcgggaa

SEQ ID NO: 1638858 - RNA, 19 nt, Artificial Sequence
  Description of Artificial Sequence: Synthetic oligonucleotide
gugcaguagucuaaaucaa

SEQ ID NO: 1638859 - RNA, 19 nt, Artificial Sequence
  Description of Artificial Sequence: Synthetic oligonucleotide
uaacuuccugagcgacaau

SEQ ID NO: 1638860 - RNA, 19 nt, Artificial Sequence
  Description of Artificial Sequence: Synthetic oligonucleotide
ccagauugaaaucccuuaa

SEQ ID NO: 1638861 - RNA, 19 nt, Artificial Sequence
  Description of Artificial Sequence: Synthetic oligonucleotide
gcaucugccgggccugacc

SEQ ID NO: 1638862 - RNA, 19 nt, Artificial Sequence
  Description of Artificial Sequence: Synthetic oligonucleotide
caaccaccagcgggaaaag

SEQ ID NO: 1638863 - RNA, 19 nt, Artificial Sequence
  Description of Artificial Sequence: Synthetic oligonucleotide
uaaccauacggggcaccau

SEQ ID NO: 1638864 - RNA, 19 nt, Artificial Sequence
  Description of Artificial Sequence: Synthetic oligonucleotide
cgaucuggcaugugagaag

SEQ ID NO: 1638865 - RNA, 19 nt, Artificial Sequence
  Description of Artificial Sequence: Synthetic oligonucleotide
uauuugcguccagccaaau

SEQ ID NO: 1638866 - RNA, 19 nt, Artificial Sequence
  Description of Artificial Sequence: Synthetic oligonucleotide
cccgcuucuuagaagcauc

SEQ ID NO: 1638867 - RNA, 19 nt, Artificial Sequence
  Description of Artificial Sequence: Synthetic oligonucleotide
agggugcaguagucuaaau

SEQ ID NO: 1638868 - RNA, 19 nt, Artificial Sequence
  Description of Artificial Sequence: Synthetic oligonucleotide
gucuugccacucggggacg

SEQ ID NO: 1638869 - RNA, 19 nt, Artificial Sequence
  Description of Artificial Sequence: Synthetic oligonucleotide
ccagaaccgguagccaucc

SEQ ID NO: 1638870 - RNA, 19 nt, Artificial Sequence
  Description of Artificial Sequence: Synthetic oligonucleotide
ggcaccauccagauugaaa

SEQ ID NO: 1638871 - RNA, 19 nt, Artificial Sequence
  Description of Artificial Sequence: Synthetic oligonucleotide
cagauccacgacauauagu

SEQ ID NO: 1638872 - RNA, 19 nt, Artificial Sequence
  Description of Artificial Sequence: Synthetic oligonucleotide
caucugccgggccugaccu

SEQ ID NO: 1638873 - RNA, 19 nt, Artificial Sequence
  Description of Artificial Sequence: Synthetic oligonucleotide
aucugccgggccugaccug

SEQ ID NO: 1638874 - RNA, 19 nt, Artificial Sequence
  Description of Artificial Sequence: Synthetic oligonucleotide
gccccagaugauccgcugc

SEQ ID NO: 1638875 - RNA, 19 nt, Artificial Sequence
  Description of Artificial Sequence: Synthetic oligonucleotide
gaaccgguagccauccauu

SEQ ID NO: 1638876 - RNA, 19 nt, Artificial Sequence
  Description of Artificial Sequence: Synthetic oligonucleotide
gaagggagucccagaagau

SEQ ID NO: 1638877 - RNA, 19 nt, Artificial Sequence
  Description of Artificial Sequence: Synthetic oligonucleotide
gcgaucuggcaugugagaa

SEQ ID NO: 1638878 - RNA, 19 nt, Artificial Sequence
  Description of Artificial Sequence: Synthetic oligonucleotide
gggcucaauucaacaauga

SEQ ID NO: 1638879 - RNA, 19 nt, Artificial Sequence
  Description of Artificial Sequence: Synthetic oligonucleotide
gcccaguauccugacuucc

SEQ ID NO: 1638880 - RNA, 19 nt, Artificial Sequence
  Description of Artificial Sequence: Synthetic oligonucleotide
acgauucgcacagcagcuu

SEQ ID NO: 1638881 - RNA, 19 nt, Artificial Sequence
  Description of Artificial Sequence: Synthetic oligonucleotide
cagcaucuacaaacaggaa

SEQ ID NO: 1638882 - RNA, 19 nt, Artificial Sequence
  Description of Artificial Sequence: Synthetic oligonucleotide
gcccaucauuccccaaccc

SEQ ID NO: 1638883 - RNA, 19 nt, Artificial Sequence
  Description of Artificial Sequence: Synthetic oligonucleotide
gccuaaugcuugggaagag

SEQ ID NO: 1638884 - RNA, 19 nt, Artificial Sequence
  Description of Artificial Sequence: Synthetic oligonucleotide
cugagcgacaauguuuaau

SEQ ID NO: 1638885 - RNA, 19 nt, Artificial Sequence
  Description of Artificial Sequence: Synthetic oligonucleotide
cccaguauccugacuucca

SEQ ID NO: 1638886 - RNA, 19 nt, Artificial Sequence
  Description of Artificial Sequence: Synthetic oligonucleotide
ggcauagaccuugaggcau

SEQ ID NO: 1638887 - RNA, 19 nt, Artificial Sequence
  Description of Artificial Sequence: Synthetic oligonucleotide
cgauucgcacagcagcuuc

SEQ ID NO: 1638888 - RNA, 19 nt, Artificial Sequence
  Description of Artificial Sequence: Synthetic oligonucleotide
auuaucgguugggcucaau

SEQ ID NO: 1638889 - RNA, 19 nt, Artificial Sequence
  Description of Artificial Sequence: Synthetic oligonucleotide
gaacgcgaucuggcaugug

SEQ ID NO: 1638890 - RNA, 19 nt, Artificial Sequence
  Description of Artificial Sequence: Synthetic oligonucleotide
ccuaaugcuugggaagaga

SEQ ID NO: 1638891 - RNA, 19 nt, Artificial Sequence
  Description of Artificial Sequence: Synthetic oligonucleotide
ccacuagggugcaguaguc

SEQ ID NO: 1638892 - RNA, 19 nt, Artificial Sequence
  Description of Artificial Sequence: Synthetic oligonucleotide
gggagggauuugaugggca

SEQ ID NO: 1638893 - RNA, 19 nt, Artificial Sequence
  Description of Artificial Sequence: Synthetic oligonucleotide
gucaaccaccagcgggaaa

SEQ ID NO: 1638894 - RNA, 19 nt, Artificial Sequence
  Description of Artificial Sequence: Synthetic oligonucleotide
ccgguagccauccauuucu

SEQ ID NO: 1638895 - RNA, 19 nt, Artificial Sequence
  Description of Artificial Sequence: Synthetic oligonucleotide
ccgcuucuuagaagcauca

SEQ ID NO: 1638896 - RNA, 19 nt, Artificial Sequence
  Description of Artificial Sequence: Synthetic oligonucleotide
cucuuggaugugggcacca

SEQ ID NO: 1638897 - RNA, 19 nt, Artificial Sequence
  Description of Artificial Sequence: Synthetic oligonucleotide
gccauccauuucucuucug

SEQ ID NO: 1638898 - RNA, 19 nt, Artificial Sequence
  Description of Artificial Sequence: Synthetic oligonucleotide
ccgggccugaccugugcag

SEQ ID NO: 1638899 - RNA, 19 nt, Artificial Sequence
  Description of Artificial Sequence: Synthetic oligonucleotide
gauuaucgguugggcucaa

SEQ ID NO: 1638900 - RNA, 19 nt, Artificial Sequence
  Description of Artificial Sequence: Synthetic oligonucleotide
caccgcggccauuuguacu

SEQ ID NO: 1638901 - RNA, 19 nt, Artificial Sequence
  Description of Artificial Sequence: Synthetic oligonucleotide
cagcagcuauuuuccuaaa

SEQ ID NO: 1638902 - RNA, 19 nt, Artificial Sequence
  Description of Artificial Sequence: Synthetic oligonucleotide
ccaccgcggccauuuguac

SEQ ID NO: 1638903 - RNA, 19 nt, Artificial Sequence
  Description of Artificial Sequence: Synthetic oligonucleotide
ccucacccaagccacccca

SEQ ID NO: 1638904 - RNA, 19 nt, Artificial Sequence
  Description of Artificial Sequence: Synthetic oligonucleotide
cugccgggccugaccugug

SEQ ID NO: 1638905 - RNA, 19 nt, Artificial Sequence
  Description of Artificial Sequence: Synthetic oligonucleotide
ugggcaccugauggaucau

SEQ ID NO: 1638906 - RNA, 19 nt, Artificial Sequence
  Description of Artificial Sequence: Synthetic oligonucleotide
cgguugggcucaauucaac

SEQ ID NO: 1638907 - RNA, 19 nt, Artificial Sequence
  Description of Artificial Sequence: Synthetic oligonucleotide
cgacauauagugcacugau

SEQ ID NO: 1638908 - RNA, 19 nt, Artificial Sequence
  Description of Artificial Sequence: Synthetic oligonucleotide
acggggcaccauccagauu

SEQ ID NO: 1638909 - RNA, 19 nt, Artificial Sequence
  Description of Artificial Sequence: Synthetic oligonucleotide
cacccaagccaccccaguu

SEQ ID NO: 1638910 - RNA, 19 nt, Artificial Sequence
  Description of Artificial Sequence: Synthetic oligonucleotide
cgacaauguuuaaugugcu

SEQ ID NO: 1638911 - RNA, 19 nt, Artificial Sequence
  Description of Artificial Sequence: Synthetic oligonucleotide
gccaccgcggccauuugua

SEQ ID NO: 1638912 - RNA, 19 nt, Artificial Sequence
  Description of Artificial Sequence: Synthetic oligonucleotide
ccagcgggaaaagcacguc

SEQ ID NO: 1638913 - RNA, 19 nt, Artificial Sequence
  Description of Artificial Sequence: Synthetic oligonucleotide
ggugggcaucugccgugca

SEQ ID NO: 1638914 - RNA, 19 nt, Artificial Sequence
  Description of Artificial Sequence: Synthetic oligonucleotide
cgcgaucuggcaugugaga

SEQ ID NO: 1638915 - RNA, 19 nt, Artificial Sequence
  Description of Artificial Sequence: Synthetic oligonucleotide
cacuccugagggagggauu

SEQ ID NO: 1638916 - RNA, 19 nt, Artificial Sequence
  Description of Artificial Sequence: Synthetic oligonucleotide
cccagaagaucagccaugu

SEQ ID NO: 1638917 - RNA, 19 nt, Artificial Sequence
  Description of Artificial Sequence: Synthetic oligonucleotide
cuggcccaguauccugacu

SEQ ID NO: 1638918 - RNA, 19 nt, Artificial Sequence
  Description of Artificial Sequence: Synthetic oligonucleotide
cgucucacaccaccagcca

SEQ ID NO: 1638919 - RNA, 19 nt, Artificial Sequence
  Description of Artificial Sequence: Synthetic oligonucleotide
cccaaagauccagcaccca

SEQ ID NO: 1638920 - RNA, 19 nt, Artificial Sequence
  Description of Artificial Sequence: Synthetic oligonucleotide
ccugagcgacaauguuuaa

SEQ ID NO: 1638921 - RNA, 19 nt, Artificial Sequence
  Description of Artificial Sequence: Synthetic oligonucleotide
gcccgcuucuuagaagcau

SEQ ID NO: 1638922 - RNA, 19 nt, Artificial Sequence
  Description of Artificial Sequence: Synthetic oligonucleotide
gccaaaugacuggcccagu

SEQ ID NO: 1638923 - RNA, 19 nt, Artificial Sequence
  Description of Artificial Sequence: Synthetic oligonucleotide
ggauccugacucagaccuu

SEQ ID NO: 1638924 - RNA, 19 nt, Artificial Sequence
  Description of Artificial Sequence: Synthetic oligonucleotide
cgcggccauuuguacugaa

SEQ ID NO: 1638925 - RNA, 19 nt, Artificial Sequence
  Description of Artificial Sequence: Synthetic oligonucleotide
cggggacgauucgcacagc

SEQ ID NO: 1638926 - RNA, 19 nt, Artificial Sequence
  Description of Artificial Sequence: Synthetic oligonucleotide
ccgcggccauuuguacuga

SEQ ID NO: 1638927 - RNA, 19 nt, Artificial Sequence
  Description of Artificial Sequence: Synthetic oligonucleotide
  modified_base (5)..(5): a, c, u, g, unknown or other
  modified_base (7)..(7): a, c, u, g, unknown or other
  modified_base (9)..(9): a, c, u, g, unknown or other
aaaanananauauauauau

SEQ ID NO: 1638928 - RNA, 19 nt, Artificial Sequence
  Description of Artificial Sequence: Synthetic oligonucleotide
  modified_base (3)..(3): a, c, u, g, unknown or other
  modified_base (5)..(5): a, c, u, g, unknown or other
  modified_base (7)..(7): a, c, u, g, unknown or other
aanananauauauauauau

SEQ ID NO: 1638929 - RNA, 19 nt, Artificial Sequence
  Description of Artificial Sequence: Synthetic oligonucleotide
aauugcauaagaaauaucc

SEQ ID NO: 1638930 - RNA, 19 nt, Artificial Sequence
  Description of Artificial Sequence: Synthetic oligonucleotide
aaguuaauuaguucgaggc

SEQ ID NO: 1638931 - RNA, 19 nt, Artificial Sequence
  Description of Artificial Sequence: Synthetic oligonucleotide
auugcuaaaggacugaagc

SEQ ID NO: 1638932 - RNA, 19 nt, Artificial Sequence
  Description of Artificial Sequence: Synthetic oligonucleotide
uaaucuuuaagauuugagg

SEQ ID NO: 1638933 - RNA, 19 nt, Artificial Sequence
  Description of Artificial Sequence: Synthetic oligonucleotide
aauaagguauuuaugacac

SEQ ID NO: 1638934 - RNA, 19 nt, Artificial Sequence
  Description of Artificial Sequence: Synthetic oligonucleotide
agggaguuaaacuauauac

SEQ ID NO: 1638935 - RNA, 19 nt, Artificial Sequence
  Description of Artificial Sequence: Synthetic oligonucleotide
guauuuaugacacagaauc

SEQ ID NO: 1638936 - RNA, 19 nt, Artificial Sequence
  Description of Artificial Sequence: Synthetic oligonucleotide
uugugaaucauaaggaucc

SEQ ID NO: 1638937 - RNA, 19 nt, Artificial Sequence
  Description of Artificial Sequence: Synthetic oligonucleotide
aaaguuaauuaguucgagg

SEQ ID NO: 1638938 - RNA, 19 nt, Artificial Sequence
  Description of Artificial Sequence: Synthetic oligonucleotide
uauaaugcaucauuuguag

SEQ ID NO: 1638939 - RNA, 19 nt, Artificial Sequence
  Description of Artificial Sequence: Synthetic oligonucleotide
uauauauauauauauacuu

SEQ ID NO: 1638940 - RNA, 19 nt, Artificial Sequence
  Description of Artificial Sequence: Synthetic oligonucleotide
ucauuuguaguccauacga

SEQ ID NO: 1638941 - RNA, 19 nt, Artificial Sequence
  Description of Artificial Sequence: Synthetic oligonucleotide
agaugaaacgcacugauug

SEQ ID NO: 1638942 - RNA, 19 nt, Artificial Sequence
  Description of Artificial Sequence: Synthetic oligonucleotide
uauucuuugaaauuaguau

SEQ ID NO: 1638943 - RNA, 19 nt, Artificial Sequence
  Description of Artificial Sequence: Synthetic oligonucleotide
aguuaauuaguucgaggcc

SEQ ID NO: 1638944 - RNA, 19 nt, Artificial Sequence
  Description of Artificial Sequence: Synthetic oligonucleotide
uucgucuagaaguugaucc

SEQ ID NO: 1638945 - RNA, 19 nt, Artificial Sequence
  Description of Artificial Sequence: Synthetic oligonucleotide
accaauaagguauuuauga

SEQ ID NO: 1638946 - RNA, 19 nt, Artificial Sequence
  Description of Artificial Sequence: Synthetic oligonucleotide
gaaaugugaauaaaggcag

SEQ ID NO: 1638947 - RNA, 19 nt, Artificial Sequence
  Description of Artificial Sequence: Synthetic oligonucleotide
uauauauauauauacuuua

SEQ ID NO: 1638948 - RNA, 19 nt, Artificial Sequence
  Description of Artificial Sequence: Synthetic oligonucleotide
ucacgaaucauucuucaag

SEQ ID NO: 1638949 - RNA, 19 nt, Artificial Sequence
  Description of Artificial Sequence: Synthetic oligonucleotide
aguucugucauauaugcca

SEQ ID NO: 1638950 - RNA, 19 nt, Artificial Sequence
  Description of Artificial Sequence: Synthetic oligonucleotide
ugugaauaaaggcagucca

SEQ ID NO: 1638951 - RNA, 19 nt, Artificial Sequence
  Description of Artificial Sequence: Synthetic oligonucleotide
aacuauauacgguccauug

SEQ ID NO: 1638952 - RNA, 19 nt, Artificial Sequence
  Description of Artificial Sequence: Synthetic oligonucleotide
uaagguauuuaugacacag

SEQ ID NO: 1638953 - RNA, 19 nt, Artificial Sequence
  Description of Artificial Sequence: Synthetic oligonucleotide
uuaaagauguauuggacuc

SEQ ID NO: 1638954 - RNA, 19 nt, Artificial Sequence
  Description of Artificial Sequence: Synthetic oligonucleotide
uauacagggaguuaaacua

SEQ ID NO: 1638955 - RNA, 19 nt, Artificial Sequence
  Description of Artificial Sequence: Synthetic oligonucleotide
acacgaaccaaucuugugg

SEQ ID NO: 1638956 - RNA, 19 nt, Artificial Sequence
  Description of Artificial Sequence: Synthetic oligonucleotide
aaugguccauuucgcaugc

SEQ ID NO: 1638957 - RNA, 19 nt, Artificial Sequence
  Description of Artificial Sequence: Synthetic oligonucleotide
aguaguagccauguaaugg

SEQ ID NO: 1638958 - RNA, 19 nt, Artificial Sequence
  Description of Artificial Sequence: Synthetic oligonucleotide
aaucuuguggcugauaagu

SEQ ID NO: 1638959 - RNA, 19 nt, Artificial Sequence
  Description of Artificial Sequence: Synthetic oligonucleotide
auuugcaaggaauaggggu

SEQ ID NO: 1638960 - RNA, 19 nt, Artificial Sequence
  Description of Artificial Sequence: Synthetic oligonucleotide
agaaauccaaccuucugag

SEQ ID NO: 1638961 - RNA, 19 nt, Artificial Sequence
  Description of Artificial Sequence: Synthetic oligonucleotide
uagauuagagaaaaucacu

SEQ ID NO: 1638962 - RNA, 19 nt, Artificial Sequence
  Description of Artificial Sequence: Synthetic oligonucleotide
uaaugcaucauuuguaguc

SEQ ID NO: 1638963 - RNA, 19 nt, Artificial Sequence
  Description of Artificial Sequence: Synthetic oligonucleotide
ucuagaauauucuuugaaa

SEQ ID NO: 1638964 - RNA, 19 nt, Artificial Sequence
  Description of Artificial Sequence: Synthetic oligonucleotide
  modified_base (2)..(2): a, c, u, g, unknown or other
  modified_base (4)..(4): a, c, u, g, unknown or other
ananauauauauauauaua

SEQ ID NO: 1638965 - RNA, 19 nt, Artificial Sequence
  Description of Artificial Sequence: Synthetic oligonucleotide
uuauacagggaguuaaacu

SEQ ID NO: 1638966 - RNA, 19 nt, Artificial Sequence
  Description of Artificial Sequence: Synthetic oligonucleotide
uccgauuaaagauguauug

SEQ ID NO: 1638967 - RNA, 19 nt, Artificial Sequence
  Description of Artificial Sequence: Synthetic oligonucleotide
cauacgagaauucacucag

SEQ ID NO: 1638968 - RNA, 19 nt, Artificial Sequence
  Description of Artificial Sequence: Synthetic oligonucleotide
  modified_base (2)..(2): a, c, u, g, unknown or other
  modified_base (4)..(4): a, c, u, g, unknown or other
  modified_base (6)..(6): a, c, u, g, unknown or other
anananauauauauauaua

SEQ ID NO: 1638969 - RNA, 19 nt, Artificial Sequence
  Description of Artificial Sequence: Synthetic oligonucleotide
uuuguaguccauacgagaa

SEQ ID NO: 1638970 - RNA, 19 nt, Artificial Sequence
  Description of Artificial Sequence: Synthetic oligonucleotide
uuuaugacacagaaucugu

SEQ ID NO: 1638971 - RNA, 19 nt, Artificial Sequence
  Description of Artificial Sequence: Synthetic oligonucleotide
uauauauauauacuuuauu

SEQ ID NO: 1638972 - RNA, 19 nt, Artificial Sequence
  Description of Artificial Sequence: Synthetic oligonucleotide
ucgcaugcaguccacauag

SEQ ID NO: 1638973 - RNA, 19 nt, Artificial Sequence
  Description of Artificial Sequence: Synthetic oligonucleotide
uuauaaugcaucauuugua

SEQ ID NO: 1638974 - RNA, 19 nt, Artificial Sequence
  Description of Artificial Sequence: Synthetic oligonucleotide
gauaagugaauucugaaau

SEQ ID NO: 1638975 - RNA, 19 nt, Artificial Sequence
  Description of Artificial Sequence: Synthetic oligonucleotide
  modified_base (4)..(4): a, c, u, g, unknown or other
  modified_base (6)..(6): a, c, u, g, unknown or other
  modified_base (8)..(8): a, c, u, g, unknown or other
aaanananauauauauaua

SEQ ID NO: 1638976 - RNA, 19 nt, Artificial Sequence
  Description of Artificial Sequence: Synthetic oligonucleotide
agagaaaaucacuuugaug

SEQ ID NO: 1638977 - RNA, 19 nt, Artificial Sequence
  Description of Artificial Sequence: Synthetic oligonucleotide
aauaaaggcaguccauaaa

SEQ ID NO: 1638978 - RNA, 19 nt, Artificial Sequence
  Description of Artificial Sequence: Synthetic oligonucleotide
  modified_base (2)..(2): a, c, u, g, unknown or other
anauauauauauauauaua

SEQ ID NO: 1638979 - RNA, 19 nt, Artificial Sequence
  Description of Artificial Sequence: Synthetic oligonucleotide
auuuaugacacagaaucug

SEQ ID NO: 1638980 - RNA, 19 nt, Artificial Sequence
  Description of Artificial Sequence: Synthetic oligonucleotide
ugauaagugaauucugaaa

SEQ ID NO: 1638981 - RNA, 19 nt, Artificial Sequence
  Description of Artificial Sequence: Synthetic oligonucleotide
auuaguauaagagaauuua

SEQ ID NO: 1638982 - RNA, 19 nt, Artificial Sequence
  Description of Artificial Sequence: Synthetic oligonucleotide
uaguauaagagaauuuaua

SEQ ID NO: 1638983 - RNA, 19 nt, Artificial Sequence
  Description of Artificial Sequence: Synthetic oligonucleotide
auaagugaauucugaaaug

SEQ ID NO: 1638984 - RNA, 19 nt, Artificial Sequence
  Description of Artificial Sequence: Synthetic oligonucleotide
uuuccuucgagguggacug

SEQ ID NO: 1638985 - RNA, 19 nt, Artificial Sequence
  Description of Artificial Sequence: Synthetic oligonucleotide
ucugaaaccagccuccgau

SEQ ID NO: 1638986 - RNA, 19 nt, Artificial Sequence
  Description of Artificial Sequence: Synthetic oligonucleotide
ucaguaguagccauguaau

SEQ ID NO: 1638987 - RNA, 19 nt, Artificial Sequence
  Description of Artificial Sequence: Synthetic oligonucleotide
uuaauuaguucgaggccag

SEQ ID NO: 1638988 - RNA, 19 nt, Artificial Sequence
  Description of Artificial Sequence: Synthetic oligonucleotide
aauucaguaguagccaugu

SEQ ID NO: 1638989 - RNA, 19 nt, Artificial Sequence
  Description of Artificial Sequence: Synthetic oligonucleotide
ucaaagguuuucugaaacc

SEQ ID NO: 1638990 - RNA, 19 nt, Artificial Sequence
  Description of Artificial Sequence: Synthetic oligonucleotide
uuugcaaggaauaggggua

SEQ ID NO: 1638991 - RNA, 19 nt, Artificial Sequence
  Description of Artificial Sequence: Synthetic oligonucleotide
aaaauucaguaguagccau

SEQ ID NO: 1638992 - RNA, 19 nt, Artificial Sequence
  Description of Artificial Sequence: Synthetic oligonucleotide
auauauauauauauauacu

SEQ ID NO: 1638993 - RNA, 19 nt, Artificial Sequence
  Description of Artificial Sequence: Synthetic oligonucleotide
cuugugaaucauaaggauc

SEQ ID NO: 1638994 - RNA, 19 nt, Artificial Sequence
  Description of Artificial Sequence: Synthetic oligonucleotide
augugaauaaaggcagucc

SEQ ID NO: 1638995 - RNA, 19 nt, Artificial Sequence
  Description of Artificial Sequence: Synthetic oligonucleotide
uccauuugcaaggaauagg

SEQ ID NO: 1638996 - RNA, 19 nt, Artificial Sequence
  Description of Artificial Sequence: Synthetic oligonucleotide
gaugaaacgcacugauugc

SEQ ID NO: 1638997 - RNA, 19 nt, Artificial Sequence
  Description of Artificial Sequence: Synthetic oligonucleotide
auuuguaguccauacgaga

SEQ ID NO: 1638998 - RNA, 19 nt, Artificial Sequence
  Description of Artificial Sequence: Synthetic oligonucleotide
ucacuuugauguuaaaguc

SEQ ID NO: 1638999 - RNA, 19 nt, Artificial Sequence
  Description of Artificial Sequence: Synthetic oligonucleotide
ugaauugcauaagaaauau

SEQ ID NO: 1639000 - RNA, 19 nt, Artificial Sequence
  Description of Artificial Sequence: Synthetic oligonucleotide
uccaagacuacgucgugag

SEQ ID NO: 1639001 - RNA, 19 nt, Artificial Sequence
  Description of Artificial Sequence: Synthetic oligonucleotide
ugcacuuagaagucuagaa

SEQ ID NO: 1639002 - RNA, 19 nt, Artificial Sequence
  Description of Artificial Sequence: Synthetic oligonucleotide
aaccaaccaguccacaaca

SEQ ID NO: 1639003 - RNA, 19 nt, Artificial Sequence
  Description of Artificial Sequence: Synthetic oligonucleotide
auaagagaauuuauacagg

SEQ ID NO: 1639004 - RNA, 19 nt, Artificial Sequence
  Description of Artificial Sequence: Synthetic oligonucleotide
gauguauuggacucugcuc

SEQ ID NO: 1639005 - RNA, 19 nt, Artificial Sequence
  Description of Artificial Sequence: Synthetic oligonucleotide
acuccaacuagauuagaga

SEQ ID NO: 1639006 - RNA, 19 nt, Artificial Sequence
  Description of Artificial Sequence: Synthetic oligonucleotide
ccauuugcaaggaauaggg

SEQ ID NO: 1639007 - RNA, 19 nt, Artificial Sequence
  Description of Artificial Sequence: Synthetic oligonucleotide
ggaaaugugaauaaaggca

SEQ ID NO: 1639008 - RNA, 19 nt, Artificial Sequence
  Description of Artificial Sequence: Synthetic oligonucleotide
aaugccuauggaaauguga

SEQ ID NO: 1639009 - RNA, 19 nt, Artificial Sequence
  Description of Artificial Sequence: Synthetic oligonucleotide
guuaauuaguucgaggcca

SEQ ID NO: 1639010 - RNA, 19 nt, Artificial Sequence
  Description of Artificial Sequence: Synthetic oligonucleotide
uugcuaaaggacugaagca

SEQ ID NO: 1639011 - RNA, 19 nt, Artificial Sequence
  Description of Artificial Sequence: Synthetic oligonucleotide
caucauuuguaguccauac

SEQ ID NO: 1639012 - RNA, 19 nt, Artificial Sequence
  Description of Artificial Sequence: Synthetic oligonucleotide
gucauauaugccaacacac

SEQ ID NO: 1639013 - RNA, 19 nt, Artificial Sequence
  Description of Artificial Sequence: Synthetic oligonucleotide
agaaguugauccuugugaa

SEQ ID NO: 1639014 - RNA, 19 nt, Artificial Sequence
  Description of Artificial Sequence: Synthetic oligonucleotide
gaaauccaaccuucugagg

SEQ ID NO: 1639015 - RNA, 19 nt, Artificial Sequence
  Description of Artificial Sequence: Synthetic oligonucleotide
uggggaauuuuccuucgag

SEQ ID NO: 1639016 - RNA, 19 nt, Artificial Sequence
  Description of Artificial Sequence: Synthetic oligonucleotide
aacgcacugauugcuaaag

SEQ ID NO: 1639017 - RNA, 19 nt, Artificial Sequence
  Description of Artificial Sequence: Synthetic oligonucleotide
auccauuccggauucacga

SEQ ID NO: 1639018 - RNA, 19 nt, Artificial Sequence
  Description of Artificial Sequence: Synthetic oligonucleotide
guuaaacuauauacggucc

SEQ ID NO: 1639019 - RNA, 19 nt, Artificial Sequence
  Description of Artificial Sequence: Synthetic oligonucleotide
cacgaaccaaucuuguggc

SEQ ID NO: 1639020 - RNA, 19 nt, Artificial Sequence
  Description of Artificial Sequence: Synthetic oligonucleotide
cauuuguaguccauacgag

SEQ ID NO: 1639021 - RNA, 19 nt, Artificial Sequence
  Description of Artificial Sequence: Synthetic oligonucleotide
acuauauacgguccauugu

SEQ ID NO: 1639022 - RNA, 19 nt, Artificial Sequence
  Description of Artificial Sequence: Synthetic oligonucleotide
auauacgguccauuguuug

SEQ ID NO: 1639023 - RNA, 19 nt, Artificial Sequence
  Description of Artificial Sequence: Synthetic oligonucleotide
uucaagucuggcuccaaga

SEQ ID NO: 1639024 - RNA, 19 nt, Artificial Sequence
  Description of Artificial Sequence: Synthetic oligonucleotide
auauauauauauauacuuu

SEQ ID NO: 1639025 - RNA, 19 nt, Artificial Sequence
  Description of Artificial Sequence: Synthetic oligonucleotide
ugccaguucugucauauau

SEQ ID NO: 1639026 - RNA, 19 nt, Artificial Sequence
  Description of Artificial Sequence: Synthetic oligonucleotide
cacuccaacuagauuagag

SEQ ID NO: 1639027 - RNA, 19 nt, Artificial Sequence
  Description of Artificial Sequence: Synthetic oligonucleotide
ugaaaugccuauggaaaug

SEQ ID NO: 1639028 - RNA, 19 nt, Artificial Sequence
  Description of Artificial Sequence: Synthetic oligonucleotide
uucacucaguuuuaaaauu

SEQ ID NO: 1639029 - RNA, 19 nt, Artificial Sequence
  Description of Artificial Sequence: Synthetic oligonucleotide
uacgucgugaggaaaacuu

SEQ ID NO: 1639030 - RNA, 19 nt, Artificial Sequence
  Description of Artificial Sequence: Synthetic oligonucleotide
acgaaucauucuucaaguc

SEQ ID NO: 1639031 - RNA, 19 nt, Artificial Sequence
  Description of Artificial Sequence: Synthetic oligonucleotide
agaugucgagacacgaacc

SEQ ID NO: 1639032 - RNA, 19 nt, Artificial Sequence
  Description of Artificial Sequence: Synthetic oligonucleotide
caaccaguccacaacacuc

SEQ ID NO: 1639033 - RNA, 19 nt, Artificial Sequence
  Description of Artificial Sequence: Synthetic oligonucleotide
ugaacucugucuccugaug

SEQ ID NO: 1639034 - RNA, 19 nt, Artificial Sequence
  Description of Artificial Sequence: Synthetic oligonucleotide
uccaacuagauuagagaaa

SEQ ID NO: 1639035 - RNA, 19 nt, Artificial Sequence
  Description of Artificial Sequence: Synthetic oligonucleotide
cagcaauaaaugcacuuag

SEQ ID NO: 1639036 - RNA, 19 nt, Artificial Sequence
  Description of Artificial Sequence: Synthetic oligonucleotide
cauuugcaaggaauagggg

SEQ ID NO: 1639037 - RNA, 19 nt, Artificial Sequence
  Description of Artificial Sequence: Synthetic oligonucleotide
gguagugacgcugucaucc

SEQ ID NO: 1639038 - RNA, 19 nt, Artificial Sequence
  Description of Artificial Sequence: Synthetic oligonucleotide
uuccucucacuccaacuag

SEQ ID NO: 1639039 - RNA, 19 nt, Artificial Sequence
  Description of Artificial Sequence: Synthetic oligonucleotide
aauccaaccuucugaggau

SEQ ID NO: 1639040 - RNA, 19 nt, Artificial Sequence
  Description of Artificial Sequence: Synthetic oligonucleotide
gaagcuacagaugucgaga

SEQ ID NO: 1639041 - RNA, 19 nt, Artificial Sequence
  Description of Artificial Sequence: Synthetic oligonucleotide
uauacgguccauuguuugu

SEQ ID NO: 1639042 - RNA, 19 nt, Artificial Sequence
  Description of Artificial Sequence: Synthetic oligonucleotide
uuaaagucuucucccacuu

SEQ ID NO: 1639043 - RNA, 19 nt, Artificial Sequence
  Description of Artificial Sequence: Synthetic oligonucleotide
agaauuuauacagggaguu

SEQ ID NO: 1639044 - RNA, 19 nt, Artificial Sequence
  Description of Artificial Sequence: Synthetic oligonucleotide
ucugucuccugauggauuc

SEQ ID NO: 1639045 - RNA, 19 nt, Artificial Sequence
  Description of Artificial Sequence: Synthetic oligonucleotide
cagaugucgagacacgaac

SEQ ID NO: 1639046 - RNA, 19 nt, Artificial Sequence
  Description of Artificial Sequence: Synthetic oligonucleotide
cauccauuccggauucacg

SEQ ID NO: 1639047 - RNA, 19 nt, Artificial Sequence
  Description of Artificial Sequence: Synthetic oligonucleotide
uguggaggagaaauccaac

SEQ ID NO: 1639048 - RNA, 19 nt, Artificial Sequence
  Description of Artificial Sequence: Synthetic oligonucleotide
aaugcacuuagaagucuag

SEQ ID NO: 1639049 - RNA, 19 nt, Artificial Sequence
  Description of Artificial Sequence: Synthetic oligonucleotide
aagagaauuuauacaggga

SEQ ID NO: 1639050 - RNA, 19 nt, Artificial Sequence
  Description of Artificial Sequence: Synthetic oligonucleotide
uacgagaauucacucaguu

SEQ ID NO: 1639051 - RNA, 19 nt, Artificial Sequence
  Description of Artificial Sequence: Synthetic oligonucleotide
aauaugugguagugacgcu

SEQ ID NO: 1639052 - RNA, 19 nt, Artificial Sequence
  Description of Artificial Sequence: Synthetic oligonucleotide
cagaaucuguaaaagaaaa

SEQ ID NO: 1639053 - RNA, 19 nt, Artificial Sequence
  Description of Artificial Sequence: Synthetic oligonucleotide
ugaauaaaggcaguccaua

SEQ ID NO: 1639054 - RNA, 19 nt, Artificial Sequence
  Description of Artificial Sequence: Synthetic oligonucleotide
uggcuccaagacuacgucg

SEQ ID NO: 1639055 - RNA, 19 nt, Artificial Sequence
  Description of Artificial Sequence: Synthetic oligonucleotide
aaauucaguaguagccaug

SEQ ID NO: 1639056 - RNA, 19 nt, Artificial Sequence
  Description of Artificial Sequence: Synthetic oligonucleotide
aguugauccuugugaauca

SEQ ID NO: 1639057 - RNA, 19 nt, Artificial Sequence
  Description of Artificial Sequence: Synthetic oligonucleotide
auauauauauauacuuuau

SEQ ID NO: 1639058 - RNA, 19 nt, Artificial Sequence
  Description of Artificial Sequence: Synthetic oligonucleotide
auaaugcaucauuuguagu

SEQ ID NO: 1639059 - RNA, 19 nt, Artificial Sequence
  Description of Artificial Sequence: Synthetic oligonucleotide
cacuuagaagucuagaaua

SEQ ID NO: 1639060 - RNA, 19 nt, Artificial Sequence
  Description of Artificial Sequence: Synthetic oligonucleotide
gagacacgaaccaaucuug

SEQ ID NO: 1639061 - RNA, 19 nt, Artificial Sequence
  Description of Artificial Sequence: Synthetic oligonucleotide
aguccauacgagaauucac

SEQ ID NO: 1639062 - RNA, 19 nt, Artificial Sequence
  Description of Artificial Sequence: Synthetic oligonucleotide
ucugcacaagaaaugccuc

SEQ ID NO: 1639063 - RNA, 19 nt, Artificial Sequence
  Description of Artificial Sequence: Synthetic oligonucleotide
uccggauucacgaaucauu

SEQ ID NO: 1639064 - RNA, 19 nt, Artificial Sequence
  Description of Artificial Sequence: Synthetic oligonucleotide
aagacuacgucgugaggaa

SEQ ID NO: 1639065 - RNA, 19 nt, Artificial Sequence
  Description of Artificial Sequence: Synthetic oligonucleotide
uacgguccauuguuugugg

SEQ ID NO: 1639066 - RNA, 19 nt, Artificial Sequence
  Description of Artificial Sequence: Synthetic oligonucleotide
ucgucuagaaguugauccu

SEQ ID NO: 1639067 - RNA, 19 nt, Artificial Sequence
  Description of Artificial Sequence: Synthetic oligonucleotide
ugucgagacacgaaccaau

SEQ ID NO: 1639068 - RNA, 19 nt, Artificial Sequence
  Description of Artificial Sequence: Synthetic oligonucleotide
uauauacgguccauuguuu

SEQ ID NO: 1639069 - RNA, 19 nt, Artificial Sequence
  Description of Artificial Sequence: Synthetic oligonucleotide
gacacgaaccaaucuugug

SEQ ID NO: 1639070 - RNA, 19 nt, Artificial Sequence
  Description of Artificial Sequence: Synthetic oligonucleotide
uuccagucguuucugcaga

SEQ ID NO: 1639071 - RNA, 19 nt, Artificial Sequence
  Description of Artificial Sequence: Synthetic oligonucleotide
uguauuggacucugcucca

SEQ ID NO: 1639072 - RNA, 19 nt, Artificial Sequence
  Description of Artificial Sequence: Synthetic oligonucleotide
uguaguccauacgagaauu

SEQ ID NO: 1639073 - RNA, 19 nt, Artificial Sequence
  Description of Artificial Sequence: Synthetic oligonucleotide
ggaugaauugcauaagaaa

SEQ ID NO: 1639074 - RNA, 19 nt, Artificial Sequence
  Description of Artificial Sequence: Synthetic oligonucleotide
cuacagaugucgagacacg

SEQ ID NO: 1639075 - RNA, 19 nt, Artificial Sequence
  Description of Artificial Sequence: Synthetic oligonucleotide
ucgagacacgaaccaaucu

SEQ ID NO: 1639076 - RNA, 19 nt, Artificial Sequence
  Description of Artificial Sequence: Synthetic oligonucleotide
uuugagggcuacagggcac

SEQ ID NO: 1639077 - RNA, 19 nt, Artificial Sequence
  Description of Artificial Sequence: Synthetic oligonucleotide
aaaugugaauaaaggcagu

SEQ ID NO: 1639078 - RNA, 19 nt, Artificial Sequence
  Description of Artificial Sequence: Synthetic oligonucleotide
auaagucaacuuccucuug

SEQ ID NO: 1639079 - RNA, 19 nt, Artificial Sequence
  Description of Artificial Sequence: Synthetic oligonucleotide
caagacuacgucgugagga

SEQ ID NO: 1639080 - RNA, 19 nt, Artificial Sequence
  Description of Artificial Sequence: Synthetic oligonucleotide
aggcaguccauaaauaagu

SEQ ID NO: 1639081 - RNA, 19 nt, Artificial Sequence
  Description of Artificial Sequence: Synthetic oligonucleotide
acuacgucgugaggaaaac

SEQ ID NO: 1639082 - RNA, 19 nt, Artificial Sequence
  Description of Artificial Sequence: Synthetic oligonucleotide
acgcacugauugcuaaagg

SEQ ID NO: 1639083 - RNA, 19 nt, Artificial Sequence
  Description of Artificial Sequence: Synthetic oligonucleotide
uuguaguccauacgagaau

SEQ ID NO: 1639084 - RNA, 19 nt, Artificial Sequence
  Description of Artificial Sequence: Synthetic oligonucleotide
agguguuuuguggacacug

SEQ ID NO: 1639085 - RNA, 19 nt, Artificial Sequence
  Description of Artificial Sequence: Synthetic oligonucleotide
uugcaaggaauagggguag

SEQ ID NO: 1639086 - RNA, 19 nt, Artificial Sequence
  Description of Artificial Sequence: Synthetic oligonucleotide
uggguaacuuccccaggug

SEQ ID NO: 1639087 - RNA, 19 nt, Artificial Sequence
  Description of Artificial Sequence: Synthetic oligonucleotide
uacagaugucgagacacga

SEQ ID NO: 1639088 - RNA, 19 nt, Artificial Sequence
  Description of Artificial Sequence: Synthetic oligonucleotide
cauuccggauucacgaauc

SEQ ID NO: 1639089 - RNA, 19 nt, Artificial Sequence
  Description of Artificial Sequence: Synthetic oligonucleotide
aagguauuuaugacacaga

SEQ ID NO: 1639090 - RNA, 19 nt, Artificial Sequence
  Description of Artificial Sequence: Synthetic oligonucleotide
uccaaccuucugaggauca

SEQ ID NO: 1639091 - RNA, 19 nt, Artificial Sequence
  Description of Artificial Sequence: Synthetic oligonucleotide
ugugguagugacgcuguca

SEQ ID NO: 1639092 - RNA, 19 nt, Artificial Sequence
  Description of Artificial Sequence: Synthetic oligonucleotide
augaaacgcacugauugcu

SEQ ID NO: 1639093 - RNA, 19 nt, Artificial Sequence
  Description of Artificial Sequence: Synthetic oligonucleotide
guagccauguaauggucca

SEQ ID NO: 1639094 - RNA, 19 nt, Artificial Sequence
  Description of Artificial Sequence: Synthetic oligonucleotide
cugaagcaacagucaaagg

SEQ ID NO: 1639095 - RNA, 19 nt, Artificial Sequence
  Description of Artificial Sequence: Synthetic oligonucleotide
cuucugaggaucaauuucu

SEQ ID NO: 1639096 - RNA, 19 nt, Artificial Sequence
  Description of Artificial Sequence: Synthetic oligonucleotide
cagccuccgauuaaagaug

SEQ ID NO: 1639097 - RNA, 19 nt, Artificial Sequence
  Description of Artificial Sequence: Synthetic oligonucleotide
agucaaagguuuucugaaa

SEQ ID NO: 1639098 - RNA, 19 nt, Artificial Sequence
  Description of Artificial Sequence: Synthetic oligonucleotide
gcuacagaugucgagacac

SEQ ID NO: 1639099 - RNA, 19 nt, Artificial Sequence
  Description of Artificial Sequence: Synthetic oligonucleotide
uucacgaaucauucuucaa

SEQ ID NO: 1639100 - RNA, 19 nt, Artificial Sequence
  Description of Artificial Sequence: Synthetic oligonucleotide
ccgauuaaagauguauugg

SEQ ID NO: 1639101 - RNA, 19 nt, Artificial Sequence
  Description of Artificial Sequence: Synthetic oligonucleotide
acuuagaagucuagaauau

SEQ ID NO: 1639102 - RNA, 19 nt, Artificial Sequence
  Description of Artificial Sequence: Synthetic oligonucleotide
guaguagccauguaauggu

SEQ ID NO: 1639103 - RNA, 19 nt, Artificial Sequence
  Description of Artificial Sequence: Synthetic oligonucleotide
aaacuauauacgguccauu

SEQ ID NO: 1639104 - RNA, 19 nt, Artificial Sequence
  Description of Artificial Sequence: Synthetic oligonucleotide
auacgguccauuguuugug

SEQ ID NO: 1639105 - RNA, 19 nt, Artificial Sequence
  Description of Artificial Sequence: Synthetic oligonucleotide
aaaugcacuuagaagucua

SEQ ID NO: 1639106 - RNA, 19 nt, Artificial Sequence
  Description of Artificial Sequence: Synthetic oligonucleotide
caguaguagccauguaaug

SEQ ID NO: 1639107 - RNA, 19 nt, Artificial Sequence
  Description of Artificial Sequence: Synthetic oligonucleotide
agagggguagcaccuacaa

SEQ ID NO: 1639108 - RNA, 19 nt, Artificial Sequence
  Description of Artificial Sequence: Synthetic oligonucleotide
ggugaagucuucugaaaca

SEQ ID NO: 1639109 - RNA, 19 nt, Artificial Sequence
  Description of Artificial Sequence: Synthetic oligonucleotide
augccuauggaaaugugaa

SEQ ID NO: 1639110 - RNA, 19 nt, Artificial Sequence
  Description of Artificial Sequence: Synthetic oligonucleotide
ucauccauuccggauucac

SEQ ID NO: 1639111 - RNA, 19 nt, Artificial Sequence
  Description of Artificial Sequence: Synthetic oligonucleotide
aaaccagccuccgauuaaa

SEQ ID NO: 1639112 - RNA, 19 nt, Artificial Sequence
  Description of Artificial Sequence: Synthetic oligonucleotide
auauaugccaacacaccaa

SEQ ID NO: 1639113 - RNA, 19 nt, Artificial Sequence
  Description of Artificial Sequence: Synthetic oligonucleotide
ccacauagcagccauccag

SEQ ID NO: 1639114 - RNA, 19 nt, Artificial Sequence
  Description of Artificial Sequence: Synthetic oligonucleotide
auuccggauucacgaauca

SEQ ID NO: 1639115 - RNA, 19 nt, Artificial Sequence
  Description of Artificial Sequence: Synthetic oligonucleotide
uccauuguuuguggaggag

SEQ ID NO: 1639116 - RNA, 19 nt, Artificial Sequence
  Description of Artificial Sequence: Synthetic oligonucleotide
uucgcaugcaguccacaua

SEQ ID NO: 1639117 - RNA, 19 nt, Artificial Sequence
  Description of Artificial Sequence: Synthetic oligonucleotide
uccuucgagguggacuggg

SEQ ID NO: 1639118 - RNA, 19 nt, Artificial Sequence
  Description of Artificial Sequence: Synthetic oligonucleotide
gaauugcauaagaaauauc

SEQ ID NO: 1639119 - RNA, 19 nt, Artificial Sequence
  Description of Artificial Sequence: Synthetic oligonucleotide
uguggcugauaagugaauu

SEQ ID NO: 1639120 - RNA, 19 nt, Artificial Sequence
  Description of Artificial Sequence: Synthetic oligonucleotide
uccagucguuucugcagag

SEQ ID NO: 1639121 - RNA, 19 nt, Artificial Sequence
  Description of Artificial Sequence: Synthetic oligonucleotide
acgagaauucacucaguuu

SEQ ID NO: 1639122 - RNA, 19 nt, Artificial Sequence
  Description of Artificial Sequence: Synthetic oligonucleotide
gaagcaacagucaaagguu

SEQ ID NO: 1639123 - RNA, 19 nt, Artificial Sequence
  Description of Artificial Sequence: Synthetic oligonucleotide
ugauugcuaaaggacugaa

SEQ ID NO: 1639124 - RNA, 19 nt, Artificial Sequence
  Description of Artificial Sequence: Synthetic oligonucleotide
ugugaaucauaaggaucca

SEQ ID NO: 1639125 - RNA, 19 nt, Artificial Sequence
  Description of Artificial Sequence: Synthetic oligonucleotide
agucguuucugcagagggg

SEQ ID NO: 1639126 - RNA, 19 nt, Artificial Sequence
  Description of Artificial Sequence: Synthetic oligonucleotide
agcaauaaaugcacuuaga

SEQ ID NO: 1639127 - RNA, 19 nt, Artificial Sequence
  Description of Artificial Sequence: Synthetic oligonucleotide
aguccacaacacucuaccu

SEQ ID NO: 1639128 - RNA, 19 nt, Artificial Sequence
  Description of Artificial Sequence: Synthetic oligonucleotide
uggauuccagucguuucug

SEQ ID NO: 1639129 - RNA, 19 nt, Artificial Sequence
  Description of Artificial Sequence: Synthetic oligonucleotide
cacgaaucauucuucaagu

SEQ ID NO: 1639130 - RNA, 19 nt, Artificial Sequence
  Description of Artificial Sequence: Synthetic oligonucleotide
cuauauacgguccauuguu

SEQ ID NO: 1639131 - RNA, 19 nt, Artificial Sequence
  Description of Artificial Sequence: Synthetic oligonucleotide
auccaaccuucugaggauc

SEQ ID NO: 1639132 - RNA, 19 nt, Artificial Sequence
  Description of Artificial Sequence: Synthetic oligonucleotide
cacugauugcuaaaggacu

SEQ ID NO: 1639133 - RNA, 19 nt, Artificial Sequence
  Description of Artificial Sequence: Synthetic oligonucleotide
gaaaccagccuccgauuaa

SEQ ID NO: 1639134 - RNA, 19 nt, Artificial Sequence
  Description of Artificial Sequence: Synthetic oligonucleotide
ugccuauggaaaugugaau

SEQ ID NO: 1639135 - RNA, 19 nt, Artificial Sequence
  Description of Artificial Sequence: Synthetic oligonucleotide
guaaugguccauuucgcau

SEQ ID NO: 1639136 - RNA, 19 nt, Artificial Sequence
  Description of Artificial Sequence: Synthetic oligonucleotide
ugacgcugucauccauucc

SEQ ID NO: 1639137 - RNA, 19 nt, Artificial Sequence
  Description of Artificial Sequence: Synthetic oligonucleotide
uccauuccggauucacgaa

SEQ ID NO: 1639138 - RNA, 19 nt, Artificial Sequence
  Description of Artificial Sequence: Synthetic oligonucleotide
agaauucacucaguuuuaa

SEQ ID NO: 1639139 - RNA, 19 nt, Artificial Sequence
  Description of Artificial Sequence: Synthetic oligonucleotide
cugcacaagaaaugccuca

SEQ ID NO: 1639140 - RNA, 19 nt, Artificial Sequence
  Description of Artificial Sequence: Synthetic oligonucleotide
aagaugaaacgcacugauu

SEQ ID NO: 1639141 - RNA, 19 nt, Artificial Sequence
  Description of Artificial Sequence: Synthetic oligonucleotide
auacagggaguuaaacuau

SEQ ID NO: 1639142 - RNA, 19 nt, Artificial Sequence
  Description of Artificial Sequence: Synthetic oligonucleotide
uuuugcuuuucagcagcaa

SEQ ID NO: 1639143 - RNA, 19 nt, Artificial Sequence
  Description of Artificial Sequence: Synthetic oligonucleotide
gguagcaccuacaaaguaa

SEQ ID NO: 1639144 - RNA, 19 nt, Artificial Sequence
  Description of Artificial Sequence: Synthetic oligonucleotide
cgauuaaagauguauugga

SEQ ID NO: 1639145 - RNA, 19 nt, Artificial Sequence
  Description of Artificial Sequence: Synthetic oligonucleotide
augcacuuagaagucuaga

SEQ ID NO: 1639146 - RNA, 19 nt, Artificial Sequence
  Description of Artificial Sequence: Synthetic oligonucleotide
gcugauaagugaauucuga

SEQ ID NO: 1639147 - RNA, 19 nt, Artificial Sequence
  Description of Artificial Sequence: Synthetic oligonucleotide
accuacaaaguaaucuuua

SEQ ID NO: 1639148 - RNA, 19 nt, Artificial Sequence
  Description of Artificial Sequence: Synthetic oligonucleotide
cuggcuccaagacuacguc

SEQ ID NO: 1639149 - RNA, 19 nt, Artificial Sequence
  Description of Artificial Sequence: Synthetic oligonucleotide
ccggauucacgaaucauuc

SEQ ID NO: 1639150 - RNA, 19 nt, Artificial Sequence
  Description of Artificial Sequence: Synthetic oligonucleotide
gcaugcaguccacauagca

SEQ ID NO: 1639151 - RNA, 19 nt, Artificial Sequence
  Description of Artificial Sequence: Synthetic oligonucleotide
uagcaccuacaaaguaauc

SEQ ID NO: 1639152 - RNA, 19 nt, Artificial Sequence
  Description of Artificial Sequence: Synthetic oligonucleotide
acgaaccaaucuuguggcu

SEQ ID NO: 1639153 - RNA, 19 nt, Artificial Sequence
  Description of Artificial Sequence: Synthetic oligonucleotide
auccucuggaugaauugca

SEQ ID NO: 1639154 - RNA, 19 nt, Artificial Sequence
  Description of Artificial Sequence: Synthetic oligonucleotide
cuuccccagguguuuugug

SEQ ID NO: 1639155 - RNA, 19 nt, Artificial Sequence
  Description of Artificial Sequence: Synthetic oligonucleotide
guccauuguuuguggagga

SEQ ID NO: 1639156 - RNA, 19 nt, Artificial Sequence
  Description of Artificial Sequence: Synthetic oligonucleotide
gcuaaaggacugaagcaac

SEQ ID NO: 1639157 - RNA, 19 nt, Artificial Sequence
  Description of Artificial Sequence: Synthetic oligonucleotide
agacacgaaccaaucuugu

SEQ ID NO: 1639158 - RNA, 19 nt, Artificial Sequence
  Description of Artificial Sequence: Synthetic oligonucleotide
guccauacgagaauucacu

SEQ ID NO: 1639159 - RNA, 19 nt, Artificial Sequence
  Description of Artificial Sequence: Synthetic oligonucleotide
cauaaggauccauggucaa

SEQ ID NO: 1639160 - RNA, 19 nt, Artificial Sequence
  Description of Artificial Sequence: Synthetic oligonucleotide
ggacacugucccauaaagc

SEQ ID NO: 1639161 - RNA, 19 nt, Artificial Sequence
  Description of Artificial Sequence: Synthetic oligonucleotide
cacaacacucuaccuucuc

SEQ ID NO: 1639162 - RNA, 19 nt, Artificial Sequence
  Description of Artificial Sequence: Synthetic oligonucleotide
gagaauucacucaguuuua

SEQ ID NO: 1639163 - RNA, 19 nt, Artificial Sequence
  Description of Artificial Sequence: Synthetic oligonucleotide
gugguagugacgcugucau

SEQ ID NO: 1639164 - RNA, 19 nt, Artificial Sequence
  Description of Artificial Sequence: Synthetic oligonucleotide
acgguccauuguuugugga

SEQ ID NO: 1639165 - RNA, 19 nt, Artificial Sequence
  Description of Artificial Sequence: Synthetic oligonucleotide
gucuggcuccaagacuacg

SEQ ID NO: 1639166 - RNA, 19 nt, Artificial Sequence
  Description of Artificial Sequence: Synthetic oligonucleotide
ccaaucuuguggcugauaa

SEQ ID NO: 1639167 - RNA, 19 nt, Artificial Sequence
  Description of Artificial Sequence: Synthetic oligonucleotide
gucgagacacgaaccaauc

SEQ ID NO: 1639168 - RNA, 19 nt, Artificial Sequence
  Description of Artificial Sequence: Synthetic oligonucleotide
uuccggauucacgaaucau

SEQ ID NO: 1639169 - RNA, 19 nt, Artificial Sequence
  Description of Artificial Sequence: Synthetic oligonucleotide
gccuauggaaaugugaaua

SEQ ID NO: 1639170 - RNA, 19 nt, Artificial Sequence
  Description of Artificial Sequence: Synthetic oligonucleotide
acagggaguuaaacuauau

SEQ ID NO: 1639171 - RNA, 19 nt, Artificial Sequence
  Description of Artificial Sequence: Synthetic oligonucleotide
agccuccgauuaaagaugu

SEQ ID NO: 1639172 - RNA, 19 nt, Artificial Sequence
  Description of Artificial Sequence: Synthetic oligonucleotide
cagggaguuaaacuauaua

SEQ ID NO: 1639173 - RNA, 19 nt, Artificial Sequence
  Description of Artificial Sequence: Synthetic oligonucleotide
auuucgcaugcaguccaca

SEQ ID NO: 1639174 - RNA, 19 nt, Artificial Sequence
  Description of Artificial Sequence: Synthetic oligonucleotide
uuccuucgagguggacugg

SEQ ID NO: 1639175 - RNA, 19 nt, Artificial Sequence
  Description of Artificial Sequence: Synthetic oligonucleotide
ugcaaggaauagggguaga

SEQ ID NO: 1639176 - RNA, 19 nt, Artificial Sequence
  Description of Artificial Sequence: Synthetic oligonucleotide
gagggguagcaccuacaaa

SEQ ID NO: 1639177 - RNA, 19 nt, Artificial Sequence
  Description of Artificial Sequence: Synthetic oligonucleotide
ggaauagggguagacaggu

SEQ ID NO: 1639178 - RNA, 19 nt, Artificial Sequence
  Description of Artificial Sequence: Synthetic oligonucleotide
guagcaccuacaaaguaau

SEQ ID NO: 1639179 - RNA, 19 nt, Artificial Sequence
  Description of Artificial Sequence: Synthetic oligonucleotide
auucaguaguagccaugua

SEQ ID NO: 1639180 - RNA, 19 nt, Artificial Sequence
  Description of Artificial Sequence: Synthetic oligonucleotide
cuccgauuaaagauguauu

SEQ ID NO: 1639181 - RNA, 19 nt, Artificial Sequence
  Description of Artificial Sequence: Synthetic oligonucleotide
augucgagacacgaaccaa

SEQ ID NO: 1639182 - RNA, 19 nt, Artificial Sequence
  Description of Artificial Sequence: Synthetic oligonucleotide
gcagcaauaaaugcacuua

SEQ ID NO: 1639183 - RNA, 19 nt, Artificial Sequence
  Description of Artificial Sequence: Synthetic oligonucleotide
auacgagaauucacucagu

SEQ ID NO: 1639184 - RNA, 19 nt, Artificial Sequence
  Description of Artificial Sequence: Synthetic oligonucleotide
agugacgcugucauccauu

SEQ ID NO: 1639185 - RNA, 19 nt, Artificial Sequence
  Description of Artificial Sequence: Synthetic oligonucleotide
ugguagugacgcugucauc

SEQ ID NO: 1639186 - RNA, 19 nt, Artificial Sequence
  Description of Artificial Sequence: Synthetic oligonucleotide
ggcaguccauaaauaaguc

SEQ ID NO: 1639187 - RNA, 19 nt, Artificial Sequence
  Description of Artificial Sequence: Synthetic oligonucleotide
uaacuuccccagguguuuu

SEQ ID NO: 1639188 - RNA, 19 nt, Artificial Sequence
  Description of Artificial Sequence: Synthetic oligonucleotide
cuccaagacuacgucguga

SEQ ID NO: 1639189 - RNA, 19 nt, Artificial Sequence
  Description of Artificial Sequence: Synthetic oligonucleotide
aaccaaucuuguggcugau

SEQ ID NO: 1639190 - RNA, 19 nt, Artificial Sequence
  Description of Artificial Sequence: Synthetic oligonucleotide
cgcacugauugcuaaagga

SEQ ID NO: 1639191 - RNA, 19 nt, Artificial Sequence
  Description of Artificial Sequence: Synthetic oligonucleotide
ccaagacuacgucgugagg

SEQ ID NO: 1639192 - RNA, 19 nt, Artificial Sequence
  Description of Artificial Sequence: Synthetic oligonucleotide
ccaguccacaacacucuac

SEQ ID NO: 1639193 - RNA, 19 nt, Artificial Sequence
  Description of Artificial Sequence: Synthetic oligonucleotide
ggaggagaaauccaaccuu

SEQ ID NO: 1639194 - RNA, 19 nt, Artificial Sequence
  Description of Artificial Sequence: Synthetic oligonucleotide
ccauuucgcaugcagucca

SEQ ID NO: 1639195 - RNA, 19 nt, Artificial Sequence
  Description of Artificial Sequence: Synthetic oligonucleotide
agcaacagucaaagguuuu

SEQ ID NO: 1639196 - RNA, 19 nt, Artificial Sequence
  Description of Artificial Sequence: Synthetic oligonucleotide
ccagccuccgauuaaagau

SEQ ID NO: 1639197 - RNA, 19 nt, Artificial Sequence
  Description of Artificial Sequence: Synthetic oligonucleotide
uagccauguaaugguccau

SEQ ID NO: 1639198 - RNA, 19 nt, Artificial Sequence
  Description of Artificial Sequence: Synthetic oligonucleotide
agacuacgucgugaggaaa

SEQ ID NO: 1639199 - RNA, 19 nt, Artificial Sequence
  Description of Artificial Sequence: Synthetic oligonucleotide
ggguaacuuccccaggugu

SEQ ID NO: 1639200 - RNA, 19 nt, Artificial Sequence
  Description of Artificial Sequence: Synthetic oligonucleotide
ggguagacaggugaagucu

SEQ ID NO: 1639201 - RNA, 19 nt, Artificial Sequence
  Description of Artificial Sequence: Synthetic oligonucleotide
auaugccaacacaccaaua

SEQ ID NO: 1639202 - RNA, 19 nt, Artificial Sequence
  Description of Artificial Sequence: Synthetic oligonucleotide
cuuagaagucuagaauauu

SEQ ID NO: 1639203 - RNA, 19 nt, Artificial Sequence
  Description of Artificial Sequence: Synthetic oligonucleotide
ucuguaccuuggggaauuu

SEQ ID NO: 1639204 - RNA, 19 nt, Artificial Sequence
  Description of Artificial Sequence: Synthetic oligonucleotide
ggacucugcuccauuugca

SEQ ID NO: 1639205 - RNA, 19 nt, Artificial Sequence
  Description of Artificial Sequence: Synthetic oligonucleotide
ggguagcaccuacaaagua

SEQ ID NO: 1639206 - RNA, 19 nt, Artificial Sequence
  Description of Artificial Sequence: Synthetic oligonucleotide
ggcuccaagacuacgucgu

SEQ ID NO: 1639207 - RNA, 19 nt, Artificial Sequence
  Description of Artificial Sequence: Synthetic oligonucleotide
ccaacacaccaauaaggua

SEQ ID NO: 1639208 - RNA, 19 nt, Artificial Sequence
  Description of Artificial Sequence: Synthetic oligonucleotide
cagaaccaaccaguccaca

SEQ ID NO: 1639209 - RNA, 19 nt, Artificial Sequence
  Description of Artificial Sequence: Synthetic oligonucleotide
cugaaaccagccuccgauu

SEQ ID NO: 1639210 - RNA, 19 nt, Artificial Sequence
  Description of Artificial Sequence: Synthetic oligonucleotide
cuacgucgugaggaaaacu

SEQ ID NO: 1639211 - RNA, 19 nt, Artificial Sequence
  Description of Artificial Sequence: Synthetic oligonucleotide
ccuccgauuaaagauguau

SEQ ID NO: 1639212 - RNA, 19 nt, Artificial Sequence
  Description of Artificial Sequence: Synthetic oligonucleotide
gggguagcaccuacaaagu

SEQ ID NO: 1639213 - RNA, 19 nt, Artificial Sequence
  Description of Artificial Sequence: Synthetic oligonucleotide
gguagacaggugaagucuu

SEQ ID NO: 1639214 - RNA, 19 nt, Artificial Sequence
  Description of Artificial Sequence: Synthetic oligonucleotide
cucuguaccuuggggaauu

SEQ ID NO: 1639215 - RNA, 19 nt, Artificial Sequence
  Description of Artificial Sequence: Synthetic oligonucleotide
cgagacacgaaccaaucuu

SEQ ID NO: 1639216 - RNA, 19 nt, Artificial Sequence
  Description of Artificial Sequence: Synthetic oligonucleotide
ccuucgagguggacuggga

SEQ ID NO: 1639217 - RNA, 19 nt, Artificial Sequence
  Description of Artificial Sequence: Synthetic oligonucleotide
cgcaugcaguccacauagc

SEQ ID NO: 1639218 - RNA, 19 nt, Artificial Sequence
  Description of Artificial Sequence: Synthetic oligonucleotide
ccauuccggauucacgaau

SEQ ID NO: 1639219 - RNA, 19 nt, Artificial Sequence
  Description of Artificial Sequence: Synthetic oligonucleotide
cgucgugaggaaaacuuuu

SEQ ID NO: 1639220 - RNA, 19 nt, Artificial Sequence
  Description of Artificial Sequence: Synthetic oligonucleotide
cagguguuuuguggacacu

SEQ ID NO: 1639221 - RNA, 19 nt, Artificial Sequence
  Description of Artificial Sequence: Synthetic oligonucleotide
ccacaacacucuaccuucu

SEQ ID NO: 1639222 - RNA, 19 nt, Artificial Sequence
  Description of Artificial Sequence: Synthetic oligonucleotide
cggauucacgaaucauucu

SEQ ID NO: 1639223 - RNA, 19 nt, Artificial Sequence
  Description of Artificial Sequence: Synthetic oligonucleotide
cgcugucauccauuccgga

SEQ ID NO: 1639224 - RNA, 19 nt, Artificial Sequence
  Description of Artificial Sequence: Synthetic oligonucleotide
gccuccgauuaaagaugua

SEQ ID NO: 1639225 - RNA, 19 nt, Artificial Sequence
  Description of Artificial Sequence: Synthetic oligonucleotide
cgucuagaaguugauccuu

SEQ ID NO: 1639226 - RNA, 19 nt, Artificial Sequence
  Description of Artificial Sequence: Synthetic oligonucleotide
  modified_base (1)..(1): a, c, u, g, unknown or other
nauauauauauauauauac

SEQ ID NO: 1639227 - RNA, 19 nt, Artificial Sequence
  Description of Artificial Sequence: Synthetic oligonucleotide
  modified_base (1)..(1): a, c, u, g, unknown or other
  modified_base (3)..(3): a, c, u, g, unknown or other
  modified_base (5)..(5): a, c, u, g, unknown or other
nananauauauauauauau

SEQ ID NO: 1639228 - RNA, 19 nt, Artificial Sequence
  Description of Artificial Sequence: Synthetic oligonucleotide
  modified_base (1)..(1): a, c, u, g, unknown or other
  modified_base (3)..(3): a, c, u, g, unknown or other
nanauauauauauauauau

SEQ ID NO: 1639229 - RNA, 19 nt, Artificial Sequence
  Description of Artificial Sequence: Synthetic oligonucleotide
gauuuuauagauuaggagg

SEQ ID NO: 1639230 - RNA, 19 nt, Artificial Sequence
  Description of Artificial Sequence: Synthetic oligonucleotide
uaugguagaagccauauag

SEQ ID NO: 1639231 - RNA, 19 nt, Artificial Sequence
  Description of Artificial Sequence: Synthetic oligonucleotide
ucggauacagaacucaugg

SEQ ID NO: 1639232 - RNA, 19 nt, Artificial Sequence
  Description of Artificial Sequence: Synthetic oligonucleotide
ugacauaucaaccucguca

SEQ ID NO: 1639233 - RNA, 19 nt, Artificial Sequence
  Description of Artificial Sequence: Synthetic oligonucleotide
ucaccauauuguaagaacg

SEQ ID NO: 1639234 - RNA, 19 nt, Artificial Sequence
  Description of Artificial Sequence: Synthetic oligonucleotide
auagcugaugccuuguacc

SEQ ID NO: 1639235 - RNA, 19 nt, Artificial Sequence
  Description of Artificial Sequence: Synthetic oligonucleotide
uuauagauuaggaggaacc

SEQ ID NO: 1639236 - RNA, 19 nt, Artificial Sequence
  Description of Artificial Sequence: Synthetic oligonucleotide
uauguguucucgaugaugc

SEQ ID NO: 1639237 - RNA, 19 nt, Artificial Sequence
  Description of Artificial Sequence: Synthetic oligonucleotide
aaguuaagaccaaagaggg

SEQ ID NO: 1639238 - RNA, 19 nt, Artificial Sequence
  Description of Artificial Sequence: Synthetic oligonucleotide
aacaugacagccauguagc

SEQ ID NO: 1639239 - RNA, 19 nt, Artificial Sequence
  Description of Artificial Sequence: Synthetic oligonucleotide
ugauuuuauagauuaggag

SEQ ID NO: 1639240 - RNA, 19 nt, Artificial Sequence
  Description of Artificial Sequence: Synthetic oligonucleotide
uaauaaguuaagaccaaag

SEQ ID NO: 1639241 - RNA, 19 nt, Artificial Sequence
  Description of Artificial Sequence: Synthetic oligonucleotide
uccauauuauuccaggccc

SEQ ID NO: 1639242 - RNA, 19 nt, Artificial Sequence
  Description of Artificial Sequence: Synthetic oligonucleotide
agaacccuaugguagaagc

SEQ ID NO: 1639243 - RNA, 19 nt, Artificial Sequence
  Description of Artificial Sequence: Synthetic oligonucleotide
auuguaagaacggggaugc

SEQ ID NO: 1639244 - RNA, 19 nt, Artificial Sequence
  Description of Artificial Sequence: Synthetic oligonucleotide
ucuugaauaauaaguuaag

SEQ ID NO: 1639245 - RNA, 19 nt, Artificial Sequence
  Description of Artificial Sequence: Synthetic oligonucleotide
ucugaaaggugcuugguag

SEQ ID NO: 1639246 - RNA, 19 nt, Artificial Sequence
  Description of Artificial Sequence: Synthetic oligonucleotide
aaugccaaaguccauugca

SEQ ID NO: 1639247 - RNA, 19 nt, Artificial Sequence
  Description of Artificial Sequence: Synthetic oligonucleotide
uggaauacgugauugcagg

SEQ ID NO: 1639248 - RNA, 19 nt, Artificial Sequence
  Description of Artificial Sequence: Synthetic oligonucleotide
aaauagaggggaacaaccc

SEQ ID NO: 1639249 - RNA, 19 nt, Artificial Sequence
  Description of Artificial Sequence: Synthetic oligonucleotide
aaccauuuauaaaccaacc

SEQ ID NO: 1639250 - RNA, 19 nt, Artificial Sequence
  Description of Artificial Sequence: Synthetic oligonucleotide
agaggucugacauaucaac

SEQ ID NO: 1639251 - RNA, 19 nt, Artificial Sequence
  Description of Artificial Sequence: Synthetic oligonucleotide
aagaacuccauaguagagg

SEQ ID NO: 1639252 - RNA, 19 nt, Artificial Sequence
  Description of Artificial Sequence: Synthetic oligonucleotide
guagaagccauauagucug

SEQ ID NO: 1639253 - RNA, 19 nt, Artificial Sequence
  Description of Artificial Sequence: Synthetic oligonucleotide
aacaacccacaucugaaag

SEQ ID NO: 1639254 - RNA, 19 nt, Artificial Sequence
  Description of Artificial Sequence: Synthetic oligonucleotide
ugaaaggguaggcugaagc

SEQ ID NO: 1639255 - RNA, 19 nt, Artificial Sequence
  Description of Artificial Sequence: Synthetic oligonucleotide
ucaaccucgucauagcucc

SEQ ID NO: 1639256 - RNA, 19 nt, Artificial Sequence
  Description of Artificial Sequence: Synthetic oligonucleotide
uuccauauuauuccaggcc

SEQ ID NO: 1639257 - RNA, 19 nt, Artificial Sequence
  Description of Artificial Sequence: Synthetic oligonucleotide
aggggaacaacccacaucu

SEQ ID NO: 1639258 - RNA, 19 nt, Artificial Sequence
  Description of Artificial Sequence: Synthetic oligonucleotide
agccauauagucugcacac

SEQ ID NO: 1639259 - RNA, 19 nt, Artificial Sequence
  Description of Artificial Sequence: Synthetic oligonucleotide
aaaggguaggcugaagcac

SEQ ID NO: 1639260 - RNA, 19 nt, Artificial Sequence
  Description of Artificial Sequence: Synthetic oligonucleotide
aauagaggggaacaaccca

SEQ ID NO: 1639261 - RNA, 19 nt, Artificial Sequence
  Description of Artificial Sequence: Synthetic oligonucleotide
auacgugcaugcucgaccc

SEQ ID NO: 1639262 - RNA, 19 nt, Artificial Sequence
  Description of Artificial Sequence: Synthetic oligonucleotide
auaucaaccucgucauagc

SEQ ID NO: 1639263 - RNA, 19 nt, Artificial Sequence
  Description of Artificial Sequence: Synthetic oligonucleotide
augacaugaggccucuccc

SEQ ID NO: 1639264 - RNA, 19 nt, Artificial Sequence
  Description of Artificial Sequence: Synthetic oligonucleotide
uuccguguggcucggaagg

SEQ ID NO: 1639265 - RNA, 19 nt, Artificial Sequence
  Description of Artificial Sequence: Synthetic oligonucleotide
cuguagaacccuaugguag

SEQ ID NO: 1639266 - RNA, 19 nt, Artificial Sequence
  Description of Artificial Sequence: Synthetic oligonucleotide
auuuuauagauuaggagga

SEQ ID NO: 1639267 - RNA, 19 nt, Artificial Sequence
  Description of Artificial Sequence: Synthetic oligonucleotide
ugcuugguaggcaugcccg

SEQ ID NO: 1639268 - RNA, 19 nt, Artificial Sequence
  Description of Artificial Sequence: Synthetic oligonucleotide
aaguaucgaagccagucca

SEQ ID NO: 1639269 - RNA, 19 nt, Artificial Sequence
  Description of Artificial Sequence: Synthetic oligonucleotide
uauuguaagaacggggaug

SEQ ID NO: 1639270 - RNA, 19 nt, Artificial Sequence
  Description of Artificial Sequence: Synthetic oligonucleotide
aguccauugcaucuucugg

SEQ ID NO: 1639271 - RNA, 19 nt, Artificial Sequence
  Description of Artificial Sequence: Synthetic oligonucleotide
aauacgugauugcaggaaa

SEQ ID NO: 1639272 - RNA, 19 nt, Artificial Sequence
  Description of Artificial Sequence: Synthetic oligonucleotide
guagcaaugaggaugagga

SEQ ID NO: 1639273 - RNA, 19 nt, Artificial Sequence
  Description of Artificial Sequence: Synthetic oligonucleotide
ugugaaauagaggggaaca

SEQ ID NO: 1639274 - RNA, 19 nt, Artificial Sequence
  Description of Artificial Sequence: Synthetic oligonucleotide
auuuauaaaccaaccuugg

SEQ ID NO: 1639275 - RNA, 19 nt, Artificial Sequence
  Description of Artificial Sequence: Synthetic oligonucleotide
cauauuguaagaacgggga

SEQ ID NO: 1639276 - RNA, 19 nt, Artificial Sequence
  Description of Artificial Sequence: Synthetic oligonucleotide
caccauauuguaagaacgg

SEQ ID NO: 1639277 - RNA, 19 nt, Artificial Sequence
  Description of Artificial Sequence: Synthetic oligonucleotide
aagaccaaagaggguaaac

SEQ ID NO: 1639278 - RNA, 19 nt, Artificial Sequence
  Description of Artificial Sequence: Synthetic oligonucleotide
uagcugauuuuauagauua

SEQ ID NO: 1639279 - RNA, 19 nt, Artificial Sequence
  Description of Artificial Sequence: Synthetic oligonucleotide
uaccaaguaucgaagccag

SEQ ID NO: 1639280 - RNA, 19 nt, Artificial Sequence
  Description of Artificial Sequence: Synthetic oligonucleotide
auauagucugcacacauuu

SEQ ID NO: 1639281 - RNA, 19 nt, Artificial Sequence
  Description of Artificial Sequence: Synthetic oligonucleotide
gaugccuuguaccaggcca

SEQ ID NO: 1639282 - RNA, 19 nt, Artificial Sequence
  Description of Artificial Sequence: Synthetic oligonucleotide
ugcccugagguccauggcg

SEQ ID NO: 1639283 - RNA, 19 nt, Artificial Sequence
  Description of Artificial Sequence: Synthetic oligonucleotide
auguuuggcaugcauacgu

SEQ ID NO: 1639284 - RNA, 19 nt, Artificial Sequence
  Description of Artificial Sequence: Synthetic oligonucleotide
uucuccuugcaguaggggc

SEQ ID NO: 1639285 - RNA, 19 nt, Artificial Sequence
  Description of Artificial Sequence: Synthetic oligonucleotide
aauuccuauacuccacaau

SEQ ID NO: 1639286 - RNA, 19 nt, Artificial Sequence
  Description of Artificial Sequence: Synthetic oligonucleotide
gaaccauuuauaaaccaac

SEQ ID NO: 1639287 - RNA, 19 nt, Artificial Sequence
  Description of Artificial Sequence: Synthetic oligonucleotide
cuaucugaaaggugcuugg

SEQ ID NO: 1639288 - RNA, 19 nt, Artificial Sequence
  Description of Artificial Sequence: Synthetic oligonucleotide
agaaaacgcaccaaugcuc

SEQ ID NO: 1639289 - RNA, 19 nt, Artificial Sequence
  Description of Artificial Sequence: Synthetic oligonucleotide
uauagcugaugccuuguac

SEQ ID NO: 1639290 - RNA, 19 nt, Artificial Sequence
  Description of Artificial Sequence: Synthetic oligonucleotide
cuuugagucuuucccaccc

SEQ ID NO: 1639291 - RNA, 19 nt, Artificial Sequence
  Description of Artificial Sequence: Synthetic oligonucleotide
uguccauacaugacaugag

SEQ ID NO: 1639292 - RNA, 19 nt, Artificial Sequence
  Description of Artificial Sequence: Synthetic oligonucleotide
uaggcugaagcacucaguc

SEQ ID NO: 1639293 - RNA, 19 nt, Artificial Sequence
  Description of Artificial Sequence: Synthetic oligonucleotide
aacccuaugguagaagcca

SEQ ID NO: 1639294 - RNA, 19 nt, Artificial Sequence
  Description of Artificial Sequence: Synthetic oligonucleotide
uuuauagauuaggaggaac

SEQ ID NO: 1639295 - RNA, 19 nt, Artificial Sequence
  Description of Artificial Sequence: Synthetic oligonucleotide
gguuccauauuauuccagg

SEQ ID NO: 1639296 - RNA, 19 nt, Artificial Sequence
  Description of Artificial Sequence: Synthetic oligonucleotide
cauaguagaggccauagaa

SEQ ID NO: 1639297 - RNA, 19 nt, Artificial Sequence
  Description of Artificial Sequence: Synthetic oligonucleotide
cauacgugcaugcucgacc

SEQ ID NO: 1639298 - RNA, 19 nt, Artificial Sequence
  Description of Artificial Sequence: Synthetic oligonucleotide
gaggccauagaagagaaga

SEQ ID NO: 1639299 - RNA, 19 nt, Artificial Sequence
  Description of Artificial Sequence: Synthetic oligonucleotide
gagguuuccguguggcucg

SEQ ID NO: 1639300 - RNA, 19 nt, Artificial Sequence
  Description of Artificial Sequence: Synthetic oligonucleotide
auagaggggaacaacccac

SEQ ID NO: 1639301 - RNA, 19 nt, Artificial Sequence
  Description of Artificial Sequence: Synthetic oligonucleotide
aggucugacauaucaaccu

SEQ ID NO: 1639302 - RNA, 19 nt, Artificial Sequence
  Description of Artificial Sequence: Synthetic oligonucleotide
acgugauugcaggaaagcc

SEQ ID NO: 1639303 - RNA, 19 nt, Artificial Sequence
  Description of Artificial Sequence: Synthetic oligonucleotide
ugaaauagaggggaacaac

SEQ ID NO: 1639304 - RNA, 19 nt, Artificial Sequence
  Description of Artificial Sequence: Synthetic oligonucleotide
aagccuguauguguucucg

SEQ ID NO: 1639305 - RNA, 19 nt, Artificial Sequence
  Description of Artificial Sequence: Synthetic oligonucleotide
gaaaggguaggcugaagca

SEQ ID NO: 1639306 - RNA, 19 nt, Artificial Sequence
  Description of Artificial Sequence: Synthetic oligonucleotide
ucugacauaucaaccucgu

SEQ ID NO: 1639307 - RNA, 19 nt, Artificial Sequence
  Description of Artificial Sequence: Synthetic oligonucleotide
guuaagaccaaagagggua

SEQ ID NO: 1639308 - RNA, 19 nt, Artificial Sequence
  Description of Artificial Sequence: Synthetic oligonucleotide
ucauggaauacgugauugc

SEQ ID NO: 1639309 - RNA, 19 nt, Artificial Sequence
  Description of Artificial Sequence: Synthetic oligonucleotide
ggguucuccaaugauaugg

SEQ ID NO: 1639310 - RNA, 19 nt, Artificial Sequence
  Description of Artificial Sequence: Synthetic oligonucleotide
acagaacucauggaauacg

SEQ ID NO: 1639311 - RNA, 19 nt, Artificial Sequence
  Description of Artificial Sequence: Synthetic oligonucleotide
aauaauaaguuaagaccaa

SEQ ID NO: 1639312 - RNA, 19 nt, Artificial Sequence
  Description of Artificial Sequence: Synthetic oligonucleotide
uaucaaccucgucauagcu

SEQ ID NO: 1639313 - RNA, 19 nt, Artificial Sequence
  Description of Artificial Sequence: Synthetic oligonucleotide
aacgcaccaaugcucucag

SEQ ID NO: 1639314 - RNA, 19 nt, Artificial Sequence
  Description of Artificial Sequence: Synthetic oligonucleotide
augcauacgugcaugcucg

SEQ ID NO: 1639315 - RNA, 19 nt, Artificial Sequence
  Description of Artificial Sequence: Synthetic oligonucleotide
aacggcuuugcccuacccu

SEQ ID NO: 1639316 - RNA, 19 nt, Artificial Sequence
  Description of Artificial Sequence: Synthetic oligonucleotide
aggugacaaaugcugugac

SEQ ID NO: 1639317 - RNA, 19 nt, Artificial Sequence
  Description of Artificial Sequence: Synthetic oligonucleotide
agucuuugugggcagcaag

SEQ ID NO: 1639318 - RNA, 19 nt, Artificial Sequence
  Description of Artificial Sequence: Synthetic oligonucleotide
acaauuccuauacuccaca

SEQ ID NO: 1639319 - RNA, 19 nt, Artificial Sequence
  Description of Artificial Sequence: Synthetic oligonucleotide
caagaacuccauaguagag

SEQ ID NO: 1639320 - RNA, 19 nt, Artificial Sequence
  Description of Artificial Sequence: Synthetic oligonucleotide
uuccuauacuccacaauaa

SEQ ID NO: 1639321 - RNA, 19 nt, Artificial Sequence
  Description of Artificial Sequence: Synthetic oligonucleotide
uuauuccaggcccaggaua

SEQ ID NO: 1639322 - RNA, 19 nt, Artificial Sequence
  Description of Artificial Sequence: Synthetic oligonucleotide
aaaacgcaccaaugcucuc

SEQ ID NO: 1639323 - RNA, 19 nt, Artificial Sequence
  Description of Artificial Sequence: Synthetic oligonucleotide
ccauauuguaagaacgggg

SEQ ID NO: 1639324 - RNA, 19 nt, Artificial Sequence
  Description of Artificial Sequence: Synthetic oligonucleotide
gacaugaggccucucccag

SEQ ID NO: 1639325 - RNA, 19 nt, Artificial Sequence
  Description of Artificial Sequence: Synthetic oligonucleotide
cuguucaaacaggauaagg

SEQ ID NO: 1639326 - RNA, 19 nt, Artificial Sequence
  Description of Artificial Sequence: Synthetic oligonucleotide
caaagucccgcucaagaac

SEQ ID NO: 1639327 - RNA, 19 nt, Artificial Sequence
  Description of Artificial Sequence: Synthetic oligonucleotide
aaaccaaccuugguguugu

SEQ ID NO: 1639328 - RNA, 19 nt, Artificial Sequence
  Description of Artificial Sequence: Synthetic oligonucleotide
cucauggaauacgugauug

SEQ ID NO: 1639329 - RNA, 19 nt, Artificial Sequence
  Description of Artificial Sequence: Synthetic oligonucleotide
ugagucuuucccacccaag

SEQ ID NO: 1639330 - RNA, 19 nt, Artificial Sequence
  Description of Artificial Sequence: Synthetic oligonucleotide
agaccaaagaggguaaaca

SEQ ID NO: 1639331 - RNA, 19 nt, Artificial Sequence
  Description of Artificial Sequence: Synthetic oligonucleotide
uacuagagguuuccgugug

SEQ ID NO: 1639332 - RNA, 19 nt, Artificial Sequence
  Description of Artificial Sequence: Synthetic oligonucleotide
aacccagacacagcugggg

SEQ ID NO: 1639333 - RNA, 19 nt, Artificial Sequence
  Description of Artificial Sequence: Synthetic oligonucleotide
gaggaaccauuuauaaacc

SEQ ID NO: 1639334 - RNA, 19 nt, Artificial Sequence
  Description of Artificial Sequence: Synthetic oligonucleotide
cacacacgcuaucugaaag

SEQ ID NO: 1639335 - RNA, 19 nt, Artificial Sequence
  Description of Artificial Sequence: Synthetic oligonucleotide
ucuguacuagagguuuccg

SEQ ID NO: 1639336 - RNA, 19 nt, Artificial Sequence
  Description of Artificial Sequence: Synthetic oligonucleotide
uccagaucaccaagaaccu

SEQ ID NO: 1639337 - RNA, 19 nt, Artificial Sequence
  Description of Artificial Sequence: Synthetic oligonucleotide
gaggucugacauaucaacc

SEQ ID NO: 1639338 - RNA, 19 nt, Artificial Sequence
  Description of Artificial Sequence: Synthetic oligonucleotide
uagcugaugccuuguacca

SEQ ID NO: 1639339 - RNA, 19 nt, Artificial Sequence
  Description of Artificial Sequence: Synthetic oligonucleotide
cuugaauaauaaguuaaga

SEQ ID NO: 1639340 - RNA, 19 nt, Artificial Sequence
  Description of Artificial Sequence: Synthetic oligonucleotide
acuguagaacccuauggua

SEQ ID NO: 1639341 - RNA, 19 nt, Artificial Sequence
  Description of Artificial Sequence: Synthetic oligonucleotide
aggaaccauuuauaaacca

SEQ ID NO: 1639342 - RNA, 19 nt, Artificial Sequence
  Description of Artificial Sequence: Synthetic oligonucleotide
aaacgcaccaaugcucuca

SEQ ID NO: 1639343 - RNA, 19 nt, Artificial Sequence
  Description of Artificial Sequence: Synthetic oligonucleotide
augaggaccauuucagcau

SEQ ID NO: 1639344 - RNA, 19 nt, Artificial Sequence
  Description of Artificial Sequence: Synthetic oligonucleotide
aucugaaagagggucacca

SEQ ID NO: 1639345 - RNA, 19 nt, Artificial Sequence
  Description of Artificial Sequence: Synthetic oligonucleotide
ucggaaggugacaaaugcu

SEQ ID NO: 1639346 - RNA, 19 nt, Artificial Sequence
  Description of Artificial Sequence: Synthetic oligonucleotide
gugauugcaggaaagccug

SEQ ID NO: 1639347 - RNA, 19 nt, Artificial Sequence
  Description of Artificial Sequence: Synthetic oligonucleotide
caugcauacgugcaugcuc

SEQ ID NO: 1639348 - RNA, 19 nt, Artificial Sequence
  Description of Artificial Sequence: Synthetic oligonucleotide
uaucgaagccaguccagca

SEQ ID NO: 1639349 - RNA, 19 nt, Artificial Sequence
  Description of Artificial Sequence: Synthetic oligonucleotide
ugcccuacccuguucaaac

SEQ ID NO: 1639350 - RNA, 19 nt, Artificial Sequence
  Description of Artificial Sequence: Synthetic oligonucleotide
acuagagguuuccgugugg

SEQ ID NO: 1639351 - RNA, 19 nt, Artificial Sequence
  Description of Artificial Sequence: Synthetic oligonucleotide
ccauacaugacaugaggcc

SEQ ID NO: 1639352 - RNA, 19 nt, Artificial Sequence
  Description of Artificial Sequence: Synthetic oligonucleotide
uacgugauugcaggaaagc

SEQ ID NO: 1639353 - RNA, 19 nt, Artificial Sequence
  Description of Artificial Sequence: Synthetic oligonucleotide
auauuguaagaacggggau

SEQ ID NO: 1639354 - RNA, 19 nt, Artificial Sequence
  Description of Artificial Sequence: Synthetic oligonucleotide
acccuguucaaacaggaua

SEQ ID NO: 1639355 - RNA, 19 nt, Artificial Sequence
  Description of Artificial Sequence: Synthetic oligonucleotide
ugcucgacccuccauugcu

SEQ ID NO: 1639356 - RNA, 19 nt, Artificial Sequence
  Description of Artificial Sequence: Synthetic oligonucleotide
cauuucugcaaagucccgc

SEQ ID NO: 1639357 - RNA, 19 nt, Artificial Sequence
  Description of Artificial Sequence: Synthetic oligonucleotide
uuugagucuuucccaccca

SEQ ID NO: 1639358 - RNA, 19 nt, Artificial Sequence
  Description of Artificial Sequence: Synthetic oligonucleotide
cuagagguuuccguguggc

SEQ ID NO: 1639359 - RNA, 19 nt, Artificial Sequence
  Description of Artificial Sequence: Synthetic oligonucleotide
ucgucauagcucccuuucc

SEQ ID NO: 1639360 - RNA, 19 nt, Artificial Sequence
  Description of Artificial Sequence: Synthetic oligonucleotide
uggcccaaaugccuuugag

SEQ ID NO: 1639361 - RNA, 19 nt, Artificial Sequence
  Description of Artificial Sequence: Synthetic oligonucleotide
accaaagaggguaaacaug

SEQ ID NO: 1639362 - RNA, 19 nt, Artificial Sequence
  Description of Artificial Sequence: Synthetic oligonucleotide
auacaugacaugaggccuc

SEQ ID NO: 1639363 - RNA, 19 nt, Artificial Sequence
  Description of Artificial Sequence: Synthetic oligonucleotide
ccaaagaggguaaacauga

SEQ ID NO: 1639364 - RNA, 19 nt, Artificial Sequence
  Description of Artificial Sequence: Synthetic oligonucleotide
auaauaaguuaagaccaaa

SEQ ID NO: 1639365 - RNA, 19 nt, Artificial Sequence
  Description of Artificial Sequence: Synthetic oligonucleotide
gacaauuccuauacuccac

SEQ ID NO: 1639366 - RNA, 19 nt, Artificial Sequence
  Description of Artificial Sequence: Synthetic oligonucleotide
gcuaccaaguaucgaagcc

SEQ ID NO: 1639367 - RNA, 19 nt, Artificial Sequence
  Description of Artificial Sequence: Synthetic oligonucleotide
gaacccuaugguagaagcc

SEQ ID NO: 1639368 - RNA, 19 nt, Artificial Sequence
  Description of Artificial Sequence: Synthetic oligonucleotide
aggaggaaccauuuauaaa

SEQ ID NO: 1639369 - RNA, 19 nt, Artificial Sequence
  Description of Artificial Sequence: Synthetic oligonucleotide
cuggggaaguccugagugg

SEQ ID NO: 1639370 - RNA, 19 nt, Artificial Sequence
  Description of Artificial Sequence: Synthetic oligonucleotide
cucggauacagaacucaug

SEQ ID NO: 1639371 - RNA, 19 nt, Artificial Sequence
  Description of Artificial Sequence: Synthetic oligonucleotide
cuguccauacaugacauga

SEQ ID NO: 1639372 - RNA, 19 nt, Artificial Sequence
  Description of Artificial Sequence: Synthetic oligonucleotide
uugagucuuucccacccaa

SEQ ID NO: 1639373 - RNA, 19 nt, Artificial Sequence
  Description of Artificial Sequence: Synthetic oligonucleotide
gaccccucgggaccaacgg

SEQ ID NO: 1639374 - RNA, 19 nt, Artificial Sequence
  Description of Artificial Sequence: Synthetic oligonucleotide
accagccucggauacagaa

SEQ ID NO: 1639375 - RNA, 19 nt, Artificial Sequence
  Description of Artificial Sequence: Synthetic oligonucleotide
guaagaacggggaugccuc

SEQ ID NO: 1639376 - RNA, 19 nt, Artificial Sequence
  Description of Artificial Sequence: Synthetic oligonucleotide
gggacaauuccuauacucc

SEQ ID NO: 1639377 - RNA, 19 nt, Artificial Sequence
  Description of Artificial Sequence: Synthetic oligonucleotide
agucccgcucaagaacucc

SEQ ID NO: 1639378 - RNA, 19 nt, Artificial Sequence
  Description of Artificial Sequence: Synthetic oligonucleotide
cugguuuaaucuugaauaa

SEQ ID NO: 1639379 - RNA, 19 nt, Artificial Sequence
  Description of Artificial Sequence: Synthetic oligonucleotide
auuauuccaggcccaggau

SEQ ID NO: 1639380 - RNA, 19 nt, Artificial Sequence
  Description of Artificial Sequence: Synthetic oligonucleotide
ggggacaauuccuauacuc

SEQ ID NO: 1639381 - RNA, 19 nt, Artificial Sequence
  Description of Artificial Sequence: Synthetic oligonucleotide
cauggaauacgugauugca

SEQ ID NO: 1639382 - RNA, 19 nt, Artificial Sequence
  Description of Artificial Sequence: Synthetic oligonucleotide
aggcaugcccgacucacug

SEQ ID NO: 1639383 - RNA, 19 nt, Artificial Sequence
  Description of Artificial Sequence: Synthetic oligonucleotide
cacugugaaauagagggga

SEQ ID NO: 1639384 - RNA, 19 nt, Artificial Sequence
  Description of Artificial Sequence: Synthetic oligonucleotide
uugguaggcaugcccgacu

SEQ ID NO: 1639385 - RNA, 19 nt, Artificial Sequence
  Description of Artificial Sequence: Synthetic oligonucleotide
acgucugcuucuuccccac

SEQ ID NO: 1639386 - RNA, 19 nt, Artificial Sequence
  Description of Artificial Sequence: Synthetic oligonucleotide
ugguuuaaucuugaauaau

SEQ ID NO: 1639387 - RNA, 19 nt, Artificial Sequence
  Description of Artificial Sequence: Synthetic oligonucleotide
gaaaacgcaccaaugcucu

SEQ ID NO: 1639388 - RNA, 19 nt, Artificial Sequence
  Description of Artificial Sequence: Synthetic oligonucleotide
cauagcugauuuuauagau

SEQ ID NO: 1639389 - RNA, 19 nt, Artificial Sequence
  Description of Artificial Sequence: Synthetic oligonucleotide
accccucgggaccaacggc

SEQ ID NO: 1639390 - RNA, 19 nt, Artificial Sequence
  Description of Artificial Sequence: Synthetic oligonucleotide
caaagaggguaaacaugac

SEQ ID NO: 1639391 - RNA, 19 nt, Artificial Sequence
  Description of Artificial Sequence: Synthetic oligonucleotide
ccacccaagucuuuguggg

SEQ ID NO: 1639392 - RNA, 19 nt, Artificial Sequence
  Description of Artificial Sequence: Synthetic oligonucleotide
gguuuaaucuugaauaaua

SEQ ID NO: 1639393 - RNA, 19 nt, Artificial Sequence
  Description of Artificial Sequence: Synthetic oligonucleotide
uagaacccuaugguagaag

SEQ ID NO: 1639394 - RNA, 19 nt, Artificial Sequence
  Description of Artificial Sequence: Synthetic oligonucleotide
ggacaauuccuauacucca

SEQ ID NO: 1639395 - RNA, 19 nt, Artificial Sequence
  Description of Artificial Sequence: Synthetic oligonucleotide
auacgugauugcaggaaag

SEQ ID NO: 1639396 - RNA, 19 nt, Artificial Sequence
  Description of Artificial Sequence: Synthetic oligonucleotide
agaggugaaaagaccccuc

SEQ ID NO: 1639397 - RNA, 19 nt, Artificial Sequence
  Description of Artificial Sequence: Synthetic oligonucleotide
cuaccaaguaucgaagcca

SEQ ID NO: 1639398 - RNA, 19 nt, Artificial Sequence
  Description of Artificial Sequence: Synthetic oligonucleotide
ccaagaaccuccaccaaug

SEQ ID NO: 1639399 - RNA, 19 nt, Artificial Sequence
  Description of Artificial Sequence: Synthetic oligonucleotide
agagggucaccauauugua

SEQ ID NO: 1639400 - RNA, 19 nt, Artificial Sequence
  Description of Artificial Sequence: Synthetic oligonucleotide
gaacaacccacaucugaaa

SEQ ID NO: 1639401 - RNA, 19 nt, Artificial Sequence
  Description of Artificial Sequence: Synthetic oligonucleotide
guaucgaagccaguccagc

SEQ ID NO: 1639402 - RNA, 19 nt, Artificial Sequence
  Description of Artificial Sequence: Synthetic oligonucleotide
aguaucgaagccaguccag

SEQ ID NO: 1639403 - RNA, 19 nt, Artificial Sequence
  Description of Artificial Sequence: Synthetic oligonucleotide
uguauguguucucgaugau

SEQ ID NO: 1639404 - RNA, 19 nt, Artificial Sequence
  Description of Artificial Sequence: Synthetic oligonucleotide
ggauauagcugaugccuug

SEQ ID NO: 1639405 - RNA, 19 nt, Artificial Sequence
  Description of Artificial Sequence: Synthetic oligonucleotide
agaacggggaugccucugu

SEQ ID NO: 1639406 - RNA, 19 nt, Artificial Sequence
  Description of Artificial Sequence: Synthetic oligonucleotide
cuuugcccuacccuguuca

SEQ ID NO: 1639407 - RNA, 19 nt, Artificial Sequence
  Description of Artificial Sequence: Synthetic oligonucleotide
cugugaaauagaggggaac

SEQ ID NO: 1639408 - RNA, 19 nt, Artificial Sequence
  Description of Artificial Sequence: Synthetic oligonucleotide
gagucuuucccacccaagu

SEQ ID NO: 1639409 - RNA, 19 nt, Artificial Sequence
  Description of Artificial Sequence: Synthetic oligonucleotide
gauuaggaggaaccauuua

SEQ ID NO: 1639410 - RNA, 19 nt, Artificial Sequence
  Description of Artificial Sequence: Synthetic oligonucleotide
guaggcaugcccgacucac

SEQ ID NO: 1639411 - RNA, 19 nt, Artificial Sequence
  Description of Artificial Sequence: Synthetic oligonucleotide
uaagaacggggaugccucu

SEQ ID NO: 1639412 - RNA, 19 nt, Artificial Sequence
  Description of Artificial Sequence: Synthetic oligonucleotide
aagaacggggaugccucug

SEQ ID NO: 1639413 - RNA, 19 nt, Artificial Sequence
  Description of Artificial Sequence: Synthetic oligonucleotide
caucauuauccccuuccca

SEQ ID NO: 1639414 - RNA, 19 nt, Artificial Sequence
  Description of Artificial Sequence: Synthetic oligonucleotide
ccgcucaagaacuccauag

SEQ ID NO: 1639415 - RNA, 19 nt, Artificial Sequence
  Description of Artificial Sequence: Synthetic oligonucleotide
aggguaaacaugacagcca

SEQ ID NO: 1639416 - RNA, 19 nt, Artificial Sequence
  Description of Artificial Sequence: Synthetic oligonucleotide
acgugcaugcucgacccuc

SEQ ID NO: 1639417 - RNA, 19 nt, Artificial Sequence
  Description of Artificial Sequence: Synthetic oligonucleotide
aaccucgucauagcucccu

SEQ ID NO: 1639418 - RNA, 19 nt, Artificial Sequence
  Description of Artificial Sequence: Synthetic oligonucleotide
cauugcaucuucugguuua

SEQ ID NO: 1639419 - RNA, 19 nt, Artificial Sequence
  Description of Artificial Sequence: Synthetic oligonucleotide
cgauguuuggcaugcauac

SEQ ID NO: 1639420 - RNA, 19 nt, Artificial Sequence
  Description of Artificial Sequence: Synthetic oligonucleotide
ggaugaggaccauuucagc

SEQ ID NO: 1639421 - RNA, 19 nt, Artificial Sequence
  Description of Artificial Sequence: Synthetic oligonucleotide
ggcuaccaaguaucgaagc

SEQ ID NO: 1639422 - RNA, 19 nt, Artificial Sequence
  Description of Artificial Sequence: Synthetic oligonucleotide
gcauagcugauuuuauaga

SEQ ID NO: 1639423 - RNA, 19 nt, Artificial Sequence
  Description of Artificial Sequence: Synthetic oligonucleotide
ugacagccccacuggcuag

SEQ ID NO: 1639424 - RNA, 19 nt, Artificial Sequence
  Description of Artificial Sequence: Synthetic oligonucleotide
guccauugcaucuucuggu

SEQ ID NO: 1639425 - RNA, 19 nt, Artificial Sequence
  Description of Artificial Sequence: Synthetic oligonucleotide
auagcugauuuuauagauu

SEQ ID NO: 1639426 - RNA, 19 nt, Artificial Sequence
  Description of Artificial Sequence: Synthetic oligonucleotide
uggguucuccaaugauaug

SEQ ID NO: 1639427 - RNA, 19 nt, Artificial Sequence
  Description of Artificial Sequence: Synthetic oligonucleotide
augcccgacucacuguaga

SEQ ID NO: 1639428 - RNA, 19 nt, Artificial Sequence
  Description of Artificial Sequence: Synthetic oligonucleotide
cagaaaacgcaccaaugcu

SEQ ID NO: 1639429 - RNA, 19 nt, Artificial Sequence
  Description of Artificial Sequence: Synthetic oligonucleotide
cauacaugacaugaggccu

SEQ ID NO: 1639430 - RNA, 19 nt, Artificial Sequence
  Description of Artificial Sequence: Synthetic oligonucleotide
aguuaagaccaaagagggu

SEQ ID NO: 1639431 - RNA, 19 nt, Artificial Sequence
  Description of Artificial Sequence: Synthetic oligonucleotide
uacccuguucaaacaggau

SEQ ID NO: 1639432 - RNA, 19 nt, Artificial Sequence
  Description of Artificial Sequence: Synthetic oligonucleotide
aggcuaccaaguaucgaag

SEQ ID NO: 1639433 - RNA, 19 nt, Artificial Sequence
  Description of Artificial Sequence: Synthetic oligonucleotide
cagcacacacgcuaucuga

SEQ ID NO: 1639434 - RNA, 19 nt, Artificial Sequence
  Description of Artificial Sequence: Synthetic oligonucleotide
uacaugacaugaggccucu

SEQ ID NO: 1639435 - RNA, 19 nt, Artificial Sequence
  Description of Artificial Sequence: Synthetic oligonucleotide
caaugauaugguuccauau

SEQ ID NO: 1639436 - RNA, 19 nt, Artificial Sequence
  Description of Artificial Sequence: Synthetic oligonucleotide
agaggggaacaacccacau

SEQ ID NO: 1639437 - RNA, 19 nt, Artificial Sequence
  Description of Artificial Sequence: Synthetic oligonucleotide
auauagcugaugccuugua

SEQ ID NO: 1639438 - RNA, 19 nt, Artificial Sequence
  Description of Artificial Sequence: Synthetic oligonucleotide
cacuguagaacccuauggu

SEQ ID NO: 1639439 - RNA, 19 nt, Artificial Sequence
  Description of Artificial Sequence: Synthetic oligonucleotide
agauuaggaggaaccauuu

SEQ ID NO: 1639440 - RNA, 19 nt, Artificial Sequence
  Description of Artificial Sequence: Synthetic oligonucleotide
aagucccgcucaagaacuc

SEQ ID NO: 1639441 - RNA, 19 nt, Artificial Sequence
  Description of Artificial Sequence: Synthetic oligonucleotide
uuugcccuacccuguucaa

SEQ ID NO: 1639442 - RNA, 19 nt, Artificial Sequence
  Description of Artificial Sequence: Synthetic oligonucleotide
aagaccccucgggaccaac

SEQ ID NO: 1639443 - RNA, 19 nt, Artificial Sequence
  Description of Artificial Sequence: Synthetic oligonucleotide
cuggguucuccaaugauau

SEQ ID NO: 1639444 - RNA, 19 nt, Artificial Sequence
  Description of Artificial Sequence: Synthetic oligonucleotide
gccauagaagagaagagaa

SEQ ID NO: 1639445 - RNA, 19 nt, Artificial Sequence
  Description of Artificial Sequence: Synthetic oligonucleotide
aggauaaggcccaggcgug

SEQ ID NO: 1639446 - RNA, 19 nt, Artificial Sequence
  Description of Artificial Sequence: Synthetic oligonucleotide
uguggcucggaaggugaca

SEQ ID NO: 1639447 - RNA, 19 nt, Artificial Sequence
  Description of Artificial Sequence: Synthetic oligonucleotide
cugacauaucaaccucguc

SEQ ID NO: 1639448 - RNA, 19 nt, Artificial Sequence
  Description of Artificial Sequence: Synthetic oligonucleotide
accaacggcuuugcccuac

SEQ ID NO: 1639449 - RNA, 19 nt, Artificial Sequence
  Description of Artificial Sequence: Synthetic oligonucleotide
gauauagcugaugccuugu

SEQ ID NO: 1639450 - RNA, 19 nt, Artificial Sequence
  Description of Artificial Sequence: Synthetic oligonucleotide
caauuccuauacuccacaa

SEQ ID NO: 1639451 - RNA, 19 nt, Artificial Sequence
  Description of Artificial Sequence: Synthetic oligonucleotide
uaggcaugcccgacucacu

SEQ ID NO: 1639452 - RNA, 19 nt, Artificial Sequence
  Description of Artificial Sequence: Synthetic oligonucleotide
caugcccgacucacuguag

SEQ ID NO: 1639453 - RNA, 19 nt, Artificial Sequence
  Description of Artificial Sequence: Synthetic oligonucleotide
agcacucagucaucagaaa

SEQ ID NO: 1639454 - RNA, 19 nt, Artificial Sequence
  Description of Artificial Sequence: Synthetic oligonucleotide
cuugguaggcaugcccgac

SEQ ID NO: 1639455 - RNA, 19 nt, Artificial Sequence
  Description of Artificial Sequence: Synthetic oligonucleotide
ggaaggugaaaggguaggc

SEQ ID NO: 1639456 - RNA, 19 nt, Artificial Sequence
  Description of Artificial Sequence: Synthetic oligonucleotide
acgcaccaaugcucucagc

SEQ ID NO: 1639457 - RNA, 19 nt, Artificial Sequence
  Description of Artificial Sequence: Synthetic oligonucleotide
cgucauagcucccuuuccg

SEQ ID NO: 1639458 - RNA, 19 nt, Artificial Sequence
  Description of Artificial Sequence: Synthetic oligonucleotide
guacuagagguuuccgugu

SEQ ID NO: 1639459 - RNA, 19 nt, Artificial Sequence
  Description of Artificial Sequence: Synthetic oligonucleotide
ggaccaacggcuuugcccu

SEQ ID NO: 1639460 - RNA, 19 nt, Artificial Sequence
  Description of Artificial Sequence: Synthetic oligonucleotide
ccuuguaccaggccaauga

SEQ ID NO: 1639461 - RNA, 19 nt, Artificial Sequence
  Description of Artificial Sequence: Synthetic oligonucleotide
gcacucagucaucagaaaa

SEQ ID NO: 1639462 - RNA, 19 nt, Artificial Sequence
  Description of Artificial Sequence: Synthetic oligonucleotide
ggcacgucugcuucuuccc

SEQ ID NO: 1639463 - RNA, 19 nt, Artificial Sequence
  Description of Artificial Sequence: Synthetic oligonucleotide
caucugaaagagggucacc

SEQ ID NO: 1639464 - RNA, 19 nt, Artificial Sequence
  Description of Artificial Sequence: Synthetic oligonucleotide
ggaauacgugauugcagga

SEQ ID NO: 1639465 - RNA, 19 nt, Artificial Sequence
  Description of Artificial Sequence: Synthetic oligonucleotide
cauagcucccuuuccgcaa

SEQ ID NO: 1639466 - RNA, 19 nt, Artificial Sequence
  Description of Artificial Sequence: Synthetic oligonucleotide
ugcauacgugcaugcucga

SEQ ID NO: 1639467 - RNA, 19 nt, Artificial Sequence
  Description of Artificial Sequence: Synthetic oligonucleotide
ugcaugcucgacccuccau

SEQ ID NO: 1639468 - RNA, 19 nt, Artificial Sequence
  Description of Artificial Sequence: Synthetic oligonucleotide
guuuccguguggcucggaa

SEQ ID NO: 1639469 - RNA, 19 nt, Artificial Sequence
  Description of Artificial Sequence: Synthetic oligonucleotide
cccuguucaaacaggauaa

SEQ ID NO: 1639470 - RNA, 19 nt, Artificial Sequence
  Description of Artificial Sequence: Synthetic oligonucleotide
gauugcaggaaagccugua

SEQ ID NO: 1639471 - RNA, 19 nt, Artificial Sequence
  Description of Artificial Sequence: Synthetic oligonucleotide
cucgggaccaacggcuuug

SEQ ID NO: 1639472 - RNA, 19 nt, Artificial Sequence
  Description of Artificial Sequence: Synthetic oligonucleotide
uguagccaacgaugccagu

SEQ ID NO: 1639473 - RNA, 19 nt, Artificial Sequence
  Description of Artificial Sequence: Synthetic oligonucleotide
agaccccucgggaccaacg

SEQ ID NO: 1639474 - RNA, 19 nt, Artificial Sequence
  Description of Artificial Sequence: Synthetic oligonucleotide
ucccgcucaagaacuccau

SEQ ID NO: 1639475 - RNA, 19 nt, Artificial Sequence
  Description of Artificial Sequence: Synthetic oligonucleotide
caacggcuuugcccuaccc

SEQ ID NO: 1639476 - RNA, 19 nt, Artificial Sequence
  Description of Artificial Sequence: Synthetic oligonucleotide
cuguacuagagguuuccgu

SEQ ID NO: 1639477 - RNA, 19 nt, Artificial Sequence
  Description of Artificial Sequence: Synthetic oligonucleotide
agcacacacgcuaucugaa

SEQ ID NO: 1639478 - RNA, 19 nt, Artificial Sequence
  Description of Artificial Sequence: Synthetic oligonucleotide
cacgucugcuucuucccca

SEQ ID NO: 1639479 - RNA, 19 nt, Artificial Sequence
  Description of Artificial Sequence: Synthetic oligonucleotide
acacgcuaucugaaaggug

SEQ ID NO: 1639480 - RNA, 19 nt, Artificial Sequence
  Description of Artificial Sequence: Synthetic oligonucleotide
uacgugcaugcucgacccu

SEQ ID NO: 1639481 - RNA, 19 nt, Artificial Sequence
  Description of Artificial Sequence: Synthetic oligonucleotide
gugaaaggguaggcugaag

SEQ ID NO: 1639482 - RNA, 19 nt, Artificial Sequence
  Description of Artificial Sequence: Synthetic oligonucleotide
uggggagaggucugacaua

SEQ ID NO: 1639483 - RNA, 19 nt, Artificial Sequence
  Description of Artificial Sequence: Synthetic oligonucleotide
ggauaaggcccaggcgugg

SEQ ID NO: 1639484 - RNA, 19 nt, Artificial Sequence
  Description of Artificial Sequence: Synthetic oligonucleotide
ugcaccagccucggauaca

SEQ ID NO: 1639485 - RNA, 19 nt, Artificial Sequence
  Description of Artificial Sequence: Synthetic oligonucleotide
caagucuuugugggcagca

SEQ ID NO: 1639486 - RNA, 19 nt, Artificial Sequence
  Description of Artificial Sequence: Synthetic oligonucleotide
uugcccuacccuguucaaa

SEQ ID NO: 1639487 - RNA, 19 nt, Artificial Sequence
  Description of Artificial Sequence: Synthetic oligonucleotide
ugacagccauguagccaac

SEQ ID NO: 1639488 - RNA, 19 nt, Artificial Sequence
  Description of Artificial Sequence: Synthetic oligonucleotide
caaccucgucauagcuccc

SEQ ID NO: 1639489 - RNA, 19 nt, Artificial Sequence
  Description of Artificial Sequence: Synthetic oligonucleotide
cuaugguagaagccauaua

SEQ ID NO: 1639490 - RNA, 19 nt, Artificial Sequence
  Description of Artificial Sequence: Synthetic oligonucleotide
ccagccucggauacagaac

SEQ ID NO: 1639491 - RNA, 19 nt, Artificial Sequence
  Description of Artificial Sequence: Synthetic oligonucleotide
ccgacucacuguagaaccc

SEQ ID NO: 1639492 - RNA, 19 nt, Artificial Sequence
  Description of Artificial Sequence: Synthetic oligonucleotide
agccucggauacagaacuc

SEQ ID NO: 1639493 - RNA, 19 nt, Artificial Sequence
  Description of Artificial Sequence: Synthetic oligonucleotide
ucgggaccaacggcuuugc

SEQ ID NO: 1639494 - RNA, 19 nt, Artificial Sequence
  Description of Artificial Sequence: Synthetic oligonucleotide
gcaguaggggcacgucugc

SEQ ID NO: 1639495 - RNA, 19 nt, Artificial Sequence
  Description of Artificial Sequence: Synthetic oligonucleotide
gccaggcuaccaaguaucg

SEQ ID NO: 1639496 - RNA, 19 nt, Artificial Sequence
  Description of Artificial Sequence: Synthetic oligonucleotide
ccauauuauuccaggccca

SEQ ID NO: 1639497 - RNA, 19 nt, Artificial Sequence
  Description of Artificial Sequence: Synthetic oligonucleotide
gugcccugagguccauggc

SEQ ID NO: 1639498 - RNA, 19 nt, Artificial Sequence
  Description of Artificial Sequence: Synthetic oligonucleotide
acucacuguagaacccuau

SEQ ID NO: 1639499 - RNA, 19 nt, Artificial Sequence
  Description of Artificial Sequence: Synthetic oligonucleotide
ggcccaaaugccuuugagu

SEQ ID NO: 1639500 - RNA, 19 nt, Artificial Sequence
  Description of Artificial Sequence: Synthetic oligonucleotide
cugcaaagucccgcucaag

SEQ ID NO: 1639501 - RNA, 19 nt, Artificial Sequence
  Description of Artificial Sequence: Synthetic oligonucleotide
ggucaccauauuguaagaa

SEQ ID NO: 1639502 - RNA, 19 nt, Artificial Sequence
  Description of Artificial Sequence: Synthetic oligonucleotide
acgcuaucugaaaggugcu

SEQ ID NO: 1639503 - RNA, 19 nt, Artificial Sequence
  Description of Artificial Sequence: Synthetic oligonucleotide
gucccgcucaagaacucca

SEQ ID NO: 1639504 - RNA, 19 nt, Artificial Sequence
  Description of Artificial Sequence: Synthetic oligonucleotide
acccuaugguagaagccau

SEQ ID NO: 1639505 - RNA, 19 nt, Artificial Sequence
  Description of Artificial Sequence: Synthetic oligonucleotide
ccuguucaaacaggauaag

SEQ ID NO: 1639506 - RNA, 19 nt, Artificial Sequence
  Description of Artificial Sequence: Synthetic oligonucleotide
agguuuccguguggcucgg

SEQ ID NO: 1639507 - RNA, 19 nt, Artificial Sequence
  Description of Artificial Sequence: Synthetic oligonucleotide
cuuccccacgaugcaccag

SEQ ID NO: 1639508 - RNA, 19 nt, Artificial Sequence
  Description of Artificial Sequence: Synthetic oligonucleotide
cagaggugaaaagaccccu

SEQ ID NO: 1639509 - RNA, 19 nt, Artificial Sequence
  Description of Artificial Sequence: Synthetic oligonucleotide
gccucggauacagaacuca

SEQ ID NO: 1639510 - RNA, 19 nt, Artificial Sequence
  Description of Artificial Sequence: Synthetic oligonucleotide
ggaaguccugaguggccca

SEQ ID NO: 1639511 - RNA, 19 nt, Artificial Sequence
  Description of Artificial Sequence: Synthetic oligonucleotide
gcuugguaggcaugcccga

SEQ ID NO: 1639512 - RNA, 19 nt, Artificial Sequence
  Description of Artificial Sequence: Synthetic oligonucleotide
cucucagccagaggugaaa

SEQ ID NO: 1639513 - RNA, 19 nt, Artificial Sequence
  Description of Artificial Sequence: Synthetic oligonucleotide
cgugcaugcucgacccucc

SEQ ID NO: 1639514 - RNA, 19 nt, Artificial Sequence
  Description of Artificial Sequence: Synthetic oligonucleotide
ccagggguugcugaacauc

SEQ ID NO: 1639515 - RNA, 19 nt, Artificial Sequence
  Description of Artificial Sequence: Synthetic oligonucleotide
acgaugcaccagccucgga

SEQ ID NO: 1639516 - RNA, 19 nt, Artificial Sequence
  Description of Artificial Sequence: Synthetic oligonucleotide
gcccgacucacuguagaac

SEQ ID NO: 1639517 - RNA, 19 nt, Artificial Sequence
  Description of Artificial Sequence: Synthetic oligonucleotide
gugcaugcucgacccucca

SEQ ID NO: 1639518 - RNA, 19 nt, Artificial Sequence
  Description of Artificial Sequence: Synthetic oligonucleotide
gcauacgugcaugcucgac

SEQ ID NO: 1639519 - RNA, 19 nt, Artificial Sequence
  Description of Artificial Sequence: Synthetic oligonucleotide
ggaccauuucagcaugcau

SEQ ID NO: 1639520 - RNA, 19 nt, Artificial Sequence
  Description of Artificial Sequence: Synthetic oligonucleotide
acccuccauugcuccucug

SEQ ID NO: 1639521 - RNA, 19 nt, Artificial Sequence
  Description of Artificial Sequence: Synthetic oligonucleotide
ccaagucuuugugggcagc

SEQ ID NO: 1639522 - RNA, 19 nt, Artificial Sequence
  Description of Artificial Sequence: Synthetic oligonucleotide
ccaacggcuuugcccuacc

SEQ ID NO: 1639523 - RNA, 19 nt, Artificial Sequence
  Description of Artificial Sequence: Synthetic oligonucleotide
gcaugcucgacccuccauu

SEQ ID NO: 1639524 - RNA, 19 nt, Artificial Sequence
  Description of Artificial Sequence: Synthetic oligonucleotide
gaguggcccaaaugccuuu

SEQ ID NO: 1639525 - RNA, 19 nt, Artificial Sequence
  Description of Artificial Sequence: Synthetic oligonucleotide
gaacggggaugccucuguu

SEQ ID NO: 1639526 - RNA, 19 nt, Artificial Sequence
  Description of Artificial Sequence: Synthetic oligonucleotide
cccaaaugccuuugagucu

SEQ ID NO: 1639527 - RNA, 19 nt, Artificial Sequence
  Description of Artificial Sequence: Synthetic oligonucleotide
ccuaugguagaagccauau

SEQ ID NO: 1639528 - RNA, 19 nt, Artificial Sequence
  Description of Artificial Sequence: Synthetic oligonucleotide
gaccaacggcuuugcccua

SEQ ID NO: 1639529 - RNA, 19 nt, Artificial Sequence
  Description of Artificial Sequence: Synthetic oligonucleotide
ggcaugcccgacucacugu

SEQ ID NO: 1639530 - RNA, 19 nt, Artificial Sequence
  Description of Artificial Sequence: Synthetic oligonucleotide
ccguguggcucggaaggug

SEQ ID NO: 1639531 - RNA, 19 nt, Artificial Sequence
  Description of Artificial Sequence: Synthetic oligonucleotide
gcaugcauacgugcaugcu

SEQ ID NO: 1639532 - RNA, 19 nt, Artificial Sequence
  Description of Artificial Sequence: Synthetic oligonucleotide
ccaggcuaccaaguaucga

SEQ ID NO: 1639533 - RNA, 19 nt, Artificial Sequence
  Description of Artificial Sequence: Synthetic oligonucleotide
ccucggauacagaacucau

SEQ ID NO: 1639534 - RNA, 19 nt, Artificial Sequence
  Description of Artificial Sequence: Synthetic oligonucleotide
cccuaugguagaagccaua

SEQ ID NO: 1639535 - RNA, 19 nt, Artificial Sequence
  Description of Artificial Sequence: Synthetic oligonucleotide
cgggaccaacggcuuugcc

SEQ ID NO: 1639536 - RNA, 19 nt, Artificial Sequence
  Description of Artificial Sequence: Synthetic oligonucleotide
ccauugcaucuucugguuu

SEQ ID NO: 1639537 - RNA, 19 nt, Artificial Sequence
  Description of Artificial Sequence: Synthetic oligonucleotide
ggcgggugggcuggguucu

SEQ ID NO: 1639538 - RNA, 19 nt, Artificial Sequence
  Description of Artificial Sequence: Synthetic oligonucleotide
gguuuccguguggcucgga

SEQ ID NO: 1639539 - RNA, 19 nt, Artificial Sequence
  Description of Artificial Sequence: Synthetic oligonucleotide
cccagggguugcugaacau

SEQ ID NO: 1639540 - RNA, 19 nt, Artificial Sequence
  Description of Artificial Sequence: Synthetic oligonucleotide
gcgggugggcuggguucuc

SEQ ID NO: 1639541 - RNA, 19 nt, Artificial Sequence
  Description of Artificial Sequence: Synthetic oligonucleotide
cccucgggaccaacggcuu

SEQ ID NO: 1639542 - RNA, 19 nt, Artificial Sequence
  Description of Artificial Sequence: Synthetic oligonucleotide
aaaugaaccugucauuggg

SEQ ID NO: 1639543 - RNA, 19 nt, Artificial Sequence
  Description of Artificial Sequence: Synthetic oligonucleotide
aagucaagagcgcaugugc

SEQ ID NO: 1639544 - RNA, 19 nt, Artificial Sequence
  Description of Artificial Sequence: Synthetic oligonucleotide
aauuuugaggcccgaauuc

SEQ ID NO: 1639545 - RNA, 19 nt, Artificial Sequence
  Description of Artificial Sequence: Synthetic oligonucleotide
ucuaguacgcccaagacac

SEQ ID NO: 1639546 - RNA, 19 nt, Artificial Sequence
  Description of Artificial Sequence: Synthetic oligonucleotide
aaaaugaaccuccaaguca

SEQ ID NO: 1639547 - RNA, 19 nt, Artificial Sequence
  Description of Artificial Sequence: Synthetic oligonucleotide
aaaaguaucuagcaggcau

SEQ ID NO: 1639548 - RNA, 19 nt, Artificial Sequence
  Description of Artificial Sequence: Synthetic oligonucleotide
aauggaacgggauacuucu

SEQ ID NO: 1639549 - RNA, 19 nt, Artificial Sequence
  Description of Artificial Sequence: Synthetic oligonucleotide
aaaaugaaccugucauugg

SEQ ID NO: 1639550 - RNA, 19 nt, Artificial Sequence
  Description of Artificial Sequence: Synthetic oligonucleotide
uaaugagggaugauggagg

SEQ ID NO: 1639551 - RNA, 19 nt, Artificial Sequence
  Description of Artificial Sequence: Synthetic oligonucleotide
ugauauccggcacagaugu

SEQ ID NO: 1639552 - RNA, 19 nt, Artificial Sequence
  Description of Artificial Sequence: Synthetic oligonucleotide
aaaguaugaaacccgagua

SEQ ID NO: 1639553 - RNA, 19 nt, Artificial Sequence
  Description of Artificial Sequence: Synthetic oligonucleotide
ucuuugcugaggcuuaagg

SEQ ID NO: 1639554 - RNA, 19 nt, Artificial Sequence
  Description of Artificial Sequence: Synthetic oligonucleotide
guaaagaccuugaagagcc

SEQ ID NO: 1639555 - RNA, 19 nt, Artificial Sequence
  Description of Artificial Sequence: Synthetic oligonucleotide
uuguuagccagccuguugc

SEQ ID NO: 1639556 - RNA, 19 nt, Artificial Sequence
  Description of Artificial Sequence: Synthetic oligonucleotide
gaaucaguacugcuggccg

SEQ ID NO: 1639557 - RNA, 19 nt, Artificial Sequence
  Description of Artificial Sequence: Synthetic oligonucleotide
auauaagucccacaggaga

SEQ ID NO: 1639558 - RNA, 19 nt, Artificial Sequence
  Description of Artificial Sequence: Synthetic oligonucleotide
auuguaucgacacaggauu

SEQ ID NO: 1639559 - RNA, 19 nt, Artificial Sequence
  Description of Artificial Sequence: Synthetic oligonucleotide
uaaaaugaaccuccaaguc

SEQ ID NO: 1639560 - RNA, 19 nt, Artificial Sequence
  Description of Artificial Sequence: Synthetic oligonucleotide
aucgacacaggauugcccg

SEQ ID NO: 1639561 - RNA, 19 nt, Artificial Sequence
  Description of Artificial Sequence: Synthetic oligonucleotide
uccuuuaggaaauuuccug

SEQ ID NO: 1639562 - RNA, 19 nt, Artificial Sequence
  Description of Artificial Sequence: Synthetic oligonucleotide
ugggguaaagaccuugaag

SEQ ID NO: 1639563 - RNA, 19 nt, Artificial Sequence
  Description of Artificial Sequence: Synthetic oligonucleotide
uucuaguacgcccaagaca

SEQ ID NO: 1639564 - RNA, 19 nt, Artificial Sequence
  Description of Artificial Sequence: Synthetic oligonucleotide
auuuugaggcccgaauucc

SEQ ID NO: 1639565 - RNA, 19 nt, Artificial Sequence
  Description of Artificial Sequence: Synthetic oligonucleotide
uauaagucccacaggagaa

SEQ ID NO: 1639566 - RNA, 19 nt, Artificial Sequence
  Description of Artificial Sequence: Synthetic oligonucleotide
ucaugcguucuucauacug

SEQ ID NO: 1639567 - RNA, 19 nt, Artificial Sequence
  Description of Artificial Sequence: Synthetic oligonucleotide
aaucaguacugcuggccgg

SEQ ID NO: 1639568 - RNA, 19 nt, Artificial Sequence
  Description of Artificial Sequence: Synthetic oligonucleotide
acgggauacuucuaguacg

SEQ ID NO: 1639569 - RNA, 19 nt, Artificial Sequence
  Description of Artificial Sequence: Synthetic oligonucleotide
ugaggcuuaaggcugcaug

SEQ ID NO: 1639570 - RNA, 19 nt, Artificial Sequence
  Description of Artificial Sequence: Synthetic oligonucleotide
ugcuacauagccuuucaga

SEQ ID NO: 1639571 - RNA, 19 nt, Artificial Sequence
  Description of Artificial Sequence: Synthetic oligonucleotide
uuggcgauauacaggaugu

SEQ ID NO: 1639572 - RNA, 19 nt, Artificial Sequence
  Description of Artificial Sequence: Synthetic oligonucleotide
uguguacaaauaaaaugaa

SEQ ID NO: 1639573 - RNA, 19 nt, Artificial Sequence
  Description of Artificial Sequence: Synthetic oligonucleotide
caagguuggcgauauacag

SEQ ID NO: 1639574 - RNA, 19 nt, Artificial Sequence
  Description of Artificial Sequence: Synthetic oligonucleotide
uucaccgccauucuucucu

SEQ ID NO: 1639575 - RNA, 19 nt, Artificial Sequence
  Description of Artificial Sequence: Synthetic oligonucleotide
aaugaaccugucauugggg

SEQ ID NO: 1639576 - RNA, 19 nt, Artificial Sequence
  Description of Artificial Sequence: Synthetic oligonucleotide
aaaugaaccuccaagucaa

SEQ ID NO: 1639577 - RNA, 19 nt, Artificial Sequence
  Description of Artificial Sequence: Synthetic oligonucleotide
gaccaaagaucacugauga

SEQ ID NO: 1639578 - RNA, 19 nt, Artificial Sequence
  Description of Artificial Sequence: Synthetic oligonucleotide
agguuggcgauauacagga

SEQ ID NO: 1639579 - RNA, 19 nt, Artificial Sequence
  Description of Artificial Sequence: Synthetic oligonucleotide
ucgucgguguguuuaaaag

SEQ ID NO: 1639580 - RNA, 19 nt, Artificial Sequence
  Description of Artificial Sequence: Synthetic oligonucleotide
ugcccgacuaucuccaagg

SEQ ID NO: 1639581 - RNA, 19 nt, Artificial Sequence
  Description of Artificial Sequence: Synthetic oligonucleotide
gggguaaagaccuugaaga

SEQ ID NO: 1639582 - RNA, 19 nt, Artificial Sequence
  Description of Artificial Sequence: Synthetic oligonucleotide
guaaugagggaugauggag

SEQ ID NO: 1639583 - RNA, 19 nt, Artificial Sequence
  Description of Artificial Sequence: Synthetic oligonucleotide
cagaugugaccccacagcg

SEQ ID NO: 1639584 - RNA, 19 nt, Artificial Sequence
  Description of Artificial Sequence: Synthetic oligonucleotide
uccccgaacagguccaugg

SEQ ID NO: 1639585 - RNA, 19 nt, Artificial Sequence
  Description of Artificial Sequence: Synthetic oligonucleotide
acaaccauauaagucccac

SEQ ID NO: 1639586 - RNA, 19 nt, Artificial Sequence
  Description of Artificial Sequence: Synthetic oligonucleotide
uccgcucugcuacauagcc

SEQ ID NO: 1639587 - RNA, 19 nt, Artificial Sequence
  Description of Artificial Sequence: Synthetic oligonucleotide
uugaagagcccaucacagg

SEQ ID NO: 1639588 - RNA, 19 nt, Artificial Sequence
  Description of Artificial Sequence: Synthetic oligonucleotide
ucaagagcgcaugugcagg

SEQ ID NO: 1639589 - RNA, 19 nt, Artificial Sequence
  Description of Artificial Sequence: Synthetic oligonucleotide
cugacagcgucugauaucc

SEQ ID NO: 1639590 - RNA, 19 nt, Artificial Sequence
  Description of Artificial Sequence: Synthetic oligonucleotide
acacacguggcaguggacc

SEQ ID NO: 1639591 - RNA, 19 nt, Artificial Sequence
  Description of Artificial Sequence: Synthetic oligonucleotide
ugauuacaucuccuuuagg

SEQ ID NO: 1639592 - RNA, 19 nt, Artificial Sequence
  Description of Artificial Sequence: Synthetic oligonucleotide
cagcaaaguaugaaacccg

SEQ ID NO: 1639593 - RNA, 19 nt, Artificial Sequence
  Description of Artificial Sequence: Synthetic oligonucleotide
accauauaagucccacagg

SEQ ID NO: 1639594 - RNA, 19 nt, Artificial Sequence
  Description of Artificial Sequence: Synthetic oligonucleotide
acuucuaguacgcccaaga

SEQ ID NO: 1639595 - RNA, 19 nt, Artificial Sequence
  Description of Artificial Sequence: Synthetic oligonucleotide
cauauaagucccacaggag

SEQ ID NO: 1639596 - RNA, 19 nt, Artificial Sequence
  Description of Artificial Sequence: Synthetic oligonucleotide
gauacuucuaguacgccca

SEQ ID NO: 1639597 - RNA, 19 nt, Artificial Sequence
  Description of Artificial Sequence: Synthetic oligonucleotide
gacuuuccucauuguaucg

SEQ ID NO: 1639598 - RNA, 19 nt, Artificial Sequence
  Description of Artificial Sequence: Synthetic oligonucleotide
ccugauuaaguucuggugc

SEQ ID NO: 1639599 - RNA, 19 nt, Artificial Sequence
  Description of Artificial Sequence: Synthetic oligonucleotide
ugaaucaguacugcuggcc

SEQ ID NO: 1639600 - RNA, 19 nt, Artificial Sequence
  Description of Artificial Sequence: Synthetic oligonucleotide
cugauuacaucuccuuuag

SEQ ID NO: 1639601 - RNA, 19 nt, Artificial Sequence
  Description of Artificial Sequence: Synthetic oligonucleotide
acugauuacaucuccuuua

SEQ ID NO: 1639602 - RNA, 19 nt, Artificial Sequence
  Description of Artificial Sequence: Synthetic oligonucleotide
uccggcacagaugugaccc

SEQ ID NO: 1639603 - RNA, 19 nt, Artificial Sequence
  Description of Artificial Sequence: Synthetic oligonucleotide
uccaagguuggcgauauac

SEQ ID NO: 1639604 - RNA, 19 nt, Artificial Sequence
  Description of Artificial Sequence: Synthetic oligonucleotide
cucacuaccaucaccguca

SEQ ID NO: 1639605 - RNA, 19 nt, Artificial Sequence
  Description of Artificial Sequence: Synthetic oligonucleotide
agagcgcaugugcaggccc

SEQ ID NO: 1639606 - RNA, 19 nt, Artificial Sequence
  Description of Artificial Sequence: Synthetic oligonucleotide
augaaacccgaguaaugag

SEQ ID NO: 1639607 - RNA, 19 nt, Artificial Sequence
  Description of Artificial Sequence: Synthetic oligonucleotide
cuuccgcucugcuacauag

SEQ ID NO: 1639608 - RNA, 19 nt, Artificial Sequence
  Description of Artificial Sequence: Synthetic oligonucleotide
uggcaagagaaccuggauc

SEQ ID NO: 1639609 - RNA, 19 nt, Artificial Sequence
  Description of Artificial Sequence: Synthetic oligonucleotide
ucugcuacauagccuuuca

SEQ ID NO: 1639610 - RNA, 19 nt, Artificial Sequence
  Description of Artificial Sequence: Synthetic oligonucleotide
ugaugaggcuuuacaaacu

SEQ ID NO: 1639611 - RNA, 19 nt, Artificial Sequence
  Description of Artificial Sequence: Synthetic oligonucleotide
uuguaucgacacaggauug

SEQ ID NO: 1639612 - RNA, 19 nt, Artificial Sequence
  Description of Artificial Sequence: Synthetic oligonucleotide
auagcgggcaucaacagca

SEQ ID NO: 1639613 - RNA, 19 nt, Artificial Sequence
  Description of Artificial Sequence: Synthetic oligonucleotide
auuaaguucuggugcaaau

SEQ ID NO: 1639614 - RNA, 19 nt, Artificial Sequence
  Description of Artificial Sequence: Synthetic oligonucleotide
ccgacuaucuccaagguug

SEQ ID NO: 1639615 - RNA, 19 nt, Artificial Sequence
  Description of Artificial Sequence: Synthetic oligonucleotide
agccuuucagaccaaagau

SEQ ID NO: 1639616 - RNA, 19 nt, Artificial Sequence
  Description of Artificial Sequence: Synthetic oligonucleotide
cucauuguaucgacacagg

SEQ ID NO: 1639617 - RNA, 19 nt, Artificial Sequence
  Description of Artificial Sequence: Synthetic oligonucleotide
ucucugacauucccuccgg

SEQ ID NO: 1639618 - RNA, 19 nt, Artificial Sequence
  Description of Artificial Sequence: Synthetic oligonucleotide
uuuugaggcccgaauuccu

SEQ ID NO: 1639619 - RNA, 19 nt, Artificial Sequence
  Description of Artificial Sequence: Synthetic oligonucleotide
aguaugaaacccgaguaau

SEQ ID NO: 1639620 - RNA, 19 nt, Artificial Sequence
  Description of Artificial Sequence: Synthetic oligonucleotide
ucuccaauggaacgggaua

SEQ ID NO: 1639621 - RNA, 19 nt, Artificial Sequence
  Description of Artificial Sequence: Synthetic oligonucleotide
gaccccacagcgcuuauac

SEQ ID NO: 1639622 - RNA, 19 nt, Artificial Sequence
  Description of Artificial Sequence: Synthetic oligonucleotide
cuucauagcgggcaucaac

SEQ ID NO: 1639623 - RNA, 19 nt, Artificial Sequence
  Description of Artificial Sequence: Synthetic oligonucleotide
aaguaucuagcaggcaucu

SEQ ID NO: 1639624 - RNA, 19 nt, Artificial Sequence
  Description of Artificial Sequence: Synthetic oligonucleotide
aggauugcccgacuaucuc

SEQ ID NO: 1639625 - RNA, 19 nt, Artificial Sequence
  Description of Artificial Sequence: Synthetic oligonucleotide
acagcgucugauauccggc

SEQ ID NO: 1639626 - RNA, 19 nt, Artificial Sequence
  Description of Artificial Sequence: Synthetic oligonucleotide
ucaaagaguaaaggucccc

SEQ ID NO: 1639627 - RNA, 19 nt, Artificial Sequence
  Description of Artificial Sequence: Synthetic oligonucleotide
auaagucccacaggagaac

SEQ ID NO: 1639628 - RNA, 19 nt, Artificial Sequence
  Description of Artificial Sequence: Synthetic oligonucleotide
aacccgaguaaugagggau

SEQ ID NO: 1639629 - RNA, 19 nt, Artificial Sequence
  Description of Artificial Sequence: Synthetic oligonucleotide
auauccggcacagauguga

SEQ ID NO: 1639630 - RNA, 19 nt, Artificial Sequence
  Description of Artificial Sequence: Synthetic oligonucleotide
acaggauugcccgacuauc

SEQ ID NO: 1639631 - RNA, 19 nt, Artificial Sequence
  Description of Artificial Sequence: Synthetic oligonucleotide
gucaagagcgcaugugcag

SEQ ID NO: 1639632 - RNA, 19 nt, Artificial Sequence
  Description of Artificial Sequence: Synthetic oligonucleotide
cuugaggccuguuucagga

SEQ ID NO: 1639633 - RNA, 19 nt, Artificial Sequence
  Description of Artificial Sequence: Synthetic oligonucleotide
agaaccuggaucaccacug

SEQ ID NO: 1639634 - RNA, 19 nt, Artificial Sequence
  Description of Artificial Sequence: Synthetic oligonucleotide
ucuguauccucaugcguuc

SEQ ID NO: 1639635 - RNA, 19 nt, Artificial Sequence
  Description of Artificial Sequence: Synthetic oligonucleotide
aguggacccgucuuuccag

SEQ ID NO: 1639636 - RNA, 19 nt, Artificial Sequence
  Description of Artificial Sequence: Synthetic oligonucleotide
aggugggagaucaucaaag

SEQ ID NO: 1639637 - RNA, 19 nt, Artificial Sequence
  Description of Artificial Sequence: Synthetic oligonucleotide
cugauauccggcacagaug

SEQ ID NO: 1639638 - RNA, 19 nt, Artificial Sequence
  Description of Artificial Sequence: Synthetic oligonucleotide
cauagcgggcaucaacagc

SEQ ID NO: 1639639 - RNA, 19 nt, Artificial Sequence
  Description of Artificial Sequence: Synthetic oligonucleotide
agcgucugauauccggcac

SEQ ID NO: 1639640 - RNA, 19 nt, Artificial Sequence
  Description of Artificial Sequence: Synthetic oligonucleotide
uugaggcccgaauuccucc

SEQ ID NO: 1639641 - RNA, 19 nt, Artificial Sequence
  Description of Artificial Sequence: Synthetic oligonucleotide
caauggaacgggauacuuc

SEQ ID NO: 1639642 - RNA, 19 nt, Artificial Sequence
  Description of Artificial Sequence: Synthetic oligonucleotide
cugauuaaguucuggugca

SEQ ID NO: 1639643 - RNA, 19 nt, Artificial Sequence
  Description of Artificial Sequence: Synthetic oligonucleotide
cuucuaguacgcccaagac

SEQ ID NO: 1639644 - RNA, 19 nt, Artificial Sequence
  Description of Artificial Sequence: Synthetic oligonucleotide
agaccaaagaucacugaug

SEQ ID NO: 1639645 - RNA, 19 nt, Artificial Sequence
  Description of Artificial Sequence: Synthetic oligonucleotide
ucugugcagcaaauuuuga

SEQ ID NO: 1639646 - RNA, 19 nt, Artificial Sequence
  Description of Artificial Sequence: Synthetic oligonucleotide
acagcgcuuauacugccca

SEQ ID NO: 1639647 - RNA, 19 nt, Artificial Sequence
  Description of Artificial Sequence: Synthetic oligonucleotide
gguaaagaccuugaagagc

SEQ ID NO: 1639648 - RNA, 19 nt, Artificial Sequence
  Description of Artificial Sequence: Synthetic oligonucleotide
ucuucaccgccauucuucu

SEQ ID NO: 1639649 - RNA, 19 nt, Artificial Sequence
  Description of Artificial Sequence: Synthetic oligonucleotide
uuaaguucuggugcaaauu

SEQ ID NO: 1639650 - RNA, 19 nt, Artificial Sequence
  Description of Artificial Sequence: Synthetic oligonucleotide
uccucauuguaucgacaca

SEQ ID NO: 1639651 - RNA, 19 nt, Artificial Sequence
  Description of Artificial Sequence: Synthetic oligonucleotide
cauuuccucccucucgccc

SEQ ID NO: 1639652 - RNA, 19 nt, Artificial Sequence
  Description of Artificial Sequence: Synthetic oligonucleotide
cuaucuccaagguuggcga

SEQ ID NO: 1639653 - RNA, 19 nt, Artificial Sequence
  Description of Artificial Sequence: Synthetic oligonucleotide
uggugcaaauucugugcag

SEQ ID NO: 1639654 - RNA, 19 nt, Artificial Sequence
  Description of Artificial Sequence: Synthetic oligonucleotide
ggguaaagaccuugaagag

SEQ ID NO: 1639655 - RNA, 19 nt, Artificial Sequence
  Description of Artificial Sequence: Synthetic oligonucleotide
cuuguuagccagccuguug

SEQ ID NO: 1639656 - RNA, 19 nt, Artificial Sequence
  Description of Artificial Sequence: Synthetic oligonucleotide
caaaguaugaaacccgagu

SEQ ID NO: 1639657 - RNA, 19 nt, Artificial Sequence
  Description of Artificial Sequence: Synthetic oligonucleotide
aguucuggugcaaauucug

SEQ ID NO: 1639658 - RNA, 19 nt, Artificial Sequence
  Description of Artificial Sequence: Synthetic oligonucleotide
uaaaaguaucuagcaggca

SEQ ID NO: 1639659 - RNA, 19 nt, Artificial Sequence
  Description of Artificial Sequence: Synthetic oligonucleotide
ucacguugucugcggagcc

SEQ ID NO: 1639660 - RNA, 19 nt, Artificial Sequence
  Description of Artificial Sequence: Synthetic oligonucleotide
uacaaccauauaaguccca

SEQ ID NO: 1639661 - RNA, 19 nt, Artificial Sequence
  Description of Artificial Sequence: Synthetic oligonucleotide
uugcccgacuaucuccaag

SEQ ID NO: 1639662 - RNA, 19 nt, Artificial Sequence
  Description of Artificial Sequence: Synthetic oligonucleotide
uggaggccgacacuccuca

SEQ ID NO: 1639663 - RNA, 19 nt, Artificial Sequence
  Description of Artificial Sequence: Synthetic oligonucleotide
guaugaaacccgaguaaug

SEQ ID NO: 1639664 - RNA, 19 nt, Artificial Sequence
  Description of Artificial Sequence: Synthetic oligonucleotide
uucgucgguguguuuaaaa

SEQ ID NO: 1639665 - RNA, 19 nt, Artificial Sequence
  Description of Artificial Sequence: Synthetic oligonucleotide
uccucaaggcaggacaaga

SEQ ID NO: 1639666 - RNA, 19 nt, Artificial Sequence
  Description of Artificial Sequence: Synthetic oligonucleotide
ccauauaagucccacagga

SEQ ID NO: 1639667 - RNA, 19 nt, Artificial Sequence
  Description of Artificial Sequence: Synthetic oligonucleotide
guacgcccaagacacgucc

SEQ ID NO: 1639668 - RNA, 19 nt, Artificial Sequence
  Description of Artificial Sequence: Synthetic oligonucleotide
aggccgacacuccucagug

SEQ ID NO: 1639669 - RNA, 19 nt, Artificial Sequence
  Description of Artificial Sequence: Synthetic oligonucleotide
caagagcgcaugugcaggc

SEQ ID NO: 1639670 - RNA, 19 nt, Artificial Sequence
  Description of Artificial Sequence: Synthetic oligonucleotide
gaacgggauacuucuagua

SEQ ID NO: 1639671 - RNA, 19 nt, Artificial Sequence
  Description of Artificial Sequence: Synthetic oligonucleotide
caucucugacauucccucc

SEQ ID NO: 1639672 - RNA, 19 nt, Artificial Sequence
  Description of Artificial Sequence: Synthetic oligonucleotide
ucgguguguuuaaaaguau

SEQ ID NO: 1639673 - RNA, 19 nt, Artificial Sequence
  Description of Artificial Sequence: Synthetic oligonucleotide
agcgcuuauacugcccauc

SEQ ID NO: 1639674 - RNA, 19 nt, Artificial Sequence
  Description of Artificial Sequence: Synthetic oligonucleotide
guaucgacacaggauugcc

SEQ ID NO: 1639675 - RNA, 19 nt, Artificial Sequence
  Description of Artificial Sequence: Synthetic oligonucleotide
uuccuguggagcuuuccuc

SEQ ID NO: 1639676 - RNA, 19 nt, Artificial Sequence
  Description of Artificial Sequence: Synthetic oligonucleotide
auagccuuucagaccaaag

SEQ ID NO: 1639677 - RNA, 19 nt, Artificial Sequence
  Description of Artificial Sequence: Synthetic oligonucleotide
ccucaugcguucuucauac

SEQ ID NO: 1639678 - RNA, 19 nt, Artificial Sequence
  Description of Artificial Sequence: Synthetic oligonucleotide
accgucacguugucugcgg

SEQ ID NO: 1639679 - RNA, 19 nt, Artificial Sequence
  Description of Artificial Sequence: Synthetic oligonucleotide
ggauugcccgacuaucucc

SEQ ID NO: 1639680 - RNA, 19 nt, Artificial Sequence
  Description of Artificial Sequence: Synthetic oligonucleotide
acuuuccucauuguaucga

SEQ ID NO: 1639681 - RNA, 19 nt, Artificial Sequence
  Description of Artificial Sequence: Synthetic oligonucleotide
uguuagccagccuguugca

SEQ ID NO: 1639682 - RNA, 19 nt, Artificial Sequence
  Description of Artificial Sequence: Synthetic oligonucleotide
agcugacagcgucugauau

SEQ ID NO: 1639683 - RNA, 19 nt, Artificial Sequence
  Description of Artificial Sequence: Synthetic oligonucleotide
auccugaaucaguacugcu

SEQ ID NO: 1639684 - RNA, 19 nt, Artificial Sequence
  Description of Artificial Sequence: Synthetic oligonucleotide
uuucccggcaggcgggcgc

SEQ ID NO: 1639685 - RNA, 19 nt, Artificial Sequence
  Description of Artificial Sequence: Synthetic oligonucleotide
ccgaacagguccauggcgg

SEQ ID NO: 1639686 - RNA, 19 nt, Artificial Sequence
  Description of Artificial Sequence: Synthetic oligonucleotide
ugcggagccgcgcugcacu

SEQ ID NO: 1639687 - RNA, 19 nt, Artificial Sequence
  Description of Artificial Sequence: Synthetic oligonucleotide
uugucugcggagccgcgcu

SEQ ID NO: 1639688 - RNA, 19 nt, Artificial Sequence
  Description of Artificial Sequence: Synthetic oligonucleotide
caagucaagagcgcaugug

SEQ ID NO: 1639689 - RNA, 19 nt, Artificial Sequence
  Description of Artificial Sequence: Synthetic oligonucleotide
gauugcccgacuaucucca

SEQ ID NO: 1639690 - RNA, 19 nt, Artificial Sequence
  Description of Artificial Sequence: Synthetic oligonucleotide
uuccgcucugcuacauagc

SEQ ID NO: 1639691 - RNA, 19 nt, Artificial Sequence
  Description of Artificial Sequence: Synthetic oligonucleotide
ugaggcccgaauuccucca

SEQ ID NO: 1639692 - RNA, 19 nt, Artificial Sequence
  Description of Artificial Sequence: Synthetic oligonucleotide
gauuaaguucuggugcaaa

SEQ ID NO: 1639693 - RNA, 19 nt, Artificial Sequence
  Description of Artificial Sequence: Synthetic oligonucleotide
ucaccaccugggaaacuga

SEQ ID NO: 1639694 - RNA, 19 nt, Artificial Sequence
  Description of Artificial Sequence: Synthetic oligonucleotide
guggacccgucuuuccagg

SEQ ID NO: 1639695 - RNA, 19 nt, Artificial Sequence
  Description of Artificial Sequence: Synthetic oligonucleotide
ucuucgucgguguguuuaa

SEQ ID NO: 1639696 - RNA, 19 nt, Artificial Sequence
  Description of Artificial Sequence: Synthetic oligonucleotide
gucgguguguuuaaaagua

SEQ ID NO: 1639697 - RNA, 19 nt, Artificial Sequence
  Description of Artificial Sequence: Synthetic oligonucleotide
augaaccuccaagucaaga

SEQ ID NO: 1639698 - RNA, 19 nt, Artificial Sequence
  Description of Artificial Sequence: Synthetic oligonucleotide
aacucuucgucgguguguu

SEQ ID NO: 1639699 - RNA, 19 nt, Artificial Sequence
  Description of Artificial Sequence: Synthetic oligonucleotide
agucaagagcgcaugugca

SEQ ID NO: 1639700 - RNA, 19 nt, Artificial Sequence
  Description of Artificial Sequence: Synthetic oligonucleotide
cuaguacgcccaagacacg

SEQ ID NO: 1639701 - RNA, 19 nt, Artificial Sequence
  Description of Artificial Sequence: Synthetic oligonucleotide
uacgcccaagacacgucca

SEQ ID NO: 1639702 - RNA, 19 nt, Artificial Sequence
  Description of Artificial Sequence: Synthetic oligonucleotide
ugacagcgucugauauccg

SEQ ID NO: 1639703 - RNA, 19 nt, Artificial Sequence
  Description of Artificial Sequence: Synthetic oligonucleotide
cauuguaucgacacaggau

SEQ ID NO: 1639704 - RNA, 19 nt, Artificial Sequence
  Description of Artificial Sequence: Synthetic oligonucleotide
aagaccuugaagagcccau

SEQ ID NO: 1639705 - RNA, 19 nt, Artificial Sequence
  Description of Artificial Sequence: Synthetic oligonucleotide
cacagcgcuuauacugccc

SEQ ID NO: 1639706 - RNA, 19 nt, Artificial Sequence
  Description of Artificial Sequence: Synthetic oligonucleotide
ccuuuaggaaauuuccuga

SEQ ID NO: 1639707 - RNA, 19 nt, Artificial Sequence
  Description of Artificial Sequence: Synthetic oligonucleotide
uguauccucaugcguucuu

SEQ ID NO: 1639708 - RNA, 19 nt, Artificial Sequence
  Description of Artificial Sequence: Synthetic oligonucleotide
cugcuacauagccuuucag

SEQ ID NO: 1639709 - RNA, 19 nt, Artificial Sequence
  Description of Artificial Sequence: Synthetic oligonucleotide
uccaauggaacgggauacu

SEQ ID NO: 1639710 - RNA, 19 nt, Artificial Sequence
  Description of Artificial Sequence: Synthetic oligonucleotide
ugauuaaguucuggugcaa

SEQ ID NO: 1639711 - RNA, 19 nt, Artificial Sequence
  Description of Artificial Sequence: Synthetic oligonucleotide
cagauccugaaucaguacu

SEQ ID NO: 1639712 - RNA, 19 nt, Artificial Sequence
  Description of Artificial Sequence: Synthetic oligonucleotide
uacuucuaguacgcccaag

SEQ ID NO: 1639713 - RNA, 19 nt, Artificial Sequence
  Description of Artificial Sequence: Synthetic oligonucleotide
aacacacacuguguacaaa

SEQ ID NO: 1639714 - RNA, 19 nt, Artificial Sequence
  Description of Artificial Sequence: Synthetic oligonucleotide
guguguuuaaaaguaucua

SEQ ID NO: 1639715 - RNA, 19 nt, Artificial Sequence
  Description of Artificial Sequence: Synthetic oligonucleotide
caaccauauaagucccaca

SEQ ID NO: 1639716 - RNA, 19 nt, Artificial Sequence
  Description of Artificial Sequence: Synthetic oligonucleotide
ucgacacaggauugcccga

SEQ ID NO: 1639717 - RNA, 19 nt, Artificial Sequence
  Description of Artificial Sequence: Synthetic oligonucleotide
uggacccgucuuuccaggc

SEQ ID NO: 1639718 - RNA, 19 nt, Artificial Sequence
  Description of Artificial Sequence: Synthetic oligonucleotide
aguacgcccaagacacguc

SEQ ID NO: 1639719 - RNA, 19 nt, Artificial Sequence
  Description of Artificial Sequence: Synthetic oligonucleotide
uggagcggaggcucgcgcu

SEQ ID NO: 1639720 - RNA, 19 nt, Artificial Sequence
  Description of Artificial Sequence: Synthetic oligonucleotide
gacaugggcauccugcauu

SEQ ID NO: 1639721 - RNA, 19 nt, Artificial Sequence
  Description of Artificial Sequence: Synthetic oligonucleotide
gcuugaggccuguuucagg

SEQ ID NO: 1639722 - RNA, 19 nt, Artificial Sequence
  Description of Artificial Sequence: Synthetic oligonucleotide
uaucuccaagguuggcgau

SEQ ID NO: 1639723 - RNA, 19 nt, Artificial Sequence
  Description of Artificial Sequence: Synthetic oligonucleotide
auacuucuaguacgcccaa

SEQ ID NO: 1639724 - RNA, 19 nt, Artificial Sequence
  Description of Artificial Sequence: Synthetic oligonucleotide
uccucacuaccaucaccgu

SEQ ID NO: 1639725 - RNA, 19 nt, Artificial Sequence
  Description of Artificial Sequence: Synthetic oligonucleotide
gauggaggccgacacuccu

SEQ ID NO: 1639726 - RNA, 19 nt, Artificial Sequence
  Description of Artificial Sequence: Synthetic oligonucleotide
gcaaaguaugaaacccgag

SEQ ID NO: 1639727 - RNA, 19 nt, Artificial Sequence
  Description of Artificial Sequence: Synthetic oligonucleotide
gacuaucuccaagguuggc

SEQ ID NO: 1639728 - RNA, 19 nt, Artificial Sequence
  Description of Artificial Sequence: Synthetic oligonucleotide
caccugggaaacugaugug

SEQ ID NO: 1639729 - RNA, 19 nt, Artificial Sequence
  Description of Artificial Sequence: Synthetic oligonucleotide
acacaggauugcccgacua

SEQ ID NO: 1639730 - RNA, 19 nt, Artificial Sequence
  Description of Artificial Sequence: Synthetic oligonucleotide
aggcccgaauuccuccaug

SEQ ID NO: 1639731 - RNA, 19 nt, Artificial Sequence
  Description of Artificial Sequence: Synthetic oligonucleotide
ugucugcggagccgcgcug

SEQ ID NO: 1639732 - RNA, 19 nt, Artificial Sequence
  Description of Artificial Sequence: Synthetic oligonucleotide
aucuccaauggaacgggau

SEQ ID NO: 1639733 - RNA, 19 nt, Artificial Sequence
  Description of Artificial Sequence: Synthetic oligonucleotide
ggaacucuucgucggugug

SEQ ID NO: 1639734 - RNA, 19 nt, Artificial Sequence
  Description of Artificial Sequence: Synthetic oligonucleotide
gaggcuuuacaaacuuucu

SEQ ID NO: 1639735 - RNA, 19 nt, Artificial Sequence
  Description of Artificial Sequence: Synthetic oligonucleotide
acccgaguaaugagggaug

SEQ ID NO: 1639736 - RNA, 19 nt, Artificial Sequence
  Description of Artificial Sequence: Synthetic oligonucleotide
ucugcggagccgcgcugca

SEQ ID NO: 1639737 - RNA, 19 nt, Artificial Sequence
  Description of Artificial Sequence: Synthetic oligonucleotide
gauauccggcacagaugug

SEQ ID NO: 1639738 - RNA, 19 nt, Artificial Sequence
  Description of Artificial Sequence: Synthetic oligonucleotide
cgggauacuucuaguacgc

SEQ ID NO: 1639739 - RNA, 19 nt, Artificial Sequence
  Description of Artificial Sequence: Synthetic oligonucleotide
caccgucacguugucugcg

SEQ ID NO: 1639740 - RNA, 19 nt, Artificial Sequence
  Description of Artificial Sequence: Synthetic oligonucleotide
guugucugcggagccgcgc

SEQ ID NO: 1639741 - RNA, 19 nt, Artificial Sequence
  Description of Artificial Sequence: Synthetic oligonucleotide
cucgcgcuaccccgggcgg

SEQ ID NO: 1639742 - RNA, 19 nt, Artificial Sequence
  Description of Artificial Sequence: Synthetic oligonucleotide
agcaaauuuugaggcccga

SEQ ID NO: 1639743 - RNA, 19 nt, Artificial Sequence
  Description of Artificial Sequence: Synthetic oligonucleotide
uggcaguggacccgucuuu

SEQ ID NO: 1639744 - RNA, 19 nt, Artificial Sequence
  Description of Artificial Sequence: Synthetic oligonucleotide
uucccggcaggcgggcgcg

SEQ ID NO: 1639745 - RNA, 19 nt, Artificial Sequence
  Description of Artificial Sequence: Synthetic oligonucleotide
agaucacugaugaggcuuu

SEQ ID NO: 1639746 - RNA, 19 nt, Artificial Sequence
  Description of Artificial Sequence: Synthetic oligonucleotide
cucgggucuggaucuuguc

SEQ ID NO: 1639747 - RNA, 19 nt, Artificial Sequence
  Description of Artificial Sequence: Synthetic oligonucleotide
ccuccggccuucuguaucc

SEQ ID NO: 1639748 - RNA, 19 nt, Artificial Sequence
  Description of Artificial Sequence: Synthetic oligonucleotide
guggagcggaggcucgcgc

SEQ ID NO: 1639749 - RNA, 19 nt, Artificial Sequence
  Description of Artificial Sequence: Synthetic oligonucleotide
caguggacccgucuuucca

SEQ ID NO: 1639750 - RNA, 19 nt, Artificial Sequence
  Description of Artificial Sequence: Synthetic oligonucleotide
cacaagcucuucaccgcca

SEQ ID NO: 1639751 - RNA, 19 nt, Artificial Sequence
  Description of Artificial Sequence: Synthetic oligonucleotide
cucuucgucgguguguuua

SEQ ID NO: 1639752 - RNA, 19 nt, Artificial Sequence
  Description of Artificial Sequence: Synthetic oligonucleotide
ccagauccugaaucaguac

SEQ ID NO: 1639753 - RNA, 19 nt, Artificial Sequence
  Description of Artificial Sequence: Synthetic oligonucleotide
caggauugcccgacuaucu

SEQ ID NO: 1639754 - RNA, 19 nt, Artificial Sequence
  Description of Artificial Sequence: Synthetic oligonucleotide
ggcuugaggccuguuucag

SEQ ID NO: 1639755 - RNA, 19 nt, Artificial Sequence
  Description of Artificial Sequence: Synthetic oligonucleotide
ccaccugggaaacugaugu

SEQ ID NO: 1639756 - RNA, 19 nt, Artificial Sequence
  Description of Artificial Sequence: Synthetic oligonucleotide
ggaaacugauguggcaaga

SEQ ID NO: 1639757 - RNA, 19 nt, Artificial Sequence
  Description of Artificial Sequence: Synthetic oligonucleotide
cgacuaucuccaagguugg

SEQ ID NO: 1639758 - RNA, 19 nt, Artificial Sequence
  Description of Artificial Sequence: Synthetic oligonucleotide
cgguguguuuaaaaguauc

SEQ ID NO: 1639759 - RNA, 19 nt, Artificial Sequence
  Description of Artificial Sequence: Synthetic oligonucleotide
cuucaccgccauucuucuc

SEQ ID NO: 1639760 - RNA, 19 nt, Artificial Sequence
  Description of Artificial Sequence: Synthetic oligonucleotide
auugcccgacuaucuccaa

SEQ ID NO: 1639761 - RNA, 19 nt, Artificial Sequence
  Description of Artificial Sequence: Synthetic oligonucleotide
ucgcccuuccgcucugcua

SEQ ID NO: 1639762 - RNA, 19 nt, Artificial Sequence
  Description of Artificial Sequence: Synthetic oligonucleotide
gcgucugauauccggcaca

SEQ ID NO: 1639763 - RNA, 19 nt, Artificial Sequence
  Description of Artificial Sequence: Synthetic oligonucleotide
gggauacuucuaguacgcc

SEQ ID NO: 1639764 - RNA, 19 nt, Artificial Sequence
  Description of Artificial Sequence: Synthetic oligonucleotide
ccacagcgcuuauacugcc

SEQ ID NO: 1639765 - RNA, 19 nt, Artificial Sequence
  Description of Artificial Sequence: Synthetic oligonucleotide
gguggagcggaggcucgcg

SEQ ID NO: 1639766 - RNA, 19 nt, Artificial Sequence
  Description of Artificial Sequence: Synthetic oligonucleotide
cgcccuuccgcucugcuac

SEQ ID NO: 1639767 - RNA, 19 nt, Artificial Sequence
  Description of Artificial Sequence: Synthetic oligonucleotide
ggacccgucuuuccaggca

SEQ ID NO: 1639768 - RNA, 19 nt, Artificial Sequence
  Description of Artificial Sequence: Synthetic oligonucleotide
uggcgauauacaggauguu

SEQ ID NO: 1639769 - RNA, 19 nt, Artificial Sequence
  Description of Artificial Sequence: Synthetic oligonucleotide
gagcggaggcucgcgcuac

SEQ ID NO: 1639770 - RNA, 19 nt, Artificial Sequence
  Description of Artificial Sequence: Synthetic oligonucleotide
gcuucaccaccugggaaac

SEQ ID NO: 1639771 - RNA, 19 nt, Artificial Sequence
  Description of Artificial Sequence: Synthetic oligonucleotide
gcacagaugugaccccaca

SEQ ID NO: 1639772 - RNA, 19 nt, Artificial Sequence
  Description of Artificial Sequence: Synthetic oligonucleotide
gcaaauuuugaggcccgaa

SEQ ID NO: 1639773 - RNA, 19 nt, Artificial Sequence
  Description of Artificial Sequence: Synthetic oligonucleotide
cacggguccuuccugugcu

SEQ ID NO: 1639774 - RNA, 19 nt, Artificial Sequence
  Description of Artificial Sequence: Synthetic oligonucleotide
cuccaagucaagagcgcau

SEQ ID NO: 1639775 - RNA, 19 nt, Artificial Sequence
  Description of Artificial Sequence: Synthetic oligonucleotide
cgucacguugucugcggag

SEQ ID NO: 1639776 - RNA, 19 nt, Artificial Sequence
  Description of Artificial Sequence: Synthetic oligonucleotide
cgucugauauccggcacag

SEQ ID NO: 1639777 - RNA, 19 nt, Artificial Sequence
  Description of Artificial Sequence: Synthetic oligonucleotide
cacaggauugcccgacuau

SEQ ID NO: 1639778 - RNA, 19 nt, Artificial Sequence
  Description of Artificial Sequence: Synthetic oligonucleotide
ggcaguggacccgucuuuc

SEQ ID NO: 1639779 - RNA, 19 nt, Artificial Sequence
  Description of Artificial Sequence: Synthetic oligonucleotide
ucgcgcuaccccgggcggc

SEQ ID NO: 1639780 - RNA, 19 nt, Artificial Sequence
  Description of Artificial Sequence: Synthetic oligonucleotide
ugaccccacagcgcuuaua

SEQ ID NO: 1639781 - RNA, 19 nt, Artificial Sequence
  Description of Artificial Sequence: Synthetic oligonucleotide
gcggcggggcgguggagcg

SEQ ID NO: 1639782 - RNA, 19 nt, Artificial Sequence
  Description of Artificial Sequence: Synthetic oligonucleotide
ucccuccggccuucuguau

SEQ ID NO: 1639783 - RNA, 19 nt, Artificial Sequence
  Description of Artificial Sequence: Synthetic oligonucleotide
gaucacugaugaggcuuua

SEQ ID NO: 1639784 - RNA, 19 nt, Artificial Sequence
  Description of Artificial Sequence: Synthetic oligonucleotide
ggcccgaauuccuccaugu

SEQ ID NO: 1639785 - RNA, 19 nt, Artificial Sequence
  Description of Artificial Sequence: Synthetic oligonucleotide
ggcgguggagcggaggcuc

SEQ ID NO: 1639786 - RNA, 19 nt, Artificial Sequence
  Description of Artificial Sequence: Synthetic oligonucleotide
ggaggccgacacuccucag

SEQ ID NO: 1639787 - RNA, 19 nt, Artificial Sequence
  Description of Artificial Sequence: Synthetic oligonucleotide
guggagcuuuccucuuugu

SEQ ID NO: 1639788 - RNA, 19 nt, Artificial Sequence
  Description of Artificial Sequence: Synthetic oligonucleotide
gccgacacuccucagugau

SEQ ID NO: 1639789 - RNA, 19 nt, Artificial Sequence
  Description of Artificial Sequence: Synthetic oligonucleotide
cuaccccgggcggcggcgg

SEQ ID NO: 1639790 - RNA, 19 nt, Artificial Sequence
  Description of Artificial Sequence: Synthetic oligonucleotide
caccgccauucuucucuuc

SEQ ID NO: 1639791 - RNA, 19 nt, Artificial Sequence
  Description of Artificial Sequence: Synthetic oligonucleotide
cuccggcagguccccgaac

SEQ ID NO: 1639792 - RNA, 19 nt, Artificial Sequence
  Description of Artificial Sequence: Synthetic oligonucleotide
gcccgaauuccuccauguc

SEQ ID NO: 1639793 - RNA, 19 nt, Artificial Sequence
  Description of Artificial Sequence: Synthetic oligonucleotide
guccccgaacagguccaug

SEQ ID NO: 1639794 - RNA, 19 nt, Artificial Sequence
  Description of Artificial Sequence: Synthetic oligonucleotide
cucucgcccuuccgcucug

SEQ ID NO: 1639795 - RNA, 19 nt, Artificial Sequence
  Description of Artificial Sequence: Synthetic oligonucleotide
gagcgcaugugcaggcccu

SEQ ID NO: 1639796 - RNA, 19 nt, Artificial Sequence
  Description of Artificial Sequence: Synthetic oligonucleotide
acucuucgucgguguguuu

SEQ ID NO: 1639797 - RNA, 19 nt, Artificial Sequence
  Description of Artificial Sequence: Synthetic oligonucleotide
auggaacgggauacuucua

SEQ ID NO: 1639798 - RNA, 19 nt, Artificial Sequence
  Description of Artificial Sequence: Synthetic oligonucleotide
cccgucuuuccaggcaggc

SEQ ID NO: 1639799 - RNA, 19 nt, Artificial Sequence
  Description of Artificial Sequence: Synthetic oligonucleotide
acggguccuuccugugcuu

SEQ ID NO: 1639800 - RNA, 19 nt, Artificial Sequence
  Description of Artificial Sequence: Synthetic oligonucleotide
cccuccggccuucuguauc

SEQ ID NO: 1639801 - RNA, 19 nt, Artificial Sequence
  Description of Artificial Sequence: Synthetic oligonucleotide
gcuaccccgggcggcggcg

SEQ ID NO: 1639802 - RNA, 19 nt, Artificial Sequence
  Description of Artificial Sequence: Synthetic oligonucleotide
gaggcccgaauuccuccau

SEQ ID NO: 1639803 - RNA, 19 nt, Artificial Sequence
  Description of Artificial Sequence: Synthetic oligonucleotide
cgucgguguguuuaaaagu

SEQ ID NO: 1639804 - RNA, 19 nt, Artificial Sequence
  Description of Artificial Sequence: Synthetic oligonucleotide
ggagcggaggcucgcgcua

SEQ ID NO: 1639805 - RNA, 19 nt, Artificial Sequence
  Description of Artificial Sequence: Synthetic oligonucleotide
cuucgucgguguguuuaaa

SEQ ID NO: 1639806 - RNA, 19 nt, Artificial Sequence
  Description of Artificial Sequence: Synthetic oligonucleotide
acauucccuccggccuucu

SEQ ID NO: 1639807 - RNA, 19 nt, Artificial Sequence
  Description of Artificial Sequence: Synthetic oligonucleotide
acauagccuuucagaccaa

SEQ ID NO: 1639808 - RNA, 19 nt, Artificial Sequence
  Description of Artificial Sequence: Synthetic oligonucleotide
ggccgacacuccucaguga

SEQ ID NO: 1639809 - RNA, 19 nt, Artificial Sequence
  Description of Artificial Sequence: Synthetic oligonucleotide
cccgaguaaugagggauga

SEQ ID NO: 1639810 - RNA, 19 nt, Artificial Sequence
  Description of Artificial Sequence: Synthetic oligonucleotide
cgacacaggauugcccgac

SEQ ID NO: 1639811 - RNA, 19 nt, Artificial Sequence
  Description of Artificial Sequence: Synthetic oligonucleotide
cguugucugcggagccgcg

SEQ ID NO: 1639812 - RNA, 19 nt, Artificial Sequence
  Description of Artificial Sequence: Synthetic oligonucleotide
cuaccaucaccgucacguu

SEQ ID NO: 1639813 - RNA, 19 nt, Artificial Sequence
  Description of Artificial Sequence: Synthetic oligonucleotide
cuguauccucaugcguucu

SEQ ID NO: 1639814 - RNA, 19 nt, Artificial Sequence
  Description of Artificial Sequence: Synthetic oligonucleotide
gcggagccgcgcugcacug

SEQ ID NO: 1639815 - RNA, 19 nt, Artificial Sequence
  Description of Artificial Sequence: Synthetic oligonucleotide
gccgcgcugcacugccuug

SEQ ID NO: 1639816 - RNA, 19 nt, Artificial Sequence
  Description of Artificial Sequence: Synthetic oligonucleotide
gcggaggcucgcgcuaccc

SEQ ID NO: 1639817 - RNA, 19 nt, Artificial Sequence
  Description of Artificial Sequence: Synthetic oligonucleotide
ccaagucaagagcgcaugu

SEQ ID NO: 1639818 - RNA, 19 nt, Artificial Sequence
  Description of Artificial Sequence: Synthetic oligonucleotide
ggcggggcgguggagcgga

SEQ ID NO: 1639819 - RNA, 19 nt, Artificial Sequence
  Description of Artificial Sequence: Synthetic oligonucleotide
acguggcaguggacccguc

SEQ ID NO: 1639820 - RNA, 19 nt, Artificial Sequence
  Description of Artificial Sequence: Synthetic oligonucleotide
gccuuguuagccagccugu

SEQ ID NO: 1639821 - RNA, 19 nt, Artificial Sequence
  Description of Artificial Sequence: Synthetic oligonucleotide
cugccuuguuagccagccu

SEQ ID NO: 1639822 - RNA, 19 nt, Artificial Sequence
  Description of Artificial Sequence: Synthetic oligonucleotide
cagcgcuuauacugcccau

SEQ ID NO: 1639823 - RNA, 19 nt, Artificial Sequence
  Description of Artificial Sequence: Synthetic oligonucleotide
gcccgacuaucuccaaggu

SEQ ID NO: 1639824 - RNA, 19 nt, Artificial Sequence
  Description of Artificial Sequence: Synthetic oligonucleotide
cgcgcuaccccgggcggcg

SEQ ID NO: 1639825 - RNA, 19 nt, Artificial Sequence
  Description of Artificial Sequence: Synthetic oligonucleotide
ccgucacguugucugcgga

SEQ ID NO: 1639826 - RNA, 19 nt, Artificial Sequence
  Description of Artificial Sequence: Synthetic oligonucleotide
gcccuuccgcucugcuaca

SEQ ID NO: 1639827 - RNA, 19 nt, Artificial Sequence
  Description of Artificial Sequence: Synthetic oligonucleotide
ccaauggaacgggauacuu

SEQ ID NO: 1639828 - RNA, 19 nt, Artificial Sequence
  Description of Artificial Sequence: Synthetic oligonucleotide
gcgcaugugcaggcccuca

SEQ ID NO: 1639829 - RNA, 19 nt, Artificial Sequence
  Description of Artificial Sequence: Synthetic oligonucleotide
cugaggcuuaaggcugcau

SEQ ID NO: 1639830 - RNA, 19 nt, Artificial Sequence
  Description of Artificial Sequence: Synthetic oligonucleotide
ccuuccgcucugcuacaua

SEQ ID NO: 1639831 - RNA, 19 nt, Artificial Sequence
  Description of Artificial Sequence: Synthetic oligonucleotide
cccgacuaucuccaagguu

SEQ ID NO: 1639832 - RNA, 19 nt, Artificial Sequence
  Description of Artificial Sequence: Synthetic oligonucleotide
ccucucgcccuuccgcucu

SEQ ID NO: 1639833 - RNA, 19 nt, Artificial Sequence
  Description of Artificial Sequence: Synthetic oligonucleotide
gcgcuaccccgggcggcgg

SEQ ID NO: 1639834 - RNA, 19 nt, Artificial Sequence
  Description of Artificial Sequence: Synthetic oligonucleotide
gguuggcgauauacaggau

SEQ ID NO: 1639835 - RNA, 19 nt, Artificial Sequence
  Description of Artificial Sequence: Synthetic oligonucleotide
cguggcaguggacccgucu

SEQ ID NO: 1639836 - RNA, 19 nt, Artificial Sequence
  Description of Artificial Sequence: Synthetic oligonucleotide
cgcuaccccgggcggcggc

SEQ ID NO: 1639837 - RNA, 19 nt, Artificial Sequence
  Description of Artificial Sequence: Synthetic oligonucleotide
ccgucuuuccaggcaggcu

SEQ ID NO: 1639838 - RNA, 19 nt, Artificial Sequence
  Description of Artificial Sequence: Synthetic oligonucleotide
ccuuguuagccagccuguu

SEQ ID NO: 1639839 - RNA, 19 nt, Artificial Sequence
  Description of Artificial Sequence: Synthetic oligonucleotide
gggcgguggagcggaggcu

SEQ ID NO: 1639840 - RNA, 19 nt, Artificial Sequence
  Description of Artificial Sequence: Synthetic oligonucleotide
ccgaguaaugagggaugau

SEQ ID NO: 1639841 - RNA, 19 nt, Artificial Sequence
  Description of Artificial Sequence: Synthetic oligonucleotide
gcggggcgguggagcggag

SEQ ID NO: 1639842 - RNA, 19 nt, Artificial Sequence
  Description of Artificial Sequence: Synthetic oligonucleotide
ccucugggguaaagaccuu

SEQ ID NO: 1639843 - RNA, 19 nt, Artificial Sequence
  Description of Artificial Sequence: Synthetic oligonucleotide
cccuuccgcucugcuacau

SEQ ID NO: 1639844 - RNA, 19 nt, Artificial Sequence
  Description of Artificial Sequence: Synthetic oligonucleotide
cgcgcugcacugccuuguu

SEQ ID NO: 1639845 - RNA, 19 nt, Artificial Sequence
  Description of Artificial Sequence: Synthetic oligonucleotide
aacaagaucacuccacagg

SEQ ID NO: 1639846 - RNA, 19 nt, Artificial Sequence
  Description of Artificial Sequence: Synthetic oligonucleotide
ucugguaaaacucuuuggc

SEQ ID NO: 1639847 - RNA, 19 nt, Artificial Sequence
  Description of Artificial Sequence: Synthetic oligonucleotide
aaauacuccuccuggagag

SEQ ID NO: 1639848 - RNA, 19 nt, Artificial Sequence
  Description of Artificial Sequence: Synthetic oligonucleotide
aaggaugugcaucucucgc

SEQ ID NO: 1639849 - RNA, 19 nt, Artificial Sequence
  Description of Artificial Sequence: Synthetic oligonucleotide
gaugagagugaugauaugg

SEQ ID NO: 1639850 - RNA, 19 nt, Artificial Sequence
  Description of Artificial Sequence: Synthetic oligonucleotide
aucaccaguagcucgaugg

SEQ ID NO: 1639851 - RNA, 19 nt, Artificial Sequence
  Description of Artificial Sequence: Synthetic oligonucleotide
agaacccaaaaucugaaag

SEQ ID NO: 1639852 - RNA, 19 nt, Artificial Sequence
  Description of Artificial Sequence: Synthetic oligonucleotide
gaagcuaggagacucguag

SEQ ID NO: 1639853 - RNA, 19 nt, Artificial Sequence
  Description of Artificial Sequence: Synthetic oligonucleotide
agaccuaggaggcuggugc

SEQ ID NO: 1639854 - RNA, 19 nt, Artificial Sequence
  Description of Artificial Sequence: Synthetic oligonucleotide
aacucucgaagcuuuucgc

SEQ ID NO: 1639855 - RNA, 19 nt, Artificial Sequence
  Description of Artificial Sequence: Synthetic oligonucleotide
ucaauuaggcgccuaacug

SEQ ID NO: 1639856 - RNA, 19 nt, Artificial Sequence
  Description of Artificial Sequence: Synthetic oligonucleotide
uucgguggccauaauaggg

SEQ ID NO: 1639857 - RNA, 19 nt, Artificial Sequence
  Description of Artificial Sequence: Synthetic oligonucleotide
ucacccaaugcccauagag

SEQ ID NO: 1639858 - RNA, 19 nt, Artificial Sequence
  Description of Artificial Sequence: Synthetic oligonucleotide
agaagcgugaacaagauca

SEQ ID NO: 1639859 - RNA, 19 nt, Artificial Sequence
  Description of Artificial Sequence: Synthetic oligonucleotide
aauuaggcgccuaacuggc

SEQ ID NO: 1639860 - RNA, 19 nt, Artificial Sequence
  Description of Artificial Sequence: Synthetic oligonucleotide
aaaauacuccuccuggaga

SEQ ID NO: 1639861 - RNA, 19 nt, Artificial Sequence
  Description of Artificial Sequence: Synthetic oligonucleotide
gaaucgaugagagugauga

SEQ ID NO: 1639862 - RNA, 19 nt, Artificial Sequence
  Description of Artificial Sequence: Synthetic oligonucleotide
ucuagcagaauauucucug

SEQ ID NO: 1639863 - RNA, 19 nt, Artificial Sequence
  Description of Artificial Sequence: Synthetic oligonucleotide
caauuaucaauuaggcgcc

SEQ ID NO: 1639864 - RNA, 19 nt, Artificial Sequence
  Description of Artificial Sequence: Synthetic oligonucleotide
guagcaucaggauuuggcg

SEQ ID NO: 1639865 - RNA, 19 nt, Artificial Sequence
  Description of Artificial Sequence: Synthetic oligonucleotide
ugcuuaaugccacucgucc

SEQ ID NO: 1639866 - RNA, 19 nt, Artificial Sequence
  Description of Artificial Sequence: Synthetic oligonucleotide
caauuaggcgccuaacugg

SEQ ID NO: 1639867 - RNA, 19 nt, Artificial Sequence
  Description of Artificial Sequence: Synthetic oligonucleotide
aaaacucuuuggccgcagc

SEQ ID NO: 1639868 - RNA, 19 nt, Artificial Sequence
  Description of Artificial Sequence: Synthetic oligonucleotide
aggauuuggcgucugugcc

SEQ ID NO: 1639869 - RNA, 19 nt, Artificial Sequence
  Description of Artificial Sequence: Synthetic oligonucleotide
cauauugucgucuagcaga

SEQ ID NO: 1639870 - RNA, 19 nt, Artificial Sequence
  Description of Artificial Sequence: Synthetic oligonucleotide
uguuaagcguuccucagga

SEQ ID NO: 1639871 - RNA, 19 nt, Artificial Sequence
  Description of Artificial Sequence: Synthetic oligonucleotide
aaaucugaaaggcggauuu

SEQ ID NO: 1639872 - RNA, 19 nt, Artificial Sequence
  Description of Artificial Sequence: Synthetic oligonucleotide
uucugguaaaacucuuugg

SEQ ID NO: 1639873 - RNA, 19 nt, Artificial Sequence
  Description of Artificial Sequence: Synthetic oligonucleotide
aacucuuuggccgcagccc

SEQ ID NO: 1639874 - RNA, 19 nt, Artificial Sequence
  Description of Artificial Sequence: Synthetic oligonucleotide
aaugacguccuuagggucg

SEQ ID NO: 1639875 - RNA, 19 nt, Artificial Sequence
  Description of Artificial Sequence: Synthetic oligonucleotide
acggugagugcuuaaugcc

SEQ ID NO: 1639876 - RNA, 19 nt, Artificial Sequence
  Description of Artificial Sequence: Synthetic oligonucleotide
aaacucaucaccaguagcu

SEQ ID NO: 1639877 - RNA, 19 nt, Artificial Sequence
  Description of Artificial Sequence: Synthetic oligonucleotide
ugguuaguggccguaaacg

SEQ ID NO: 1639878 - RNA, 19 nt, Artificial Sequence
  Description of Artificial Sequence: Synthetic oligonucleotide
ugaacaagaucacuccaca

SEQ ID NO: 1639879 - RNA, 19 nt, Artificial Sequence
  Description of Artificial Sequence: Synthetic oligonucleotide
ucccacacaacucucgaag

SEQ ID NO: 1639880 - RNA, 19 nt, Artificial Sequence
  Description of Artificial Sequence: Synthetic oligonucleotide
auaauagggaaagaccuag

SEQ ID NO: 1639881 - RNA, 19 nt, Artificial Sequence
  Description of Artificial Sequence: Synthetic oligonucleotide
uuaguggccguaaacggug

SEQ ID NO: 1639882 - RNA, 19 nt, Artificial Sequence
  Description of Artificial Sequence: Synthetic oligonucleotide
cuuagggucguacuucugg

SEQ ID NO: 1639883 - RNA, 19 nt, Artificial Sequence
  Description of Artificial Sequence: Synthetic oligonucleotide
ucgucuagcagaauauucu

SEQ ID NO: 1639884 - RNA, 19 nt, Artificial Sequence
  Description of Artificial Sequence: Synthetic oligonucleotide
uuaagcguuccucaggauc

SEQ ID NO: 1639885 - RNA, 19 nt, Artificial Sequence
  Description of Artificial Sequence: Synthetic oligonucleotide
ucguaggaaucgaugagag

SEQ ID NO: 1639886 - RNA, 19 nt, Artificial Sequence
  Description of Artificial Sequence: Synthetic oligonucleotide
agcuaaacugguauuggcc

SEQ ID NO: 1639887 - RNA, 19 nt, Artificial Sequence
  Description of Artificial Sequence: Synthetic oligonucleotide
uuuacccucagccgccugg

SEQ ID NO: 1639888 - RNA, 19 nt, Artificial Sequence
  Description of Artificial Sequence: Synthetic oligonucleotide
aaagaaggggugcuguaga

SEQ ID NO: 1639889 - RNA, 19 nt, Artificial Sequence
  Description of Artificial Sequence: Synthetic oligonucleotide
ucgaugagagugaugauau

SEQ ID NO: 1639890 - RNA, 19 nt, Artificial Sequence
  Description of Artificial Sequence: Synthetic oligonucleotide
agcacuuaaggaucucugg

SEQ ID NO: 1639891 - RNA, 19 nt, Artificial Sequence
  Description of Artificial Sequence: Synthetic oligonucleotide
ggcacaauuaucaauuagg

SEQ ID NO: 1639892 - RNA, 19 nt, Artificial Sequence
  Description of Artificial Sequence: Synthetic oligonucleotide
cuuaaugccacucguccag

SEQ ID NO: 1639893 - RNA, 19 nt, Artificial Sequence
  Description of Artificial Sequence: Synthetic oligonucleotide
uagcucgauggacacagcg

SEQ ID NO: 1639894 - RNA, 19 nt, Artificial Sequence
  Description of Artificial Sequence: Synthetic oligonucleotide
cuugccguagccugggugg

SEQ ID NO: 1639895 - RNA, 19 nt, Artificial Sequence
  Description of Artificial Sequence: Synthetic oligonucleotide
ugcuugaacgaucauccca

SEQ ID NO: 1639896 - RNA, 19 nt, Artificial Sequence
  Description of Artificial Sequence: Synthetic oligonucleotide
agagaccucaugauggacc

SEQ ID NO: 1639897 - RNA, 19 nt, Artificial Sequence
  Description of Artificial Sequence: Synthetic oligonucleotide
gugaauucuugguuagugg

SEQ ID NO: 1639898 - RNA, 19 nt, Artificial Sequence
  Description of Artificial Sequence: Synthetic oligonucleotide
gaaggaugugcaucucucg

SEQ ID NO: 1639899 - RNA, 19 nt, Artificial Sequence
  Description of Artificial Sequence: Synthetic oligonucleotide
gaucaucccacucugguga

SEQ ID NO: 1639900 - RNA, 19 nt, Artificial Sequence
  Description of Artificial Sequence: Synthetic oligonucleotide
uauuggccuuccaugauca

SEQ ID NO: 1639901 - RNA, 19 nt, Artificial Sequence
  Description of Artificial Sequence: Synthetic oligonucleotide
augguggugagccagccag

SEQ ID NO: 1639902 - RNA, 19 nt, Artificial Sequence
  Description of Artificial Sequence: Synthetic oligonucleotide
aaacggugagugcuuaaug

SEQ ID NO: 1639903 - RNA, 19 nt, Artificial Sequence
  Description of Artificial Sequence: Synthetic oligonucleotide
aagcuaggagacucguagg

SEQ ID NO: 1639904 - RNA, 19 nt, Artificial Sequence
  Description of Artificial Sequence: Synthetic oligonucleotide
aguagcucgauggacacag

SEQ ID NO: 1639905 - RNA, 19 nt, Artificial Sequence
  Description of Artificial Sequence: Synthetic oligonucleotide
uggucuuuacccucagccg

SEQ ID NO: 1639906 - RNA, 19 nt, Artificial Sequence
  Description of Artificial Sequence: Synthetic oligonucleotide
ugagcuaaacugguauugg

SEQ ID NO: 1639907 - RNA, 19 nt, Artificial Sequence
  Description of Artificial Sequence: Synthetic oligonucleotide
ugcauauugucgucuagca

SEQ ID NO: 1639908 - RNA, 19 nt, Artificial Sequence
  Description of Artificial Sequence: Synthetic oligonucleotide
uccaaauggcaggagaacc

SEQ ID NO: 1639909 - RNA, 19 nt, Artificial Sequence
  Description of Artificial Sequence: Synthetic oligonucleotide
uucacugcaaacucaucac

SEQ ID NO: 1639910 - RNA, 19 nt, Artificial Sequence
  Description of Artificial Sequence: Synthetic oligonucleotide
uuugcauauugucgucuag

SEQ ID NO: 1639911 - RNA, 19 nt, Artificial Sequence
  Description of Artificial Sequence: Synthetic oligonucleotide
ucuuugacggugcuugaac

SEQ ID NO: 1639912 - RNA, 19 nt, Artificial Sequence
  Description of Artificial Sequence: Synthetic oligonucleotide
gucauucugaaggaugugg

SEQ ID NO: 1639913 - RNA, 19 nt, Artificial Sequence
  Description of Artificial Sequence: Synthetic oligonucleotide
gaacaagaucacuccacag

SEQ ID NO: 1639914 - RNA, 19 nt, Artificial Sequence
  Description of Artificial Sequence: Synthetic oligonucleotide
ugaaaggcggauuugcaua

SEQ ID NO: 1639915 - RNA, 19 nt, Artificial Sequence
  Description of Artificial Sequence: Synthetic oligonucleotide
uccauggagcacuuaagga

SEQ ID NO: 1639916 - RNA, 19 nt, Artificial Sequence
  Description of Artificial Sequence: Synthetic oligonucleotide
agugaauucuugguuagug

SEQ ID NO: 1639917 - RNA, 19 nt, Artificial Sequence
  Description of Artificial Sequence: Synthetic oligonucleotide
cuucugguaaaacucuuug

SEQ ID NO: 1639918 - RNA, 19 nt, Artificial Sequence
  Description of Artificial Sequence: Synthetic oligonucleotide
auugucgucuagcagaaua

SEQ ID NO: 1639919 - RNA, 19 nt, Artificial Sequence
  Description of Artificial Sequence: Synthetic oligonucleotide
gagugcuuaaugccacucg

SEQ ID NO: 1639920 - RNA, 19 nt, Artificial Sequence
  Description of Artificial Sequence: Synthetic oligonucleotide
uuccuuuucugagagggcc

SEQ ID NO: 1639921 - RNA, 19 nt, Artificial Sequence
  Description of Artificial Sequence: Synthetic oligonucleotide
agcgugaacaagaucacuc

SEQ ID NO: 1639922 - RNA, 19 nt, Artificial Sequence
  Description of Artificial Sequence: Synthetic oligonucleotide
gaccucaugauggaccugg

SEQ ID NO: 1639923 - RNA, 19 nt, Artificial Sequence
  Description of Artificial Sequence: Synthetic oligonucleotide
cacuccucugccaaugacg

SEQ ID NO: 1639924 - RNA, 19 nt, Artificial Sequence
  Description of Artificial Sequence: Synthetic oligonucleotide
ugcuagauacccuggaguc

SEQ ID NO: 1639925 - RNA, 19 nt, Artificial Sequence
  Description of Artificial Sequence: Synthetic oligonucleotide
cuagauacccuggaguccc

SEQ ID NO: 1639926 - RNA, 19 nt, Artificial Sequence
  Description of Artificial Sequence: Synthetic oligonucleotide
ucugaaaggcggauuugca

SEQ ID NO: 1639927 - RNA, 19 nt, Artificial Sequence
  Description of Artificial Sequence: Synthetic oligonucleotide
gacucguaggaaucgauga

SEQ ID NO: 1639928 - RNA, 19 nt, Artificial Sequence
  Description of Artificial Sequence: Synthetic oligonucleotide
acgcucagcggucaccucc

SEQ ID NO: 1639929 - RNA, 19 nt, Artificial Sequence
  Description of Artificial Sequence: Synthetic oligonucleotide
ugguauuggccuuccauga

SEQ ID NO: 1639930 - RNA, 19 nt, Artificial Sequence
  Description of Artificial Sequence: Synthetic oligonucleotide
ucuggugagcuaaacuggu

SEQ ID NO: 1639931 - RNA, 19 nt, Artificial Sequence
  Description of Artificial Sequence: Synthetic oligonucleotide
agugcuuaaugccacucgu

SEQ ID NO: 1639932 - RNA, 19 nt, Artificial Sequence
  Description of Artificial Sequence: Synthetic oligonucleotide
uuugacggugcuugaacga

SEQ ID NO: 1639933 - RNA, 19 nt, Artificial Sequence
  Description of Artificial Sequence: Synthetic oligonucleotide
gguuaguggccguaaacgg

SEQ ID NO: 1639934 - RNA, 19 nt, Artificial Sequence
  Description of Artificial Sequence: Synthetic oligonucleotide
uaggaaucgaugagaguga

SEQ ID NO: 1639935 - RNA, 19 nt, Artificial Sequence
  Description of Artificial Sequence: Synthetic oligonucleotide
gagcuaaacugguauuggc

SEQ ID NO: 1639936 - RNA, 19 nt, Artificial Sequence
  Description of Artificial Sequence: Synthetic oligonucleotide
caggauuuggcgucugugc

SEQ ID NO: 1639937 - RNA, 19 nt, Artificial Sequence
  Description of Artificial Sequence: Synthetic oligonucleotide
aggcacaauuaucaauuag

SEQ ID NO: 1639938 - RNA, 19 nt, Artificial Sequence
  Description of Artificial Sequence: Synthetic oligonucleotide
ucgguguacaauguuguug

SEQ ID NO: 1639939 - RNA, 19 nt, Artificial Sequence
  Description of Artificial Sequence: Synthetic oligonucleotide
uuuggccgcagcccagucg

SEQ ID NO: 1639940 - RNA, 19 nt, Artificial Sequence
  Description of Artificial Sequence: Synthetic oligonucleotide
uugcauauugucgucuagc

SEQ ID NO: 1639941 - RNA, 19 nt, Artificial Sequence
  Description of Artificial Sequence: Synthetic oligonucleotide
ucugagagggccaccuucu

SEQ ID NO: 1639942 - RNA, 19 nt, Artificial Sequence
  Description of Artificial Sequence: Synthetic oligonucleotide
uugguuaguggccguaaac

SEQ ID NO: 1639943 - RNA, 19 nt, Artificial Sequence
  Description of Artificial Sequence: Synthetic oligonucleotide
acucguaggaaucgaugag

SEQ ID NO: 1639944 - RNA, 19 nt, Artificial Sequence
  Description of Artificial Sequence: Synthetic oligonucleotide
uccuaggcuagcaccagug

SEQ ID NO: 1639945 - RNA, 19 nt, Artificial Sequence
  Description of Artificial Sequence: Synthetic oligonucleotide
acuucugucgaggugugag

SEQ ID NO: 1639946 - RNA, 19 nt, Artificial Sequence
  Description of Artificial Sequence: Synthetic oligonucleotide
cagaggucgacuuccuugc

SEQ ID NO: 1639947 - RNA, 19 nt, Artificial Sequence
  Description of Artificial Sequence: Synthetic oligonucleotide
auaggggucucucaacagu

SEQ ID NO: 1639948 - RNA, 19 nt, Artificial Sequence
  Description of Artificial Sequence: Synthetic oligonucleotide
agaaggggugcuguagagc

SEQ ID NO: 1639949 - RNA, 19 nt, Artificial Sequence
  Description of Artificial Sequence: Synthetic oligonucleotide
agcuguuaagcguuccuca

SEQ ID NO: 1639950 - RNA, 19 nt, Artificial Sequence
  Description of Artificial Sequence: Synthetic oligonucleotide
uugucgucuagcagaauau

SEQ ID NO: 1639951 - RNA, 19 nt, Artificial Sequence
  Description of Artificial Sequence: Synthetic oligonucleotide
cucgcguuuauuccuuugc

SEQ ID NO: 1639952 - RNA, 19 nt, Artificial Sequence
  Description of Artificial Sequence: Synthetic oligonucleotide
gauuuggcgucugugccag

SEQ ID NO: 1639953 - RNA, 19 nt, Artificial Sequence
  Description of Artificial Sequence: Synthetic oligonucleotide
agcuaggagacucguagga

SEQ ID NO: 1639954 - RNA, 19 nt, Artificial Sequence
  Description of Artificial Sequence: Synthetic oligonucleotide
cuguuaagcguuccucagg

SEQ ID NO: 1639955 - RNA, 19 nt, Artificial Sequence
  Description of Artificial Sequence: Synthetic oligonucleotide
uagcaucaggauuuggcgu

SEQ ID NO: 1639956 - RNA, 19 nt, Artificial Sequence
  Description of Artificial Sequence: Synthetic oligonucleotide
ggcaggagaacccaaaauc

SEQ ID NO: 1639957 - RNA, 19 nt, Artificial Sequence
  Description of Artificial Sequence: Synthetic oligonucleotide
acgaucaucccacucuggu

SEQ ID NO: 1639958 - RNA, 19 nt, Artificial Sequence
  Description of Artificial Sequence: Synthetic oligonucleotide
uuucuggcuugccagggaa

SEQ ID NO: 1639959 - RNA, 19 nt, Artificial Sequence
  Description of Artificial Sequence: Synthetic oligonucleotide
uaggagacucguaggaauc

SEQ ID NO: 1639960 - RNA, 19 nt, Artificial Sequence
  Description of Artificial Sequence: Synthetic oligonucleotide
uaaggaucucuggugcuag

SEQ ID NO: 1639961 - RNA, 19 nt, Artificial Sequence
  Description of Artificial Sequence: Synthetic oligonucleotide
caguauuguccacacugcc

SEQ ID NO: 1639962 - RNA, 19 nt, Artificial Sequence
  Description of Artificial Sequence: Synthetic oligonucleotide
uggccguaaacggugagug

SEQ ID NO: 1639963 - RNA, 19 nt, Artificial Sequence
  Description of Artificial Sequence: Synthetic oligonucleotide
ucgacuuccuugccguagc

SEQ ID NO: 1639964 - RNA, 19 nt, Artificial Sequence
  Description of Artificial Sequence: Synthetic oligonucleotide
gugagcuaaacugguauug

SEQ ID NO: 1639965 - RNA, 19 nt, Artificial Sequence
  Description of Artificial Sequence: Synthetic oligonucleotide
ucgcguuuauuccuuugcu

SEQ ID NO: 1639966 - RNA, 19 nt, Artificial Sequence
  Description of Artificial Sequence: Synthetic oligonucleotide
ucaggauuuggcgucugug

SEQ ID NO: 1639967 - RNA, 19 nt, Artificial Sequence
  Description of Artificial Sequence: Synthetic oligonucleotide
ucaccaguagcucgaugga

SEQ ID NO: 1639968 - RNA, 19 nt, Artificial Sequence
  Description of Artificial Sequence: Synthetic oligonucleotide
cugugauaguguuggaguc

SEQ ID NO: 1639969 - RNA, 19 nt, Artificial Sequence
  Description of Artificial Sequence: Synthetic oligonucleotide
uugaacgaucaucccacuc

SEQ ID NO: 1639970 - RNA, 19 nt, Artificial Sequence
  Description of Artificial Sequence: Synthetic oligonucleotide
uguuggaguccccuucuuc

SEQ ID NO: 1639971 - RNA, 19 nt, Artificial Sequence
  Description of Artificial Sequence: Synthetic oligonucleotide
augcccauagagccggaag

SEQ ID NO: 1639972 - RNA, 19 nt, Artificial Sequence
  Description of Artificial Sequence: Synthetic oligonucleotide
aggaugugcaucucucgcu

SEQ ID NO: 1639973 - RNA, 19 nt, Artificial Sequence
  Description of Artificial Sequence: Synthetic oligonucleotide
gcggauuugcauauugucg

SEQ ID NO: 1639974 - RNA, 19 nt, Artificial Sequence
  Description of Artificial Sequence: Synthetic oligonucleotide
agugcauaggggucucuca

SEQ ID NO: 1639975 - RNA, 19 nt, Artificial Sequence
  Description of Artificial Sequence: Synthetic oligonucleotide
gaaggcacaauuaucaauu

SEQ ID NO: 1639976 - RNA, 19 nt, Artificial Sequence
  Description of Artificial Sequence: Synthetic oligonucleotide
agaggucgacuuccuugcc

SEQ ID NO: 1639977 - RNA, 19 nt, Artificial Sequence
  Description of Artificial Sequence: Synthetic oligonucleotide
uccgugagauagucaaaca

SEQ ID NO: 1639978 - RNA, 19 nt, Artificial Sequence
  Description of Artificial Sequence: Synthetic oligonucleotide
aagaaguccuaggcuagca

SEQ ID NO: 1639979 - RNA, 19 nt, Artificial Sequence
  Description of Artificial Sequence: Synthetic oligonucleotide
agaacucacuccucugcca

SEQ ID NO: 1639980 - RNA, 19 nt, Artificial Sequence
  Description of Artificial Sequence: Synthetic oligonucleotide
agaaugguggugagccagc

SEQ ID NO: 1639981 - RNA, 19 nt, Artificial Sequence
  Description of Artificial Sequence: Synthetic oligonucleotide
aguauuguccacacugcca

SEQ ID NO: 1639982 - RNA, 19 nt, Artificial Sequence
  Description of Artificial Sequence: Synthetic oligonucleotide
gccauaauagggaaagacc

SEQ ID NO: 1639983 - RNA, 19 nt, Artificial Sequence
  Description of Artificial Sequence: Synthetic oligonucleotide
uccuuagggucguacuucu

SEQ ID NO: 1639984 - RNA, 19 nt, Artificial Sequence
  Description of Artificial Sequence: Synthetic oligonucleotide
ucuucuucgguggccauaa

SEQ ID NO: 1639985 - RNA, 19 nt, Artificial Sequence
  Description of Artificial Sequence: Synthetic oligonucleotide
cgguguacaauguuguugg

SEQ ID NO: 1639986 - RNA, 19 nt, Artificial Sequence
  Description of Artificial Sequence: Synthetic oligonucleotide
acccaaaaucugaaaggcg

SEQ ID NO: 1639987 - RNA, 19 nt, Artificial Sequence
  Description of Artificial Sequence: Synthetic oligonucleotide
auuugcauauugucgucua

SEQ ID NO: 1639988 - RNA, 19 nt, Artificial Sequence
  Description of Artificial Sequence: Synthetic oligonucleotide
agggucguacuucugguaa

SEQ ID NO: 1639989 - RNA, 19 nt, Artificial Sequence
  Description of Artificial Sequence: Synthetic oligonucleotide
guauuggccuuccaugauc

SEQ ID NO: 1639990 - RNA, 19 nt, Artificial Sequence
  Description of Artificial Sequence: Synthetic oligonucleotide
agcggucaccuccaugauc

SEQ ID NO: 1639991 - RNA, 19 nt, Artificial Sequence
  Description of Artificial Sequence: Synthetic oligonucleotide
aggucgacuuccuugccgu

SEQ ID NO: 1639992 - RNA, 19 nt, Artificial Sequence
  Description of Artificial Sequence: Synthetic oligonucleotide
uaaacggugagugcuuaau

SEQ ID NO: 1639993 - RNA, 19 nt, Artificial Sequence
  Description of Artificial Sequence: Synthetic oligonucleotide
aucgaugagagugaugaua

SEQ ID NO: 1639994 - RNA, 19 nt, Artificial Sequence
  Description of Artificial Sequence: Synthetic oligonucleotide
gagcacuuaaggaucucug

SEQ ID NO: 1639995 - RNA, 19 nt, Artificial Sequence
  Description of Artificial Sequence: Synthetic oligonucleotide
ccaaauggcaggagaaccc

SEQ ID NO: 1639996 - RNA, 19 nt, Artificial Sequence
  Description of Artificial Sequence: Synthetic oligonucleotide
uucugucgaggugugaggu

SEQ ID NO: 1639997 - RNA, 19 nt, Artificial Sequence
  Description of Artificial Sequence: Synthetic oligonucleotide
ucgccugguuccaaauggc

SEQ ID NO: 1639998 - RNA, 19 nt, Artificial Sequence
  Description of Artificial Sequence: Synthetic oligonucleotide
cucgauggacacagcggcg

SEQ ID NO: 1639999 - RNA, 19 nt, Artificial Sequence
  Description of Artificial Sequence: Synthetic oligonucleotide
aauuaucaauuaggcgccu

SEQ ID NO: 1640000 - RNA, 19 nt, Artificial Sequence
  Description of Artificial Sequence: Synthetic oligonucleotide
ugcauaggggucucucaac

SEQ ID NO: 1640001 - RNA, 19 nt, Artificial Sequence
  Description of Artificial Sequence: Synthetic oligonucleotide
cguagcaucaggauuuggc

SEQ ID NO: 1640002 - RNA, 19 nt, Artificial Sequence
  Description of Artificial Sequence: Synthetic oligonucleotide
agcccagucgggcagcuca

SEQ ID NO: 1640003 - RNA, 19 nt, Artificial Sequence
  Description of Artificial Sequence: Synthetic oligonucleotide
cacagcgcucaaagaaggg

SEQ ID NO: 1640004 - RNA, 19 nt, Artificial Sequence
  Description of Artificial Sequence: Synthetic oligonucleotide
uaaaacucuuuggccgcag

SEQ ID NO: 1640005 - RNA, 19 nt, Artificial Sequence
  Description of Artificial Sequence: Synthetic oligonucleotide
ggugcuagauacccuggag

SEQ ID NO: 1640006 - RNA, 19 nt, Artificial Sequence
  Description of Artificial Sequence: Synthetic oligonucleotide
aauggcaggagaacccaaa

SEQ ID NO: 1640007 - RNA, 19 nt, Artificial Sequence
  Description of Artificial Sequence: Synthetic oligonucleotide
gaacucacuccucugccaa

SEQ ID NO: 1640008 - RNA, 19 nt, Artificial Sequence
  Description of Artificial Sequence: Synthetic oligonucleotide
cuaggcuagcaccagugca

SEQ ID NO: 1640009 - RNA, 19 nt, Artificial Sequence
  Description of Artificial Sequence: Synthetic oligonucleotide
agucccacacaacucucga

SEQ ID NO: 1640010 - RNA, 19 nt, Artificial Sequence
  Description of Artificial Sequence: Synthetic oligonucleotide
uuaaggaucucuggugcua

SEQ ID NO: 1640011 - RNA, 19 nt, Artificial Sequence
  Description of Artificial Sequence: Synthetic oligonucleotide
gaucacuccacaggcccag

SEQ ID NO: 1640012 - RNA, 19 nt, Artificial Sequence
  Description of Artificial Sequence: Synthetic oligonucleotide
gaagcgugaacaagaucac

SEQ ID NO: 1640013 - RNA, 19 nt, Artificial Sequence
  Description of Artificial Sequence: Synthetic oligonucleotide
ugucgaggugugagguucc

SEQ ID NO: 1640014 - RNA, 19 nt, Artificial Sequence
  Description of Artificial Sequence: Synthetic oligonucleotide
aggcuagcaccagugcagc

SEQ ID NO: 1640015 - RNA, 19 nt, Artificial Sequence
  Description of Artificial Sequence: Synthetic oligonucleotide
uuuucgccugguuccaaau

SEQ ID NO: 1640016 - RNA, 19 nt, Artificial Sequence
  Description of Artificial Sequence: Synthetic oligonucleotide
ccgugagauagucaaacag

SEQ ID NO: 1640017 - RNA, 19 nt, Artificial Sequence
  Description of Artificial Sequence: Synthetic oligonucleotide
gaccuggcgaaggaugugc

SEQ ID NO: 1640018 - RNA, 19 nt, Artificial Sequence
  Description of Artificial Sequence: Synthetic oligonucleotide
uuaaugccacucguccagc

SEQ ID NO: 1640019 - RNA, 19 nt, Artificial Sequence
  Description of Artificial Sequence: Synthetic oligonucleotide
gcuguuaagcguuccucag

SEQ ID NO: 1640020 - RNA, 19 nt, Artificial Sequence
  Description of Artificial Sequence: Synthetic oligonucleotide
cauaauagggaaagaccua

SEQ ID NO: 1640021 - RNA, 19 nt, Artificial Sequence
  Description of Artificial Sequence: Synthetic oligonucleotide
ucugccaaugacguccuua

SEQ ID NO: 1640022 - RNA, 19 nt, Artificial Sequence
  Description of Artificial Sequence: Synthetic oligonucleotide
aagcgugaacaagaucacu

SEQ ID NO: 1640023 - RNA, 19 nt, Artificial Sequence
  Description of Artificial Sequence: Synthetic oligonucleotide
agccggaaggcacaauuau

SEQ ID NO: 1640024 - RNA, 19 nt, Artificial Sequence
  Description of Artificial Sequence: Synthetic oligonucleotide
cacagaacucacuccucug

SEQ ID NO: 1640025 - RNA, 19 nt, Artificial Sequence
  Description of Artificial Sequence: Synthetic oligonucleotide
ugaagcuaggagacucgua

SEQ ID NO: 1640026 - RNA, 19 nt, Artificial Sequence
  Description of Artificial Sequence: Synthetic oligonucleotide
gugagauagucaaacagcu

SEQ ID NO: 1640027 - RNA, 19 nt, Artificial Sequence
  Description of Artificial Sequence: Synthetic oligonucleotide
gagaacccaaaaucugaaa

SEQ ID NO: 1640028 - RNA, 19 nt, Artificial Sequence
  Description of Artificial Sequence: Synthetic oligonucleotide
ggccauaauagggaaagac

SEQ ID NO: 1640029 - RNA, 19 nt, Artificial Sequence
  Description of Artificial Sequence: Synthetic oligonucleotide
ugagugcuuaaugccacuc

SEQ ID NO: 1640030 - RNA, 19 nt, Artificial Sequence
  Description of Artificial Sequence: Synthetic oligonucleotide
aucaucccacucuggugag

SEQ ID NO: 1640031 - RNA, 19 nt, Artificial Sequence
  Description of Artificial Sequence: Synthetic oligonucleotide
agacucguaggaaucgaug

SEQ ID NO: 1640032 - RNA, 19 nt, Artificial Sequence
  Description of Artificial Sequence: Synthetic oligonucleotide
uuuggcgucugugccagaa

SEQ ID NO: 1640033 - RNA, 19 nt, Artificial Sequence
  Description of Artificial Sequence: Synthetic oligonucleotide
cucgaagcuuuucgccugg

SEQ ID NO: 1640034 - RNA, 19 nt, Artificial Sequence
  Description of Artificial Sequence: Synthetic oligonucleotide
cuggagucccacacaacuc

SEQ ID NO: 1640035 - RNA, 19 nt, Artificial Sequence
  Description of Artificial Sequence: Synthetic oligonucleotide
gaaugguggugagccagcc

SEQ ID NO: 1640036 - RNA, 19 nt, Artificial Sequence
  Description of Artificial Sequence: Synthetic oligonucleotide
gcuugaacgaucaucccac

SEQ ID NO: 1640037 - RNA, 19 nt, Artificial Sequence
  Description of Artificial Sequence: Synthetic oligonucleotide
ccauaauagggaaagaccu

SEQ ID NO: 1640038 - RNA, 19 nt, Artificial Sequence
  Description of Artificial Sequence: Synthetic oligonucleotide
auuaggcgccuaacuggcc

SEQ ID NO: 1640039 - RNA, 19 nt, Artificial Sequence
  Description of Artificial Sequence: Synthetic oligonucleotide
ggcggauuugcauauuguc

SEQ ID NO: 1640040 - RNA, 19 nt, Artificial Sequence
  Description of Artificial Sequence: Synthetic oligonucleotide
augcguagcaucaggauuu

SEQ ID NO: 1640041 - RNA, 19 nt, Artificial Sequence
  Description of Artificial Sequence: Synthetic oligonucleotide
ccaguauuguccacacugc

SEQ ID NO: 1640042 - RNA, 19 nt, Artificial Sequence
  Description of Artificial Sequence: Synthetic oligonucleotide
acguccuuagggucguacu

SEQ ID NO: 1640043 - RNA, 19 nt, Artificial Sequence
  Description of Artificial Sequence: Synthetic oligonucleotide
gacggugcuugaacgauca

SEQ ID NO: 1640044 - RNA, 19 nt, Artificial Sequence
  Description of Artificial Sequence: Synthetic oligonucleotide
aucaugcguagcaucagga

SEQ ID NO: 1640045 - RNA, 19 nt, Artificial Sequence
  Description of Artificial Sequence: Synthetic oligonucleotide
uugacggugcuugaacgau

SEQ ID NO: 1640046 - RNA, 19 nt, Artificial Sequence
  Description of Artificial Sequence: Synthetic oligonucleotide
ugacggugcuugaacgauc

SEQ ID NO: 1640047 - RNA, 19 nt, Artificial Sequence
  Description of Artificial Sequence: Synthetic oligonucleotide
aguggccguaaacggugag

SEQ ID NO: 1640048 - RNA, 19 nt, Artificial Sequence
  Description of Artificial Sequence: Synthetic oligonucleotide
cugucgaggugugagguuc

SEQ ID NO: 1640049 - RNA, 19 nt, Artificial Sequence
  Description of Artificial Sequence: Synthetic oligonucleotide
guggccagcgaccuggcga

SEQ ID NO: 1640050 - RNA, 19 nt, Artificial Sequence
  Description of Artificial Sequence: Synthetic oligonucleotide
auauugucgucuagcagaa

SEQ ID NO: 1640051 - RNA, 19 nt, Artificial Sequence
  Description of Artificial Sequence: Synthetic oligonucleotide
cucguaggaaucgaugaga

SEQ ID NO: 1640052 - RNA, 19 nt, Artificial Sequence
  Description of Artificial Sequence: Synthetic oligonucleotide
uggccgcagugcauagggg

SEQ ID NO: 1640053 - RNA, 19 nt, Artificial Sequence
  Description of Artificial Sequence: Synthetic oligonucleotide
agccagaagcgugaacaag

SEQ ID NO: 1640054 - RNA, 19 nt, Artificial Sequence
  Description of Artificial Sequence: Synthetic oligonucleotide
aacucacuccucugccaau

SEQ ID NO: 1640055 - RNA, 19 nt, Artificial Sequence
  Description of Artificial Sequence: Synthetic oligonucleotide
ucuccgugagauagucaaa

SEQ ID NO: 1640056 - RNA, 19 nt, Artificial Sequence
  Description of Artificial Sequence: Synthetic oligonucleotide
gaaaggcggauuugcauau

SEQ ID NO: 1640057 - RNA, 19 nt, Artificial Sequence
  Description of Artificial Sequence: Synthetic oligonucleotide
agcagccaguauuguccac

SEQ ID NO: 1640058 - RNA, 19 nt, Artificial Sequence
  Description of Artificial Sequence: Synthetic oligonucleotide
gcuaaacugguauuggccu

SEQ ID NO: 1640059 - RNA, 19 nt, Artificial Sequence
  Description of Artificial Sequence: Synthetic oligonucleotide
gucgacuuccuugccguag

SEQ ID NO: 1640060 - RNA, 19 nt, Artificial Sequence
  Description of Artificial Sequence: Synthetic oligonucleotide
uaggcgccuaacuggccgc

SEQ ID NO: 1640061 - RNA, 19 nt, Artificial Sequence
  Description of Artificial Sequence: Synthetic oligonucleotide
uaguggccguaaacgguga

SEQ ID NO: 1640062 - RNA, 19 nt, Artificial Sequence
  Description of Artificial Sequence: Synthetic oligonucleotide
uuacccucagccgccuggc

SEQ ID NO: 1640063 - RNA, 19 nt, Artificial Sequence
  Description of Artificial Sequence: Synthetic oligonucleotide
uggccagcgaccuggcgaa

SEQ ID NO: 1640064 - RNA, 19 nt, Artificial Sequence
  Description of Artificial Sequence: Synthetic oligonucleotide
ucagccgccuggcucgcgu

SEQ ID NO: 1640065 - RNA, 19 nt, Artificial Sequence
  Description of Artificial Sequence: Synthetic oligonucleotide
gcuaccuucacagcgcuca

SEQ ID NO: 1640066 - RNA, 19 nt, Artificial Sequence
  Description of Artificial Sequence: Synthetic oligonucleotide
uucacccaaugcccauaga

SEQ ID NO: 1640067 - RNA, 19 nt, Artificial Sequence
  Description of Artificial Sequence: Synthetic oligonucleotide
gugcuagauacccuggagu

SEQ ID NO: 1640068 - RNA, 19 nt, Artificial Sequence
  Description of Artificial Sequence: Synthetic oligonucleotide
agcgaccuggcgaaggaug

SEQ ID NO: 1640069 - RNA, 19 nt, Artificial Sequence
  Description of Artificial Sequence: Synthetic oligonucleotide
ccaaugcccauagagccgg

SEQ ID NO: 1640070 - RNA, 19 nt, Artificial Sequence
  Description of Artificial Sequence: Synthetic oligonucleotide
ccuggcucgcguuuauucc

SEQ ID NO: 1640071 - RNA, 19 nt, Artificial Sequence
  Description of Artificial Sequence: Synthetic oligonucleotide
ugucgucuagcagaauauu

SEQ ID NO: 1640072 - RNA, 19 nt, Artificial Sequence
  Description of Artificial Sequence: Synthetic oligonucleotide
cagaagcgugaacaagauc

SEQ ID NO: 1640073 - RNA, 19 nt, Artificial Sequence
  Description of Artificial Sequence: Synthetic oligonucleotide
gcauaggggucucucaaca

SEQ ID NO: 1640074 - RNA, 19 nt, Artificial Sequence
  Description of Artificial Sequence: Synthetic oligonucleotide
gaacuucugucgaggugug

SEQ ID NO: 1640075 - RNA, 19 nt, Artificial Sequence
  Description of Artificial Sequence: Synthetic oligonucleotide
acccggaacuucugucgag

SEQ ID NO: 1640076 - RNA, 19 nt, Artificial Sequence
  Description of Artificial Sequence: Synthetic oligonucleotide
uagggucguacuucuggua

SEQ ID NO: 1640077 - RNA, 19 nt, Artificial Sequence
  Description of Artificial Sequence: Synthetic oligonucleotide
cuaggagacucguaggaau

SEQ ID NO: 1640078 - RNA, 19 nt, Artificial Sequence
  Description of Artificial Sequence: Synthetic oligonucleotide
aaugcccauagagccggaa

SEQ ID NO: 1640079 - RNA, 19 nt, Artificial Sequence
  Description of Artificial Sequence: Synthetic oligonucleotide
agcgcucaaagaaggggug

SEQ ID NO: 1640080 - RNA, 19 nt, Artificial Sequence
  Description of Artificial Sequence: Synthetic oligonucleotide
aguccuaggcuagcaccag

SEQ ID NO: 1640081 - RNA, 19 nt, Artificial Sequence
  Description of Artificial Sequence: Synthetic oligonucleotide
cccacacaacucucgaagc

SEQ ID NO: 1640082 - RNA, 19 nt, Artificial Sequence
  Description of Artificial Sequence: Synthetic oligonucleotide
gacguccuuagggucguac

SEQ ID NO: 1640083 - RNA, 19 nt, Artificial Sequence
  Description of Artificial Sequence: Synthetic oligonucleotide
ggauuugcauauugucguc

SEQ ID NO: 1640084 - RNA, 19 nt, Artificial Sequence
  Description of Artificial Sequence: Synthetic oligonucleotide
cagcuguuaagcguuccuc

SEQ ID NO: 1640085 - RNA, 19 nt, Artificial Sequence
  Description of Artificial Sequence: Synthetic oligonucleotide
auuaucaauuaggcgccua

SEQ ID NO: 1640086 - RNA, 19 nt, Artificial Sequence
  Description of Artificial Sequence: Synthetic oligonucleotide
ugcguagcaucaggauuug

SEQ ID NO: 1640087 - RNA, 19 nt, Artificial Sequence
  Description of Artificial Sequence: Synthetic oligonucleotide
caggauuggcuaccuucac

SEQ ID NO: 1640088 - RNA, 19 nt, Artificial Sequence
  Description of Artificial Sequence: Synthetic oligonucleotide
ggcgucugugccagaaugg

SEQ ID NO: 1640089 - RNA, 19 nt, Artificial Sequence
  Description of Artificial Sequence: Synthetic oligonucleotide
gcuagauacccuggagucc

SEQ ID NO: 1640090 - RNA, 19 nt, Artificial Sequence
  Description of Artificial Sequence: Synthetic oligonucleotide
ggauuuggcgucugugcca

SEQ ID NO: 1640091 - RNA, 19 nt, Artificial Sequence
  Description of Artificial Sequence: Synthetic oligonucleotide
caccaguagcucgauggac

SEQ ID NO: 1640092 - RNA, 19 nt, Artificial Sequence
  Description of Artificial Sequence: Synthetic oligonucleotide
cuuaaggaucucuggugcu

SEQ ID NO: 1640093 - RNA, 19 nt, Artificial Sequence
  Description of Artificial Sequence: Synthetic oligonucleotide
ccgguucuguuguucaccc

SEQ ID NO: 1640094 - RNA, 19 nt, Artificial Sequence
  Description of Artificial Sequence: Synthetic oligonucleotide
aggaaucgaugagagugau

SEQ ID NO: 1640095 - RNA, 19 nt, Artificial Sequence
  Description of Artificial Sequence: Synthetic oligonucleotide
guaaacggugagugcuuaa

SEQ ID NO: 1640096 - RNA, 19 nt, Artificial Sequence
  Description of Artificial Sequence: Synthetic oligonucleotide
guaaaacucuuuggccgca

SEQ ID NO: 1640097 - RNA, 19 nt, Artificial Sequence
  Description of Artificial Sequence: Synthetic oligonucleotide
ucuuuacccucagccgccu

SEQ ID NO: 1640098 - RNA, 19 nt, Artificial Sequence
  Description of Artificial Sequence: Synthetic oligonucleotide
cuuuucgccugguuccaaa

SEQ ID NO: 1640099 - RNA, 19 nt, Artificial Sequence
  Description of Artificial Sequence: Synthetic oligonucleotide
aucuuugacggugcuugaa

SEQ ID NO: 1640100 - RNA, 19 nt, Artificial Sequence
  Description of Artificial Sequence: Synthetic oligonucleotide
cugaaaggcggauuugcau

SEQ ID NO: 1640101 - RNA, 19 nt, Artificial Sequence
  Description of Artificial Sequence: Synthetic oligonucleotide
cuugguuaguggccguaaa

SEQ ID NO: 1640102 - RNA, 19 nt, Artificial Sequence
  Description of Artificial Sequence: Synthetic oligonucleotide
cagagaccucaugauggac

SEQ ID NO: 1640103 - RNA, 19 nt, Artificial Sequence
  Description of Artificial Sequence: Synthetic oligonucleotide
caugcguagcaucaggauu

SEQ ID NO: 1640104 - RNA, 19 nt, Artificial Sequence
  Description of Artificial Sequence: Synthetic oligonucleotide
gcacuuaaggaucucuggu

SEQ ID NO: 1640105 - RNA, 19 nt, Artificial Sequence
  Description of Artificial Sequence: Synthetic oligonucleotide
aggcggauuugcauauugu

SEQ ID NO: 1640106 - RNA, 19 nt, Artificial Sequence
  Description of Artificial Sequence: Synthetic oligonucleotide
ccuaggcuagcaccagugc

SEQ ID NO: 1640107 - RNA, 19 nt, Artificial Sequence
  Description of Artificial Sequence: Synthetic oligonucleotide
gucuagcagaauauucucu

SEQ ID NO: 1640108 - RNA, 19 nt, Artificial Sequence
  Description of Artificial Sequence: Synthetic oligonucleotide
uggcucgcguuuauuccuu

SEQ ID NO: 1640109 - RNA, 19 nt, Artificial Sequence
  Description of Artificial Sequence: Synthetic oligonucleotide
gcaggagaacccaaaaucu

SEQ ID NO: 1640110 - RNA, 19 nt, Artificial Sequence
  Description of Artificial Sequence: Synthetic oligonucleotide
cgaaggaugugcaucucuc

SEQ ID NO: 1640111 - RNA, 19 nt, Artificial Sequence
  Description of Artificial Sequence: Synthetic oligonucleotide
cagugcauaggggucucuc

SEQ ID NO: 1640112 - RNA, 19 nt, Artificial Sequence
  Description of Artificial Sequence: Synthetic oligonucleotide
augacguccuuagggucgu

SEQ ID NO: 1640113 - RNA, 19 nt, Artificial Sequence
  Description of Artificial Sequence: Synthetic oligonucleotide
gauggaccugguuuccuuu

SEQ ID NO: 1640114 - RNA, 19 nt, Artificial Sequence
  Description of Artificial Sequence: Synthetic oligonucleotide
cuucuccgugagauaguca

SEQ ID NO: 1640115 - RNA, 19 nt, Artificial Sequence
  Description of Artificial Sequence: Synthetic oligonucleotide
aaaggcggauuugcauauu

SEQ ID NO: 1640116 - RNA, 19 nt, Artificial Sequence
  Description of Artificial Sequence: Synthetic oligonucleotide
ccgcaucaggucaaacacc

SEQ ID NO: 1640117 - RNA, 19 nt, Artificial Sequence
  Description of Artificial Sequence: Synthetic oligonucleotide
ggagaacccaaaaucugaa

SEQ ID NO: 1640118 - RNA, 19 nt, Artificial Sequence
  Description of Artificial Sequence: Synthetic oligonucleotide
cgcaucaggucaaacacca

SEQ ID NO: 1640119 - RNA, 19 nt, Artificial Sequence
  Description of Artificial Sequence: Synthetic oligonucleotide
gcguuuauuccuuugcuuu

SEQ ID NO: 1640120 - RNA, 19 nt, Artificial Sequence
  Description of Artificial Sequence: Synthetic oligonucleotide
ggcccagaggucgacuucc

SEQ ID NO: 1640121 - RNA, 19 nt, Artificial Sequence
  Description of Artificial Sequence: Synthetic oligonucleotide
cuuuacccucagccgccug

SEQ ID NO: 1640122 - RNA, 19 nt, Artificial Sequence
  Description of Artificial Sequence: Synthetic oligonucleotide
ggccguaaacggugagugc

SEQ ID NO: 1640123 - RNA, 19 nt, Artificial Sequence
  Description of Artificial Sequence: Synthetic oligonucleotide
auagagccggaaggcacaa

SEQ ID NO: 1640124 - RNA, 19 nt, Artificial Sequence
  Description of Artificial Sequence: Synthetic oligonucleotide
ggaaucgaugagagugaug

SEQ ID NO: 1640125 - RNA, 19 nt, Artificial Sequence
  Description of Artificial Sequence: Synthetic oligonucleotide
uaccuucacagcgcucaaa

SEQ ID NO: 1640126 - RNA, 19 nt, Artificial Sequence
  Description of Artificial Sequence: Synthetic oligonucleotide
gcagccaguauuguccaca

SEQ ID NO: 1640127 - RNA, 19 nt, Artificial Sequence
  Description of Artificial Sequence: Synthetic oligonucleotide
ccauggagcacuuaaggau

SEQ ID NO: 1640128 - RNA, 19 nt, Artificial Sequence
  Description of Artificial Sequence: Synthetic oligonucleotide
gcccauagagccggaaggc

SEQ ID NO: 1640129 - RNA, 19 nt, Artificial Sequence
  Description of Artificial Sequence: Synthetic oligonucleotide
ccuaacuggccgcagugca

SEQ ID NO: 1640130 - RNA, 19 nt, Artificial Sequence
  Description of Artificial Sequence: Synthetic oligonucleotide
ggugugagguuccaggauu

SEQ ID NO: 1640131 - RNA, 19 nt, Artificial Sequence
  Description of Artificial Sequence: Synthetic oligonucleotide
gaccuaggaggcuggugcu

SEQ ID NO: 1640132 - RNA, 19 nt, Artificial Sequence
  Description of Artificial Sequence: Synthetic oligonucleotide
ccacucguccagcagccag

SEQ ID NO: 1640133 - RNA, 19 nt, Artificial Sequence
  Description of Artificial Sequence: Synthetic oligonucleotide
cuaaacugguauuggccuu

SEQ ID NO: 1640134 - RNA, 19 nt, Artificial Sequence
  Description of Artificial Sequence: Synthetic oligonucleotide
cuggcucgcguuuauuccu

SEQ ID NO: 1640135 - RNA, 19 nt, Artificial Sequence
  Description of Artificial Sequence: Synthetic oligonucleotide
uggccgcagcccagucggg

SEQ ID NO: 1640136 - RNA, 19 nt, Artificial Sequence
  Description of Artificial Sequence: Synthetic oligonucleotide
gcucgcguuuauuccuuug

SEQ ID NO: 1640137 - RNA, 19 nt, Artificial Sequence
  Description of Artificial Sequence: Synthetic oligonucleotide
cauccucccgccccacguc

SEQ ID NO: 1640138 - RNA, 19 nt, Artificial Sequence
  Description of Artificial Sequence: Synthetic oligonucleotide
uacccucagccgccuggcu

SEQ ID NO: 1640139 - RNA, 19 nt, Artificial Sequence
  Description of Artificial Sequence: Synthetic oligonucleotide
cacccggaacuucugucga

SEQ ID NO: 1640140 - RNA, 19 nt, Artificial Sequence
  Description of Artificial Sequence: Synthetic oligonucleotide
ccaaugacguccuuagggu

SEQ ID NO: 1640141 - RNA, 19 nt, Artificial Sequence
  Description of Artificial Sequence: Synthetic oligonucleotide
gguggguuucauccaugga

SEQ ID NO: 1640142 - RNA, 19 nt, Artificial Sequence
  Description of Artificial Sequence: Synthetic oligonucleotide
cgaucaucccacucuggug

SEQ ID NO: 1640143 - RNA, 19 nt, Artificial Sequence
  Description of Artificial Sequence: Synthetic oligonucleotide
ggggucucucaacagugaa

SEQ ID NO: 1640144 - RNA, 19 nt, Artificial Sequence
  Description of Artificial Sequence: Synthetic oligonucleotide
gccguaaacggugagugcu

SEQ ID NO: 1640145 - RNA, 19 nt, Artificial Sequence
  Description of Artificial Sequence: Synthetic oligonucleotide
ccuugccguagccugggug

SEQ ID NO: 1640146 - RNA, 19 nt, Artificial Sequence
  Description of Artificial Sequence: Synthetic oligonucleotide
cugccacccggaacuucug

SEQ ID NO: 1640147 - RNA, 19 nt, Artificial Sequence
  Description of Artificial Sequence: Synthetic oligonucleotide
cccgguucuguuguucacc

SEQ ID NO: 1640148 - RNA, 19 nt, Artificial Sequence
  Description of Artificial Sequence: Synthetic oligonucleotide
ggcuagcaccagugcagcc

SEQ ID NO: 1640149 - RNA, 19 nt, Artificial Sequence
  Description of Artificial Sequence: Synthetic oligonucleotide
cggauuugcauauugucgu

SEQ ID NO: 1640150 - RNA, 19 nt, Artificial Sequence
  Description of Artificial Sequence: Synthetic oligonucleotide
gagacucguaggaaucgau

SEQ ID NO: 1640151 - RNA, 19 nt, Artificial Sequence
  Description of Artificial Sequence: Synthetic oligonucleotide
gccacccggaacuucuguc

SEQ ID NO: 1640152 - RNA, 19 nt, Artificial Sequence
  Description of Artificial Sequence: Synthetic oligonucleotide
cagcggcggaccacagaac

SEQ ID NO: 1640153 - RNA, 19 nt, Artificial Sequence
  Description of Artificial Sequence: Synthetic oligonucleotide
ggagacucguaggaaucga

SEQ ID NO: 1640154 - RNA, 19 nt, Artificial Sequence
  Description of Artificial Sequence: Synthetic oligonucleotide
cuugaacgaucaucccacu

SEQ ID NO: 1640155 - RNA, 19 nt, Artificial Sequence
  Description of Artificial Sequence: Synthetic oligonucleotide
cuaggaggcuggugcugga

SEQ ID NO: 1640156 - RNA, 19 nt, Artificial Sequence
  Description of Artificial Sequence: Synthetic oligonucleotide
cguccaaugucauucugaa

SEQ ID NO: 1640157 - RNA, 19 nt, Artificial Sequence
  Description of Artificial Sequence: Synthetic oligonucleotide
ggccgcagugcauaggggu

SEQ ID NO: 1640158 - RNA, 19 nt, Artificial Sequence
  Description of Artificial Sequence: Synthetic oligonucleotide
gcuaggagacucguaggaa

SEQ ID NO: 1640159 - RNA, 19 nt, Artificial Sequence
  Description of Artificial Sequence: Synthetic oligonucleotide
guuaagcguuccucaggau

SEQ ID NO: 1640160 - RNA, 19 nt, Artificial Sequence
  Description of Artificial Sequence: Synthetic oligonucleotide
guagccuggguggguuuca

SEQ ID NO: 1640161 - RNA, 19 nt, Artificial Sequence
  Description of Artificial Sequence: Synthetic oligonucleotide
gccuaacuggccgcagugc

SEQ ID NO: 1640162 - RNA, 19 nt, Artificial Sequence
  Description of Artificial Sequence: Synthetic oligonucleotide
cugcccgguucuguuguuc

SEQ ID NO: 1640163 - RNA, 19 nt, Artificial Sequence
  Description of Artificial Sequence: Synthetic oligonucleotide
gggucguacuucugguaaa

SEQ ID NO: 1640164 - RNA, 19 nt, Artificial Sequence
  Description of Artificial Sequence: Synthetic oligonucleotide
cucagacgcucagcgguca

SEQ ID NO: 1640165 - RNA, 19 nt, Artificial Sequence
  Description of Artificial Sequence: Synthetic oligonucleotide
acggugcuugaacgaucau

SEQ ID NO: 1640166 - RNA, 19 nt, Artificial Sequence
  Description of Artificial Sequence: Synthetic oligonucleotide
gguauuggccuuccaugau

SEQ ID NO: 1640167 - RNA, 19 nt, Artificial Sequence
  Description of Artificial Sequence: Synthetic oligonucleotide
cggugagugcuuaaugcca

SEQ ID NO: 1640168 - RNA, 19 nt, Artificial Sequence
  Description of Artificial Sequence: Synthetic oligonucleotide
cgucugugccagaauggug

SEQ ID NO: 1640169 - RNA, 19 nt, Artificial Sequence
  Description of Artificial Sequence: Synthetic oligonucleotide
cuaccuucacagcgcucaa

SEQ ID NO: 1640170 - RNA, 19 nt, Artificial Sequence
  Description of Artificial Sequence: Synthetic oligonucleotide
gcgaaggaugugcaucucu

SEQ ID NO: 1640171 - RNA, 19 nt, Artificial Sequence
  Description of Artificial Sequence: Synthetic oligonucleotide
guggccguaaacggugagu

SEQ ID NO: 1640172 - RNA, 19 nt, Artificial Sequence
  Description of Artificial Sequence: Synthetic oligonucleotide
cacagcggcggaccacaga

SEQ ID NO: 1640173 - RNA, 19 nt, Artificial Sequence
  Description of Artificial Sequence: Synthetic oligonucleotide
gguggccauaauagggaaa

SEQ ID NO: 1640174 - RNA, 19 nt, Artificial Sequence
  Description of Artificial Sequence: Synthetic oligonucleotide
cggugcuugaacgaucauc

SEQ ID NO: 1640175 - RNA, 19 nt, Artificial Sequence
  Description of Artificial Sequence: Synthetic oligonucleotide
gcguagcaucaggauuugg

SEQ ID NO: 1640176 - RNA, 19 nt, Artificial Sequence
  Description of Artificial Sequence: Synthetic oligonucleotide
gucgaggugugagguucca

SEQ ID NO: 1640177 - RNA, 19 nt, Artificial Sequence
  Description of Artificial Sequence: Synthetic oligonucleotide
acacagcggcggaccacag

SEQ ID NO: 1640178 - RNA, 19 nt, Artificial Sequence
  Description of Artificial Sequence: Synthetic oligonucleotide
cuuuccgcaucaggucaaa

SEQ ID NO: 1640179 - RNA, 19 nt, Artificial Sequence
  Description of Artificial Sequence: Synthetic oligonucleotide
gccgcagugcauagggguc

SEQ ID NO: 1640180 - RNA, 19 nt, Artificial Sequence
  Description of Artificial Sequence: Synthetic oligonucleotide
aggcgccuaacuggccgca

SEQ ID NO: 1640181 - RNA, 19 nt, Artificial Sequence
  Description of Artificial Sequence: Synthetic oligonucleotide
caucucucgcuguguggcu

SEQ ID NO: 1640182 - RNA, 19 nt, Artificial Sequence
  Description of Artificial Sequence: Synthetic oligonucleotide
ccacagaacucacuccucu

SEQ ID NO: 1640183 - RNA, 19 nt, Artificial Sequence
  Description of Artificial Sequence: Synthetic oligonucleotide
ccacacaacucucgaagcu

SEQ ID NO: 1640184 - RNA, 19 nt, Artificial Sequence
  Description of Artificial Sequence: Synthetic oligonucleotide
caaugcccauagagccgga

SEQ ID NO: 1640185 - RNA, 19 nt, Artificial Sequence
  Description of Artificial Sequence: Synthetic oligonucleotide
gccgcagcccagucgggca

SEQ ID NO: 1640186 - RNA, 19 nt, Artificial Sequence
  Description of Artificial Sequence: Synthetic oligonucleotide
cgccuaacuggccgcagug

SEQ ID NO: 1640187 - RNA, 19 nt, Artificial Sequence
  Description of Artificial Sequence: Synthetic oligonucleotide
gcccgguucuguuguucac

SEQ ID NO: 1640188 - RNA, 19 nt, Artificial Sequence
  Description of Artificial Sequence: Synthetic oligonucleotide
cucagccgccuggcucgcg

SEQ ID NO: 1640189 - RNA, 19 nt, Artificial Sequence
  Description of Artificial Sequence: Synthetic oligonucleotide
cgacuuccuugccguagcc

SEQ ID NO: 1640190 - RNA, 19 nt, Artificial Sequence
  Description of Artificial Sequence: Synthetic oligonucleotide
ccacucuggugagcuaaac

SEQ ID NO: 1640191 - RNA, 19 nt, Artificial Sequence
  Description of Artificial Sequence: Synthetic oligonucleotide
ccuuuccgcaucaggucaa

SEQ ID NO: 1640192 - RNA, 19 nt, Artificial Sequence
  Description of Artificial Sequence: Synthetic oligonucleotide
ccagaagcgugaacaagau

SEQ ID NO: 1640193 - RNA, 19 nt, Artificial Sequence
  Description of Artificial Sequence: Synthetic oligonucleotide
ggcgccuaacuggccgcag

SEQ ID NO: 1640194 - RNA, 19 nt, Artificial Sequence
  Description of Artificial Sequence: Synthetic oligonucleotide
ggcggaccacagaacucac

SEQ ID NO: 1640195 - RNA, 19 nt, Artificial Sequence
  Description of Artificial Sequence: Synthetic oligonucleotide
gcgucugugccagaauggu

SEQ ID NO: 1640196 - RNA, 19 nt, Artificial Sequence
  Description of Artificial Sequence: Synthetic oligonucleotide
ggcgaaggaugugcaucuc

SEQ ID NO: 1640197 - RNA, 19 nt, Artificial Sequence
  Description of Artificial Sequence: Synthetic oligonucleotide
gggucucucaacagugaau

SEQ ID NO: 1640198 - RNA, 19 nt, Artificial Sequence
  Description of Artificial Sequence: Synthetic oligonucleotide
cagaucuuugacggugcuu

SEQ ID NO: 1640199 - RNA, 19 nt, Artificial Sequence
  Description of Artificial Sequence: Synthetic oligonucleotide
gcggcggaccacagaacuc

SEQ ID NO: 1640200 - RNA, 19 nt, Artificial Sequence
  Description of Artificial Sequence: Synthetic oligonucleotide
gcgaccuggcgaaggaugu

SEQ ID NO: 1640201 - RNA, 19 nt, Artificial Sequence
  Description of Artificial Sequence: Synthetic oligonucleotide
cggcggaccacagaacuca

SEQ ID NO: 1640202 - RNA, 19 nt, Artificial Sequence
  Description of Artificial Sequence: Synthetic oligonucleotide
ggucgacuuccuugccgua

SEQ ID NO: 1640203 - RNA, 19 nt, Artificial Sequence
  Description of Artificial Sequence: Synthetic oligonucleotide
ugacguccuuagggucgua

SEQ ID NO: 1640204 - RNA, 19 nt, Artificial Sequence
  Description of Artificial Sequence: Synthetic oligonucleotide
ccgccccacguccaauguc

SEQ ID NO: 1640205 - RNA, 19 nt, Artificial Sequence
  Description of Artificial Sequence: Synthetic oligonucleotide
gcaucaggauuuggcgucu

SEQ ID NO: 1640206 - RNA, 19 nt, Artificial Sequence
  Description of Artificial Sequence: Synthetic oligonucleotide
cguagccuggguggguuuc

SEQ ID NO: 1640207 - RNA, 19 nt, Artificial Sequence
  Description of Artificial Sequence: Synthetic oligonucleotide
gcuuuucgccugguuccaa

SEQ ID NO: 1640208 - RNA, 19 nt, Artificial Sequence
  Description of Artificial Sequence: Synthetic oligonucleotide
gcgccuaacuggccgcagu

SEQ ID NO: 1640209 - RNA, 19 nt, Artificial Sequence
  Description of Artificial Sequence: Synthetic oligonucleotide
cguaaacggugagugcuua

SEQ ID NO: 1640210 - RNA, 19 nt, Artificial Sequence
  Description of Artificial Sequence: Synthetic oligonucleotide
ggccagcgaccuggcgaag

SEQ ID NO: 1640211 - RNA, 19 nt, Artificial Sequence
  Description of Artificial Sequence: Synthetic oligonucleotide
ccguaaacggugagugcuu

SEQ ID NO: 1640212 - RNA, 19 nt, Artificial Sequence
  Description of Artificial Sequence: Synthetic oligonucleotide
cguccuuagggucguacuu

SEQ ID NO: 1640213 - RNA, 19 nt, Artificial Sequence
  Description of Artificial Sequence: Synthetic oligonucleotide
gccacucguccagcagcca

SEQ ID NO: 1640214 - RNA, 19 nt, Artificial Sequence
  Description of Artificial Sequence: Synthetic oligonucleotide
gcggaccacagaacucacu

SEQ ID NO: 1640215 - RNA, 19 nt, Artificial Sequence
  Description of Artificial Sequence: Synthetic oligonucleotide
cgcagugcauaggggucuc

SEQ ID NO: 1640216 - RNA, 19 nt, Artificial Sequence
  Description of Artificial Sequence: Synthetic oligonucleotide
ggcucgcguuuauuccuuu

SEQ ID NO: 1640217 - RNA, 19 nt, Artificial Sequence
  Description of Artificial Sequence: Synthetic oligonucleotide
cagcgaccuggcgaaggau

SEQ ID NO: 1640218 - RNA, 19 nt, Artificial Sequence
  Description of Artificial Sequence: Synthetic oligonucleotide
ccgcagugcauaggggucu

SEQ ID NO: 1640219 - RNA, 19 nt, Artificial Sequence
  Description of Artificial Sequence: Synthetic oligonucleotide
gccgccuggcucgcguuua

SEQ ID NO: 1640220 - RNA, 19 nt, Artificial Sequence
  Description of Artificial Sequence: Synthetic oligonucleotide
gccguagccuggguggguu

SEQ ID NO: 1640221 - RNA, 19 nt, Artificial Sequence
  Description of Artificial Sequence: Synthetic oligonucleotide
cagccgccuggcucgcguu

SEQ ID NO: 1640222 - RNA, 19 nt, Artificial Sequence
  Description of Artificial Sequence: Synthetic oligonucleotide
cccgccccacguccaaugu

SEQ ID NO: 1640223 - RNA, 19 nt, Artificial Sequence
  Description of Artificial Sequence: Synthetic oligonucleotide
cccagaggucgacuuccuu

SEQ ID NO: 1640224 - RNA, 19 nt, Artificial Sequence
  Description of Artificial Sequence: Synthetic oligonucleotide
gccccacguccaaugucau

SEQ ID NO: 1640225 - RNA, 19 nt, Artificial Sequence
  Description of Artificial Sequence: Synthetic oligonucleotide
ccccacguccaaugucauu

SEQ ID NO: 1640226 - RNA, 19 nt, Artificial Sequence
  Description of Artificial Sequence: Synthetic oligonucleotide
ccguagccuggguggguuu

SEQ ID NO: 1640227 - RNA, 19 nt, Artificial Sequence
  Description of Artificial Sequence: Synthetic oligonucleotide
ccgccuggcucgcguuuau

SEQ ID NO: 1640228 - RNA, 19 nt, Artificial Sequence
  Description of Artificial Sequence: Synthetic oligonucleotide
ucagcauugccaaagaugg

SEQ ID NO: 1640229 - RNA, 19 nt, Artificial Sequence
  Description of Artificial Sequence: Synthetic oligonucleotide
gaaaucaccaguuagcacc

SEQ ID NO: 1640230 - RNA, 19 nt, Artificial Sequence
  Description of Artificial Sequence: Synthetic oligonucleotide
cuaaacgccacuuugaaag

SEQ ID NO: 1640231 - RNA, 19 nt, Artificial Sequence
  Description of Artificial Sequence: Synthetic oligonucleotide
aaugguaguuuccaguccg

SEQ ID NO: 1640232 - RNA, 19 nt, Artificial Sequence
  Description of Artificial Sequence: Synthetic oligonucleotide
aaaaugaguagaaagaacu

SEQ ID NO: 1640233 - RNA, 19 nt, Artificial Sequence
  Description of Artificial Sequence: Synthetic oligonucleotide
aaugaguagaaagaacuac

SEQ ID NO: 1640234 - RNA, 19 nt, Artificial Sequence
  Description of Artificial Sequence: Synthetic oligonucleotide
acugguauguaacagcagg

SEQ ID NO: 1640235 - RNA, 19 nt, Artificial Sequence
  Description of Artificial Sequence: Synthetic oligonucleotide
uggaaaaugaguagaaaga

SEQ ID NO: 1640236 - RNA, 19 nt, Artificial Sequence
  Description of Artificial Sequence: Synthetic oligonucleotide
uuuagccaagauaagcagg

SEQ ID NO: 1640237 - RNA, 19 nt, Artificial Sequence
  Description of Artificial Sequence: Synthetic oligonucleotide
gaaaagugagcccuaauug

SEQ ID NO: 1640238 - RNA, 19 nt, Artificial Sequence
  Description of Artificial Sequence: Synthetic oligonucleotide
ucuuuagccaagauaagca

SEQ ID NO: 1640239 - RNA, 19 nt, Artificial Sequence
  Description of Artificial Sequence: Synthetic oligonucleotide
uguccaaaagcccugaagu

SEQ ID NO: 1640240 - RNA, 19 nt, Artificial Sequence
  Description of Artificial Sequence: Synthetic oligonucleotide
ugguauuccacucacuuug

SEQ ID NO: 1640241 - RNA, 19 nt, Artificial Sequence
  Description of Artificial Sequence: Synthetic oligonucleotide
aaagcugacagagacuuuc

SEQ ID NO: 1640242 - RNA, 19 nt, Artificial Sequence
  Description of Artificial Sequence: Synthetic oligonucleotide
agccagacaaaauauagag

SEQ ID NO: 1640243 - RNA, 19 nt, Artificial Sequence
  Description of Artificial Sequence: Synthetic oligonucleotide
uuagccaagauaagcaggc

SEQ ID NO: 1640244 - RNA, 19 nt, Artificial Sequence
  Description of Artificial Sequence: Synthetic oligonucleotide
aaaaguggcuucccgauga

SEQ ID NO: 1640245 - RNA, 19 nt, Artificial Sequence
  Description of Artificial Sequence: Synthetic oligonucleotide
ugcauugguacaagaaccg

SEQ ID NO: 1640246 - RNA, 19 nt, Artificial Sequence
  Description of Artificial Sequence: Synthetic oligonucleotide
gaaacaccuggcuugacag

SEQ ID NO: 1640247 - RNA, 19 nt, Artificial Sequence
  Description of Artificial Sequence: Synthetic oligonucleotide
uugacagucagguuggucu

SEQ ID NO: 1640248 - RNA, 19 nt, Artificial Sequence
  Description of Artificial Sequence: Synthetic oligonucleotide
ucuaucucauagaugaccu

SEQ ID NO: 1640249 - RNA, 19 nt, Artificial Sequence
  Description of Artificial Sequence: Synthetic oligonucleotide
uugucaaagauauuucugu

SEQ ID NO: 1640250 - RNA, 19 nt, Artificial Sequence
  Description of Artificial Sequence: Synthetic oligonucleotide
auuacccucgcucugcaac

SEQ ID NO: 1640251 - RNA, 19 nt, Artificial Sequence
  Description of Artificial Sequence: Synthetic oligonucleotide
ucugcuaaacgccacuuug

SEQ ID NO: 1640252 - RNA, 19 nt, Artificial Sequence
  Description of Artificial Sequence: Synthetic oligonucleotide
uagguugaucccuuggugg

SEQ ID NO: 1640253 - RNA, 19 nt, Artificial Sequence
  Description of Artificial Sequence: Synthetic oligonucleotide
ucccauagggaaaagugag

SEQ ID NO: 1640254 - RNA, 19 nt, Artificial Sequence
  Description of Artificial Sequence: Synthetic oligonucleotide
aaguguuacaggaaccugg

SEQ ID NO: 1640255 - RNA, 19 nt, Artificial Sequence
  Description of Artificial Sequence: Synthetic oligonucleotide
auauagagccagcaguuuc

SEQ ID NO: 1640256 - RNA, 19 nt, Artificial Sequence
  Description of Artificial Sequence: Synthetic oligonucleotide
uauagagccagcaguuucc

SEQ ID NO: 1640257 - RNA, 19 nt, Artificial Sequence
  Description of Artificial Sequence: Synthetic oligonucleotide
caaguaggaagacacacag

SEQ ID NO: 1640258 - RNA, 19 nt, Artificial Sequence
  Description of Artificial Sequence: Synthetic oligonucleotide
uauaugugcccacaacacc

SEQ ID NO: 1640259 - RNA, 19 nt, Artificial Sequence
  Description of Artificial Sequence: Synthetic oligonucleotide
cugcauugguacaagaacc

SEQ ID NO: 1640260 - RNA, 19 nt, Artificial Sequence
  Description of Artificial Sequence: Synthetic oligonucleotide
aaagaacuacuuccuaaca

SEQ ID NO: 1640261 - RNA, 19 nt, Artificial Sequence
  Description of Artificial Sequence: Synthetic oligonucleotide
cauugguacaagaaccggg

SEQ ID NO: 1640262 - RNA, 19 nt, Artificial Sequence
  Description of Artificial Sequence: Synthetic oligonucleotide
uuaacagccgaaacacugc

SEQ ID NO: 1640263 - RNA, 19 nt, Artificial Sequence
  Description of Artificial Sequence: Synthetic oligonucleotide
gacggaaaucaccaguuag

SEQ ID NO: 1640264 - RNA, 19 nt, Artificial Sequence
  Description of Artificial Sequence: Synthetic oligonucleotide
ugguaaaucuccuucugca

SEQ ID NO: 1640265 - RNA, 19 nt, Artificial Sequence
  Description of Artificial Sequence: Synthetic oligonucleotide
ugccacgugagcuuguggg

SEQ ID NO: 1640266 - RNA, 19 nt, Artificial Sequence
  Description of Artificial Sequence: Synthetic oligonucleotide
agguugaucccuugguggc

SEQ ID NO: 1640267 - RNA, 19 nt, Artificial Sequence
  Description of Artificial Sequence: Synthetic oligonucleotide
aauugucagcaguagugca

SEQ ID NO: 1640268 - RNA, 19 nt, Artificial Sequence
  Description of Artificial Sequence: Synthetic oligonucleotide
cuuuagccaagauaagcag

SEQ ID NO: 1640269 - RNA, 19 nt, Artificial Sequence
  Description of Artificial Sequence: Synthetic oligonucleotide
ucgagugacggaaaucacc

SEQ ID NO: 1640270 - RNA, 19 nt, Artificial Sequence
  Description of Artificial Sequence: Synthetic oligonucleotide
ucuuaacagagcacauucc

SEQ ID NO: 1640271 - RNA, 19 nt, Artificial Sequence
  Description of Artificial Sequence: Synthetic oligonucleotide
uauguaacagcaggaagug

SEQ ID NO: 1640272 - RNA, 19 nt, Artificial Sequence
  Description of Artificial Sequence: Synthetic oligonucleotide
agaaagaacuacuuccuaa

SEQ ID NO: 1640273 - RNA, 19 nt, Artificial Sequence
  Description of Artificial Sequence: Synthetic oligonucleotide
guccguucuagguugaucc

SEQ ID NO: 1640274 - RNA, 19 nt, Artificial Sequence
  Description of Artificial Sequence: Synthetic oligonucleotide
auugccaaagauggcaacg

SEQ ID NO: 1640275 - RNA, 19 nt, Artificial Sequence
  Description of Artificial Sequence: Synthetic oligonucleotide
uucacucugggugacauca

SEQ ID NO: 1640276 - RNA, 19 nt, Artificial Sequence
  Description of Artificial Sequence: Synthetic oligonucleotide
auuccacucacuuuggaaa

SEQ ID NO: 1640277 - RNA, 19 nt, Artificial Sequence
  Description of Artificial Sequence: Synthetic oligonucleotide
cuguauucacuccaaacug

SEQ ID NO: 1640278 - RNA, 19 nt, Artificial Sequence
  Description of Artificial Sequence: Synthetic oligonucleotide
caguuagcaccaaaagugg

SEQ ID NO: 1640279 - RNA, 19 nt, Artificial Sequence
  Description of Artificial Sequence: Synthetic oligonucleotide
acggaaaucaccaguuagc

SEQ ID NO: 1640280 - RNA, 19 nt, Artificial Sequence
  Description of Artificial Sequence: Synthetic oligonucleotide
caugcgcuguccaaaagcc

SEQ ID NO: 1640281 - RNA, 19 nt, Artificial Sequence
  Description of Artificial Sequence: Synthetic oligonucleotide
accucuuuagccaagauaa

SEQ ID NO: 1640282 - RNA, 19 nt, Artificial Sequence
  Description of Artificial Sequence: Synthetic oligonucleotide
aggaggacggguuugugag

SEQ ID NO: 1640283 - RNA, 19 nt, Artificial Sequence
  Description of Artificial Sequence: Synthetic oligonucleotide
uugcuguaaggaaacaccu

SEQ ID NO: 1640284 - RNA, 19 nt, Artificial Sequence
  Description of Artificial Sequence: Synthetic oligonucleotide
uaaacgccacuuugaaagg

SEQ ID NO: 1640285 - RNA, 19 nt, Artificial Sequence
  Description of Artificial Sequence: Synthetic oligonucleotide
gaccugggaaacuauauuc

SEQ ID NO: 1640286 - RNA, 19 nt, Artificial Sequence
  Description of Artificial Sequence: Synthetic oligonucleotide
ugcaaauggcugcagcuca

SEQ ID NO: 1640287 - RNA, 19 nt, Artificial Sequence
  Description of Artificial Sequence: Synthetic oligonucleotide
gauaagcaggcugucuugg

SEQ ID NO: 1640288 - RNA, 19 nt, Artificial Sequence
  Description of Artificial Sequence: Synthetic oligonucleotide
auagggaaaagugagcccu

SEQ ID NO: 1640289 - RNA, 19 nt, Artificial Sequence
  Description of Artificial Sequence: Synthetic oligonucleotide
aagaaaucaaaugguaguu

SEQ ID NO: 1640290 - RNA, 19 nt, Artificial Sequence
  Description of Artificial Sequence: Synthetic oligonucleotide
ugcaacagggucaucgagu

SEQ ID NO: 1640291 - RNA, 19 nt, Artificial Sequence
  Description of Artificial Sequence: Synthetic oligonucleotide
cucuuuagccaagauaagc

SEQ ID NO: 1640292 - RNA, 19 nt, Artificial Sequence
  Description of Artificial Sequence: Synthetic oligonucleotide
gaauugucagcaguagugc

SEQ ID NO: 1640293 - RNA, 19 nt, Artificial Sequence
  Description of Artificial Sequence: Synthetic oligonucleotide
aaauauagagccagcaguu

SEQ ID NO: 1640294 - RNA, 19 nt, Artificial Sequence
  Description of Artificial Sequence: Synthetic oligonucleotide
uugagaacuccaaguagga

SEQ ID NO: 1640295 - RNA, 19 nt, Artificial Sequence
  Description of Artificial Sequence: Synthetic oligonucleotide
gaaaggacugguggggucg

SEQ ID NO: 1640296 - RNA, 19 nt, Artificial Sequence
  Description of Artificial Sequence: Synthetic oligonucleotide
ugcgcuguccaaaagcccu

SEQ ID NO: 1640297 - RNA, 19 nt, Artificial Sequence
  Description of Artificial Sequence: Synthetic oligonucleotide
agaaccggguuccugccac

SEQ ID NO: 1640298 - RNA, 19 nt, Artificial Sequence
  Description of Artificial Sequence: Synthetic oligonucleotide
uccaaaagcccugaaguga

SEQ ID NO: 1640299 - RNA, 19 nt, Artificial Sequence
  Description of Artificial Sequence: Synthetic oligonucleotide
uguacagaccugcauuggu

SEQ ID NO: 1640300 - RNA, 19 nt, Artificial Sequence
  Description of Artificial Sequence: Synthetic oligonucleotide
ugguacaagaaccggguuc

SEQ ID NO: 1640301 - RNA, 19 nt, Artificial Sequence
  Description of Artificial Sequence: Synthetic oligonucleotide
uccaguccguucuagguug

SEQ ID NO: 1640302 - RNA, 19 nt, Artificial Sequence
  Description of Artificial Sequence: Synthetic oligonucleotide
cuuaacagagcacauucca

SEQ ID NO: 1640303 - RNA, 19 nt, Artificial Sequence
  Description of Artificial Sequence: Synthetic oligonucleotide
auuccauuacccucgcucu

SEQ ID NO: 1640304 - RNA, 19 nt, Artificial Sequence
  Description of Artificial Sequence: Synthetic oligonucleotide
cuggaguccuauaugugcc

SEQ ID NO: 1640305 - RNA, 19 nt, Artificial Sequence
  Description of Artificial Sequence: Synthetic oligonucleotide
uauuccacucacuuuggaa

SEQ ID NO: 1640306 - RNA, 19 nt, Artificial Sequence
  Description of Artificial Sequence: Synthetic oligonucleotide
aggauucccacuucuagga

SEQ ID NO: 1640307 - RNA, 19 nt, Artificial Sequence
  Description of Artificial Sequence: Synthetic oligonucleotide
ugugaguugagaacuccaa

SEQ ID NO: 1640308 - RNA, 19 nt, Artificial Sequence
  Description of Artificial Sequence: Synthetic oligonucleotide
ugcaguuaacagccgaaac

SEQ ID NO: 1640309 - RNA, 19 nt, Artificial Sequence
  Description of Artificial Sequence: Synthetic oligonucleotide
agccgaaacacugcagucc

SEQ ID NO: 1640310 - RNA, 19 nt, Artificial Sequence
  Description of Artificial Sequence: Synthetic oligonucleotide
agagcacauuccauuaccc

SEQ ID NO: 1640311 - RNA, 19 nt, Artificial Sequence
  Description of Artificial Sequence: Synthetic oligonucleotide
caggaagugcaguuaacag

SEQ ID NO: 1640312 - RNA, 19 nt, Artificial Sequence
  Description of Artificial Sequence: Synthetic oligonucleotide
gaucccagaggucccauug

SEQ ID NO: 1640313 - RNA, 19 nt, Artificial Sequence
  Description of Artificial Sequence: Synthetic oligonucleotide
uggacuggaguccuauaug

SEQ ID NO: 1640314 - RNA, 19 nt, Artificial Sequence
  Description of Artificial Sequence: Synthetic oligonucleotide
augaggaccucuuuagcca

SEQ ID NO: 1640315 - RNA, 19 nt, Artificial Sequence
  Description of Artificial Sequence: Synthetic oligonucleotide
aauagaggaggacggguuu

SEQ ID NO: 1640316 - RNA, 19 nt, Artificial Sequence
  Description of Artificial Sequence: Synthetic oligonucleotide
gaagagaugguauuccacu

SEQ ID NO: 1640317 - RNA, 19 nt, Artificial Sequence
  Description of Artificial Sequence: Synthetic oligonucleotide
agcccuucugaguucacuc

SEQ ID NO: 1640318 - RNA, 19 nt, Artificial Sequence
  Description of Artificial Sequence: Synthetic oligonucleotide
uaacagccgaaacacugca

SEQ ID NO: 1640319 - RNA, 19 nt, Artificial Sequence
  Description of Artificial Sequence: Synthetic oligonucleotide
uuggacuggaguccuauau

SEQ ID NO: 1640320 - RNA, 19 nt, Artificial Sequence
  Description of Artificial Sequence: Synthetic oligonucleotide
cauagggaaaagugagccc

SEQ ID NO: 1640321 - RNA, 19 nt, Artificial Sequence
  Description of Artificial Sequence: Synthetic oligonucleotide
guuacaggaaccuggagcu

SEQ ID NO: 1640322 - RNA, 19 nt, Artificial Sequence
  Description of Artificial Sequence: Synthetic oligonucleotide
gggauguccaugaagagcc

SEQ ID NO: 1640323 - RNA, 19 nt, Artificial Sequence
  Description of Artificial Sequence: Synthetic oligonucleotide
agucuugcuguaaggaaac

SEQ ID NO: 1640324 - RNA, 19 nt, Artificial Sequence
  Description of Artificial Sequence: Synthetic oligonucleotide
ugggauguccaugaagagc

SEQ ID NO: 1640325 - RNA, 19 nt, Artificial Sequence
  Description of Artificial Sequence: Synthetic oligonucleotide
ugcuaaacgccacuuugaa

SEQ ID NO: 1640326 - RNA, 19 nt, Artificial Sequence
  Description of Artificial Sequence: Synthetic oligonucleotide
gugaguugagaacuccaag

SEQ ID NO: 1640327 - RNA, 19 nt, Artificial Sequence
  Description of Artificial Sequence: Synthetic oligonucleotide
uuggcaaaagagccagaca

SEQ ID NO: 1640328 - RNA, 19 nt, Artificial Sequence
  Description of Artificial Sequence: Synthetic oligonucleotide
cuugaauugucagcaguag

SEQ ID NO: 1640329 - RNA, 19 nt, Artificial Sequence
  Description of Artificial Sequence: Synthetic oligonucleotide
caagaguugucaaagauau

SEQ ID NO: 1640330 - RNA, 19 nt, Artificial Sequence
  Description of Artificial Sequence: Synthetic oligonucleotide
aagucuugcuguaaggaaa

SEQ ID NO: 1640331 - RNA, 19 nt, Artificial Sequence
  Description of Artificial Sequence: Synthetic oligonucleotide
gacaauagaggaggacggg

SEQ ID NO: 1640332 - RNA, 19 nt, Artificial Sequence
  Description of Artificial Sequence: Synthetic oligonucleotide
cuagguugaucccuuggug

SEQ ID NO: 1640333 - RNA, 19 nt, Artificial Sequence
  Description of Artificial Sequence: Synthetic oligonucleotide
gacaucaggcgcaugugcc

SEQ ID NO: 1640334 - RNA, 19 nt, Artificial Sequence
  Description of Artificial Sequence: Synthetic oligonucleotide
aaaugaguagaaagaacua

SEQ ID NO: 1640335 - RNA, 19 nt, Artificial Sequence
  Description of Artificial Sequence: Synthetic oligonucleotide
gagcccuucugaaugcugg

SEQ ID NO: 1640336 - RNA, 19 nt, Artificial Sequence
  Description of Artificial Sequence: Synthetic oligonucleotide
uugagaagagaugguauuc

SEQ ID NO: 1640337 - RNA, 19 nt, Artificial Sequence
  Description of Artificial Sequence: Synthetic oligonucleotide
gaaacacugcaguccuugc

SEQ ID NO: 1640338 - RNA, 19 nt, Artificial Sequence
  Description of Artificial Sequence: Synthetic oligonucleotide
gucuuggaauuucccauag

SEQ ID NO: 1640339 - RNA, 19 nt, Artificial Sequence
  Description of Artificial Sequence: Synthetic oligonucleotide
gguacaagaaccggguucc

SEQ ID NO: 1640340 - RNA, 19 nt, Artificial Sequence
  Description of Artificial Sequence: Synthetic oligonucleotide
cauagaugaccugggaaac

SEQ ID NO: 1640341 - RNA, 19 nt, Artificial Sequence
  Description of Artificial Sequence: Synthetic oligonucleotide
gugaaugaugaagucuugc

SEQ ID NO: 1640342 - RNA, 19 nt, Artificial Sequence
  Description of Artificial Sequence: Synthetic oligonucleotide
caucgagugacggaaauca

SEQ ID NO: 1640343 - RNA, 19 nt, Artificial Sequence
  Description of Artificial Sequence: Synthetic oligonucleotide
aaacaccuggcuugacagu

SEQ ID NO: 1640344 - RNA, 19 nt, Artificial Sequence
  Description of Artificial Sequence: Synthetic oligonucleotide
ggcgcaugugccuaugagg

SEQ ID NO: 1640345 - RNA, 19 nt, Artificial Sequence
  Description of Artificial Sequence: Synthetic oligonucleotide
guuggucugucuaaagcug

SEQ ID NO: 1640346 - RNA, 19 nt, Artificial Sequence
  Description of Artificial Sequence: Synthetic oligonucleotide
gaggacggguuugugaggc

SEQ ID NO: 1640347 - RNA, 19 nt, Artificial Sequence
  Description of Artificial Sequence: Synthetic oligonucleotide
ugagguagccaggauuccc

SEQ ID NO: 1640348 - RNA, 19 nt, Artificial Sequence
  Description of Artificial Sequence: Synthetic oligonucleotide
uuccacucacuuuggaaaa

SEQ ID NO: 1640349 - RNA, 19 nt, Artificial Sequence
  Description of Artificial Sequence: Synthetic oligonucleotide
aauauagagccagcaguuu

SEQ ID NO: 1640350 - RNA, 19 nt, Artificial Sequence
  Description of Artificial Sequence: Synthetic oligonucleotide
gaagaucagucauaccucu

SEQ ID NO: 1640351 - RNA, 19 nt, Artificial Sequence
  Description of Artificial Sequence: Synthetic oligonucleotide
uggcuucccgaugagguag

SEQ ID NO: 1640352 - RNA, 19 nt, Artificial Sequence
  Description of Artificial Sequence: Synthetic oligonucleotide
aaacgccacuuugaaagga

SEQ ID NO: 1640353 - RNA, 19 nt, Artificial Sequence
  Description of Artificial Sequence: Synthetic oligonucleotide
ucgaccugcuauugagaag

SEQ ID NO: 1640354 - RNA, 19 nt, Artificial Sequence
  Description of Artificial Sequence: Synthetic oligonucleotide
uccauuacccucgcucugc

SEQ ID NO: 1640355 - RNA, 19 nt, Artificial Sequence
  Description of Artificial Sequence: Synthetic oligonucleotide
ugucuuggaauuucccaua

SEQ ID NO: 1640356 - RNA, 19 nt, Artificial Sequence
  Description of Artificial Sequence: Synthetic oligonucleotide
uggaguccuauaugugccc

SEQ ID NO: 1640357 - RNA, 19 nt, Artificial Sequence
  Description of Artificial Sequence: Synthetic oligonucleotide
uuccauuacccucgcucug

SEQ ID NO: 1640358 - RNA, 19 nt, Artificial Sequence
  Description of Artificial Sequence: Synthetic oligonucleotide
cagcucaccucuuuggguc

SEQ ID NO: 1640359 - RNA, 19 nt, Artificial Sequence
  Description of Artificial Sequence: Synthetic oligonucleotide
ccauagggaaaagugagcc

SEQ ID NO: 1640360 - RNA, 19 nt, Artificial Sequence
  Description of Artificial Sequence: Synthetic oligonucleotide
aggauccugcuccacccuc

SEQ ID NO: 1640361 - RNA, 19 nt, Artificial Sequence
  Description of Artificial Sequence: Synthetic oligonucleotide
gaccaguaggaaaagcauc

SEQ ID NO: 1640362 - RNA, 19 nt, Artificial Sequence
  Description of Artificial Sequence: Synthetic oligonucleotide
caagaaccggguuccugcc

SEQ ID NO: 1640363 - RNA, 19 nt, Artificial Sequence
  Description of Artificial Sequence: Synthetic oligonucleotide
uccuaacacaggucugucu

SEQ ID NO: 1640364 - RNA, 19 nt, Artificial Sequence
  Description of Artificial Sequence: Synthetic oligonucleotide
ucucuaucucauagaugac

SEQ ID NO: 1640365 - RNA, 19 nt, Artificial Sequence
  Description of Artificial Sequence: Synthetic oligonucleotide
uccguucuagguugauccc

SEQ ID NO: 1640366 - RNA, 19 nt, Artificial Sequence
  Description of Artificial Sequence: Synthetic oligonucleotide
uucugaguucacucugggu

SEQ ID NO: 1640367 - RNA, 19 nt, Artificial Sequence
  Description of Artificial Sequence: Synthetic oligonucleotide
uccaugcgcuguccaaaag

SEQ ID NO: 1640368 - RNA, 19 nt, Artificial Sequence
  Description of Artificial Sequence: Synthetic oligonucleotide
gaccucuuuagccaagaua

SEQ ID NO: 1640369 - RNA, 19 nt, Artificial Sequence
  Description of Artificial Sequence: Synthetic oligonucleotide
uuccaguccguucuagguu

SEQ ID NO: 1640370 - RNA, 19 nt, Artificial Sequence
  Description of Artificial Sequence: Synthetic oligonucleotide
uggucugucuaaagcugac

SEQ ID NO: 1640371 - RNA, 19 nt, Artificial Sequence
  Description of Artificial Sequence: Synthetic oligonucleotide
aacgugcuccgguuuggga

SEQ ID NO: 1640372 - RNA, 19 nt, Artificial Sequence
  Description of Artificial Sequence: Synthetic oligonucleotide
ucccauuggucucuaucuc

SEQ ID NO: 1640373 - RNA, 19 nt, Artificial Sequence
  Description of Artificial Sequence: Synthetic oligonucleotide
uugugaggcaaguguuaca

SEQ ID NO: 1640374 - RNA, 19 nt, Artificial Sequence
  Description of Artificial Sequence: Synthetic oligonucleotide
aggacugguggggucgacc

SEQ ID NO: 1640375 - RNA, 19 nt, Artificial Sequence
  Description of Artificial Sequence: Synthetic oligonucleotide
caaaaguggcuucccgaug

SEQ ID NO: 1640376 - RNA, 19 nt, Artificial Sequence
  Description of Artificial Sequence: Synthetic oligonucleotide
aacagccgaaacacugcag

SEQ ID NO: 1640377 - RNA, 19 nt, Artificial Sequence
  Description of Artificial Sequence: Synthetic oligonucleotide
aggcgcaugugccuaugag

SEQ ID NO: 1640378 - RNA, 19 nt, Artificial Sequence
  Description of Artificial Sequence: Synthetic oligonucleotide
acgugcuccgguuugggau

SEQ ID NO: 1640379 - RNA, 19 nt, Artificial Sequence
  Description of Artificial Sequence: Synthetic oligonucleotide
gugaggcaaguguuacagg

SEQ ID NO: 1640380 - RNA, 19 nt, Artificial Sequence
  Description of Artificial Sequence: Synthetic oligonucleotide
auaagcaggcugucuugga

SEQ ID NO: 1640381 - RNA, 19 nt, Artificial Sequence
  Description of Artificial Sequence: Synthetic oligonucleotide
agucagguuggucugucua

SEQ ID NO: 1640382 - RNA, 19 nt, Artificial Sequence
  Description of Artificial Sequence: Synthetic oligonucleotide
gagccagacaaaauauaga

SEQ ID NO: 1640383 - RNA, 19 nt, Artificial Sequence
  Description of Artificial Sequence: Synthetic oligonucleotide
aguccguucuagguugauc

SEQ ID NO: 1640384 - RNA, 19 nt, Artificial Sequence
  Description of Artificial Sequence: Synthetic oligonucleotide
ccuauaugugcccacaaca

SEQ ID NO: 1640385 - RNA, 19 nt, Artificial Sequence
  Description of Artificial Sequence: Synthetic oligonucleotide
auagaggaggacggguuug

SEQ ID NO: 1640386 - RNA, 19 nt, Artificial Sequence
  Description of Artificial Sequence: Synthetic oligonucleotide
ugacggaaaucaccaguua

SEQ ID NO: 1640387 - RNA, 19 nt, Artificial Sequence
  Description of Artificial Sequence: Synthetic oligonucleotide
cuacuuccuaacacagguc

SEQ ID NO: 1640388 - RNA, 19 nt, Artificial Sequence
  Description of Artificial Sequence: Synthetic oligonucleotide
gucgaccugcuauugagaa

SEQ ID NO: 1640389 - RNA, 19 nt, Artificial Sequence
  Description of Artificial Sequence: Synthetic oligonucleotide
aacgccacuuugaaaggaa

SEQ ID NO: 1640390 - RNA, 19 nt, Artificial Sequence
  Description of Artificial Sequence: Synthetic oligonucleotide
gguaguuuccaguccguuc

SEQ ID NO: 1640391 - RNA, 19 nt, Artificial Sequence
  Description of Artificial Sequence: Synthetic oligonucleotide
aucgagugacggaaaucac

SEQ ID NO: 1640392 - RNA, 19 nt, Artificial Sequence
  Description of Artificial Sequence: Synthetic oligonucleotide
caaguguuacaggaaccug

SEQ ID NO: 1640393 - RNA, 19 nt, Artificial Sequence
  Description of Artificial Sequence: Synthetic oligonucleotide
ccuaauuguucuuucuuca

SEQ ID NO: 1640394 - RNA, 19 nt, Artificial Sequence
  Description of Artificial Sequence: Synthetic oligonucleotide
ugagcccuaauuguucuuu

SEQ ID NO: 1640395 - RNA, 19 nt, Artificial Sequence
  Description of Artificial Sequence: Synthetic oligonucleotide
cugcaacagggucaucgag

SEQ ID NO: 1640396 - RNA, 19 nt, Artificial Sequence
  Description of Artificial Sequence: Synthetic oligonucleotide
gucccauuggucucuaucu

SEQ ID NO: 1640397 - RNA, 19 nt, Artificial Sequence
  Description of Artificial Sequence: Synthetic oligonucleotide
aucaccaguuagcaccaaa

SEQ ID NO: 1640398 - RNA, 19 nt, Artificial Sequence
  Description of Artificial Sequence: Synthetic oligonucleotide
ucaucgagugacggaaauc

SEQ ID NO: 1640399 - RNA, 19 nt, Artificial Sequence
  Description of Artificial Sequence: Synthetic oligonucleotide
gcaugugccuaugaggacc

SEQ ID NO: 1640400 - RNA, 19 nt, Artificial Sequence
  Description of Artificial Sequence: Synthetic oligonucleotide
gaaccggguuccugccacg

SEQ ID NO: 1640401 - RNA, 19 nt, Artificial Sequence
  Description of Artificial Sequence: Synthetic oligonucleotide
guggguuggacuggagucc

SEQ ID NO: 1640402 - RNA, 19 nt, Artificial Sequence
  Description of Artificial Sequence: Synthetic oligonucleotide
agggucaucgagugacgga

SEQ ID NO: 1640403 - RNA, 19 nt, Artificial Sequence
  Description of Artificial Sequence: Synthetic oligonucleotide
cagggaaacugguauguaa

SEQ ID NO: 1640404 - RNA, 19 nt, Artificial Sequence
  Description of Artificial Sequence: Synthetic oligonucleotide
uugguacaagaaccggguu

SEQ ID NO: 1640405 - RNA, 19 nt, Artificial Sequence
  Description of Artificial Sequence: Synthetic oligonucleotide
agcucacaagaguugucaa

SEQ ID NO: 1640406 - RNA, 19 nt, Artificial Sequence
  Description of Artificial Sequence: Synthetic oligonucleotide
agagacuuucuggauccca

SEQ ID NO: 1640407 - RNA, 19 nt, Artificial Sequence
  Description of Artificial Sequence: Synthetic oligonucleotide
cacgugagcuuguggguug

SEQ ID NO: 1640408 - RNA, 19 nt, Artificial Sequence
  Description of Artificial Sequence: Synthetic oligonucleotide
gauggcaacgugcuccggu

SEQ ID NO: 1640409 - RNA, 19 nt, Artificial Sequence
  Description of Artificial Sequence: Synthetic oligonucleotide
cugaaugcuggccccucug

SEQ ID NO: 1640410 - RNA, 19 nt, Artificial Sequence
  Description of Artificial Sequence: Synthetic oligonucleotide
gagcccuaauuguucuuuc

SEQ ID NO: 1640411 - RNA, 19 nt, Artificial Sequence
  Description of Artificial Sequence: Synthetic oligonucleotide
cccuaauuguucuuucuuc

SEQ ID NO: 1640412 - RNA, 19 nt, Artificial Sequence
  Description of Artificial Sequence: Synthetic oligonucleotide
agcauccaugcgcugucca

SEQ ID NO: 1640413 - RNA, 19 nt, Artificial Sequence
  Description of Artificial Sequence: Synthetic oligonucleotide
cagggucaucgagugacgg

SEQ ID NO: 1640414 - RNA, 19 nt, Artificial Sequence
  Description of Artificial Sequence: Synthetic oligonucleotide
ggaaaagugagcccuaauu

SEQ ID NO: 1640415 - RNA, 19 nt, Artificial Sequence
  Description of Artificial Sequence: Synthetic oligonucleotide
gccagacaaaauauagagc

SEQ ID NO: 1640416 - RNA, 19 nt, Artificial Sequence
  Description of Artificial Sequence: Synthetic oligonucleotide
acuuccuaacacaggucug

SEQ ID NO: 1640417 - RNA, 19 nt, Artificial Sequence
  Description of Artificial Sequence: Synthetic oligonucleotide
cugcaaauggcugcagcuc

SEQ ID NO: 1640418 - RNA, 19 nt, Artificial Sequence
  Description of Artificial Sequence: Synthetic oligonucleotide
uaaagcugacagagacuuu

SEQ ID NO: 1640419 - RNA, 19 nt, Artificial Sequence
  Description of Artificial Sequence: Synthetic oligonucleotide
cagccgaaacacugcaguc

SEQ ID NO: 1640420 - RNA, 19 nt, Artificial Sequence
  Description of Artificial Sequence: Synthetic oligonucleotide
guauuccacucacuuugga

SEQ ID NO: 1640421 - RNA, 19 nt, Artificial Sequence
  Description of Artificial Sequence: Synthetic oligonucleotide
aaaggacugguggggucga

SEQ ID NO: 1640422 - RNA, 19 nt, Artificial Sequence
  Description of Artificial Sequence: Synthetic oligonucleotide
auccaugcgcuguccaaaa

SEQ ID NO: 1640423 - RNA, 19 nt, Artificial Sequence
  Description of Artificial Sequence: Synthetic oligonucleotide
ucucaacuugcagccagau

SEQ ID NO: 1640424 - RNA, 19 nt, Artificial Sequence
  Description of Artificial Sequence: Synthetic oligonucleotide
auggcaacgugcuccgguu

SEQ ID NO: 1640425 - RNA, 19 nt, Artificial Sequence
  Description of Artificial Sequence: Synthetic oligonucleotide
gcaaaagagccagacaaaa

SEQ ID NO: 1640426 - RNA, 19 nt, Artificial Sequence
  Description of Artificial Sequence: Synthetic oligonucleotide
cuggccccucugcuaaacg

SEQ ID NO: 1640427 - RNA, 19 nt, Artificial Sequence
  Description of Artificial Sequence: Synthetic oligonucleotide
cacaagaguugucaaagau

SEQ ID NO: 1640428 - RNA, 19 nt, Artificial Sequence
  Description of Artificial Sequence: Synthetic oligonucleotide
cugucuuggaauuucccau

SEQ ID NO: 1640429 - RNA, 19 nt, Artificial Sequence
  Description of Artificial Sequence: Synthetic oligonucleotide
guagccaggauucccacuu

SEQ ID NO: 1640430 - RNA, 19 nt, Artificial Sequence
  Description of Artificial Sequence: Synthetic oligonucleotide
ggacuggaguccuauaugu

SEQ ID NO: 1640431 - RNA, 19 nt, Artificial Sequence
  Description of Artificial Sequence: Synthetic oligonucleotide
aaggacugguggggucgac

SEQ ID NO: 1640432 - RNA, 19 nt, Artificial Sequence
  Description of Artificial Sequence: Synthetic oligonucleotide
uugcagccagauacuguau

SEQ ID NO: 1640433 - RNA, 19 nt, Artificial Sequence
  Description of Artificial Sequence: Synthetic oligonucleotide
acagggucaucgagugacg

SEQ ID NO: 1640434 - RNA, 19 nt, Artificial Sequence
  Description of Artificial Sequence: Synthetic oligonucleotide
gaccugcauugguacaaga

SEQ ID NO: 1640435 - RNA, 19 nt, Artificial Sequence
  Description of Artificial Sequence: Synthetic oligonucleotide
agaggucccauuggucucu

SEQ ID NO: 1640436 - RNA, 19 nt, Artificial Sequence
  Description of Artificial Sequence: Synthetic oligonucleotide
ggcaacgugcuccgguuug

SEQ ID NO: 1640437 - RNA, 19 nt, Artificial Sequence
  Description of Artificial Sequence: Synthetic oligonucleotide
ggaggacggguuugugagg

SEQ ID NO: 1640438 - RNA, 19 nt, Artificial Sequence
  Description of Artificial Sequence: Synthetic oligonucleotide
ucccacuucuaggaccagu

SEQ ID NO: 1640439 - RNA, 19 nt, Artificial Sequence
  Description of Artificial Sequence: Synthetic oligonucleotide
uccacucacuuuggaaaau

SEQ ID NO: 1640440 - RNA, 19 nt, Artificial Sequence
  Description of Artificial Sequence: Synthetic oligonucleotide
aaccggguuccugccacgu

SEQ ID NO: 1640441 - RNA, 19 nt, Artificial Sequence
  Description of Artificial Sequence: Synthetic oligonucleotide
caacgugcuccgguuuggg

SEQ ID NO: 1640442 - RNA, 19 nt, Artificial Sequence
  Description of Artificial Sequence: Synthetic oligonucleotide
uggggucgaccugcuauug

SEQ ID NO: 1640443 - RNA, 19 nt, Artificial Sequence
  Description of Artificial Sequence: Synthetic oligonucleotide
cagccagauacuguauuca

SEQ ID NO: 1640444 - RNA, 19 nt, Artificial Sequence
  Description of Artificial Sequence: Synthetic oligonucleotide
acgugagcuuguggguugg

SEQ ID NO: 1640445 - RNA, 19 nt, Artificial Sequence
  Description of Artificial Sequence: Synthetic oligonucleotide
ugccuaugaggaccucuuu

SEQ ID NO: 1640446 - RNA, 19 nt, Artificial Sequence
  Description of Artificial Sequence: Synthetic oligonucleotide
ggucucuaucucauagaug

SEQ ID NO: 1640447 - RNA, 19 nt, Artificial Sequence
  Description of Artificial Sequence: Synthetic oligonucleotide
uugaucccuugguggcucu

SEQ ID NO: 1640448 - RNA, 19 nt, Artificial Sequence
  Description of Artificial Sequence: Synthetic oligonucleotide
cuccgguuugggaugucca

SEQ ID NO: 1640449 - RNA, 19 nt, Artificial Sequence
  Description of Artificial Sequence: Synthetic oligonucleotide
gugagcuuguggguuggac

SEQ ID NO: 1640450 - RNA, 19 nt, Artificial Sequence
  Description of Artificial Sequence: Synthetic oligonucleotide
aggaaacaccuggcuugac

SEQ ID NO: 1640451 - RNA, 19 nt, Artificial Sequence
  Description of Artificial Sequence: Synthetic oligonucleotide
ggauucccacuucuaggac

SEQ ID NO: 1640452 - RNA, 19 nt, Artificial Sequence
  Description of Artificial Sequence: Synthetic oligonucleotide
aagaguugucaaagauauu

SEQ ID NO: 1640453 - RNA, 19 nt, Artificial Sequence
  Description of Artificial Sequence: Synthetic oligonucleotide
cuucacguagucugugagu

SEQ ID NO: 1640454 - RNA, 19 nt, Artificial Sequence
  Description of Artificial Sequence: Synthetic oligonucleotide
ugguaguuuccaguccguu

SEQ ID NO: 1640455 - RNA, 19 nt, Artificial Sequence
  Description of Artificial Sequence: Synthetic oligonucleotide
gcccugaagugaaugauga

SEQ ID NO: 1640456 - RNA, 19 nt, Artificial Sequence
  Description of Artificial Sequence: Synthetic oligonucleotide
ucaggcgcaugugccuaug

SEQ ID NO: 1640457 - RNA, 19 nt, Artificial Sequence
  Description of Artificial Sequence: Synthetic oligonucleotide
guccuauaugugcccacaa

SEQ ID NO: 1640458 - RNA, 19 nt, Artificial Sequence
  Description of Artificial Sequence: Synthetic oligonucleotide
gcuaaacgccacuuugaaa

SEQ ID NO: 1640459 - RNA, 19 nt, Artificial Sequence
  Description of Artificial Sequence: Synthetic oligonucleotide
gggucaucgagugacggaa

SEQ ID NO: 1640460 - RNA, 19 nt, Artificial Sequence
  Description of Artificial Sequence: Synthetic oligonucleotide
uggcaacgugcuccgguuu

SEQ ID NO: 1640461 - RNA, 19 nt, Artificial Sequence
  Description of Artificial Sequence: Synthetic oligonucleotide
accggguuccugccacgug

SEQ ID NO: 1640462 - RNA, 19 nt, Artificial Sequence
  Description of Artificial Sequence: Synthetic oligonucleotide
acauguguuuccagacaau

SEQ ID NO: 1640463 - RNA, 19 nt, Artificial Sequence
  Description of Artificial Sequence: Synthetic oligonucleotide
ugaucccuugguggcucug

SEQ ID NO: 1640464 - RNA, 19 nt, Artificial Sequence
  Description of Artificial Sequence: Synthetic oligonucleotide
augguaguuuccaguccgu

SEQ ID NO: 1640465 - RNA, 19 nt, Artificial Sequence
  Description of Artificial Sequence: Synthetic oligonucleotide
ggcuugaauugucagcagu

SEQ ID NO: 1640466 - RNA, 19 nt, Artificial Sequence
  Description of Artificial Sequence: Synthetic oligonucleotide
cgaaacacugcaguccuug

SEQ ID NO: 1640467 - RNA, 19 nt, Artificial Sequence
  Description of Artificial Sequence: Synthetic oligonucleotide
gcaaguguuacaggaaccu

SEQ ID NO: 1640468 - RNA, 19 nt, Artificial Sequence
  Description of Artificial Sequence: Synthetic oligonucleotide
ggcugucuuggaauuuccc

SEQ ID NO: 1640469 - RNA, 19 nt, Artificial Sequence
  Description of Artificial Sequence: Synthetic oligonucleotide
aggacggguuugugaggca

SEQ ID NO: 1640470 - RNA, 19 nt, Artificial Sequence
  Description of Artificial Sequence: Synthetic oligonucleotide
gcaacgugcuccgguuugg

SEQ ID NO: 1640471 - RNA, 19 nt, Artificial Sequence
  Description of Artificial Sequence: Synthetic oligonucleotide
gucaucgagugacggaaau

SEQ ID NO: 1640472 - RNA, 19 nt, Artificial Sequence
  Description of Artificial Sequence: Synthetic oligonucleotide
agauggcaacgugcuccgg

SEQ ID NO: 1640473 - RNA, 19 nt, Artificial Sequence
  Description of Artificial Sequence: Synthetic oligonucleotide
acguagucugugaguugag

SEQ ID NO: 1640474 - RNA, 19 nt, Artificial Sequence
  Description of Artificial Sequence: Synthetic oligonucleotide
gguggggucgaccugcuau

SEQ ID NO: 1640475 - RNA, 19 nt, Artificial Sequence
  Description of Artificial Sequence: Synthetic oligonucleotide
gugacggaaaucaccaguu

SEQ ID NO: 1640476 - RNA, 19 nt, Artificial Sequence
  Description of Artificial Sequence: Synthetic oligonucleotide
uccugccacgugagcuugu

SEQ ID NO: 1640477 - RNA, 19 nt, Artificial Sequence
  Description of Artificial Sequence: Synthetic oligonucleotide
guuggacuggaguccuaua

SEQ ID NO: 1640478 - RNA, 19 nt, Artificial Sequence
  Description of Artificial Sequence: Synthetic oligonucleotide
cucaacuugcagccagaua

SEQ ID NO: 1640479 - RNA, 19 nt, Artificial Sequence
  Description of Artificial Sequence: Synthetic oligonucleotide
ugggugacaucaggcgcau

SEQ ID NO: 1640480 - RNA, 19 nt, Artificial Sequence
  Description of Artificial Sequence: Synthetic oligonucleotide
gccgaaacacugcaguccu

SEQ ID NO: 1640481 - RNA, 19 nt, Artificial Sequence
  Description of Artificial Sequence: Synthetic oligonucleotide
acgccacuuugaaaggaaa

SEQ ID NO: 1640482 - RNA, 19 nt, Artificial Sequence
  Description of Artificial Sequence: Synthetic oligonucleotide
ggucugucuaaagcugaca

SEQ ID NO: 1640483 - RNA, 19 nt, Artificial Sequence
  Description of Artificial Sequence: Synthetic oligonucleotide
gaggauccugcuccacccu

SEQ ID NO: 1640484 - RNA, 19 nt, Artificial Sequence
  Description of Artificial Sequence: Synthetic oligonucleotide
gcuccgguuugggaugucc

SEQ ID NO: 1640485 - RNA, 19 nt, Artificial Sequence
  Description of Artificial Sequence: Synthetic oligonucleotide
caacagggucaucgaguga

SEQ ID NO: 1640486 - RNA, 19 nt, Artificial Sequence
  Description of Artificial Sequence: Synthetic oligonucleotide
gcaaauggcugcagcucac

SEQ ID NO: 1640487 - RNA, 19 nt, Artificial Sequence
  Description of Artificial Sequence: Synthetic oligonucleotide
cgugcuccgguuugggaug

SEQ ID NO: 1640488 - RNA, 19 nt, Artificial Sequence
  Description of Artificial Sequence: Synthetic oligonucleotide
uggccacacuuuggcaaaa

SEQ ID NO: 1640489 - RNA, 19 nt, Artificial Sequence
  Description of Artificial Sequence: Synthetic oligonucleotide
gcuauugagaagagauggu

SEQ ID NO: 1640490 - RNA, 19 nt, Artificial Sequence
  Description of Artificial Sequence: Synthetic oligonucleotide
gguuugugaggcaaguguu

SEQ ID NO: 1640491 - RNA, 19 nt, Artificial Sequence
  Description of Artificial Sequence: Synthetic oligonucleotide
augugccuaugaggaccuc

SEQ ID NO: 1640492 - RNA, 19 nt, Artificial Sequence
  Description of Artificial Sequence: Synthetic oligonucleotide
cccacuucuaggaccagua

SEQ ID NO: 1640493 - RNA, 19 nt, Artificial Sequence
  Description of Artificial Sequence: Synthetic oligonucleotide
cauuacccucgcucugcaa

SEQ ID NO: 1640494 - RNA, 19 nt, Artificial Sequence
  Description of Artificial Sequence: Synthetic oligonucleotide
gagccugguaaaucuccuu

SEQ ID NO: 1640495 - RNA, 19 nt, Artificial Sequence
  Description of Artificial Sequence: Synthetic oligonucleotide
ggucgaccugcuauugaga

SEQ ID NO: 1640496 - RNA, 19 nt, Artificial Sequence
  Description of Artificial Sequence: Synthetic oligonucleotide
ccaaaaguggcuucccgau

SEQ ID NO: 1640497 - RNA, 19 nt, Artificial Sequence
  Description of Artificial Sequence: Synthetic oligonucleotide
ggggucgaccugcuauuga

SEQ ID NO: 1640498 - RNA, 19 nt, Artificial Sequence
  Description of Artificial Sequence: Synthetic oligonucleotide
gucucuuaacagagcacau

SEQ ID NO: 1640499 - RNA, 19 nt, Artificial Sequence
  Description of Artificial Sequence: Synthetic oligonucleotide
caucaggcgcaugugccua

SEQ ID NO: 1640500 - RNA, 19 nt, Artificial Sequence
  Description of Artificial Sequence: Synthetic oligonucleotide
caggcgcaugugccuauga

SEQ ID NO: 1640501 - RNA, 19 nt, Artificial Sequence
  Description of Artificial Sequence: Synthetic oligonucleotide
ggacggguuugugaggcaa

SEQ ID NO: 1640502 - RNA, 19 nt, Artificial Sequence
  Description of Artificial Sequence: Synthetic oligonucleotide
ugguggggucgaccugcua

SEQ ID NO: 1640503 - RNA, 19 nt, Artificial Sequence
  Description of Artificial Sequence: Synthetic oligonucleotide
ggucagcauugccaaagau

SEQ ID NO: 1640504 - RNA, 19 nt, Artificial Sequence
  Description of Artificial Sequence: Synthetic oligonucleotide
guggggucgaccugcuauu

SEQ ID NO: 1640505 - RNA, 19 nt, Artificial Sequence
  Description of Artificial Sequence: Synthetic oligonucleotide
cucugcuaaacgccacuuu

SEQ ID NO: 1640506 - RNA, 19 nt, Artificial Sequence
  Description of Artificial Sequence: Synthetic oligonucleotide
cucaccucuuugggucuca

SEQ ID NO: 1640507 - RNA, 19 nt, Artificial Sequence
  Description of Artificial Sequence: Synthetic oligonucleotide
gccacgugagcuugugggu

SEQ ID NO: 1640508 - RNA, 19 nt, Artificial Sequence
  Description of Artificial Sequence: Synthetic oligonucleotide
cgcaugugccuaugaggac

SEQ ID NO: 1640509 - RNA, 19 nt, Artificial Sequence
  Description of Artificial Sequence: Synthetic oligonucleotide
gcgcuguccaaaagcccug

SEQ ID NO: 1640510 - RNA, 19 nt, Artificial Sequence
  Description of Artificial Sequence: Synthetic oligonucleotide
cccgaugagguagccagga

SEQ ID NO: 1640511 - RNA, 19 nt, Artificial Sequence
  Description of Artificial Sequence: Synthetic oligonucleotide
ccccucugcuaaacgccac

SEQ ID NO: 1640512 - RNA, 19 nt, Artificial Sequence
  Description of Artificial Sequence: Synthetic oligonucleotide
ggucaucgagugacggaaa

SEQ ID NO: 1640513 - RNA, 19 nt, Artificial Sequence
  Description of Artificial Sequence: Synthetic oligonucleotide
ggagaggcugagcccuucu

SEQ ID NO: 1640514 - RNA, 19 nt, Artificial Sequence
  Description of Artificial Sequence: Synthetic oligonucleotide
ccauuacccucgcucugca

SEQ ID NO: 1640515 - RNA, 19 nt, Artificial Sequence
  Description of Artificial Sequence: Synthetic oligonucleotide
guacaagaaccggguuccu

SEQ ID NO: 1640516 - RNA, 19 nt, Artificial Sequence
  Description of Artificial Sequence: Synthetic oligonucleotide
cguagucugugaguugaga

SEQ ID NO: 1640517 - RNA, 19 nt, Artificial Sequence
  Description of Artificial Sequence: Synthetic oligonucleotide
ugcuccgguuugggauguc

SEQ ID NO: 1640518 - RNA, 19 nt, Artificial Sequence
  Description of Artificial Sequence: Synthetic oligonucleotide
gcucaccucuuugggucuc

SEQ ID NO: 1640519 - RNA, 19 nt, Artificial Sequence
  Description of Artificial Sequence: Synthetic oligonucleotide
ccguucuagguugaucccu

SEQ ID NO: 1640520 - RNA, 19 nt, Artificial Sequence
  Description of Artificial Sequence: Synthetic oligonucleotide
cccucugcuaaacgccacu

SEQ ID NO: 1640521 - RNA, 19 nt, Artificial Sequence
  Description of Artificial Sequence: Synthetic oligonucleotide
cguucuagguugaucccuu

SEQ ID NO: 1640522 - RNA, 19 nt, Artificial Sequence
  Description of Artificial Sequence: Synthetic oligonucleotide
ccucgcucugcaacagggu

SEQ ID NO: 1640523 - RNA, 19 nt, Artificial Sequence
  Description of Artificial Sequence: Synthetic oligonucleotide
caguccguucuagguugau

SEQ ID NO: 1640524 - RNA, 19 nt, Artificial Sequence
  Description of Artificial Sequence: Synthetic oligonucleotide
ccucugcuaaacgccacuu

SEQ ID NO: 1640525 - RNA, 19 nt, Artificial Sequence
  Description of Artificial Sequence: Synthetic oligonucleotide
ccgaaacacugcaguccuu

SEQ ID NO: 1640526 - RNA, 19 nt, Artificial Sequence
  Description of Artificial Sequence: Synthetic oligonucleotide
cgugagcuuguggguugga

SEQ ID NO: 1640527 - RNA, 19 nt, Artificial Sequence
  Description of Artificial Sequence: Synthetic oligonucleotide
aaaugaagcagccucucgc

SEQ ID NO: 1640528 - RNA, 19 nt, Artificial Sequence
  Description of Artificial Sequence: Synthetic oligonucleotide
guagcagucaccauaaggg

SEQ ID NO: 1640529 - RNA, 19 nt, Artificial Sequence
  Description of Artificial Sequence: Synthetic oligonucleotide
uuaggcaguggucaaaggc

SEQ ID NO: 1640530 - RNA, 19 nt, Artificial Sequence
  Description of Artificial Sequence: Synthetic oligonucleotide
cugccauucacauauguag

SEQ ID NO: 1640531 - RNA, 19 nt, Artificial Sequence
  Description of Artificial Sequence: Synthetic oligonucleotide
uagguguugggucuuacag

SEQ ID NO: 1640532 - RNA, 19 nt, Artificial Sequence
  Description of Artificial Sequence: Synthetic oligonucleotide
uggagacugacucugggag

SEQ ID NO: 1640533 - RNA, 19 nt, Artificial Sequence
  Description of Artificial Sequence: Synthetic oligonucleotide
aggacaugcgguuucuacc

SEQ ID NO: 1640534 - RNA, 19 nt, Artificial Sequence
  Description of Artificial Sequence: Synthetic oligonucleotide
gauguguugagcugcuggg

SEQ ID NO: 1640535 - RNA, 19 nt, Artificial Sequence
  Description of Artificial Sequence: Synthetic oligonucleotide
ugcgguuucuaccagggcc

SEQ ID NO: 1640536 - RNA, 19 nt, Artificial Sequence
  Description of Artificial Sequence: Synthetic oligonucleotide
cacgccauagucucgaggg

SEQ ID NO: 1640537 - RNA, 19 nt, Artificial Sequence
  Description of Artificial Sequence: Synthetic oligonucleotide
  modified_base (5)..(5): a, c, u, g, unknown or other
agggnuuccugcuugaugu

SEQ ID NO: 1640538 - RNA, 19 nt, Artificial Sequence
  Description of Artificial Sequence: Synthetic oligonucleotide
acauauguagccugagguc

SEQ ID NO: 1640539 - RNA, 19 nt, Artificial Sequence
  Description of Artificial Sequence: Synthetic oligonucleotide
agcaagcccauuuuguggg

SEQ ID NO: 1640540 - RNA, 19 nt, Artificial Sequence
  Description of Artificial Sequence: Synthetic oligonucleotide
ggggaugugacuuaggcag

SEQ ID NO: 1640541 - RNA, 19 nt, Artificial Sequence
  Description of Artificial Sequence: Synthetic oligonucleotide
ucuuacaggguugaaacca

SEQ ID NO: 1640542 - RNA, 19 nt, Artificial Sequence
  Description of Artificial Sequence: Synthetic oligonucleotide
agaaacagacccuggugac

SEQ ID NO: 1640543 - RNA, 19 nt, Artificial Sequence
  Description of Artificial Sequence: Synthetic oligonucleotide
aaugaagcagccucucgca

SEQ ID NO: 1640544 - RNA, 19 nt, Artificial Sequence
  Description of Artificial Sequence: Synthetic oligonucleotide
caggauauacaccugggag

SEQ ID NO: 1640545 - RNA, 19 nt, Artificial Sequence
  Description of Artificial Sequence: Synthetic oligonucleotide
aaacagacccuggugacag

SEQ ID NO: 1640546 - RNA, 19 nt, Artificial Sequence
  Description of Artificial Sequence: Synthetic oligonucleotide
gaagcaagcccauuuugug

SEQ ID NO: 1640547 - RNA, 19 nt, Artificial Sequence
  Description of Artificial Sequence: Synthetic oligonucleotide
gaaaugaagcagccucucg

SEQ ID NO: 1640548 - RNA, 19 nt, Artificial Sequence
  Description of Artificial Sequence: Synthetic oligonucleotide
cuucuuacgcaccugcugc

SEQ ID NO: 1640549 - RNA, 19 nt, Artificial Sequence
  Description of Artificial Sequence: Synthetic oligonucleotide
ucuucuuacgcaccugcug

SEQ ID NO: 1640550 - RNA, 19 nt, Artificial Sequence
  Description of Artificial Sequence: Synthetic oligonucleotide
ucuaccagggccucguagc

SEQ ID NO: 1640551 - RNA, 19 nt, Artificial Sequence
  Description of Artificial Sequence: Synthetic oligonucleotide
aggauauacaccugggagu

SEQ ID NO: 1640552 - RNA, 19 nt, Artificial Sequence
  Description of Artificial Sequence: Synthetic oligonucleotide
ugccauucacauauguagc

SEQ ID NO: 1640553 - RNA, 19 nt, Artificial Sequence
  Description of Artificial Sequence: Synthetic oligonucleotide
uguggaugcauggaguugc

SEQ ID NO: 1640554 - RNA, 19 nt, Artificial Sequence
  Description of Artificial Sequence: Synthetic oligonucleotide
gguagcagucaccauaagg

SEQ ID NO: 1640555 - RNA, 19 nt, Artificial Sequence
  Description of Artificial Sequence: Synthetic oligonucleotide
uggaauagguguugggucu

SEQ ID NO: 1640556 - RNA, 19 nt, Artificial Sequence
  Description of Artificial Sequence: Synthetic oligonucleotide
auaagggaagcaguucugg

SEQ ID NO: 1640557 - RNA, 19 nt, Artificial Sequence
  Description of Artificial Sequence: Synthetic oligonucleotide
agcaguucuggauggaaug

SEQ ID NO: 1640558 - RNA, 19 nt, Artificial Sequence
  Description of Artificial Sequence: Synthetic oligonucleotide
ucaccauaagggaagcagu

SEQ ID NO: 1640559 - RNA, 19 nt, Artificial Sequence
  Description of Artificial Sequence: Synthetic oligonucleotide
agggaagcaguucuggaug

SEQ ID NO: 1640560 - RNA, 19 nt, Artificial Sequence
  Description of Artificial Sequence: Synthetic oligonucleotide
uuuuguggggugacggggc

SEQ ID NO: 1640561 - RNA, 19 nt, Artificial Sequence
  Description of Artificial Sequence: Synthetic oligonucleotide
agggcugauggccagcagg

SEQ ID NO: 1640562 - RNA, 19 nt, Artificial Sequence
  Description of Artificial Sequence: Synthetic oligonucleotide
gaccaugggugagagaagg

SEQ ID NO: 1640563 - RNA, 19 nt, Artificial Sequence
  Description of Artificial Sequence: Synthetic oligonucleotide
cauucacauauguagccug

SEQ ID NO: 1640564 - RNA, 19 nt, Artificial Sequence
  Description of Artificial Sequence: Synthetic oligonucleotide
aauagguguugggucuuac

SEQ ID NO: 1640565 - RNA, 19 nt, Artificial Sequence
  Description of Artificial Sequence: Synthetic oligonucleotide
uuggacacgccauagucuc

SEQ ID NO: 1640566 - RNA, 19 nt, Artificial Sequence
  Description of Artificial Sequence: Synthetic oligonucleotide
aaagaugcgcugaggcugg

SEQ ID NO: 1640567 - RNA, 19 nt, Artificial Sequence
  Description of Artificial Sequence: Synthetic oligonucleotide
cuucucugaacagugcccg

SEQ ID NO: 1640568 - RNA, 19 nt, Artificial Sequence
  Description of Artificial Sequence: Synthetic oligonucleotide
uguugggucuuacaggguu

SEQ ID NO: 1640569 - RNA, 19 nt, Artificial Sequence
  Description of Artificial Sequence: Synthetic oligonucleotide
aaguagugucaggagcugg

SEQ ID NO: 1640570 - RNA, 19 nt, Artificial Sequence
  Description of Artificial Sequence: Synthetic oligonucleotide
aaaccaugggcaucaccca

SEQ ID NO: 1640571 - RNA, 19 nt, Artificial Sequence
  Description of Artificial Sequence: Synthetic oligonucleotide
caucuucuuacgcaccugc

SEQ ID NO: 1640572 - RNA, 19 nt, Artificial Sequence
  Description of Artificial Sequence: Synthetic oligonucleotide
uccgguagcagucaccaua

SEQ ID NO: 1640573 - RNA, 19 nt, Artificial Sequence
  Description of Artificial Sequence: Synthetic oligonucleotide
ugugacuuaggcagugguc

SEQ ID NO: 1640574 - RNA, 19 nt, Artificial Sequence
  Description of Artificial Sequence: Synthetic oligonucleotide
ugaaaccaugggcaucacc

SEQ ID NO: 1640575 - RNA, 19 nt, Artificial Sequence
  Description of Artificial Sequence: Synthetic oligonucleotide
agaaugcccgaagcaagcc

SEQ ID NO: 1640576 - RNA, 19 nt, Artificial Sequence
  Description of Artificial Sequence: Synthetic oligonucleotide
guagccugaggucugggug

SEQ ID NO: 1640577 - RNA, 19 nt, Artificial Sequence
  Description of Artificial Sequence: Synthetic oligonucleotide
accaagccccuucaguggg

SEQ ID NO: 1640578 - RNA, 19 nt, Artificial Sequence
  Description of Artificial Sequence: Synthetic oligonucleotide
uuuccguccccgcagccgc

SEQ ID NO: 1640579 - RNA, 19 nt, Artificial Sequence
  Description of Artificial Sequence: Synthetic oligonucleotide
acaugcgguuucuaccagg

SEQ ID NO: 1640580 - RNA, 19 nt, Artificial Sequence
  Description of Artificial Sequence: Synthetic oligonucleotide
uaggacaugcgguuucuac

SEQ ID NO: 1640581 - RNA, 19 nt, Artificial Sequence
  Description of Artificial Sequence: Synthetic oligonucleotide
acggggccaggauauacac

SEQ ID NO: 1640582 - RNA, 19 nt, Artificial Sequence
  Description of Artificial Sequence: Synthetic oligonucleotide
gaagcagccucucgcagac

SEQ ID NO: 1640583 - RNA, 19 nt, Artificial Sequence
  Description of Artificial Sequence: Synthetic oligonucleotide
gacacuccgacagaacagc

SEQ ID NO: 1640584 - RNA, 19 nt, Artificial Sequence
  Description of Artificial Sequence: Synthetic oligonucleotide
accgcuggauaccaggucu

SEQ ID NO: 1640585 - RNA, 19 nt, Artificial Sequence
  Description of Artificial Sequence: Synthetic oligonucleotide
guagcucccguucaccuug

SEQ ID NO: 1640586 - RNA, 19 nt, Artificial Sequence
  Description of Artificial Sequence: Synthetic oligonucleotide
gguagguuggcuugcuggg

SEQ ID NO: 1640587 - RNA, 19 nt, Artificial Sequence
  Description of Artificial Sequence: Synthetic oligonucleotide
acuuaggcaguggucaaag

SEQ ID NO: 1640588 - RNA, 19 nt, Artificial Sequence
  Description of Artificial Sequence: Synthetic oligonucleotide
cauaagggaagcaguucug

SEQ ID NO: 1640589 - RNA, 19 nt, Artificial Sequence
  Description of Artificial Sequence: Synthetic oligonucleotide
ugcuugauguguugagcug

SEQ ID NO: 1640590 - RNA, 19 nt, Artificial Sequence
  Description of Artificial Sequence: Synthetic oligonucleotide
uauacaccugggaguagcu

SEQ ID NO: 1640591 - RNA, 19 nt, Artificial Sequence
  Description of Artificial Sequence: Synthetic oligonucleotide
cucggcugugggcagaggg

SEQ ID NO: 1640592 - RNA, 19 nt, Artificial Sequence
  Description of Artificial Sequence: Synthetic oligonucleotide
uuacaggguugaaaccaug

SEQ ID NO: 1640593 - RNA, 19 nt, Artificial Sequence
  Description of Artificial Sequence: Synthetic oligonucleotide
aagcccauuuuguggggug

SEQ ID NO: 1640594 - RNA, 19 nt, Artificial Sequence
  Description of Artificial Sequence: Synthetic oligonucleotide
uccugcuugauguguugag

SEQ ID NO: 1640595 - RNA, 19 nt, Artificial Sequence
  Description of Artificial Sequence: Synthetic oligonucleotide
ugcgcugaggcuggaauag

SEQ ID NO: 1640596 - RNA, 19 nt, Artificial Sequence
  Description of Artificial Sequence: Synthetic oligonucleotide
gugacuuaggcagugguca

SEQ ID NO: 1640597 - RNA, 19 nt, Artificial Sequence
  Description of Artificial Sequence: Synthetic oligonucleotide
cugaccaugggugagagaa

SEQ ID NO: 1640598 - RNA, 19 nt, Artificial Sequence
  Description of Artificial Sequence: Synthetic oligonucleotide
ggugguggacucuggaagg

SEQ ID NO: 1640599 - RNA, 19 nt, Artificial Sequence
  Description of Artificial Sequence: Synthetic oligonucleotide
accauaagggaagcaguuc

SEQ ID NO: 1640600 - RNA, 19 nt, Artificial Sequence
  Description of Artificial Sequence: Synthetic oligonucleotide
cuuaggcaguggucaaagg

SEQ ID NO: 1640601 - RNA, 19 nt, Artificial Sequence
  Description of Artificial Sequence: Synthetic oligonucleotide
aucagcacccgugugcauc

SEQ ID NO: 1640602 - RNA, 19 nt, Artificial Sequence
  Description of Artificial Sequence: Synthetic oligonucleotide
uggggagcguggagaaugg

SEQ ID NO: 1640603 - RNA, 19 nt, Artificial Sequence
  Description of Artificial Sequence: Synthetic oligonucleotide
augugacuuaggcaguggu

SEQ ID NO: 1640604 - RNA, 19 nt, Artificial Sequence
  Description of Artificial Sequence: Synthetic oligonucleotide
agucucgagggcuccgggg

SEQ ID NO: 1640605 - RNA, 19 nt, Artificial Sequence
  Description of Artificial Sequence: Synthetic oligonucleotide
aaccaugggcaucacccau

SEQ ID NO: 1640606 - RNA, 19 nt, Artificial Sequence
  Description of Artificial Sequence: Synthetic oligonucleotide
gucuuacaggguugaaacc

SEQ ID NO: 1640607 - RNA, 19 nt, Artificial Sequence
  Description of Artificial Sequence: Synthetic oligonucleotide
ggagaaacagacccuggug

SEQ ID NO: 1640608 - RNA, 19 nt, Artificial Sequence
  Description of Artificial Sequence: Synthetic oligonucleotide
ggaauggaaacugccuugg

SEQ ID NO: 1640609 - RNA, 19 nt, Artificial Sequence
  Description of Artificial Sequence: Synthetic oligonucleotide
acgccauagucucgagggc

SEQ ID NO: 1640610 - RNA, 19 nt, Artificial Sequence
  Description of Artificial Sequence: Synthetic oligonucleotide
cacauauguagccugaggu

SEQ ID NO: 1640611 - RNA, 19 nt, Artificial Sequence
  Description of Artificial Sequence: Synthetic oligonucleotide
cuacagggagaaacagacc

SEQ ID NO: 1640612 - RNA, 19 nt, Artificial Sequence
  Description of Artificial Sequence: Synthetic oligonucleotide
ugaccaugggugagagaag

SEQ ID NO: 1640613 - RNA, 19 nt, Artificial Sequence
  Description of Artificial Sequence: Synthetic oligonucleotide
auagguguugggucuuaca

SEQ ID NO: 1640614 - RNA, 19 nt, Artificial Sequence
  Description of Artificial Sequence: Synthetic oligonucleotide
ugcauggaguugcugcagu

SEQ ID NO: 1640615 - RNA, 19 nt, Artificial Sequence
  Description of Artificial Sequence: Synthetic oligonucleotide
auuggggaagaagccacag

SEQ ID NO: 1640616 - RNA, 19 nt, Artificial Sequence
  Description of Artificial Sequence: Synthetic oligonucleotide
aacagacccuggugacagg

SEQ ID NO: 1640617 - RNA, 19 nt, Artificial Sequence
  Description of Artificial Sequence: Synthetic oligonucleotide
cagacacuccgacagaaca

SEQ ID NO: 1640618 - RNA, 19 nt, Artificial Sequence
  Description of Artificial Sequence: Synthetic oligonucleotide
cuuacgcaccugcugcuag

SEQ ID NO: 1640619 - RNA, 19 nt, Artificial Sequence
  Description of Artificial Sequence: Synthetic oligonucleotide
agggacaucaugggagggg

SEQ ID NO: 1640620 - RNA, 19 nt, Artificial Sequence
  Description of Artificial Sequence: Synthetic oligonucleotide
uggacacgccauagucucg

SEQ ID NO: 1640621 - RNA, 19 nt, Artificial Sequence
  Description of Artificial Sequence: Synthetic oligonucleotide
uguagccugaggucugggu

SEQ ID NO: 1640622 - RNA, 19 nt, Artificial Sequence
  Description of Artificial Sequence: Synthetic oligonucleotide
uggggcagguaaagaugcg

SEQ ID NO: 1640623 - RNA, 19 nt, Artificial Sequence
  Description of Artificial Sequence: Synthetic oligonucleotide
gccauucacauauguagcc

SEQ ID NO: 1640624 - RNA, 19 nt, Artificial Sequence
  Description of Artificial Sequence: Synthetic oligonucleotide
cagguaaagaugcgcugag

SEQ ID NO: 1640625 - RNA, 19 nt, Artificial Sequence
  Description of Artificial Sequence: Synthetic oligonucleotide
caugggugagagaaggcca

SEQ ID NO: 1640626 - RNA, 19 nt, Artificial Sequence
  Description of Artificial Sequence: Synthetic oligonucleotide
uggugcucucggcuguggg

SEQ ID NO: 1640627 - RNA, 19 nt, Artificial Sequence
  Description of Artificial Sequence: Synthetic oligonucleotide
cucugaacagugcccguag

SEQ ID NO: 1640628 - RNA, 19 nt, Artificial Sequence
  Description of Artificial Sequence: Synthetic oligonucleotide
augcgguuucuaccagggc

SEQ ID NO: 1640629 - RNA, 19 nt, Artificial Sequence
  Description of Artificial Sequence: Synthetic oligonucleotide
cugggugaccuguuaggag

SEQ ID NO: 1640630 - RNA, 19 nt, Artificial Sequence
  Description of Artificial Sequence: Synthetic oligonucleotide
uccuucaggugucugugua

SEQ ID NO: 1640631 - RNA, 19 nt, Artificial Sequence
  Description of Artificial Sequence: Synthetic oligonucleotide
cagccucucgcagacaggg

SEQ ID NO: 1640632 - RNA, 19 nt, Artificial Sequence
  Description of Artificial Sequence: Synthetic oligonucleotide
gagacugacucugggagga

SEQ ID NO: 1640633 - RNA, 19 nt, Artificial Sequence
  Description of Artificial Sequence: Synthetic oligonucleotide
ggccaggauauacaccugg

SEQ ID NO: 1640634 - RNA, 19 nt, Artificial Sequence
  Description of Artificial Sequence: Synthetic oligonucleotide
ugaggucugggugaccugu

SEQ ID NO: 1640635 - RNA, 19 nt, Artificial Sequence
  Description of Artificial Sequence: Synthetic oligonucleotide
ucagcacccgugugcaucu

SEQ ID NO: 1640636 - RNA, 19 nt, Artificial Sequence
  Description of Artificial Sequence: Synthetic oligonucleotide
ugcuguaggacaugcgguu

SEQ ID NO: 1640637 - RNA, 19 nt, Artificial Sequence
  Description of Artificial Sequence: Synthetic oligonucleotide
gggaagcaguucuggaugg

SEQ ID NO: 1640638 - RNA, 19 nt, Artificial Sequence
  Description of Artificial Sequence: Synthetic oligonucleotide
gguacagcagcacuccuuc

SEQ ID NO: 1640639 - RNA, 19 nt, Artificial Sequence
  Description of Artificial Sequence: Synthetic oligonucleotide
agacacuccgacagaacag

SEQ ID NO: 1640640 - RNA, 19 nt, Artificial Sequence
  Description of Artificial Sequence: Synthetic oligonucleotide
gaaguagugucaggagcug

SEQ ID NO: 1640641 - RNA, 19 nt, Artificial Sequence
  Description of Artificial Sequence: Synthetic oligonucleotide
ggagacugacucugggagg

SEQ ID NO: 1640642 - RNA, 19 nt, Artificial Sequence
  Description of Artificial Sequence: Synthetic oligonucleotide
gauggaauggaaacugccu

SEQ ID NO: 1640643 - RNA, 19 nt, Artificial Sequence
  Description of Artificial Sequence: Synthetic oligonucleotide
gacaugcgguuucuaccag

SEQ ID NO: 1640644 - RNA, 19 nt, Artificial Sequence
  Description of Artificial Sequence: Synthetic oligonucleotide
agcggguggugccuggaag

SEQ ID NO: 1640645 - RNA, 19 nt, Artificial Sequence
  Description of Artificial Sequence: Synthetic oligonucleotide
uucuuacgcaccugcugcu

SEQ ID NO: 1640646 - RNA, 19 nt, Artificial Sequence
  Description of Artificial Sequence: Synthetic oligonucleotide
auagucucgagggcuccgg

SEQ ID NO: 1640647 - RNA, 19 nt, Artificial Sequence
  Description of Artificial Sequence: Synthetic oligonucleotide
ggaaggguggguagguugg

SEQ ID NO: 1640648 - RNA, 19 nt, Artificial Sequence
  Description of Artificial Sequence: Synthetic oligonucleotide
acacuccgacagaacagcc

SEQ ID NO: 1640649 - RNA, 19 nt, Artificial Sequence
  Description of Artificial Sequence: Synthetic oligonucleotide
gagcgcguggugguggugg

SEQ ID NO: 1640650 - RNA, 19 nt, Artificial Sequence
  Description of Artificial Sequence: Synthetic oligonucleotide
ggugagagaaggccagacc

SEQ ID NO: 1640651 - RNA, 19 nt, Artificial Sequence
  Description of Artificial Sequence: Synthetic oligonucleotide
  modified_base (6)..(6): a, c, u, g, unknown or other
cagggnuuccugcuugaug

SEQ ID NO: 1640652 - RNA, 19 nt, Artificial Sequence
  Description of Artificial Sequence: Synthetic oligonucleotide
uggaggggaugugacuuag

SEQ ID NO: 1640653 - RNA, 19 nt, Artificial Sequence
  Description of Artificial Sequence: Synthetic oligonucleotide
cugcuggcaggcaaaggug

SEQ ID NO: 1640654 - RNA, 19 nt, Artificial Sequence
  Description of Artificial Sequence: Synthetic oligonucleotide
guagaggugguggacucug

SEQ ID NO: 1640655 - RNA, 19 nt, Artificial Sequence
  Description of Artificial Sequence: Synthetic oligonucleotide
uccgacagaacagccucug

SEQ ID NO: 1640656 - RNA, 19 nt, Artificial Sequence
  Description of Artificial Sequence: Synthetic oligonucleotide
caguccucgggaccgcugg

SEQ ID NO: 1640657 - RNA, 19 nt, Artificial Sequence
  Description of Artificial Sequence: Synthetic oligonucleotide
cauauguagccugaggucu

SEQ ID NO: 1640658 - RNA, 19 nt, Artificial Sequence
  Description of Artificial Sequence: Synthetic oligonucleotide
ggaaccaguggugaccucc

SEQ ID NO: 1640659 - RNA, 19 nt, Artificial Sequence
  Description of Artificial Sequence: Synthetic oligonucleotide
guagguuggcuugcugggg

SEQ ID NO: 1640660 - RNA, 19 nt, Artificial Sequence
  Description of Artificial Sequence: Synthetic oligonucleotide
  modified_base (9)..(9): a, c, u, g, unknown or other
aggcagggnuuccugcuug

SEQ ID NO: 1640661 - RNA, 19 nt, Artificial Sequence
  Description of Artificial Sequence: Synthetic oligonucleotide
guggagaauggcugucccc

SEQ ID NO: 1640662 - RNA, 19 nt, Artificial Sequence
  Description of Artificial Sequence: Synthetic oligonucleotide
ggacaugcgguuucuacca

SEQ ID NO: 1640663 - RNA, 19 nt, Artificial Sequence
  Description of Artificial Sequence: Synthetic oligonucleotide
guuuccguccccgcagccg

SEQ ID NO: 1640664 - RNA, 19 nt, Artificial Sequence
  Description of Artificial Sequence: Synthetic oligonucleotide
gggaccgcuggauaccagg

SEQ ID NO: 1640665 - RNA, 19 nt, Artificial Sequence
  Description of Artificial Sequence: Synthetic oligonucleotide
auucacauauguagccuga

SEQ ID NO: 1640666 - RNA, 19 nt, Artificial Sequence
  Description of Artificial Sequence: Synthetic oligonucleotide
  modified_base (17)..(17): a, c, u, g, unknown or other
ugguagucaggcagggnuu

SEQ ID NO: 1640667 - RNA, 19 nt, Artificial Sequence
  Description of Artificial Sequence: Synthetic oligonucleotide
uugggucuuacaggguuga

SEQ ID NO: 1640668 - RNA, 19 nt, Artificial Sequence
  Description of Artificial Sequence: Synthetic oligonucleotide
ggagcguggagaauggcug

SEQ ID NO: 1640669 - RNA, 19 nt, Artificial Sequence
  Description of Artificial Sequence: Synthetic oligonucleotide
caggcucuucucugaacag

SEQ ID NO: 1640670 - RNA, 19 nt, Artificial Sequence
  Description of Artificial Sequence: Synthetic oligonucleotide
agcgcgugguggugguggc

SEQ ID NO: 1640671 - RNA, 19 nt, Artificial Sequence
  Description of Artificial Sequence: Synthetic oligonucleotide
aggcagguacagcagcacu

SEQ ID NO: 1640672 - RNA, 19 nt, Artificial Sequence
  Description of Artificial Sequence: Synthetic oligonucleotide
gaugaccccggggcggugg

SEQ ID NO: 1640673 - RNA, 19 nt, Artificial Sequence
  Description of Artificial Sequence: Synthetic oligonucleotide
ucucgcggguuuccguccc

SEQ ID NO: 1640674 - RNA, 19 nt, Artificial Sequence
  Description of Artificial Sequence: Synthetic oligonucleotide
ggucugggugaccuguuag

SEQ ID NO: 1640675 - RNA, 19 nt, Artificial Sequence
  Description of Artificial Sequence: Synthetic oligonucleotide
uuacgcaccugcugcuagu

SEQ ID NO: 1640676 - RNA, 19 nt, Artificial Sequence
  Description of Artificial Sequence: Synthetic oligonucleotide
ccauuuuguggggugacgg

SEQ ID NO: 1640677 - RNA, 19 nt, Artificial Sequence
  Description of Artificial Sequence: Synthetic oligonucleotide
ugguccgguagcagucacc

SEQ ID NO: 1640678 - RNA, 19 nt, Artificial Sequence
  Description of Artificial Sequence: Synthetic oligonucleotide
cuguaggacaugcgguuuc

SEQ ID NO: 1640679 - RNA, 19 nt, Artificial Sequence
  Description of Artificial Sequence: Synthetic oligonucleotide
cagugcuguaggacaugcg

SEQ ID NO: 1640680 - RNA, 19 nt, Artificial Sequence
  Description of Artificial Sequence: Synthetic oligonucleotide
ucccuggugcucucggcug

SEQ ID NO: 1640681 - RNA, 19 nt, Artificial Sequence
  Description of Artificial Sequence: Synthetic oligonucleotide
gcggaggaggucgugagcg

SEQ ID NO: 1640682 - RNA, 19 nt, Artificial Sequence
  Description of Artificial Sequence: Synthetic oligonucleotide
ugcccguagcucccguuca

SEQ ID NO: 1640683 - RNA, 19 nt, Artificial Sequence
  Description of Artificial Sequence: Synthetic oligonucleotide
auauguagccugaggucug

SEQ ID NO: 1640684 - RNA, 19 nt, Artificial Sequence
  Description of Artificial Sequence: Synthetic oligonucleotide
uagccuggggcagguaaag

SEQ ID NO: 1640685 - RNA, 19 nt, Artificial Sequence
  Description of Artificial Sequence: Synthetic oligonucleotide
agguuggcuugcuggggag

SEQ ID NO: 1640686 - RNA, 19 nt, Artificial Sequence
  Description of Artificial Sequence: Synthetic oligonucleotide
guugggucuuacaggguug

SEQ ID NO: 1640687 - RNA, 19 nt, Artificial Sequence
  Description of Artificial Sequence: Synthetic oligonucleotide
gacugacucugggaggaug

SEQ ID NO: 1640688 - RNA, 19 nt, Artificial Sequence
  Description of Artificial Sequence: Synthetic oligonucleotide
aaacugccuugguagccuu

SEQ ID NO: 1640689 - RNA, 19 nt, Artificial Sequence
  Description of Artificial Sequence: Synthetic oligonucleotide
ggggccaggauauacaccu

SEQ ID NO: 1640690 - RNA, 19 nt, Artificial Sequence
  Description of Artificial Sequence: Synthetic oligonucleotide
cauagucucgagggcuccg

SEQ ID NO: 1640691 - RNA, 19 nt, Artificial Sequence
  Description of Artificial Sequence: Synthetic oligonucleotide
ggcagguaaagaugcgcug

SEQ ID NO: 1640692 - RNA, 19 nt, Artificial Sequence
  Description of Artificial Sequence: Synthetic oligonucleotide
gugguggugggaaccagug

SEQ ID NO: 1640693 - RNA, 19 nt, Artificial Sequence
  Description of Artificial Sequence: Synthetic oligonucleotide
ccuuggacacgccauaguc

SEQ ID NO: 1640694 - RNA, 19 nt, Artificial Sequence
  Description of Artificial Sequence: Synthetic oligonucleotide
agcaggugaaguaguguca

SEQ ID NO: 1640695 - RNA, 19 nt, Artificial Sequence
  Description of Artificial Sequence: Synthetic oligonucleotide
ucucugaacagugcccgua

SEQ ID NO: 1640696 - RNA, 19 nt, Artificial Sequence
  Description of Artificial Sequence: Synthetic oligonucleotide
uggggcagggguggugugg

SEQ ID NO: 1640697 - RNA, 19 nt, Artificial Sequence
  Description of Artificial Sequence: Synthetic oligonucleotide
uacgcaccugcugcuagug

SEQ ID NO: 1640698 - RNA, 19 nt, Artificial Sequence
  Description of Artificial Sequence: Synthetic oligonucleotide
acgcaccugcugcuagugg

SEQ ID NO: 1640699 - RNA, 19 nt, Artificial Sequence
  Description of Artificial Sequence: Synthetic oligonucleotide
agggagaaacagacccugg

SEQ ID NO: 1640700 - RNA, 19 nt, Artificial Sequence
  Description of Artificial Sequence: Synthetic oligonucleotide
ggaaacugccuugguagcc

SEQ ID NO: 1640701 - RNA, 19 nt, Artificial Sequence
  Description of Artificial Sequence: Synthetic oligonucleotide
gacaggugguggugggaac

SEQ ID NO: 1640702 - RNA, 19 nt, Artificial Sequence
  Description of Artificial Sequence: Synthetic oligonucleotide
gcggguggugccuggaagg

SEQ ID NO: 1640703 - RNA, 19 nt, Artificial Sequence
  Description of Artificial Sequence: Synthetic oligonucleotide
agcguggagaauggcuguc

SEQ ID NO: 1640704 - RNA, 19 nt, Artificial Sequence
  Description of Artificial Sequence: Synthetic oligonucleotide
ugacggggccaggauauac

SEQ ID NO: 1640705 - RNA, 19 nt, Artificial Sequence
  Description of Artificial Sequence: Synthetic oligonucleotide
  modified_base (18)..(18): a, c, u, g, unknown or other
cugguagucaggcagggnu

SEQ ID NO: 1640706 - RNA, 19 nt, Artificial Sequence
  Description of Artificial Sequence: Synthetic oligonucleotide
ccaugggugagagaaggcc

SEQ ID NO: 1640707 - RNA, 19 nt, Artificial Sequence
  Description of Artificial Sequence: Synthetic oligonucleotide
agggccucguagccugggg

SEQ ID NO: 1640708 - RNA, 19 nt, Artificial Sequence
  Description of Artificial Sequence: Synthetic oligonucleotide
acccuggugacaggagggg

SEQ ID NO: 1640709 - RNA, 19 nt, Artificial Sequence
  Description of Artificial Sequence: Synthetic oligonucleotide
caucccuggugcucucggc

SEQ ID NO: 1640710 - RNA, 19 nt, Artificial Sequence
  Description of Artificial Sequence: Synthetic oligonucleotide
gaaacugccuugguagccu

SEQ ID NO: 1640711 - RNA, 19 nt, Artificial Sequence
  Description of Artificial Sequence: Synthetic oligonucleotide
cccgugugcaucuucuuac

SEQ ID NO: 1640712 - RNA, 19 nt, Artificial Sequence
  Description of Artificial Sequence: Synthetic oligonucleotide
caguggugaccuccagcgg

SEQ ID NO: 1640713 - RNA, 19 nt, Artificial Sequence
  Description of Artificial Sequence: Synthetic oligonucleotide
gacucuggaagggugggua

SEQ ID NO: 1640714 - RNA, 19 nt, Artificial Sequence
  Description of Artificial Sequence: Synthetic oligonucleotide
ggaggaggucgugagcgcg

SEQ ID NO: 1640715 - RNA, 19 nt, Artificial Sequence
  Description of Artificial Sequence: Synthetic oligonucleotide
uggaugcauggaguugcug

SEQ ID NO: 1640716 - RNA, 19 nt, Artificial Sequence
  Description of Artificial Sequence: Synthetic oligonucleotide
gaaggguggguagguuggc

SEQ ID NO: 1640717 - RNA, 19 nt, Artificial Sequence
  Description of Artificial Sequence: Synthetic oligonucleotide
agcucccguucaccuugcc

SEQ ID NO: 1640718 - RNA, 19 nt, Artificial Sequence
  Description of Artificial Sequence: Synthetic oligonucleotide
gaccgcuggauaccagguc

SEQ ID NO: 1640719 - RNA, 19 nt, Artificial Sequence
  Description of Artificial Sequence: Synthetic oligonucleotide
guguggaugcauggaguug

SEQ ID NO: 1640720 - RNA, 19 nt, Artificial Sequence
  Description of Artificial Sequence: Synthetic oligonucleotide
gugggaagcuccagggcug

SEQ ID NO: 1640721 - RNA, 19 nt, Artificial Sequence
  Description of Artificial Sequence: Synthetic oligonucleotide
augaccccggggcgguggg

SEQ ID NO: 1640722 - RNA, 19 nt, Artificial Sequence
  Description of Artificial Sequence: Synthetic oligonucleotide
gacggggccaggauauaca

SEQ ID NO: 1640723 - RNA, 19 nt, Artificial Sequence
  Description of Artificial Sequence: Synthetic oligonucleotide
gucucgcggguuuccgucc

SEQ ID NO: 1640724 - RNA, 19 nt, Artificial Sequence
  Description of Artificial Sequence: Synthetic oligonucleotide
cugcuaguggguggggcag

SEQ ID NO: 1640725 - RNA, 19 nt, Artificial Sequence
  Description of Artificial Sequence: Synthetic oligonucleotide
gaaccaguggugaccucca

SEQ ID NO: 1640726 - RNA, 19 nt, Artificial Sequence
  Description of Artificial Sequence: Synthetic oligonucleotide
uccucgggaccgcuggaua

SEQ ID NO: 1640727 - RNA, 19 nt, Artificial Sequence
  Description of Artificial Sequence: Synthetic oligonucleotide
guucaccuugccgccgccg

SEQ ID NO: 1640728 - RNA, 19 nt, Artificial Sequence
  Description of Artificial Sequence: Synthetic oligonucleotide
ucgcggguuuccguccccg

SEQ ID NO: 1640729 - RNA, 19 nt, Artificial Sequence
  Description of Artificial Sequence: Synthetic oligonucleotide
aacugccuugguagccuug

SEQ ID NO: 1640730 - RNA, 19 nt, Artificial Sequence
  Description of Artificial Sequence: Synthetic oligonucleotide
  modified_base (15)..(15): a, c, u, g, unknown or other
guagucaggcagggnuucc

SEQ ID NO: 1640731 - RNA, 19 nt, Artificial Sequence
  Description of Artificial Sequence: Synthetic oligonucleotide
ggggcagguaaagaugcgc

SEQ ID NO: 1640732 - RNA, 19 nt, Artificial Sequence
  Description of Artificial Sequence: Synthetic oligonucleotide
cugccuugguagccuuggg

SEQ ID NO: 1640733 - RNA, 19 nt, Artificial Sequence
  Description of Artificial Sequence: Synthetic oligonucleotide
cucagugguccgguagcag

SEQ ID NO: 1640734 - RNA, 19 nt, Artificial Sequence
  Description of Artificial Sequence: Synthetic oligonucleotide
gcaagcccauuuugugggg

SEQ ID NO: 1640735 - RNA, 19 nt, Artificial Sequence
  Description of Artificial Sequence: Synthetic oligonucleotide
ggaaaugaagcagccucuc

SEQ ID NO: 1640736 - RNA, 19 nt, Artificial Sequence
  Description of Artificial Sequence: Synthetic oligonucleotide
uggggugacggggccagga

SEQ ID NO: 1640737 - RNA, 19 nt, Artificial Sequence
  Description of Artificial Sequence: Synthetic oligonucleotide
gcauggaguugcugcagug

SEQ ID NO: 1640738 - RNA, 19 nt, Artificial Sequence
  Description of Artificial Sequence: Synthetic oligonucleotide
uagcucccguucaccuugc

SEQ ID NO: 1640739 - RNA, 19 nt, Artificial Sequence
  Description of Artificial Sequence: Synthetic oligonucleotide
cugaacagugcccguagcu

SEQ ID NO: 1640740 - RNA, 19 nt, Artificial Sequence
  Description of Artificial Sequence: Synthetic oligonucleotide
gaauggaaacugccuuggu

SEQ ID NO: 1640741 - RNA, 19 nt, Artificial Sequence
  Description of Artificial Sequence: Synthetic oligonucleotide
ggugggaaccaguggugac

SEQ ID NO: 1640742 - RNA, 19 nt, Artificial Sequence
  Description of Artificial Sequence: Synthetic oligonucleotide
gguccgguagcagucacca

SEQ ID NO: 1640743 - RNA, 19 nt, Artificial Sequence
  Description of Artificial Sequence: Synthetic oligonucleotide
aggucgugagcgcguggug

SEQ ID NO: 1640744 - RNA, 19 nt, Artificial Sequence
  Description of Artificial Sequence: Synthetic oligonucleotide
cuuacaggguugaaaccau

SEQ ID NO: 1640745 - RNA, 19 nt, Artificial Sequence
  Description of Artificial Sequence: Synthetic oligonucleotide
ccgugugcaucuucuuacg

SEQ ID NO: 1640746 - RNA, 19 nt, Artificial Sequence
  Description of Artificial Sequence: Synthetic oligonucleotide
  modified_base (4)..(4): a, c, u, g, unknown or other
gggnuuccugcuugaugug

SEQ ID NO: 1640747 - RNA, 19 nt, Artificial Sequence
  Description of Artificial Sequence: Synthetic oligonucleotide
ugguggcaccggcagccga

SEQ ID NO: 1640748 - RNA, 19 nt, Artificial Sequence
  Description of Artificial Sequence: Synthetic oligonucleotide
ugugggcacuggccauggc

SEQ ID NO: 1640749 - RNA, 19 nt, Artificial Sequence
  Description of Artificial Sequence: Synthetic oligonucleotide
auggaggggaugugacuua

SEQ ID NO: 1640750 - RNA, 19 nt, Artificial Sequence
  Description of Artificial Sequence: Synthetic oligonucleotide
ugggaagcuccagggcuga

SEQ ID NO: 1640751 - RNA, 19 nt, Artificial Sequence
  Description of Artificial Sequence: Synthetic oligonucleotide
aggucucgcggguuuccgu

SEQ ID NO: 1640752 - RNA, 19 nt, Artificial Sequence
  Description of Artificial Sequence: Synthetic oligonucleotide
aguggucaaaggccccauu

SEQ ID NO: 1640753 - RNA, 19 nt, Artificial Sequence
  Description of Artificial Sequence: Synthetic oligonucleotide
gugggcugaccauggguga

SEQ ID NO: 1640754 - RNA, 19 nt, Artificial Sequence
  Description of Artificial Sequence: Synthetic oligonucleotide
agccgaggcagcaggucuc

SEQ ID NO: 1640755 - RNA, 19 nt, Artificial Sequence
  Description of Artificial Sequence: Synthetic oligonucleotide
agcccauuuugugggguga

SEQ ID NO: 1640756 - RNA, 19 nt, Artificial Sequence
  Description of Artificial Sequence: Synthetic oligonucleotide
gcugaggcuggaauaggug

SEQ ID NO: 1640757 - RNA, 19 nt, Artificial Sequence
  Description of Artificial Sequence: Synthetic oligonucleotide
cuccagggcugauggccag

SEQ ID NO: 1640758 - RNA, 19 nt, Artificial Sequence
  Description of Artificial Sequence: Synthetic oligonucleotide
ccgaagcaagcccauuuug

SEQ ID NO: 1640759 - RNA, 19 nt, Artificial Sequence
  Description of Artificial Sequence: Synthetic oligonucleotide
aaggccccauuggggaaga

SEQ ID NO: 1640760 - RNA, 19 nt, Artificial Sequence
  Description of Artificial Sequence: Synthetic oligonucleotide
ggucucgcggguuuccguc

SEQ ID NO: 1640761 - RNA, 19 nt, Artificial Sequence
  Description of Artificial Sequence: Synthetic oligonucleotide
gguugaaaccaugggcauc

SEQ ID NO: 1640762 - RNA, 19 nt, Artificial Sequence
  Description of Artificial Sequence: Synthetic oligonucleotide
ggaagcuccagggcugaug

SEQ ID NO: 1640763 - RNA, 19 nt, Artificial Sequence
  Description of Artificial Sequence: Synthetic oligonucleotide
cuaguggguggggcagggg

SEQ ID NO: 1640764 - RNA, 19 nt, Artificial Sequence
  Description of Artificial Sequence: Synthetic oligonucleotide
caccuugccgccgccggcc

SEQ ID NO: 1640765 - RNA, 19 nt, Artificial Sequence
  Description of Artificial Sequence: Synthetic oligonucleotide
guacagcagcacuccuuca

SEQ ID NO: 1640766 - RNA, 19 nt, Artificial Sequence
  Description of Artificial Sequence: Synthetic oligonucleotide
ccauaagggaagcaguucu

SEQ ID NO: 1640767 - RNA, 19 nt, Artificial Sequence
  Description of Artificial Sequence: Synthetic oligonucleotide
  modified_base (2)..(2): a, c, u, g, unknown or other
gnuuccugcuugauguguu

SEQ ID NO: 1640768 - RNA, 19 nt, Artificial Sequence
  Description of Artificial Sequence: Synthetic oligonucleotide
gcuggaauagguguugggu

SEQ ID NO: 1640769 - RNA, 19 nt, Artificial Sequence
  Description of Artificial Sequence: Synthetic oligonucleotide
gggccucguagccuggggc

SEQ ID NO: 1640770 - RNA, 19 nt, Artificial Sequence
  Description of Artificial Sequence: Synthetic oligonucleotide
uuguggggugacggggcca

SEQ ID NO: 1640771 - RNA, 19 nt, Artificial Sequence
  Description of Artificial Sequence: Synthetic oligonucleotide
gggcggaggaggucgugag

SEQ ID NO: 1640772 - RNA, 19 nt, Artificial Sequence
  Description of Artificial Sequence: Synthetic oligonucleotide
ugccccuugugggaagcuc

SEQ ID NO: 1640773 - RNA, 19 nt, Artificial Sequence
  Description of Artificial Sequence: Synthetic oligonucleotide
gggagaaacagacccuggu

SEQ ID NO: 1640774 - RNA, 19 nt, Artificial Sequence
  Description of Artificial Sequence: Synthetic oligonucleotide
gguggguagguuggcuugc

SEQ ID NO: 1640775 - RNA, 19 nt, Artificial Sequence
  Description of Artificial Sequence: Synthetic oligonucleotide
aggaggucgugagcgcgug

SEQ ID NO: 1640776 - RNA, 19 nt, Artificial Sequence
  Description of Artificial Sequence: Synthetic oligonucleotide
gugguccgguagcagucac

SEQ ID NO: 1640777 - RNA, 19 nt, Artificial Sequence
  Description of Artificial Sequence: Synthetic oligonucleotide
uugaaaccaugggcaucac

SEQ ID NO: 1640778 - RNA, 19 nt, Artificial Sequence
  Description of Artificial Sequence: Synthetic oligonucleotide
caccauaagggaagcaguu

SEQ ID NO: 1640779 - RNA, 19 nt, Artificial Sequence
  Description of Artificial Sequence: Synthetic oligonucleotide
gaggucgugagcgcguggu

SEQ ID NO: 1640780 - RNA, 19 nt, Artificial Sequence
  Description of Artificial Sequence: Synthetic oligonucleotide
cucucggcugugggcagag

SEQ ID NO: 1640781 - RNA, 19 nt, Artificial Sequence
  Description of Artificial Sequence: Synthetic oligonucleotide
ggugaccuguuaggagggg

SEQ ID NO: 1640782 - RNA, 19 nt, Artificial Sequence
  Description of Artificial Sequence: Synthetic oligonucleotide
ccaggauauacaccuggga

SEQ ID NO: 1640783 - RNA, 19 nt, Artificial Sequence
  Description of Artificial Sequence: Synthetic oligonucleotide
ccucgggaccgcuggauac

SEQ ID NO: 1640784 - RNA, 19 nt, Artificial Sequence
  Description of Artificial Sequence: Synthetic oligonucleotide
cguggagaauggcuguccc

SEQ ID NO: 1640785 - RNA, 19 nt, Artificial Sequence
  Description of Artificial Sequence: Synthetic oligonucleotide
gcgguggggucccuacagg

SEQ ID NO: 1640786 - RNA, 19 nt, Artificial Sequence
  Description of Artificial Sequence: Synthetic oligonucleotide
cgugugcaucuucuuacgc

SEQ ID NO: 1640787 - RNA, 19 nt, Artificial Sequence
  Description of Artificial Sequence: Synthetic oligonucleotide
ugaccuccagcggguggug

SEQ ID NO: 1640788 - RNA, 19 nt, Artificial Sequence
  Description of Artificial Sequence: Synthetic oligonucleotide
ggcugaccaugggugagag

SEQ ID NO: 1640789 - RNA, 19 nt, Artificial Sequence
  Description of Artificial Sequence: Synthetic oligonucleotide
agugcccguagcucccguu

SEQ ID NO: 1640790 - RNA, 19 nt, Artificial Sequence
  Description of Artificial Sequence: Synthetic oligonucleotide
ggaggggaugugacuuagg

SEQ ID NO: 1640791 - RNA, 19 nt, Artificial Sequence
  Description of Artificial Sequence: Synthetic oligonucleotide
gggugagagaaggccagac

SEQ ID NO: 1640792 - RNA, 19 nt, Artificial Sequence
  Description of Artificial Sequence: Synthetic oligonucleotide
gggucuuacaggguugaaa

SEQ ID NO: 1640793 - RNA, 19 nt, Artificial Sequence
  Description of Artificial Sequence: Synthetic oligonucleotide
cacuccgacagaacagccu

SEQ ID NO: 1640794 - RNA, 19 nt, Artificial Sequence
  Description of Artificial Sequence: Synthetic oligonucleotide
ccaucccuggugcucucgg

SEQ ID NO: 1640795 - RNA, 19 nt, Artificial Sequence
  Description of Artificial Sequence: Synthetic oligonucleotide
ggaggucgugagcgcgugg

SEQ ID NO: 1640796 - RNA, 19 nt, Artificial Sequence
  Description of Artificial Sequence: Synthetic oligonucleotide
gaauagguguugggucuua

SEQ ID NO: 1640797 - RNA, 19 nt, Artificial Sequence
  Description of Artificial Sequence: Synthetic oligonucleotide
ggacacgccauagucucga

SEQ ID NO: 1640798 - RNA, 19 nt, Artificial Sequence
  Description of Artificial Sequence: Synthetic oligonucleotide
ggugugggcacuggccaug

SEQ ID NO: 1640799 - RNA, 19 nt, Artificial Sequence
  Description of Artificial Sequence: Synthetic oligonucleotide
guagcuccuggcucagggu

SEQ ID NO: 1640800 - RNA, 19 nt, Artificial Sequence
  Description of Artificial Sequence: Synthetic oligonucleotide
uggugaccuccagcgggug

SEQ ID NO: 1640801 - RNA, 19 nt, Artificial Sequence
  Description of Artificial Sequence: Synthetic oligonucleotide
ccgacagaacagccucugg

SEQ ID NO: 1640802 - RNA, 19 nt, Artificial Sequence
  Description of Artificial Sequence: Synthetic oligonucleotide
ggguuuccguccccgcagc

SEQ ID NO: 1640803 - RNA, 19 nt, Artificial Sequence
  Description of Artificial Sequence: Synthetic oligonucleotide
gguguggaugcauggaguu

SEQ ID NO: 1640804 - RNA, 19 nt, Artificial Sequence
  Description of Artificial Sequence: Synthetic oligonucleotide
cucgcggguuuccgucccc

SEQ ID NO: 1640805 - RNA, 19 nt, Artificial Sequence
  Description of Artificial Sequence: Synthetic oligonucleotide
gucgugagcgcgugguggu

SEQ ID NO: 1640806 - RNA, 19 nt, Artificial Sequence
  Description of Artificial Sequence: Synthetic oligonucleotide
gccugguagucaggcaggg

SEQ ID NO: 1640807 - RNA, 19 nt, Artificial Sequence
  Description of Artificial Sequence: Synthetic oligonucleotide
ggcggaggaggucgugagc

SEQ ID NO: 1640808 - RNA, 19 nt, Artificial Sequence
  Description of Artificial Sequence: Synthetic oligonucleotide
gguuggcuugcuggggagc

SEQ ID NO: 1640809 - RNA, 19 nt, Artificial Sequence
  Description of Artificial Sequence: Synthetic oligonucleotide
ugggucuuacaggguugaa

SEQ ID NO: 1640810 - RNA, 19 nt, Artificial Sequence
  Description of Artificial Sequence: Synthetic oligonucleotide
aagaugcgcugaggcugga

SEQ ID NO: 1640811 - RNA, 19 nt, Artificial Sequence
  Description of Artificial Sequence: Synthetic oligonucleotide
ugagcgcguggugguggug

SEQ ID NO: 1640812 - RNA, 19 nt, Artificial Sequence
  Description of Artificial Sequence: Synthetic oligonucleotide
agccuggggcagguaaaga

SEQ ID NO: 1640813 - RNA, 19 nt, Artificial Sequence
  Description of Artificial Sequence: Synthetic oligonucleotide
ggggaccaagccccuucag

SEQ ID NO: 1640814 - RNA, 19 nt, Artificial Sequence
  Description of Artificial Sequence: Synthetic oligonucleotide
gggucuggcugcccuuccc

SEQ ID NO: 1640815 - RNA, 19 nt, Artificial Sequence
  Description of Artificial Sequence: Synthetic oligonucleotide
cagggccucguagccuggg

SEQ ID NO: 1640816 - RNA, 19 nt, Artificial Sequence
  Description of Artificial Sequence: Synthetic oligonucleotide
gcguggagaauggcugucc

SEQ ID NO: 1640817 - RNA, 19 nt, Artificial Sequence
  Description of Artificial Sequence: Synthetic oligonucleotide
uggcugccccuugugggaa

SEQ ID NO: 1640818 - RNA, 19 nt, Artificial Sequence
  Description of Artificial Sequence: Synthetic oligonucleotide
gggaaaugaagcagccucu

SEQ ID NO: 1640819 - RNA, 19 nt, Artificial Sequence
  Description of Artificial Sequence: Synthetic oligonucleotide
  modified_base (8)..(8): a, c, u, g, unknown or other
ggcagggnuuccugcuuga

SEQ ID NO: 1640820 - RNA, 19 nt, Artificial Sequence
  Description of Artificial Sequence: Synthetic oligonucleotide
ggcaguggucaaaggcccc

SEQ ID NO: 1640821 - RNA, 19 nt, Artificial Sequence
  Description of Artificial Sequence: Synthetic oligonucleotide
gugaccuccagcggguggu

SEQ ID NO: 1640822 - RNA, 19 nt, Artificial Sequence
  Description of Artificial Sequence: Synthetic oligonucleotide
ccgguagcagucaccauaa

SEQ ID NO: 1640823 - RNA, 19 nt, Artificial Sequence
  Description of Artificial Sequence: Synthetic oligonucleotide
ccaagccccuucagugggc

SEQ ID NO: 1640824 - RNA, 19 nt, Artificial Sequence
  Description of Artificial Sequence: Synthetic oligonucleotide
  modified_base (3)..(3): a, c, u, g, unknown or other
ggnuuccugcuugaugugu

SEQ ID NO: 1640825 - RNA, 19 nt, Artificial Sequence
  Description of Artificial Sequence: Synthetic oligonucleotide
cugcugcuagugggugggg

SEQ ID NO: 1640826 - RNA, 19 nt, Artificial Sequence
  Description of Artificial Sequence: Synthetic oligonucleotide
gccauagucucgagggcuc

SEQ ID NO: 1640827 - RNA, 19 nt, Artificial Sequence
  Description of Artificial Sequence: Synthetic oligonucleotide
ggcugccauucacauaugu

SEQ ID NO: 1640828 - RNA, 19 nt, Artificial Sequence
  Description of Artificial Sequence: Synthetic oligonucleotide
ggugacggggccaggauau

SEQ ID NO: 1640829 - RNA, 19 nt, Artificial Sequence
  Description of Artificial Sequence: Synthetic oligonucleotide
gggcagguaaagaugcgcu

SEQ ID NO: 1640830 - RNA, 19 nt, Artificial Sequence
  Description of Artificial Sequence: Synthetic oligonucleotide
ccguucaccuugccgccgc

SEQ ID NO: 1640831 - RNA, 19 nt, Artificial Sequence
  Description of Artificial Sequence: Synthetic oligonucleotide
gccagacacuccgacagaa

SEQ ID NO: 1640832 - RNA, 19 nt, Artificial Sequence
  Description of Artificial Sequence: Synthetic oligonucleotide
cggguuuccguccccgcag

SEQ ID NO: 1640833 - RNA, 19 nt, Artificial Sequence
  Description of Artificial Sequence: Synthetic oligonucleotide
gggagcguggagaauggcu

SEQ ID NO: 1640834 - RNA, 19 nt, Artificial Sequence
  Description of Artificial Sequence: Synthetic oligonucleotide
ggggcgguggggucccuac

SEQ ID NO: 1640835 - RNA, 19 nt, Artificial Sequence
  Description of Artificial Sequence: Synthetic oligonucleotide
gaggaggucgugagcgcgu

SEQ ID NO: 1640836 - RNA, 19 nt, Artificial Sequence
  Description of Artificial Sequence: Synthetic oligonucleotide
ggguugaaaccaugggcau

SEQ ID NO: 1640837 - RNA, 19 nt, Artificial Sequence
  Description of Artificial Sequence: Synthetic oligonucleotide
gcggguuuccguccccgca

SEQ ID NO: 1640838 - RNA, 19 nt, Artificial Sequence
  Description of Artificial Sequence: Synthetic oligonucleotide
agacugacucugggaggau

SEQ ID NO: 1640839 - RNA, 19 nt, Artificial Sequence
  Description of Artificial Sequence: Synthetic oligonucleotide
cagaccccaggccaucccu

SEQ ID NO: 1640840 - RNA, 19 nt, Artificial Sequence
  Description of Artificial Sequence: Synthetic oligonucleotide
ggacccucggccaggucca

SEQ ID NO: 1640841 - RNA, 19 nt, Artificial Sequence
  Description of Artificial Sequence: Synthetic oligonucleotide
gcaggucucgcggguuucc

SEQ ID NO: 1640842 - RNA, 19 nt, Artificial Sequence
  Description of Artificial Sequence: Synthetic oligonucleotide
gcgguuucuaccagggccu

SEQ ID NO: 1640843 - RNA, 19 nt, Artificial Sequence
  Description of Artificial Sequence: Synthetic oligonucleotide
cccuggugacaggaggggc

SEQ ID NO: 1640844 - RNA, 19 nt, Artificial Sequence
  Description of Artificial Sequence: Synthetic oligonucleotide
guaggacaugcgguuucua

SEQ ID NO: 1640845 - RNA, 19 nt, Artificial Sequence
  Description of Artificial Sequence: Synthetic oligonucleotide
ggaggcugccauucacaua

SEQ ID NO: 1640846 - RNA, 19 nt, Artificial Sequence
  Description of Artificial Sequence: Synthetic oligonucleotide
ccuggaggcugcuggcuca

SEQ ID NO: 1640847 - RNA, 19 nt, Artificial Sequence
  Description of Artificial Sequence: Synthetic oligonucleotide
caagcccauuuuguggggu

SEQ ID NO: 1640848 - RNA, 19 nt, Artificial Sequence
  Description of Artificial Sequence: Synthetic oligonucleotide
gccaucccuggugcucucg

SEQ ID NO: 1640849 - RNA, 19 nt, Artificial Sequence
  Description of Artificial Sequence: Synthetic oligonucleotide
gggugacggggccaggaua

SEQ ID NO: 1640850 - RNA, 19 nt, Artificial Sequence
  Description of Artificial Sequence: Synthetic oligonucleotide
ugcccgaagcaagcccauu

SEQ ID NO: 1640851 - RNA, 19 nt, Artificial Sequence
  Description of Artificial Sequence: Synthetic oligonucleotide
cuccagcggguggugccug

SEQ ID NO: 1640852 - RNA, 19 nt, Artificial Sequence
  Description of Artificial Sequence: Synthetic oligonucleotide
gcccauuuuguggggugac

SEQ ID NO: 1640853 - RNA, 19 nt, Artificial Sequence
  Description of Artificial Sequence: Synthetic oligonucleotide
  modified_base (10)..(10): a, c, u, g, unknown or other
caggcagggnuuccugcuu

SEQ ID NO: 1640854 - RNA, 19 nt, Artificial Sequence
  Description of Artificial Sequence: Synthetic oligonucleotide
gacccucggccagguccag

SEQ ID NO: 1640855 - RNA, 19 nt, Artificial Sequence
  Description of Artificial Sequence: Synthetic oligonucleotide
ggugccuggaagggacauc

SEQ ID NO: 1640856 - RNA, 19 nt, Artificial Sequence
  Description of Artificial Sequence: Synthetic oligonucleotide
ccucguagccuggggcagg

SEQ ID NO: 1640857 - RNA, 19 nt, Artificial Sequence
  Description of Artificial Sequence: Synthetic oligonucleotide
gcucagugguccgguagca

SEQ ID NO: 1640858 - RNA, 19 nt, Artificial Sequence
  Description of Artificial Sequence: Synthetic oligonucleotide
caguccaucccuggaggcu

SEQ ID NO: 1640859 - RNA, 19 nt, Artificial Sequence
  Description of Artificial Sequence: Synthetic oligonucleotide
ccauucacauauguagccu

SEQ ID NO: 1640860 - RNA, 19 nt, Artificial Sequence
  Description of Artificial Sequence: Synthetic oligonucleotide
gcccguagcucccguucac

SEQ ID NO: 1640861 - RNA, 19 nt, Artificial Sequence
  Description of Artificial Sequence: Synthetic oligonucleotide
cguagccuggggcagguaa

SEQ ID NO: 1640862 - RNA, 19 nt, Artificial Sequence
  Description of Artificial Sequence: Synthetic oligonucleotide
ggggagcguggagaauggc

SEQ ID NO: 1640863 - RNA, 19 nt, Artificial Sequence
  Description of Artificial Sequence: Synthetic oligonucleotide
gugagcgcguggugguggu

SEQ ID NO: 1640864 - RNA, 19 nt, Artificial Sequence
  Description of Artificial Sequence: Synthetic oligonucleotide
gcgugguggugguggcacc

SEQ ID NO: 1640865 - RNA, 19 nt, Artificial Sequence
  Description of Artificial Sequence: Synthetic oligonucleotide
ggccauggccugguaguca

SEQ ID NO: 1640866 - RNA, 19 nt, Artificial Sequence
  Description of Artificial Sequence: Synthetic oligonucleotide
caagccccuucagugggcu

SEQ ID NO: 1640867 - RNA, 19 nt, Artificial Sequence
  Description of Artificial Sequence: Synthetic oligonucleotide
gcugaccaugggugagaga

SEQ ID NO: 1640868 - RNA, 19 nt, Artificial Sequence
  Description of Artificial Sequence: Synthetic oligonucleotide
guggaugcauggaguugcu

SEQ ID NO: 1640869 - RNA, 19 nt, Artificial Sequence
  Description of Artificial Sequence: Synthetic oligonucleotide
cggaggaggucgugagcgc

SEQ ID NO: 1640870 - RNA, 19 nt, Artificial Sequence
  Description of Artificial Sequence: Synthetic oligonucleotide
gaccccggggcgguggggu

SEQ ID NO: 1640871 - RNA, 19 nt, Artificial Sequence
  Description of Artificial Sequence: Synthetic oligonucleotide
gggcugaccaugggugaga

SEQ ID NO: 1640872 - RNA, 19 nt, Artificial Sequence
  Description of Artificial Sequence: Synthetic oligonucleotide
guccccgcagccgccgcca

SEQ ID NO: 1640873 - RNA, 19 nt, Artificial Sequence
  Description of Artificial Sequence: Synthetic oligonucleotide
gcacuccuucaggugucug

SEQ ID NO: 1640874 - RNA, 19 nt, Artificial Sequence
  Description of Artificial Sequence: Synthetic oligonucleotide
gguagaggugguggacucu

SEQ ID NO: 1640875 - RNA, 19 nt, Artificial Sequence
  Description of Artificial Sequence: Synthetic oligonucleotide
ggaccgcuggauaccaggu

SEQ ID NO: 1640876 - RNA, 19 nt, Artificial Sequence
  Description of Artificial Sequence: Synthetic oligonucleotide
ccgccggccuuggacacgc

SEQ ID NO: 1640877 - RNA, 19 nt, Artificial Sequence
  Description of Artificial Sequence: Synthetic oligonucleotide
cagcggguggugccuggaa

SEQ ID NO: 1640878 - RNA, 19 nt, Artificial Sequence
  Description of Artificial Sequence: Synthetic oligonucleotide
ggguggugccuggaaggga

SEQ ID NO: 1640879 - RNA, 19 nt, Artificial Sequence
  Description of Artificial Sequence: Synthetic oligonucleotide
guggguagguuggcuugcu

SEQ ID NO: 1640880 - RNA, 19 nt, Artificial Sequence
  Description of Artificial Sequence: Synthetic oligonucleotide
guguugggucuuacagggu

SEQ ID NO: 1640881 - RNA, 19 nt, Artificial Sequence
  Description of Artificial Sequence: Synthetic oligonucleotide
cugacucugggaggauggu

SEQ ID NO: 1640882 - RNA, 19 nt, Artificial Sequence
  Description of Artificial Sequence: Synthetic oligonucleotide
gccuuggacacgccauagu

SEQ ID NO: 1640883 - RNA, 19 nt, Artificial Sequence
  Description of Artificial Sequence: Synthetic oligonucleotide
gggaaccaguggugaccuc

SEQ ID NO: 1640884 - RNA, 19 nt, Artificial Sequence
  Description of Artificial Sequence: Synthetic oligonucleotide
ucguagccuggggcaggua

SEQ ID NO: 1640885 - RNA, 19 nt, Artificial Sequence
  Description of Artificial Sequence: Synthetic oligonucleotide
cucguagccuggggcaggu

SEQ ID NO: 1640886 - RNA, 19 nt, Artificial Sequence
  Description of Artificial Sequence: Synthetic oligonucleotide
gccgccggccuuggacacg

SEQ ID NO: 1640887 - RNA, 19 nt, Artificial Sequence
  Description of Artificial Sequence: Synthetic oligonucleotide
gaggucugggugaccuguu

SEQ ID NO: 1640888 - RNA, 19 nt, Artificial Sequence
  Description of Artificial Sequence: Synthetic oligonucleotide
gggcgguggggucccuaca

SEQ ID NO: 1640889 - RNA, 19 nt, Artificial Sequence
  Description of Artificial Sequence: Synthetic oligonucleotide
ccguagcucccguucaccu

SEQ ID NO: 1640890 - RNA, 19 nt, Artificial Sequence
  Description of Artificial Sequence: Synthetic oligonucleotide
cguucaccuugccgccgcc

SEQ ID NO: 1640891 - RNA, 19 nt, Artificial Sequence
  Description of Artificial Sequence: Synthetic oligonucleotide
ccagcaggugaaguagugu

SEQ ID NO: 1640892 - RNA, 19 nt, Artificial Sequence
  Description of Artificial Sequence: Synthetic oligonucleotide
gcuguaggacaugcgguuu

SEQ ID NO: 1640893 - RNA, 19 nt, Artificial Sequence
  Description of Artificial Sequence: Synthetic oligonucleotide
  modified_base (19)..(19): a, c, u, g, unknown or other
ccugguagucaggcagggn

SEQ ID NO: 1640894 - RNA, 19 nt, Artificial Sequence
  Description of Artificial Sequence: Synthetic oligonucleotide
cgcggguuuccguccccgc

SEQ ID NO: 1640895 - RNA, 19 nt, Artificial Sequence
  Description of Artificial Sequence: Synthetic oligonucleotide
gugacggggccaggauaua

SEQ ID NO: 1640896 - RNA, 19 nt, Artificial Sequence
  Description of Artificial Sequence: Synthetic oligonucleotide
gcuggcucagugguccggu

SEQ ID NO: 1640897 - RNA, 19 nt, Artificial Sequence
  Description of Artificial Sequence: Synthetic oligonucleotide
cgguagcagucaccauaag

SEQ ID NO: 1640898 - RNA, 19 nt, Artificial Sequence
  Description of Artificial Sequence: Synthetic oligonucleotide
ggcaggcaaagguguggau

SEQ ID NO: 1640899 - RNA, 19 nt, Artificial Sequence
  Description of Artificial Sequence: Synthetic oligonucleotide
  modified_base (7)..(7): a, c, u, g, unknown or other
gcagggnuuccugcuugau

SEQ ID NO: 1640900 - RNA, 19 nt, Artificial Sequence
  Description of Artificial Sequence: Synthetic oligonucleotide
ggaugaccccggggcggug

SEQ ID NO: 1640901 - RNA, 19 nt, Artificial Sequence
  Description of Artificial Sequence: Synthetic oligonucleotide
ggggugacggggccaggau

SEQ ID NO: 1640902 - RNA, 19 nt, Artificial Sequence
  Description of Artificial Sequence: Synthetic oligonucleotide
cgcuggauaccaggucuuc

SEQ ID NO: 1640903 - RNA, 19 nt, Artificial Sequence
  Description of Artificial Sequence: Synthetic oligonucleotide
cacccgugugcaucuucuu

SEQ ID NO: 1640904 - RNA, 19 nt, Artificial Sequence
  Description of Artificial Sequence: Synthetic oligonucleotide
cacaguccucgggaccgcu

SEQ ID NO: 1640905 - RNA, 19 nt, Artificial Sequence
  Description of Artificial Sequence: Synthetic oligonucleotide
cuggaaggguggguagguu

SEQ ID NO: 1640906 - RNA, 19 nt, Artificial Sequence
  Description of Artificial Sequence: Synthetic oligonucleotide
ccccggggcgguggggucc

SEQ ID NO: 1640907 - RNA, 19 nt, Artificial Sequence
  Description of Artificial Sequence: Synthetic oligonucleotide
cgccauagucucgagggcu

SEQ ID NO: 1640908 - RNA, 19 nt, Artificial Sequence
  Description of Artificial Sequence: Synthetic oligonucleotide
cagugcccguagcucccgu

SEQ ID NO: 1640909 - RNA, 19 nt, Artificial Sequence
  Description of Artificial Sequence: Synthetic oligonucleotide
cccggggcggugggguccc

SEQ ID NO: 1640910 - RNA, 19 nt, Artificial Sequence
  Description of Artificial Sequence: Synthetic oligonucleotide
ccccuucagugggcugacc

SEQ ID NO: 1640911 - RNA, 19 nt, Artificial Sequence
  Description of Artificial Sequence: Synthetic oligonucleotide
cgguuucuaccagggccuc

SEQ ID NO: 1640912 - RNA, 19 nt, Artificial Sequence
  Description of Artificial Sequence: Synthetic oligonucleotide
cugccccuugugggaagcu

SEQ ID NO: 1640913 - RNA, 19 nt, Artificial Sequence
  Description of Artificial Sequence: Synthetic oligonucleotide
ccucuggaucagcacccgu

SEQ ID NO: 1640914 - RNA, 19 nt, Artificial Sequence
  Description of Artificial Sequence: Synthetic oligonucleotide
gcgcgugguggugguggca

SEQ ID NO: 1640915 - RNA, 19 nt, Artificial Sequence
  Description of Artificial Sequence: Synthetic oligonucleotide
ccagcggguggugccugga

SEQ ID NO: 1640916 - RNA, 19 nt, Artificial Sequence
  Description of Artificial Sequence: Synthetic oligonucleotide
gggucccuacagggagaaa

SEQ ID NO: 1640917 - RNA, 19 nt, Artificial Sequence
  Description of Artificial Sequence: Synthetic oligonucleotide
ccgcuggauaccaggucuu

SEQ ID NO: 1640918 - RNA, 19 nt, Artificial Sequence
  Description of Artificial Sequence: Synthetic oligonucleotide
gcuggggagcguggagaau

SEQ ID NO: 1640919 - RNA, 19 nt, Artificial Sequence
  Description of Artificial Sequence: Synthetic oligonucleotide
cagcacccgugugcaucuu

SEQ ID NO: 1640920 - RNA, 19 nt, Artificial Sequence
  Description of Artificial Sequence: Synthetic oligonucleotide
aauuauaucaggaacagac

SEQ ID NO: 1640921 - RNA, 19 nt, Artificial Sequence
  Description of Artificial Sequence: Synthetic oligonucleotide
aaauaacaaacucauagac

SEQ ID NO: 1640922 - RNA, 19 nt, Artificial Sequence
  Description of Artificial Sequence: Synthetic oligonucleotide
uuauuuagcaguaaguuug

SEQ ID NO: 1640923 - RNA, 19 nt, Artificial Sequence
  Description of Artificial Sequence: Synthetic oligonucleotide
cuaaauauagugaugugcg

SEQ ID NO: 1640924 - RNA, 19 nt, Artificial Sequence
  Description of Artificial Sequence: Synthetic oligonucleotide
uuagcaguaaguuugaaac

SEQ ID NO: 1640925 - RNA, 19 nt, Artificial Sequence
  Description of Artificial Sequence: Synthetic oligonucleotide
aaauauagugaugugcgcc

SEQ ID NO: 1640926 - RNA, 19 nt, Artificial Sequence
  Description of Artificial Sequence: Synthetic oligonucleotide
cugaaauagaccuucacgg

SEQ ID NO: 1640927 - RNA, 19 nt, Artificial Sequence
  Description of Artificial Sequence: Synthetic oligonucleotide
uguagaacgcauuuaagcc

SEQ ID NO: 1640928 - RNA, 19 nt, Artificial Sequence
  Description of Artificial Sequence: Synthetic oligonucleotide
uuaggaaccacaaauuugu

SEQ ID NO: 1640929 - RNA, 19 nt, Artificial Sequence
  Description of Artificial Sequence: Synthetic oligonucleotide
uaugggaucugucucaucc

SEQ ID NO: 1640930 - RNA, 19 nt, Artificial Sequence
  Description of Artificial Sequence: Synthetic oligonucleotide
ugaugugcgccacagauag

SEQ ID NO: 1640931 - RNA, 19 nt, Artificial Sequence
  Description of Artificial Sequence: Synthetic oligonucleotide
acuuugacguacuagcuac

SEQ ID NO: 1640932 - RNA, 19 nt, Artificial Sequence
  Description of Artificial Sequence: Synthetic oligonucleotide
aacguguuggcauagccag

SEQ ID NO: 1640933 - RNA, 19 nt, Artificial Sequence
  Description of Artificial Sequence: Synthetic oligonucleotide
ugaauucgaacuuuaguag

SEQ ID NO: 1640934 - RNA, 19 nt, Artificial Sequence
  Description of Artificial Sequence: Synthetic oligonucleotide
agccaauaaaaguuggggc

SEQ ID NO: 1640935 - RNA, 19 nt, Artificial Sequence
  Description of Artificial Sequence: Synthetic oligonucleotide
uuguagaacgcauuuaagc

SEQ ID NO: 1640936 - RNA, 19 nt, Artificial Sequence
  Description of Artificial Sequence: Synthetic oligonucleotide
uuaagcaaggguacuacag

SEQ ID NO: 1640937 - RNA, 19 nt, Artificial Sequence
  Description of Artificial Sequence: Synthetic oligonucleotide
aaauauacccuuguacuuc

SEQ ID NO: 1640938 - RNA, 19 nt, Artificial Sequence
  Description of Artificial Sequence: Synthetic oligonucleotide
acuuuaguagcuuccauag

SEQ ID NO: 1640939 - RNA, 19 nt, Artificial Sequence
  Description of Artificial Sequence: Synthetic oligonucleotide
uuauucaguacagagacca

SEQ ID NO: 1640940 - RNA, 19 nt, Artificial Sequence
  Description of Artificial Sequence: Synthetic oligonucleotide
uguacaaugcuucaacggu

SEQ ID NO: 1640941 - RNA, 19 nt, Artificial Sequence
  Description of Artificial Sequence: Synthetic oligonucleotide
aacaacagcaguguguguc

SEQ ID NO: 1640942 - RNA, 19 nt, Artificial Sequence
  Description of Artificial Sequence: Synthetic oligonucleotide
uuauaucaggaacagacaa

SEQ ID NO: 1640943 - RNA, 19 nt, Artificial Sequence
  Description of Artificial Sequence: Synthetic oligonucleotide
aauauagugaugugcgcca

SEQ ID NO: 1640944 - RNA, 19 nt, Artificial Sequence
  Description of Artificial Sequence: Synthetic oligonucleotide
gaaauagaccuucacggag

SEQ ID NO: 1640945 - RNA, 19 nt, Artificial Sequence
  Description of Artificial Sequence: Synthetic oligonucleotide
aacucauagacaucaugag

SEQ ID NO: 1640946 - RNA, 19 nt, Artificial Sequence
  Description of Artificial Sequence: Synthetic oligonucleotide
cugaucaacaagcagauuc

SEQ ID NO: 1640947 - RNA, 19 nt, Artificial Sequence
  Description of Artificial Sequence: Synthetic oligonucleotide
ucauaaaagccgaacuugc

SEQ ID NO: 1640948 - RNA, 19 nt, Artificial Sequence
  Description of Artificial Sequence: Synthetic oligonucleotide
aacaauugcacagaagacu

SEQ ID NO: 1640949 - RNA, 19 nt, Artificial Sequence
  Description of Artificial Sequence: Synthetic oligonucleotide
aaaagccgaacuugcagag

SEQ ID NO: 1640950 - RNA, 19 nt, Artificial Sequence
  Description of Artificial Sequence: Synthetic oligonucleotide
ugugugucagcccacaacu

SEQ ID NO: 1640951 - RNA, 19 nt, Artificial Sequence
  Description of Artificial Sequence: Synthetic oligonucleotide
aaucaugaugauucgggca

SEQ ID NO: 1640952 - RNA, 19 nt, Artificial Sequence
  Description of Artificial Sequence: Synthetic oligonucleotide
aauaacaaacucauagaca

SEQ ID NO: 1640953 - RNA, 19 nt, Artificial Sequence
  Description of Artificial Sequence: Synthetic oligonucleotide
uucaacgguacguucaaag

SEQ ID NO: 1640954 - RNA, 19 nt, Artificial Sequence
  Description of Artificial Sequence: Synthetic oligonucleotide
ugacguacuagcuacucag

SEQ ID NO: 1640955 - RNA, 19 nt, Artificial Sequence
  Description of Artificial Sequence: Synthetic oligonucleotide
aauccauuaaauauacccu

SEQ ID NO: 1640956 - RNA, 19 nt, Artificial Sequence
  Description of Artificial Sequence: Synthetic oligonucleotide
uguaaccugccacaaaugu

SEQ ID NO: 1640957 - RNA, 19 nt, Artificial Sequence
  Description of Artificial Sequence: Synthetic oligonucleotide
uucaguguaacggagaauc

SEQ ID NO: 1640958 - RNA, 19 nt, Artificial Sequence
  Description of Artificial Sequence: Synthetic oligonucleotide
cauagaugaaccacuguag

SEQ ID NO: 1640959 - RNA, 19 nt, Artificial Sequence
  Description of Artificial Sequence: Synthetic oligonucleotide
aguaauuauaucaggaaca

SEQ ID NO: 1640960 - RNA, 19 nt, Artificial Sequence
  Description of Artificial Sequence: Synthetic oligonucleotide
uagccaauaaaaguugggg

SEQ ID NO: 1640961 - RNA, 19 nt, Artificial Sequence
  Description of Artificial Sequence: Synthetic oligonucleotide
cuuuauacauuuugggaac

SEQ ID NO: 1640962 - RNA, 19 nt, Artificial Sequence
  Description of Artificial Sequence: Synthetic oligonucleotide
uacuaaauccagaggaaca

SEQ ID NO: 1640963 - RNA, 19 nt, Artificial Sequence
  Description of Artificial Sequence: Synthetic oligonucleotide
aacagcuucccucaacgug

SEQ ID NO: 1640964 - RNA, 19 nt, Artificial Sequence
  Description of Artificial Sequence: Synthetic oligonucleotide
aaauuuguacaaugcuuca

SEQ ID NO: 1640965 - RNA, 19 nt, Artificial Sequence
  Description of Artificial Sequence: Synthetic oligonucleotide
uucacuucgggguuuagga

SEQ ID NO: 1640966 - RNA, 19 nt, Artificial Sequence
  Description of Artificial Sequence: Synthetic oligonucleotide
acgcauuuaagccuucuuc

SEQ ID NO: 1640967 - RNA, 19 nt, Artificial Sequence
  Description of Artificial Sequence: Synthetic oligonucleotide
aagacuccagcuauguaac

SEQ ID NO: 1640968 - RNA, 19 nt, Artificial Sequence
  Description of Artificial Sequence: Synthetic oligonucleotide
acaauugcacagaagacuc

SEQ ID NO: 1640969 - RNA, 19 nt, Artificial Sequence
  Description of Artificial Sequence: Synthetic oligonucleotide
cuugcuuuaagcaagggua

SEQ ID NO: 1640970 - RNA, 19 nt, Artificial Sequence
  Description of Artificial Sequence: Synthetic oligonucleotide
uaaguuugaaacucuugcu

SEQ ID NO: 1640971 - RNA, 19 nt, Artificial Sequence
  Description of Artificial Sequence: Synthetic oligonucleotide
aacucuugcuuuaagcaag

SEQ ID NO: 1640972 - RNA, 19 nt, Artificial Sequence
  Description of Artificial Sequence: Synthetic oligonucleotide
ugaaauagaccuucacgga

SEQ ID NO: 1640973 - RNA, 19 nt, Artificial Sequence
  Description of Artificial Sequence: Synthetic oligonucleotide
aacuuuaguagcuuccaua

SEQ ID NO: 1640974 - RNA, 19 nt, Artificial Sequence
  Description of Artificial Sequence: Synthetic oligonucleotide
ucaacgguacguucaaagc

SEQ ID NO: 1640975 - RNA, 19 nt, Artificial Sequence
  Description of Artificial Sequence: Synthetic oligonucleotide
ucgaacuuuaguagcuucc

SEQ ID NO: 1640976 - RNA, 19 nt, Artificial Sequence
  Description of Artificial Sequence: Synthetic oligonucleotide
uaaauauagugaugugcgc

SEQ ID NO: 1640977 - RNA, 19 nt, Artificial Sequence
  Description of Artificial Sequence: Synthetic oligonucleotide
agcagauucaguccauguc

SEQ ID NO: 1640978 - RNA, 19 nt, Artificial Sequence
  Description of Artificial Sequence: Synthetic oligonucleotide
ucaccaagcauguugcugu

SEQ ID NO: 1640979 - RNA, 19 nt, Artificial Sequence
  Description of Artificial Sequence: Synthetic oligonucleotide
ucaacguguuggcauagcc

SEQ ID NO: 1640980 - RNA, 19 nt, Artificial Sequence
  Description of Artificial Sequence: Synthetic oligonucleotide
aacgguacguucaaagcag

SEQ ID NO: 1640981 - RNA, 19 nt, Artificial Sequence
  Description of Artificial Sequence: Synthetic oligonucleotide
cuagcuacucagcuaaccc

SEQ ID NO: 1640982 - RNA, 19 nt, Artificial Sequence
  Description of Artificial Sequence: Synthetic oligonucleotide
agcagcuaaauauagugau

SEQ ID NO: 1640983 - RNA, 19 nt, Artificial Sequence
  Description of Artificial Sequence: Synthetic oligonucleotide
uaagcaaggguacuacagu

SEQ ID NO: 1640984 - RNA, 19 nt, Artificial Sequence
  Description of Artificial Sequence: Synthetic oligonucleotide
ucagcccacaacuuaagac

SEQ ID NO: 1640985 - RNA, 19 nt, Artificial Sequence
  Description of Artificial Sequence: Synthetic oligonucleotide
agugaugugcgccacagau

SEQ ID NO: 1640986 - RNA, 19 nt, Artificial Sequence
  Description of Artificial Sequence: Synthetic oligonucleotide
aaggguacuacaguaauua

SEQ ID NO: 1640987 - RNA, 19 nt, Artificial Sequence
  Description of Artificial Sequence: Synthetic oligonucleotide
uucuuucaguguaacggag

SEQ ID NO: 1640988 - RNA, 19 nt, Artificial Sequence
  Description of Artificial Sequence: Synthetic oligonucleotide
ugcuguauaaggcuuugaa

SEQ ID NO: 1640989 - RNA, 19 nt, Artificial Sequence
  Description of Artificial Sequence: Synthetic oligonucleotide
acuagcuacucagcuaacc

SEQ ID NO: 1640990 - RNA, 19 nt, Artificial Sequence
  Description of Artificial Sequence: Synthetic oligonucleotide
agauggcgaacacccaacc

SEQ ID NO: 1640991 - RNA, 19 nt, Artificial Sequence
  Description of Artificial Sequence: Synthetic oligonucleotide
uacaaugcuucaacgguac

SEQ ID NO: 1640992 - RNA, 19 nt, Artificial Sequence
  Description of Artificial Sequence: Synthetic oligonucleotide
uauaucaggaacagacaau

SEQ ID NO: 1640993 - RNA, 19 nt, Artificial Sequence
  Description of Artificial Sequence: Synthetic oligonucleotide
acucauagacaucaugagu

SEQ ID NO: 1640994 - RNA, 19 nt, Artificial Sequence
  Description of Artificial Sequence: Synthetic oligonucleotide
uaagauggcgaacacccaa

SEQ ID NO: 1640995 - RNA, 19 nt, Artificial Sequence
  Description of Artificial Sequence: Synthetic oligonucleotide
gagaauccauuaaauauac

SEQ ID NO: 1640996 - RNA, 19 nt, Artificial Sequence
  Description of Artificial Sequence: Synthetic oligonucleotide
uuuaagcaaggguacuaca

SEQ ID NO: 1640997 - RNA, 19 nt, Artificial Sequence
  Description of Artificial Sequence: Synthetic oligonucleotide
auuuccuacacugucaaau

SEQ ID NO: 1640998 - RNA, 19 nt, Artificial Sequence
  Description of Artificial Sequence: Synthetic oligonucleotide
uuagccaaaccacgaacac

SEQ ID NO: 1640999 - RNA, 19 nt, Artificial Sequence
  Description of Artificial Sequence: Synthetic oligonucleotide
aguccaugucacuuugacg

SEQ ID NO: 1641000 - RNA, 19 nt, Artificial Sequence
  Description of Artificial Sequence: Synthetic oligonucleotide
gauggcgaacacccaaccg

SEQ ID NO: 1641001 - RNA, 19 nt, Artificial Sequence
  Description of Artificial Sequence: Synthetic oligonucleotide
gccaauaaaaguuggggcc

SEQ ID NO: 1641002 - RNA, 19 nt, Artificial Sequence
  Description of Artificial Sequence: Synthetic oligonucleotide
uacucagcuaacccaagcu

SEQ ID NO: 1641003 - RNA, 19 nt, Artificial Sequence
  Description of Artificial Sequence: Synthetic oligonucleotide
caaucaugaugauucgggc

SEQ ID NO: 1641004 - RNA, 19 nt, Artificial Sequence
  Description of Artificial Sequence: Synthetic oligonucleotide
ugcuucaacgguacguuca

SEQ ID NO: 1641005 - RNA, 19 nt, Artificial Sequence
  Description of Artificial Sequence: Synthetic oligonucleotide
aaaguuggggcccauccuu

SEQ ID NO: 1641006 - RNA, 19 nt, Artificial Sequence
  Description of Artificial Sequence: Synthetic oligonucleotide
aaagccgaacuugcagagc

SEQ ID NO: 1641007 - RNA, 19 nt, Artificial Sequence
  Description of Artificial Sequence: Synthetic oligonucleotide
ccaaucaugaugauucggg

SEQ ID NO: 1641008 - RNA, 19 nt, Artificial Sequence
  Description of Artificial Sequence: Synthetic oligonucleotide
aguuugaaacucuugcuuu

SEQ ID NO: 1641009 - RNA, 19 nt, Artificial Sequence
  Description of Artificial Sequence: Synthetic oligonucleotide
gcuaaauauagugaugugc

SEQ ID NO: 1641010 - RNA, 19 nt, Artificial Sequence
  Description of Artificial Sequence: Synthetic oligonucleotide
gugccaaucaugaugauuc

SEQ ID NO: 1641011 - RNA, 19 nt, Artificial Sequence
  Description of Artificial Sequence: Synthetic oligonucleotide
uugcuuuaagcaaggguac

SEQ ID NO: 1641012 - RNA, 19 nt, Artificial Sequence
  Description of Artificial Sequence: Synthetic oligonucleotide
aaauagaccuucacggagu

SEQ ID NO: 1641013 - RNA, 19 nt, Artificial Sequence
  Description of Artificial Sequence: Synthetic oligonucleotide
uguaacggagaauccauua

SEQ ID NO: 1641014 - RNA, 19 nt, Artificial Sequence
  Description of Artificial Sequence: Synthetic oligonucleotide
aagauggcgaacacccaac

SEQ ID NO: 1641015 - RNA, 19 nt, Artificial Sequence
  Description of Artificial Sequence: Synthetic oligonucleotide
ugcgccacggacgagaaca

SEQ ID NO: 1641016 - RNA, 19 nt, Artificial Sequence
  Description of Artificial Sequence: Synthetic oligonucleotide
cuuuagccaaaccacgaac

SEQ ID NO: 1641017 - RNA, 19 nt, Artificial Sequence
  Description of Artificial Sequence: Synthetic oligonucleotide
ugguguaugggaucugucu

SEQ ID NO: 1641018 - RNA, 19 nt, Artificial Sequence
  Description of Artificial Sequence: Synthetic oligonucleotide
uccuuuagccaaaccacga

SEQ ID NO: 1641019 - RNA, 19 nt, Artificial Sequence
  Description of Artificial Sequence: Synthetic oligonucleotide
agguguuuuccucaccaag

SEQ ID NO: 1641020 - RNA, 19 nt, Artificial Sequence
  Description of Artificial Sequence: Synthetic oligonucleotide
auuuugggaacagcuuccc

SEQ ID NO: 1641021 - RNA, 19 nt, Artificial Sequence
  Description of Artificial Sequence: Synthetic oligonucleotide
agaaucagcagggugagaa

SEQ ID NO: 1641022 - RNA, 19 nt, Artificial Sequence
  Description of Artificial Sequence: Synthetic oligonucleotide
aagcaaggguacuacagua

SEQ ID NO: 1641023 - RNA, 19 nt, Artificial Sequence
  Description of Artificial Sequence: Synthetic oligonucleotide
acggacgagaacauccucc

SEQ ID NO: 1641024 - RNA, 19 nt, Artificial Sequence
  Description of Artificial Sequence: Synthetic oligonucleotide
cacaacuuaagaccccacc

SEQ ID NO: 1641025 - RNA, 19 nt, Artificial Sequence
  Description of Artificial Sequence: Synthetic oligonucleotide
aggugcggcgcguugaagg

SEQ ID NO: 1641026 - RNA, 19 nt, Artificial Sequence
  Description of Artificial Sequence: Synthetic oligonucleotide
ugcggcauuuuacuaaauc

SEQ ID NO: 1641027 - RNA, 19 nt, Artificial Sequence
  Description of Artificial Sequence: Synthetic oligonucleotide
auacccuuguacuucugug

SEQ ID NO: 1641028 - RNA, 19 nt, Artificial Sequence
  Description of Artificial Sequence: Synthetic oligonucleotide
ugucacuuugacguacuag

SEQ ID NO: 1641029 - RNA, 19 nt, Artificial Sequence
  Description of Artificial Sequence: Synthetic oligonucleotide
ucacuuugacguacuagcu

SEQ ID NO: 1641030 - RNA, 19 nt, Artificial Sequence
  Description of Artificial Sequence: Synthetic oligonucleotide
uggauggguuuauuuagca

SEQ ID NO: 1641031 - RNA, 19 nt, Artificial Sequence
  Description of Artificial Sequence: Synthetic oligonucleotide
guacguucaaagcaggcga

SEQ ID NO: 1641032 - RNA, 19 nt, Artificial Sequence
  Description of Artificial Sequence: Synthetic oligonucleotide
aauuuguacaaugcuucaa

SEQ ID NO: 1641033 - RNA, 19 nt, Artificial Sequence
  Description of Artificial Sequence: Synthetic oligonucleotide
uugacguacuagcuacuca

SEQ ID NO: 1641034 - RNA, 19 nt, Artificial Sequence
  Description of Artificial Sequence: Synthetic oligonucleotide
gaggccaucgugcaccagc

SEQ ID NO: 1641035 - RNA, 19 nt, Artificial Sequence
  Description of Artificial Sequence: Synthetic oligonucleotide
uagaacgcauuuaagccuu

SEQ ID NO: 1641036 - RNA, 19 nt, Artificial Sequence
  Description of Artificial Sequence: Synthetic oligonucleotide
gucaaagugccaaucauga

SEQ ID NO: 1641037 - RNA, 19 nt, Artificial Sequence
  Description of Artificial Sequence: Synthetic oligonucleotide
agcuaacccaagcuucuuc

SEQ ID NO: 1641038 - RNA, 19 nt, Artificial Sequence
  Description of Artificial Sequence: Synthetic oligonucleotide
guacuagcuacucagcuaa

SEQ ID NO: 1641039 - RNA, 19 nt, Artificial Sequence
  Description of Artificial Sequence: Synthetic oligonucleotide
acacccaaccgcucgcucg

SEQ ID NO: 1641040 - RNA, 19 nt, Artificial Sequence
  Description of Artificial Sequence: Synthetic oligonucleotide
acuucgggguuuaggaacc

SEQ ID NO: 1641041 - RNA, 19 nt, Artificial Sequence
  Description of Artificial Sequence: Synthetic oligonucleotide
ugccuuuguacauucacuu

SEQ ID NO: 1641042 - RNA, 19 nt, Artificial Sequence
  Description of Artificial Sequence: Synthetic oligonucleotide
uccuacacugucaaauaua

SEQ ID NO: 1641043 - RNA, 19 nt, Artificial Sequence
  Description of Artificial Sequence: Synthetic oligonucleotide
caaaccacgaacaccaucu

SEQ ID NO: 1641044 - RNA, 19 nt, Artificial Sequence
  Description of Artificial Sequence: Synthetic oligonucleotide
ugccaaucaugaugauucg

SEQ ID NO: 1641045 - RNA, 19 nt, Artificial Sequence
  Description of Artificial Sequence: Synthetic oligonucleotide
uuuccuacacugucaaaua

SEQ ID NO: 1641046 - RNA, 19 nt, Artificial Sequence
  Description of Artificial Sequence: Synthetic oligonucleotide
cuuuaagcaaggguacuac

SEQ ID NO: 1641047 - RNA, 19 nt, Artificial Sequence
  Description of Artificial Sequence: Synthetic oligonucleotide
aagcagcuaaauauaguga

SEQ ID NO: 1641048 - RNA, 19 nt, Artificial Sequence
  Description of Artificial Sequence: Synthetic oligonucleotide
ucgggguuuaggaaccaca

SEQ ID NO: 1641049 - RNA, 19 nt, Artificial Sequence
  Description of Artificial Sequence: Synthetic oligonucleotide
aaagaggcccuuccacaca

SEQ ID NO: 1641050 - RNA, 19 nt, Artificial Sequence
  Description of Artificial Sequence: Synthetic oligonucleotide
auuauaucaggaacagaca

SEQ ID NO: 1641051 - RNA, 19 nt, Artificial Sequence
  Description of Artificial Sequence: Synthetic oligonucleotide
agcuaaauauagugaugug

SEQ ID NO: 1641052 - RNA, 19 nt, Artificial Sequence
  Description of Artificial Sequence: Synthetic oligonucleotide
agacuccagcuauguaacc

SEQ ID NO: 1641053 - RNA, 19 nt, Artificial Sequence
  Description of Artificial Sequence: Synthetic oligonucleotide
gguacguucaaagcaggcg

SEQ ID NO: 1641054 - RNA, 19 nt, Artificial Sequence
  Description of Artificial Sequence: Synthetic oligonucleotide
uggguuugaauucgaacuu

SEQ ID NO: 1641055 - RNA, 19 nt, Artificial Sequence
  Description of Artificial Sequence: Synthetic oligonucleotide
gacuucauaaaagccgaac

SEQ ID NO: 1641056 - RNA, 19 nt, Artificial Sequence
  Description of Artificial Sequence: Synthetic oligonucleotide
agcccuugcauggaauagc

SEQ ID NO: 1641057 - RNA, 19 nt, Artificial Sequence
  Description of Artificial Sequence: Synthetic oligonucleotide
acguacuagcuacucagcu

SEQ ID NO: 1641058 - RNA, 19 nt, Artificial Sequence
  Description of Artificial Sequence: Synthetic oligonucleotide
uucgaacuuuaguagcuuc

SEQ ID NO: 1641059 - RNA, 19 nt, Artificial Sequence
  Description of Artificial Sequence: Synthetic oligonucleotide
auucaguacagagaccaca

SEQ ID NO: 1641060 - RNA, 19 nt, Artificial Sequence
  Description of Artificial Sequence: Synthetic oligonucleotide
agucaaagugccaaucaug

SEQ ID NO: 1641061 - RNA, 19 nt, Artificial Sequence
  Description of Artificial Sequence: Synthetic oligonucleotide
uacuucauggagccaaauu

SEQ ID NO: 1641062 - RNA, 19 nt, Artificial Sequence
  Description of Artificial Sequence: Synthetic oligonucleotide
uucagagacgcuggcaucu

SEQ ID NO: 1641063 - RNA, 19 nt, Artificial Sequence
  Description of Artificial Sequence: Synthetic oligonucleotide
gauagguguuuuccucacc

SEQ ID NO: 1641064 - RNA, 19 nt, Artificial Sequence
  Description of Artificial Sequence: Synthetic oligonucleotide
uaauuauaucaggaacaga

SEQ ID NO: 1641065 - RNA, 19 nt, Artificial Sequence
  Description of Artificial Sequence: Synthetic oligonucleotide
acaacagcaguguguguca

SEQ ID NO: 1641066 - RNA, 19 nt, Artificial Sequence
  Description of Artificial Sequence: Synthetic oligonucleotide
cuucuuucaguguaacgga

SEQ ID NO: 1641067 - RNA, 19 nt, Artificial Sequence
  Description of Artificial Sequence: Synthetic oligonucleotide
caacgguacguucaaagca

SEQ ID NO: 1641068 - RNA, 19 nt, Artificial Sequence
  Description of Artificial Sequence: Synthetic oligonucleotide
cagauucaguccaugucac

SEQ ID NO: 1641069 - RNA, 19 nt, Artificial Sequence
  Description of Artificial Sequence: Synthetic oligonucleotide
cacggagucauagaugaac

SEQ ID NO: 1641070 - RNA, 19 nt, Artificial Sequence
  Description of Artificial Sequence: Synthetic oligonucleotide
cuacccuucucuuuauuca

SEQ ID NO: 1641071 - RNA, 19 nt, Artificial Sequence
  Description of Artificial Sequence: Synthetic oligonucleotide
gcagauucaguccauguca

SEQ ID NO: 1641072 - RNA, 19 nt, Artificial Sequence
  Description of Artificial Sequence: Synthetic oligonucleotide
aacgcauuuaagccuucuu

SEQ ID NO: 1641073 - RNA, 19 nt, Artificial Sequence
  Description of Artificial Sequence: Synthetic oligonucleotide
uauucaguacagagaccac

SEQ ID NO: 1641074 - RNA, 19 nt, Artificial Sequence
  Description of Artificial Sequence: Synthetic oligonucleotide
ucuuccacggcggcggcgg

SEQ ID NO: 1641075 - RNA, 19 nt, Artificial Sequence
  Description of Artificial Sequence: Synthetic oligonucleotide
uccagcuauguaaccugcc

SEQ ID NO: 1641076 - RNA, 19 nt, Artificial Sequence
  Description of Artificial Sequence: Synthetic oligonucleotide
augugcgccacagauaggu

SEQ ID NO: 1641077 - RNA, 19 nt, Artificial Sequence
  Description of Artificial Sequence: Synthetic oligonucleotide
gcauaauacuucauggagc

SEQ ID NO: 1641078 - RNA, 19 nt, Artificial Sequence
  Description of Artificial Sequence: Synthetic oligonucleotide
uccuaagauggcgaacacc

SEQ ID NO: 1641079 - RNA, 19 nt, Artificial Sequence
  Description of Artificial Sequence: Synthetic oligonucleotide
uagccaaaccacgaacacc

SEQ ID NO: 1641080 - RNA, 19 nt, Artificial Sequence
  Description of Artificial Sequence: Synthetic oligonucleotide
uccauaggagccagggcaa

SEQ ID NO: 1641081 - RNA, 19 nt, Artificial Sequence
  Description of Artificial Sequence: Synthetic oligonucleotide
cauaaaagccgaacuugca

SEQ ID NO: 1641082 - RNA, 19 nt, Artificial Sequence
  Description of Artificial Sequence: Synthetic oligonucleotide
uuggggcccauccuuuagc

SEQ ID NO: 1641083 - RNA, 19 nt, Artificial Sequence
  Description of Artificial Sequence: Synthetic oligonucleotide
cuucccucaacguguuggc

SEQ ID NO: 1641084 - RNA, 19 nt, Artificial Sequence
  Description of Artificial Sequence: Synthetic oligonucleotide
ugcauggaauagccaauaa

SEQ ID NO: 1641085 - RNA, 19 nt, Artificial Sequence
  Description of Artificial Sequence: Synthetic oligonucleotide
guagaacgcauuuaagccu

SEQ ID NO: 1641086 - RNA, 19 nt, Artificial Sequence
  Description of Artificial Sequence: Synthetic oligonucleotide
aagcagugcuacccuucuc

SEQ ID NO: 1641087 - RNA, 19 nt, Artificial Sequence
  Description of Artificial Sequence: Synthetic oligonucleotide
augcuucaacgguacguuc

SEQ ID NO: 1641088 - RNA, 19 nt, Artificial Sequence
  Description of Artificial Sequence: Synthetic oligonucleotide
aauuuccuacacugucaaa

SEQ ID NO: 1641089 - RNA, 19 nt, Artificial Sequence
  Description of Artificial Sequence: Synthetic oligonucleotide
uacguucaaagcaggcgaa

SEQ ID NO: 1641090 - RNA, 19 nt, Artificial Sequence
  Description of Artificial Sequence: Synthetic oligonucleotide
aacuugcagagcccuugca

SEQ ID NO: 1641091 - RNA, 19 nt, Artificial Sequence
  Description of Artificial Sequence: Synthetic oligonucleotide
auagacaucaugaguggau

SEQ ID NO: 1641092 - RNA, 19 nt, Artificial Sequence
  Description of Artificial Sequence: Synthetic oligonucleotide
gguacuacaguaauuauau

SEQ ID NO: 1641093 - RNA, 19 nt, Artificial Sequence
  Description of Artificial Sequence: Synthetic oligonucleotide
ucaaagugccaaucaugau

SEQ ID NO: 1641094 - RNA, 19 nt, Artificial Sequence
  Description of Artificial Sequence: Synthetic oligonucleotide
guagugcagucaaagugcc

SEQ ID NO: 1641095 - RNA, 19 nt, Artificial Sequence
  Description of Artificial Sequence: Synthetic oligonucleotide
aguguaacggagaauccau

SEQ ID NO: 1641096 - RNA, 19 nt, Artificial Sequence
  Description of Artificial Sequence: Synthetic oligonucleotide
ggagucauagaugaaccac

SEQ ID NO: 1641097 - RNA, 19 nt, Artificial Sequence
  Description of Artificial Sequence: Synthetic oligonucleotide
aggaacagacaauuuccua

SEQ ID NO: 1641098 - RNA, 19 nt, Artificial Sequence
  Description of Artificial Sequence: Synthetic oligonucleotide
ucacuucgggguuuaggaa

SEQ ID NO: 1641099 - RNA, 19 nt, Artificial Sequence
  Description of Artificial Sequence: Synthetic oligonucleotide
gugugugucagcccacaac

SEQ ID NO: 1641100 - RNA, 19 nt, Artificial Sequence
  Description of Artificial Sequence: Synthetic oligonucleotide
ccaauaaaaguuggggccc

SEQ ID NO: 1641101 - RNA, 19 nt, Artificial Sequence
  Description of Artificial Sequence: Synthetic oligonucleotide
ugugcgccacagauaggug

SEQ ID NO: 1641102 - RNA, 19 nt, Artificial Sequence
  Description of Artificial Sequence: Synthetic oligonucleotide
gcauguugcuguauaaggc

SEQ ID NO: 1641103 - RNA, 19 nt, Artificial Sequence
  Description of Artificial Sequence: Synthetic oligonucleotide
caacguguuggcauagcca

SEQ ID NO: 1641104 - RNA, 19 nt, Artificial Sequence
  Description of Artificial Sequence: Synthetic oligonucleotide
acguucaaagcaggcgaac

SEQ ID NO: 1641105 - RNA, 19 nt, Artificial Sequence
  Description of Artificial Sequence: Synthetic oligonucleotide
guaaccugccacaaauguc

SEQ ID NO: 1641106 - RNA, 19 nt, Artificial Sequence
  Description of Artificial Sequence: Synthetic oligonucleotide
caauuuccuacacugucaa

SEQ ID NO: 1641107 - RNA, 19 nt, Artificial Sequence
  Description of Artificial Sequence: Synthetic oligonucleotide
ugcuuuaagcaaggguacu

SEQ ID NO: 1641108 - RNA, 19 nt, Artificial Sequence
  Description of Artificial Sequence: Synthetic oligonucleotide
gacguacuagcuacucagc

SEQ ID NO: 1641109 - RNA, 19 nt, Artificial Sequence
  Description of Artificial Sequence: Synthetic oligonucleotide
caugaugauucgggcaaag

SEQ ID NO: 1641110 - RNA, 19 nt, Artificial Sequence
  Description of Artificial Sequence: Synthetic oligonucleotide
uucgcccgggccaggugcg

SEQ ID NO: 1641111 - RNA, 19 nt, Artificial Sequence
  Description of Artificial Sequence: Synthetic oligonucleotide
guucgcccgggccaggugc

SEQ ID NO: 1641112 - RNA, 19 nt, Artificial Sequence
  Description of Artificial Sequence: Synthetic oligonucleotide
guuggggcccauccuuuag

SEQ ID NO: 1641113 - RNA, 19 nt, Artificial Sequence
  Description of Artificial Sequence: Synthetic oligonucleotide
gagcccuugcauggaauag

SEQ ID NO: 1641114 - RNA, 19 nt, Artificial Sequence
  Description of Artificial Sequence: Synthetic oligonucleotide
aucaacaagcagauucagu

SEQ ID NO: 1641115 - RNA, 19 nt, Artificial Sequence
  Description of Artificial Sequence: Synthetic oligonucleotide
ugcgccacagauagguguu

SEQ ID NO: 1641116 - RNA, 19 nt, Artificial Sequence
  Description of Artificial Sequence: Synthetic oligonucleotide
caacuuaagaccccaccaa

SEQ ID NO: 1641117 - RNA, 19 nt, Artificial Sequence
  Description of Artificial Sequence: Synthetic oligonucleotide
ggguuuaggaaccacaaau

SEQ ID NO: 1641118 - RNA, 19 nt, Artificial Sequence
  Description of Artificial Sequence: Synthetic oligonucleotide
ugcaugcggcauuuuacua

SEQ ID NO: 1641119 - RNA, 19 nt, Artificial Sequence
  Description of Artificial Sequence: Synthetic oligonucleotide
cagcuaaauauagugaugu

SEQ ID NO: 1641120 - RNA, 19 nt, Artificial Sequence
  Description of Artificial Sequence: Synthetic oligonucleotide
ggcaaagaggcccuuccac

SEQ ID NO: 1641121 - RNA, 19 nt, Artificial Sequence
  Description of Artificial Sequence: Synthetic oligonucleotide
aaccgcucgcucggcaagg

SEQ ID NO: 1641122 - RNA, 19 nt, Artificial Sequence
  Description of Artificial Sequence: Synthetic oligonucleotide
cacccaaccgcucgcucgg

SEQ ID NO: 1641123 - RNA, 19 nt, Artificial Sequence
  Description of Artificial Sequence: Synthetic oligonucleotide
cauccuccuaagauggcga

SEQ ID NO: 1641124 - RNA, 19 nt, Artificial Sequence
  Description of Artificial Sequence: Synthetic oligonucleotide
ggugcggcgcguugaaggg

SEQ ID NO: 1641125 - RNA, 19 nt, Artificial Sequence
  Description of Artificial Sequence: Synthetic oligonucleotide
uagguguuuuccucaccaa

SEQ ID NO: 1641126 - RNA, 19 nt, Artificial Sequence
  Description of Artificial Sequence: Synthetic oligonucleotide
aggguacuacaguaauuau

SEQ ID NO: 1641127 - RNA, 19 nt, Artificial Sequence
  Description of Artificial Sequence: Synthetic oligonucleotide
uaggaaccacaaauuugua

SEQ ID NO: 1641128 - RNA, 19 nt, Artificial Sequence
  Description of Artificial Sequence: Synthetic oligonucleotide
guacuacaguaauuauauc

SEQ ID NO: 1641129 - RNA, 19 nt, Artificial Sequence
  Description of Artificial Sequence: Synthetic oligonucleotide
uguacuucuguggguccac

SEQ ID NO: 1641130 - RNA, 19 nt, Artificial Sequence
  Description of Artificial Sequence: Synthetic oligonucleotide
gccacggacgagaacaucc

SEQ ID NO: 1641131 - RNA, 19 nt, Artificial Sequence
  Description of Artificial Sequence: Synthetic oligonucleotide
ucggcaaggcugcggcuca

SEQ ID NO: 1641132 - RNA, 19 nt, Artificial Sequence
  Description of Artificial Sequence: Synthetic oligonucleotide
auguaaccugccacaaaug

SEQ ID NO: 1641133 - RNA, 19 nt, Artificial Sequence
  Description of Artificial Sequence: Synthetic oligonucleotide
uggcgggaacgcuggggcg

SEQ ID NO: 1641134 - RNA, 19 nt, Artificial Sequence
  Description of Artificial Sequence: Synthetic oligonucleotide
caguguaacggagaaucca

SEQ ID NO: 1641135 - RNA, 19 nt, Artificial Sequence
  Description of Artificial Sequence: Synthetic oligonucleotide
uacuagcuacucagcuaac

SEQ ID NO: 1641136 - RNA, 19 nt, Artificial Sequence
  Description of Artificial Sequence: Synthetic oligonucleotide
gggugagaaacaauugcac

SEQ ID NO: 1641137 - RNA, 19 nt, Artificial Sequence
  Description of Artificial Sequence: Synthetic oligonucleotide
acgguacguucaaagcagg

SEQ ID NO: 1641138 - RNA, 19 nt, Artificial Sequence
  Description of Artificial Sequence: Synthetic oligonucleotide
aggcagccugaaauagacc

SEQ ID NO: 1641139 - RNA, 19 nt, Artificial Sequence
  Description of Artificial Sequence: Synthetic oligonucleotide
caacacccuuguagaacgc

SEQ ID NO: 1641140 - RNA, 19 nt, Artificial Sequence
  Description of Artificial Sequence: Synthetic oligonucleotide
agaagacuccagcuaugua

SEQ ID NO: 1641141 - RNA, 19 nt, Artificial Sequence
  Description of Artificial Sequence: Synthetic oligonucleotide
cuaagauggcgaacaccca

SEQ ID NO: 1641142 - RNA, 19 nt, Artificial Sequence
  Description of Artificial Sequence: Synthetic oligonucleotide
gcagcuaaauauagugaug

SEQ ID NO: 1641143 - RNA, 19 nt, Artificial Sequence
  Description of Artificial Sequence: Synthetic oligonucleotide
cauagacaucaugagugga

SEQ ID NO: 1641144 - RNA, 19 nt, Artificial Sequence
  Description of Artificial Sequence: Synthetic oligonucleotide
agcaaggguacuacaguaa

SEQ ID NO: 1641145 - RNA, 19 nt, Artificial Sequence
  Description of Artificial Sequence: Synthetic oligonucleotide
cauaggagccagggcaaug

SEQ ID NO: 1641146 - RNA, 19 nt, Artificial Sequence
  Description of Artificial Sequence: Synthetic oligonucleotide
guacaaugcuucaacggua

SEQ ID NO: 1641147 - RNA, 19 nt, Artificial Sequence
  Description of Artificial Sequence: Synthetic oligonucleotide
gaugugcgccacagauagg

SEQ ID NO: 1641148 - RNA, 19 nt, Artificial Sequence
  Description of Artificial Sequence: Synthetic oligonucleotide
cacuuugacguacuagcua

SEQ ID NO: 1641149 - RNA, 19 nt, Artificial Sequence
  Description of Artificial Sequence: Synthetic oligonucleotide
auucgaacuuuaguagcuu

SEQ ID NO: 1641150 - RNA, 19 nt, Artificial Sequence
  Description of Artificial Sequence: Synthetic oligonucleotide
ugcaggugcggcgcguuga

SEQ ID NO: 1641151 - RNA, 19 nt, Artificial Sequence
  Description of Artificial Sequence: Synthetic oligonucleotide
ggcgcguugaagggguucg

SEQ ID NO: 1641152 - RNA, 19 nt, Artificial Sequence
  Description of Artificial Sequence: Synthetic oligonucleotide
aagugccaaucaugaugau

SEQ ID NO: 1641153 - RNA, 19 nt, Artificial Sequence
  Description of Artificial Sequence: Synthetic oligonucleotide
ucacggagucauagaugaa

SEQ ID NO: 1641154 - RNA, 19 nt, Artificial Sequence
  Description of Artificial Sequence: Synthetic oligonucleotide
cacagauagguguuuuccu

SEQ ID NO: 1641155 - RNA, 19 nt, Artificial Sequence
  Description of Artificial Sequence: Synthetic oligonucleotide
ggaccugagaagcagugcu

SEQ ID NO: 1641156 - RNA, 19 nt, Artificial Sequence
  Description of Artificial Sequence: Synthetic oligonucleotide
gagcaacacccuuguagaa

SEQ ID NO: 1641157 - RNA, 19 nt, Artificial Sequence
  Description of Artificial Sequence: Synthetic oligonucleotide
gcaggcgaacuucaucaug

SEQ ID NO: 1641158 - RNA, 19 nt, Artificial Sequence
  Description of Artificial Sequence: Synthetic oligonucleotide
gcaugcggcauuuuacuaa

SEQ ID NO: 1641159 - RNA, 19 nt, Artificial Sequence
  Description of Artificial Sequence: Synthetic oligonucleotide
uucgggguuuaggaaccac

SEQ ID NO: 1641160 - RNA, 19 nt, Artificial Sequence
  Description of Artificial Sequence: Synthetic oligonucleotide
agaacgcauuuaagccuuc

SEQ ID NO: 1641161 - RNA, 19 nt, Artificial Sequence
  Description of Artificial Sequence: Synthetic oligonucleotide
cucggcaaggcugcggcuc

SEQ ID NO: 1641162 - RNA, 19 nt, Artificial Sequence
  Description of Artificial Sequence: Synthetic oligonucleotide
aggugcgccacggacgaga

SEQ ID NO: 1641163 - RNA, 19 nt, Artificial Sequence
  Description of Artificial Sequence: Synthetic oligonucleotide
guucaaagcaggcgaacuu

SEQ ID NO: 1641164 - RNA, 19 nt, Artificial Sequence
  Description of Artificial Sequence: Synthetic oligonucleotide
ugcuacccuucucuuuauu

SEQ ID NO: 1641165 - RNA, 19 nt, Artificial Sequence
  Description of Artificial Sequence: Synthetic oligonucleotide
cugcaugcggcauuuuacu

SEQ ID NO: 1641166 - RNA, 19 nt, Artificial Sequence
  Description of Artificial Sequence: Synthetic oligonucleotide
ggguacuacaguaauuaua

SEQ ID NO: 1641167 - RNA, 19 nt, Artificial Sequence
  Description of Artificial Sequence: Synthetic oligonucleotide
augaaccacuguagugcag

SEQ ID NO: 1641168 - RNA, 19 nt, Artificial Sequence
  Description of Artificial Sequence: Synthetic oligonucleotide
cacggacgagaacauccuc

SEQ ID NO: 1641169 - RNA, 19 nt, Artificial Sequence
  Description of Artificial Sequence: Synthetic oligonucleotide
gugcgccacagauaggugu

SEQ ID NO: 1641170 - RNA, 19 nt, Artificial Sequence
  Description of Artificial Sequence: Synthetic oligonucleotide
ugggaacagcuucccucaa

SEQ ID NO: 1641171 - RNA, 19 nt, Artificial Sequence
  Description of Artificial Sequence: Synthetic oligonucleotide
guacuucuguggguccacc

SEQ ID NO: 1641172 - RNA, 19 nt, Artificial Sequence
  Description of Artificial Sequence: Synthetic oligonucleotide
ucgcucggcaaggcugcgg

SEQ ID NO: 1641173 - RNA, 19 nt, Artificial Sequence
  Description of Artificial Sequence: Synthetic oligonucleotide
gcccuugcauggaauagcc

SEQ ID NO: 1641174 - RNA, 19 nt, Artificial Sequence
  Description of Artificial Sequence: Synthetic oligonucleotide
gguggcgggaacgcugggg

SEQ ID NO: 1641175 - RNA, 19 nt, Artificial Sequence
  Description of Artificial Sequence: Synthetic oligonucleotide
gguuugaauucgaacuuua

SEQ ID NO: 1641176 - RNA, 19 nt, Artificial Sequence
  Description of Artificial Sequence: Synthetic oligonucleotide
guaugggaucugucucauc

SEQ ID NO: 1641177 - RNA, 19 nt, Artificial Sequence
  Description of Artificial Sequence: Synthetic oligonucleotide
gcacagaagacuccagcua

SEQ ID NO: 1641178 - RNA, 19 nt, Artificial Sequence
  Description of Artificial Sequence: Synthetic oligonucleotide
agggguucgcccgggccag

SEQ ID NO: 1641179 - RNA, 19 nt, Artificial Sequence
  Description of Artificial Sequence: Synthetic oligonucleotide
acagugcauaauacuucau

SEQ ID NO: 1641180 - RNA, 19 nt, Artificial Sequence
  Description of Artificial Sequence: Synthetic oligonucleotide
gugcggcgcguugaagggg

SEQ ID NO: 1641181 - RNA, 19 nt, Artificial Sequence
  Description of Artificial Sequence: Synthetic oligonucleotide
gccacagauagguguuuuc

SEQ ID NO: 1641182 - RNA, 19 nt, Artificial Sequence
  Description of Artificial Sequence: Synthetic oligonucleotide
gaacgcuggggcgggccug

SEQ ID NO: 1641183 - RNA, 19 nt, Artificial Sequence
  Description of Artificial Sequence: Synthetic oligonucleotide
caugguguaugggaucugu

SEQ ID NO: 1641184 - RNA, 19 nt, Artificial Sequence
  Description of Artificial Sequence: Synthetic oligonucleotide
gaccugagaagcagugcua

SEQ ID NO: 1641185 - RNA, 19 nt, Artificial Sequence
  Description of Artificial Sequence: Synthetic oligonucleotide
cuuugacguacuagcuacu

SEQ ID NO: 1641186 - RNA, 19 nt, Artificial Sequence
  Description of Artificial Sequence: Synthetic oligonucleotide
gaacgcauuuaagccuucu

SEQ ID NO: 1641187 - RNA, 19 nt, Artificial Sequence
  Description of Artificial Sequence: Synthetic oligonucleotide
cauucacuucgggguuuag

SEQ ID NO: 1641188 - RNA, 19 nt, Artificial Sequence
  Description of Artificial Sequence: Synthetic oligonucleotide
agacuucauaaaagccgaa

SEQ ID NO: 1641189 - RNA, 19 nt, Artificial Sequence
  Description of Artificial Sequence: Synthetic oligonucleotide
acauucacuucgggguuua

SEQ ID NO: 1641190 - RNA, 19 nt, Artificial Sequence
  Description of Artificial Sequence: Synthetic oligonucleotide
caguaaguuugaaacucuu

SEQ ID NO: 1641191 - RNA, 19 nt, Artificial Sequence
  Description of Artificial Sequence: Synthetic oligonucleotide
gcuacucagcuaacccaag

SEQ ID NO: 1641192 - RNA, 19 nt, Artificial Sequence
  Description of Artificial Sequence: Synthetic oligonucleotide
caaggguacuacaguaauu

SEQ ID NO: 1641193 - RNA, 19 nt, Artificial Sequence
  Description of Artificial Sequence: Synthetic oligonucleotide
gugaugugcgccacagaua

SEQ ID NO: 1641194 - RNA, 19 nt, Artificial Sequence
  Description of Artificial Sequence: Synthetic oligonucleotide
acccaaccgcucgcucggc

SEQ ID NO: 1641195 - RNA, 19 nt, Artificial Sequence
  Description of Artificial Sequence: Synthetic oligonucleotide
accaagcauguugcuguau

SEQ ID NO: 1641196 - RNA, 19 nt, Artificial Sequence
  Description of Artificial Sequence: Synthetic oligonucleotide
agggcgaggcagccugaaa

SEQ ID NO: 1641197 - RNA, 19 nt, Artificial Sequence
  Description of Artificial Sequence: Synthetic oligonucleotide
ccuuuagccaaaccacgaa

SEQ ID NO: 1641198 - RNA, 19 nt, Artificial Sequence
  Description of Artificial Sequence: Synthetic oligonucleotide
ccacaacuuaagaccccac

SEQ ID NO: 1641199 - RNA, 19 nt, Artificial Sequence
  Description of Artificial Sequence: Synthetic oligonucleotide
cccauccuuuagccaaacc

SEQ ID NO: 1641200 - RNA, 19 nt, Artificial Sequence
  Description of Artificial Sequence: Synthetic oligonucleotide
gggacccgagaggccaucg

SEQ ID NO: 1641201 - RNA, 19 nt, Artificial Sequence
  Description of Artificial Sequence: Synthetic oligonucleotide
gcaguaaguuugaaacucu

SEQ ID NO: 1641202 - RNA, 19 nt, Artificial Sequence
  Description of Artificial Sequence: Synthetic oligonucleotide
gcucgcucggcaaggcugc

SEQ ID NO: 1641203 - RNA, 19 nt, Artificial Sequence
  Description of Artificial Sequence: Synthetic oligonucleotide
cuuccacggcggcggcggc

SEQ ID NO: 1641204 - RNA, 19 nt, Artificial Sequence
  Description of Artificial Sequence: Synthetic oligonucleotide
gaacacccaaccgcucgcu

SEQ ID NO: 1641205 - RNA, 19 nt, Artificial Sequence
  Description of Artificial Sequence: Synthetic oligonucleotide
cucgcucggcaaggcugcg

SEQ ID NO: 1641206 - RNA, 19 nt, Artificial Sequence
  Description of Artificial Sequence: Synthetic oligonucleotide
cgcucggcaaggcugcggc

SEQ ID NO: 1641207 - RNA, 19 nt, Artificial Sequence
  Description of Artificial Sequence: Synthetic oligonucleotide
caggugcggcgcguugaag

SEQ ID NO: 1641208 - RNA, 19 nt, Artificial Sequence
  Description of Artificial Sequence: Synthetic oligonucleotide
caccaagcauguugcugua

SEQ ID NO: 1641209 - RNA, 19 nt, Artificial Sequence
  Description of Artificial Sequence: Synthetic oligonucleotide
ccucaacguguuggcauag

SEQ ID NO: 1641210 - RNA, 19 nt, Artificial Sequence
  Description of Artificial Sequence: Synthetic oligonucleotide
gguucgcccgggccaggug

SEQ ID NO: 1641211 - RNA, 19 nt, Artificial Sequence
  Description of Artificial Sequence: Synthetic oligonucleotide
gugcagucaaagugccaau

SEQ ID NO: 1641212 - RNA, 19 nt, Artificial Sequence
  Description of Artificial Sequence: Synthetic oligonucleotide
aggcuggguuugaauucga

SEQ ID NO: 1641213 - RNA, 19 nt, Artificial Sequence
  Description of Artificial Sequence: Synthetic oligonucleotide
cuucgggguuuaggaacca

SEQ ID NO: 1641214 - RNA, 19 nt, Artificial Sequence
  Description of Artificial Sequence: Synthetic oligonucleotide
gagggcgaggcagccugaa

SEQ ID NO: 1641215 - RNA, 19 nt, Artificial Sequence
  Description of Artificial Sequence: Synthetic oligonucleotide
cgggguuuaggaaccacaa

SEQ ID NO: 1641216 - RNA, 19 nt, Artificial Sequence
  Description of Artificial Sequence: Synthetic oligonucleotide
cccgagaggccaucgugca

SEQ ID NO: 1641217 - RNA, 19 nt, Artificial Sequence
  Description of Artificial Sequence: Synthetic oligonucleotide
guguaacggagaauccauu

SEQ ID NO: 1641218 - RNA, 19 nt, Artificial Sequence
  Description of Artificial Sequence: Synthetic oligonucleotide
cgaggcagccugaaauaga

SEQ ID NO: 1641219 - RNA, 19 nt, Artificial Sequence
  Description of Artificial Sequence: Synthetic oligonucleotide
cgcguugaagggguucgcc

SEQ ID NO: 1641220 - RNA, 19 nt, Artificial Sequence
  Description of Artificial Sequence: Synthetic oligonucleotide
cagugcuacccuucucuuu

SEQ ID NO: 1641221 - RNA, 19 nt, Artificial Sequence
  Description of Artificial Sequence: Synthetic oligonucleotide
cccucaacguguuggcaua

SEQ ID NO: 1641222 - RNA, 19 nt, Artificial Sequence
  Description of Artificial Sequence: Synthetic oligonucleotide
ccaaccgcucgcucggcaa

SEQ ID NO: 1641223 - RNA, 19 nt, Artificial Sequence
  Description of Artificial Sequence: Synthetic oligonucleotide
cccuugcauggaauagcca

SEQ ID NO: 1641224 - RNA, 19 nt, Artificial Sequence
  Description of Artificial Sequence: Synthetic oligonucleotide
gccgaacuugcagagcccu

SEQ ID NO: 1641225 - RNA, 19 nt, Artificial Sequence
  Description of Artificial Sequence: Synthetic oligonucleotide
ggaacgcuggggcgggccu

SEQ ID NO: 1641226 - RNA, 19 nt, Artificial Sequence
  Description of Artificial Sequence: Synthetic oligonucleotide
ccacggacgagaacauccu

SEQ ID NO: 1641227 - RNA, 19 nt, Artificial Sequence
  Description of Artificial Sequence: Synthetic oligonucleotide
cggacgagaacauccuccu

SEQ ID NO: 1641228 - RNA, 19 nt, Artificial Sequence
  Description of Artificial Sequence: Synthetic oligonucleotide
cguucaaagcaggcgaacu

SEQ ID NO: 1641229 - RNA, 19 nt, Artificial Sequence
  Description of Artificial Sequence: Synthetic oligonucleotide
ggacccgagaggccaucgu

SEQ ID NO: 1641230 - RNA, 19 nt, Artificial Sequence
  Description of Artificial Sequence: Synthetic oligonucleotide
gcgcguugaagggguucgc

SEQ ID NO: 1641231 - RNA, 19 nt, Artificial Sequence
  Description of Artificial Sequence: Synthetic oligonucleotide
cccaaccgcucgcucggca

SEQ ID NO: 1641232 - RNA, 19 nt, Artificial Sequence
  Description of Artificial Sequence: Synthetic oligonucleotide
ggagggcgaggcagccuga

SEQ ID NO: 1641233 - RNA, 19 nt, Artificial Sequence
  Description of Artificial Sequence: Synthetic oligonucleotide
ggggacccgagaggccauc

SEQ ID NO: 1641234 - RNA, 19 nt, Artificial Sequence
  Description of Artificial Sequence: Synthetic oligonucleotide
cagcuaacccaagcuucuu

SEQ ID NO: 1641235 - RNA, 19 nt, Artificial Sequence
  Description of Artificial Sequence: Synthetic oligonucleotide
gcucggcaaggcugcggcu

SEQ ID NO: 1641236 - RNA, 19 nt, Artificial Sequence
  Description of Artificial Sequence: Synthetic oligonucleotide
cggcgcguugaagggguuc

SEQ ID NO: 1641237 - RNA, 19 nt, Artificial Sequence
  Description of Artificial Sequence: Synthetic oligonucleotide
cgccacggacgagaacauc

SEQ ID NO: 1641238 - RNA, 19 nt, Artificial Sequence
  Description of Artificial Sequence: Synthetic oligonucleotide
ggguucgcccgggccaggu

SEQ ID NO: 1641239 - RNA, 19 nt, Artificial Sequence
  Description of Artificial Sequence: Synthetic oligonucleotide
gcgccacggacgagaacau

SEQ ID NO: 1641240 - RNA, 19 nt, Artificial Sequence
  Description of Artificial Sequence: Synthetic oligonucleotide
caccugcaugcggcauuuu

SEQ ID NO: 1641241 - RNA, 19 nt, Artificial Sequence
  Description of Artificial Sequence: Synthetic oligonucleotide
gcggcgcguugaagggguu

SEQ ID NO: 1641242 - RNA, 19 nt, Artificial Sequence
  Description of Artificial Sequence: Synthetic oligonucleotide
uucaaaacuaccuaaaacg

SEQ ID NO: 1641243 - RNA, 19 nt, Artificial Sequence
  Description of Artificial Sequence: Synthetic oligonucleotide
accuaaaacgaucauaccc

SEQ ID NO: 1641244 - RNA, 19 nt, Artificial Sequence
  Description of Artificial Sequence: Synthetic oligonucleotide
uuacacaugagucugagug

SEQ ID NO: 1641245 - RNA, 19 nt, Artificial Sequence
  Description of Artificial Sequence: Synthetic oligonucleotide
uaagucuuaaaauggaagg

SEQ ID NO: 1641246 - RNA, 19 nt, Artificial Sequence
  Description of Artificial Sequence: Synthetic oligonucleotide
aaaacgaucauacccaaga

SEQ ID NO: 1641247 - RNA, 19 nt, Artificial Sequence
  Description of Artificial Sequence: Synthetic oligonucleotide
aaucuggcagagcaaaggc

SEQ ID NO: 1641248 - RNA, 19 nt, Artificial Sequence
  Description of Artificial Sequence: Synthetic oligonucleotide
aaauggaaggacaaucucc

SEQ ID NO: 1641249 - RNA, 19 nt, Artificial Sequence
  Description of Artificial Sequence: Synthetic oligonucleotide
aauggaaggacaaucuccc

SEQ ID NO: 1641250 - RNA, 19 nt, Artificial Sequence
  Description of Artificial Sequence: Synthetic oligonucleotide
aaaacuaccuaaaacgauc

SEQ ID NO: 1641251 - RNA, 19 nt, Artificial Sequence
  Description of Artificial Sequence: Synthetic oligonucleotide
ugaaugauggccaccagag

SEQ ID NO: 1641252 - RNA, 19 nt, Artificial Sequence
  Description of Artificial Sequence: Synthetic oligonucleotide
ucaccaaagaugcugaaug

SEQ ID NO: 1641253 - RNA, 19 nt, Artificial Sequence
  Description of Artificial Sequence: Synthetic oligonucleotide
caagaauaaacucuguccc

SEQ ID NO: 1641254 - RNA, 19 nt, Artificial Sequence
  Description of Artificial Sequence: Synthetic oligonucleotide
ucaaagaaagcucugugac

SEQ ID NO: 1641255 - RNA, 19 nt, Artificial Sequence
  Description of Artificial Sequence: Synthetic oligonucleotide
cuaccuaaaacgaucauac

SEQ ID NO: 1641256 - RNA, 19 nt, Artificial Sequence
  Description of Artificial Sequence: Synthetic oligonucleotide
gguacuaagucuuaaaaug

SEQ ID NO: 1641257 - RNA, 19 nt, Artificial Sequence
  Description of Artificial Sequence: Synthetic oligonucleotide
uuugcucaaagaaagcucu

SEQ ID NO: 1641258 - RNA, 19 nt, Artificial Sequence
  Description of Artificial Sequence: Synthetic oligonucleotide
cuaagucuuaaaauggaag

SEQ ID NO: 1641259 - RNA, 19 nt, Artificial Sequence
  Description of Artificial Sequence: Synthetic oligonucleotide
uucacauuagaguggaggc

SEQ ID NO: 1641260 - RNA, 19 nt, Artificial Sequence
  Description of Artificial Sequence: Synthetic oligonucleotide
aauuugcucaaagaaagcu

SEQ ID NO: 1641261 - RNA, 19 nt, Artificial Sequence
  Description of Artificial Sequence: Synthetic oligonucleotide
aauaaacucugucccuggg

SEQ ID NO: 1641262 - RNA, 19 nt, Artificial Sequence
  Description of Artificial Sequence: Synthetic oligonucleotide
acgauuuccaguuacacau

SEQ ID NO: 1641263 - RNA, 19 nt, Artificial Sequence
  Description of Artificial Sequence: Synthetic oligonucleotide
aacaacaggaugccgucuc

SEQ ID NO: 1641264 - RNA, 19 nt, Artificial Sequence
  Description of Artificial Sequence: Synthetic oligonucleotide
agugucccugaauagaggg

SEQ ID NO: 1641265 - RNA, 19 nt, Artificial Sequence
  Description of Artificial Sequence: Synthetic oligonucleotide
uguggaagucuccuaaaag

SEQ ID NO: 1641266 - RNA, 19 nt, Artificial Sequence
  Description of Artificial Sequence: Synthetic oligonucleotide
ugcgguguaacccacugag

SEQ ID NO: 1641267 - RNA, 19 nt, Artificial Sequence
  Description of Artificial Sequence: Synthetic oligonucleotide
uuaaaauggaaggacaauc

SEQ ID NO: 1641268 - RNA, 19 nt, Artificial Sequence
  Description of Artificial Sequence: Synthetic oligonucleotide
uuuuauucauucucuugag

SEQ ID NO: 1641269 - RNA, 19 nt, Artificial Sequence
  Description of Artificial Sequence: Synthetic oligonucleotide
uucauuauucagaagcuau

SEQ ID NO: 1641270 - RNA, 19 nt, Artificial Sequence
  Description of Artificial Sequence: Synthetic oligonucleotide
uuggaaacgcgaaacaaac

SEQ ID NO: 1641271 - RNA, 19 nt, Artificial Sequence
  Description of Artificial Sequence: Synthetic oligonucleotide
gaguccuggacacucaggg

SEQ ID NO: 1641272 - RNA, 19 nt, Artificial Sequence
  Description of Artificial Sequence: Synthetic oligonucleotide
aggacaaucuccccugccc

SEQ ID NO: 1641273 - RNA, 19 nt, Artificial Sequence
  Description of Artificial Sequence: Synthetic oligonucleotide
guacuaagucuuaaaaugg

SEQ ID NO: 1641274 - RNA, 19 nt, Artificial Sequence
  Description of Artificial Sequence: Synthetic oligonucleotide
uuagaguggaggcugugcc

SEQ ID NO: 1641275 - RNA, 19 nt, Artificial Sequence
  Description of Artificial Sequence: Synthetic oligonucleotide
ucaaagugguacuaagucu

SEQ ID NO: 1641276 - RNA, 19 nt, Artificial Sequence
  Description of Artificial Sequence: Synthetic oligonucleotide
aaagcaggguaugcuaccc

SEQ ID NO: 1641277 - RNA, 19 nt, Artificial Sequence
  Description of Artificial Sequence: Synthetic oligonucleotide
caaaggacccuauccaugg

SEQ ID NO: 1641278 - RNA, 19 nt, Artificial Sequence
  Description of Artificial Sequence: Synthetic oligonucleotide
aguucuugcccuugaggcc

SEQ ID NO: 1641279 - RNA, 19 nt, Artificial Sequence
  Description of Artificial Sequence: Synthetic oligonucleotide
aagaauaaacucugucccu

SEQ ID NO: 1641280 - RNA, 19 nt, Artificial Sequence
  Description of Artificial Sequence: Synthetic oligonucleotide
acacacauauuggaaacgc

SEQ ID NO: 1641281 - RNA, 19 nt, Artificial Sequence
  Description of Artificial Sequence: Synthetic oligonucleotide
uacuaagucuuaaaaugga

SEQ ID NO: 1641282 - RNA, 19 nt, Artificial Sequence
  Description of Artificial Sequence: Synthetic oligonucleotide
aauaaggaaucuggcagag

SEQ ID NO: 1641283 - RNA, 19 nt, Artificial Sequence
  Description of Artificial Sequence: Synthetic oligonucleotide
uacacaugagucugagugg

SEQ ID NO: 1641284 - RNA, 19 nt, Artificial Sequence
  Description of Artificial Sequence: Synthetic oligonucleotide
caagucaucaccagacuag

SEQ ID NO: 1641285 - RNA, 19 nt, Artificial Sequence
  Description of Artificial Sequence: Synthetic oligonucleotide
gagaggaaagcccagguuc

SEQ ID NO: 1641286 - RNA, 19 nt, Artificial Sequence
  Description of Artificial Sequence: Synthetic oligonucleotide
aucauacccaagaauaaac

SEQ ID NO: 1641287 - RNA, 19 nt, Artificial Sequence
  Description of Artificial Sequence: Synthetic oligonucleotide
auaaacucugucccugggg

SEQ ID NO: 1641288 - RNA, 19 nt, Artificial Sequence
  Description of Artificial Sequence: Synthetic oligonucleotide
ugaggaagccugcucagag

SEQ ID NO: 1641289 - RNA, 19 nt, Artificial Sequence
  Description of Artificial Sequence: Synthetic oligonucleotide
agccccaugacucggaguc

SEQ ID NO: 1641290 - RNA, 19 nt, Artificial Sequence
  Description of Artificial Sequence: Synthetic oligonucleotide
ggaaacgcgaaacaaacug

SEQ ID NO: 1641291 - RNA, 19 nt, Artificial Sequence
  Description of Artificial Sequence: Synthetic oligonucleotide
uuccaguuacacaugaguc

SEQ ID NO: 1641292 - RNA, 19 nt, Artificial Sequence
  Description of Artificial Sequence: Synthetic oligonucleotide
ucaucuggccccaggaaag

SEQ ID NO: 1641293 - RNA, 19 nt, Artificial Sequence
  Description of Artificial Sequence: Synthetic oligonucleotide
aagucuuaaaauggaagga

SEQ ID NO: 1641294 - RNA, 19 nt, Artificial Sequence
  Description of Artificial Sequence: Synthetic oligonucleotide
ucaaaggacccuauccaug

SEQ ID NO: 1641295 - RNA, 19 nt, Artificial Sequence
  Description of Artificial Sequence: Synthetic oligonucleotide
ugugacgauuuccaguuac

SEQ ID NO: 1641296 - RNA, 19 nt, Artificial Sequence
  Description of Artificial Sequence: Synthetic oligonucleotide
aacgaucauacccaagaau

SEQ ID NO: 1641297 - RNA, 19 nt, Artificial Sequence
  Description of Artificial Sequence: Synthetic oligonucleotide
cauauuggaaacgcgaaac

SEQ ID NO: 1641298 - RNA, 19 nt, Artificial Sequence
  Description of Artificial Sequence: Synthetic oligonucleotide
cuagugucccugaauagag

SEQ ID NO: 1641299 - RNA, 19 nt, Artificial Sequence
  Description of Artificial Sequence: Synthetic oligonucleotide
aaacaaacuguggaagucu

SEQ ID NO: 1641300 - RNA, 19 nt, Artificial Sequence
  Description of Artificial Sequence: Synthetic oligonucleotide
accaauaaggaaucuggca

SEQ ID NO: 1641301 - RNA, 19 nt, Artificial Sequence
  Description of Artificial Sequence: Synthetic oligonucleotide
auaaacagcaugucacaca

SEQ ID NO: 1641302 - RNA, 19 nt, Artificial Sequence
  Description of Artificial Sequence: Synthetic oligonucleotide
cagucaaaggacccuaucc

SEQ ID NO: 1641303 - RNA, 19 nt, Artificial Sequence
  Description of Artificial Sequence: Synthetic oligonucleotide
cauacccaagaauaaacuc

SEQ ID NO: 1641304 - RNA, 19 nt, Artificial Sequence
  Description of Artificial Sequence: Synthetic oligonucleotide
auuagaguggaggcugugc

SEQ ID NO: 1641305 - RNA, 19 nt, Artificial Sequence
  Description of Artificial Sequence: Synthetic oligonucleotide
cacauucacauuagagugg

SEQ ID NO: 1641306 - RNA, 19 nt, Artificial Sequence
  Description of Artificial Sequence: Synthetic oligonucleotide
auuugcucaaagaaagcuc

SEQ ID NO: 1641307 - RNA, 19 nt, Artificial Sequence
  Description of Artificial Sequence: Synthetic oligonucleotide
agcugauaaauaaacagca

SEQ ID NO: 1641308 - RNA, 19 nt, Artificial Sequence
  Description of Artificial Sequence: Synthetic oligonucleotide
uugccaucgugguagaggc

SEQ ID NO: 1641309 - RNA, 19 nt, Artificial Sequence
  Description of Artificial Sequence: Synthetic oligonucleotide
gaacucaccaaagaugcug

SEQ ID NO: 1641310 - RNA, 19 nt, Artificial Sequence
  Description of Artificial Sequence: Synthetic oligonucleotide
ugguacuaagucuuaaaau

SEQ ID NO: 1641311 - RNA, 19 nt, Artificial Sequence
  Description of Artificial Sequence: Synthetic oligonucleotide
aacuguggaagucuccuaa

SEQ ID NO: 1641312 - RNA, 19 nt, Artificial Sequence
  Description of Artificial Sequence: Synthetic oligonucleotide
uaaaacgaucauacccaag

SEQ ID NO: 1641313 - RNA, 19 nt, Artificial Sequence
  Description of Artificial Sequence: Synthetic oligonucleotide
ugcaaaggggcacgggccg

SEQ ID NO: 1641314 - RNA, 19 nt, Artificial Sequence
  Description of Artificial Sequence: Synthetic oligonucleotide
uggccaguuuuccugggcg

SEQ ID NO: 1641315 - RNA, 19 nt, Artificial Sequence
  Description of Artificial Sequence: Synthetic oligonucleotide
accggguacaguucuugcc

SEQ ID NO: 1641316 - RNA, 19 nt, Artificial Sequence
  Description of Artificial Sequence: Synthetic oligonucleotide
ggagacuugucucucaaag

SEQ ID NO: 1641317 - RNA, 19 nt, Artificial Sequence
  Description of Artificial Sequence: Synthetic oligonucleotide
aaacgcgaaacaaacugug

SEQ ID NO: 1641318 - RNA, 19 nt, Artificial Sequence
  Description of Artificial Sequence: Synthetic oligonucleotide
auacccaagaauaaacucu

SEQ ID NO: 1641319 - RNA, 19 nt, Artificial Sequence
  Description of Artificial Sequence: Synthetic oligonucleotide
acugugacgauuuccaguu

SEQ ID NO: 1641320 - RNA, 19 nt, Artificial Sequence
  Description of Artificial Sequence: Synthetic oligonucleotide
aaacuaccuaaaacgauca

SEQ ID NO: 1641321 - RNA, 19 nt, Artificial Sequence
  Description of Artificial Sequence: Synthetic oligonucleotide
gugacaaccaggcuucacc

SEQ ID NO: 1641322 - RNA, 19 nt, Artificial Sequence
  Description of Artificial Sequence: Synthetic oligonucleotide
cuauuuugucuccacuggc

SEQ ID NO: 1641323 - RNA, 19 nt, Artificial Sequence
  Description of Artificial Sequence: Synthetic oligonucleotide
auauuggaaacgcgaaaca

SEQ ID NO: 1641324 - RNA, 19 nt, Artificial Sequence
  Description of Artificial Sequence: Synthetic oligonucleotide
acacaugagucugaguggg

SEQ ID NO: 1641325 - RNA, 19 nt, Artificial Sequence
  Description of Artificial Sequence: Synthetic oligonucleotide
cacacauauuggaaacgcg

SEQ ID NO: 1641326 - RNA, 19 nt, Artificial Sequence
  Description of Artificial Sequence: Synthetic oligonucleotide
gacuugucucucaaagugg

SEQ ID NO: 1641327 - RNA, 19 nt, Artificial Sequence
  Description of Artificial Sequence: Synthetic oligonucleotide
aaacgaucauacccaagaa

SEQ ID NO: 1641328 - RNA, 19 nt, Artificial Sequence
  Description of Artificial Sequence: Synthetic oligonucleotide
aguguuuuauucauucucu

SEQ ID NO: 1641329 - RNA, 19 nt, Artificial Sequence
  Description of Artificial Sequence: Synthetic oligonucleotide
uauuggaaacgcgaaacaa

SEQ ID NO: 1641330 - RNA, 19 nt, Artificial Sequence
  Description of Artificial Sequence: Synthetic oligonucleotide
gguaugcuaccccaggacg

SEQ ID NO: 1641331 - RNA, 19 nt, Artificial Sequence
  Description of Artificial Sequence: Synthetic oligonucleotide
aacgcgaaacaaacugugg

SEQ ID NO: 1641332 - RNA, 19 nt, Artificial Sequence
  Description of Artificial Sequence: Synthetic oligonucleotide
ucaucaccagacuaguguc

SEQ ID NO: 1641333 - RNA, 19 nt, Artificial Sequence
  Description of Artificial Sequence: Synthetic oligonucleotide
agcacgaccaauaaggaau

SEQ ID NO: 1641334 - RNA, 19 nt, Artificial Sequence
  Description of Artificial Sequence: Synthetic oligonucleotide
cuugccaucgugguagagg

SEQ ID NO: 1641335 - RNA, 19 nt, Artificial Sequence
  Description of Artificial Sequence: Synthetic oligonucleotide
agguucuucgcacugcugu

SEQ ID NO: 1641336 - RNA, 19 nt, Artificial Sequence
  Description of Artificial Sequence: Synthetic oligonucleotide
gucgcugcccaccagugcg

SEQ ID NO: 1641337 - RNA, 19 nt, Artificial Sequence
  Description of Artificial Sequence: Synthetic oligonucleotide
ucauuauucagaagcuauu

SEQ ID NO: 1641338 - RNA, 19 nt, Artificial Sequence
  Description of Artificial Sequence: Synthetic oligonucleotide
agacuagugucccugaaua

SEQ ID NO: 1641339 - RNA, 19 nt, Artificial Sequence
  Description of Artificial Sequence: Synthetic oligonucleotide
acgcgaaacaaacugugga

SEQ ID NO: 1641340 - RNA, 19 nt, Artificial Sequence
  Description of Artificial Sequence: Synthetic oligonucleotide
uaacccacugagugcaaag

SEQ ID NO: 1641341 - RNA, 19 nt, Artificial Sequence
  Description of Artificial Sequence: Synthetic oligonucleotide
gacuagugucccugaauag

SEQ ID NO: 1641342 - RNA, 19 nt, Artificial Sequence
  Description of Artificial Sequence: Synthetic oligonucleotide
acagucaaaggacccuauc

SEQ ID NO: 1641343 - RNA, 19 nt, Artificial Sequence
  Description of Artificial Sequence: Synthetic oligonucleotide
gaagcuauuuugucuccac

SEQ ID NO: 1641344 - RNA, 19 nt, Artificial Sequence
  Description of Artificial Sequence: Synthetic oligonucleotide
gaaacaaacuguggaaguc

SEQ ID NO: 1641345 - RNA, 19 nt, Artificial Sequence
  Description of Artificial Sequence: Synthetic oligonucleotide
ugaauagagggguggggac

SEQ ID NO: 1641346 - RNA, 19 nt, Artificial Sequence
  Description of Artificial Sequence: Synthetic oligonucleotide
gacgauuuccaguuacaca

SEQ ID NO: 1641347 - RNA, 19 nt, Artificial Sequence
  Description of Artificial Sequence: Synthetic oligonucleotide
augacucggagucgcugcc

SEQ ID NO: 1641348 - RNA, 19 nt, Artificial Sequence
  Description of Artificial Sequence: Synthetic oligonucleotide
accucuuucaaaacuaccu

SEQ ID NO: 1641349 - RNA, 19 nt, Artificial Sequence
  Description of Artificial Sequence: Synthetic oligonucleotide
ugucccugaauagaggggu

SEQ ID NO: 1641350 - RNA, 19 nt, Artificial Sequence
  Description of Artificial Sequence: Synthetic oligonucleotide
acgaucauacccaagaaua

SEQ ID NO: 1641351 - RNA, 19 nt, Artificial Sequence
  Description of Artificial Sequence: Synthetic oligonucleotide
aaggccacgcccaggguac

SEQ ID NO: 1641352 - RNA, 19 nt, Artificial Sequence
  Description of Artificial Sequence: Synthetic oligonucleotide
cuucgcacugcuguggucc

SEQ ID NO: 1641353 - RNA, 19 nt, Artificial Sequence
  Description of Artificial Sequence: Synthetic oligonucleotide
cacauuagaguggaggcug

SEQ ID NO: 1641354 - RNA, 19 nt, Artificial Sequence
  Description of Artificial Sequence: Synthetic oligonucleotide
cucugugagaggauggguc

SEQ ID NO: 1641355 - RNA, 19 nt, Artificial Sequence
  Description of Artificial Sequence: Synthetic oligonucleotide
guaugcuaccccaggacgg

SEQ ID NO: 1641356 - RNA, 19 nt, Artificial Sequence
  Description of Artificial Sequence: Synthetic oligonucleotide
acuagugucccugaauaga

SEQ ID NO: 1641357 - RNA, 19 nt, Artificial Sequence
  Description of Artificial Sequence: Synthetic oligonucleotide
ugccgcggaugccauaccg

SEQ ID NO: 1641358 - RNA, 19 nt, Artificial Sequence
  Description of Artificial Sequence: Synthetic oligonucleotide
aguaucuggaacucaccaa

SEQ ID NO: 1641359 - RNA, 19 nt, Artificial Sequence
  Description of Artificial Sequence: Synthetic oligonucleotide
cacacugugacgauuucca

SEQ ID NO: 1641360 - RNA, 19 nt, Artificial Sequence
  Description of Artificial Sequence: Synthetic oligonucleotide
agcaaaggccucaucuggc

SEQ ID NO: 1641361 - RNA, 19 nt, Artificial Sequence
  Description of Artificial Sequence: Synthetic oligonucleotide
acucacaccggguacaguu

SEQ ID NO: 1641362 - RNA, 19 nt, Artificial Sequence
  Description of Artificial Sequence: Synthetic oligonucleotide
ggaaagcccagguucuucg

SEQ ID NO: 1641363 - RNA, 19 nt, Artificial Sequence
  Description of Artificial Sequence: Synthetic oligonucleotide
uaccuaaaacgaucauacc

SEQ ID NO: 1641364 - RNA, 19 nt, Artificial Sequence
  Description of Artificial Sequence: Synthetic oligonucleotide
gaugccgucuccugccaag

SEQ ID NO: 1641365 - RNA, 19 nt, Artificial Sequence
  Description of Artificial Sequence: Synthetic oligonucleotide
aguuacacaugagucugag

SEQ ID NO: 1641366 - RNA, 19 nt, Artificial Sequence
  Description of Artificial Sequence: Synthetic oligonucleotide
aacucaccaaagaugcuga

SEQ ID NO: 1641367 - RNA, 19 nt, Artificial Sequence
  Description of Artificial Sequence: Synthetic oligonucleotide
gaccaauaaggaaucuggc

SEQ ID NO: 1641368 - RNA, 19 nt, Artificial Sequence
  Description of Artificial Sequence: Synthetic oligonucleotide
acauucacauuagagugga

SEQ ID NO: 1641369 - RNA, 19 nt, Artificial Sequence
  Description of Artificial Sequence: Synthetic oligonucleotide
agugcgguguaacccacug

SEQ ID NO: 1641370 - RNA, 19 nt, Artificial Sequence
  Description of Artificial Sequence: Synthetic oligonucleotide
caucaccagacuagugucc

SEQ ID NO: 1641371 - RNA, 19 nt, Artificial Sequence
  Description of Artificial Sequence: Synthetic oligonucleotide
auaaggaaucuggcagagc

SEQ ID NO: 1641372 - RNA, 19 nt, Artificial Sequence
  Description of Artificial Sequence: Synthetic oligonucleotide
guggaagucuccuaaaagu

SEQ ID NO: 1641373 - RNA, 19 nt, Artificial Sequence
  Description of Artificial Sequence: Synthetic oligonucleotide
aagucaucaccagacuagu

SEQ ID NO: 1641374 - RNA, 19 nt, Artificial Sequence
  Description of Artificial Sequence: Synthetic oligonucleotide
ccuaaaacgaucauaccca

SEQ ID NO: 1641375 - RNA, 19 nt, Artificial Sequence
  Description of Artificial Sequence: Synthetic oligonucleotide
ugacgauuuccaguuacac

SEQ ID NO: 1641376 - RNA, 19 nt, Artificial Sequence
  Description of Artificial Sequence: Synthetic oligonucleotide
caugagucugaguggggag

SEQ ID NO: 1641377 - RNA, 19 nt, Artificial Sequence
  Description of Artificial Sequence: Synthetic oligonucleotide
cgaccaauaaggaaucugg

SEQ ID NO: 1641378 - RNA, 19 nt, Artificial Sequence
  Description of Artificial Sequence: Synthetic oligonucleotide
gacgguucuugccaucgug

SEQ ID NO: 1641379 - RNA, 19 nt, Artificial Sequence
  Description of Artificial Sequence: Synthetic oligonucleotide
ugugugucacacccacccc

SEQ ID NO: 1641380 - RNA, 19 nt, Artificial Sequence
  Description of Artificial Sequence: Synthetic oligonucleotide
acuaccuaaaacgaucaua

SEQ ID NO: 1641381 - RNA, 19 nt, Artificial Sequence
  Description of Artificial Sequence: Synthetic oligonucleotide
ucccugaauagaggggugg

SEQ ID NO: 1641382 - RNA, 19 nt, Artificial Sequence
  Description of Artificial Sequence: Synthetic oligonucleotide
aguggaucugccaugcgug

SEQ ID NO: 1641383 - RNA, 19 nt, Artificial Sequence
  Description of Artificial Sequence: Synthetic oligonucleotide
ucacaccggguacaguucu

SEQ ID NO: 1641384 - RNA, 19 nt, Artificial Sequence
  Description of Artificial Sequence: Synthetic oligonucleotide
uuugccgcggaugccauac

SEQ ID NO: 1641385 - RNA, 19 nt, Artificial Sequence
  Description of Artificial Sequence: Synthetic oligonucleotide
ugcucaaagaaagcucugu

SEQ ID NO: 1641386 - RNA, 19 nt, Artificial Sequence
  Description of Artificial Sequence: Synthetic oligonucleotide
agucgcugcccaccagugc

SEQ ID NO: 1641387 - RNA, 19 nt, Artificial Sequence
  Description of Artificial Sequence: Synthetic oligonucleotide
cacucagggugucacagac

SEQ ID NO: 1641388 - RNA, 19 nt, Artificial Sequence
  Description of Artificial Sequence: Synthetic oligonucleotide
guaucccacacugugacga

SEQ ID NO: 1641389 - RNA, 19 nt, Artificial Sequence
  Description of Artificial Sequence: Synthetic oligonucleotide
ggaaggacaaucuccccug

SEQ ID NO: 1641390 - RNA, 19 nt, Artificial Sequence
  Description of Artificial Sequence: Synthetic oligonucleotide
agucuccuaaaagugaaaa

SEQ ID NO: 1641391 - RNA, 19 nt, Artificial Sequence
  Description of Artificial Sequence: Synthetic oligonucleotide
aacuaccuaaaacgaucau

SEQ ID NO: 1641392 - RNA, 19 nt, Artificial Sequence
  Description of Artificial Sequence: Synthetic oligonucleotide
caaagaaagcucugugaca

SEQ ID NO: 1641393 - RNA, 19 nt, Artificial Sequence
  Description of Artificial Sequence: Synthetic oligonucleotide
gucaucaccagacuagugu

SEQ ID NO: 1641394 - RNA, 19 nt, Artificial Sequence
  Description of Artificial Sequence: Synthetic oligonucleotide
acaccucuuucaaaacuac

SEQ ID NO: 1641395 - RNA, 19 nt, Artificial Sequence
  Description of Artificial Sequence: Synthetic oligonucleotide
  modified_base (14)..(14): a, c, u, g, unknown or other
ugcccuugaggccncggaa

SEQ ID NO: 1641396 - RNA, 19 nt, Artificial Sequence
  Description of Artificial Sequence: Synthetic oligonucleotide
gggaccaucaaggauuugc

SEQ ID NO: 1641397 - RNA, 19 nt, Artificial Sequence
  Description of Artificial Sequence: Synthetic oligonucleotide
caggaugccgucuccugcc

SEQ ID NO: 1641398 - RNA, 19 nt, Artificial Sequence
  Description of Artificial Sequence: Synthetic oligonucleotide
aaaggacccuauccauggu

SEQ ID NO: 1641399 - RNA, 19 nt, Artificial Sequence
  Description of Artificial Sequence: Synthetic oligonucleotide
uuugucuccacuggccagu

SEQ ID NO: 1641400 - RNA, 19 nt, Artificial Sequence
  Description of Artificial Sequence: Synthetic oligonucleotide
aggacgguucuugccaucg

SEQ ID NO: 1641401 - RNA, 19 nt, Artificial Sequence
  Description of Artificial Sequence: Synthetic oligonucleotide
acgaccaauaaggaaucug

SEQ ID NO: 1641402 - RNA, 19 nt, Artificial Sequence
  Description of Artificial Sequence: Synthetic oligonucleotide
acccuauccaugguggaag

SEQ ID NO: 1641403 - RNA, 19 nt, Artificial Sequence
  Description of Artificial Sequence: Synthetic oligonucleotide
aggaaagcaggguaugcua

SEQ ID NO: 1641404 - RNA, 19 nt, Artificial Sequence
  Description of Artificial Sequence: Synthetic oligonucleotide
aucugccaugcgugcaggc

SEQ ID NO: 1641405 - RNA, 19 nt, Artificial Sequence
  Description of Artificial Sequence: Synthetic oligonucleotide
acuugucucucaaaguggu

SEQ ID NO: 1641406 - RNA, 19 nt, Artificial Sequence
  Description of Artificial Sequence: Synthetic oligonucleotide
ucugccaugcgugcaggcc

SEQ ID NO: 1641407 - RNA, 19 nt, Artificial Sequence
  Description of Artificial Sequence: Synthetic oligonucleotide
gcuucacccugaaugaugg

SEQ ID NO: 1641408 - RNA, 19 nt, Artificial Sequence
  Description of Artificial Sequence: Synthetic oligonucleotide
cugccaugcgugcaggccc

SEQ ID NO: 1641409 - RNA, 19 nt, Artificial Sequence
  Description of Artificial Sequence: Synthetic oligonucleotide
augcgugcaggccccgggc

SEQ ID NO: 1641410 - RNA, 19 nt, Artificial Sequence
  Description of Artificial Sequence: Synthetic oligonucleotide
acgguucuugccaucgugg

SEQ ID NO: 1641411 - RNA, 19 nt, Artificial Sequence
  Description of Artificial Sequence: Synthetic oligonucleotide
cagaagcuauuuugucucc

SEQ ID NO: 1641412 - RNA, 19 nt, Artificial Sequence
  Description of Artificial Sequence: Synthetic oligonucleotide
  modified_base (9)..(9): a, c, u, g, unknown or other
uugaggccncggaaggcca

SEQ ID NO: 1641413 - RNA, 19 nt, Artificial Sequence
  Description of Artificial Sequence: Synthetic oligonucleotide
uccugagaacuccugccuc

SEQ ID NO: 1641414 - RNA, 19 nt, Artificial Sequence
  Description of Artificial Sequence: Synthetic oligonucleotide
ucugaguggggaguaucug

SEQ ID NO: 1641415 - RNA, 19 nt, Artificial Sequence
  Description of Artificial Sequence: Synthetic oligonucleotide
ccaucauucauuauucaga

SEQ ID NO: 1641416 - RNA, 19 nt, Artificial Sequence
  Description of Artificial Sequence: Synthetic oligonucleotide
guucuucgcacugcugugg

SEQ ID NO: 1641417 - RNA, 19 nt, Artificial Sequence
  Description of Artificial Sequence: Synthetic oligonucleotide
aaacuguggaagucuccua

SEQ ID NO: 1641418 - RNA, 19 nt, Artificial Sequence
  Description of Artificial Sequence: Synthetic oligonucleotide
ggcauggcccacuuugccg

SEQ ID NO: 1641419 - RNA, 19 nt, Artificial Sequence
  Description of Artificial Sequence: Synthetic oligonucleotide
accccaggacgguucuugc

SEQ ID NO: 1641420 - RNA, 19 nt, Artificial Sequence
  Description of Artificial Sequence: Synthetic oligonucleotide
gacuugguguccugagaac

SEQ ID NO: 1641421 - RNA, 19 nt, Artificial Sequence
  Description of Artificial Sequence: Synthetic oligonucleotide
cugagugcaaaggggcacg

SEQ ID NO: 1641422 - RNA, 19 nt, Artificial Sequence
  Description of Artificial Sequence: Synthetic oligonucleotide
gcucaaagaaagcucugug

SEQ ID NO: 1641423 - RNA, 19 nt, Artificial Sequence
  Description of Artificial Sequence: Synthetic oligonucleotide
ugcagagacugugugucac

SEQ ID NO: 1641424 - RNA, 19 nt, Artificial Sequence
  Description of Artificial Sequence: Synthetic oligonucleotide
  modified_base (19)..(19): a, c, u, g, unknown or other
guucuugcccuugaggccn

SEQ ID NO: 1641425 - RNA, 19 nt, Artificial Sequence
  Description of Artificial Sequence: Synthetic oligonucleotide
caaagugguacuaagucuu

SEQ ID NO: 1641426 - RNA, 19 nt, Artificial Sequence
  Description of Artificial Sequence: Synthetic oligonucleotide
gcucugguaucccacacug

SEQ ID NO: 1641427 - RNA, 19 nt, Artificial Sequence
  Description of Artificial Sequence: Synthetic oligonucleotide
acgaugaagcugagcgugc

SEQ ID NO: 1641428 - RNA, 19 nt, Artificial Sequence
  Description of Artificial Sequence: Synthetic oligonucleotide
aggaaucuggcagagcaaa

SEQ ID NO: 1641429 - RNA, 19 nt, Artificial Sequence
  Description of Artificial Sequence: Synthetic oligonucleotide
ucucucaaagugguacuaa

SEQ ID NO: 1641430 - RNA, 19 nt, Artificial Sequence
  Description of Artificial Sequence: Synthetic oligonucleotide
cuaaaacgaucauacccaa

SEQ ID NO: 1641431 - RNA, 19 nt, Artificial Sequence
  Description of Artificial Sequence: Synthetic oligonucleotide
cauaccgugcucugggcca

SEQ ID NO: 1641432 - RNA, 19 nt, Artificial Sequence
  Description of Artificial Sequence: Synthetic oligonucleotide
  modified_base (15)..(15): a, c, u, g, unknown or other
uugcccuugaggccncgga

SEQ ID NO: 1641433 - RNA, 19 nt, Artificial Sequence
  Description of Artificial Sequence: Synthetic oligonucleotide
gccaucgugguagaggcgg

SEQ ID NO: 1641434 - RNA, 19 nt, Artificial Sequence
  Description of Artificial Sequence: Synthetic oligonucleotide
cagcaacacucugugagag

SEQ ID NO: 1641435 - RNA, 19 nt, Artificial Sequence
  Description of Artificial Sequence: Synthetic oligonucleotide
cugaauagaggggugggga

SEQ ID NO: 1641436 - RNA, 19 nt, Artificial Sequence
  Description of Artificial Sequence: Synthetic oligonucleotide
gaaacgcgaaacaaacugu

SEQ ID NO: 1641437 - RNA, 19 nt, Artificial Sequence
  Description of Artificial Sequence: Synthetic oligonucleotide
agucccaaggccacgccag

SEQ ID NO: 1641438 - RNA, 19 nt, Artificial Sequence
  Description of Artificial Sequence: Synthetic oligonucleotide
agaagcuauuuugucucca

SEQ ID NO: 1641439 - RNA, 19 nt, Artificial Sequence
  Description of Artificial Sequence: Synthetic oligonucleotide
ugccaucgugguagaggcg

SEQ ID NO: 1641440 - RNA, 19 nt, Artificial Sequence
  Description of Artificial Sequence: Synthetic oligonucleotide
aagugguacuaagucuuaa

SEQ ID NO: 1641441 - RNA, 19 nt, Artificial Sequence
  Description of Artificial Sequence: Synthetic oligonucleotide
uaccccaggacgguucuug

SEQ ID NO: 1641442 - RNA, 19 nt, Artificial Sequence
  Description of Artificial Sequence: Synthetic oligonucleotide
caccagugcgguguaaccc

SEQ ID NO: 1641443 - RNA, 19 nt, Artificial Sequence
  Description of Artificial Sequence: Synthetic oligonucleotide
caggcuucacccugaauga

SEQ ID NO: 1641444 - RNA, 19 nt, Artificial Sequence
  Description of Artificial Sequence: Synthetic oligonucleotide
gaggaagaaguggucucug

SEQ ID NO: 1641445 - RNA, 19 nt, Artificial Sequence
  Description of Artificial Sequence: Synthetic oligonucleotide
caugcgugcaggccccggg

SEQ ID NO: 1641446 - RNA, 19 nt, Artificial Sequence
  Description of Artificial Sequence: Synthetic oligonucleotide
cacucugguugacugggug

SEQ ID NO: 1641447 - RNA, 19 nt, Artificial Sequence
  Description of Artificial Sequence: Synthetic oligonucleotide
acugugugucacacccacc

SEQ ID NO: 1641448 - RNA, 19 nt, Artificial Sequence
  Description of Artificial Sequence: Synthetic oligonucleotide
ugccaugcgugcaggcccc

SEQ ID NO: 1641449 - RNA, 19 nt, Artificial Sequence
  Description of Artificial Sequence: Synthetic oligonucleotide
ccauccacgaugaagcuga

SEQ ID NO: 1641450 - RNA, 19 nt, Artificial Sequence
  Description of Artificial Sequence: Synthetic oligonucleotide
gugucccugaauagagggg

SEQ ID NO: 1641451 - RNA, 19 nt, Artificial Sequence
  Description of Artificial Sequence: Synthetic oligonucleotide
gaaggccacgcccagggua

SEQ ID NO: 1641452 - RNA, 19 nt, Artificial Sequence
  Description of Artificial Sequence: Synthetic oligonucleotide
ucgcugcccaccagugcgg

SEQ ID NO: 1641453 - RNA, 19 nt, Artificial Sequence
  Description of Artificial Sequence: Synthetic oligonucleotide
guggaucugccaugcgugc

SEQ ID NO: 1641454 - RNA, 19 nt, Artificial Sequence
  Description of Artificial Sequence: Synthetic oligonucleotide
ggaucugccaugcgugcag

SEQ ID NO: 1641455 - RNA, 19 nt, Artificial Sequence
  Description of Artificial Sequence: Synthetic oligonucleotide
  modified_base (7)..(7): a, c, u, g, unknown or other
gaggccncggaaggccacg

SEQ ID NO: 1641456 - RNA, 19 nt, Artificial Sequence
  Description of Artificial Sequence: Synthetic oligonucleotide
guagaggcggcugcggccc

SEQ ID NO: 1641457 - RNA, 19 nt, Artificial Sequence
  Description of Artificial Sequence: Synthetic oligonucleotide
ugcuaccccaggacgguuc

SEQ ID NO: 1641458 - RNA, 19 nt, Artificial Sequence
  Description of Artificial Sequence: Synthetic oligonucleotide
gguaucccacacugugacg

SEQ ID NO: 1641459 - RNA, 19 nt, Artificial Sequence
  Description of Artificial Sequence: Synthetic oligonucleotide
cagagacugugugucacac

SEQ ID NO: 1641460 - RNA, 19 nt, Artificial Sequence
  Description of Artificial Sequence: Synthetic oligonucleotide
ccggguacaguucuugccc

SEQ ID NO: 1641461 - RNA, 19 nt, Artificial Sequence
  Description of Artificial Sequence: Synthetic oligonucleotide
gcaaaggccucaucuggcc

SEQ ID NO: 1641462 - RNA, 19 nt, Artificial Sequence
  Description of Artificial Sequence: Synthetic oligonucleotide
cucacaccggguacaguuc

SEQ ID NO: 1641463 - RNA, 19 nt, Artificial Sequence
  Description of Artificial Sequence: Synthetic oligonucleotide
cccacuuugccgcggaugc

SEQ ID NO: 1641464 - RNA, 19 nt, Artificial Sequence
  Description of Artificial Sequence: Synthetic oligonucleotide
aaagugguacuaagucuua

SEQ ID NO: 1641465 - RNA, 19 nt, Artificial Sequence
  Description of Artificial Sequence: Synthetic oligonucleotide
caccggguacaguucuugc

SEQ ID NO: 1641466 - RNA, 19 nt, Artificial Sequence
  Description of Artificial Sequence: Synthetic oligonucleotide
gucucugcacucugguuga

SEQ ID NO: 1641467 - RNA, 19 nt, Artificial Sequence
  Description of Artificial Sequence: Synthetic oligonucleotide
gaggggaccaucaaggauu

SEQ ID NO: 1641468 - RNA, 19 nt, Artificial Sequence
  Description of Artificial Sequence: Synthetic oligonucleotide
acccugaaugauggccacc

SEQ ID NO: 1641469 - RNA, 19 nt, Artificial Sequence
  Description of Artificial Sequence: Synthetic oligonucleotide
ggaagucuccuaaaaguga

SEQ ID NO: 1641470 - RNA, 19 nt, Artificial Sequence
  Description of Artificial Sequence: Synthetic oligonucleotide
  modified_base (16)..(16): a, c, u, g, unknown or other
cuugcccuugaggccncgg

SEQ ID NO: 1641471 - RNA, 19 nt, Artificial Sequence
  Description of Artificial Sequence: Synthetic oligonucleotide
gguucuucgcacugcugug

SEQ ID NO: 1641472 - RNA, 19 nt, Artificial Sequence
  Description of Artificial Sequence: Synthetic oligonucleotide
accacacaccucuuucaaa

SEQ ID NO: 1641473 - RNA, 19 nt, Artificial Sequence
  Description of Artificial Sequence: Synthetic oligonucleotide
aaggaaucuggcagagcaa

SEQ ID NO: 1641474 - RNA, 19 nt, Artificial Sequence
  Description of Artificial Sequence: Synthetic oligonucleotide
gagugcaaaggggcacggg

SEQ ID NO: 1641475 - RNA, 19 nt, Artificial Sequence
  Description of Artificial Sequence: Synthetic oligonucleotide
uggagacuugucucucaaa

SEQ ID NO: 1641476 - RNA, 19 nt, Artificial Sequence
  Description of Artificial Sequence: Synthetic oligonucleotide
cuggccaguuuuccugggc

SEQ ID NO: 1641477 - RNA, 19 nt, Artificial Sequence
  Description of Artificial Sequence: Synthetic oligonucleotide
ccuccuuagcaccuuuggg

SEQ ID NO: 1641478 - RNA, 19 nt, Artificial Sequence
  Description of Artificial Sequence: Synthetic oligonucleotide
gacucggagucgcugccca

SEQ ID NO: 1641479 - RNA, 19 nt, Artificial Sequence
  Description of Artificial Sequence: Synthetic oligonucleotide
ucauucucuugaggaagaa

SEQ ID NO: 1641480 - RNA, 19 nt, Artificial Sequence
  Description of Artificial Sequence: Synthetic oligonucleotide
  modified_base (8)..(8): a, c, u, g, unknown or other
ugaggccncggaaggccac

SEQ ID NO: 1641481 - RNA, 19 nt, Artificial Sequence
  Description of Artificial Sequence: Synthetic oligonucleotide
accagacuagugucccuga

SEQ ID NO: 1641482 - RNA, 19 nt, Artificial Sequence
  Description of Artificial Sequence: Synthetic oligonucleotide
acgcccaccacagcauggg

SEQ ID NO: 1641483 - RNA, 19 nt, Artificial Sequence
  Description of Artificial Sequence: Synthetic oligonucleotide
uggaucugccaugcgugca

SEQ ID NO: 1641484 - RNA, 19 nt, Artificial Sequence
  Description of Artificial Sequence: Synthetic oligonucleotide
agcacucacaccggguaca

SEQ ID NO: 1641485 - RNA, 19 nt, Artificial Sequence
  Description of Artificial Sequence: Synthetic oligonucleotide
  modified_base (4)..(4): a, c, u, g, unknown or other
gccncggaaggccacgccc

SEQ ID NO: 1641486 - RNA, 19 nt, Artificial Sequence
  Description of Artificial Sequence: Synthetic oligonucleotide
ugagucugaguggggagua

SEQ ID NO: 1641487 - RNA, 19 nt, Artificial Sequence
  Description of Artificial Sequence: Synthetic oligonucleotide
gguacacagcacucacacc

SEQ ID NO: 1641488 - RNA, 19 nt, Artificial Sequence
  Description of Artificial Sequence: Synthetic oligonucleotide
ugauggccaccagaguccu

SEQ ID NO: 1641489 - RNA, 19 nt, Artificial Sequence
  Description of Artificial Sequence: Synthetic oligonucleotide
caccagacuagugucccug

SEQ ID NO: 1641490 - RNA, 19 nt, Artificial Sequence
  Description of Artificial Sequence: Synthetic oligonucleotide
acaccggguacaguucuug

SEQ ID NO: 1641491 - RNA, 19 nt, Artificial Sequence
  Description of Artificial Sequence: Synthetic oligonucleotide
cgguguaacccacugagug

SEQ ID NO: 1641492 - RNA, 19 nt, Artificial Sequence
  Description of Artificial Sequence: Synthetic oligonucleotide
augccauaccgugcucugg

SEQ ID NO: 1641493 - RNA, 19 nt, Artificial Sequence
  Description of Artificial Sequence: Synthetic oligonucleotide
ucaccagacuagugucccu

SEQ ID NO: 1641494 - RNA, 19 nt, Artificial Sequence
  Description of Artificial Sequence: Synthetic oligonucleotide
cuguggaagucuccuaaaa

SEQ ID NO: 1641495 - RNA, 19 nt, Artificial Sequence
  Description of Artificial Sequence: Synthetic oligonucleotide
uaucccacacugugacgau

SEQ ID NO: 1641496 - RNA, 19 nt, Artificial Sequence
  Description of Artificial Sequence: Synthetic oligonucleotide
gucaaaggacccuauccau

SEQ ID NO: 1641497 - RNA, 19 nt, Artificial Sequence
  Description of Artificial Sequence: Synthetic oligonucleotide
aucgugguagaggcggcug

SEQ ID NO: 1641498 - RNA, 19 nt, Artificial Sequence
  Description of Artificial Sequence: Synthetic oligonucleotide
agucaucaccagacuagug

SEQ ID NO: 1641499 - RNA, 19 nt, Artificial Sequence
  Description of Artificial Sequence: Synthetic oligonucleotide
  modified_base (6)..(6): a, c, u, g, unknown or other
aggccncggaaggccacgc

SEQ ID NO: 1641500 - RNA, 19 nt, Artificial Sequence
  Description of Artificial Sequence: Synthetic oligonucleotide
gagucgcugcccaccagug

SEQ ID NO: 1641501 - RNA, 19 nt, Artificial Sequence
  Description of Artificial Sequence: Synthetic oligonucleotide
uucuugccaucgugguaga

SEQ ID NO: 1641502 - RNA, 19 nt, Artificial Sequence
  Description of Artificial Sequence: Synthetic oligonucleotide
acucaccaaagaugcugaa

SEQ ID NO: 1641503 - RNA, 19 nt, Artificial Sequence
  Description of Artificial Sequence: Synthetic oligonucleotide
  modified_base (12)..(12): a, c, u, g, unknown or other
cccuugaggccncggaagg

SEQ ID NO: 1641504 - RNA, 19 nt, Artificial Sequence
  Description of Artificial Sequence: Synthetic oligonucleotide
caucuggccccaggaaagc

SEQ ID NO: 1641505 - RNA, 19 nt, Artificial Sequence
  Description of Artificial Sequence: Synthetic oligonucleotide
cagcacucacaccggguac

SEQ ID NO: 1641506 - RNA, 19 nt, Artificial Sequence
  Description of Artificial Sequence: Synthetic oligonucleotide
ggaguaucuggaacucacc

SEQ ID NO: 1641507 - RNA, 19 nt, Artificial Sequence
  Description of Artificial Sequence: Synthetic oligonucleotide
cauuagaguggaggcugug

SEQ ID NO: 1641508 - RNA, 19 nt, Artificial Sequence
  Description of Artificial Sequence: Synthetic oligonucleotide
gcaagucaucaccagacua

SEQ ID NO: 1641509 - RNA, 19 nt, Artificial Sequence
  Description of Artificial Sequence: Synthetic oligonucleotide
ggaaucuggcagagcaaag

SEQ ID NO: 1641510 - RNA, 19 nt, Artificial Sequence
  Description of Artificial Sequence: Synthetic oligonucleotide
gugacgauuuccaguuaca

SEQ ID NO: 1641511 - RNA, 19 nt, Artificial Sequence
  Description of Artificial Sequence: Synthetic oligonucleotide
ggccccagcugauaaauaa

SEQ ID NO: 1641512 - RNA, 19 nt, Artificial Sequence
  Description of Artificial Sequence: Synthetic oligonucleotide
ucuucgcacugcugugguc

SEQ ID NO: 1641513 - RNA, 19 nt, Artificial Sequence
  Description of Artificial Sequence: Synthetic oligonucleotide
ccgggcauggcccacuuug

SEQ ID NO: 1641514 - RNA, 19 nt, Artificial Sequence
  Description of Artificial Sequence: Synthetic oligonucleotide
ggcuucacccugaaugaug

SEQ ID NO: 1641515 - RNA, 19 nt, Artificial Sequence
  Description of Artificial Sequence: Synthetic oligonucleotide
acauuagaguggaggcugu

SEQ ID NO: 1641516 - RNA, 19 nt, Artificial Sequence
  Description of Artificial Sequence: Synthetic oligonucleotide
  modified_base (2)..(2): a, c, u, g, unknown or other
cncggaaggccacgcccag

SEQ ID NO: 1641517 - RNA, 19 nt, Artificial Sequence
  Description of Artificial Sequence: Synthetic oligonucleotide
ccauaccgugcucugggcc

SEQ ID NO: 1641518 - RNA, 19 nt, Artificial Sequence
  Description of Artificial Sequence: Synthetic oligonucleotide
cagcacgaccaauaaggaa

SEQ ID NO: 1641519 - RNA, 19 nt, Artificial Sequence
  Description of Artificial Sequence: Synthetic oligonucleotide
ugagaacuccugccuccuu

SEQ ID NO: 1641520 - RNA, 19 nt, Artificial Sequence
  Description of Artificial Sequence: Synthetic oligonucleotide
uggcccacuuugccgcgga

SEQ ID NO: 1641521 - RNA, 19 nt, Artificial Sequence
  Description of Artificial Sequence: Synthetic oligonucleotide
gacccuauccaugguggaa

SEQ ID NO: 1641522 - RNA, 19 nt, Artificial Sequence
  Description of Artificial Sequence: Synthetic oligonucleotide
augggugccccgcugccua

SEQ ID NO: 1641523 - RNA, 19 nt, Artificial Sequence
  Description of Artificial Sequence: Synthetic oligonucleotide
agcgugcccuguccauguc

SEQ ID NO: 1641524 - RNA, 19 nt, Artificial Sequence
  Description of Artificial Sequence: Synthetic oligonucleotide
uagcuggccaguggaucug

SEQ ID NO: 1641525 - RNA, 19 nt, Artificial Sequence
  Description of Artificial Sequence: Synthetic oligonucleotide
uugccgcggaugccauacc

SEQ ID NO: 1641526 - RNA, 19 nt, Artificial Sequence
  Description of Artificial Sequence: Synthetic oligonucleotide
caguuacacaugagucuga

SEQ ID NO: 1641527 - RNA, 19 nt, Artificial Sequence
  Description of Artificial Sequence: Synthetic oligonucleotide
gggcauggcccacuuugcc

SEQ ID NO: 1641528 - RNA, 19 nt, Artificial Sequence
  Description of Artificial Sequence: Synthetic oligonucleotide
cugugagaggaugggucuc

SEQ ID NO: 1641529 - RNA, 19 nt, Artificial Sequence
  Description of Artificial Sequence: Synthetic oligonucleotide
ccaccagugcgguguaacc

SEQ ID NO: 1641530 - RNA, 19 nt, Artificial Sequence
  Description of Artificial Sequence: Synthetic oligonucleotide
uggucccuggagacuuguc

SEQ ID NO: 1641531 - RNA, 19 nt, Artificial Sequence
  Description of Artificial Sequence: Synthetic oligonucleotide
ccacacugugacgauuucc

SEQ ID NO: 1641532 - RNA, 19 nt, Artificial Sequence
  Description of Artificial Sequence: Synthetic oligonucleotide
  modified_base (17)..(17): a, c, u, g, unknown or other
ucuugcccuugaggccncg

SEQ ID NO: 1641533 - RNA, 19 nt, Artificial Sequence
  Description of Artificial Sequence: Synthetic oligonucleotide
uccugccaaguguuuuauu

SEQ ID NO: 1641534 - RNA, 19 nt, Artificial Sequence
  Description of Artificial Sequence: Synthetic oligonucleotide
cuugucucucaaaguggua

SEQ ID NO: 1641535 - RNA, 19 nt, Artificial Sequence
  Description of Artificial Sequence: Synthetic oligonucleotide
ggggaacaacaggaugccg

SEQ ID NO: 1641536 - RNA, 19 nt, Artificial Sequence
  Description of Artificial Sequence: Synthetic oligonucleotide
ggucccuggagacuugucu

SEQ ID NO: 1641537 - RNA, 19 nt, Artificial Sequence
  Description of Artificial Sequence: Synthetic oligonucleotide
gaccaucaaggauuugcuu

SEQ ID NO: 1641538 - RNA, 19 nt, Artificial Sequence
  Description of Artificial Sequence: Synthetic oligonucleotide
acccaagaauaaacucugu

SEQ ID NO: 1641539 - RNA, 19 nt, Artificial Sequence
  Description of Artificial Sequence: Synthetic oligonucleotide
ggccaguggaucugccaug

SEQ ID NO: 1641540 - RNA, 19 nt, Artificial Sequence
  Description of Artificial Sequence: Synthetic oligonucleotide
acucagggugucacagacu

SEQ ID NO: 1641541 - RNA, 19 nt, Artificial Sequence
  Description of Artificial Sequence: Synthetic oligonucleotide
gagcgugcccuguccaugu

SEQ ID NO: 1641542 - RNA, 19 nt, Artificial Sequence
  Description of Artificial Sequence: Synthetic oligonucleotide
accgugcucugggccaccg

SEQ ID NO: 1641543 - RNA, 19 nt, Artificial Sequence
  Description of Artificial Sequence: Synthetic oligonucleotide
auggcccacuuugccgcgg

SEQ ID NO: 1641544 - RNA, 19 nt, Artificial Sequence
  Description of Artificial Sequence: Synthetic oligonucleotide
gucucucaaagugguacua

SEQ ID NO: 1641545 - RNA, 19 nt, Artificial Sequence
  Description of Artificial Sequence: Synthetic oligonucleotide
gugcgguguaacccacuga

SEQ ID NO: 1641546 - RNA, 19 nt, Artificial Sequence
  Description of Artificial Sequence: Synthetic oligonucleotide
ggacaaucuccccugcccu

SEQ ID NO: 1641547 - RNA, 19 nt, Artificial Sequence
  Description of Artificial Sequence: Synthetic oligonucleotide
ccgcggaugccauaccgug

SEQ ID NO: 1641548 - RNA, 19 nt, Artificial Sequence
  Description of Artificial Sequence: Synthetic oligonucleotide
caggaaagcaggguaugcu

SEQ ID NO: 1641549 - RNA, 19 nt, Artificial Sequence
  Description of Artificial Sequence: Synthetic oligonucleotide
gcagagacugugugucaca

SEQ ID NO: 1641550 - RNA, 19 nt, Artificial Sequence
  Description of Artificial Sequence: Synthetic oligonucleotide
cugcggcccaagucccagc

SEQ ID NO: 1641551 - RNA, 19 nt, Artificial Sequence
  Description of Artificial Sequence: Synthetic oligonucleotide
gcacgaccaauaaggaauc

SEQ ID NO: 1641552 - RNA, 19 nt, Artificial Sequence
  Description of Artificial Sequence: Synthetic oligonucleotide
ccagcacgaccaauaagga

SEQ ID NO: 1641553 - RNA, 19 nt, Artificial Sequence
  Description of Artificial Sequence: Synthetic oligonucleotide
gguucuugccaucguggua

SEQ ID NO: 1641554 - RNA, 19 nt, Artificial Sequence
  Description of Artificial Sequence: Synthetic oligonucleotide
cagacuagugucccugaau

SEQ ID NO: 1641555 - RNA, 19 nt, Artificial Sequence
  Description of Artificial Sequence: Synthetic oligonucleotide
aggcuucacccugaaugau

SEQ ID NO: 1641556 - RNA, 19 nt, Artificial Sequence
  Description of Artificial Sequence: Synthetic oligonucleotide
cgaucauacccaagaauaa

SEQ ID NO: 1641557 - RNA, 19 nt, Artificial Sequence
  Description of Artificial Sequence: Synthetic oligonucleotide
ccuagcuggccaguggauc

SEQ ID NO: 1641558 - RNA, 19 nt, Artificial Sequence
  Description of Artificial Sequence: Synthetic oligonucleotide
gcugagcgugcccugucca

SEQ ID NO: 1641559 - RNA, 19 nt, Artificial Sequence
  Description of Artificial Sequence: Synthetic oligonucleotide
gcaugggugccccgcugcc

SEQ ID NO: 1641560 - RNA, 19 nt, Artificial Sequence
  Description of Artificial Sequence: Synthetic oligonucleotide
gggcgugucugcagugggg

SEQ ID NO: 1641561 - RNA, 19 nt, Artificial Sequence
  Description of Artificial Sequence: Synthetic oligonucleotide
aggggaccaucaaggauuu

SEQ ID NO: 1641562 - RNA, 19 nt, Artificial Sequence
  Description of Artificial Sequence: Synthetic oligonucleotide
gcggaugccauaccgugcu

SEQ ID NO: 1641563 - RNA, 19 nt, Artificial Sequence
  Description of Artificial Sequence: Synthetic oligonucleotide
ggagucgcugcccaccagu

SEQ ID NO: 1641564 - RNA, 19 nt, Artificial Sequence
  Description of Artificial Sequence: Synthetic oligonucleotide
cgcgaaacaaacuguggaa

SEQ ID NO: 1641565 - RNA, 19 nt, Artificial Sequence
  Description of Artificial Sequence: Synthetic oligonucleotide
gcugauaaauaaacagcau

SEQ ID NO: 1641566 - RNA, 19 nt, Artificial Sequence
  Description of Artificial Sequence: Synthetic oligonucleotide
gaggcggcugcggcccaag

SEQ ID NO: 1641567 - RNA, 19 nt, Artificial Sequence
  Description of Artificial Sequence: Synthetic oligonucleotide
ccccaggacgguucuugcc

SEQ ID NO: 1641568 - RNA, 19 nt, Artificial Sequence
  Description of Artificial Sequence: Synthetic oligonucleotide
cacagcacucacaccgggu

SEQ ID NO: 1641569 - RNA, 19 nt, Artificial Sequence
  Description of Artificial Sequence: Synthetic oligonucleotide
ggcaagucaucaccagacu

SEQ ID NO: 1641570 - RNA, 19 nt, Artificial Sequence
  Description of Artificial Sequence: Synthetic oligonucleotide
gcccagguucuucgcacug

SEQ ID NO: 1641571 - RNA, 19 nt, Artificial Sequence
  Description of Artificial Sequence: Synthetic oligonucleotide
ggaggggaccaucaaggau

SEQ ID NO: 1641572 - RNA, 19 nt, Artificial Sequence
  Description of Artificial Sequence: Synthetic oligonucleotide
  modified_base (5)..(5): a, c, u, g, unknown or other
ggccncggaaggccacgcc

SEQ ID NO: 1641573 - RNA, 19 nt, Artificial Sequence
  Description of Artificial Sequence: Synthetic oligonucleotide
gcugcggcccaagucccag

SEQ ID NO: 1641574 - RNA, 19 nt, Artificial Sequence
  Description of Artificial Sequence: Synthetic oligonucleotide
gcugccuagcuggccagug

SEQ ID NO: 1641575 - RNA, 19 nt, Artificial Sequence
  Description of Artificial Sequence: Synthetic oligonucleotide
acuuugccgcggaugccau

SEQ ID NO: 1641576 - RNA, 19 nt, Artificial Sequence
  Description of Artificial Sequence: Synthetic oligonucleotide
ccaguggaucugccaugcg

SEQ ID NO: 1641577 - RNA, 19 nt, Artificial Sequence
  Description of Artificial Sequence: Synthetic oligonucleotide
ccaugacucggagucgcug

SEQ ID NO: 1641578 - RNA, 19 nt, Artificial Sequence
  Description of Artificial Sequence: Synthetic oligonucleotide
cccaccagugcgguguaac

SEQ ID NO: 1641579 - RNA, 19 nt, Artificial Sequence
  Description of Artificial Sequence: Synthetic oligonucleotide
cccaggguacuggccaucc

SEQ ID NO: 1641580 - RNA, 19 nt, Artificial Sequence
  Description of Artificial Sequence: Synthetic oligonucleotide
gcccacuuugccgcggaug

SEQ ID NO: 1641581 - RNA, 19 nt, Artificial Sequence
  Description of Artificial Sequence: Synthetic oligonucleotide
auagagggguggggacagu

SEQ ID NO: 1641582 - RNA, 19 nt, Artificial Sequence
  Description of Artificial Sequence: Synthetic oligonucleotide
cgcggaugccauaccgugc

SEQ ID NO: 1641583 - RNA, 19 nt, Artificial Sequence
  Description of Artificial Sequence: Synthetic oligonucleotide
ugucugcaguggggaacaa

SEQ ID NO: 1641584 - RNA, 19 nt, Artificial Sequence
  Description of Artificial Sequence: Synthetic oligonucleotide
cacacccaccccuuccagu

SEQ ID NO: 1641585 - RNA, 19 nt, Artificial Sequence
  Description of Artificial Sequence: Synthetic oligonucleotide
uaccgugcucugggccacc

SEQ ID NO: 1641586 - RNA, 19 nt, Artificial Sequence
  Description of Artificial Sequence: Synthetic oligonucleotide
ccuggagacuugucucuca

SEQ ID NO: 1641587 - RNA, 19 nt, Artificial Sequence
  Description of Artificial Sequence: Synthetic oligonucleotide
ggaugggucucaggcccug

SEQ ID NO: 1641588 - RNA, 19 nt, Artificial Sequence
  Description of Artificial Sequence: Synthetic oligonucleotide
gccccaugacucggagucg

SEQ ID NO: 1641589 - RNA, 19 nt, Artificial Sequence
  Description of Artificial Sequence: Synthetic oligonucleotide
ccugggcgugucugcagug

SEQ ID NO: 1641590 - RNA, 19 nt, Artificial Sequence
  Description of Artificial Sequence: Synthetic oligonucleotide
cugagaacuccugccuccu

SEQ ID NO: 1641591 - RNA, 19 nt, Artificial Sequence
  Description of Artificial Sequence: Synthetic oligonucleotide
cugugacgauuuccaguua

SEQ ID NO: 1641592 - RNA, 19 nt, Artificial Sequence
  Description of Artificial Sequence: Synthetic oligonucleotide
ggccaguuuuccugggcgu

SEQ ID NO: 1641593 - RNA, 19 nt, Artificial Sequence
  Description of Artificial Sequence: Synthetic oligonucleotide
cccgcugccuagcuggcca

SEQ ID NO: 1641594 - RNA, 19 nt, Artificial Sequence
  Description of Artificial Sequence: Synthetic oligonucleotide
gcggcccaagucccagccc

SEQ ID NO: 1641595 - RNA, 19 nt, Artificial Sequence
  Description of Artificial Sequence: Synthetic oligonucleotide
cuuugccgcggaugccaua

SEQ ID NO: 1641596 - RNA, 19 nt, Artificial Sequence
  Description of Artificial Sequence: Synthetic oligonucleotide
augcuaccccaggacgguu

SEQ ID NO: 1641597 - RNA, 19 nt, Artificial Sequence
  Description of Artificial Sequence: Synthetic oligonucleotide
cugagcgugcccuguccau

SEQ ID NO: 1641598 - RNA, 19 nt, Artificial Sequence
  Description of Artificial Sequence: Synthetic oligonucleotide
gaggaaagcccagguucuu

SEQ ID NO: 1641599 - RNA, 19 nt, Artificial Sequence
  Description of Artificial Sequence: Synthetic oligonucleotide
ggaugccgucuccugccaa

SEQ ID NO: 1641600 - RNA, 19 nt, Artificial Sequence
  Description of Artificial Sequence: Synthetic oligonucleotide
cacgggccguggccacgcc

SEQ ID NO: 1641601 - RNA, 19 nt, Artificial Sequence
  Description of Artificial Sequence: Synthetic oligonucleotide
cacgaccaauaaggaaucu

SEQ ID NO: 1641602 - RNA, 19 nt, Artificial Sequence
  Description of Artificial Sequence: Synthetic oligonucleotide
ccagacuagugucccugaa

SEQ ID NO: 1641603 - RNA, 19 nt, Artificial Sequence
  Description of Artificial Sequence: Synthetic oligonucleotide
caucgugguagaggcggcu

SEQ ID NO: 1641604 - RNA, 19 nt, Artificial Sequence
  Description of Artificial Sequence: Synthetic oligonucleotide
ggcaggggaggggaccauc

SEQ ID NO: 1641605 - RNA, 19 nt, Artificial Sequence
  Description of Artificial Sequence: Synthetic oligonucleotide
cagugcgguguaacccacu

SEQ ID NO: 1641606 - RNA, 19 nt, Artificial Sequence
  Description of Artificial Sequence: Synthetic oligonucleotide
cauguccagcacgaccaau

SEQ ID NO: 1641607 - RNA, 19 nt, Artificial Sequence
  Description of Artificial Sequence: Synthetic oligonucleotide
ccacgaugaagcugagcgu

SEQ ID NO: 1641608 - RNA, 19 nt, Artificial Sequence
  Description of Artificial Sequence: Synthetic oligonucleotide
ccaugcgugcaggccccgg

SEQ ID NO: 1641609 - RNA, 19 nt, Artificial Sequence
  Description of Artificial Sequence: Synthetic oligonucleotide
ccgugcucugggccaccgg

SEQ ID NO: 1641610 - RNA, 19 nt, Artificial Sequence
  Description of Artificial Sequence: Synthetic oligonucleotide
ggggccccagcugauaaau

SEQ ID NO: 1641611 - RNA, 19 nt, Artificial Sequence
  Description of Artificial Sequence: Synthetic oligonucleotide
aggccacgcccaggguacu

SEQ ID NO: 1641612 - RNA, 19 nt, Artificial Sequence
  Description of Artificial Sequence: Synthetic oligonucleotide
gcgugucugcaguggggaa

SEQ ID NO: 1641613 - RNA, 19 nt, Artificial Sequence
  Description of Artificial Sequence: Synthetic oligonucleotide
caugggugccccgcugccu

SEQ ID NO: 1641614 - RNA, 19 nt, Artificial Sequence
  Description of Artificial Sequence: Synthetic oligonucleotide
ggacgguucuugccaucgu

SEQ ID NO: 1641615 - RNA, 19 nt, Artificial Sequence
  Description of Artificial Sequence: Synthetic oligonucleotide
ggccacgcccaggguacug

SEQ ID NO: 1641616 - RNA, 19 nt, Artificial Sequence
  Description of Artificial Sequence: Synthetic oligonucleotide
gccaugcgugcaggccccg

SEQ ID NO: 1641617 - RNA, 19 nt, Artificial Sequence
  Description of Artificial Sequence: Synthetic oligonucleotide
ccuggacacucaggguguc

SEQ ID NO: 1641618 - RNA, 19 nt, Artificial Sequence
  Description of Artificial Sequence: Synthetic oligonucleotide
ggugccccgcugccuagcu

SEQ ID NO: 1641619 - RNA, 19 nt, Artificial Sequence
  Description of Artificial Sequence: Synthetic oligonucleotide
gggcacgggccguggccac

SEQ ID NO: 1641620 - RNA, 19 nt, Artificial Sequence
  Description of Artificial Sequence: Synthetic oligonucleotide
gggugccccgcugccuagc

SEQ ID NO: 1641621 - RNA, 19 nt, Artificial Sequence
  Description of Artificial Sequence: Synthetic oligonucleotide
ggguacaguucuugcccuu

SEQ ID NO: 1641622 - RNA, 19 nt, Artificial Sequence
  Description of Artificial Sequence: Synthetic oligonucleotide
gcgguguaacccacugagu

SEQ ID NO: 1641623 - RNA, 19 nt, Artificial Sequence
  Description of Artificial Sequence: Synthetic oligonucleotide
gccgcggaugccauaccgu

SEQ ID NO: 1641624 - RNA, 19 nt, Artificial Sequence
  Description of Artificial Sequence: Synthetic oligonucleotide
cgguucuugccaucguggu

SEQ ID NO: 1641625 - RNA, 19 nt, Artificial Sequence
  Description of Artificial Sequence: Synthetic oligonucleotide
cacucacaccggguacagu

SEQ ID NO: 1641626 - RNA, 19 nt, Artificial Sequence
  Description of Artificial Sequence: Synthetic oligonucleotide
cggagucgcugcccaccag

SEQ ID NO: 1641627 - RNA, 19 nt, Artificial Sequence
  Description of Artificial Sequence: Synthetic oligonucleotide
ggcugcggcccaaguccca

SEQ ID NO: 1641628 - RNA, 19 nt, Artificial Sequence
  Description of Artificial Sequence: Synthetic oligonucleotide
gggccccagcugauaaaua

SEQ ID NO: 1641629 - RNA, 19 nt, Artificial Sequence
  Description of Artificial Sequence: Synthetic oligonucleotide
ccccgcugccuagcuggcc

SEQ ID NO: 1641630 - RNA, 19 nt, Artificial Sequence
  Description of Artificial Sequence: Synthetic oligonucleotide
gcgugcaggccccgggcau

SEQ ID NO: 1641631 - RNA, 19 nt, Artificial Sequence
  Description of Artificial Sequence: Synthetic oligonucleotide
gcacucugguugacugggu

SEQ ID NO: 1641632 - RNA, 19 nt, Artificial Sequence
  Description of Artificial Sequence: Synthetic oligonucleotide
cuaccccaggacgguucuu

SEQ ID NO: 1641633 - RNA, 19 nt, Artificial Sequence
  Description of Artificial Sequence: Synthetic oligonucleotide
gcccaccagugcgguguaa

SEQ ID NO: 1641634 - RNA, 19 nt, Artificial Sequence
  Description of Artificial Sequence: Synthetic oligonucleotide
cccgggcauggcccacuuu

SEQ ID NO: 1641635 - RNA, 19 nt, Artificial Sequence
  Description of Artificial Sequence: Synthetic oligonucleotide
cgcugccuagcuggccagu

SEQ ID NO: 1641636 - RNA, 19 nt, Artificial Sequence
  Description of Artificial Sequence: Synthetic oligonucleotide
uccacgaagacauaagugg

SEQ ID NO: 1641637 - RNA, 19 nt, Artificial Sequence
  Description of Artificial Sequence: Synthetic oligonucleotide
caagacuucaaaauguugg

SEQ ID NO: 1641638 - RNA, 19 nt, Artificial Sequence
  Description of Artificial Sequence: Synthetic oligonucleotide
acacauuuguuacaggcgc

SEQ ID NO: 1641639 - RNA, 19 nt, Artificial Sequence
  Description of Artificial Sequence: Synthetic oligonucleotide
uggacaauuuauauacacg

SEQ ID NO: 1641640 - RNA, 19 nt, Artificial Sequence
  Description of Artificial Sequence: Synthetic oligonucleotide
auaggugguaaguuugugc

SEQ ID NO: 1641641 - RNA, 19 nt, Artificial Sequence
  Description of Artificial Sequence: Synthetic oligonucleotide
gacuucaaaauguugguug

SEQ ID NO: 1641642 - RNA, 19 nt, Artificial Sequence
  Description of Artificial Sequence: Synthetic oligonucleotide
uacacauuuguuacaggcg

SEQ ID NO: 1641643 - RNA, 19 nt, Artificial Sequence
  Description of Artificial Sequence: Synthetic oligonucleotide
ugccacauuaaauacaugu

SEQ ID NO: 1641644 - RNA, 19 nt, Artificial Sequence
  Description of Artificial Sequence: Synthetic oligonucleotide
uuuauauacacgccgcuuc

SEQ ID NO: 1641645 - RNA, 19 nt, Artificial Sequence
  Description of Artificial Sequence: Synthetic oligonucleotide
caaaauguugguugguacg

SEQ ID NO: 1641646 - RNA, 19 nt, Artificial Sequence
  Description of Artificial Sequence: Synthetic oligonucleotide
uggaauccgacgaagagcu

SEQ ID NO: 1641647 - RNA, 19 nt, Artificial Sequence
  Description of Artificial Sequence: Synthetic oligonucleotide
ugcgguugaagauaggcag

SEQ ID NO: 1641648 - RNA, 19 nt, Artificial Sequence
  Description of Artificial Sequence: Synthetic oligonucleotide
acuucaaaauguugguugg

SEQ ID NO: 1641649 - RNA, 19 nt, Artificial Sequence
  Description of Artificial Sequence: Synthetic oligonucleotide
cacccaacaaagcagaugc

SEQ ID NO: 1641650 - RNA, 19 nt, Artificial Sequence
  Description of Artificial Sequence: Synthetic oligonucleotide
gacucaagcuccuuguggg

SEQ ID NO: 1641651 - RNA, 19 nt, Artificial Sequence
  Description of Artificial Sequence: Synthetic oligonucleotide
uaggugguaaguuugugcc

SEQ ID NO: 1641652 - RNA, 19 nt, Artificial Sequence
  Description of Artificial Sequence: Synthetic oligonucleotide
ggacaauuuauauacacgc

SEQ ID NO: 1641653 - RNA, 19 nt, Artificial Sequence
  Description of Artificial Sequence: Synthetic oligonucleotide
aguaagcgccugcagagcc

SEQ ID NO: 1641654 - RNA, 19 nt, Artificial Sequence
  Description of Artificial Sequence: Synthetic oligonucleotide
agaacgugccuguagcgcc

SEQ ID NO: 1641655 - RNA, 19 nt, Artificial Sequence
  Description of Artificial Sequence: Synthetic oligonucleotide
caauuuauauacacgccgc

SEQ ID NO: 1641656 - RNA, 19 nt, Artificial Sequence
  Description of Artificial Sequence: Synthetic oligonucleotide
aauuuauauacacgccgcu

SEQ ID NO: 1641657 - RNA, 19 nt, Artificial Sequence
  Description of Artificial Sequence: Synthetic oligonucleotide
uguugagccacuugcaaug

SEQ ID NO: 1641658 - RNA, 19 nt, Artificial Sequence
  Description of Artificial Sequence: Synthetic oligonucleotide
ugugugauucuucaagacu

SEQ ID NO: 1641659 - RNA, 19 nt, Artificial Sequence
  Description of Artificial Sequence: Synthetic oligonucleotide
agucaggugcaccacaagg

SEQ ID NO: 1641660 - RNA, 19 nt, Artificial Sequence
  Description of Artificial Sequence: Synthetic oligonucleotide
aucuacgucgcacagguug

SEQ ID NO: 1641661 - RNA, 19 nt, Artificial Sequence
  Description of Artificial Sequence: Synthetic oligonucleotide
uuaaauacauguggaagca

SEQ ID NO: 1641662 - RNA, 19 nt, Artificial Sequence
  Description of Artificial Sequence: Synthetic oligonucleotide
caggccacaaucuggagcg

SEQ ID NO: 1641663 - RNA, 19 nt, Artificial Sequence
  Description of Artificial Sequence: Synthetic oligonucleotide
ugugccacauuaaauacau

SEQ ID NO: 1641664 - RNA, 19 nt, Artificial Sequence
  Description of Artificial Sequence: Synthetic oligonucleotide
aauagcucuugucccgcac

SEQ ID NO: 1641665 - RNA, 19 nt, Artificial Sequence
  Description of Artificial Sequence: Synthetic oligonucleotide
uuauauacacgccgcuucc

SEQ ID NO: 1641666 - RNA, 19 nt, Artificial Sequence
  Description of Artificial Sequence: Synthetic oligonucleotide
uuugugccacauuaaauac

SEQ ID NO: 1641667 - RNA, 19 nt, Artificial Sequence
  Description of Artificial Sequence: Synthetic oligonucleotide
aaaauguugguugguacga

SEQ ID NO: 1641668 - RNA, 19 nt, Artificial Sequence
  Description of Artificial Sequence: Synthetic oligonucleotide
gaauccgacgaagagcugg

SEQ ID NO: 1641669 - RNA, 19 nt, Artificial Sequence
  Description of Artificial Sequence: Synthetic oligonucleotide
guaguaagcgccugcagag

SEQ ID NO: 1641670 - RNA, 19 nt, Artificial Sequence
  Description of Artificial Sequence: Synthetic oligonucleotide
aaauacauguggaagcaga

SEQ ID NO: 1641671 - RNA, 19 nt, Artificial Sequence
  Description of Artificial Sequence: Synthetic oligonucleotide
auggaauccgacgaagagc

SEQ ID NO: 1641672 - RNA, 19 nt, Artificial Sequence
  Description of Artificial Sequence: Synthetic oligonucleotide
aauacauguggaagcagag

SEQ ID NO: 1641673 - RNA, 19 nt, Artificial Sequence
  Description of Artificial Sequence: Synthetic oligonucleotide
ucaaaauguugguugguac

SEQ ID NO: 1641674 - RNA, 19 nt, Artificial Sequence
  Description of Artificial Sequence: Synthetic oligonucleotide
agagcuguagaaagcaggc

SEQ ID NO: 1641675 - RNA, 19 nt, Artificial Sequence
  Description of Artificial Sequence: Synthetic oligonucleotide
uugguugguacgaagccgc

SEQ ID NO: 1641676 - RNA, 19 nt, Artificial Sequence
  Description of Artificial Sequence: Synthetic oligonucleotide
ugaugcugaguaguaagcg

SEQ ID NO: 1641677 - RNA, 19 nt, Artificial Sequence
  Description of Artificial Sequence: Synthetic oligonucleotide
ggagacagcagucaggugc

SEQ ID NO: 1641678 - RNA, 19 nt, Artificial Sequence
  Description of Artificial Sequence: Synthetic oligonucleotide
acaucuacgucgcacaggu

SEQ ID NO: 1641679 - RNA, 19 nt, Artificial Sequence
  Description of Artificial Sequence: Synthetic oligonucleotide
uccuuaaugggccgcaucu

SEQ ID NO: 1641680 - RNA, 19 nt, Artificial Sequence
  Description of Artificial Sequence: Synthetic oligonucleotide
cuugcaaugauggucgaag

SEQ ID NO: 1641681 - RNA, 19 nt, Artificial Sequence
  Description of Artificial Sequence: Synthetic oligonucleotide
augggguugacaaagaacu

SEQ ID NO: 1641682 - RNA, 19 nt, Artificial Sequence
  Description of Artificial Sequence: Synthetic oligonucleotide
uuuaaugcugcuggccugg

SEQ ID NO: 1641683 - RNA, 19 nt, Artificial Sequence
  Description of Artificial Sequence: Synthetic oligonucleotide
uuaaugggccgcaucuucc

SEQ ID NO: 1641684 - RNA, 19 nt, Artificial Sequence
  Description of Artificial Sequence: Synthetic oligonucleotide
acaugugcaugcuggcugc

SEQ ID NO: 1641685 - RNA, 19 nt, Artificial Sequence
  Description of Artificial Sequence: Synthetic oligonucleotide
gagccagccacauguaccg

SEQ ID NO: 1641686 - RNA, 19 nt, Artificial Sequence
  Description of Artificial Sequence: Synthetic oligonucleotide
caguuguugagccacuugc

SEQ ID NO: 1641687 - RNA, 19 nt, Artificial Sequence
  Description of Artificial Sequence: Synthetic oligonucleotide
augcugaguaguaagcgcc

SEQ ID NO: 1641688 - RNA, 19 nt, Artificial Sequence
  Description of Artificial Sequence: Synthetic oligonucleotide
ggaacaaggaccccaaagc

SEQ ID NO: 1641689 - RNA, 19 nt, Artificial Sequence
  Description of Artificial Sequence: Synthetic oligonucleotide
gacaugugcaugcuggcug

SEQ ID NO: 1641690 - RNA, 19 nt, Artificial Sequence
  Description of Artificial Sequence: Synthetic oligonucleotide
caaaccacacaucugugug

SEQ ID NO: 1641691 - RNA, 19 nt, Artificial Sequence
  Description of Artificial Sequence: Synthetic oligonucleotide
auagccagcaggcacccag

SEQ ID NO: 1641692 - RNA, 19 nt, Artificial Sequence
  Description of Artificial Sequence: Synthetic oligonucleotide
uugguacgaagccgcaugg

SEQ ID NO: 1641693 - RNA, 19 nt, Artificial Sequence
  Description of Artificial Sequence: Synthetic oligonucleotide
augacaugugcaugcuggc

SEQ ID NO: 1641694 - RNA, 19 nt, Artificial Sequence
  Description of Artificial Sequence: Synthetic oligonucleotide
uggaaucucuuccauggac

SEQ ID NO: 1641695 - RNA, 19 nt, Artificial Sequence
  Description of Artificial Sequence: Synthetic oligonucleotide
ucuugucccgcacauuggc

SEQ ID NO: 1641696 - RNA, 19 nt, Artificial Sequence
  Description of Artificial Sequence: Synthetic oligonucleotide
auauacacgccgcuuccuc

SEQ ID NO: 1641697 - RNA, 19 nt, Artificial Sequence
  Description of Artificial Sequence: Synthetic oligonucleotide
auacauguggaagcagagc

SEQ ID NO: 1641698 - RNA, 19 nt, Artificial Sequence
  Description of Artificial Sequence: Synthetic oligonucleotide
cagaauagcucuugucccg

SEQ ID NO: 1641699 - RNA, 19 nt, Artificial Sequence
  Description of Artificial Sequence: Synthetic oligonucleotide
agagccagccacauguacc

SEQ ID NO: 1641700 - RNA, 19 nt, Artificial Sequence
  Description of Artificial Sequence: Synthetic oligonucleotide
ucuacgucgcacagguugc

SEQ ID NO: 1641701 - RNA, 19 nt, Artificial Sequence
  Description of Artificial Sequence: Synthetic oligonucleotide
agaacacccaacaaagcag

SEQ ID NO: 1641702 - RNA, 19 nt, Artificial Sequence
  Description of Artificial Sequence: Synthetic oligonucleotide
accgggcuggcacugaugg

SEQ ID NO: 1641703 - RNA, 19 nt, Artificial Sequence
  Description of Artificial Sequence: Synthetic oligonucleotide
uaaugggccgcaucuuccg

SEQ ID NO: 1641704 - RNA, 19 nt, Artificial Sequence
  Description of Artificial Sequence: Synthetic oligonucleotide
aaagagccgauaguuccuc

SEQ ID NO: 1641705 - RNA, 19 nt, Artificial Sequence
  Description of Artificial Sequence: Synthetic oligonucleotide
cuguacgauguacucauag

SEQ ID NO: 1641706 - RNA, 19 nt, Artificial Sequence
  Description of Artificial Sequence: Synthetic oligonucleotide
aaaacggccggagaacgug

SEQ ID NO: 1641707 - RNA, 19 nt, Artificial Sequence
  Description of Artificial Sequence: Synthetic oligonucleotide
aagaccccagaccuggaca

SEQ ID NO: 1641708 - RNA, 19 nt, Artificial Sequence
  Description of Artificial Sequence: Synthetic oligonucleotide
uguauccugggcagcgggg

SEQ ID NO: 1641709 - RNA, 19 nt, Artificial Sequence
  Description of Artificial Sequence: Synthetic oligonucleotide
uucaagacuucaaaauguu

SEQ ID NO: 1641710 - RNA, 19 nt, Artificial Sequence
  Description of Artificial Sequence: Synthetic oligonucleotide
guugguacgaagccgcaug

SEQ ID NO: 1641711 - RNA, 19 nt, Artificial Sequence
  Description of Artificial Sequence: Synthetic oligonucleotide
caaugauggucgaagccgc

SEQ ID NO: 1641712 - RNA, 19 nt, Artificial Sequence
  Description of Artificial Sequence: Synthetic oligonucleotide
ugcuguacgauguacucau

SEQ ID NO: 1641713 - RNA, 19 nt, Artificial Sequence
  Description of Artificial Sequence: Synthetic oligonucleotide
guuucgaucgcgcacucac

SEQ ID NO: 1641714 - RNA, 19 nt, Artificial Sequence
  Description of Artificial Sequence: Synthetic oligonucleotide
aaugggccgcaucuuccgg

SEQ ID NO: 1641715 - RNA, 19 nt, Artificial Sequence
  Description of Artificial Sequence: Synthetic oligonucleotide
aagguggccagcaaagaug

SEQ ID NO: 1641716 - RNA, 19 nt, Artificial Sequence
  Description of Artificial Sequence: Synthetic oligonucleotide
cacaagguggccagcaaag

SEQ ID NO: 1641717 - RNA, 19 nt, Artificial Sequence
  Description of Artificial Sequence: Synthetic oligonucleotide
cacgaagacauaaguggcc

SEQ ID NO: 1641718 - RNA, 19 nt, Artificial Sequence
  Description of Artificial Sequence: Synthetic oligonucleotide
agcauagccagcaggcacc

SEQ ID NO: 1641719 - RNA, 19 nt, Artificial Sequence
  Description of Artificial Sequence: Synthetic oligonucleotide
ugcaguguuucgaucgcgc

SEQ ID NO: 1641720 - RNA, 19 nt, Artificial Sequence
  Description of Artificial Sequence: Synthetic oligonucleotide
acaaaccacacaucugugu

SEQ ID NO: 1641721 - RNA, 19 nt, Artificial Sequence
  Description of Artificial Sequence: Synthetic oligonucleotide
acucacaucuacgucgcac

SEQ ID NO: 1641722 - RNA, 19 nt, Artificial Sequence
  Description of Artificial Sequence: Synthetic oligonucleotide
uggucgaagccgcauacac

SEQ ID NO: 1641723 - RNA, 19 nt, Artificial Sequence
  Description of Artificial Sequence: Synthetic oligonucleotide
gcaaugauggucgaagccg

SEQ ID NO: 1641724 - RNA, 19 nt, Artificial Sequence
  Description of Artificial Sequence: Synthetic oligonucleotide
uaaauacauguggaagcag

SEQ ID NO: 1641725 - RNA, 19 nt, Artificial Sequence
  Description of Artificial Sequence: Synthetic oligonucleotide
agcgcagcacuacccaggc

SEQ ID NO: 1641726 - RNA, 19 nt, Artificial Sequence
  Description of Artificial Sequence: Synthetic oligonucleotide
guugguugguacgaagccg

SEQ ID NO: 1641727 - RNA, 19 nt, Artificial Sequence
  Description of Artificial Sequence: Synthetic oligonucleotide
ucauaggugguaaguuugu

SEQ ID NO: 1641728 - RNA, 19 nt, Artificial Sequence
  Description of Artificial Sequence: Synthetic oligonucleotide
gguacgaagccgcaugggg

SEQ ID NO: 1641729 - RNA, 19 nt, Artificial Sequence
  Description of Artificial Sequence: Synthetic oligonucleotide
uguagcgccagcccagacu

SEQ ID NO: 1641730 - RNA, 19 nt, Artificial Sequence
  Description of Artificial Sequence: Synthetic oligonucleotide
aagacauaaguggccacca

SEQ ID NO: 1641731 - RNA, 19 nt, Artificial Sequence
  Description of Artificial Sequence: Synthetic oligonucleotide
agauggcacccaugcaagc

SEQ ID NO: 1641732 - RNA, 19 nt, Artificial Sequence
  Description of Artificial Sequence: Synthetic oligonucleotide
guuccucucgcccacgcag

SEQ ID NO: 1641733 - RNA, 19 nt, Artificial Sequence
  Description of Artificial Sequence: Synthetic oligonucleotide
cccagaauagcucuugucc

SEQ ID NO: 1641734 - RNA, 19 nt, Artificial Sequence
  Description of Artificial Sequence: Synthetic oligonucleotide
agccgauaguuccucucgc

SEQ ID NO: 1641735 - RNA, 19 nt, Artificial Sequence
  Description of Artificial Sequence: Synthetic oligonucleotide
uugcaaugauggucgaagc

SEQ ID NO: 1641736 - RNA, 19 nt, Artificial Sequence
  Description of Artificial Sequence: Synthetic oligonucleotide
uuuucugggguuggauccg

SEQ ID NO: 1641737 - RNA, 19 nt, Artificial Sequence
  Description of Artificial Sequence: Synthetic oligonucleotide
uggugguuccacuuggccu

SEQ ID NO: 1641738 - RNA, 19 nt, Artificial Sequence
  Description of Artificial Sequence: Synthetic oligonucleotide
cuuaaugggccgcaucuuc

SEQ ID NO: 1641739 - RNA, 19 nt, Artificial Sequence
  Description of Artificial Sequence: Synthetic oligonucleotide
aaaacuccaucuccuuaau

SEQ ID NO: 1641740 - RNA, 19 nt, Artificial Sequence
  Description of Artificial Sequence: Synthetic oligonucleotide
aaacggccggagaacgugc

SEQ ID NO: 1641741 - RNA, 19 nt, Artificial Sequence
  Description of Artificial Sequence: Synthetic oligonucleotide
gauggucgaagccgcauac

SEQ ID NO: 1641742 - RNA, 19 nt, Artificial Sequence
  Description of Artificial Sequence: Synthetic oligonucleotide
aaaagagccgauaguuccu

SEQ ID NO: 1641743 - RNA, 19 nt, Artificial Sequence
  Description of Artificial Sequence: Synthetic oligonucleotide
aggugcaccacaagguggc

SEQ ID NO: 1641744 - RNA, 19 nt, Artificial Sequence
  Description of Artificial Sequence: Synthetic oligonucleotide
agguccucauguaaaacuc

SEQ ID NO: 1641745 - RNA, 19 nt, Artificial Sequence
  Description of Artificial Sequence: Synthetic oligonucleotide
agguggccagcaaagaugg

SEQ ID NO: 1641746 - RNA, 19 nt, Artificial Sequence
  Description of Artificial Sequence: Synthetic oligonucleotide
acgcacauggcugaagguc

SEQ ID NO: 1641747 - RNA, 19 nt, Artificial Sequence
  Description of Artificial Sequence: Synthetic oligonucleotide
uauacacgccgcuuccucu

SEQ ID NO: 1641748 - RNA, 19 nt, Artificial Sequence
  Description of Artificial Sequence: Synthetic oligonucleotide
uggaucgauggagacagca

SEQ ID NO: 1641749 - RNA, 19 nt, Artificial Sequence
  Description of Artificial Sequence: Synthetic oligonucleotide
aguguuucgaucgcgcacu

SEQ ID NO: 1641750 - RNA, 19 nt, Artificial Sequence
  Description of Artificial Sequence: Synthetic oligonucleotide
uucgaucgcgcacucacau

SEQ ID NO: 1641751 - RNA, 19 nt, Artificial Sequence
  Description of Artificial Sequence: Synthetic oligonucleotide
aucgcgcacucacaucuac

SEQ ID NO: 1641752 - RNA, 19 nt, Artificial Sequence
  Description of Artificial Sequence: Synthetic oligonucleotide
gcuggaucgauggagacag

SEQ ID NO: 1641753 - RNA, 19 nt, Artificial Sequence
  Description of Artificial Sequence: Synthetic oligonucleotide
uuguugagccacuugcaau

SEQ ID NO: 1641754 - RNA, 19 nt, Artificial Sequence
  Description of Artificial Sequence: Synthetic oligonucleotide
cugugugauucuucaagac

SEQ ID NO: 1641755 - RNA, 19 nt, Artificial Sequence
  Description of Artificial Sequence: Synthetic oligonucleotide
ugugcaugcuggcugcggu

SEQ ID NO: 1641756 - RNA, 19 nt, Artificial Sequence
  Description of Artificial Sequence: Synthetic oligonucleotide
gggaacaaggaccccaaag

SEQ ID NO: 1641757 - RNA, 19 nt, Artificial Sequence
  Description of Artificial Sequence: Synthetic oligonucleotide
aucugcuggaucgauggag

SEQ ID NO: 1641758 - RNA, 19 nt, Artificial Sequence
  Description of Artificial Sequence: Synthetic oligonucleotide
guacgauguacucauaggu

SEQ ID NO: 1641759 - RNA, 19 nt, Artificial Sequence
  Description of Artificial Sequence: Synthetic oligonucleotide
guagaaagcaggcccagaa

SEQ ID NO: 1641760 - RNA, 19 nt, Artificial Sequence
  Description of Artificial Sequence: Synthetic oligonucleotide
ugcagugcaggucuucaau

SEQ ID NO: 1641761 - RNA, 19 nt, Artificial Sequence
  Description of Artificial Sequence: Synthetic oligonucleotide
cucuggacgcacauggcug

SEQ ID NO: 1641762 - RNA, 19 nt, Artificial Sequence
  Description of Artificial Sequence: Synthetic oligonucleotide
uccccuguauccugggcag

SEQ ID NO: 1641763 - RNA, 19 nt, Artificial Sequence
  Description of Artificial Sequence: Synthetic oligonucleotide
acucauaggugguaaguuu

SEQ ID NO: 1641764 - RNA, 19 nt, Artificial Sequence
  Description of Artificial Sequence: Synthetic oligonucleotide
ucgcgcacucacaucuacg

SEQ ID NO: 1641765 - RNA, 19 nt, Artificial Sequence
  Description of Artificial Sequence: Synthetic oligonucleotide
ucuggacgcacauggcuga

SEQ ID NO: 1641766 - RNA, 19 nt, Artificial Sequence
  Description of Artificial Sequence: Synthetic oligonucleotide
gagaacgugccuguagcgc

SEQ ID NO: 1641767 - RNA, 19 nt, Artificial Sequence
  Description of Artificial Sequence: Synthetic oligonucleotide
guagcgccagcccagacuc

SEQ ID NO: 1641768 - RNA, 19 nt, Artificial Sequence
  Description of Artificial Sequence: Synthetic oligonucleotide
agcgccugcagagccagcc

SEQ ID NO: 1641769 - RNA, 19 nt, Artificial Sequence
  Description of Artificial Sequence: Synthetic oligonucleotide
gaguaguaagcgccugcag

SEQ ID NO: 1641770 - RNA, 19 nt, Artificial Sequence
  Description of Artificial Sequence: Synthetic oligonucleotide
agcagagcuguagaaagca

SEQ ID NO: 1641771 - RNA, 19 nt, Artificial Sequence
  Description of Artificial Sequence: Synthetic oligonucleotide
ccaaucaccgcgaagaaga

SEQ ID NO: 1641772 - RNA, 19 nt, Artificial Sequence
  Description of Artificial Sequence: Synthetic oligonucleotide
uggcugcgguugaagauag

SEQ ID NO: 1641773 - RNA, 19 nt, Artificial Sequence
  Description of Artificial Sequence: Synthetic oligonucleotide
acgaagagcuggaauggcg

SEQ ID NO: 1641774 - RNA, 19 nt, Artificial Sequence
  Description of Artificial Sequence: Synthetic oligonucleotide
gaucgauggagacagcagu

SEQ ID NO: 1641775 - RNA, 19 nt, Artificial Sequence
  Description of Artificial Sequence: Synthetic oligonucleotide
ggacgcacauggcugaagg

SEQ ID NO: 1641776 - RNA, 19 nt, Artificial Sequence
  Description of Artificial Sequence: Synthetic oligonucleotide
cugaguaguaagcgccugc

SEQ ID NO: 1641777 - RNA, 19 nt, Artificial Sequence
  Description of Artificial Sequence: Synthetic oligonucleotide
auagcucuugucccgcaca

SEQ ID NO: 1641778 - RNA, 19 nt, Artificial Sequence
  Description of Artificial Sequence: Synthetic oligonucleotide
agccgcaugggguugacaa

SEQ ID NO: 1641779 - RNA, 19 nt, Artificial Sequence
  Description of Artificial Sequence: Synthetic oligonucleotide
acauuuguuacaggcgcug

SEQ ID NO: 1641780 - RNA, 19 nt, Artificial Sequence
  Description of Artificial Sequence: Synthetic oligonucleotide
agacauaaguggccaccag

SEQ ID NO: 1641781 - RNA, 19 nt, Artificial Sequence
  Description of Artificial Sequence: Synthetic oligonucleotide
acgaagacauaaguggcca

SEQ ID NO: 1641782 - RNA, 19 nt, Artificial Sequence
  Description of Artificial Sequence: Synthetic oligonucleotide
caugcaagcauagccagca

SEQ ID NO: 1641783 - RNA, 19 nt, Artificial Sequence
  Description of Artificial Sequence: Synthetic oligonucleotide
gguggcaagaaacugggaa

SEQ ID NO: 1641784 - RNA, 19 nt, Artificial Sequence
  Description of Artificial Sequence: Synthetic oligonucleotide
ucggcugaugcugaguagu

SEQ ID NO: 1641785 - RNA, 19 nt, Artificial Sequence
  Description of Artificial Sequence: Synthetic oligonucleotide
aacggccggagaacgugcc

SEQ ID NO: 1641786 - RNA, 19 nt, Artificial Sequence
  Description of Artificial Sequence: Synthetic oligonucleotide
acaaucuggagcgggugag

SEQ ID NO: 1641787 - RNA, 19 nt, Artificial Sequence
  Description of Artificial Sequence: Synthetic oligonucleotide
gcacugauggaauccgacg

SEQ ID NO: 1641788 - RNA, 19 nt, Artificial Sequence
  Description of Artificial Sequence: Synthetic oligonucleotide
gcucuugucccgcacauug

SEQ ID NO: 1641789 - RNA, 19 nt, Artificial Sequence
  Description of Artificial Sequence: Synthetic oligonucleotide
uuucgaucgcgcacucaca

SEQ ID NO: 1641790 - RNA, 19 nt, Artificial Sequence
  Description of Artificial Sequence: Synthetic oligonucleotide
uccgacgaagagcuggaau

SEQ ID NO: 1641791 - RNA, 19 nt, Artificial Sequence
  Description of Artificial Sequence: Synthetic oligonucleotide
auggacauuuaaugcugcu

SEQ ID NO: 1641792 - RNA, 19 nt, Artificial Sequence
  Description of Artificial Sequence: Synthetic oligonucleotide
uugucccgcacauuggcau

SEQ ID NO: 1641793 - RNA, 19 nt, Artificial Sequence
  Description of Artificial Sequence: Synthetic oligonucleotide
acuacccaggcgugucugg

SEQ ID NO: 1641794 - RNA, 19 nt, Artificial Sequence
  Description of Artificial Sequence: Synthetic oligonucleotide
cgcacucacaucuacgucg

SEQ ID NO: 1641795 - RNA, 19 nt, Artificial Sequence
  Description of Artificial Sequence: Synthetic oligonucleotide
cugauggaauccgacgaag

SEQ ID NO: 1641796 - RNA, 19 nt, Artificial Sequence
  Description of Artificial Sequence: Synthetic oligonucleotide
uaagcgccugcagagccag

SEQ ID NO: 1641797 - RNA, 19 nt, Artificial Sequence
  Description of Artificial Sequence: Synthetic oligonucleotide
ugggcggugcuguacgaug

SEQ ID NO: 1641798 - RNA, 19 nt, Artificial Sequence
  Description of Artificial Sequence: Synthetic oligonucleotide
guuguugagccacuugcaa

SEQ ID NO: 1641799 - RNA, 19 nt, Artificial Sequence
  Description of Artificial Sequence: Synthetic oligonucleotide
gggguugacaaagaacucc

SEQ ID NO: 1641800 - RNA, 19 nt, Artificial Sequence
  Description of Artificial Sequence: Synthetic oligonucleotide
ugauggucgaagccgcaua

SEQ ID NO: 1641801 - RNA, 19 nt, Artificial Sequence
  Description of Artificial Sequence: Synthetic oligonucleotide
gaagguccucauguaaaac

SEQ ID NO: 1641802 - RNA, 19 nt, Artificial Sequence
  Description of Artificial Sequence: Synthetic oligonucleotide
gcaagcauagccagcaggc

SEQ ID NO: 1641803 - RNA, 19 nt, Artificial Sequence
  Description of Artificial Sequence: Synthetic oligonucleotide
aguuugugccacauuaaau

SEQ ID NO: 1641804 - RNA, 19 nt, Artificial Sequence
  Description of Artificial Sequence: Synthetic oligonucleotide
aagagccgauaguuccucu

SEQ ID NO: 1641805 - RNA, 19 nt, Artificial Sequence
  Description of Artificial Sequence: Synthetic oligonucleotide
uauauacacgccgcuuccu

SEQ ID NO: 1641806 - RNA, 19 nt, Artificial Sequence
  Description of Artificial Sequence: Synthetic oligonucleotide
cauuuguuacaggcgcugc

SEQ ID NO: 1641807 - RNA, 19 nt, Artificial Sequence
  Description of Artificial Sequence: Synthetic oligonucleotide
ccacgaagacauaaguggc

SEQ ID NO: 1641808 - RNA, 19 nt, Artificial Sequence
  Description of Artificial Sequence: Synthetic oligonucleotide
ccgacgaagagcuggaaug

SEQ ID NO: 1641809 - RNA, 19 nt, Artificial Sequence
  Description of Artificial Sequence: Synthetic oligonucleotide
aauccgacgaagagcugga

SEQ ID NO: 1641810 - RNA, 19 nt, Artificial Sequence
  Description of Artificial Sequence: Synthetic oligonucleotide
aaauguugguugguacgaa

SEQ ID NO: 1641811 - RNA, 19 nt, Artificial Sequence
  Description of Artificial Sequence: Synthetic oligonucleotide
caguguuucgaucgcgcac

SEQ ID NO: 1641812 - RNA, 19 nt, Artificial Sequence
  Description of Artificial Sequence: Synthetic oligonucleotide
aguggugguuccacuuggc

SEQ ID NO: 1641813 - RNA, 19 nt, Artificial Sequence
  Description of Artificial Sequence: Synthetic oligonucleotide
cugaagguccucauguaaa

SEQ ID NO: 1641814 - RNA, 19 nt, Artificial Sequence
  Description of Artificial Sequence: Synthetic oligonucleotide
caaucaccgcgaagaagag

SEQ ID NO: 1641815 - RNA, 19 nt, Artificial Sequence
  Description of Artificial Sequence: Synthetic oligonucleotide
uacgaagccgcaugggguu

SEQ ID NO: 1641816 - RNA, 19 nt, Artificial Sequence
  Description of Artificial Sequence: Synthetic oligonucleotide
aggggcccagaauagcucu

SEQ ID NO: 1641817 - RNA, 19 nt, Artificial Sequence
  Description of Artificial Sequence: Synthetic oligonucleotide
gucgaagccgcauacacau

SEQ ID NO: 1641818 - RNA, 19 nt, Artificial Sequence
  Description of Artificial Sequence: Synthetic oligonucleotide
cuaaggcaggccaucuuca

SEQ ID NO: 1641819 - RNA, 19 nt, Artificial Sequence
  Description of Artificial Sequence: Synthetic oligonucleotide
acacccaacaaagcagaug

SEQ ID NO: 1641820 - RNA, 19 nt, Artificial Sequence
  Description of Artificial Sequence: Synthetic oligonucleotide
acucggcugaugcugagua

SEQ ID NO: 1641821 - RNA, 19 nt, Artificial Sequence
  Description of Artificial Sequence: Synthetic oligonucleotide
gacgaagagcuggaauggc

SEQ ID NO: 1641822 - RNA, 19 nt, Artificial Sequence
  Description of Artificial Sequence: Synthetic oligonucleotide
agcacuacccaggcguguc

SEQ ID NO: 1641823 - RNA, 19 nt, Artificial Sequence
  Description of Artificial Sequence: Synthetic oligonucleotide
agaccccagaccuggacaa

SEQ ID NO: 1641824 - RNA, 19 nt, Artificial Sequence
  Description of Artificial Sequence: Synthetic oligonucleotide
uuacaggcgcugcaguguu

SEQ ID NO: 1641825 - RNA, 19 nt, Artificial Sequence
  Description of Artificial Sequence: Synthetic oligonucleotide
gaagccgcauacacauuug

SEQ ID NO: 1641826 - RNA, 19 nt, Artificial Sequence
  Description of Artificial Sequence: Synthetic oligonucleotide
gccacauuaaauacaugug

SEQ ID NO: 1641827 - RNA, 19 nt, Artificial Sequence
  Description of Artificial Sequence: Synthetic oligonucleotide
aggugguaaguuugugcca

SEQ ID NO: 1641828 - RNA, 19 nt, Artificial Sequence
  Description of Artificial Sequence: Synthetic oligonucleotide
ccgcauacacauuuguuac

SEQ ID NO: 1641829 - RNA, 19 nt, Artificial Sequence
  Description of Artificial Sequence: Synthetic oligonucleotide
cacaucuacgucgcacagg

SEQ ID NO: 1641830 - RNA, 19 nt, Artificial Sequence
  Description of Artificial Sequence: Synthetic oligonucleotide
ggugguaaguuugugccac

SEQ ID NO: 1641831 - RNA, 19 nt, Artificial Sequence
  Description of Artificial Sequence: Synthetic oligonucleotide
gcugcgguugaagauaggc

SEQ ID NO: 1641832 - RNA, 19 nt, Artificial Sequence
  Description of Artificial Sequence: Synthetic oligonucleotide
acccaugcaagcauagcca

SEQ ID NO: 1641833 - RNA, 19 nt, Artificial Sequence
  Description of Artificial Sequence: Synthetic oligonucleotide
caccgcgaagaagagguag

SEQ ID NO: 1641834 - RNA, 19 nt, Artificial Sequence
  Description of Artificial Sequence: Synthetic oligonucleotide
cauaggugguaaguuugug

SEQ ID NO: 1641835 - RNA, 19 nt, Artificial Sequence
  Description of Artificial Sequence: Synthetic oligonucleotide
gagacagcagucaggugca

SEQ ID NO: 1641836 - RNA, 19 nt, Artificial Sequence
  Description of Artificial Sequence: Synthetic oligonucleotide
uaguaagcgccugcagagc

SEQ ID NO: 1641837 - RNA, 19 nt, Artificial Sequence
  Description of Artificial Sequence: Synthetic oligonucleotide
gcuaaggcaggccaucuuc

SEQ ID NO: 1641838 - RNA, 19 nt, Artificial Sequence
  Description of Artificial Sequence: Synthetic oligonucleotide
acucaagcuccuugugggu

SEQ ID NO: 1641839 - RNA, 19 nt, Artificial Sequence
  Description of Artificial Sequence: Synthetic oligonucleotide
cugcgguugaagauaggca

SEQ ID NO: 1641840 - RNA, 19 nt, Artificial Sequence
  Description of Artificial Sequence: Synthetic oligonucleotide
ggugcuguacgauguacuc

SEQ ID NO: 1641841 - RNA, 19 nt, Artificial Sequence
  Description of Artificial Sequence: Synthetic oligonucleotide
aaugauggucgaagccgca

SEQ ID NO: 1641842 - RNA, 19 nt, Artificial Sequence
  Description of Artificial Sequence: Synthetic oligonucleotide
aggugucccgggcucgccg

SEQ ID NO: 1641843 - RNA, 19 nt, Artificial Sequence
  Description of Artificial Sequence: Synthetic oligonucleotide
agagcuggaauggcggcca

SEQ ID NO: 1641844 - RNA, 19 nt, Artificial Sequence
  Description of Artificial Sequence: Synthetic oligonucleotide
uuccucucgcccacgcagu

SEQ ID NO: 1641845 - RNA, 19 nt, Artificial Sequence
  Description of Artificial Sequence: Synthetic oligonucleotide
caugacucaagcuccuugu

SEQ ID NO: 1641846 - RNA, 19 nt, Artificial Sequence
  Description of Artificial Sequence: Synthetic oligonucleotide
agaagagguagagcagcca

SEQ ID NO: 1641847 - RNA, 19 nt, Artificial Sequence
  Description of Artificial Sequence: Synthetic oligonucleotide
ccacacaucugugugauuc

SEQ ID NO: 1641848 - RNA, 19 nt, Artificial Sequence
  Description of Artificial Sequence: Synthetic oligonucleotide
cagaccuggacaauuuaua

SEQ ID NO: 1641849 - RNA, 19 nt, Artificial Sequence
  Description of Artificial Sequence: Synthetic oligonucleotide
acgucgcacagguugcagu

SEQ ID NO: 1641850 - RNA, 19 nt, Artificial Sequence
  Description of Artificial Sequence: Synthetic oligonucleotide
cuacccaggcgugucuggg

SEQ ID NO: 1641851 - RNA, 19 nt, Artificial Sequence
  Description of Artificial Sequence: Synthetic oligonucleotide
gcaugacucaagcuccuug

SEQ ID NO: 1641852 - RNA, 19 nt, Artificial Sequence
  Description of Artificial Sequence: Synthetic oligonucleotide
caaucuggagcgggugagg

SEQ ID NO: 1641853 - RNA, 19 nt, Artificial Sequence
  Description of Artificial Sequence: Synthetic oligonucleotide
ggggcaugacucaagcucc

SEQ ID NO: 1641854 - RNA, 19 nt, Artificial Sequence
  Description of Artificial Sequence: Synthetic oligonucleotide
gaauagcucuugucccgca

SEQ ID NO: 1641855 - RNA, 19 nt, Artificial Sequence
  Description of Artificial Sequence: Synthetic oligonucleotide
cucaagcuccuuguggguc

SEQ ID NO: 1641856 - RNA, 19 nt, Artificial Sequence
  Description of Artificial Sequence: Synthetic oligonucleotide
uacccaggcgugucugggc

SEQ ID NO: 1641857 - RNA, 19 nt, Artificial Sequence
  Description of Artificial Sequence: Synthetic oligonucleotide
gccgcauacacauuuguua

SEQ ID NO: 1641858 - RNA, 19 nt, Artificial Sequence
  Description of Artificial Sequence: Synthetic oligonucleotide
ggaucgauggagacagcag

SEQ ID NO: 1641859 - RNA, 19 nt, Artificial Sequence
  Description of Artificial Sequence: Synthetic oligonucleotide
uacgucgcacagguugcag

SEQ ID NO: 1641860 - RNA, 19 nt, Artificial Sequence
  Description of Artificial Sequence: Synthetic oligonucleotide
ugguaaguuugugccacau

SEQ ID NO: 1641861 - RNA, 19 nt, Artificial Sequence
  Description of Artificial Sequence: Synthetic oligonucleotide
guugcagugcaggucuuca

SEQ ID NO: 1641862 - RNA, 19 nt, Artificial Sequence
  Description of Artificial Sequence: Synthetic oligonucleotide
ugucccgcacauuggcauc

SEQ ID NO: 1641863 - RNA, 19 nt, Artificial Sequence
  Description of Artificial Sequence: Synthetic oligonucleotide
gugccuguagcgccagccc

SEQ ID NO: 1641864 - RNA, 19 nt, Artificial Sequence
  Description of Artificial Sequence: Synthetic oligonucleotide
augugcaugcuggcugcgg

SEQ ID NO: 1641865 - RNA, 19 nt, Artificial Sequence
  Description of Artificial Sequence: Synthetic oligonucleotide
auacacgccgcuuccucuu

SEQ ID NO: 1641866 - RNA, 19 nt, Artificial Sequence
  Description of Artificial Sequence: Synthetic oligonucleotide
ccgauaguuccucucgccc

SEQ ID NO: 1641867 - RNA, 19 nt, Artificial Sequence
  Description of Artificial Sequence: Synthetic oligonucleotide
cuugucccgcacauuggca

SEQ ID NO: 1641868 - RNA, 19 nt, Artificial Sequence
  Description of Artificial Sequence: Synthetic oligonucleotide
cugcaguguuucgaucgcg

SEQ ID NO: 1641869 - RNA, 19 nt, Artificial Sequence
  Description of Artificial Sequence: Synthetic oligonucleotide
acaagguggccagcaaaga

SEQ ID NO: 1641870 - RNA, 19 nt, Artificial Sequence
  Description of Artificial Sequence: Synthetic oligonucleotide
auaguuccucucgcccacg

SEQ ID NO: 1641871 - RNA, 19 nt, Artificial Sequence
  Description of Artificial Sequence: Synthetic oligonucleotide
cacaaucuggagcggguga

SEQ ID NO: 1641872 - RNA, 19 nt, Artificial Sequence
  Description of Artificial Sequence: Synthetic oligonucleotide
caucuccuuaaugggccgc

SEQ ID NO: 1641873 - RNA, 19 nt, Artificial Sequence
  Description of Artificial Sequence: Synthetic oligonucleotide
cuccuuaaugggccgcauc

SEQ ID NO: 1641874 - RNA, 19 nt, Artificial Sequence
  Description of Artificial Sequence: Synthetic oligonucleotide
uguuucgaucgcgcacuca

SEQ ID NO: 1641875 - RNA, 19 nt, Artificial Sequence
  Description of Artificial Sequence: Synthetic oligonucleotide
gccacauguaccgggcugg

SEQ ID NO: 1641876 - RNA, 19 nt, Artificial Sequence
  Description of Artificial Sequence: Synthetic oligonucleotide
gauaggcaggggcccagaa

SEQ ID NO: 1641877 - RNA, 19 nt, Artificial Sequence
  Description of Artificial Sequence: Synthetic oligonucleotide
uggacgcacauggcugaag

SEQ ID NO: 1641878 - RNA, 19 nt, Artificial Sequence
  Description of Artificial Sequence: Synthetic oligonucleotide
ucgaucgcgcacucacauc

SEQ ID NO: 1641879 - RNA, 19 nt, Artificial Sequence
  Description of Artificial Sequence: Synthetic oligonucleotide
  modified_base (14)..(14): a, c, u, g, unknown or other
gcugcucgggcucncaaaa

SEQ ID NO: 1641880 - RNA, 19 nt, Artificial Sequence
  Description of Artificial Sequence: Synthetic oligonucleotide
gcgguugaagauaggcagg

SEQ ID NO: 1641881 - RNA, 19 nt, Artificial Sequence
  Description of Artificial Sequence: Synthetic oligonucleotide
agccaaucaccgcgaagaa

SEQ ID NO: 1641882 - RNA, 19 nt, Artificial Sequence
  Description of Artificial Sequence: Synthetic oligonucleotide
accgcgaagaagagguaga

SEQ ID NO: 1641883 - RNA, 19 nt, Artificial Sequence
  Description of Artificial Sequence: Synthetic oligonucleotide
gccgauaguuccucucgcc

SEQ ID NO: 1641884 - RNA, 19 nt, Artificial Sequence
  Description of Artificial Sequence: Synthetic oligonucleotide
gcugaagguccucauguaa

SEQ ID NO: 1641885 - RNA, 19 nt, Artificial Sequence
  Description of Artificial Sequence: Synthetic oligonucleotide
uggcacccaugcaagcaua

SEQ ID NO: 1641886 - RNA, 19 nt, Artificial Sequence
  Description of Artificial Sequence: Synthetic oligonucleotide
guacucauaggugguaagu

SEQ ID NO: 1641887 - RNA, 19 nt, Artificial Sequence
  Description of Artificial Sequence: Synthetic oligonucleotide
ucccaguccccuguauccu

SEQ ID NO: 1641888 - RNA, 19 nt, Artificial Sequence
  Description of Artificial Sequence: Synthetic oligonucleotide
uuucccuggggcgcccagc

SEQ ID NO: 1641889 - RNA, 19 nt, Artificial Sequence
  Description of Artificial Sequence: Synthetic oligonucleotide
ggaccccaaagccaaucac

SEQ ID NO: 1641890 - RNA, 19 nt, Artificial Sequence
  Description of Artificial Sequence: Synthetic oligonucleotide
augauggucgaagccgcau

SEQ ID NO: 1641891 - RNA, 19 nt, Artificial Sequence
  Description of Artificial Sequence: Synthetic oligonucleotide
gugcuguacgauguacuca

SEQ ID NO: 1641892 - RNA, 19 nt, Artificial Sequence
  Description of Artificial Sequence: Synthetic oligonucleotide
gggaaggauggacauuuaa

SEQ ID NO: 1641893 - RNA, 19 nt, Artificial Sequence
  Description of Artificial Sequence: Synthetic oligonucleotide
acuugcaaugauggucgaa

SEQ ID NO: 1641894 - RNA, 19 nt, Artificial Sequence
  Description of Artificial Sequence: Synthetic oligonucleotide
guuacaggcgcugcagugu

SEQ ID NO: 1641895 - RNA, 19 nt, Artificial Sequence
  Description of Artificial Sequence: Synthetic oligonucleotide
caggcgcugcaguguuucg

SEQ ID NO: 1641896 - RNA, 19 nt, Artificial Sequence
  Description of Artificial Sequence: Synthetic oligonucleotide
ggguuggauccguggaggc

SEQ ID NO: 1641897 - RNA, 19 nt, Artificial Sequence
  Description of Artificial Sequence: Synthetic oligonucleotide
ggccacaaucuggagcggg

SEQ ID NO: 1641898 - RNA, 19 nt, Artificial Sequence
  Description of Artificial Sequence: Synthetic oligonucleotide
gaacgugccuguagcgcca

SEQ ID NO: 1641899 - RNA, 19 nt, Artificial Sequence
  Description of Artificial Sequence: Synthetic oligonucleotide
acgugccuguagcgccagc

SEQ ID NO: 1641900 - RNA, 19 nt, Artificial Sequence
  Description of Artificial Sequence: Synthetic oligonucleotide
auggucgaagccgcauaca

SEQ ID NO: 1641901 - RNA, 19 nt, Artificial Sequence
  Description of Artificial Sequence: Synthetic oligonucleotide
uguaccgggcuggcacuga

SEQ ID NO: 1641902 - RNA, 19 nt, Artificial Sequence
  Description of Artificial Sequence: Synthetic oligonucleotide
ggucccaguccccuguauc

SEQ ID NO: 1641903 - RNA, 19 nt, Artificial Sequence
  Description of Artificial Sequence: Synthetic oligonucleotide
gaauggcggccaggggucc

SEQ ID NO: 1641904 - RNA, 19 nt, Artificial Sequence
  Description of Artificial Sequence: Synthetic oligonucleotide
cccugguuucccuggggcg

SEQ ID NO: 1641905 - RNA, 19 nt, Artificial Sequence
  Description of Artificial Sequence: Synthetic oligonucleotide
guacgaagccgcauggggu

SEQ ID NO: 1641906 - RNA, 19 nt, Artificial Sequence
  Description of Artificial Sequence: Synthetic oligonucleotide
cacuacccaggcgugucug

SEQ ID NO: 1641907 - RNA, 19 nt, Artificial Sequence
  Description of Artificial Sequence: Synthetic oligonucleotide
ccgcaugggguugacaaag

SEQ ID NO: 1641908 - RNA, 19 nt, Artificial Sequence
  Description of Artificial Sequence: Synthetic oligonucleotide
gacgcacauggcugaaggu

SEQ ID NO: 1641909 - RNA, 19 nt, Artificial Sequence
  Description of Artificial Sequence: Synthetic oligonucleotide
cacauuuguuacaggcgcu

SEQ ID NO: 1641910 - RNA, 19 nt, Artificial Sequence
  Description of Artificial Sequence: Synthetic oligonucleotide
ccugguuucccuggggcgc

SEQ ID NO: 1641911 - RNA, 19 nt, Artificial Sequence
  Description of Artificial Sequence: Synthetic oligonucleotide
gcaguguuucgaucgcgca

SEQ ID NO: 1641912 - RNA, 19 nt, Artificial Sequence
  Description of Artificial Sequence: Synthetic oligonucleotide
cuggaucgauggagacagc

SEQ ID NO: 1641913 - RNA, 19 nt, Artificial Sequence
  Description of Artificial Sequence: Synthetic oligonucleotide
ggugguuccacuuggccuu

SEQ ID NO: 1641914 - RNA, 19 nt, Artificial Sequence
  Description of Artificial Sequence: Synthetic oligonucleotide
ggaauggcggccagggguc

SEQ ID NO: 1641915 - RNA, 19 nt, Artificial Sequence
  Description of Artificial Sequence: Synthetic oligonucleotide
cgacgaagagcuggaaugg

SEQ ID NO: 1641916 - RNA, 19 nt, Artificial Sequence
  Description of Artificial Sequence: Synthetic oligonucleotide
cuggcugcgguugaagaua

SEQ ID NO: 1641917 - RNA, 19 nt, Artificial Sequence
  Description of Artificial Sequence: Synthetic oligonucleotide
ggcacccaugcaagcauag

SEQ ID NO: 1641918 - RNA, 19 nt, Artificial Sequence
  Description of Artificial Sequence: Synthetic oligonucleotide
aggcgcugcaguguuucga

SEQ ID NO: 1641919 - RNA, 19 nt, Artificial Sequence
  Description of Artificial Sequence: Synthetic oligonucleotide
auguaccgggcuggcacug

SEQ ID NO: 1641920 - RNA, 19 nt, Artificial Sequence
  Description of Artificial Sequence: Synthetic oligonucleotide
ucgaagccgcauacacauu

SEQ ID NO: 1641921 - RNA, 19 nt, Artificial Sequence
  Description of Artificial Sequence: Synthetic oligonucleotide
guaagcgccugcagagcca

SEQ ID NO: 1641922 - RNA, 19 nt, Artificial Sequence
  Description of Artificial Sequence: Synthetic oligonucleotide
cccuguauccugggcagcg

SEQ ID NO: 1641923 - RNA, 19 nt, Artificial Sequence
  Description of Artificial Sequence: Synthetic oligonucleotide
acggccggagaacgugccu

SEQ ID NO: 1641924 - RNA, 19 nt, Artificial Sequence
  Description of Artificial Sequence: Synthetic oligonucleotide
cgauggagacagcagucag

SEQ ID NO: 1641925 - RNA, 19 nt, Artificial Sequence
  Description of Artificial Sequence: Synthetic oligonucleotide
agccgcauacacauuuguu

SEQ ID NO: 1641926 - RNA, 19 nt, Artificial Sequence
  Description of Artificial Sequence: Synthetic oligonucleotide
ggcgugucugggccacugg

SEQ ID NO: 1641927 - RNA, 19 nt, Artificial Sequence
  Description of Artificial Sequence: Synthetic oligonucleotide
gcccagaauagcucuuguc

SEQ ID NO: 1641928 - RNA, 19 nt, Artificial Sequence
  Description of Artificial Sequence: Synthetic oligonucleotide
acgaagccgcaugggguug

SEQ ID NO: 1641929 - RNA, 19 nt, Artificial Sequence
  Description of Artificial Sequence: Synthetic oligonucleotide
gugccacauuaaauacaug

SEQ ID NO: 1641930 - RNA, 19 nt, Artificial Sequence
  Description of Artificial Sequence: Synthetic oligonucleotide
guguuucgaucgcgcacuc

SEQ ID NO: 1641931 - RNA, 19 nt, Artificial Sequence
  Description of Artificial Sequence: Synthetic oligonucleotide
gugcaccacaagguggcca

SEQ ID NO: 1641932 - RNA, 19 nt, Artificial Sequence
  Description of Artificial Sequence: Synthetic oligonucleotide
uacaggcgcugcaguguuu

SEQ ID NO: 1641933 - RNA, 19 nt, Artificial Sequence
  Description of Artificial Sequence: Synthetic oligonucleotide
ccagcgcagcacuacccag

SEQ ID NO: 1641934 - RNA, 19 nt, Artificial Sequence
  Description of Artificial Sequence: Synthetic oligonucleotide
caccacaagguggccagca

SEQ ID NO: 1641935 - RNA, 19 nt, Artificial Sequence
  Description of Artificial Sequence: Synthetic oligonucleotide
ggucgaagccgcauacaca

SEQ ID NO: 1641936 - RNA, 19 nt, Artificial Sequence
  Description of Artificial Sequence: Synthetic oligonucleotide
aggcgugucugggccacug

SEQ ID NO: 1641937 - RNA, 19 nt, Artificial Sequence
  Description of Artificial Sequence: Synthetic oligonucleotide
cuguagcgccagcccagac

SEQ ID NO: 1641938 - RNA, 19 nt, Artificial Sequence
  Description of Artificial Sequence: Synthetic oligonucleotide
uggcaucugcuggaucgau

SEQ ID NO: 1641939 - RNA, 19 nt, Artificial Sequence
  Description of Artificial Sequence: Synthetic oligonucleotide
gggcucccggcccaagacc

SEQ ID NO: 1641940 - RNA, 19 nt, Artificial Sequence
  Description of Artificial Sequence: Synthetic oligonucleotide
ccccaaagccaaucaccgc

SEQ ID NO: 1641941 - RNA, 19 nt, Artificial Sequence
  Description of Artificial Sequence: Synthetic oligonucleotide
cauguaccgggcuggcacu

SEQ ID NO: 1641942 - RNA, 19 nt, Artificial Sequence
  Description of Artificial Sequence: Synthetic oligonucleotide
gcucuggacgcacauggcu

SEQ ID NO: 1641943 - RNA, 19 nt, Artificial Sequence
  Description of Artificial Sequence: Synthetic oligonucleotide
gguuggauccguggaggca

SEQ ID NO: 1641944 - RNA, 19 nt, Artificial Sequence
  Description of Artificial Sequence: Synthetic oligonucleotide
uagcgccagcccagacucu

SEQ ID NO: 1641945 - RNA, 19 nt, Artificial Sequence
  Description of Artificial Sequence: Synthetic oligonucleotide
cauggacucggcugaugcu

SEQ ID NO: 1641946 - RNA, 19 nt, Artificial Sequence
  Description of Artificial Sequence: Synthetic oligonucleotide
caggggucccaguccccug

SEQ ID NO: 1641947 - RNA, 19 nt, Artificial Sequence
  Description of Artificial Sequence: Synthetic oligonucleotide
ggggcucccggcccaagac

SEQ ID NO: 1641948 - RNA, 19 nt, Artificial Sequence
  Description of Artificial Sequence: Synthetic oligonucleotide
cacuugcaaugauggucga

SEQ ID NO: 1641949 - RNA, 19 nt, Artificial Sequence
  Description of Artificial Sequence: Synthetic oligonucleotide
ccgcgaagaagagguagag

SEQ ID NO: 1641950 - RNA, 19 nt, Artificial Sequence
  Description of Artificial Sequence: Synthetic oligonucleotide
cgauaguuccucucgccca

SEQ ID NO: 1641951 - RNA, 19 nt, Artificial Sequence
  Description of Artificial Sequence: Synthetic oligonucleotide
ucccgcacauuggcaucug

SEQ ID NO: 1641952 - RNA, 19 nt, Artificial Sequence
  Description of Artificial Sequence: Synthetic oligonucleotide
gggcccagaauagcucuug

SEQ ID NO: 1641953 - RNA, 19 nt, Artificial Sequence
  Description of Artificial Sequence: Synthetic oligonucleotide
gcgugucugggccacugga

SEQ ID NO: 1641954 - RNA, 19 nt, Artificial Sequence
  Description of Artificial Sequence: Synthetic oligonucleotide
gcccacgcaguuguugagc

SEQ ID NO: 1641955 - RNA, 19 nt, Artificial Sequence
  Description of Artificial Sequence: Synthetic oligonucleotide
cgugccuguagcgccagcc

SEQ ID NO: 1641956 - RNA, 19 nt, Artificial Sequence
  Description of Artificial Sequence: Synthetic oligonucleotide
ccuguauccugggcagcgg

SEQ ID NO: 1641957 - RNA, 19 nt, Artificial Sequence
  Description of Artificial Sequence: Synthetic oligonucleotide
accacacaucugugugauu

SEQ ID NO: 1641958 - RNA, 19 nt, Artificial Sequence
  Description of Artificial Sequence: Synthetic oligonucleotide
gcggccaggggucccaguc

SEQ ID NO: 1641959 - RNA, 19 nt, Artificial Sequence
  Description of Artificial Sequence: Synthetic oligonucleotide
gcagcacuacccaggcgug

SEQ ID NO: 1641960 - RNA, 19 nt, Artificial Sequence
  Description of Artificial Sequence: Synthetic oligonucleotide
cccaguccccuguauccug

SEQ ID NO: 1641961 - RNA, 19 nt, Artificial Sequence
  Description of Artificial Sequence: Synthetic oligonucleotide
ugguuucccuggggcgccc

SEQ ID NO: 1641962 - RNA, 19 nt, Artificial Sequence
  Description of Artificial Sequence: Synthetic oligonucleotide
cauggcugaagguccucau

SEQ ID NO: 1641963 - RNA, 19 nt, Artificial Sequence
  Description of Artificial Sequence: Synthetic oligonucleotide
gcgcacucacaucuacguc

SEQ ID NO: 1641964 - RNA, 19 nt, Artificial Sequence
  Description of Artificial Sequence: Synthetic oligonucleotide
gccagcccagacucucggc

SEQ ID NO: 1641965 - RNA, 19 nt, Artificial Sequence
  Description of Artificial Sequence: Synthetic oligonucleotide
cuacgucgcacagguugca

SEQ ID NO: 1641966 - RNA, 19 nt, Artificial Sequence
  Description of Artificial Sequence: Synthetic oligonucleotide
gguugcagugcaggucuuc

SEQ ID NO: 1641967 - RNA, 19 nt, Artificial Sequence
  Description of Artificial Sequence: Synthetic oligonucleotide
gguaaguuugugccacauu

SEQ ID NO: 1641968 - RNA, 19 nt, Artificial Sequence
  Description of Artificial Sequence: Synthetic oligonucleotide
cacauguaccgggcuggca

SEQ ID NO: 1641969 - RNA, 19 nt, Artificial Sequence
  Description of Artificial Sequence: Synthetic oligonucleotide
ggugcaccacaagguggcc

SEQ ID NO: 1641970 - RNA, 19 nt, Artificial Sequence
  Description of Artificial Sequence: Synthetic oligonucleotide
gaucgcgcacucacaucua

SEQ ID NO: 1641971 - RNA, 19 nt, Artificial Sequence
  Description of Artificial Sequence: Synthetic oligonucleotide
gcggugcuguacgauguac

SEQ ID NO: 1641972 - RNA, 19 nt, Artificial Sequence
  Description of Artificial Sequence: Synthetic oligonucleotide
cgcagcacuacccaggcgu

SEQ ID NO: 1641973 - RNA, 19 nt, Artificial Sequence
  Description of Artificial Sequence: Synthetic oligonucleotide
ggcugaugcugaguaguaa

SEQ ID NO: 1641974 - RNA, 19 nt, Artificial Sequence
  Description of Artificial Sequence: Synthetic oligonucleotide
acgcaguuguugagccacu

SEQ ID NO: 1641975 - RNA, 19 nt, Artificial Sequence
  Description of Artificial Sequence: Synthetic oligonucleotide
cgaucgcgcacucacaucu

SEQ ID NO: 1641976 - RNA, 19 nt, Artificial Sequence
  Description of Artificial Sequence: Synthetic oligonucleotide
gguggccaagcagagcugu

SEQ ID NO: 1641977 - RNA, 19 nt, Artificial Sequence
  Description of Artificial Sequence: Synthetic oligonucleotide
gcgcagcacuacccaggcg

SEQ ID NO: 1641978 - RNA, 19 nt, Artificial Sequence
  Description of Artificial Sequence: Synthetic oligonucleotide
auccgacgaagagcuggaa

SEQ ID NO: 1641979 - RNA, 19 nt, Artificial Sequence
  Description of Artificial Sequence: Synthetic oligonucleotide
ggaauccgacgaagagcug

SEQ ID NO: 1641980 - RNA, 19 nt, Artificial Sequence
  Description of Artificial Sequence: Synthetic oligonucleotide
ccagaccuggacaauuuau

SEQ ID NO: 1641981 - RNA, 19 nt, Artificial Sequence
  Description of Artificial Sequence: Synthetic oligonucleotide
gcccagcgcagcacuaccc

SEQ ID NO: 1641982 - RNA, 19 nt, Artificial Sequence
  Description of Artificial Sequence: Synthetic oligonucleotide
cacucacaucuacgucgca

SEQ ID NO: 1641983 - RNA, 19 nt, Artificial Sequence
  Description of Artificial Sequence: Synthetic oligonucleotide
cccagcgcagcacuaccca

SEQ ID NO: 1641984 - RNA, 19 nt, Artificial Sequence
  Description of Artificial Sequence: Synthetic oligonucleotide
gcagagccagugugucuga

SEQ ID NO: 1641985 - RNA, 19 nt, Artificial Sequence
  Description of Artificial Sequence: Synthetic oligonucleotide
ccacauguaccgggcuggc

SEQ ID NO: 1641986 - RNA, 19 nt, Artificial Sequence
  Description of Artificial Sequence: Synthetic oligonucleotide
ggcugcgguugaagauagg

SEQ ID NO: 1641987 - RNA, 19 nt, Artificial Sequence
  Description of Artificial Sequence: Synthetic oligonucleotide
gccgcaugggguugacaaa

SEQ ID NO: 1641988 - RNA, 19 nt, Artificial Sequence
  Description of Artificial Sequence: Synthetic oligonucleotide
ccggcccaagaccccagac

SEQ ID NO: 1641989 - RNA, 19 nt, Artificial Sequence
  Description of Artificial Sequence: Synthetic oligonucleotide
guaccgggcuggcacugau

SEQ ID NO: 1641990 - RNA, 19 nt, Artificial Sequence
  Description of Artificial Sequence: Synthetic oligonucleotide
ggcccagaauagcucuugu

SEQ ID NO: 1641991 - RNA, 19 nt, Artificial Sequence
  Description of Artificial Sequence: Synthetic oligonucleotide
gugcaugcuggcugcgguu

SEQ ID NO: 1641992 - RNA, 19 nt, Artificial Sequence
  Description of Artificial Sequence: Synthetic oligonucleotide
ccgcacauuggcaucugcu

SEQ ID NO: 1641993 - RNA, 19 nt, Artificial Sequence
  Description of Artificial Sequence: Synthetic oligonucleotide
cagccacauguaccgggcu

SEQ ID NO: 1641994 - RNA, 19 nt, Artificial Sequence
  Description of Artificial Sequence: Synthetic oligonucleotide
cuggacgcacauggcugaa

SEQ ID NO: 1641995 - RNA, 19 nt, Artificial Sequence
  Description of Artificial Sequence: Synthetic oligonucleotide
cgcgcacucacaucuacgu

SEQ ID NO: 1641996 - RNA, 19 nt, Artificial Sequence
  Description of Artificial Sequence: Synthetic oligonucleotide
cgaagccgcauacacauuu

SEQ ID NO: 1641997 - RNA, 19 nt, Artificial Sequence
  Description of Artificial Sequence: Synthetic oligonucleotide
ggcggugcuguacgaugua

SEQ ID NO: 1641998 - RNA, 19 nt, Artificial Sequence
  Description of Artificial Sequence: Synthetic oligonucleotide
cgggcuggcacugauggaa

SEQ ID NO: 1641999 - RNA, 19 nt, Artificial Sequence
  Description of Artificial Sequence: Synthetic oligonucleotide
ggccggagaacgugccugu

SEQ ID NO: 1642000 - RNA, 19 nt, Artificial Sequence
  Description of Artificial Sequence: Synthetic oligonucleotide
gcaccacaagguggccagc

SEQ ID NO: 1642001 - RNA, 19 nt, Artificial Sequence
  Description of Artificial Sequence: Synthetic oligonucleotide
ggguggcaagaaacuggga

SEQ ID NO: 1642002 - RNA, 19 nt, Artificial Sequence
  Description of Artificial Sequence: Synthetic oligonucleotide
gguugguacgaagccgcau

SEQ ID NO: 1642003 - RNA, 19 nt, Artificial Sequence
  Description of Artificial Sequence: Synthetic oligonucleotide
cggccggagaacgugccug

SEQ ID NO: 1642004 - RNA, 19 nt, Artificial Sequence
  Description of Artificial Sequence: Synthetic oligonucleotide
cgcaugggguugacaaaga

SEQ ID NO: 1642005 - RNA, 19 nt, Artificial Sequence
  Description of Artificial Sequence: Synthetic oligonucleotide
gcacuacccaggcgugucu

SEQ ID NO: 1642006 - RNA, 19 nt, Artificial Sequence
  Description of Artificial Sequence: Synthetic oligonucleotide
gcgcccagcgcagcacuac

SEQ ID NO: 1642007 - RNA, 19 nt, Artificial Sequence
  Description of Artificial Sequence: Synthetic oligonucleotide
gcacauggcugaagguccu

SEQ ID NO: 1642008 - RNA, 19 nt, Artificial Sequence
  Description of Artificial Sequence: Synthetic oligonucleotide
cggugcuguacgauguacu

SEQ ID NO: 1642009 - RNA, 19 nt, Artificial Sequence
  Description of Artificial Sequence: Synthetic oligonucleotide
cagcacuacccaggcgugu

SEQ ID NO: 1642010 - RNA, 19 nt, Artificial Sequence
  Description of Artificial Sequence: Synthetic oligonucleotide
gcuguacgauguacucaua

SEQ ID NO: 1642011 - RNA, 19 nt, Artificial Sequence
  Description of Artificial Sequence: Synthetic oligonucleotide
caucuacgucgcacagguu

SEQ ID NO: 1642012 - RNA, 19 nt, Artificial Sequence
  Description of Artificial Sequence: Synthetic oligonucleotide
cugggcggugcuguacgau

SEQ ID NO: 1642013 - RNA, 19 nt, Artificial Sequence
  Description of Artificial Sequence: Synthetic oligonucleotide
  modified_base (16)..(16): a, c, u, g, unknown or other
ccgcugcucgggcucncaa

SEQ ID NO: 1642014 - RNA, 19 nt, Artificial Sequence
  Description of Artificial Sequence: Synthetic oligonucleotide
cggcugaugcugaguagua

SEQ ID NO: 1642015 - RNA, 19 nt, Artificial Sequence
  Description of Artificial Sequence: Synthetic oligonucleotide
ccgggcuggcacugaugga

SEQ ID NO: 1642016 - RNA, 19 nt, Artificial Sequence
  Description of Artificial Sequence: Synthetic oligonucleotide
  modified_base (15)..(15): a, c, u, g, unknown or other
cgcugcucgggcucncaaa

SEQ ID NO: 1642017 - RNA, 19 nt, Artificial Sequence
  Description of Artificial Sequence: Synthetic oligonucleotide
ggcaugacucaagcuccuu

SEQ ID NO: 1642018 - RNA, 19 nt, Artificial Sequence
  Description of Artificial Sequence: Synthetic oligonucleotide
gccggagaacgugccugua

SEQ ID NO: 1642019 - RNA, 19 nt, Artificial Sequence
  Description of Artificial Sequence: Synthetic oligonucleotide
ggcgcccagcgcagcacua

SEQ ID NO: 1642020 - RNA, 19 nt, Artificial Sequence
  Description of Artificial Sequence: Synthetic oligonucleotide
ggcggccaggggucccagu

SEQ ID NO: 1642021 - RNA, 19 nt, Artificial Sequence
  Description of Artificial Sequence: Synthetic oligonucleotide
caggcgugucugggccacu

SEQ ID NO: 1642022 - RNA, 19 nt, Artificial Sequence
  Description of Artificial Sequence: Synthetic oligonucleotide
ccguggaggcagagccagu

SEQ ID NO: 1642023 - RNA, 19 nt, Artificial Sequence
  Description of Artificial Sequence: Synthetic oligonucleotide
aaacaaaacaccucuaucc

SEQ ID NO: 1642024 - RNA, 19 nt, Artificial Sequence
  Description of Artificial Sequence: Synthetic oligonucleotide
uguucauacucaaugaagg

SEQ ID NO: 1642025 - RNA, 19 nt, Artificial Sequence
  Description of Artificial Sequence: Synthetic oligonucleotide
auugggaucauugugaggg

SEQ ID NO: 1642026 - RNA, 19 nt, Artificial Sequence
  Description of Artificial Sequence: Synthetic oligonucleotide
uucauguucauacucaaug

SEQ ID NO: 1642027 - RNA, 19 nt, Artificial Sequence
  Description of Artificial Sequence: Synthetic oligonucleotide
aaggccaccuccuagccgc

SEQ ID NO: 1642028 - RNA, 19 nt, Artificial Sequence
  Description of Artificial Sequence: Synthetic oligonucleotide
acgaacagagucuugaagg

SEQ ID NO: 1642029 - RNA, 19 nt, Artificial Sequence
  Description of Artificial Sequence: Synthetic oligonucleotide
cuuacuguauaccaugugg

SEQ ID NO: 1642030 - RNA, 19 nt, Artificial Sequence
  Description of Artificial Sequence: Synthetic oligonucleotide
auguggauucuuuugaugg

SEQ ID NO: 1642031 - RNA, 19 nt, Artificial Sequence
  Description of Artificial Sequence: Synthetic oligonucleotide
agaggguucagccaugucg

SEQ ID NO: 1642032 - RNA, 19 nt, Artificial Sequence
  Description of Artificial Sequence: Synthetic oligonucleotide
auacacuucaaacucucuc

SEQ ID NO: 1642033 - RNA, 19 nt, Artificial Sequence
  Description of Artificial Sequence: Synthetic oligonucleotide
acuaccuagcccuuccagc

SEQ ID NO: 1642034 - RNA, 19 nt, Artificial Sequence
  Description of Artificial Sequence: Synthetic oligonucleotide
uuacuguauaccaugugga

SEQ ID NO: 1642035 - RNA, 19 nt, Artificial Sequence
  Description of Artificial Sequence: Synthetic oligonucleotide
acuucgacugcuucgucgc

SEQ ID NO: 1642036 - RNA, 19 nt, Artificial Sequence
  Description of Artificial Sequence: Synthetic oligonucleotide
uucacucuagccacgaaca

SEQ ID NO: 1642037 - RNA, 19 nt, Artificial Sequence
  Description of Artificial Sequence: Synthetic oligonucleotide
aucgagaagugucaucucg

SEQ ID NO: 1642038 - RNA, 19 nt, Artificial Sequence
  Description of Artificial Sequence: Synthetic oligonucleotide
caucauaucgagaaguguc

SEQ ID NO: 1642039 - RNA, 19 nt, Artificial Sequence
  Description of Artificial Sequence: Synthetic oligonucleotide
ugauguucacaucugcccc

SEQ ID NO: 1642040 - RNA, 19 nt, Artificial Sequence
  Description of Artificial Sequence: Synthetic oligonucleotide
ucuggaacggcgacgcucg

SEQ ID NO: 1642041 - RNA, 19 nt, Artificial Sequence
  Description of Artificial Sequence: Synthetic oligonucleotide
ugguggaaaggcuaggaag

SEQ ID NO: 1642042 - RNA, 19 nt, Artificial Sequence
  Description of Artificial Sequence: Synthetic oligonucleotide
cucuccgaagcuuagauuc

SEQ ID NO: 1642043 - RNA, 19 nt, Artificial Sequence
  Description of Artificial Sequence: Synthetic oligonucleotide
ucauguucauacucaauga

SEQ ID NO: 1642044 - RNA, 19 nt, Artificial Sequence
  Description of Artificial Sequence: Synthetic oligonucleotide
uguggauucuuuugauggg

SEQ ID NO: 1642045 - RNA, 19 nt, Artificial Sequence
  Description of Artificial Sequence: Synthetic oligonucleotide
aucacuaccuagcccuucc

SEQ ID NO: 1642046 - RNA, 19 nt, Artificial Sequence
  Description of Artificial Sequence: Synthetic oligonucleotide
ugugucauaguucacucua

SEQ ID NO: 1642047 - RNA, 19 nt, Artificial Sequence
  Description of Artificial Sequence: Synthetic oligonucleotide
ucuccaugcguucuucccg

SEQ ID NO: 1642048 - RNA, 19 nt, Artificial Sequence
  Description of Artificial Sequence: Synthetic oligonucleotide
gaagcuuagauucuguugu

SEQ ID NO: 1642049 - RNA, 19 nt, Artificial Sequence
  Description of Artificial Sequence: Synthetic oligonucleotide
auaucgagaagugucaucu

SEQ ID NO: 1642050 - RNA, 19 nt, Artificial Sequence
  Description of Artificial Sequence: Synthetic oligonucleotide
ucuagccacgaacagaguc

SEQ ID NO: 1642051 - RNA, 19 nt, Artificial Sequence
  Description of Artificial Sequence: Synthetic oligonucleotide
cagaggauaagccauggug

SEQ ID NO: 1642052 - RNA, 19 nt, Artificial Sequence
  Description of Artificial Sequence: Synthetic oligonucleotide
agaacgcuuacuguauacc

SEQ ID NO: 1642053 - RNA, 19 nt, Artificial Sequence
  Description of Artificial Sequence: Synthetic oligonucleotide
gacuucgacugcuucgucg

SEQ ID NO: 1642054 - RNA, 19 nt, Artificial Sequence
  Description of Artificial Sequence: Synthetic oligonucleotide
uccgguggcuccuacgucg

SEQ ID NO: 1642055 - RNA, 19 nt, Artificial Sequence
  Description of Artificial Sequence: Synthetic oligonucleotide
ugucaucucggcccgaaug

SEQ ID NO: 1642056 - RNA, 19 nt, Artificial Sequence
  Description of Artificial Sequence: Synthetic oligonucleotide
uuuaaauccaagggaccag

SEQ ID NO: 1642057 - RNA, 19 nt, Artificial Sequence
  Description of Artificial Sequence: Synthetic oligonucleotide
ucugcgugcuuguaagcgg

SEQ ID NO: 1642058 - RNA, 19 nt, Artificial Sequence
  Description of Artificial Sequence: Synthetic oligonucleotide
cuaccuagcccuuccagcc

SEQ ID NO: 1642059 - RNA, 19 nt, Artificial Sequence
  Description of Artificial Sequence: Synthetic oligonucleotide
aaguaagagcauguccaac

SEQ ID NO: 1642060 - RNA, 19 nt, Artificial Sequence
  Description of Artificial Sequence: Synthetic oligonucleotide
uguugugucauaguucacu

SEQ ID NO: 1642061 - RNA, 19 nt, Artificial Sequence
  Description of Artificial Sequence: Synthetic oligonucleotide
cacgggguuuuccagaacg

SEQ ID NO: 1642062 - RNA, 19 nt, Artificial Sequence
  Description of Artificial Sequence: Synthetic oligonucleotide
guucauacucaaugaaggc

SEQ ID NO: 1642063 - RNA, 19 nt, Artificial Sequence
  Description of Artificial Sequence: Synthetic oligonucleotide
augccugauguucacaucu

SEQ ID NO: 1642064 - RNA, 19 nt, Artificial Sequence
  Description of Artificial Sequence: Synthetic oligonucleotide
uucugguaccaccaaggcc

SEQ ID NO: 1642065 - RNA, 19 nt, Artificial Sequence
  Description of Artificial Sequence: Synthetic oligonucleotide
ucuuuugauggguccauac

SEQ ID NO: 1642066 - RNA, 19 nt, Artificial Sequence
  Description of Artificial Sequence: Synthetic oligonucleotide
gaagugucaucucggcccg

SEQ ID NO: 1642067 - RNA, 19 nt, Artificial Sequence
  Description of Artificial Sequence: Synthetic oligonucleotide
gauacccauucucuggggc

SEQ ID NO: 1642068 - RNA, 19 nt, Artificial Sequence
  Description of Artificial Sequence: Synthetic oligonucleotide
auaaccacgggguuuucca

SEQ ID NO: 1642069 - RNA, 19 nt, Artificial Sequence
  Description of Artificial Sequence: Synthetic oligonucleotide
ucuccguucucucuccuug

SEQ ID NO: 1642070 - RNA, 19 nt, Artificial Sequence
  Description of Artificial Sequence: Synthetic oligonucleotide
uccauguacaugucgcggc

SEQ ID NO: 1642071 - RNA, 19 nt, Artificial Sequence
  Description of Artificial Sequence: Synthetic oligonucleotide
ugcugccuccaucagauac

SEQ ID NO: 1642072 - RNA, 19 nt, Artificial Sequence
  Description of Artificial Sequence: Synthetic oligonucleotide
gguggaaaggcuaggaagg

SEQ ID NO: 1642073 - RNA, 19 nt, Artificial Sequence
  Description of Artificial Sequence: Synthetic oligonucleotide
ugcuccucucucuggaacg

SEQ ID NO: 1642074 - RNA, 19 nt, Artificial Sequence
  Description of Artificial Sequence: Synthetic oligonucleotide
gaacgcuuacuguauacca

SEQ ID NO: 1642075 - RNA, 19 nt, Artificial Sequence
  Description of Artificial Sequence: Synthetic oligonucleotide
cuauccucagaggauaagc

SEQ ID NO: 1642076 - RNA, 19 nt, Artificial Sequence
  Description of Artificial Sequence: Synthetic oligonucleotide
uccucucucuggaacggcg

SEQ ID NO: 1642077 - RNA, 19 nt, Artificial Sequence
  Description of Artificial Sequence: Synthetic oligonucleotide
ucucucccgacuucgacug

SEQ ID NO: 1642078 - RNA, 19 nt, Artificial Sequence
  Description of Artificial Sequence: Synthetic oligonucleotide
cagauacccauucucuggg

SEQ ID NO: 1642079 - RNA, 19 nt, Artificial Sequence
  Description of Artificial Sequence: Synthetic oligonucleotide
uuaaauccaagggaccaga

SEQ ID NO: 1642080 - RNA, 19 nt, Artificial Sequence
  Description of Artificial Sequence: Synthetic oligonucleotide
gacguucccucucacuccg

SEQ ID NO: 1642081 - RNA, 19 nt, Artificial Sequence
  Description of Artificial Sequence: Synthetic oligonucleotide
uuucugcccuuguuggagg

SEQ ID NO: 1642082 - RNA, 19 nt, Artificial Sequence
  Description of Artificial Sequence: Synthetic oligonucleotide
ucgcuuucggucucggucc

SEQ ID NO: 1642083 - RNA, 19 nt, Artificial Sequence
  Description of Artificial Sequence: Synthetic oligonucleotide
aagcuuagauucuguugug

SEQ ID NO: 1642084 - RNA, 19 nt, Artificial Sequence
  Description of Artificial Sequence: Synthetic oligonucleotide
uguggaagcggggaggggc

SEQ ID NO: 1642085 - RNA, 19 nt, Artificial Sequence
  Description of Artificial Sequence: Synthetic oligonucleotide
acgcuuacuguauaccaug

SEQ ID NO: 1642086 - RNA, 19 nt, Artificial Sequence
  Description of Artificial Sequence: Synthetic oligonucleotide
aagcggagugcaugucucg

SEQ ID NO: 1642087 - RNA, 19 nt, Artificial Sequence
  Description of Artificial Sequence: Synthetic oligonucleotide
caccaccucaccucgaagc

SEQ ID NO: 1642088 - RNA, 19 nt, Artificial Sequence
  Description of Artificial Sequence: Synthetic oligonucleotide
agcaaaguaagagcauguc

SEQ ID NO: 1642089 - RNA, 19 nt, Artificial Sequence
  Description of Artificial Sequence: Synthetic oligonucleotide
aucugcgugcuuguaagcg

SEQ ID NO: 1642090 - RNA, 19 nt, Artificial Sequence
  Description of Artificial Sequence: Synthetic oligonucleotide
cauguacccaucaccgccc

SEQ ID NO: 1642091 - RNA, 19 nt, Artificial Sequence
  Description of Artificial Sequence: Synthetic oligonucleotide
ugccuccauguacaugucg

SEQ ID NO: 1642092 - RNA, 19 nt, Artificial Sequence
  Description of Artificial Sequence: Synthetic oligonucleotide
cuuguaagcggagugcaug

SEQ ID NO: 1642093 - RNA, 19 nt, Artificial Sequence
  Description of Artificial Sequence: Synthetic oligonucleotide
ugcuucgucgcuuucgguc

SEQ ID NO: 1642094 - RNA, 19 nt, Artificial Sequence
  Description of Artificial Sequence: Synthetic oligonucleotide
uuguaagcggagugcaugu

SEQ ID NO: 1642095 - RNA, 19 nt, Artificial Sequence
  Description of Artificial Sequence: Synthetic oligonucleotide
guaagagcauguccaacac

SEQ ID NO: 1642096 - RNA, 19 nt, Artificial Sequence
  Description of Artificial Sequence: Synthetic oligonucleotide
uaagcggagugcaugucuc

SEQ ID NO: 1642097 - RNA, 19 nt, Artificial Sequence
  Description of Artificial Sequence: Synthetic oligonucleotide
cacgaacagagucuugaag

SEQ ID NO: 1642098 - RNA, 19 nt, Artificial Sequence
  Description of Artificial Sequence: Synthetic oligonucleotide
caugucucguucauguuca

SEQ ID NO: 1642099 - RNA, 19 nt, Artificial Sequence
  Description of Artificial Sequence: Synthetic oligonucleotide
uccuccggucccgagagcg

SEQ ID NO: 1642100 - RNA, 19 nt, Artificial Sequence
  Description of Artificial Sequence: Synthetic oligonucleotide
ugucucgacuccgggagcg

SEQ ID NO: 1642101 - RNA, 19 nt, Artificial Sequence
  Description of Artificial Sequence: Synthetic oligonucleotide
agagucuugaaggcaucac

SEQ ID NO: 1642102 - RNA, 19 nt, Artificial Sequence
  Description of Artificial Sequence: Synthetic oligonucleotide
cauuguccugaccacugcc

SEQ ID NO: 1642103 - RNA, 19 nt, Artificial Sequence
  Description of Artificial Sequence: Synthetic oligonucleotide
aaccacgggguuuuccaga

SEQ ID NO: 1642104 - RNA, 19 nt, Artificial Sequence
  Description of Artificial Sequence: Synthetic oligonucleotide
uccagaacgcuuacuguau

SEQ ID NO: 1642105 - RNA, 19 nt, Artificial Sequence
  Description of Artificial Sequence: Synthetic oligonucleotide
cucguucauguucauacuc

SEQ ID NO: 1642106 - RNA, 19 nt, Artificial Sequence
  Description of Artificial Sequence: Synthetic oligonucleotide
agauacccauucucugggg

SEQ ID NO: 1642107 - RNA, 19 nt, Artificial Sequence
  Description of Artificial Sequence: Synthetic oligonucleotide
aggcagacagcaaaguaag

SEQ ID NO: 1642108 - RNA, 19 nt, Artificial Sequence
  Description of Artificial Sequence: Synthetic oligonucleotide
ucacccugagcauugggau

SEQ ID NO: 1642109 - RNA, 19 nt, Artificial Sequence
  Description of Artificial Sequence: Synthetic oligonucleotide
cuccaugcguucuucccgg

SEQ ID NO: 1642110 - RNA, 19 nt, Artificial Sequence
  Description of Artificial Sequence: Synthetic oligonucleotide
ucugcgugcucucucccga

SEQ ID NO: 1642111 - RNA, 19 nt, Artificial Sequence
  Description of Artificial Sequence: Synthetic oligonucleotide
agggucccacauuuucagc

SEQ ID NO: 1642112 - RNA, 19 nt, Artificial Sequence
  Description of Artificial Sequence: Synthetic oligonucleotide
gucgcuuucggucucgguc

SEQ ID NO: 1642113 - RNA, 19 nt, Artificial Sequence
  Description of Artificial Sequence: Synthetic oligonucleotide
guuugugcucucgaucccg

SEQ ID NO: 1642114 - RNA, 19 nt, Artificial Sequence
  Description of Artificial Sequence: Synthetic oligonucleotide
ggguuucugcccuuguugg

SEQ ID NO: 1642115 - RNA, 19 nt, Artificial Sequence
  Description of Artificial Sequence: Synthetic oligonucleotide
cucuccaugcguucuuccc

SEQ ID NO: 1642116 - RNA, 19 nt, Artificial Sequence
  Description of Artificial Sequence: Synthetic oligonucleotide
aucauaucgagaaguguca

SEQ ID NO: 1642117 - RNA, 19 nt, Artificial Sequence
  Description of Artificial Sequence: Synthetic oligonucleotide
uaaccacgggguuuuccag

SEQ ID NO: 1642118 - RNA, 19 nt, Artificial Sequence
  Description of Artificial Sequence: Synthetic oligonucleotide
gaaggcauaaccacggggu

SEQ ID NO: 1642119 - RNA, 19 nt, Artificial Sequence
  Description of Artificial Sequence: Synthetic oligonucleotide
uuugugcucucgaucccga

SEQ ID NO: 1642120 - RNA, 19 nt, Artificial Sequence
  Description of Artificial Sequence: Synthetic oligonucleotide
ugugcucucgaucccgauc

SEQ ID NO: 1642121 - RNA, 19 nt, Artificial Sequence
  Description of Artificial Sequence: Synthetic oligonucleotide
agcccuucacaguccggcc

SEQ ID NO: 1642122 - RNA, 19 nt, Artificial Sequence
  Description of Artificial Sequence: Synthetic oligonucleotide
ugcuuguaagcggagugca

SEQ ID NO: 1642123 - RNA, 19 nt, Artificial Sequence
  Description of Artificial Sequence: Synthetic oligonucleotide
ucguccuugucucgacucc

SEQ ID NO: 1642124 - RNA, 19 nt, Artificial Sequence
  Description of Artificial Sequence: Synthetic oligonucleotide
cagaacgcuuacuguauac

SEQ ID NO: 1642125 - RNA, 19 nt, Artificial Sequence
  Description of Artificial Sequence: Synthetic oligonucleotide
ucuauccucagaggauaag

SEQ ID NO: 1642126 - RNA, 19 nt, Artificial Sequence
  Description of Artificial Sequence: Synthetic oligonucleotide
agcgggagcgucuccguuc

SEQ ID NO: 1642127 - RNA, 19 nt, Artificial Sequence
  Description of Artificial Sequence: Synthetic oligonucleotide
ucagaggauaagccauggu

SEQ ID NO: 1642128 - RNA, 19 nt, Artificial Sequence
  Description of Artificial Sequence: Synthetic oligonucleotide
ggaacggcgacgcucgucc

SEQ ID NO: 1642129 - RNA, 19 nt, Artificial Sequence
  Description of Artificial Sequence: Synthetic oligonucleotide
ucucucuggaacggcgacg

SEQ ID NO: 1642130 - RNA, 19 nt, Artificial Sequence
  Description of Artificial Sequence: Synthetic oligonucleotide
cuccauguacaugucgcgg

SEQ ID NO: 1642131 - RNA, 19 nt, Artificial Sequence
  Description of Artificial Sequence: Synthetic oligonucleotide
uucacaucugccccaccuc

SEQ ID NO: 1642132 - RNA, 19 nt, Artificial Sequence
  Description of Artificial Sequence: Synthetic oligonucleotide
aaggcauaaccacgggguu

SEQ ID NO: 1642133 - RNA, 19 nt, Artificial Sequence
  Description of Artificial Sequence: Synthetic oligonucleotide
aacgcuuacuguauaccau

SEQ ID NO: 1642134 - RNA, 19 nt, Artificial Sequence
  Description of Artificial Sequence: Synthetic oligonucleotide
aaacaccucuauccucaga

SEQ ID NO: 1642135 - RNA, 19 nt, Artificial Sequence
  Description of Artificial Sequence: Synthetic oligonucleotide
cauguucauacucaaugaa

SEQ ID NO: 1642136 - RNA, 19 nt, Artificial Sequence
  Description of Artificial Sequence: Synthetic oligonucleotide
ugauggguccauacacuuc

SEQ ID NO: 1642137 - RNA, 19 nt, Artificial Sequence
  Description of Artificial Sequence: Synthetic oligonucleotide
ugccugauguucacaucug

SEQ ID NO: 1642138 - RNA, 19 nt, Artificial Sequence
  Description of Artificial Sequence: Synthetic oligonucleotide
accuccuagccgccggggc

SEQ ID NO: 1642139 - RNA, 19 nt, Artificial Sequence
  Description of Artificial Sequence: Synthetic oligonucleotide
uccgaagcuuagauucugu

SEQ ID NO: 1642140 - RNA, 19 nt, Artificial Sequence
  Description of Artificial Sequence: Synthetic oligonucleotide
ccguuugugcucucgaucc

SEQ ID NO: 1642141 - RNA, 19 nt, Artificial Sequence
  Description of Artificial Sequence: Synthetic oligonucleotide
uguuggaggaggggcaucu

SEQ ID NO: 1642142 - RNA, 19 nt, Artificial Sequence
  Description of Artificial Sequence: Synthetic oligonucleotide
ccugauguucacaucugcc

SEQ ID NO: 1642143 - RNA, 19 nt, Artificial Sequence
  Description of Artificial Sequence: Synthetic oligonucleotide
gguucagccaugucgccgc

SEQ ID NO: 1642144 - RNA, 19 nt, Artificial Sequence
  Description of Artificial Sequence: Synthetic oligonucleotide
uccuacgucgcucccgguc

SEQ ID NO: 1642145 - RNA, 19 nt, Artificial Sequence
  Description of Artificial Sequence: Synthetic oligonucleotide
uucagaggguucagccaug

SEQ ID NO: 1642146 - RNA, 19 nt, Artificial Sequence
  Description of Artificial Sequence: Synthetic oligonucleotide
gucccuguguggaagcggg

SEQ ID NO: 1642147 - RNA, 19 nt, Artificial Sequence
  Description of Artificial Sequence: Synthetic oligonucleotide
uaccuagcccuuccagccc

SEQ ID NO: 1642148 - RNA, 19 nt, Artificial Sequence
  Description of Artificial Sequence: Synthetic oligonucleotide
gaaugccugauguucacau

SEQ ID NO: 1642149 - RNA, 19 nt, Artificial Sequence
  Description of Artificial Sequence: Synthetic oligonucleotide
acggucucgaucccggcga

SEQ ID NO: 1642150 - RNA, 19 nt, Artificial Sequence
  Description of Artificial Sequence: Synthetic oligonucleotide
acgggguuuuccagaacgc

SEQ ID NO: 1642151 - RNA, 19 nt, Artificial Sequence
  Description of Artificial Sequence: Synthetic oligonucleotide
augguggaaaggcuaggaa

SEQ ID NO: 1642152 - RNA, 19 nt, Artificial Sequence
  Description of Artificial Sequence: Synthetic oligonucleotide
auaguucacucuagccacg

SEQ ID NO: 1642153 - RNA, 19 nt, Artificial Sequence
  Description of Artificial Sequence: Synthetic oligonucleotide
ucauugugagggucccaca

SEQ ID NO: 1642154 - RNA, 19 nt, Artificial Sequence
  Description of Artificial Sequence: Synthetic oligonucleotide
cauaaccacgggguuuucc

SEQ ID NO: 1642155 - RNA, 19 nt, Artificial Sequence
  Description of Artificial Sequence: Synthetic oligonucleotide
cacuaccuagcccuuccag

SEQ ID NO: 1642156 - RNA, 19 nt, Artificial Sequence
  Description of Artificial Sequence: Synthetic oligonucleotide
ucucccguucucugcgugc

SEQ ID NO: 1642157 - RNA, 19 nt, Artificial Sequence
  Description of Artificial Sequence: Synthetic oligonucleotide
auguucacaucugccccac

SEQ ID NO: 1642158 - RNA, 19 nt, Artificial Sequence
  Description of Artificial Sequence: Synthetic oligonucleotide
caccucuauccucagagga

SEQ ID NO: 1642159 - RNA, 19 nt, Artificial Sequence
  Description of Artificial Sequence: Synthetic oligonucleotide
caucagauacccauucucu

SEQ ID NO: 1642160 - RNA, 19 nt, Artificial Sequence
  Description of Artificial Sequence: Synthetic oligonucleotide
caugucgcggccaucacua

SEQ ID NO: 1642161 - RNA, 19 nt, Artificial Sequence
  Description of Artificial Sequence: Synthetic oligonucleotide
ucgaucccggcgacguucc

SEQ ID NO: 1642162 - RNA, 19 nt, Artificial Sequence
  Description of Artificial Sequence: Synthetic oligonucleotide
cucguccuugucucgacuc

SEQ ID NO: 1642163 - RNA, 19 nt, Artificial Sequence
  Description of Artificial Sequence: Synthetic oligonucleotide
ucgaagcuccucuuuucuc

SEQ ID NO: 1642164 - RNA, 19 nt, Artificial Sequence
  Description of Artificial Sequence: Synthetic oligonucleotide
gacgcucguccuugucucg

SEQ ID NO: 1642165 - RNA, 19 nt, Artificial Sequence
  Description of Artificial Sequence: Synthetic oligonucleotide
gauucuguugugucauagu

SEQ ID NO: 1642166 - RNA, 19 nt, Artificial Sequence
  Description of Artificial Sequence: Synthetic oligonucleotide
aaacucucuccgaagcuua

SEQ ID NO: 1642167 - RNA, 19 nt, Artificial Sequence
  Description of Artificial Sequence: Synthetic oligonucleotide
caaggccaccuccuagccg

SEQ ID NO: 1642168 - RNA, 19 nt, Artificial Sequence
  Description of Artificial Sequence: Synthetic oligonucleotide
ccaucugcgugcuuguaag

SEQ ID NO: 1642169 - RNA, 19 nt, Artificial Sequence
  Description of Artificial Sequence: Synthetic oligonucleotide
ucacuaccuagcccuucca

SEQ ID NO: 1642170 - RNA, 19 nt, Artificial Sequence
  Description of Artificial Sequence: Synthetic oligonucleotide
caucugcgugcuuguaagc

SEQ ID NO: 1642171 - RNA, 19 nt, Artificial Sequence
  Description of Artificial Sequence: Synthetic oligonucleotide
uugucucgacuccgggagc

SEQ ID NO: 1642172 - RNA, 19 nt, Artificial Sequence
  Description of Artificial Sequence: Synthetic oligonucleotide
uaucgagaagugucaucuc

SEQ ID NO: 1642173 - RNA, 19 nt, Artificial Sequence
  Description of Artificial Sequence: Synthetic oligonucleotide
gugucauaguucacucuag

SEQ ID NO: 1642174 - RNA, 19 nt, Artificial Sequence
  Description of Artificial Sequence: Synthetic oligonucleotide
ccugccaucuaucuucuug

SEQ ID NO: 1642175 - RNA, 19 nt, Artificial Sequence
  Description of Artificial Sequence: Synthetic oligonucleotide
gcaugucucguucauguuc

SEQ ID NO: 1642176 - RNA, 19 nt, Artificial Sequence
  Description of Artificial Sequence: Synthetic oligonucleotide
auugugagggucccacauu

SEQ ID NO: 1642177 - RNA, 19 nt, Artificial Sequence
  Description of Artificial Sequence: Synthetic oligonucleotide
gugcaugucucguucaugu

SEQ ID NO: 1642178 - RNA, 19 nt, Artificial Sequence
  Description of Artificial Sequence: Synthetic oligonucleotide
ugcgugcuuguaagcggag

SEQ ID NO: 1642179 - RNA, 19 nt, Artificial Sequence
  Description of Artificial Sequence: Synthetic oligonucleotide
ucucgguccuuguccuugc

SEQ ID NO: 1642180 - RNA, 19 nt, Artificial Sequence
  Description of Artificial Sequence: Synthetic oligonucleotide
gugcuuguaagcggagugc

SEQ ID NO: 1642181 - RNA, 19 nt, Artificial Sequence
  Description of Artificial Sequence: Synthetic oligonucleotide
ucucuccgaagcuuagauu

SEQ ID NO: 1642182 - RNA, 19 nt, Artificial Sequence
  Description of Artificial Sequence: Synthetic oligonucleotide
caucuaucuucuugccauc

SEQ ID NO: 1642183 - RNA, 19 nt, Artificial Sequence
  Description of Artificial Sequence: Synthetic oligonucleotide
uccaugcguucuucccggg

SEQ ID NO: 1642184 - RNA, 19 nt, Artificial Sequence
  Description of Artificial Sequence: Synthetic oligonucleotide
acaggccucuucauucagg

SEQ ID NO: 1642185 - RNA, 19 nt, Artificial Sequence
  Description of Artificial Sequence: Synthetic oligonucleotide
ucagaggguucagccaugu

SEQ ID NO: 1642186 - RNA, 19 nt, Artificial Sequence
  Description of Artificial Sequence: Synthetic oligonucleotide
ggucccgagagcgggagcg

SEQ ID NO: 1642187 - RNA, 19 nt, Artificial Sequence
  Description of Artificial Sequence: Synthetic oligonucleotide
accacgggguuuuccagaa

SEQ ID NO: 1642188 - RNA, 19 nt, Artificial Sequence
  Description of Artificial Sequence: Synthetic oligonucleotide
guaagcggagugcaugucu

SEQ ID NO: 1642189 - RNA, 19 nt, Artificial Sequence
  Description of Artificial Sequence: Synthetic oligonucleotide
cgaagcuuagauucuguug

SEQ ID NO: 1642190 - RNA, 19 nt, Artificial Sequence
  Description of Artificial Sequence: Synthetic oligonucleotide
ucucccgacuucgacugcu

SEQ ID NO: 1642191 - RNA, 19 nt, Artificial Sequence
  Description of Artificial Sequence: Synthetic oligonucleotide
gggaucauugugagggucc

SEQ ID NO: 1642192 - RNA, 19 nt, Artificial Sequence
  Description of Artificial Sequence: Synthetic oligonucleotide
aguccggccccucuccaca

SEQ ID NO: 1642193 - RNA, 19 nt, Artificial Sequence
  Description of Artificial Sequence: Synthetic oligonucleotide
ugggaucauugugaggguc

SEQ ID NO: 1642194 - RNA, 19 nt, Artificial Sequence
  Description of Artificial Sequence: Synthetic oligonucleotide
gcuccuacgucgcucccgg

SEQ ID NO: 1642195 - RNA, 19 nt, Artificial Sequence
  Description of Artificial Sequence: Synthetic oligonucleotide
ccauacacuucaaacucuc

SEQ ID NO: 1642196 - RNA, 19 nt, Artificial Sequence
  Description of Artificial Sequence: Synthetic oligonucleotide
acacacaggccucuucauu

SEQ ID NO: 1642197 - RNA, 19 nt, Artificial Sequence
  Description of Artificial Sequence: Synthetic oligonucleotide
uccucuuuucucucccguu

SEQ ID NO: 1642198 - RNA, 19 nt, Artificial Sequence
  Description of Artificial Sequence: Synthetic oligonucleotide
cucuggaacggcgacgcuc

SEQ ID NO: 1642199 - RNA, 19 nt, Artificial Sequence
  Description of Artificial Sequence: Synthetic oligonucleotide
gugcucucucccgacuucg

SEQ ID NO: 1642200 - RNA, 19 nt, Artificial Sequence
  Description of Artificial Sequence: Synthetic oligonucleotide
gcuuacuguauaccaugug

SEQ ID NO: 1642201 - RNA, 19 nt, Artificial Sequence
  Description of Artificial Sequence: Synthetic oligonucleotide
uucgucgcuuucggucucg

SEQ ID NO: 1642202 - RNA, 19 nt, Artificial Sequence
  Description of Artificial Sequence: Synthetic oligonucleotide
ggcccuucuccucugggcc

SEQ ID NO: 1642203 - RNA, 19 nt, Artificial Sequence
  Description of Artificial Sequence: Synthetic oligonucleotide
cuucuuucucugcgcuccc

SEQ ID NO: 1642204 - RNA, 19 nt, Artificial Sequence
  Description of Artificial Sequence: Synthetic oligonucleotide
gcgacguucccucucacuc

SEQ ID NO: 1642205 - RNA, 19 nt, Artificial Sequence
  Description of Artificial Sequence: Synthetic oligonucleotide
cccgacuucgacugcuucg

SEQ ID NO: 1642206 - RNA, 19 nt, Artificial Sequence
  Description of Artificial Sequence: Synthetic oligonucleotide
uccaagggaccagaacaaa

SEQ ID NO: 1642207 - RNA, 19 nt, Artificial Sequence
  Description of Artificial Sequence: Synthetic oligonucleotide
ucucgaucccggcccuucu

SEQ ID NO: 1642208 - RNA, 19 nt, Artificial Sequence
  Description of Artificial Sequence: Synthetic oligonucleotide
ccuccauguacaugucgcg

SEQ ID NO: 1642209 - RNA, 19 nt, Artificial Sequence
  Description of Artificial Sequence: Synthetic oligonucleotide
cacuccgguggcuccuacg

SEQ ID NO: 1642210 - RNA, 19 nt, Artificial Sequence
  Description of Artificial Sequence: Synthetic oligonucleotide
ucucgacuccgggagcgcc

SEQ ID NO: 1642211 - RNA, 19 nt, Artificial Sequence
  Description of Artificial Sequence: Synthetic oligonucleotide
ucgacugcuucgucgcuuu

SEQ ID NO: 1642212 - RNA, 19 nt, Artificial Sequence
  Description of Artificial Sequence: Synthetic oligonucleotide
acccuccugccaucuaucu

SEQ ID NO: 1642213 - RNA, 19 nt, Artificial Sequence
  Description of Artificial Sequence: Synthetic oligonucleotide
uguaagcggagugcauguc

SEQ ID NO: 1642214 - RNA, 19 nt, Artificial Sequence
  Description of Artificial Sequence: Synthetic oligonucleotide
cacccugagcauugggauc

SEQ ID NO: 1642215 - RNA, 19 nt, Artificial Sequence
  Description of Artificial Sequence: Synthetic oligonucleotide
ggauaagccaugguggaaa

SEQ ID NO: 1642216 - RNA, 19 nt, Artificial Sequence
  Description of Artificial Sequence: Synthetic oligonucleotide
ugcucucucccgacuucga

SEQ ID NO: 1642217 - RNA, 19 nt, Artificial Sequence
  Description of Artificial Sequence: Synthetic oligonucleotide
cugcgugcuuguaagcgga

SEQ ID NO: 1642218 - RNA, 19 nt, Artificial Sequence
  Description of Artificial Sequence: Synthetic oligonucleotide
guccuugucucgacuccgg

SEQ ID NO: 1642219 - RNA, 19 nt, Artificial Sequence
  Description of Artificial Sequence: Synthetic oligonucleotide
uagauucuguugugucaua

SEQ ID NO: 1642220 - RNA, 19 nt, Artificial Sequence
  Description of Artificial Sequence: Synthetic oligonucleotide
uacgucgcucccggucucg

SEQ ID NO: 1642221 - RNA, 19 nt, Artificial Sequence
  Description of Artificial Sequence: Synthetic oligonucleotide
ccauguacaugucgcggcc

SEQ ID NO: 1642222 - RNA, 19 nt, Artificial Sequence
  Description of Artificial Sequence: Synthetic oligonucleotide
ggguucagccaugucgccg

SEQ ID NO: 1642223 - RNA, 19 nt, Artificial Sequence
  Description of Artificial Sequence: Synthetic oligonucleotide
ucccgacuucgacugcuuc

SEQ ID NO: 1642224 - RNA, 19 nt, Artificial Sequence
  Description of Artificial Sequence: Synthetic oligonucleotide
accucuauccucagaggau

SEQ ID NO: 1642225 - RNA, 19 nt, Artificial Sequence
  Description of Artificial Sequence: Synthetic oligonucleotide
cacucuagccacgaacaga

SEQ ID NO: 1642226 - RNA, 19 nt, Artificial Sequence
  Description of Artificial Sequence: Synthetic oligonucleotide
cuccggucccgagagcggg

SEQ ID NO: 1642227 - RNA, 19 nt, Artificial Sequence
  Description of Artificial Sequence: Synthetic oligonucleotide
gcggccaucacuaccuagc

SEQ ID NO: 1642228 - RNA, 19 nt, Artificial Sequence
  Description of Artificial Sequence: Synthetic oligonucleotide
ugucucguucauguucaua

SEQ ID NO: 1642229 - RNA, 19 nt, Artificial Sequence
  Description of Artificial Sequence: Synthetic oligonucleotide
aucucggcccgaaugccug

SEQ ID NO: 1642230 - RNA, 19 nt, Artificial Sequence
  Description of Artificial Sequence: Synthetic oligonucleotide
gaagcggggaggggcccgg

SEQ ID NO: 1642231 - RNA, 19 nt, Artificial Sequence
  Description of Artificial Sequence: Synthetic oligonucleotide
gguuuuccagaacgcuuac

SEQ ID NO: 1642232 - RNA, 19 nt, Artificial Sequence
  Description of Artificial Sequence: Synthetic oligonucleotide
ugccccgcucacuacccgu

SEQ ID NO: 1642233 - RNA, 19 nt, Artificial Sequence
  Description of Artificial Sequence: Synthetic oligonucleotide
cguucaaucuuuucccguc

SEQ ID NO: 1642234 - RNA, 19 nt, Artificial Sequence
  Description of Artificial Sequence: Synthetic oligonucleotide
ucggcccgaaugccugaug

SEQ ID NO: 1642235 - RNA, 19 nt, Artificial Sequence
  Description of Artificial Sequence: Synthetic oligonucleotide
agcggagugcaugucucgu

SEQ ID NO: 1642236 - RNA, 19 nt, Artificial Sequence
  Description of Artificial Sequence: Synthetic oligonucleotide
cagcaaaguaagagcaugu

SEQ ID NO: 1642237 - RNA, 19 nt, Artificial Sequence
  Description of Artificial Sequence: Synthetic oligonucleotide
gccaugguggaaaggcuag

SEQ ID NO: 1642238 - RNA, 19 nt, Artificial Sequence
  Description of Artificial Sequence: Synthetic oligonucleotide
ucucacuccgguggcuccu

SEQ ID NO: 1642239 - RNA, 19 nt, Artificial Sequence
  Description of Artificial Sequence: Synthetic oligonucleotide
cgugcuuguaagcggagug

SEQ ID NO: 1642240 - RNA, 19 nt, Artificial Sequence
  Description of Artificial Sequence: Synthetic oligonucleotide
cacaaggacccuccugcca

SEQ ID NO: 1642241 - RNA, 19 nt, Artificial Sequence
  Description of Artificial Sequence: Synthetic oligonucleotide
uucgacugcuucgucgcuu

SEQ ID NO: 1642242 - RNA, 19 nt, Artificial Sequence
  Description of Artificial Sequence: Synthetic oligonucleotide
acggcgacgcucguccuug

SEQ ID NO: 1642243 - RNA, 19 nt, Artificial Sequence
  Description of Artificial Sequence: Synthetic oligonucleotide
guggauucuuuugaugggu

SEQ ID NO: 1642244 - RNA, 19 nt, Artificial Sequence
  Description of Artificial Sequence: Synthetic oligonucleotide
cccuuguuggaggaggggc

SEQ ID NO: 1642245 - RNA, 19 nt, Artificial Sequence
  Description of Artificial Sequence: Synthetic oligonucleotide
ucucggcccgaaugccuga

SEQ ID NO: 1642246 - RNA, 19 nt, Artificial Sequence
  Description of Artificial Sequence: Synthetic oligonucleotide
ggccaucacuaccuagccc

SEQ ID NO: 1642247 - RNA, 19 nt, Artificial Sequence
  Description of Artificial Sequence: Synthetic oligonucleotide
cucuauccucagaggauaa

SEQ ID NO: 1642248 - RNA, 19 nt, Artificial Sequence
  Description of Artificial Sequence: Synthetic oligonucleotide
caucaccgcccucugccuc

SEQ ID NO: 1642249 - RNA, 19 nt, Artificial Sequence
  Description of Artificial Sequence: Synthetic oligonucleotide
uguacccaucaccgcccuc

SEQ ID NO: 1642250 - RNA, 19 nt, Artificial Sequence
  Description of Artificial Sequence: Synthetic oligonucleotide
uguacaugucgcggccauc

SEQ ID NO: 1642251 - RNA, 19 nt, Artificial Sequence
  Description of Artificial Sequence: Synthetic oligonucleotide
ucgucgcuuucggucucgg

SEQ ID NO: 1642252 - RNA, 19 nt, Artificial Sequence
  Description of Artificial Sequence: Synthetic oligonucleotide
cauugugagggucccacau

SEQ ID NO: 1642253 - RNA, 19 nt, Artificial Sequence
  Description of Artificial Sequence: Synthetic oligonucleotide
ccucagaggauaagccaug

SEQ ID NO: 1642254 - RNA, 19 nt, Artificial Sequence
  Description of Artificial Sequence: Synthetic oligonucleotide
ucucuggaacggcgacgcu

SEQ ID NO: 1642255 - RNA, 19 nt, Artificial Sequence
  Description of Artificial Sequence: Synthetic oligonucleotide
cauacacuucaaacucucu

SEQ ID NO: 1642256 - RNA, 19 nt, Artificial Sequence
  Description of Artificial Sequence: Synthetic oligonucleotide
acucucuccgaagcuuaga

SEQ ID NO: 1642257 - RNA, 19 nt, Artificial Sequence
  Description of Artificial Sequence: Synthetic oligonucleotide
gggccaagcucuccaggag

SEQ ID NO: 1642258 - RNA, 19 nt, Artificial Sequence
  Description of Artificial Sequence: Synthetic oligonucleotide
aggcauaaccacgggguuu

SEQ ID NO: 1642259 - RNA, 19 nt, Artificial Sequence
  Description of Artificial Sequence: Synthetic oligonucleotide
cucucucccgacuucgacu

SEQ ID NO: 1642260 - RNA, 19 nt, Artificial Sequence
  Description of Artificial Sequence: Synthetic oligonucleotide
cucgaagcuccucuuuucu

SEQ ID NO: 1642261 - RNA, 19 nt, Artificial Sequence
  Description of Artificial Sequence: Synthetic oligonucleotide
uugugcucucgaucccgau

SEQ ID NO: 1642262 - RNA, 19 nt, Artificial Sequence
  Description of Artificial Sequence: Synthetic oligonucleotide
ucacuccgguggcuccuac

SEQ ID NO: 1642263 - RNA, 19 nt, Artificial Sequence
  Description of Artificial Sequence: Synthetic oligonucleotide
caucacuaccuagcccuuc

SEQ ID NO: 1642264 - RNA, 19 nt, Artificial Sequence
  Description of Artificial Sequence: Synthetic oligonucleotide
cucucuccgaagcuuagau

SEQ ID NO: 1642265 - RNA, 19 nt, Artificial Sequence
  Description of Artificial Sequence: Synthetic oligonucleotide
ucucugcgcucccgcucgc

SEQ ID NO: 1642266 - RNA, 19 nt, Artificial Sequence
  Description of Artificial Sequence: Synthetic oligonucleotide
uucagccaugucgccgcca

SEQ ID NO: 1642267 - RNA, 19 nt, Artificial Sequence
  Description of Artificial Sequence: Synthetic oligonucleotide
gacccuccugccaucuauc

SEQ ID NO: 1642268 - RNA, 19 nt, Artificial Sequence
  Description of Artificial Sequence: Synthetic oligonucleotide
ugccuccaucagauaccca

SEQ ID NO: 1642269 - RNA, 19 nt, Artificial Sequence
  Description of Artificial Sequence: Synthetic oligonucleotide
cauguacaugucgcggcca

SEQ ID NO: 1642270 - RNA, 19 nt, Artificial Sequence
  Description of Artificial Sequence: Synthetic oligonucleotide
agcgccuccuccggucccg

SEQ ID NO: 1642271 - RNA, 19 nt, Artificial Sequence
  Description of Artificial Sequence: Synthetic oligonucleotide
ccauuguccugaccacugc

SEQ ID NO: 1642272 - RNA, 19 nt, Artificial Sequence
  Description of Artificial Sequence: Synthetic oligonucleotide
uggaacggcgacgcucguc

SEQ ID NO: 1642273 - RNA, 19 nt, Artificial Sequence
  Description of Artificial Sequence: Synthetic oligonucleotide
ggguuuuccagaacgcuua

SEQ ID NO: 1642274 - RNA, 19 nt, Artificial Sequence
  Description of Artificial Sequence: Synthetic oligonucleotide
cccguuugugcucucgauc

SEQ ID NO: 1642275 - RNA, 19 nt, Artificial Sequence
  Description of Artificial Sequence: Synthetic oligonucleotide
cggguuucugcccuuguug

SEQ ID NO: 1642276 - RNA, 19 nt, Artificial Sequence
  Description of Artificial Sequence: Synthetic oligonucleotide
uggcuccuacgucgcuccc

SEQ ID NO: 1642277 - RNA, 19 nt, Artificial Sequence
  Description of Artificial Sequence: Synthetic oligonucleotide
cuucgucgcuuucggucuc

SEQ ID NO: 1642278 - RNA, 19 nt, Artificial Sequence
  Description of Artificial Sequence: Synthetic oligonucleotide
cugcgugcucucucccgac

SEQ ID NO: 1642279 - RNA, 19 nt, Artificial Sequence
  Description of Artificial Sequence: Synthetic oligonucleotide
cugccccgcucacuacccg

SEQ ID NO: 1642280 - RNA, 19 nt, Artificial Sequence
  Description of Artificial Sequence: Synthetic oligonucleotide
gagugcaugucucguucau

SEQ ID NO: 1642281 - RNA, 19 nt, Artificial Sequence
  Description of Artificial Sequence: Synthetic oligonucleotide
gcccgaaugccugauguuc

SEQ ID NO: 1642282 - RNA, 19 nt, Artificial Sequence
  Description of Artificial Sequence: Synthetic oligonucleotide
caguccggccccucuccac

SEQ ID NO: 1642283 - RNA, 19 nt, Artificial Sequence
  Description of Artificial Sequence: Synthetic oligonucleotide
ggcuccuacgucgcucccg

SEQ ID NO: 1642284 - RNA, 19 nt, Artificial Sequence
  Description of Artificial Sequence: Synthetic oligonucleotide
gucccggucccugugugga

SEQ ID NO: 1642285 - RNA, 19 nt, Artificial Sequence
  Description of Artificial Sequence: Synthetic oligonucleotide
cucucccgacuucgacugc

SEQ ID NO: 1642286 - RNA, 19 nt, Artificial Sequence
  Description of Artificial Sequence: Synthetic oligonucleotide
gcuucgucgcuuucggucu

SEQ ID NO: 1642287 - RNA, 19 nt, Artificial Sequence
  Description of Artificial Sequence: Synthetic oligonucleotide
gcucucucccgacuucgac

SEQ ID NO: 1642288 - RNA, 19 nt, Artificial Sequence
  Description of Artificial Sequence: Synthetic oligonucleotide
aggcaucacccugagcauu

SEQ ID NO: 1642289 - RNA, 19 nt, Artificial Sequence
  Description of Artificial Sequence: Synthetic oligonucleotide
ccgaaugccugauguucac

SEQ ID NO: 1642290 - RNA, 19 nt, Artificial Sequence
  Description of Artificial Sequence: Synthetic oligonucleotide
cuugucucgcucucggcuu

SEQ ID NO: 1642291 - RNA, 19 nt, Artificial Sequence
  Description of Artificial Sequence: Synthetic oligonucleotide
ucgacuccgggagcgccuc

SEQ ID NO: 1642292 - RNA, 19 nt, Artificial Sequence
  Description of Artificial Sequence: Synthetic oligonucleotide
ucccggguuucugcccuug

SEQ ID NO: 1642293 - RNA, 19 nt, Artificial Sequence
  Description of Artificial Sequence: Synthetic oligonucleotide
acgcucguccuugucucga

SEQ ID NO: 1642294 - RNA, 19 nt, Artificial Sequence
  Description of Artificial Sequence: Synthetic oligonucleotide
gccaucugcgugcuuguaa

SEQ ID NO: 1642295 - RNA, 19 nt, Artificial Sequence
  Description of Artificial Sequence: Synthetic oligonucleotide
ucucgaucccggcgacguu

SEQ ID NO: 1642296 - RNA, 19 nt, Artificial Sequence
  Description of Artificial Sequence: Synthetic oligonucleotide
cccgaaugccugauguuca

SEQ ID NO: 1642297 - RNA, 19 nt, Artificial Sequence
  Description of Artificial Sequence: Synthetic oligonucleotide
cgacguucccucucacucc

SEQ ID NO: 1642298 - RNA, 19 nt, Artificial Sequence
  Description of Artificial Sequence: Synthetic oligonucleotide
caugcguucuucccggguu

SEQ ID NO: 1642299 - RNA, 19 nt, Artificial Sequence
  Description of Artificial Sequence: Synthetic oligonucleotide
caaacucucuccgaagcuu

SEQ ID NO: 1642300 - RNA, 19 nt, Artificial Sequence
  Description of Artificial Sequence: Synthetic oligonucleotide
cuacgucgcucccggucuc

SEQ ID NO: 1642301 - RNA, 19 nt, Artificial Sequence
  Description of Artificial Sequence: Synthetic oligonucleotide
caucucgaggguccucaaa

SEQ ID NO: 1642302 - RNA, 19 nt, Artificial Sequence
  Description of Artificial Sequence: Synthetic oligonucleotide
aagugucaucucggcccga

SEQ ID NO: 1642303 - RNA, 19 nt, Artificial Sequence
  Description of Artificial Sequence: Synthetic oligonucleotide
ucccgaucacggucucgau

SEQ ID NO: 1642304 - RNA, 19 nt, Artificial Sequence
  Description of Artificial Sequence: Synthetic oligonucleotide
ucccgagagcgggagcguc

SEQ ID NO: 1642305 - RNA, 19 nt, Artificial Sequence
  Description of Artificial Sequence: Synthetic oligonucleotide
ccacuuccugcugucgccg

SEQ ID NO: 1642306 - RNA, 19 nt, Artificial Sequence
  Description of Artificial Sequence: Synthetic oligonucleotide
uccugcugucgccguucaa

SEQ ID NO: 1642307 - RNA, 19 nt, Artificial Sequence
  Description of Artificial Sequence: Synthetic oligonucleotide
cuucccggguuucugcccu

SEQ ID NO: 1642308 - RNA, 19 nt, Artificial Sequence
  Description of Artificial Sequence: Synthetic oligonucleotide
gucucgaucccggcccuuc

SEQ ID NO: 1642309 - RNA, 19 nt, Artificial Sequence
  Description of Artificial Sequence: Synthetic oligonucleotide
caucucggcccgaaugccu

SEQ ID NO: 1642310 - RNA, 19 nt, Artificial Sequence
  Description of Artificial Sequence: Synthetic oligonucleotide
guucauguucauacucaau

SEQ ID NO: 1642311 - RNA, 19 nt, Artificial Sequence
  Description of Artificial Sequence: Synthetic oligonucleotide
gguggcuccuacgucgcuc

SEQ ID NO: 1642312 - RNA, 19 nt, Artificial Sequence
  Description of Artificial Sequence: Synthetic oligonucleotide
ccggccccucuccacaucc

SEQ ID NO: 1642313 - RNA, 19 nt, Artificial Sequence
  Description of Artificial Sequence: Synthetic oligonucleotide
gaucccggcgacguucccu

SEQ ID NO: 1642314 - RNA, 19 nt, Artificial Sequence
  Description of Artificial Sequence: Synthetic oligonucleotide
cuccucuuuucucucccgu

SEQ ID NO: 1642315 - RNA, 19 nt, Artificial Sequence
  Description of Artificial Sequence: Synthetic oligonucleotide
cccgcucacuacccguucc

SEQ ID NO: 1642316 - RNA, 19 nt, Artificial Sequence
  Description of Artificial Sequence: Synthetic oligonucleotide
cauucucuggggccaugua

SEQ ID NO: 1642317 - RNA, 19 nt, Artificial Sequence
  Description of Artificial Sequence: Synthetic oligonucleotide
ccgcucacuacccguuccc

SEQ ID NO: 1642318 - RNA, 19 nt, Artificial Sequence
  Description of Artificial Sequence: Synthetic oligonucleotide
ucccggucccuguguggaa

SEQ ID NO: 1642319 - RNA, 19 nt, Artificial Sequence
  Description of Artificial Sequence: Synthetic oligonucleotide
gcaucacccugagcauugg

SEQ ID NO: 1642320 - RNA, 19 nt, Artificial Sequence
  Description of Artificial Sequence: Synthetic oligonucleotide
cggagugcaugucucguuc

SEQ ID NO: 1642321 - RNA, 19 nt, Artificial Sequence
  Description of Artificial Sequence: Synthetic oligonucleotide
ggccccucuccacauccac

SEQ ID NO: 1642322 - RNA, 19 nt, Artificial Sequence
  Description of Artificial Sequence: Synthetic oligonucleotide
cguuugugcucucgauccc

SEQ ID NO: 1642323 - RNA, 19 nt, Artificial Sequence
  Description of Artificial Sequence: Synthetic oligonucleotide
cuccaucccugccccgcuc

SEQ ID NO: 1642324 - RNA, 19 nt, Artificial Sequence
  Description of Artificial Sequence: Synthetic oligonucleotide
ggggcccggccucucauca

SEQ ID NO: 1642325 - RNA, 19 nt, Artificial Sequence
  Description of Artificial Sequence: Synthetic oligonucleotide
gggagcgccuccuccgguc

SEQ ID NO: 1642326 - RNA, 19 nt, Artificial Sequence
  Description of Artificial Sequence: Synthetic oligonucleotide
cgacgcucguccuugucuc

SEQ ID NO: 1642327 - RNA, 19 nt, Artificial Sequence
  Description of Artificial Sequence: Synthetic oligonucleotide
ccgguggcuccuacgucgc

SEQ ID NO: 1642328 - RNA, 19 nt, Artificial Sequence
  Description of Artificial Sequence: Synthetic oligonucleotide
ccggucccuguguggaagc

SEQ ID NO: 1642329 - RNA, 19 nt, Artificial Sequence
  Description of Artificial Sequence: Synthetic oligonucleotide
ccagcccuucacaguccgg

SEQ ID NO: 1642330 - RNA, 19 nt, Artificial Sequence
  Description of Artificial Sequence: Synthetic oligonucleotide
cuuguuggaggaggggcau

SEQ ID NO: 1642331 - RNA, 19 nt, Artificial Sequence
  Description of Artificial Sequence: Synthetic oligonucleotide
ccucuauccucagaggaua

SEQ ID NO: 1642332 - RNA, 19 nt, Artificial Sequence
  Description of Artificial Sequence: Synthetic oligonucleotide
ucccggcgacguucccucu

SEQ ID NO: 1642333 - RNA, 19 nt, Artificial Sequence
  Description of Artificial Sequence: Synthetic oligonucleotide
ggcauaaccacgggguuuu

SEQ ID NO: 1642334 - RNA, 19 nt, Artificial Sequence
  Description of Artificial Sequence: Synthetic oligonucleotide
ggacccuccugccaucuau

SEQ ID NO: 1642335 - RNA, 19 nt, Artificial Sequence
  Description of Artificial Sequence: Synthetic oligonucleotide
caucugccccaccucuucu

SEQ ID NO: 1642336 - RNA, 19 nt, Artificial Sequence
  Description of Artificial Sequence: Synthetic oligonucleotide
ccaagcucuccaggagggc

SEQ ID NO: 1642337 - RNA, 19 nt, Artificial Sequence
  Description of Artificial Sequence: Synthetic oligonucleotide
uucccggguuucugcccuu

SEQ ID NO: 1642338 - RNA, 19 nt, Artificial Sequence
  Description of Artificial Sequence: Synthetic oligonucleotide
gaacggcgacgcucguccu

SEQ ID NO: 1642339 - RNA, 19 nt, Artificial Sequence
  Description of Artificial Sequence: Synthetic oligonucleotide
cucgacuccgggagcgccu

SEQ ID NO: 1642340 - RNA, 19 nt, Artificial Sequence
  Description of Artificial Sequence: Synthetic oligonucleotide
ccuacgucgcucccggucu

SEQ ID NO: 1642341 - RNA, 19 nt, Artificial Sequence
  Description of Artificial Sequence: Synthetic oligonucleotide
ccgggagcgccuccuccgg

SEQ ID NO: 1642342 - RNA, 19 nt, Artificial Sequence
  Description of Artificial Sequence: Synthetic oligonucleotide
gggguuuuccagaacgcuu

SEQ ID NO: 1642343 - RNA, 19 nt, Artificial Sequence
  Description of Artificial Sequence: Synthetic oligonucleotide
cggccucucaucauaucga

SEQ ID NO: 1642344 - RNA, 19 nt, Artificial Sequence
  Description of Artificial Sequence: Synthetic oligonucleotide
gggagcgucuccguucucu

SEQ ID NO: 1642345 - RNA, 19 nt, Artificial Sequence
  Description of Artificial Sequence: Synthetic oligonucleotide
cugucgccguucaaucuuu

SEQ ID NO: 1642346 - RNA, 19 nt, Artificial Sequence
  Description of Artificial Sequence: Synthetic oligonucleotide
ggccuccaucccugccccg

SEQ ID NO: 1642347 - RNA, 19 nt, Artificial Sequence
  Description of Artificial Sequence: Synthetic oligonucleotide
caccaccaccucaccucga

SEQ ID NO: 1642348 - RNA, 19 nt, Artificial Sequence
  Description of Artificial Sequence: Synthetic oligonucleotide
gggccaucagggccaagcu

SEQ ID NO: 1642349 - RNA, 19 nt, Artificial Sequence
  Description of Artificial Sequence: Synthetic oligonucleotide
cuucgacugcuucgucgcu

SEQ ID NO: 1642350 - RNA, 19 nt, Artificial Sequence
  Description of Artificial Sequence: Synthetic oligonucleotide
ggcgacguucccucucacu

SEQ ID NO: 1642351 - RNA, 19 nt, Artificial Sequence
  Description of Artificial Sequence: Synthetic oligonucleotide
ccauguggauucuuuugau

SEQ ID NO: 1642352 - RNA, 19 nt, Artificial Sequence
  Description of Artificial Sequence: Synthetic oligonucleotide
ggcccggccucucaucaua

SEQ ID NO: 1642353 - RNA, 19 nt, Artificial Sequence
  Description of Artificial Sequence: Synthetic oligonucleotide
cgcggccaucacuaccuag

SEQ ID NO: 1642354 - RNA, 19 nt, Artificial Sequence
  Description of Artificial Sequence: Synthetic oligonucleotide
cucuagccacgaacagagu

SEQ ID NO: 1642355 - RNA, 19 nt, Artificial Sequence
  Description of Artificial Sequence: Synthetic oligonucleotide
gucuccguucucucuccuu

SEQ ID NO: 1642356 - RNA, 19 nt, Artificial Sequence
  Description of Artificial Sequence: Synthetic oligonucleotide
ccagaacgcuuacuguaua

SEQ ID NO: 1642357 - RNA, 19 nt, Artificial Sequence
  Description of Artificial Sequence: Synthetic oligonucleotide
cgugcucucucccgacuuc

SEQ ID NO: 1642358 - RNA, 19 nt, Artificial Sequence
  Description of Artificial Sequence: Synthetic oligonucleotide
gaggggcccggccucucau

SEQ ID NO: 1642359 - RNA, 19 nt, Artificial Sequence
  Description of Artificial Sequence: Synthetic oligonucleotide
ccguucaaucuuuucccgu

SEQ ID NO: 1642360 - RNA, 19 nt, Artificial Sequence
  Description of Artificial Sequence: Synthetic oligonucleotide
ggaggggcaucucgagggu

SEQ ID NO: 1642361 - RNA, 19 nt, Artificial Sequence
  Description of Artificial Sequence: Synthetic oligonucleotide
cgaucacggucucgauccc

SEQ ID NO: 1642362 - RNA, 19 nt, Artificial Sequence
  Description of Artificial Sequence: Synthetic oligonucleotide
gugucaucucggcccgaau

SEQ ID NO: 1642363 - RNA, 19 nt, Artificial Sequence
  Description of Artificial Sequence: Synthetic oligonucleotide
cacuuccugcugucgccgu

SEQ ID NO: 1642364 - RNA, 19 nt, Artificial Sequence
  Description of Artificial Sequence: Synthetic oligonucleotide
cgcucacuacccguucccc

SEQ ID NO: 1642365 - RNA, 19 nt, Artificial Sequence
  Description of Artificial Sequence: Synthetic oligonucleotide
gcgggagcgucuccguucu

SEQ ID NO: 1642366 - RNA, 19 nt, Artificial Sequence
  Description of Artificial Sequence: Synthetic oligonucleotide
ccacgggguuuuccagaac

SEQ ID NO: 1642367 - RNA, 19 nt, Artificial Sequence
  Description of Artificial Sequence: Synthetic oligonucleotide
ccggucccgagagcgggag

SEQ ID NO: 1642368 - RNA, 19 nt, Artificial Sequence
  Description of Artificial Sequence: Synthetic oligonucleotide
gcucguccuugucucgacu

SEQ ID NO: 1642369 - RNA, 19 nt, Artificial Sequence
  Description of Artificial Sequence: Synthetic oligonucleotide
cccggcccuucuccucugg

SEQ ID NO: 1642370 - RNA, 19 nt, Artificial Sequence
  Description of Artificial Sequence: Synthetic oligonucleotide
cgcuuacuguauaccaugu

SEQ ID NO: 1642371 - RNA, 19 nt, Artificial Sequence
  Description of Artificial Sequence: Synthetic oligonucleotide
ccgacuucgacugcuucgu

SEQ ID NO: 1642372 - RNA, 19 nt, Artificial Sequence
  Description of Artificial Sequence: Synthetic oligonucleotide
cccggcgacguucccucuc

SEQ ID NO: 1642373 - RNA, 19 nt, Artificial Sequence
  Description of Artificial Sequence: Synthetic oligonucleotide
ccgaagcuuagauucuguu

SEQ ID NO: 1642374 - RNA, 19 nt, Artificial Sequence
  Description of Artificial Sequence: Synthetic oligonucleotide
cucgguccuuguccuugcu

SEQ ID NO: 1642375 - RNA, 19 nt, Artificial Sequence
  Description of Artificial Sequence: Synthetic oligonucleotide
cgaaugccugauguucaca

SEQ ID NO: 1642376 - RNA, 19 nt, Artificial Sequence
  Description of Artificial Sequence: Synthetic oligonucleotide
cucacuccgguggcuccua

SEQ ID NO: 1642377 - RNA, 19 nt, Artificial Sequence
  Description of Artificial Sequence: Synthetic oligonucleotide
gcuuguaagcggagugcau

SEQ ID NO: 1642378 - RNA, 19 nt, Artificial Sequence
  Description of Artificial Sequence: Synthetic oligonucleotide
ccccgcucacuacccguuc

SEQ ID NO: 1642379 - RNA, 19 nt, Artificial Sequence
  Description of Artificial Sequence: Synthetic oligonucleotide
ccuccaucagauacccauu

SEQ ID NO: 1642380 - RNA, 19 nt, Artificial Sequence
  Description of Artificial Sequence: Synthetic oligonucleotide
guccggccccucuccacau

SEQ ID NO: 1642381 - RNA, 19 nt, Artificial Sequence
  Description of Artificial Sequence: Synthetic oligonucleotide
gcauaaccacgggguuuuc

SEQ ID NO: 1642382 - RNA, 19 nt, Artificial Sequence
  Description of Artificial Sequence: Synthetic oligonucleotide
cucccgacuucgacugcuu

SEQ ID NO: 1642383 - RNA, 19 nt, Artificial Sequence
  Description of Artificial Sequence: Synthetic oligonucleotide
ggcccgaaugccugauguu

SEQ ID NO: 1642384 - RNA, 19 nt, Artificial Sequence
  Description of Artificial Sequence: Synthetic oligonucleotide
gcggagugcaugucucguu

SEQ ID NO: 1642385 - RNA, 19 nt, Artificial Sequence
  Description of Artificial Sequence: Synthetic oligonucleotide
cccacauuuucagcucugu

SEQ ID NO: 1642386 - RNA, 19 nt, Artificial Sequence
  Description of Artificial Sequence: Synthetic oligonucleotide
gucccgagagcgggagcgu

SEQ ID NO: 1642387 - RNA, 19 nt, Artificial Sequence
  Description of Artificial Sequence: Synthetic oligonucleotide
cggcccgaaugccugaugu

SEQ ID NO: 1642388 - RNA, 19 nt, Artificial Sequence
  Description of Artificial Sequence: Synthetic oligonucleotide
ccaccaaggccaccuccua

SEQ ID NO: 1642389 - RNA, 19 nt, Artificial Sequence
  Description of Artificial Sequence: Synthetic oligonucleotide
ccaugcguucuucccgggu

SEQ ID NO: 1642390 - RNA, 19 nt, Artificial Sequence
  Description of Artificial Sequence: Synthetic oligonucleotide
cccgagagcgggagcgucu

SEQ ID NO: 1642391 - RNA, 19 nt, Artificial Sequence
  Description of Artificial Sequence: Synthetic oligonucleotide
cuccuacgucgcucccggu

SEQ ID NO: 1642392 - RNA, 19 nt, Artificial Sequence
  Description of Artificial Sequence: Synthetic oligonucleotide
cuggaacggcgacgcucgu

SEQ ID NO: 1642393 - RNA, 19 nt, Artificial Sequence
  Description of Artificial Sequence: Synthetic oligonucleotide
cucggcccgaaugccugau

SEQ ID NO: 1642394 - RNA, 19 nt, Artificial Sequence
  Description of Artificial Sequence: Synthetic oligonucleotide
cggucccgagagcgggagc

SEQ ID NO: 1642395 - RNA, 19 nt, Artificial Sequence
  Description of Artificial Sequence: Synthetic oligonucleotide
ggggcaucucgaggguccu

SEQ ID NO: 1642396 - RNA, 19 nt, Artificial Sequence
  Description of Artificial Sequence: Synthetic oligonucleotide
cgggguuuuccagaacgcu

SEQ ID NO: 1642397 - RNA, 19 nt, Artificial Sequence
  Description of Artificial Sequence: Synthetic oligonucleotide
cgacugcuucgucgcuuuc

SEQ ID NO: 1642398 - RNA, 19 nt, Artificial Sequence
  Description of Artificial Sequence: Synthetic oligonucleotide
ccccguuugugcucucgau

SEQ ID NO: 1642399 - RNA, 19 nt, Artificial Sequence
  Description of Artificial Sequence: Synthetic oligonucleotide
cggcgacguucccucucac

SEQ ID NO: 1642400 - RNA, 19 nt, Artificial Sequence
  Description of Artificial Sequence: Synthetic oligonucleotide
ccggguuucugcccuuguu

SEQ ID NO: 1642401 - RNA, 19 nt, Artificial Sequence
  Description of Artificial Sequence: Synthetic oligonucleotide
cccgucucuuucucuccau

SEQ ID NO: 1642402 - RNA, 19 nt, Artificial Sequence
  Description of Artificial Sequence: Synthetic oligonucleotide
cgccuccuccggucccgag

SEQ ID NO: 1642403 - RNA, 19 nt, Artificial Sequence
  Description of Artificial Sequence: Synthetic oligonucleotide
cggccccucuccacaucca

SEQ ID NO: 1642404 - RNA, 19 nt, Artificial Sequence
  Description of Artificial Sequence: Synthetic oligonucleotide
cccggguuucugcccuugu

SEQ ID NO: 1642405 - RNA, 19 nt, Artificial Sequence
  Description of Artificial Sequence: Synthetic oligonucleotide
cgucgcuuucggucucggu

SEQ ID NO: 1642406 - RNA, 19 nt, Artificial Sequence
  Description of Artificial Sequence: Synthetic oligonucleotide
cgcuuucggucucgguccu

SEQ ID NO: 1642407 - RNA, 19 nt, Artificial Sequence
  Description of Artificial Sequence: Synthetic oligonucleotide
cgucuccguucucucuccu

SEQ ID NO: 1642408 - RNA, 19 nt, Artificial Sequence
  Description of Artificial Sequence: Synthetic oligonucleotide
ggucucgaucccggcccuu

SEQ ID NO: 1642409 - RNA, 19 nt, Artificial Sequence
  Description of Artificial Sequence: Synthetic oligonucleotide
cgggagcgucuccguucuc

SEQ ID NO: 1642410 - RNA, 19 nt, Artificial Sequence
  Description of Artificial Sequence: Synthetic oligonucleotide
cggucucgaucccggcccu

SEQ ID NO: 1642411 - RNA, 19 nt, Artificial Sequence
  Description of Artificial Sequence: Synthetic oligonucleotide
cgucgcucccggucucgau

SEQ ID NO: 1642412 - RNA, 19 nt, Artificial Sequence
  Description of Artificial Sequence: Synthetic oligonucleotide
caccgcccucugccuccau

SEQ ID NO: 1642413 - RNA, 19 nt, Artificial Sequence
  Description of Artificial Sequence: Synthetic oligonucleotide
cgggagcgccuccuccggu

SEQ ID NO: 1642414 - RNA, 19 nt, Artificial Sequence
  Description of Artificial Sequence: Synthetic oligonucleotide
cccugagcauugggaucau

SEQ ID NO: 1642415 - RNA, 19 nt, Artificial Sequence
  Description of Artificial Sequence: Synthetic oligonucleotide
auagcuauggaacaggucc

SEQ ID NO: 1642416 - RNA, 19 nt, Artificial Sequence
  Description of Artificial Sequence: Synthetic oligonucleotide
aaagacaaggaccacacga

SEQ ID NO: 1642417 - RNA, 19 nt, Artificial Sequence
  Description of Artificial Sequence: Synthetic oligonucleotide
aauuccuggggucacaauc

SEQ ID NO: 1642418 - RNA, 19 nt, Artificial Sequence
  Description of Artificial Sequence: Synthetic oligonucleotide
uuugagggaauaauaaagc

SEQ ID NO: 1642419 - RNA, 19 nt, Artificial Sequence
  Description of Artificial Sequence: Synthetic oligonucleotide
uuauuuagaaguccccagg

SEQ ID NO: 1642420 - RNA, 19 nt, Artificial Sequence
  Description of Artificial Sequence: Synthetic oligonucleotide
aauaaaaugaaagggcuga

SEQ ID NO: 1642421 - RNA, 19 nt, Artificial Sequence
  Description of Artificial Sequence: Synthetic oligonucleotide
guuauagccaaagacaagg

SEQ ID NO: 1642422 - RNA, 19 nt, Artificial Sequence
  Description of Artificial Sequence: Synthetic oligonucleotide
auaauuacuggcucccacc

SEQ ID NO: 1642423 - RNA, 19 nt, Artificial Sequence
  Description of Artificial Sequence: Synthetic oligonucleotide
uaagaugcgaacauucuca

SEQ ID NO: 1642424 - RNA, 19 nt, Artificial Sequence
  Description of Artificial Sequence: Synthetic oligonucleotide
aguacugacuacucgcugc

SEQ ID NO: 1642425 - RNA, 19 nt, Artificial Sequence
  Description of Artificial Sequence: Synthetic oligonucleotide
uuucuauuuccugaggucg

SEQ ID NO: 1642426 - RNA, 19 nt, Artificial Sequence
  Description of Artificial Sequence: Synthetic oligonucleotide
ugaaaguacugacuacucg

SEQ ID NO: 1642427 - RNA, 19 nt, Artificial Sequence
  Description of Artificial Sequence: Synthetic oligonucleotide
ugacuauccggucacaacc

SEQ ID NO: 1642428 - RNA, 19 nt, Artificial Sequence
  Description of Artificial Sequence: Synthetic oligonucleotide
uaauaaaaugaaagggcug

SEQ ID NO: 1642429 - RNA, 19 nt, Artificial Sequence
  Description of Artificial Sequence: Synthetic oligonucleotide
gaguguugaauucuugggg

SEQ ID NO: 1642430 - RNA, 19 nt, Artificial Sequence
  Description of Artificial Sequence: Synthetic oligonucleotide
ucugcuaccacgcggagca

SEQ ID NO: 1642431 - RNA, 19 nt, Artificial Sequence
  Description of Artificial Sequence: Synthetic oligonucleotide
uuacucagcacguagguac

SEQ ID NO: 1642432 - RNA, 19 nt, Artificial Sequence
  Description of Artificial Sequence: Synthetic oligonucleotide
cucaguauaaaguucccag

SEQ ID NO: 1642433 - RNA, 19 nt, Artificial Sequence
  Description of Artificial Sequence: Synthetic oligonucleotide
uuuaccucauuacaccgcc

SEQ ID NO: 1642434 - RNA, 19 nt, Artificial Sequence
  Description of Artificial Sequence: Synthetic oligonucleotide
uauaaagaacuguccgugg

SEQ ID NO: 1642435 - RNA, 19 nt, Artificial Sequence
  Description of Artificial Sequence: Synthetic oligonucleotide
aaaguuccauccugugagc

SEQ ID NO: 1642436 - RNA, 19 nt, Artificial Sequence
  Description of Artificial Sequence: Synthetic oligonucleotide
acacacucccuccauaggc

SEQ ID NO: 1642437 - RNA, 19 nt, Artificial Sequence
  Description of Artificial Sequence: Synthetic oligonucleotide
gucacuacaauuccugggg

SEQ ID NO: 1642438 - RNA, 19 nt, Artificial Sequence
  Description of Artificial Sequence: Synthetic oligonucleotide
ucgaguguugaauucuugg

SEQ ID NO: 1642439 - RNA, 19 nt, Artificial Sequence
  Description of Artificial Sequence: Synthetic oligonucleotide
uucuguucggggauguugg

SEQ ID NO: 1642440 - RNA, 19 nt, Artificial Sequence
  Description of Artificial Sequence: Synthetic oligonucleotide
ucauauugcugaaaguacu

SEQ ID NO: 1642441 - RNA, 19 nt, Artificial Sequence
  Description of Artificial Sequence: Synthetic oligonucleotide
cugaaauaaggcaaacccc

SEQ ID NO: 1642442 - RNA, 19 nt, Artificial Sequence
  Description of Artificial Sequence: Synthetic oligonucleotide
ugagggaauaauaaagcaa

SEQ ID NO: 1642443 - RNA, 19 nt, Artificial Sequence
  Description of Artificial Sequence: Synthetic oligonucleotide
gaccacacgaagcucaggg

SEQ ID NO: 1642444 - RNA, 19 nt, Artificial Sequence
  Description of Artificial Sequence: Synthetic oligonucleotide
ucuuuuauggccgcgacac

SEQ ID NO: 1642445 - RNA, 19 nt, Artificial Sequence
  Description of Artificial Sequence: Synthetic oligonucleotide
gaugguuguauagcuaugg

SEQ ID NO: 1642446 - RNA, 19 nt, Artificial Sequence
  Description of Artificial Sequence: Synthetic oligonucleotide
agugaagacaaguugucca

SEQ ID NO: 1642447 - RNA, 19 nt, Artificial Sequence
  Description of Artificial Sequence: Synthetic oligonucleotide
agacaaguuguccaccugg

SEQ ID NO: 1642448 - RNA, 19 nt, Artificial Sequence
  Description of Artificial Sequence: Synthetic oligonucleotide
cuuauuuagaaguccccag

SEQ ID NO: 1642449 - RNA, 19 nt, Artificial Sequence
  Description of Artificial Sequence: Synthetic oligonucleotide
gucgauugcuaccugaucc

SEQ ID NO: 1642450 - RNA, 19 nt, Artificial Sequence
  Description of Artificial Sequence: Synthetic oligonucleotide
uauuuagaaguccccaggu

SEQ ID NO: 1642451 - RNA, 19 nt, Artificial Sequence
  Description of Artificial Sequence: Synthetic oligonucleotide
cagaaucugccauauaaag

SEQ ID NO: 1642452 - RNA, 19 nt, Artificial Sequence
  Description of Artificial Sequence: Synthetic oligonucleotide
acucgcugcagauaauuac

SEQ ID NO: 1642453 - RNA, 19 nt, Artificial Sequence
  Description of Artificial Sequence: Synthetic oligonucleotide
agucacuacaauuccuggg

SEQ ID NO: 1642454 - RNA, 19 nt, Artificial Sequence
  Description of Artificial Sequence: Synthetic oligonucleotide
uucucaagggcaacugccg

SEQ ID NO: 1642455 - RNA, 19 nt, Artificial Sequence
  Description of Artificial Sequence: Synthetic oligonucleotide
ccuuaauaaaaugaaaggg

SEQ ID NO: 1642456 - RNA, 19 nt, Artificial Sequence
  Description of Artificial Sequence: Synthetic oligonucleotide
auggccgcgacacucuucc

SEQ ID NO: 1642457 - RNA, 19 nt, Artificial Sequence
  Description of Artificial Sequence: Synthetic oligonucleotide
auaggcggcacacuccggc

SEQ ID NO: 1642458 - RNA, 19 nt, Artificial Sequence
  Description of Artificial Sequence: Synthetic oligonucleotide
aagccaaauaaggggacac

SEQ ID NO: 1642459 - RNA, 19 nt, Artificial Sequence
  Description of Artificial Sequence: Synthetic oligonucleotide
uuccuuuaccucauuacac

SEQ ID NO: 1642460 - RNA, 19 nt, Artificial Sequence
  Description of Artificial Sequence: Synthetic oligonucleotide
guauaaaguucccagugac

SEQ ID NO: 1642461 - RNA, 19 nt, Artificial Sequence
  Description of Artificial Sequence: Synthetic oligonucleotide
uauaaaguucccagugacu

SEQ ID NO: 1642462 - RNA, 19 nt, Artificial Sequence
  Description of Artificial Sequence: Synthetic oligonucleotide
acaaggaccacacgaagcu

SEQ ID NO: 1642463 - RNA, 19 nt, Artificial Sequence
  Description of Artificial Sequence: Synthetic oligonucleotide
aagaagccaaauaagggga

SEQ ID NO: 1642464 - RNA, 19 nt, Artificial Sequence
  Description of Artificial Sequence: Synthetic oligonucleotide
uaauuacuggcucccaccu

SEQ ID NO: 1642465 - RNA, 19 nt, Artificial Sequence
  Description of Artificial Sequence: Synthetic oligonucleotide
ucaguauaaaguucccagu

SEQ ID NO: 1642466 - RNA, 19 nt, Artificial Sequence
  Description of Artificial Sequence: Synthetic oligonucleotide
ugguaagaugcgaacauuc

SEQ ID NO: 1642467 - RNA, 19 nt, Artificial Sequence
  Description of Artificial Sequence: Synthetic oligonucleotide
caguauaaaguucccagug

SEQ ID NO: 1642468 - RNA, 19 nt, Artificial Sequence
  Description of Artificial Sequence: Synthetic oligonucleotide
auaaagaacuguccguggu

SEQ ID NO: 1642469 - RNA, 19 nt, Artificial Sequence
  Description of Artificial Sequence: Synthetic oligonucleotide
acuguccgugguaagaugc

SEQ ID NO: 1642470 - RNA, 19 nt, Artificial Sequence
  Description of Artificial Sequence: Synthetic oligonucleotide
uauccggucacaaccaauc

SEQ ID NO: 1642471 - RNA, 19 nt, Artificial Sequence
  Description of Artificial Sequence: Synthetic oligonucleotide
acgcacgcgaacaugaagc

SEQ ID NO: 1642472 - RNA, 19 nt, Artificial Sequence
  Description of Artificial Sequence: Synthetic oligonucleotide
auuccuggggucacaaucc

SEQ ID NO: 1642473 - RNA, 19 nt, Artificial Sequence
  Description of Artificial Sequence: Synthetic oligonucleotide
gagguuacucagcacguag

SEQ ID NO: 1642474 - RNA, 19 nt, Artificial Sequence
  Description of Artificial Sequence: Synthetic oligonucleotide
uuauagccaaagacaagga

SEQ ID NO: 1642475 - RNA, 19 nt, Artificial Sequence
  Description of Artificial Sequence: Synthetic oligonucleotide
agcaagcugaugucguucg

SEQ ID NO: 1642476 - RNA, 19 nt, Artificial Sequence
  Description of Artificial Sequence: Synthetic oligonucleotide
uucccagugacuauccggu

SEQ ID NO: 1642477 - RNA, 19 nt, Artificial Sequence
  Description of Artificial Sequence: Synthetic oligonucleotide
uucggugcccgcuaaagga

SEQ ID NO: 1642478 - RNA, 19 nt, Artificial Sequence
  Description of Artificial Sequence: Synthetic oligonucleotide
cacguagguacuccgaggg

SEQ ID NO: 1642479 - RNA, 19 nt, Artificial Sequence
  Description of Artificial Sequence: Synthetic oligonucleotide
aacgcacgcgaacaugaag

SEQ ID NO: 1642480 - RNA, 19 nt, Artificial Sequence
  Description of Artificial Sequence: Synthetic oligonucleotide
aucaauauccagaggguuc

SEQ ID NO: 1642481 - RNA, 19 nt, Artificial Sequence
  Description of Artificial Sequence: Synthetic oligonucleotide
ugccucuacagucuuguca

SEQ ID NO: 1642482 - RNA, 19 nt, Artificial Sequence
  Description of Artificial Sequence: Synthetic oligonucleotide
auuuagaaguccccaggug

SEQ ID NO: 1642483 - RNA, 19 nt, Artificial Sequence
  Description of Artificial Sequence: Synthetic oligonucleotide
gagucacuacaauuccugg

SEQ ID NO: 1642484 - RNA, 19 nt, Artificial Sequence
  Description of Artificial Sequence: Synthetic oligonucleotide
aaggugaacacacgcucca

SEQ ID NO: 1642485 - RNA, 19 nt, Artificial Sequence
  Description of Artificial Sequence: Synthetic oligonucleotide
uuauccagaagacccacuu

SEQ ID NO: 1642486 - RNA, 19 nt, Artificial Sequence
  Description of Artificial Sequence: Synthetic oligonucleotide
uguugaauucuuggggucc

SEQ ID NO: 1642487 - RNA, 19 nt, Artificial Sequence
  Description of Artificial Sequence: Synthetic oligonucleotide
ucaauauccagaggguucu

SEQ ID NO: 1642488 - RNA, 19 nt, Artificial Sequence
  Description of Artificial Sequence: Synthetic oligonucleotide
cuuuaccucauuacaccgc

SEQ ID NO: 1642489 - RNA, 19 nt, Artificial Sequence
  Description of Artificial Sequence: Synthetic oligonucleotide
gaacacacgcuccaccacc

SEQ ID NO: 1642490 - RNA, 19 nt, Artificial Sequence
  Description of Artificial Sequence: Synthetic oligonucleotide
aggacaguccaaccacacc

SEQ ID NO: 1642491 - RNA, 19 nt, Artificial Sequence
  Description of Artificial Sequence: Synthetic oligonucleotide
aaguacugacuacucgcug

SEQ ID NO: 1642492 - RNA, 19 nt, Artificial Sequence
  Description of Artificial Sequence: Synthetic oligonucleotide
uccagcuaagaugauauuc

SEQ ID NO: 1642493 - RNA, 19 nt, Artificial Sequence
  Description of Artificial Sequence: Synthetic oligonucleotide
auaaaguucccagugacua

SEQ ID NO: 1642494 - RNA, 19 nt, Artificial Sequence
  Description of Artificial Sequence: Synthetic oligonucleotide
caccuuacagcaguuauag

SEQ ID NO: 1642495 - RNA, 19 nt, Artificial Sequence
  Description of Artificial Sequence: Synthetic oligonucleotide
ucagcacguagguacuccg

SEQ ID NO: 1642496 - RNA, 19 nt, Artificial Sequence
  Description of Artificial Sequence: Synthetic oligonucleotide
ucgauugcuaccugauccc

SEQ ID NO: 1642497 - RNA, 19 nt, Artificial Sequence
  Description of Artificial Sequence: Synthetic oligonucleotide
auucggugcccgcuaaagg

SEQ ID NO: 1642498 - RNA, 19 nt, Artificial Sequence
  Description of Artificial Sequence: Synthetic oligonucleotide
guaagaugcgaacauucuc

SEQ ID NO: 1642499 - RNA, 19 nt, Artificial Sequence
  Description of Artificial Sequence: Synthetic oligonucleotide
aucccauuggagucacuac

SEQ ID NO: 1642500 - RNA, 19 nt, Artificial Sequence
  Description of Artificial Sequence: Synthetic oligonucleotide
uuugaggcgcugcauggcu

SEQ ID NO: 1642501 - RNA, 19 nt, Artificial Sequence
  Description of Artificial Sequence: Synthetic oligonucleotide
uccgcgagguuacucagca

SEQ ID NO: 1642502 - RNA, 19 nt, Artificial Sequence
  Description of Artificial Sequence: Synthetic oligonucleotide
aagaacuguccgugguaag

SEQ ID NO: 1642503 - RNA, 19 nt, Artificial Sequence
  Description of Artificial Sequence: Synthetic oligonucleotide
cagaagacccacuucagca

SEQ ID NO: 1642504 - RNA, 19 nt, Artificial Sequence
  Description of Artificial Sequence: Synthetic oligonucleotide
auuacuggcucccaccuua

SEQ ID NO: 1642505 - RNA, 19 nt, Artificial Sequence
  Description of Artificial Sequence: Synthetic oligonucleotide
uaaagaacuguccguggua

SEQ ID NO: 1642506 - RNA, 19 nt, Artificial Sequence
  Description of Artificial Sequence: Synthetic oligonucleotide
ugauauucauauugcugaa

SEQ ID NO: 1642507 - RNA, 19 nt, Artificial Sequence
  Description of Artificial Sequence: Synthetic oligonucleotide
acuccggcuaccccgcagc

SEQ ID NO: 1642508 - RNA, 19 nt, Artificial Sequence
  Description of Artificial Sequence: Synthetic oligonucleotide
gcaacugccgucuccauag

SEQ ID NO: 1642509 - RNA, 19 nt, Artificial Sequence
  Description of Artificial Sequence: Synthetic oligonucleotide
agcacguagguacuccgag

SEQ ID NO: 1642510 - RNA, 19 nt, Artificial Sequence
  Description of Artificial Sequence: Synthetic oligonucleotide
cagauaauuacuggcuccc

SEQ ID NO: 1642511 - RNA, 19 nt, Artificial Sequence
  Description of Artificial Sequence: Synthetic oligonucleotide
gcuaaugaagguuucagaa

SEQ ID NO: 1642512 - RNA, 19 nt, Artificial Sequence
  Description of Artificial Sequence: Synthetic oligonucleotide
aagacccacuucagcaagc

SEQ ID NO: 1642513 - RNA, 19 nt, Artificial Sequence
  Description of Artificial Sequence: Synthetic oligonucleotide
acuacaauuccugggguca

SEQ ID NO: 1642514 - RNA, 19 nt, Artificial Sequence
  Description of Artificial Sequence: Synthetic oligonucleotide
ucgcugcagauaauuacug

SEQ ID NO: 1642515 - RNA, 19 nt, Artificial Sequence
  Description of Artificial Sequence: Synthetic oligonucleotide
cuaccugaucccauuggag

SEQ ID NO: 1642516 - RNA, 19 nt, Artificial Sequence
  Description of Artificial Sequence: Synthetic oligonucleotide
gacuacucgcugcagauaa

SEQ ID NO: 1642517 - RNA, 19 nt, Artificial Sequence
  Description of Artificial Sequence: Synthetic oligonucleotide
uccaggcuaaugaagguuu

SEQ ID NO: 1642518 - RNA, 19 nt, Artificial Sequence
  Description of Artificial Sequence: Synthetic oligonucleotide
aagcgccucugcuaccacg

SEQ ID NO: 1642519 - RNA, 19 nt, Artificial Sequence
  Description of Artificial Sequence: Synthetic oligonucleotide
ugaugguuguauagcuaug

SEQ ID NO: 1642520 - RNA, 19 nt, Artificial Sequence
  Description of Artificial Sequence: Synthetic oligonucleotide
ugcgaacauucucaagcgc

SEQ ID NO: 1642521 - RNA, 19 nt, Artificial Sequence
  Description of Artificial Sequence: Synthetic oligonucleotide
aacuguccgugguaagaug

SEQ ID NO: 1642522 - RNA, 19 nt, Artificial Sequence
  Description of Artificial Sequence: Synthetic oligonucleotide
gacuuauuuagaagucccc

SEQ ID NO: 1642523 - RNA, 19 nt, Artificial Sequence
  Description of Artificial Sequence: Synthetic oligonucleotide
uucgaguguugaauucuug

SEQ ID NO: 1642524 - RNA, 19 nt, Artificial Sequence
  Description of Artificial Sequence: Synthetic oligonucleotide
uuuccugaggucgauugcu

SEQ ID NO: 1642525 - RNA, 19 nt, Artificial Sequence
  Description of Artificial Sequence: Synthetic oligonucleotide
aaauaaggggacacuggga

SEQ ID NO: 1642526 - RNA, 19 nt, Artificial Sequence
  Description of Artificial Sequence: Synthetic oligonucleotide
uccauaggcggcacacucc

SEQ ID NO: 1642527 - RNA, 19 nt, Artificial Sequence
  Description of Artificial Sequence: Synthetic oligonucleotide
gauucggugcccgcuaaag

SEQ ID NO: 1642528 - RNA, 19 nt, Artificial Sequence
  Description of Artificial Sequence: Synthetic oligonucleotide
uccauuccucgccuacccg

SEQ ID NO: 1642529 - RNA, 19 nt, Artificial Sequence
  Description of Artificial Sequence: Synthetic oligonucleotide
agaagccaaauaaggggac

SEQ ID NO: 1642530 - RNA, 19 nt, Artificial Sequence
  Description of Artificial Sequence: Synthetic oligonucleotide
cugaaaguacugacuacuc

SEQ ID NO: 1642531 - RNA, 19 nt, Artificial Sequence
  Description of Artificial Sequence: Synthetic oligonucleotide
aacugccgucuccauagug

SEQ ID NO: 1642532 - RNA, 19 nt, Artificial Sequence
  Description of Artificial Sequence: Synthetic oligonucleotide
acugacuacucgcugcaga

SEQ ID NO: 1642533 - RNA, 19 nt, Artificial Sequence
  Description of Artificial Sequence: Synthetic oligonucleotide
auuacaccgccucaguaua

SEQ ID NO: 1642534 - RNA, 19 nt, Artificial Sequence
  Description of Artificial Sequence: Synthetic oligonucleotide
accgccucaguauaaaguu

SEQ ID NO: 1642535 - RNA, 19 nt, Artificial Sequence
  Description of Artificial Sequence: Synthetic oligonucleotide
gcagauaauuacuggcucc

SEQ ID NO: 1642536 - RNA, 19 nt, Artificial Sequence
  Description of Artificial Sequence: Synthetic oligonucleotide
ucauuacaccgccucagua

SEQ ID NO: 1642537 - RNA, 19 nt, Artificial Sequence
  Description of Artificial Sequence: Synthetic oligonucleotide
ucucaagggcaacugccgu

SEQ ID NO: 1642538 - RNA, 19 nt, Artificial Sequence
  Description of Artificial Sequence: Synthetic oligonucleotide
aacgugaucucagggcaug

SEQ ID NO: 1642539 - RNA, 19 nt, Artificial Sequence
  Description of Artificial Sequence: Synthetic oligonucleotide
uauccagaagacccacuuc

SEQ ID NO: 1642540 - RNA, 19 nt, Artificial Sequence
  Description of Artificial Sequence: Synthetic oligonucleotide
agguuucagaaucugccau

SEQ ID NO: 1642541 - RNA, 19 nt, Artificial Sequence
  Description of Artificial Sequence: Synthetic oligonucleotide
ucucaacaagacuuauuua

SEQ ID NO: 1642542 - RNA, 19 nt, Artificial Sequence
  Description of Artificial Sequence: Synthetic oligonucleotide
cacgcgaacaugaagccga

SEQ ID NO: 1642543 - RNA, 19 nt, Artificial Sequence
  Description of Artificial Sequence: Synthetic oligonucleotide
aagucagugaagacaaguu

SEQ ID NO: 1642544 - RNA, 19 nt, Artificial Sequence
  Description of Artificial Sequence: Synthetic oligonucleotide
augguuguauagcuaugga

SEQ ID NO: 1642545 - RNA, 19 nt, Artificial Sequence
  Description of Artificial Sequence: Synthetic oligonucleotide
gacaaguuguccaccuggc

SEQ ID NO: 1642546 - RNA, 19 nt, Artificial Sequence
  Description of Artificial Sequence: Synthetic oligonucleotide
agaugcgaacauucucaag

SEQ ID NO: 1642547 - RNA, 19 nt, Artificial Sequence
  Description of Artificial Sequence: Synthetic oligonucleotide
uuacagcaguuauagccaa

SEQ ID NO: 1642548 - RNA, 19 nt, Artificial Sequence
  Description of Artificial Sequence: Synthetic oligonucleotide
ugcugaaaguacugacuac

SEQ ID NO: 1642549 - RNA, 19 nt, Artificial Sequence
  Description of Artificial Sequence: Synthetic oligonucleotide
ugucguucgaguguugaau

SEQ ID NO: 1642550 - RNA, 19 nt, Artificial Sequence
  Description of Artificial Sequence: Synthetic oligonucleotide
aaaggacaguccaaccaca

SEQ ID NO: 1642551 - RNA, 19 nt, Artificial Sequence
  Description of Artificial Sequence: Synthetic oligonucleotide
acgcggagcaagcaauguc

SEQ ID NO: 1642552 - RNA, 19 nt, Artificial Sequence
  Description of Artificial Sequence: Synthetic oligonucleotide
agcaccaugaugguuguau

SEQ ID NO: 1642553 - RNA, 19 nt, Artificial Sequence
  Description of Artificial Sequence: Synthetic oligonucleotide
caaagacaaggaccacacg

SEQ ID NO: 1642554 - RNA, 19 nt, Artificial Sequence
  Description of Artificial Sequence: Synthetic oligonucleotide
agcgccucugcuaccacgc

SEQ ID NO: 1642555 - RNA, 19 nt, Artificial Sequence
  Description of Artificial Sequence: Synthetic oligonucleotide
cauuccucgccuacccgcc

SEQ ID NO: 1642556 - RNA, 19 nt, Artificial Sequence
  Description of Artificial Sequence: Synthetic oligonucleotide
ucugcgcacacacucccuc

SEQ ID NO: 1642557 - RNA, 19 nt, Artificial Sequence
  Description of Artificial Sequence: Synthetic oligonucleotide
auugcuaccugaucccauu

SEQ ID NO: 1642558 - RNA, 19 nt, Artificial Sequence
  Description of Artificial Sequence: Synthetic oligonucleotide
uacucagcacguagguacu

SEQ ID NO: 1642559 - RNA, 19 nt, Artificial Sequence
  Description of Artificial Sequence: Synthetic oligonucleotide
guucuguucggggauguug

SEQ ID NO: 1642560 - RNA, 19 nt, Artificial Sequence
  Description of Artificial Sequence: Synthetic oligonucleotide
cagugaagacaaguugucc

SEQ ID NO: 1642561 - RNA, 19 nt, Artificial Sequence
  Description of Artificial Sequence: Synthetic oligonucleotide
ucggugcccgcuaaaggac

SEQ ID NO: 1642562 - RNA, 19 nt, Artificial Sequence
  Description of Artificial Sequence: Synthetic oligonucleotide
gugacuauccggucacaac

SEQ ID NO: 1642563 - RNA, 19 nt, Artificial Sequence
  Description of Artificial Sequence: Synthetic oligonucleotide
aauuacuggcucccaccuu

SEQ ID NO: 1642564 - RNA, 19 nt, Artificial Sequence
  Description of Artificial Sequence: Synthetic oligonucleotide
uugaggcgcugcauggcug

SEQ ID NO: 1642565 - RNA, 19 nt, Artificial Sequence
  Description of Artificial Sequence: Synthetic oligonucleotide
ggagucacuacaauuccug

SEQ ID NO: 1642566 - RNA, 19 nt, Artificial Sequence
  Description of Artificial Sequence: Synthetic oligonucleotide
gauauucauauugcugaaa

SEQ ID NO: 1642567 - RNA, 19 nt, Artificial Sequence
  Description of Artificial Sequence: Synthetic oligonucleotide
gaugucguucgaguguuga

SEQ ID NO: 1642568 - RNA, 19 nt, Artificial Sequence
  Description of Artificial Sequence: Synthetic oligonucleotide
auccucguugaggagaacu

SEQ ID NO: 1642569 - RNA, 19 nt, Artificial Sequence
  Description of Artificial Sequence: Synthetic oligonucleotide
cucucaacaagacuuauuu

SEQ ID NO: 1642570 - RNA, 19 nt, Artificial Sequence
  Description of Artificial Sequence: Synthetic oligonucleotide
ugguguucuguucggggau

SEQ ID NO: 1642571 - RNA, 19 nt, Artificial Sequence
  Description of Artificial Sequence: Synthetic oligonucleotide
uacucgcugcagauaauua

SEQ ID NO: 1642572 - RNA, 19 nt, Artificial Sequence
  Description of Artificial Sequence: Synthetic oligonucleotide
gcacacuccggcuaccccg

SEQ ID NO: 1642573 - RNA, 19 nt, Artificial Sequence
  Description of Artificial Sequence: Synthetic oligonucleotide
accuccgcgagguuacuca

SEQ ID NO: 1642574 - RNA, 19 nt, Artificial Sequence
  Description of Artificial Sequence: Synthetic oligonucleotide
cuccgagggucagugaagg

SEQ ID NO: 1642575 - RNA, 19 nt, Artificial Sequence
  Description of Artificial Sequence: Synthetic oligonucleotide
cgaguguugaauucuuggg

SEQ ID NO: 1642576 - RNA, 19 nt, Artificial Sequence
  Description of Artificial Sequence: Synthetic oligonucleotide
gcgaacauucucaagcgcc

SEQ ID NO: 1642577 - RNA, 19 nt, Artificial Sequence
  Description of Artificial Sequence: Synthetic oligonucleotide
gaggucgauugcuaccuga

SEQ ID NO: 1642578 - RNA, 19 nt, Artificial Sequence
  Description of Artificial Sequence: Synthetic oligonucleotide
ucuguucggggauguuggc

SEQ ID NO: 1642579 - RNA, 19 nt, Artificial Sequence
  Description of Artificial Sequence: Synthetic oligonucleotide
ugcucuuuuauggccgcga

SEQ ID NO: 1642580 - RNA, 19 nt, Artificial Sequence
  Description of Artificial Sequence: Synthetic oligonucleotide
gaguccauuccucgccuac

SEQ ID NO: 1642581 - RNA, 19 nt, Artificial Sequence
  Description of Artificial Sequence: Synthetic oligonucleotide
acaaggagcuaguuuuguu

SEQ ID NO: 1642582 - RNA, 19 nt, Artificial Sequence
  Description of Artificial Sequence: Synthetic oligonucleotide
acaguccaaccacaccugu

SEQ ID NO: 1642583 - RNA, 19 nt, Artificial Sequence
  Description of Artificial Sequence: Synthetic oligonucleotide
gaucccauuggagucacua

SEQ ID NO: 1642584 - RNA, 19 nt, Artificial Sequence
  Description of Artificial Sequence: Synthetic oligonucleotide
accucauuacaccgccuca

SEQ ID NO: 1642585 - RNA, 19 nt, Artificial Sequence
  Description of Artificial Sequence: Synthetic oligonucleotide
gaggagaacuguagcacuc

SEQ ID NO: 1642586 - RNA, 19 nt, Artificial Sequence
  Description of Artificial Sequence: Synthetic oligonucleotide
guacugacuacucgcugca

SEQ ID NO: 1642587 - RNA, 19 nt, Artificial Sequence
  Description of Artificial Sequence: Synthetic oligonucleotide
ggacuugacacugcuuggg

SEQ ID NO: 1642588 - RNA, 19 nt, Artificial Sequence
  Description of Artificial Sequence: Synthetic oligonucleotide
uuaccucauuacaccgccu

SEQ ID NO: 1642589 - RNA, 19 nt, Artificial Sequence
  Description of Artificial Sequence: Synthetic oligonucleotide
cgcgagguuacucagcacg

SEQ ID NO: 1642590 - RNA, 19 nt, Artificial Sequence
  Description of Artificial Sequence: Synthetic oligonucleotide
ugaggucgauugcuaccug

SEQ ID NO: 1642591 - RNA, 19 nt, Artificial Sequence
  Description of Artificial Sequence: Synthetic oligonucleotide
cuaaugaagguuucagaau

SEQ ID NO: 1642592 - RNA, 19 nt, Artificial Sequence
  Description of Artificial Sequence: Synthetic oligonucleotide
ggacaguccaaccacaccu

SEQ ID NO: 1642593 - RNA, 19 nt, Artificial Sequence
  Description of Artificial Sequence: Synthetic oligonucleotide
caaguuguccaccuggccu

SEQ ID NO: 1642594 - RNA, 19 nt, Artificial Sequence
  Description of Artificial Sequence: Synthetic oligonucleotide
ucacgcagcgguggguccg

SEQ ID NO: 1642595 - RNA, 19 nt, Artificial Sequence
  Description of Artificial Sequence: Synthetic oligonucleotide
gccaaauaaggggacacug

SEQ ID NO: 1642596 - RNA, 19 nt, Artificial Sequence
  Description of Artificial Sequence: Synthetic oligonucleotide
auccggucacaaccaaucu

SEQ ID NO: 1642597 - RNA, 19 nt, Artificial Sequence
  Description of Artificial Sequence: Synthetic oligonucleotide
uuacaccgccucaguauaa

SEQ ID NO: 1642598 - RNA, 19 nt, Artificial Sequence
  Description of Artificial Sequence: Synthetic oligonucleotide
aggaguccauuccucgccu

SEQ ID NO: 1642599 - RNA, 19 nt, Artificial Sequence
  Description of Artificial Sequence: Synthetic oligonucleotide
uccuucaauuugagggaau

SEQ ID NO: 1642600 - RNA, 19 nt, Artificial Sequence
  Description of Artificial Sequence: Synthetic oligonucleotide
cuuugaggcgcugcauggc

SEQ ID NO: 1642601 - RNA, 19 nt, Artificial Sequence
  Description of Artificial Sequence: Synthetic oligonucleotide
gguacuccgagggucagug

SEQ ID NO: 1642602 - RNA, 19 nt, Artificial Sequence
  Description of Artificial Sequence: Synthetic oligonucleotide
ccauaggcggcacacuccg

SEQ ID NO: 1642603 - RNA, 19 nt, Artificial Sequence
  Description of Artificial Sequence: Synthetic oligonucleotide
cugcagauaauuacuggcu

SEQ ID NO: 1642604 - RNA, 19 nt, Artificial Sequence
  Description of Artificial Sequence: Synthetic oligonucleotide
cucgcugcagauaauuacu

SEQ ID NO: 1642605 - RNA, 19 nt, Artificial Sequence
  Description of Artificial Sequence: Synthetic oligonucleotide
aggugaacacacgcuccac

SEQ ID NO: 1642606 - RNA, 19 nt, Artificial Sequence
  Description of Artificial Sequence: Synthetic oligonucleotide
accaaucuccccauuucca

SEQ ID NO: 1642607 - RNA, 19 nt, Artificial Sequence
  Description of Artificial Sequence: Synthetic oligonucleotide
ggcuaaugaagguuucaga

SEQ ID NO: 1642608 - RNA, 19 nt, Artificial Sequence
  Description of Artificial Sequence: Synthetic oligonucleotide
agauaauuacuggcuccca

SEQ ID NO: 1642609 - RNA, 19 nt, Artificial Sequence
  Description of Artificial Sequence: Synthetic oligonucleotide
ugaauucuugggguccuua

SEQ ID NO: 1642610 - RNA, 19 nt, Artificial Sequence
  Description of Artificial Sequence: Synthetic oligonucleotide
acuauccggucacaaccaa

SEQ ID NO: 1642611 - RNA, 19 nt, Artificial Sequence
  Description of Artificial Sequence: Synthetic oligonucleotide
ugaugucguucgaguguug

SEQ ID NO: 1642612 - RNA, 19 nt, Artificial Sequence
  Description of Artificial Sequence: Synthetic oligonucleotide
agugacuauccggucacaa

SEQ ID NO: 1642613 - RNA, 19 nt, Artificial Sequence
  Description of Artificial Sequence: Synthetic oligonucleotide
cgagggucagugaaggagg

SEQ ID NO: 1642614 - RNA, 19 nt, Artificial Sequence
  Description of Artificial Sequence: Synthetic oligonucleotide
gcacguagguacuccgagg

SEQ ID NO: 1642615 - RNA, 19 nt, Artificial Sequence
  Description of Artificial Sequence: Synthetic oligonucleotide
cgcggagcaagcaaugucc

SEQ ID NO: 1642616 - RNA, 19 nt, Artificial Sequence
  Description of Artificial Sequence: Synthetic oligonucleotide
cauuacaccgccucaguau

SEQ ID NO: 1642617 - RNA, 19 nt, Artificial Sequence
  Description of Artificial Sequence: Synthetic oligonucleotide
uacaauuccuggggucaca

SEQ ID NO: 1642618 - RNA, 19 nt, Artificial Sequence
  Description of Artificial Sequence: Synthetic oligonucleotide
aucuccccauuuccaaaga

SEQ ID NO: 1642619 - RNA, 19 nt, Artificial Sequence
  Description of Artificial Sequence: Synthetic oligonucleotide
gccgcgacacucuuccagg

SEQ ID NO: 1642620 - RNA, 19 nt, Artificial Sequence
  Description of Artificial Sequence: Synthetic oligonucleotide
guucggggauguuggcugc

SEQ ID NO: 1642621 - RNA, 19 nt, Artificial Sequence
  Description of Artificial Sequence: Synthetic oligonucleotide
ccauuccucgccuacccgc

SEQ ID NO: 1642622 - RNA, 19 nt, Artificial Sequence
  Description of Artificial Sequence: Synthetic oligonucleotide
cuggaagccccggccaacg

SEQ ID NO: 1642623 - RNA, 19 nt, Artificial Sequence
  Description of Artificial Sequence: Synthetic oligonucleotide
augucguucgaguguugaa

SEQ ID NO: 1642624 - RNA, 19 nt, Artificial Sequence
  Description of Artificial Sequence: Synthetic oligonucleotide
aaacgugaucucagggcau

SEQ ID NO: 1642625 - RNA, 19 nt, Artificial Sequence
  Description of Artificial Sequence: Synthetic oligonucleotide
ugcccgcuaaaggacaguc

SEQ ID NO: 1642626 - RNA, 19 nt, Artificial Sequence
  Description of Artificial Sequence: Synthetic oligonucleotide
gauccaggucacgcagcgg

SEQ ID NO: 1642627 - RNA, 19 nt, Artificial Sequence
  Description of Artificial Sequence: Synthetic oligonucleotide
guagguacuccgaggguca

SEQ ID NO: 1642628 - RNA, 19 nt, Artificial Sequence
  Description of Artificial Sequence: Synthetic oligonucleotide
uauggccgcgacacucuuc

SEQ ID NO: 1642629 - RNA, 19 nt, Artificial Sequence
  Description of Artificial Sequence: Synthetic oligonucleotide
cauaggcggcacacuccgg

SEQ ID NO: 1642630 - RNA, 19 nt, Artificial Sequence
  Description of Artificial Sequence: Synthetic oligonucleotide
gaacauucucaagcgccuc

SEQ ID NO: 1642631 - RNA, 19 nt, Artificial Sequence
  Description of Artificial Sequence: Synthetic oligonucleotide
gcuaccugaucccauugga

SEQ ID NO: 1642632 - RNA, 19 nt, Artificial Sequence
  Description of Artificial Sequence: Synthetic oligonucleotide
caggucacgcagcgguggg

SEQ ID NO: 1642633 - RNA, 19 nt, Artificial Sequence
  Description of Artificial Sequence: Synthetic oligonucleotide
agccaaauaaggggacacu

SEQ ID NO: 1642634 - RNA, 19 nt, Artificial Sequence
  Description of Artificial Sequence: Synthetic oligonucleotide
cucguugaggagaacugua

SEQ ID NO: 1642635 - RNA, 19 nt, Artificial Sequence
  Description of Artificial Sequence: Synthetic oligonucleotide
uaggcggcacacuccggcu

SEQ ID NO: 1642636 - RNA, 19 nt, Artificial Sequence
  Description of Artificial Sequence: Synthetic oligonucleotide
acucagcacguagguacuc

SEQ ID NO: 1642637 - RNA, 19 nt, Artificial Sequence
  Description of Artificial Sequence: Synthetic oligonucleotide
uacugacuacucgcugcag

SEQ ID NO: 1642638 - RNA, 19 nt, Artificial Sequence
  Description of Artificial Sequence: Synthetic oligonucleotide
cuacaauuccuggggucac

SEQ ID NO: 1642639 - RNA, 19 nt, Artificial Sequence
  Description of Artificial Sequence: Synthetic oligonucleotide
cuccgcgagguuacucagc

SEQ ID NO: 1642640 - RNA, 19 nt, Artificial Sequence
  Description of Artificial Sequence: Synthetic oligonucleotide
acguagguacuccgagggu

SEQ ID NO: 1642641 - RNA, 19 nt, Artificial Sequence
  Description of Artificial Sequence: Synthetic oligonucleotide
ggccgcgacacucuuccag

SEQ ID NO: 1642642 - RNA, 19 nt, Artificial Sequence
  Description of Artificial Sequence: Synthetic oligonucleotide
uuauggccgcgacacucuu

SEQ ID NO: 1642643 - RNA, 19 nt, Artificial Sequence
  Description of Artificial Sequence: Synthetic oligonucleotide
cacacgaagcucaggguua

SEQ ID NO: 1642644 - RNA, 19 nt, Artificial Sequence
  Description of Artificial Sequence: Synthetic oligonucleotide
uggguccgcaggacucugc

SEQ ID NO: 1642645 - RNA, 19 nt, Artificial Sequence
  Description of Artificial Sequence: Synthetic oligonucleotide
gguuauccagaagacccac

SEQ ID NO: 1642646 - RNA, 19 nt, Artificial Sequence
  Description of Artificial Sequence: Synthetic oligonucleotide
agugaaggaggaguccauu

SEQ ID NO: 1642647 - RNA, 19 nt, Artificial Sequence
  Description of Artificial Sequence: Synthetic oligonucleotide
cagcaagcugaugucguuc

SEQ ID NO: 1642648 - RNA, 19 nt, Artificial Sequence
  Description of Artificial Sequence: Synthetic oligonucleotide
gguuucagaaucugccaua

SEQ ID NO: 1642649 - RNA, 19 nt, Artificial Sequence
  Description of Artificial Sequence: Synthetic oligonucleotide
uccgcaggacucugcgcac

SEQ ID NO: 1642650 - RNA, 19 nt, Artificial Sequence
  Description of Artificial Sequence: Synthetic oligonucleotide
acauccucguugaggagaa

SEQ ID NO: 1642651 - RNA, 19 nt, Artificial Sequence
  Description of Artificial Sequence: Synthetic oligonucleotide
uccgccacgcccgcggaga

SEQ ID NO: 1642652 - RNA, 19 nt, Artificial Sequence
  Description of Artificial Sequence: Synthetic oligonucleotide
agcgguggguccgcaggac

SEQ ID NO: 1642653 - RNA, 19 nt, Artificial Sequence
  Description of Artificial Sequence: Synthetic oligonucleotide
ccaacgcacgcgaacauga

SEQ ID NO: 1642654 - RNA, 19 nt, Artificial Sequence
  Description of Artificial Sequence: Synthetic oligonucleotide
gucacgcagcggugggucc

SEQ ID NO: 1642655 - RNA, 19 nt, Artificial Sequence
  Description of Artificial Sequence: Synthetic oligonucleotide
ccucauuacaccgccucag

SEQ ID NO: 1642656 - RNA, 19 nt, Artificial Sequence
  Description of Artificial Sequence: Synthetic oligonucleotide
acucucaacaagacuuauu

SEQ ID NO: 1642657 - RNA, 19 nt, Artificial Sequence
  Description of Artificial Sequence: Synthetic oligonucleotide
ugacuacucgcugcagaua

SEQ ID NO: 1642658 - RNA, 19 nt, Artificial Sequence
  Description of Artificial Sequence: Synthetic oligonucleotide
cugaucccauuggagucac

SEQ ID NO: 1642659 - RNA, 19 nt, Artificial Sequence
  Description of Artificial Sequence: Synthetic oligonucleotide
gccgucuccauagugguuc

SEQ ID NO: 1642660 - RNA, 19 nt, Artificial Sequence
  Description of Artificial Sequence: Synthetic oligonucleotide
cagcaguuauagccaaaga

SEQ ID NO: 1642661 - RNA, 19 nt, Artificial Sequence
  Description of Artificial Sequence: Synthetic oligonucleotide
aggucgauugcuaccugau

SEQ ID NO: 1642662 - RNA, 19 nt, Artificial Sequence
  Description of Artificial Sequence: Synthetic oligonucleotide
aucucagggcaugacucaa

SEQ ID NO: 1642663 - RNA, 19 nt, Artificial Sequence
  Description of Artificial Sequence: Synthetic oligonucleotide
guuacucagcacguaggua

SEQ ID NO: 1642664 - RNA, 19 nt, Artificial Sequence
  Description of Artificial Sequence: Synthetic oligonucleotide
ugaagccgaugguguucug

SEQ ID NO: 1642665 - RNA, 19 nt, Artificial Sequence
  Description of Artificial Sequence: Synthetic oligonucleotide
accacgcggagcaagcaau

SEQ ID NO: 1642666 - RNA, 19 nt, Artificial Sequence
  Description of Artificial Sequence: Synthetic oligonucleotide
gcacgcgaacaugaagccg

SEQ ID NO: 1642667 - RNA, 19 nt, Artificial Sequence
  Description of Artificial Sequence: Synthetic oligonucleotide
cugacuacucgcugcagau

SEQ ID NO: 1642668 - RNA, 19 nt, Artificial Sequence
  Description of Artificial Sequence: Synthetic oligonucleotide
gccacgcccgcggagaucc

SEQ ID NO: 1642669 - RNA, 19 nt, Artificial Sequence
  Description of Artificial Sequence: Synthetic oligonucleotide
gcuaccacgcggagcaagc

SEQ ID NO: 1642670 - RNA, 19 nt, Artificial Sequence
  Description of Artificial Sequence: Synthetic oligonucleotide
gguaagaugcgaacauucu

SEQ ID NO: 1642671 - RNA, 19 nt, Artificial Sequence
  Description of Artificial Sequence: Synthetic oligonucleotide
guugaauucuugggguccu

SEQ ID NO: 1642672 - RNA, 19 nt, Artificial Sequence
  Description of Artificial Sequence: Synthetic oligonucleotide
cugaggucgauugcuaccu

SEQ ID NO: 1642673 - RNA, 19 nt, Artificial Sequence
  Description of Artificial Sequence: Synthetic oligonucleotide
cugccauauaaagaacugu

SEQ ID NO: 1642674 - RNA, 19 nt, Artificial Sequence
  Description of Artificial Sequence: Synthetic oligonucleotide
cagcacguagguacuccga

SEQ ID NO: 1642675 - RNA, 19 nt, Artificial Sequence
  Description of Artificial Sequence: Synthetic oligonucleotide
ggugcccgcuaaaggacag

SEQ ID NO: 1642676 - RNA, 19 nt, Artificial Sequence
  Description of Artificial Sequence: Synthetic oligonucleotide
gggucagugaaggaggagu

SEQ ID NO: 1642677 - RNA, 19 nt, Artificial Sequence
  Description of Artificial Sequence: Synthetic oligonucleotide
cucauuacaccgccucagu

SEQ ID NO: 1642678 - RNA, 19 nt, Artificial Sequence
  Description of Artificial Sequence: Synthetic oligonucleotide
cguagguacuccgaggguc

SEQ ID NO: 1642679 - RNA, 19 nt, Artificial Sequence
  Description of Artificial Sequence: Synthetic oligonucleotide
caaccacaccuguggcauc

SEQ ID NO: 1642680 - RNA, 19 nt, Artificial Sequence
  Description of Artificial Sequence: Synthetic oligonucleotide
ugccgucuccauagugguu

SEQ ID NO: 1642681 - RNA, 19 nt, Artificial Sequence
  Description of Artificial Sequence: Synthetic oligonucleotide
cgcacgcgaacaugaagcc

SEQ ID NO: 1642682 - RNA, 19 nt, Artificial Sequence
  Description of Artificial Sequence: Synthetic oligonucleotide
ccaaucuccccauuuccaa

SEQ ID NO: 1642683 - RNA, 19 nt, Artificial Sequence
  Description of Artificial Sequence: Synthetic oligonucleotide
ccaggucacgcagcggugg

SEQ ID NO: 1642684 - RNA, 19 nt, Artificial Sequence
  Description of Artificial Sequence: Synthetic oligonucleotide
ccuccagcuaagaugauau

SEQ ID NO: 1642685 - RNA, 19 nt, Artificial Sequence
  Description of Artificial Sequence: Synthetic oligonucleotide
gcaugacucaaagcuaaaa

SEQ ID NO: 1642686 - RNA, 19 nt, Artificial Sequence
  Description of Artificial Sequence: Synthetic oligonucleotide
ccaggcuaaugaagguuuc

SEQ ID NO: 1642687 - RNA, 19 nt, Artificial Sequence
  Description of Artificial Sequence: Synthetic oligonucleotide
acgugaucucagggcauga

SEQ ID NO: 1642688 - RNA, 19 nt, Artificial Sequence
  Description of Artificial Sequence: Synthetic oligonucleotide
gcggagcaagcaauguccc

SEQ ID NO: 1642689 - RNA, 19 nt, Artificial Sequence
  Description of Artificial Sequence: Synthetic oligonucleotide
ucccaccuuacagcaguua

SEQ ID NO: 1642690 - RNA, 19 nt, Artificial Sequence
  Description of Artificial Sequence: Synthetic oligonucleotide
cugccucuacagucuuguc

SEQ ID NO: 1642691 - RNA, 19 nt, Artificial Sequence
  Description of Artificial Sequence: Synthetic oligonucleotide
cugccgucuccauaguggu

SEQ ID NO: 1642692 - RNA, 19 nt, Artificial Sequence
  Description of Artificial Sequence: Synthetic oligonucleotide
gcgacacucuuccaggcua

SEQ ID NO: 1642693 - RNA, 19 nt, Artificial Sequence
  Description of Artificial Sequence: Synthetic oligonucleotide
uguucuguucggggauguu

SEQ ID NO: 1642694 - RNA, 19 nt, Artificial Sequence
  Description of Artificial Sequence: Synthetic oligonucleotide
cccagugacuauccgguca

SEQ ID NO: 1642695 - RNA, 19 nt, Artificial Sequence
  Description of Artificial Sequence: Synthetic oligonucleotide
uccauccugugagcaccac

SEQ ID NO: 1642696 - RNA, 19 nt, Artificial Sequence
  Description of Artificial Sequence: Synthetic oligonucleotide
ggcggcacacuccggcuac

SEQ ID NO: 1642697 - RNA, 19 nt, Artificial Sequence
  Description of Artificial Sequence: Synthetic oligonucleotide
cuauccggucacaaccaau

SEQ ID NO: 1642698 - RNA, 19 nt, Artificial Sequence
  Description of Artificial Sequence: Synthetic oligonucleotide
aggcggcacacuccggcua

SEQ ID NO: 1642699 - RNA, 19 nt, Artificial Sequence
  Description of Artificial Sequence: Synthetic oligonucleotide
ccuccgcgagguuacucag

SEQ ID NO: 1642700 - RNA, 19 nt, Artificial Sequence
  Description of Artificial Sequence: Synthetic oligonucleotide
caacgcacgcgaacaugaa

SEQ ID NO: 1642701 - RNA, 19 nt, Artificial Sequence
  Description of Artificial Sequence: Synthetic oligonucleotide
ccgccucaguauaaaguuc

SEQ ID NO: 1642702 - RNA, 19 nt, Artificial Sequence
  Description of Artificial Sequence: Synthetic oligonucleotide
guacuccgagggucaguga

SEQ ID NO: 1642703 - RNA, 19 nt, Artificial Sequence
  Description of Artificial Sequence: Synthetic oligonucleotide
ggucacgcagcgguggguc

SEQ ID NO: 1642704 - RNA, 19 nt, Artificial Sequence
  Description of Artificial Sequence: Synthetic oligonucleotide
cuggauucggugcccgcua

SEQ ID NO: 1642705 - RNA, 19 nt, Artificial Sequence
  Description of Artificial Sequence: Synthetic oligonucleotide
gccaacgcacgcgaacaug

SEQ ID NO: 1642706 - RNA, 19 nt, Artificial Sequence
  Description of Artificial Sequence: Synthetic oligonucleotide
caccacucucaacaagacu

SEQ ID NO: 1642707 - RNA, 19 nt, Artificial Sequence
  Description of Artificial Sequence: Synthetic oligonucleotide
acuacucgcugcagauaau

SEQ ID NO: 1642708 - RNA, 19 nt, Artificial Sequence
  Description of Artificial Sequence: Synthetic oligonucleotide
gccucugcuaccacgcgga

SEQ ID NO: 1642709 - RNA, 19 nt, Artificial Sequence
  Description of Artificial Sequence: Synthetic oligonucleotide
cuacucgcugcagauaauu

SEQ ID NO: 1642710 - RNA, 19 nt, Artificial Sequence
  Description of Artificial Sequence: Synthetic oligonucleotide
cuaccacgcggagcaagca

SEQ ID NO: 1642711 - RNA, 19 nt, Artificial Sequence
  Description of Artificial Sequence: Synthetic oligonucleotide
cuuuuauggccgcgacacu

SEQ ID NO: 1642712 - RNA, 19 nt, Artificial Sequence
  Description of Artificial Sequence: Synthetic oligonucleotide
guagcacucuggauucggu

SEQ ID NO: 1642713 - RNA, 19 nt, Artificial Sequence
  Description of Artificial Sequence: Synthetic oligonucleotide
aggucacgcagcggugggu

SEQ ID NO: 1642714 - RNA, 19 nt, Artificial Sequence
  Description of Artificial Sequence: Synthetic oligonucleotide
cugaugucguucgaguguu

SEQ ID NO: 1642715 - RNA, 19 nt, Artificial Sequence
  Description of Artificial Sequence: Synthetic oligonucleotide
ccgcgacacucuuccaggc

SEQ ID NO: 1642716 - RNA, 19 nt, Artificial Sequence
  Description of Artificial Sequence: Synthetic oligonucleotide
uggccgcgacacucuucca

SEQ ID NO: 1642717 - RNA, 19 nt, Artificial Sequence
  Description of Artificial Sequence: Synthetic oligonucleotide
guggguccgcaggacucug

SEQ ID NO: 1642718 - RNA, 19 nt, Artificial Sequence
  Description of Artificial Sequence: Synthetic oligonucleotide
gugguaagaugcgaacauu

SEQ ID NO: 1642719 - RNA, 19 nt, Artificial Sequence
  Description of Artificial Sequence: Synthetic oligonucleotide
cagcgguggguccgcagga

SEQ ID NO: 1642720 - RNA, 19 nt, Artificial Sequence
  Description of Artificial Sequence: Synthetic oligonucleotide
ccugaucccauuggaguca

SEQ ID NO: 1642721 - RNA, 19 nt, Artificial Sequence
  Description of Artificial Sequence: Synthetic oligonucleotide
cgccucugcuaccacgcgg

SEQ ID NO: 1642722 - RNA, 19 nt, Artificial Sequence
  Description of Artificial Sequence: Synthetic oligonucleotide
ccggccaacgcacgcgaac

SEQ ID NO: 1642723 - RNA, 19 nt, Artificial Sequence
  Description of Artificial Sequence: Synthetic oligonucleotide
ccaccuuacagcaguuaua

SEQ ID NO: 1642724 - RNA, 19 nt, Artificial Sequence
  Description of Artificial Sequence: Synthetic oligonucleotide
caccuccgcgagguuacuc

SEQ ID NO: 1642725 - RNA, 19 nt, Artificial Sequence
  Description of Artificial Sequence: Synthetic oligonucleotide
cuccggcuaccccgcagca

SEQ ID NO: 1642726 - RNA, 19 nt, Artificial Sequence
  Description of Artificial Sequence: Synthetic oligonucleotide
ccacucucaacaagacuua

SEQ ID NO: 1642727 - RNA, 19 nt, Artificial Sequence
  Description of Artificial Sequence: Synthetic oligonucleotide
cauccucguugaggagaac

SEQ ID NO: 1642728 - RNA, 19 nt, Artificial Sequence
  Description of Artificial Sequence: Synthetic oligonucleotide
guguucuguucggggaugu

SEQ ID NO: 1642729 - RNA, 19 nt, Artificial Sequence
  Description of Artificial Sequence: Synthetic oligonucleotide
ggauucggugcccgcuaaa

SEQ ID NO: 1642730 - RNA, 19 nt, Artificial Sequence
  Description of Artificial Sequence: Synthetic oligonucleotide
gccccggccaacgcacgcg

SEQ ID NO: 1642731 - RNA, 19 nt, Artificial Sequence
  Description of Artificial Sequence: Synthetic oligonucleotide
caccaccuccgcgagguua

SEQ ID NO: 1642732 - RNA, 19 nt, Artificial Sequence
  Description of Artificial Sequence: Synthetic oligonucleotide
cgaacauucucaagcgccu

SEQ ID NO: 1642733 - RNA, 19 nt, Artificial Sequence
  Description of Artificial Sequence: Synthetic oligonucleotide
acgcgaacaugaagccgau

SEQ ID NO: 1642734 - RNA, 19 nt, Artificial Sequence
  Description of Artificial Sequence: Synthetic oligonucleotide
cagcgccuuggcgggcagg

SEQ ID NO: 1642735 - RNA, 19 nt, Artificial Sequence
  Description of Artificial Sequence: Synthetic oligonucleotide
cgugaucucagggcaugac

SEQ ID NO: 1642736 - RNA, 19 nt, Artificial Sequence
  Description of Artificial Sequence: Synthetic oligonucleotide
caauuccuggggucacaau

SEQ ID NO: 1642737 - RNA, 19 nt, Artificial Sequence
  Description of Artificial Sequence: Synthetic oligonucleotide
cggagauccaggucacgca

SEQ ID NO: 1642738 - RNA, 19 nt, Artificial Sequence
  Description of Artificial Sequence: Synthetic oligonucleotide
ccacacgaagcucaggguu

SEQ ID NO: 1642739 - RNA, 19 nt, Artificial Sequence
  Description of Artificial Sequence: Synthetic oligonucleotide
ccucugcuaccacgcggag

SEQ ID NO: 1642740 - RNA, 19 nt, Artificial Sequence
  Description of Artificial Sequence: Synthetic oligonucleotide
cgugguaagaugcgaacau

SEQ ID NO: 1642741 - RNA, 19 nt, Artificial Sequence
  Description of Artificial Sequence: Synthetic oligonucleotide
cagugacuauccggucaca

SEQ ID NO: 1642742 - RNA, 19 nt, Artificial Sequence
  Description of Artificial Sequence: Synthetic oligonucleotide
ggcugccucuacagucuug

SEQ ID NO: 1642743 - RNA, 19 nt, Artificial Sequence
  Description of Artificial Sequence: Synthetic oligonucleotide
cacgcggagcaagcaaugu

SEQ ID NO: 1642744 - RNA, 19 nt, Artificial Sequence
  Description of Artificial Sequence: Synthetic oligonucleotide
ccgcggagauccaggucac

SEQ ID NO: 1642745 - RNA, 19 nt, Artificial Sequence
  Description of Artificial Sequence: Synthetic oligonucleotide
gacacucuuccaggcuaau

SEQ ID NO: 1642746 - RNA, 19 nt, Artificial Sequence
  Description of Artificial Sequence: Synthetic oligonucleotide
cuccagcuaagaugauauu

SEQ ID NO: 1642747 - RNA, 19 nt, Artificial Sequence
  Description of Artificial Sequence: Synthetic oligonucleotide
gcgagguuacucagcacgu

SEQ ID NO: 1642748 - RNA, 19 nt, Artificial Sequence
  Description of Artificial Sequence: Synthetic oligonucleotide
cguucgaguguugaauucu

SEQ ID NO: 1642749 - RNA, 19 nt, Artificial Sequence
  Description of Artificial Sequence: Synthetic oligonucleotide
ccgcgagguuacucagcac

SEQ ID NO: 1642750 - RNA, 19 nt, Artificial Sequence
  Description of Artificial Sequence: Synthetic oligonucleotide
gguggguccgcaggacucu

SEQ ID NO: 1642751 - RNA, 19 nt, Artificial Sequence
  Description of Artificial Sequence: Synthetic oligonucleotide
caacugccgucuccauagu

SEQ ID NO: 1642752 - RNA, 19 nt, Artificial Sequence
  Description of Artificial Sequence: Synthetic oligonucleotide
ccauccugugagcaccacu

SEQ ID NO: 1642753 - RNA, 19 nt, Artificial Sequence
  Description of Artificial Sequence: Synthetic oligonucleotide
cacaaccaaucuccccauu

SEQ ID NO: 1642754 - RNA, 19 nt, Artificial Sequence
  Description of Artificial Sequence: Synthetic oligonucleotide
gcccgcggagauccagguc

SEQ ID NO: 1642755 - RNA, 19 nt, Artificial Sequence
  Description of Artificial Sequence: Synthetic oligonucleotide
gcgguggguccgcaggacu

SEQ ID NO: 1642756 - RNA, 19 nt, Artificial Sequence
  Description of Artificial Sequence: Synthetic oligonucleotide
cgacacucuuccaggcuaa

SEQ ID NO: 1642757 - RNA, 19 nt, Artificial Sequence
  Description of Artificial Sequence: Synthetic oligonucleotide
cggugcccgcuaaaggaca

SEQ ID NO: 1642758 - RNA, 19 nt, Artificial Sequence
  Description of Artificial Sequence: Synthetic oligonucleotide
ggccaacgcacgcgaacau

SEQ ID NO: 1642759 - RNA, 19 nt, Artificial Sequence
  Description of Artificial Sequence: Synthetic oligonucleotide
gugcccgcuaaaggacagu

SEQ ID NO: 1642760 - RNA, 19 nt, Artificial Sequence
  Description of Artificial Sequence: Synthetic oligonucleotide
cggccaacgcacgcgaaca

SEQ ID NO: 1642761 - RNA, 19 nt, Artificial Sequence
  Description of Artificial Sequence: Synthetic oligonucleotide
cggcacacuccggcuaccc

SEQ ID NO: 1642762 - RNA, 19 nt, Artificial Sequence
  Description of Artificial Sequence: Synthetic oligonucleotide
ggcgggcaggaaggugaac

SEQ ID NO: 1642763 - RNA, 19 nt, Artificial Sequence
  Description of Artificial Sequence: Synthetic oligonucleotide
ccccggccaacgcacgcga

SEQ ID NO: 1642764 - RNA, 19 nt, Artificial Sequence
  Description of Artificial Sequence: Synthetic oligonucleotide
cgcgaacaugaagccgaug

SEQ ID NO: 1642765 - RNA, 19 nt, Artificial Sequence
  Description of Artificial Sequence: Synthetic oligonucleotide
cugcuaccacgcggagcaa

SEQ ID NO: 1642766 - RNA, 19 nt, Artificial Sequence
  Description of Artificial Sequence: Synthetic oligonucleotide
ccgcaggacucugcgcaca

SEQ ID NO: 1642767 - RNA, 19 nt, Artificial Sequence
  Description of Artificial Sequence: Synthetic oligonucleotide
cggagcaagcaaugucccu

SEQ ID NO: 1642768 - RNA, 19 nt, Artificial Sequence
  Description of Artificial Sequence: Synthetic oligonucleotide
cgagguuacucagcacgua

SEQ ID NO: 1642769 - RNA, 19 nt, Artificial Sequence
  Description of Artificial Sequence: Synthetic oligonucleotide
gggcaacugccgucuccau

SEQ ID NO: 1642770 - RNA, 19 nt, Artificial Sequence
  Description of Artificial Sequence: Synthetic oligonucleotide
cccggccaacgcacgcgaa

SEQ ID NO: 1642771 - RNA, 19 nt, Artificial Sequence
  Description of Artificial Sequence: Synthetic oligonucleotide
gcgccuuggcgggcaggaa

SEQ ID NO: 1642772 - RNA, 19 nt, Artificial Sequence
  Description of Artificial Sequence: Synthetic oligonucleotide
cgcccgcggagauccaggu

SEQ ID NO: 1642773 - RNA, 19 nt, Artificial Sequence
  Description of Artificial Sequence: Synthetic oligonucleotide
cggggauguuggcugcuuu

SEQ ID NO: 1642774 - RNA, 19 nt, Artificial Sequence
  Description of Artificial Sequence: Synthetic oligonucleotide
cgccacgcccgcggagauc

SEQ ID NO: 1642775 - RNA, 19 nt, Artificial Sequence
  Description of Artificial Sequence: Synthetic oligonucleotide
ccaccuccgcgagguuacu

SEQ ID NO: 1642776 - RNA, 19 nt, Artificial Sequence
  Description of Artificial Sequence: Synthetic oligonucleotide
ccgccacgcccgcggagau

SEQ ID NO: 1642777 - RNA, 19 nt, Artificial Sequence
  Description of Artificial Sequence: Synthetic oligonucleotide
aagaaugagaaauacaagg

SEQ ID NO: 1642778 - RNA, 19 nt, Artificial Sequence
  Description of Artificial Sequence: Synthetic oligonucleotide
guuauuguaagacuggagg

SEQ ID NO: 1642779 - RNA, 19 nt, Artificial Sequence
  Description of Artificial Sequence: Synthetic oligonucleotide
uuuacauaaguaagcaagg

SEQ ID NO: 1642780 - RNA, 19 nt, Artificial Sequence
  Description of Artificial Sequence: Synthetic oligonucleotide
auauuagucuuguagaaag

SEQ ID NO: 1642781 - RNA, 19 nt, Artificial Sequence
  Description of Artificial Sequence: Synthetic oligonucleotide
aauuaaggacauaugcucc

SEQ ID NO: 1642782 - RNA, 19 nt, Artificial Sequence
  Description of Artificial Sequence: Synthetic oligonucleotide
cauaucaagacgcaggagg

SEQ ID NO: 1642783 - RNA, 19 nt, Artificial Sequence
  Description of Artificial Sequence: Synthetic oligonucleotide
gaaaacucaaggcucaccc

SEQ ID NO: 1642784 - RNA, 19 nt, Artificial Sequence
  Description of Artificial Sequence: Synthetic oligonucleotide
uaauuaaggacauaugcuc

SEQ ID NO: 1642785 - RNA, 19 nt, Artificial Sequence
  Description of Artificial Sequence: Synthetic oligonucleotide
uauuccacaacccuaugca

SEQ ID NO: 1642786 - RNA, 19 nt, Artificial Sequence
  Description of Artificial Sequence: Synthetic oligonucleotide
uucuguacaaccagaagug

SEQ ID NO: 1642787 - RNA, 19 nt, Artificial Sequence
  Description of Artificial Sequence: Synthetic oligonucleotide
uccucuauggcuugggagg

SEQ ID NO: 1642788 - RNA, 19 nt, Artificial Sequence
  Description of Artificial Sequence: Synthetic oligonucleotide
ugaguuuaaggcauuuggc

SEQ ID NO: 1642789 - RNA, 19 nt, Artificial Sequence
  Description of Artificial Sequence: Synthetic oligonucleotide
aaauguggccuccagagaa

SEQ ID NO: 1642790 - RNA, 19 nt, Artificial Sequence
  Description of Artificial Sequence: Synthetic oligonucleotide
uguacaaccagaagugcug

SEQ ID NO: 1642791 - RNA, 19 nt, Artificial Sequence
  Description of Artificial Sequence: Synthetic oligonucleotide
aaacucaaggcucacccug

SEQ ID NO: 1642792 - RNA, 19 nt, Artificial Sequence
  Description of Artificial Sequence: Synthetic oligonucleotide
acagauaguaaacaagcca

SEQ ID NO: 1642793 - RNA, 19 nt, Artificial Sequence
  Description of Artificial Sequence: Synthetic oligonucleotide
uagucagugauccaagugu

SEQ ID NO: 1642794 - RNA, 19 nt, Artificial Sequence
  Description of Artificial Sequence: Synthetic oligonucleotide
uggcauaucaagacgcagg

SEQ ID NO: 1642795 - RNA, 19 nt, Artificial Sequence
  Description of Artificial Sequence: Synthetic oligonucleotide
aagaucaauguccauuggu

SEQ ID NO: 1642796 - RNA, 19 nt, Artificial Sequence
  Description of Artificial Sequence: Synthetic oligonucleotide
ucggcugcaaacuuggugc

SEQ ID NO: 1642797 - RNA, 19 nt, Artificial Sequence
  Description of Artificial Sequence: Synthetic oligonucleotide
aaacuuggugcccaguucu

SEQ ID NO: 1642798 - RNA, 19 nt, Artificial Sequence
  Description of Artificial Sequence: Synthetic oligonucleotide
agcaagguccuccaagccc

SEQ ID NO: 1642799 - RNA, 19 nt, Artificial Sequence
  Description of Artificial Sequence: Synthetic oligonucleotide
auacaagaaugagaaauac

SEQ ID NO: 1642800 - RNA, 19 nt, Artificial Sequence
  Description of Artificial Sequence: Synthetic oligonucleotide
cagaguaagauccuucacc

SEQ ID NO: 1642801 - RNA, 19 nt, Artificial Sequence
  Description of Artificial Sequence: Synthetic oligonucleotide
uacauaaguaagcaagguc

SEQ ID NO: 1642802 - RNA, 19 nt, Artificial Sequence
  Description of Artificial Sequence: Synthetic oligonucleotide
ucaagucuggcuuucaguc

SEQ ID NO: 1642803 - RNA, 19 nt, Artificial Sequence
  Description of Artificial Sequence: Synthetic oligonucleotide
agagagaguccucuauggc

SEQ ID NO: 1642804 - RNA, 19 nt, Artificial Sequence
  Description of Artificial Sequence: Synthetic oligonucleotide
ugcaacuuuggguugggag

SEQ ID NO: 1642805 - RNA, 19 nt, Artificial Sequence
  Description of Artificial Sequence: Synthetic oligonucleotide
auaugcuccaccaaaauga

SEQ ID NO: 1642806 - RNA, 19 nt, Artificial Sequence
  Description of Artificial Sequence: Synthetic oligonucleotide
ugugggucaacaugcagcc

SEQ ID NO: 1642807 - RNA, 19 nt, Artificial Sequence
  Description of Artificial Sequence: Synthetic oligonucleotide
uccaauauaacugccuucu

SEQ ID NO: 1642808 - RNA, 19 nt, Artificial Sequence
  Description of Artificial Sequence: Synthetic oligonucleotide
uguccauuggucguuauug

SEQ ID NO: 1642809 - RNA, 19 nt, Artificial Sequence
  Description of Artificial Sequence: Synthetic oligonucleotide
gaucuugaacccgaggagg

SEQ ID NO: 1642810 - RNA, 19 nt, Artificial Sequence
  Description of Artificial Sequence: Synthetic oligonucleotide
ugaaccuuccaacuccagc

SEQ ID NO: 1642811 - RNA, 19 nt, Artificial Sequence
  Description of Artificial Sequence: Synthetic oligonucleotide
uauuagucuuguagaaagc

SEQ ID NO: 1642812 - RNA, 19 nt, Artificial Sequence
  Description of Artificial Sequence: Synthetic oligonucleotide
ucgguauacaguaccagcu

SEQ ID NO: 1642813 - RNA, 19 nt, Artificial Sequence
  Description of Artificial Sequence: Synthetic oligonucleotide
agaucaauguccauugguc

SEQ ID NO: 1642814 - RNA, 19 nt, Artificial Sequence
  Description of Artificial Sequence: Synthetic oligonucleotide
aacgaagugguggaaagca

SEQ ID NO: 1642815 - RNA, 19 nt, Artificial Sequence
  Description of Artificial Sequence: Synthetic oligonucleotide
aauauuagucuuguagaaa

SEQ ID NO: 1642816 - RNA, 19 nt, Artificial Sequence
  Description of Artificial Sequence: Synthetic oligonucleotide
cuuaugucaauguauucca

SEQ ID NO: 1642817 - RNA, 19 nt, Artificial Sequence
  Description of Artificial Sequence: Synthetic oligonucleotide
agauaguaaacaagccacc

SEQ ID NO: 1642818 - RNA, 19 nt, Artificial Sequence
  Description of Artificial Sequence: Synthetic oligonucleotide
ucaaggcucacccugcuuc

SEQ ID NO: 1642819 - RNA, 19 nt, Artificial Sequence
  Description of Artificial Sequence: Synthetic oligonucleotide
aacccuaugcauuucuuua

SEQ ID NO: 1642820 - RNA, 19 nt, Artificial Sequence
  Description of Artificial Sequence: Synthetic oligonucleotide
acagaguaagauccuucac

SEQ ID NO: 1642821 - RNA, 19 nt, Artificial Sequence
  Description of Artificial Sequence: Synthetic oligonucleotide
aaaacucaaggcucacccu

SEQ ID NO: 1642822 - RNA, 19 nt, Artificial Sequence
  Description of Artificial Sequence: Synthetic oligonucleotide
cauaugcuccaccaaaaug

SEQ ID NO: 1642823 - RNA, 19 nt, Artificial Sequence
  Description of Artificial Sequence: Synthetic oligonucleotide
acccuaugcauuucuuuac

SEQ ID NO: 1642824 - RNA, 19 nt, Artificial Sequence
  Description of Artificial Sequence: Synthetic oligonucleotide
uuggacagggaucuugaac

SEQ ID NO: 1642825 - RNA, 19 nt, Artificial Sequence
  Description of Artificial Sequence: Synthetic oligonucleotide
uggcuguuaauacuggguc

SEQ ID NO: 1642826 - RNA, 19 nt, Artificial Sequence
  Description of Artificial Sequence: Synthetic oligonucleotide
aagguccaauauaacugcc

SEQ ID NO: 1642827 - RNA, 19 nt, Artificial Sequence
  Description of Artificial Sequence: Synthetic oligonucleotide
uuggucguuauuguaagac

SEQ ID NO: 1642828 - RNA, 19 nt, Artificial Sequence
  Description of Artificial Sequence: Synthetic oligonucleotide
aagagauggcauaucaaga

SEQ ID NO: 1642829 - RNA, 19 nt, Artificial Sequence
  Description of Artificial Sequence: Synthetic oligonucleotide
guauuccacaacccuaugc

SEQ ID NO: 1642830 - RNA, 19 nt, Artificial Sequence
  Description of Artificial Sequence: Synthetic oligonucleotide
aagagcaauuuggaaaacu

SEQ ID NO: 1642831 - RNA, 19 nt, Artificial Sequence
  Description of Artificial Sequence: Synthetic oligonucleotide
aaaccuaccuggcucuggu

SEQ ID NO: 1642832 - RNA, 19 nt, Artificial Sequence
  Description of Artificial Sequence: Synthetic oligonucleotide
aucaagacgcaggaggagg

SEQ ID NO: 1642833 - RNA, 19 nt, Artificial Sequence
  Description of Artificial Sequence: Synthetic oligonucleotide
agaaccucaucccauuagu

SEQ ID NO: 1642834 - RNA, 19 nt, Artificial Sequence
  Description of Artificial Sequence: Synthetic oligonucleotide
aacaagccaccuuuuaauu

SEQ ID NO: 1642835 - RNA, 19 nt, Artificial Sequence
  Description of Artificial Sequence: Synthetic oligonucleotide
ucagucuacagaguaagau

SEQ ID NO: 1642836 - RNA, 19 nt, Artificial Sequence
  Description of Artificial Sequence: Synthetic oligonucleotide
uaaggcauuuggcccauga

SEQ ID NO: 1642837 - RNA, 19 nt, Artificial Sequence
  Description of Artificial Sequence: Synthetic oligonucleotide
uuacauaaguaagcaaggu

SEQ ID NO: 1642838 - RNA, 19 nt, Artificial Sequence
  Description of Artificial Sequence: Synthetic oligonucleotide
uuguaagacuggaggaaca

SEQ ID NO: 1642839 - RNA, 19 nt, Artificial Sequence
  Description of Artificial Sequence: Synthetic oligonucleotide
gucgguauacaguaccagc

SEQ ID NO: 1642840 - RNA, 19 nt, Artificial Sequence
  Description of Artificial Sequence: Synthetic oligonucleotide
aagaccgugcuucucucgu

SEQ ID NO: 1642841 - RNA, 19 nt, Artificial Sequence
  Description of Artificial Sequence: Synthetic oligonucleotide
ugagaaauacaagggcccc

SEQ ID NO: 1642842 - RNA, 19 nt, Artificial Sequence
  Description of Artificial Sequence: Synthetic oligonucleotide
uugguugggucaccgaaga

SEQ ID NO: 1642843 - RNA, 19 nt, Artificial Sequence
  Description of Artificial Sequence: Synthetic oligonucleotide
uaaggacauaugcuccacc

SEQ ID NO: 1642844 - RNA, 19 nt, Artificial Sequence
  Description of Artificial Sequence: Synthetic oligonucleotide
uucgaaauguggccuccag

SEQ ID NO: 1642845 - RNA, 19 nt, Artificial Sequence
  Description of Artificial Sequence: Synthetic oligonucleotide
cucgucgguauacaguacc

SEQ ID NO: 1642846 - RNA, 19 nt, Artificial Sequence
  Description of Artificial Sequence: Synthetic oligonucleotide
caaguccgaacuugguugg

SEQ ID NO: 1642847 - RNA, 19 nt, Artificial Sequence
  Description of Artificial Sequence: Synthetic oligonucleotide
ggagagaccacuucaaguc

SEQ ID NO: 1642848 - RNA, 19 nt, Artificial Sequence
  Description of Artificial Sequence: Synthetic oligonucleotide
guuuaaggcauuuggccca

SEQ ID NO: 1642849 - RNA, 19 nt, Artificial Sequence
  Description of Artificial Sequence: Synthetic oligonucleotide
cuagucagugauccaagug

SEQ ID NO: 1642850 - RNA, 19 nt, Artificial Sequence
  Description of Artificial Sequence: Synthetic oligonucleotide
uugguacuggcagauaaga

SEQ ID NO: 1642851 - RNA, 19 nt, Artificial Sequence
  Description of Artificial Sequence: Synthetic oligonucleotide
ucucucgucgguauacagu

SEQ ID NO: 1642852 - RNA, 19 nt, Artificial Sequence
  Description of Artificial Sequence: Synthetic oligonucleotide
uaauacugggucucugggu

SEQ ID NO: 1642853 - RNA, 19 nt, Artificial Sequence
  Description of Artificial Sequence: Synthetic oligonucleotide
ugggagagaccacuucaag

SEQ ID NO: 1642854 - RNA, 19 nt, Artificial Sequence
  Description of Artificial Sequence: Synthetic oligonucleotide
ccaccuuuuaauuaaggac

SEQ ID NO: 1642855 - RNA, 19 nt, Artificial Sequence
  Description of Artificial Sequence: Synthetic oligonucleotide
gucguuauuguaagacugg

SEQ ID NO: 1642856 - RNA, 19 nt, Artificial Sequence
  Description of Artificial Sequence: Synthetic oligonucleotide
gacaccaaguccgaacuug

SEQ ID NO: 1642857 - RNA, 19 nt, Artificial Sequence
  Description of Artificial Sequence: Synthetic oligonucleotide
cuacccugaaccuuccaac

SEQ ID NO: 1642858 - RNA, 19 nt, Artificial Sequence
  Description of Artificial Sequence: Synthetic oligonucleotide
ucgaaauguggccuccaga

SEQ ID NO: 1642859 - RNA, 19 nt, Artificial Sequence
  Description of Artificial Sequence: Synthetic oligonucleotide
aucggcugcaaacuuggug

SEQ ID NO: 1642860 - RNA, 19 nt, Artificial Sequence
  Description of Artificial Sequence: Synthetic oligonucleotide
ccuuaugucaauguauucc

SEQ ID NO: 1642861 - RNA, 19 nt, Artificial Sequence
  Description of Artificial Sequence: Synthetic oligonucleotide
uggucguuauuguaagacu

SEQ ID NO: 1642862 - RNA, 19 nt, Artificial Sequence
  Description of Artificial Sequence: Synthetic oligonucleotide
gaugaguuuaaggcauuug

SEQ ID NO: 1642863 - RNA, 19 nt, Artificial Sequence
  Description of Artificial Sequence: Synthetic oligonucleotide
ucccugugaacgaaguggu

SEQ ID NO: 1642864 - RNA, 19 nt, Artificial Sequence
  Description of Artificial Sequence: Synthetic oligonucleotide
uuagccccuuucaagcugu

SEQ ID NO: 1642865 - RNA, 19 nt, Artificial Sequence
  Description of Artificial Sequence: Synthetic oligonucleotide
auacaguaccagcucuguc

SEQ ID NO: 1642866 - RNA, 19 nt, Artificial Sequence
  Description of Artificial Sequence: Synthetic oligonucleotide
ucuagucagugauccaagu

SEQ ID NO: 1642867 - RNA, 19 nt, Artificial Sequence
  Description of Artificial Sequence: Synthetic oligonucleotide
aaggguuagccccuuucaa

SEQ ID NO: 1642868 - RNA, 19 nt, Artificial Sequence
  Description of Artificial Sequence: Synthetic oligonucleotide
uccaaagguccaauauaac

SEQ ID NO: 1642869 - RNA, 19 nt, Artificial Sequence
  Description of Artificial Sequence: Synthetic oligonucleotide
acaguaccagcucugucca

SEQ ID NO: 1642870 - RNA, 19 nt, Artificial Sequence
  Description of Artificial Sequence: Synthetic oligonucleotide
cauuaguccucuccccucc

SEQ ID NO: 1642871 - RNA, 19 nt, Artificial Sequence
  Description of Artificial Sequence: Synthetic oligonucleotide
uucucucgucgguauacag

SEQ ID NO: 1642872 - RNA, 19 nt, Artificial Sequence
  Description of Artificial Sequence: Synthetic oligonucleotide
auaaguaagcaagguccuc

SEQ ID NO: 1642873 - RNA, 19 nt, Artificial Sequence
  Description of Artificial Sequence: Synthetic oligonucleotide
ccagugugggucaacaugc

SEQ ID NO: 1642874 - RNA, 19 nt, Artificial Sequence
  Description of Artificial Sequence: Synthetic oligonucleotide
uguggccuccagagaaagg

SEQ ID NO: 1642875 - RNA, 19 nt, Artificial Sequence
  Description of Artificial Sequence: Synthetic oligonucleotide
ucguuauuguaagacugga

SEQ ID NO: 1642876 - RNA, 19 nt, Artificial Sequence
  Description of Artificial Sequence: Synthetic oligonucleotide
ucgucgguauacaguacca

SEQ ID NO: 1642877 - RNA, 19 nt, Artificial Sequence
  Description of Artificial Sequence: Synthetic oligonucleotide
uguuaauacugggucucug

SEQ ID NO: 1642878 - RNA, 19 nt, Artificial Sequence
  Description of Artificial Sequence: Synthetic oligonucleotide
auaucaagacgcaggagga

SEQ ID NO: 1642879 - RNA, 19 nt, Artificial Sequence
  Description of Artificial Sequence: Synthetic oligonucleotide
ggucguuauuguaagacug

SEQ ID NO: 1642880 - RNA, 19 nt, Artificial Sequence
  Description of Artificial Sequence: Synthetic oligonucleotide
gagcaauuuggaaaacuca

SEQ ID NO: 1642881 - RNA, 19 nt, Artificial Sequence
  Description of Artificial Sequence: Synthetic oligonucleotide
guuuggggcaaggccaucg

SEQ ID NO: 1642882 - RNA, 19 nt, Artificial Sequence
  Description of Artificial Sequence: Synthetic oligonucleotide
uaucaagacgcaggaggag

SEQ ID NO: 1642883 - RNA, 19 nt, Artificial Sequence
  Description of Artificial Sequence: Synthetic oligonucleotide
aggaggguugggugucucc

SEQ ID NO: 1642884 - RNA, 19 nt, Artificial Sequence
  Description of Artificial Sequence: Synthetic oligonucleotide
ccaaguccgaacuugguug

SEQ ID NO: 1642885 - RNA, 19 nt, Artificial Sequence
  Description of Artificial Sequence: Synthetic oligonucleotide
caaccuuuccuaccagggc

SEQ ID NO: 1642886 - RNA, 19 nt, Artificial Sequence
  Description of Artificial Sequence: Synthetic oligonucleotide
cgaaauguggccuccagag

SEQ ID NO: 1642887 - RNA, 19 nt, Artificial Sequence
  Description of Artificial Sequence: Synthetic oligonucleotide
acaagccaccuuuuaauua

SEQ ID NO: 1642888 - RNA, 19 nt, Artificial Sequence
  Description of Artificial Sequence: Synthetic oligonucleotide
uucuccgauccaguguggg

SEQ ID NO: 1642889 - RNA, 19 nt, Artificial Sequence
  Description of Artificial Sequence: Synthetic oligonucleotide
gugugugcugccugaagcc

SEQ ID NO: 1642890 - RNA, 19 nt, Artificial Sequence
  Description of Artificial Sequence: Synthetic oligonucleotide
gucaccgaagaucaauguc

SEQ ID NO: 1642891 - RNA, 19 nt, Artificial Sequence
  Description of Artificial Sequence: Synthetic oligonucleotide
cagaaccucaucccauuag

SEQ ID NO: 1642892 - RNA, 19 nt, Artificial Sequence
  Description of Artificial Sequence: Synthetic oligonucleotide
gacagggaucuugaacccg

SEQ ID NO: 1642893 - RNA, 19 nt, Artificial Sequence
  Description of Artificial Sequence: Synthetic oligonucleotide
caaggcucacccugcuucg

SEQ ID NO: 1642894 - RNA, 19 nt, Artificial Sequence
  Description of Artificial Sequence: Synthetic oligonucleotide
gauaguaaacaagccaccu

SEQ ID NO: 1642895 - RNA, 19 nt, Artificial Sequence
  Description of Artificial Sequence: Synthetic oligonucleotide
ucccauuaguccucucccc

SEQ ID NO: 1642896 - RNA, 19 nt, Artificial Sequence
  Description of Artificial Sequence: Synthetic oligonucleotide
gaggguugggugucucccg

SEQ ID NO: 1642897 - RNA, 19 nt, Artificial Sequence
  Description of Artificial Sequence: Synthetic oligonucleotide
auauaacugccuucugcau

SEQ ID NO: 1642898 - RNA, 19 nt, Artificial Sequence
  Description of Artificial Sequence: Synthetic oligonucleotide
gcuucuccgauccagugug

SEQ ID NO: 1642899 - RNA, 19 nt, Artificial Sequence
  Description of Artificial Sequence: Synthetic oligonucleotide
aggguugggugucucccgg

SEQ ID NO: 1642900 - RNA, 19 nt, Artificial Sequence
  Description of Artificial Sequence: Synthetic oligonucleotide
uuaaggacauaugcuccac

SEQ ID NO: 1642901 - RNA, 19 nt, Artificial Sequence
  Description of Artificial Sequence: Synthetic oligonucleotide
ccugugaacgaaguggugg

SEQ ID NO: 1642902 - RNA, 19 nt, Artificial Sequence
  Description of Artificial Sequence: Synthetic oligonucleotide
auacccugguuucuuucug

SEQ ID NO: 1642903 - RNA, 19 nt, Artificial Sequence
  Description of Artificial Sequence: Synthetic oligonucleotide
auacaagggccccucaaua

SEQ ID NO: 1642904 - RNA, 19 nt, Artificial Sequence
  Description of Artificial Sequence: Synthetic oligonucleotide
gaacgaagugguggaaagc

SEQ ID NO: 1642905 - RNA, 19 nt, Artificial Sequence
  Description of Artificial Sequence: Synthetic oligonucleotide
ugcccuacccugaaccuuc

SEQ ID NO: 1642906 - RNA, 19 nt, Artificial Sequence
  Description of Artificial Sequence: Synthetic oligonucleotide
caaacuuggugcccaguuc

SEQ ID NO: 1642907 - RNA, 19 nt, Artificial Sequence
  Description of Artificial Sequence: Synthetic oligonucleotide
guauacaguaccagcucug

SEQ ID NO: 1642908 - RNA, 19 nt, Artificial Sequence
  Description of Artificial Sequence: Synthetic oligonucleotide
cuucgaguccauuggccac

SEQ ID NO: 1642909 - RNA, 19 nt, Artificial Sequence
  Description of Artificial Sequence: Synthetic oligonucleotide
auuggucguuauuguaaga

SEQ ID NO: 1642910 - RNA, 19 nt, Artificial Sequence
  Description of Artificial Sequence: Synthetic oligonucleotide
acaccaaguccgaacuugg

SEQ ID NO: 1642911 - RNA, 19 nt, Artificial Sequence
  Description of Artificial Sequence: Synthetic oligonucleotide
accaaguccgaacuugguu

SEQ ID NO: 1642912 - RNA, 19 nt, Artificial Sequence
  Description of Artificial Sequence: Synthetic oligonucleotide
aacuugguugggucaccga

SEQ ID NO: 1642913 - RNA, 19 nt, Artificial Sequence
  Description of Artificial Sequence: Synthetic oligonucleotide
gaguaagauccuucaccac

SEQ ID NO: 1642914 - RNA, 19 nt, Artificial Sequence
  Description of Artificial Sequence: Synthetic oligonucleotide
ugaggaagaccgugcuucu

SEQ ID NO: 1642915 - RNA, 19 nt, Artificial Sequence
  Description of Artificial Sequence: Synthetic oligonucleotide
cucucgucgguauacagua

SEQ ID NO: 1642916 - RNA, 19 nt, Artificial Sequence
  Description of Artificial Sequence: Synthetic oligonucleotide
uggguugggagagaccacu

SEQ ID NO: 1642917 - RNA, 19 nt, Artificial Sequence
  Description of Artificial Sequence: Synthetic oligonucleotide
acgaagugguggaaagcac

SEQ ID NO: 1642918 - RNA, 19 nt, Artificial Sequence
  Description of Artificial Sequence: Synthetic oligonucleotide
uccgauccaguguggguca

SEQ ID NO: 1642919 - RNA, 19 nt, Artificial Sequence
  Description of Artificial Sequence: Synthetic oligonucleotide
gauggcauaucaagacgca

SEQ ID NO: 1642920 - RNA, 19 nt, Artificial Sequence
  Description of Artificial Sequence: Synthetic oligonucleotide
agaaaggaccccagaaccu

SEQ ID NO: 1642921 - RNA, 19 nt, Artificial Sequence
  Description of Artificial Sequence: Synthetic oligonucleotide
aaguccgaacuugguuggg

SEQ ID NO: 1642922 - RNA, 19 nt, Artificial Sequence
  Description of Artificial Sequence: Synthetic oligonucleotide
guccaauauaacugccuuc

SEQ ID NO: 1642923 - RNA, 19 nt, Artificial Sequence
  Description of Artificial Sequence: Synthetic oligonucleotide
gauccagugugggucaaca

SEQ ID NO: 1642924 - RNA, 19 nt, Artificial Sequence
  Description of Artificial Sequence: Synthetic oligonucleotide
aaccuugguacuggcagau

SEQ ID NO: 1642925 - RNA, 19 nt, Artificial Sequence
  Description of Artificial Sequence: Synthetic oligonucleotide
uucgaguccauuggccaca

SEQ ID NO: 1642926 - RNA, 19 nt, Artificial Sequence
  Description of Artificial Sequence: Synthetic oligonucleotide
gaaauacaagggccccuca

SEQ ID NO: 1642927 - RNA, 19 nt, Artificial Sequence
  Description of Artificial Sequence: Synthetic oligonucleotide
uuaguccucuccccuccac

SEQ ID NO: 1642928 - RNA, 19 nt, Artificial Sequence
  Description of Artificial Sequence: Synthetic oligonucleotide
ugugugcugccugaagccu

SEQ ID NO: 1642929 - RNA, 19 nt, Artificial Sequence
  Description of Artificial Sequence: Synthetic oligonucleotide
gaaccucaucccauuaguc

SEQ ID NO: 1642930 - RNA, 19 nt, Artificial Sequence
  Description of Artificial Sequence: Synthetic oligonucleotide
agagaccacuucaagucug

SEQ ID NO: 1642931 - RNA, 19 nt, Artificial Sequence
  Description of Artificial Sequence: Synthetic oligonucleotide
ccaucggcugcaaacuugg

SEQ ID NO: 1642932 - RNA, 19 nt, Artificial Sequence
  Description of Artificial Sequence: Synthetic oligonucleotide
cugugaacgaaguggugga

SEQ ID NO: 1642933 - RNA, 19 nt, Artificial Sequence
  Description of Artificial Sequence: Synthetic oligonucleotide
acaagggccccucaauauu

SEQ ID NO: 1642934 - RNA, 19 nt, Artificial Sequence
  Description of Artificial Sequence: Synthetic oligonucleotide
agaccgugcuucucucguc

SEQ ID NO: 1642935 - RNA, 19 nt, Artificial Sequence
  Description of Artificial Sequence: Synthetic oligonucleotide
ucuccgauccagugugggu

SEQ ID NO: 1642936 - RNA, 19 nt, Artificial Sequence
  Description of Artificial Sequence: Synthetic oligonucleotide
ccugaagccuuaaagaaaa

SEQ ID NO: 1642937 - RNA, 19 nt, Artificial Sequence
  Description of Artificial Sequence: Synthetic oligonucleotide
gagaguccucuauggcuug

SEQ ID NO: 1642938 - RNA, 19 nt, Artificial Sequence
  Description of Artificial Sequence: Synthetic oligonucleotide
gacgcaggaggaggguugg

SEQ ID NO: 1642939 - RNA, 19 nt, Artificial Sequence
  Description of Artificial Sequence: Synthetic oligonucleotide
cuccgauccaguguggguc

SEQ ID NO: 1642940 - RNA, 19 nt, Artificial Sequence
  Description of Artificial Sequence: Synthetic oligonucleotide
ggacauaugcuccaccaaa

SEQ ID NO: 1642941 - RNA, 19 nt, Artificial Sequence
  Description of Artificial Sequence: Synthetic oligonucleotide
accuuuuaauuaaggacau

SEQ ID NO: 1642942 - RNA, 19 nt, Artificial Sequence
  Description of Artificial Sequence: Synthetic oligonucleotide
gaguccucuauggcuuggg

SEQ ID NO: 1642943 - RNA, 19 nt, Artificial Sequence
  Description of Artificial Sequence: Synthetic oligonucleotide
cccugcuucgaaauguggc

SEQ ID NO: 1642944 - RNA, 19 nt, Artificial Sequence
  Description of Artificial Sequence: Synthetic oligonucleotide
ugggucaccgaagaucaau

SEQ ID NO: 1642945 - RNA, 19 nt, Artificial Sequence
  Description of Artificial Sequence: Synthetic oligonucleotide
caaggguuagccccuuuca

SEQ ID NO: 1642946 - RNA, 19 nt, Artificial Sequence
  Description of Artificial Sequence: Synthetic oligonucleotide
aagcacccuuggcucucac

SEQ ID NO: 1642947 - RNA, 19 nt, Artificial Sequence
  Description of Artificial Sequence: Synthetic oligonucleotide
aagggccccucaauauuag

SEQ ID NO: 1642948 - RNA, 19 nt, Artificial Sequence
  Description of Artificial Sequence: Synthetic oligonucleotide
ggacacaaccuuuccuacc

SEQ ID NO: 1642949 - RNA, 19 nt, Artificial Sequence
  Description of Artificial Sequence: Synthetic oligonucleotide
caaaccuaccuggcucugg

SEQ ID NO: 1642950 - RNA, 19 nt, Artificial Sequence
  Description of Artificial Sequence: Synthetic oligonucleotide
uucaugcccuacccugaac

SEQ ID NO: 1642951 - RNA, 19 nt, Artificial Sequence
  Description of Artificial Sequence: Synthetic oligonucleotide
caccuucgaguccauuggc

SEQ ID NO: 1642952 - RNA, 19 nt, Artificial Sequence
  Description of Artificial Sequence: Synthetic oligonucleotide
gaggaggcuaaagcugccc

SEQ ID NO: 1642953 - RNA, 19 nt, Artificial Sequence
  Description of Artificial Sequence: Synthetic oligonucleotide
caccgaagaucaaugucca

SEQ ID NO: 1642954 - RNA, 19 nt, Artificial Sequence
  Description of Artificial Sequence: Synthetic oligonucleotide
agacacugaaacaaaccua

SEQ ID NO: 1642955 - RNA, 19 nt, Artificial Sequence
  Description of Artificial Sequence: Synthetic oligonucleotide
aggcuucuccgauccagug

SEQ ID NO: 1642956 - RNA, 19 nt, Artificial Sequence
  Description of Artificial Sequence: Synthetic oligonucleotide
aagugguggaaagcacccu

SEQ ID NO: 1642957 - RNA, 19 nt, Artificial Sequence
  Description of Artificial Sequence: Synthetic oligonucleotide
aacuuggugcccaguucug

SEQ ID NO: 1642958 - RNA, 19 nt, Artificial Sequence
  Description of Artificial Sequence: Synthetic oligonucleotide
cuucuccgauccagugugg

SEQ ID NO: 1642959 - RNA, 19 nt, Artificial Sequence
  Description of Artificial Sequence: Synthetic oligonucleotide
agguccaauauaacugccu

SEQ ID NO: 1642960 - RNA, 19 nt, Artificial Sequence
  Description of Artificial Sequence: Synthetic oligonucleotide
accgugcuucucucgucgg

SEQ ID NO: 1642961 - RNA, 19 nt, Artificial Sequence
  Description of Artificial Sequence: Synthetic oligonucleotide
aauguggccuccagagaaa

SEQ ID NO: 1642962 - RNA, 19 nt, Artificial Sequence
  Description of Artificial Sequence: Synthetic oligonucleotide
cccugaaccuuccaacucc

SEQ ID NO: 1642963 - RNA, 19 nt, Artificial Sequence
  Description of Artificial Sequence: Synthetic oligonucleotide
auuaguccucuccccucca

SEQ ID NO: 1642964 - RNA, 19 nt, Artificial Sequence
  Description of Artificial Sequence: Synthetic oligonucleotide
gaccacuucaagucuggcu

SEQ ID NO: 1642965 - RNA, 19 nt, Artificial Sequence
  Description of Artificial Sequence: Synthetic oligonucleotide
auuuggcccaugaggaaga

SEQ ID NO: 1642966 - RNA, 19 nt, Artificial Sequence
  Description of Artificial Sequence: Synthetic oligonucleotide
uuggguugggagagaccac

SEQ ID NO: 1642967 - RNA, 19 nt, Artificial Sequence
  Description of Artificial Sequence: Synthetic oligonucleotide
cuguacaaccagaagugcu

SEQ ID NO: 1642968 - RNA, 19 nt, Artificial Sequence
  Description of Artificial Sequence: Synthetic oligonucleotide
uuuaaggcauuuggcccau

SEQ ID NO: 1642969 - RNA, 19 nt, Artificial Sequence
  Description of Artificial Sequence: Synthetic oligonucleotide
cugaaccuuccaacuccag

SEQ ID NO: 1642970 - RNA, 19 nt, Artificial Sequence
  Description of Artificial Sequence: Synthetic oligonucleotide
ggacagggaucuugaaccc

SEQ ID NO: 1642971 - RNA, 19 nt, Artificial Sequence
  Description of Artificial Sequence: Synthetic oligonucleotide
guccgaacuugguuggguc

SEQ ID NO: 1642972 - RNA, 19 nt, Artificial Sequence
  Description of Artificial Sequence: Synthetic oligonucleotide
ugucgggaccugugugugc

SEQ ID NO: 1642973 - RNA, 19 nt, Artificial Sequence
  Description of Artificial Sequence: Synthetic oligonucleotide
agaguccucuauggcuugg

SEQ ID NO: 1642974 - RNA, 19 nt, Artificial Sequence
  Description of Artificial Sequence: Synthetic oligonucleotide
ccaaagguccaauauaacu

SEQ ID NO: 1642975 - RNA, 19 nt, Artificial Sequence
  Description of Artificial Sequence: Synthetic oligonucleotide
gaacaucuggaggaggcua

SEQ ID NO: 1642976 - RNA, 19 nt, Artificial Sequence
  Description of Artificial Sequence: Synthetic oligonucleotide
agucagugauccaagugua

SEQ ID NO: 1642977 - RNA, 19 nt, Artificial Sequence
  Description of Artificial Sequence: Synthetic oligonucleotide
cguuauuguaagacuggag

SEQ ID NO: 1642978 - RNA, 19 nt, Artificial Sequence
  Description of Artificial Sequence: Synthetic oligonucleotide
auguccauuggucguuauu

SEQ ID NO: 1642979 - RNA, 19 nt, Artificial Sequence
  Description of Artificial Sequence: Synthetic oligonucleotide
aagcugucucagaaacacu

SEQ ID NO: 1642980 - RNA, 19 nt, Artificial Sequence
  Description of Artificial Sequence: Synthetic oligonucleotide
cugcaucuagucagugauc

SEQ ID NO: 1642981 - RNA, 19 nt, Artificial Sequence
  Description of Artificial Sequence: Synthetic oligonucleotide
aguccgaacuugguugggu

SEQ ID NO: 1642982 - RNA, 19 nt, Artificial Sequence
  Description of Artificial Sequence: Synthetic oligonucleotide
caagggccccucaauauua

SEQ ID NO: 1642983 - RNA, 19 nt, Artificial Sequence
  Description of Artificial Sequence: Synthetic oligonucleotide
aggccaucggcugcaaacu

SEQ ID NO: 1642984 - RNA, 19 nt, Artificial Sequence
  Description of Artificial Sequence: Synthetic oligonucleotide
gucagugauccaaguguac

SEQ ID NO: 1642985 - RNA, 19 nt, Artificial Sequence
  Description of Artificial Sequence: Synthetic oligonucleotide
aacuuuggguugggagaga

SEQ ID NO: 1642986 - RNA, 19 nt, Artificial Sequence
  Description of Artificial Sequence: Synthetic oligonucleotide
caccuuaugucaauguauu

SEQ ID NO: 1642987 - RNA, 19 nt, Artificial Sequence
  Description of Artificial Sequence: Synthetic oligonucleotide
gugaacgaagugguggaaa

SEQ ID NO: 1642988 - RNA, 19 nt, Artificial Sequence
  Description of Artificial Sequence: Synthetic oligonucleotide
cauacccugguuucuuucu

SEQ ID NO: 1642989 - RNA, 19 nt, Artificial Sequence
  Description of Artificial Sequence: Synthetic oligonucleotide
gggucaccgaagaucaaug

SEQ ID NO: 1642990 - RNA, 19 nt, Artificial Sequence
  Description of Artificial Sequence: Synthetic oligonucleotide
ugcugccugaagccuuaaa

SEQ ID NO: 1642991 - RNA, 19 nt, Artificial Sequence
  Description of Artificial Sequence: Synthetic oligonucleotide
aaccuaccuggcucugguu

SEQ ID NO: 1642992 - RNA, 19 nt, Artificial Sequence
  Description of Artificial Sequence: Synthetic oligonucleotide
auccagugugggucaacau

SEQ ID NO: 1642993 - RNA, 19 nt, Artificial Sequence
  Description of Artificial Sequence: Synthetic oligonucleotide
cucuauggcuugggagggg

SEQ ID NO: 1642994 - RNA, 19 nt, Artificial Sequence
  Description of Artificial Sequence: Synthetic oligonucleotide
agggccccucaauauuagu

SEQ ID NO: 1642995 - RNA, 19 nt, Artificial Sequence
  Description of Artificial Sequence: Synthetic oligonucleotide
cugucgggaccugugugug

SEQ ID NO: 1642996 - RNA, 19 nt, Artificial Sequence
  Description of Artificial Sequence: Synthetic oligonucleotide
cuaccagggcccaagcccu

SEQ ID NO: 1642997 - RNA, 19 nt, Artificial Sequence
  Description of Artificial Sequence: Synthetic oligonucleotide
gcuucucucgucgguauac

SEQ ID NO: 1642998 - RNA, 19 nt, Artificial Sequence
  Description of Artificial Sequence: Synthetic oligonucleotide
ccuucgaguccauuggcca

SEQ ID NO: 1642999 - RNA, 19 nt, Artificial Sequence
  Description of Artificial Sequence: Synthetic oligonucleotide
ggccccucaauauuagucu

SEQ ID NO: 1643000 - RNA, 19 nt, Artificial Sequence
  Description of Artificial Sequence: Synthetic oligonucleotide
caagcccuggcuguuaaua

SEQ ID NO: 1643001 - RNA, 19 nt, Artificial Sequence
  Description of Artificial Sequence: Synthetic oligonucleotide
gcauaucaagacgcaggag

SEQ ID NO: 1643002 - RNA, 19 nt, Artificial Sequence
  Description of Artificial Sequence: Synthetic oligonucleotide
ccucuauggcuugggaggg

SEQ ID NO: 1643003 - RNA, 19 nt, Artificial Sequence
  Description of Artificial Sequence: Synthetic oligonucleotide
gguccaauauaacugccuu

SEQ ID NO: 1643004 - RNA, 19 nt, Artificial Sequence
  Description of Artificial Sequence: Synthetic oligonucleotide
ccaauauaacugccuucug

SEQ ID NO: 1643005 - RNA, 19 nt, Artificial Sequence
  Description of Artificial Sequence: Synthetic oligonucleotide
ggacuugguuccaaagguc

SEQ ID NO: 1643006 - RNA, 19 nt, Artificial Sequence
  Description of Artificial Sequence: Synthetic oligonucleotide
cagcucuguccaccgguug

SEQ ID NO: 1643007 - RNA, 19 nt, Artificial Sequence
  Description of Artificial Sequence: Synthetic oligonucleotide
ccccucaauauuagucuug

SEQ ID NO: 1643008 - RNA, 19 nt, Artificial Sequence
  Description of Artificial Sequence: Synthetic oligonucleotide
gguugggugucucccggca

SEQ ID NO: 1643009 - RNA, 19 nt, Artificial Sequence
  Description of Artificial Sequence: Synthetic oligonucleotide
acuggugguuuggggcaag

SEQ ID NO: 1643010 - RNA, 19 nt, Artificial Sequence
  Description of Artificial Sequence: Synthetic oligonucleotide
acaacccuaugcauuucuu

SEQ ID NO: 1643011 - RNA, 19 nt, Artificial Sequence
  Description of Artificial Sequence: Synthetic oligonucleotide
cacaacccuaugcauuucu

SEQ ID NO: 1643012 - RNA, 19 nt, Artificial Sequence
  Description of Artificial Sequence: Synthetic oligonucleotide
cuucaugcccuacccugaa

SEQ ID NO: 1643013 - RNA, 19 nt, Artificial Sequence
  Description of Artificial Sequence: Synthetic oligonucleotide
ccauuaguccucuccccuc

SEQ ID NO: 1643014 - RNA, 19 nt, Artificial Sequence
  Description of Artificial Sequence: Synthetic oligonucleotide
cagugugggucaacaugca

SEQ ID NO: 1643015 - RNA, 19 nt, Artificial Sequence
  Description of Artificial Sequence: Synthetic oligonucleotide
gcuucgaaauguggccucc

SEQ ID NO: 1643016 - RNA, 19 nt, Artificial Sequence
  Description of Artificial Sequence: Synthetic oligonucleotide
ucgggaccugugugugcug

SEQ ID NO: 1643017 - RNA, 19 nt, Artificial Sequence
  Description of Artificial Sequence: Synthetic oligonucleotide
ugcaaggguuagccccuuu

SEQ ID NO: 1643018 - RNA, 19 nt, Artificial Sequence
  Description of Artificial Sequence: Synthetic oligonucleotide
caugcccuacccugaaccu

SEQ ID NO: 1643019 - RNA, 19 nt, Artificial Sequence
  Description of Artificial Sequence: Synthetic oligonucleotide
gcuuucagucucagagcag

SEQ ID NO: 1643020 - RNA, 19 nt, Artificial Sequence
  Description of Artificial Sequence: Synthetic oligonucleotide
gccaucggcugcaaacuug

SEQ ID NO: 1643021 - RNA, 19 nt, Artificial Sequence
  Description of Artificial Sequence: Synthetic oligonucleotide
cuucucucgucgguauaca

SEQ ID NO: 1643022 - RNA, 19 nt, Artificial Sequence
  Description of Artificial Sequence: Synthetic oligonucleotide
cagccugaacaugcugaug

SEQ ID NO: 1643023 - RNA, 19 nt, Artificial Sequence
  Description of Artificial Sequence: Synthetic oligonucleotide
caacccuaugcauuucuuu

SEQ ID NO: 1643024 - RNA, 19 nt, Artificial Sequence
  Description of Artificial Sequence: Synthetic oligonucleotide
ccaccccugcuucaugccc

SEQ ID NO: 1643025 - RNA, 19 nt, Artificial Sequence
  Description of Artificial Sequence: Synthetic oligonucleotide
cuuggucccugugaacgaa

SEQ ID NO: 1643026 - RNA, 19 nt, Artificial Sequence
  Description of Artificial Sequence: Synthetic oligonucleotide
cuucgaaauguggccucca

SEQ ID NO: 1643027 - RNA, 19 nt, Artificial Sequence
  Description of Artificial Sequence: Synthetic oligonucleotide
agccccuuucaagcugucu

SEQ ID NO: 1643028 - RNA, 19 nt, Artificial Sequence
  Description of Artificial Sequence: Synthetic oligonucleotide
gccugaagccuuaaagaaa

SEQ ID NO: 1643029 - RNA, 19 nt, Artificial Sequence
  Description of Artificial Sequence: Synthetic oligonucleotide
augcccuacccugaaccuu

SEQ ID NO: 1643030 - RNA, 19 nt, Artificial Sequence
  Description of Artificial Sequence: Synthetic oligonucleotide
gcaucuagucagugaucca

SEQ ID NO: 1643031 - RNA, 19 nt, Artificial Sequence
  Description of Artificial Sequence: Synthetic oligonucleotide
aggaugaguuuaaggcauu

SEQ ID NO: 1643032 - RNA, 19 nt, Artificial Sequence
  Description of Artificial Sequence: Synthetic oligonucleotide
ggaaagcacccuuggcucu

SEQ ID NO: 1643033 - RNA, 19 nt, Artificial Sequence
  Description of Artificial Sequence: Synthetic oligonucleotide
ccugaaccuuccaacucca

SEQ ID NO: 1643034 - RNA, 19 nt, Artificial Sequence
  Description of Artificial Sequence: Synthetic oligonucleotide
ccuacccugaaccuuccaa

SEQ ID NO: 1643035 - RNA, 19 nt, Artificial Sequence
  Description of Artificial Sequence: Synthetic oligonucleotide
cgguauacaguaccagcuc

SEQ ID NO: 1643036 - RNA, 19 nt, Artificial Sequence
  Description of Artificial Sequence: Synthetic oligonucleotide
uagccccuuucaagcuguc

SEQ ID NO: 1643037 - RNA, 19 nt, Artificial Sequence
  Description of Artificial Sequence: Synthetic oligonucleotide
gucgggaccugugugugcu

SEQ ID NO: 1643038 - RNA, 19 nt, Artificial Sequence
  Description of Artificial Sequence: Synthetic oligonucleotide
ggguugggugucucccggc

SEQ ID NO: 1643039 - RNA, 19 nt, Artificial Sequence
  Description of Artificial Sequence: Synthetic oligonucleotide
ccaccuuaugucaauguau

SEQ ID NO: 1643040 - RNA, 19 nt, Artificial Sequence
  Description of Artificial Sequence: Synthetic oligonucleotide
ggcugcaaacuuggugccc

SEQ ID NO: 1643041 - RNA, 19 nt, Artificial Sequence
  Description of Artificial Sequence: Synthetic oligonucleotide
gcugucgggaccugugugu

SEQ ID NO: 1643042 - RNA, 19 nt, Artificial Sequence
  Description of Artificial Sequence: Synthetic oligonucleotide
gggcugcaacuuuggguug

SEQ ID NO: 1643043 - RNA, 19 nt, Artificial Sequence
  Description of Artificial Sequence: Synthetic oligonucleotide
cccugugaacgaaguggug

SEQ ID NO: 1643044 - RNA, 19 nt, Artificial Sequence
  Description of Artificial Sequence: Synthetic oligonucleotide
cuguuaauacugggucucu

SEQ ID NO: 1643045 - RNA, 19 nt, Artificial Sequence
  Description of Artificial Sequence: Synthetic oligonucleotide
ccgaagaucaauguccauu

SEQ ID NO: 1643046 - RNA, 19 nt, Artificial Sequence
  Description of Artificial Sequence: Synthetic oligonucleotide
cccucaauauuagucuugu

SEQ ID NO: 1643047 - RNA, 19 nt, Artificial Sequence
  Description of Artificial Sequence: Synthetic oligonucleotide
cccgaggaggcuucuccga

SEQ ID NO: 1643048 - RNA, 19 nt, Artificial Sequence
  Description of Artificial Sequence: Synthetic oligonucleotide
ggaugaguuuaaggcauuu

SEQ ID NO: 1643049 - RNA, 19 nt, Artificial Sequence
  Description of Artificial Sequence: Synthetic oligonucleotide
gggauggcugucgggaccu

SEQ ID NO: 1643050 - RNA, 19 nt, Artificial Sequence
  Description of Artificial Sequence: Synthetic oligonucleotide
caucggcugcaaacuuggu

SEQ ID NO: 1643051 - RNA, 19 nt, Artificial Sequence
  Description of Artificial Sequence: Synthetic oligonucleotide
ggucaacaugcagccaccu

SEQ ID NO: 1643052 - RNA, 19 nt, Artificial Sequence
  Description of Artificial Sequence: Synthetic oligonucleotide
gugugcugccugaagccuu

SEQ ID NO: 1643053 - RNA, 19 nt, Artificial Sequence
  Description of Artificial Sequence: Synthetic oligonucleotide
ccacaacccuaugcauuuc

SEQ ID NO: 1643054 - RNA, 19 nt, Artificial Sequence
  Description of Artificial Sequence: Synthetic oligonucleotide
cgauccagugugggucaac

SEQ ID NO: 1643055 - RNA, 19 nt, Artificial Sequence
  Description of Artificial Sequence: Synthetic oligonucleotide
cccuacccugaaccuucca

SEQ ID NO: 1643056 - RNA, 19 nt, Artificial Sequence
  Description of Artificial Sequence: Synthetic oligonucleotide
ccgaggaggcuucuccgau

SEQ ID NO: 1643057 - RNA, 19 nt, Artificial Sequence
  Description of Artificial Sequence: Synthetic oligonucleotide
uguaucaaauauuuguucg

SEQ ID NO: 1643058 - RNA, 19 nt, Artificial Sequence
  Description of Artificial Sequence: Synthetic oligonucleotide
aacuaaagguccuucaaac

SEQ ID NO: 1643059 - RNA, 19 nt, Artificial Sequence
  Description of Artificial Sequence: Synthetic oligonucleotide
aaccuucaaaucuaggacc

SEQ ID NO: 1643060 - RNA, 19 nt, Artificial Sequence
  Description of Artificial Sequence: Synthetic oligonucleotide
uucaaauuguucuugacag

SEQ ID NO: 1643061 - RNA, 19 nt, Artificial Sequence
  Description of Artificial Sequence: Synthetic oligonucleotide
auuaaauugguccuugagg

SEQ ID NO: 1643062 - RNA, 19 nt, Artificial Sequence
  Description of Artificial Sequence: Synthetic oligonucleotide
agguccauuaaauuggucc

SEQ ID NO: 1643063 - RNA, 19 nt, Artificial Sequence
  Description of Artificial Sequence: Synthetic oligonucleotide
caauaucaaaucuugaugc

SEQ ID NO: 1643064 - RNA, 19 nt, Artificial Sequence
  Description of Artificial Sequence: Synthetic oligonucleotide
uuaaauugguccuugaggu

SEQ ID NO: 1643065 - RNA, 19 nt, Artificial Sequence
  Description of Artificial Sequence: Synthetic oligonucleotide
aaaucgaggaccuggcugg

SEQ ID NO: 1643066 - RNA, 19 nt, Artificial Sequence
  Description of Artificial Sequence: Synthetic oligonucleotide
uacaaucaaaagaagaugu

SEQ ID NO: 1643067 - RNA, 19 nt, Artificial Sequence
  Description of Artificial Sequence: Synthetic oligonucleotide
uaaagaaugacaaccuuca

SEQ ID NO: 1643068 - RNA, 19 nt, Artificial Sequence
  Description of Artificial Sequence: Synthetic oligonucleotide
uugauaaucuucauaacac

SEQ ID NO: 1643069 - RNA, 19 nt, Artificial Sequence
  Description of Artificial Sequence: Synthetic oligonucleotide
uucauaacacgauggaugg

SEQ ID NO: 1643070 - RNA, 19 nt, Artificial Sequence
  Description of Artificial Sequence: Synthetic oligonucleotide
uuuccgucuacucuaauag

SEQ ID NO: 1643071 - RNA, 19 nt, Artificial Sequence
  Description of Artificial Sequence: Synthetic oligonucleotide
caacauaauguucaaaggg

SEQ ID NO: 1643072 - RNA, 19 nt, Artificial Sequence
  Description of Artificial Sequence: Synthetic oligonucleotide
cuugcuguagcaaagggcc

SEQ ID NO: 1643073 - RNA, 19 nt, Artificial Sequence
  Description of Artificial Sequence: Synthetic oligonucleotide
uguacaaucaaaagaagau

SEQ ID NO: 1643074 - RNA, 19 nt, Artificial Sequence
  Description of Artificial Sequence: Synthetic oligonucleotide
aaaauaguguccugaagcu

SEQ ID NO: 1643075 - RNA, 19 nt, Artificial Sequence
  Description of Artificial Sequence: Synthetic oligonucleotide
agaagauguauuuugauaa

SEQ ID NO: 1643076 - RNA, 19 nt, Artificial Sequence
  Description of Artificial Sequence: Synthetic oligonucleotide
ugauaaucuucauaacacg

SEQ ID NO: 1643077 - RNA, 19 nt, Artificial Sequence
  Description of Artificial Sequence: Synthetic oligonucleotide
augauuaucaggauaugcc

SEQ ID NO: 1643078 - RNA, 19 nt, Artificial Sequence
  Description of Artificial Sequence: Synthetic oligonucleotide
uguccuucaaaucucagac

SEQ ID NO: 1643079 - RNA, 19 nt, Artificial Sequence
  Description of Artificial Sequence: Synthetic oligonucleotide
ucaacuggugucuugcugg

SEQ ID NO: 1643080 - RNA, 19 nt, Artificial Sequence
  Description of Artificial Sequence: Synthetic oligonucleotide
acuaaagguccuucaaacc

SEQ ID NO: 1643081 - RNA, 19 nt, Artificial Sequence
  Description of Artificial Sequence: Synthetic oligonucleotide
caucaaaccuuaaagaaug

SEQ ID NO: 1643082 - RNA, 19 nt, Artificial Sequence
  Description of Artificial Sequence: Synthetic oligonucleotide
uaucaaaucuugaugcuug

SEQ ID NO: 1643083 - RNA, 19 nt, Artificial Sequence
  Description of Artificial Sequence: Synthetic oligonucleotide
cuucauaacacgauggaug

SEQ ID NO: 1643084 - RNA, 19 nt, Artificial Sequence
  Description of Artificial Sequence: Synthetic oligonucleotide
uccuuguugaacuaaaggu

SEQ ID NO: 1643085 - RNA, 19 nt, Artificial Sequence
  Description of Artificial Sequence: Synthetic oligonucleotide
ucucagaccagcuacagac

SEQ ID NO: 1643086 - RNA, 19 nt, Artificial Sequence
  Description of Artificial Sequence: Synthetic oligonucleotide
uuuccuacugacauuggag

SEQ ID NO: 1643087 - RNA, 19 nt, Artificial Sequence
  Description of Artificial Sequence: Synthetic oligonucleotide
caggauaugccuuaggaag

SEQ ID NO: 1643088 - RNA, 19 nt, Artificial Sequence
  Description of Artificial Sequence: Synthetic oligonucleotide
ugacuugagaugauuauca

SEQ ID NO: 1643089 - RNA, 19 nt, Artificial Sequence
  Description of Artificial Sequence: Synthetic oligonucleotide
gacaauguucaacauaaug

SEQ ID NO: 1643090 - RNA, 19 nt, Artificial Sequence
  Description of Artificial Sequence: Synthetic oligonucleotide
agguguaucaaauauuugu

SEQ ID NO: 1643091 - RNA, 19 nt, Artificial Sequence
  Description of Artificial Sequence: Synthetic oligonucleotide
uuaacuuugggacuuucac

SEQ ID NO: 1643092 - RNA, 19 nt, Artificial Sequence
  Description of Artificial Sequence: Synthetic oligonucleotide
uuuacauccaccugacuug

SEQ ID NO: 1643093 - RNA, 19 nt, Artificial Sequence
  Description of Artificial Sequence: Synthetic oligonucleotide
ugcacguucuuccaaauca

SEQ ID NO: 1643094 - RNA, 19 nt, Artificial Sequence
  Description of Artificial Sequence: Synthetic oligonucleotide
aauaucaaaucuugaugcu

SEQ ID NO: 1643095 - RNA, 19 nt, Artificial Sequence
  Description of Artificial Sequence: Synthetic oligonucleotide
aagguucccaccuaguuga

SEQ ID NO: 1643096 - RNA, 19 nt, Artificial Sequence
  Description of Artificial Sequence: Synthetic oligonucleotide
caugagguccauuaaauug

SEQ ID NO: 1643097 - RNA, 19 nt, Artificial Sequence
  Description of Artificial Sequence: Synthetic oligonucleotide
aucaaaccuugguugaacc

SEQ ID NO: 1643098 - RNA, 19 nt, Artificial Sequence
  Description of Artificial Sequence: Synthetic oligonucleotide
acaauguucaacauaaugu

SEQ ID NO: 1643099 - RNA, 19 nt, Artificial Sequence
  Description of Artificial Sequence: Synthetic oligonucleotide
aacauaauguucaaagggu

SEQ ID NO: 1643100 - RNA, 19 nt, Artificial Sequence
  Description of Artificial Sequence: Synthetic oligonucleotide
ucaaaggguuuucaacugg

SEQ ID NO: 1643101 - RNA, 19 nt, Artificial Sequence
  Description of Artificial Sequence: Synthetic oligonucleotide
ugggcaauaucaaaucuug

SEQ ID NO: 1643102 - RNA, 19 nt, Artificial Sequence
  Description of Artificial Sequence: Synthetic oligonucleotide
ucaaaccugaucccaaccc

SEQ ID NO: 1643103 - RNA, 19 nt, Artificial Sequence
  Description of Artificial Sequence: Synthetic oligonucleotide
gguccuucaaaccugaucc

SEQ ID NO: 1643104 - RNA, 19 nt, Artificial Sequence
  Description of Artificial Sequence: Synthetic oligonucleotide
auuuacauccaccugacuu

SEQ ID NO: 1643105 - RNA, 19 nt, Artificial Sequence
  Description of Artificial Sequence: Synthetic oligonucleotide
ugauuaucaggauaugccu

SEQ ID NO: 1643106 - RNA, 19 nt, Artificial Sequence
  Description of Artificial Sequence: Synthetic oligonucleotide
ugagguguaucaaauauuu

SEQ ID NO: 1643107 - RNA, 19 nt, Artificial Sequence
  Description of Artificial Sequence: Synthetic oligonucleotide
gauugggaaauucugguuc

SEQ ID NO: 1643108 - RNA, 19 nt, Artificial Sequence
  Description of Artificial Sequence: Synthetic oligonucleotide
cauuggaguagguaaauug

SEQ ID NO: 1643109 - RNA, 19 nt, Artificial Sequence
  Description of Artificial Sequence: Synthetic oligonucleotide
ugagguacaccaucaaacc

SEQ ID NO: 1643110 - RNA, 19 nt, Artificial Sequence
  Description of Artificial Sequence: Synthetic oligonucleotide
aggguuuucaacugguguc

SEQ ID NO: 1643111 - RNA, 19 nt, Artificial Sequence
  Description of Artificial Sequence: Synthetic oligonucleotide
gaugauuaucaggauaugc

SEQ ID NO: 1643112 - RNA, 19 nt, Artificial Sequence
  Description of Artificial Sequence: Synthetic oligonucleotide
ucucaacugcuccagcugg

SEQ ID NO: 1643113 - RNA, 19 nt, Artificial Sequence
  Description of Artificial Sequence: Synthetic oligonucleotide
caaaucucagaccagcuac

SEQ ID NO: 1643114 - RNA, 19 nt, Artificial Sequence
  Description of Artificial Sequence: Synthetic oligonucleotide
uaagguucccaccuaguug

SEQ ID NO: 1643115 - RNA, 19 nt, Artificial Sequence
  Description of Artificial Sequence: Synthetic oligonucleotide
gaugguaaaucuuuccguc

SEQ ID NO: 1643116 - RNA, 19 nt, Artificial Sequence
  Description of Artificial Sequence: Synthetic oligonucleotide
uuuagcagccuccugaguu

SEQ ID NO: 1643117 - RNA, 19 nt, Artificial Sequence
  Description of Artificial Sequence: Synthetic oligonucleotide
caucaaaucuuugagguac

SEQ ID NO: 1643118 - RNA, 19 nt, Artificial Sequence
  Description of Artificial Sequence: Synthetic oligonucleotide
augagguccauuaaauugg

SEQ ID NO: 1643119 - RNA, 19 nt, Artificial Sequence
  Description of Artificial Sequence: Synthetic oligonucleotide
caaaccuuaaagaaugaca

SEQ ID NO: 1643120 - RNA, 19 nt, Artificial Sequence
  Description of Artificial Sequence: Synthetic oligonucleotide
aucaaaagaagauguauuu

SEQ ID NO: 1643121 - RNA, 19 nt, Artificial Sequence
  Description of Artificial Sequence: Synthetic oligonucleotide
aaaucuaggaccaccuuga

SEQ ID NO: 1643122 - RNA, 19 nt, Artificial Sequence
  Description of Artificial Sequence: Synthetic oligonucleotide
ugagaugauuaucaggaua

SEQ ID NO: 1643123 - RNA, 19 nt, Artificial Sequence
  Description of Artificial Sequence: Synthetic oligonucleotide
aaauaguguccugaagcuc

SEQ ID NO: 1643124 - RNA, 19 nt, Artificial Sequence
  Description of Artificial Sequence: Synthetic oligonucleotide
uacaccaucaaaccuuggu

SEQ ID NO: 1643125 - RNA, 19 nt, Artificial Sequence
  Description of Artificial Sequence: Synthetic oligonucleotide
cagguggaucauuauaugg

SEQ ID NO: 1643126 - RNA, 19 nt, Artificial Sequence
  Description of Artificial Sequence: Synthetic oligonucleotide
ugacagauuucacaacucu

SEQ ID NO: 1643127 - RNA, 19 nt, Artificial Sequence
  Description of Artificial Sequence: Synthetic oligonucleotide
ucaaaccucauuccaacuc

SEQ ID NO: 1643128 - RNA, 19 nt, Artificial Sequence
  Description of Artificial Sequence: Synthetic oligonucleotide
caccuaguugauuaugucc

SEQ ID NO: 1643129 - RNA, 19 nt, Artificial Sequence
  Description of Artificial Sequence: Synthetic oligonucleotide
uuaggaagaccuccugaag

SEQ ID NO: 1643130 - RNA, 19 nt, Artificial Sequence
  Description of Artificial Sequence: Synthetic oligonucleotide
caaaccucauuccaacucc

SEQ ID NO: 1643131 - RNA, 19 nt, Artificial Sequence
  Description of Artificial Sequence: Synthetic oligonucleotide
aguacuguucaaauuguuc

SEQ ID NO: 1643132 - RNA, 19 nt, Artificial Sequence
  Description of Artificial Sequence: Synthetic oligonucleotide
aguagguaaauugccaaag

SEQ ID NO: 1643133 - RNA, 19 nt, Artificial Sequence
  Description of Artificial Sequence: Synthetic oligonucleotide
ugaacuaaagguccuucaa

SEQ ID NO: 1643134 - RNA, 19 nt, Artificial Sequence
  Description of Artificial Sequence: Synthetic oligonucleotide
ucagaccagcuacagacug

SEQ ID NO: 1643135 - RNA, 19 nt, Artificial Sequence
  Description of Artificial Sequence: Synthetic oligonucleotide
caaccuucaaaucuaggac

SEQ ID NO: 1643136 - RNA, 19 nt, Artificial Sequence
  Description of Artificial Sequence: Synthetic oligonucleotide
uucaaaucgaggaccuggc

SEQ ID NO: 1643137 - RNA, 19 nt, Artificial Sequence
  Description of Artificial Sequence: Synthetic oligonucleotide
caaaucuaggaccaccuug

SEQ ID NO: 1643138 - RNA, 19 nt, Artificial Sequence
  Description of Artificial Sequence: Synthetic oligonucleotide
uuugagguacaccaucaaa

SEQ ID NO: 1643139 - RNA, 19 nt, Artificial Sequence
  Description of Artificial Sequence: Synthetic oligonucleotide
caaaccucauuccaccucc

SEQ ID NO: 1643140 - RNA, 19 nt, Artificial Sequence
  Description of Artificial Sequence: Synthetic oligonucleotide
aaucuaggaccaccuugac

SEQ ID NO: 1643141 - RNA, 19 nt, Artificial Sequence
  Description of Artificial Sequence: Synthetic oligonucleotide
auuauguccuucaaaucuc

SEQ ID NO: 1643142 - RNA, 19 nt, Artificial Sequence
  Description of Artificial Sequence: Synthetic oligonucleotide
agguggaucauuauauggg

SEQ ID NO: 1643143 - RNA, 19 nt, Artificial Sequence
  Description of Artificial Sequence: Synthetic oligonucleotide
uuuugauaaucuucauaac

SEQ ID NO: 1643144 - RNA, 19 nt, Artificial Sequence
  Description of Artificial Sequence: Synthetic oligonucleotide
uucaaaccugaucccaacc

SEQ ID NO: 1643145 - RNA, 19 nt, Artificial Sequence
  Description of Artificial Sequence: Synthetic oligonucleotide
uuauaugggcaauaucaaa

SEQ ID NO: 1643146 - RNA, 19 nt, Artificial Sequence
  Description of Artificial Sequence: Synthetic oligonucleotide
caauucucaggccaccucc

SEQ ID NO: 1643147 - RNA, 19 nt, Artificial Sequence
  Description of Artificial Sequence: Synthetic oligonucleotide
uagguaaauugccaaaguu

SEQ ID NO: 1643148 - RNA, 19 nt, Artificial Sequence
  Description of Artificial Sequence: Synthetic oligonucleotide
uugaacuaaagguccuuca

SEQ ID NO: 1643149 - RNA, 19 nt, Artificial Sequence
  Description of Artificial Sequence: Synthetic oligonucleotide
guacaaucaaaagaagaug

SEQ ID NO: 1643150 - RNA, 19 nt, Artificial Sequence
  Description of Artificial Sequence: Synthetic oligonucleotide
augccugaauguuuccuac

SEQ ID NO: 1643151 - RNA, 19 nt, Artificial Sequence
  Description of Artificial Sequence: Synthetic oligonucleotide
ucuugaugcuugcuggugu

SEQ ID NO: 1643152 - RNA, 19 nt, Artificial Sequence
  Description of Artificial Sequence: Synthetic oligonucleotide
uccaacuccuugcuguagc

SEQ ID NO: 1643153 - RNA, 19 nt, Artificial Sequence
  Description of Artificial Sequence: Synthetic oligonucleotide
ucauuauaugggcaauauc

SEQ ID NO: 1643154 - RNA, 19 nt, Artificial Sequence
  Description of Artificial Sequence: Synthetic oligonucleotide
uguucaaauuguucuugac

SEQ ID NO: 1643155 - RNA, 19 nt, Artificial Sequence
  Description of Artificial Sequence: Synthetic oligonucleotide
cuugagauggaacaauuaa

SEQ ID NO: 1643156 - RNA, 19 nt, Artificial Sequence
  Description of Artificial Sequence: Synthetic oligonucleotide
gaagauucuuuucaucaaa

SEQ ID NO: 1643157 - RNA, 19 nt, Artificial Sequence
  Description of Artificial Sequence: Synthetic oligonucleotide
uuuugcacguucuuccaaa

SEQ ID NO: 1643158 - RNA, 19 nt, Artificial Sequence
  Description of Artificial Sequence: Synthetic oligonucleotide
aaauugccaaaguuuccaa

SEQ ID NO: 1643159 - RNA, 19 nt, Artificial Sequence
  Description of Artificial Sequence: Synthetic oligonucleotide
aacacgauggaugguaaau

SEQ ID NO: 1643160 - RNA, 19 nt, Artificial Sequence
  Description of Artificial Sequence: Synthetic oligonucleotide
gguaaauugccaaaguuuc

SEQ ID NO: 1643161 - RNA, 19 nt, Artificial Sequence
  Description of Artificial Sequence: Synthetic oligonucleotide
cuucaaaucuaggaccacc

SEQ ID NO: 1643162 - RNA, 19 nt, Artificial Sequence
  Description of Artificial Sequence: Synthetic oligonucleotide
aauguuuccuacugacauu

SEQ ID NO: 1643163 - RNA, 19 nt, Artificial Sequence
  Description of Artificial Sequence: Synthetic oligonucleotide
aguuuugaggacaaccucu

SEQ ID NO: 1643164 - RNA, 19 nt, Artificial Sequence
  Description of Artificial Sequence: Synthetic oligonucleotide
auuucacaacucucaacug

SEQ ID NO: 1643165 - RNA, 19 nt, Artificial Sequence
  Description of Artificial Sequence: Synthetic oligonucleotide
uguuaaggggauugggaaa

SEQ ID NO: 1643166 - RNA, 19 nt, Artificial Sequence
  Description of Artificial Sequence: Synthetic oligonucleotide
ugagcaacaccagucagaa

SEQ ID NO: 1643167 - RNA, 19 nt, Artificial Sequence
  Description of Artificial Sequence: Synthetic oligonucleotide
acaacucucaacugcucca

SEQ ID NO: 1643168 - RNA, 19 nt, Artificial Sequence
  Description of Artificial Sequence: Synthetic oligonucleotide
ugguugaccaugugguccc

SEQ ID NO: 1643169 - RNA, 19 nt, Artificial Sequence
  Description of Artificial Sequence: Synthetic oligonucleotide
accuaguugauuauguccu

SEQ ID NO: 1643170 - RNA, 19 nt, Artificial Sequence
  Description of Artificial Sequence: Synthetic oligonucleotide
uggcccaucaaaucuuuga

SEQ ID NO: 1643171 - RNA, 19 nt, Artificial Sequence
  Description of Artificial Sequence: Synthetic oligonucleotide
gguggaucauuauaugggc

SEQ ID NO: 1643172 - RNA, 19 nt, Artificial Sequence
  Description of Artificial Sequence: Synthetic oligonucleotide
aaagaaugacaaccuucaa

SEQ ID NO: 1643173 - RNA, 19 nt, Artificial Sequence
  Description of Artificial Sequence: Synthetic oligonucleotide
ugguaaaucuuuccgucua

SEQ ID NO: 1643174 - RNA, 19 nt, Artificial Sequence
  Description of Artificial Sequence: Synthetic oligonucleotide
uacaggacccucaaaccuc

SEQ ID NO: 1643175 - RNA, 19 nt, Artificial Sequence
  Description of Artificial Sequence: Synthetic oligonucleotide
aucaaaucuuggcaagagu

SEQ ID NO: 1643176 - RNA, 19 nt, Artificial Sequence
  Description of Artificial Sequence: Synthetic oligonucleotide
acuggugucuugcugggga

SEQ ID NO: 1643177 - RNA, 19 nt, Artificial Sequence
  Description of Artificial Sequence: Synthetic oligonucleotide
cucaaaucugauaccacca

SEQ ID NO: 1643178 - RNA, 19 nt, Artificial Sequence
  Description of Artificial Sequence: Synthetic oligonucleotide
auguccuucaaaucucaga

SEQ ID NO: 1643179 - RNA, 19 nt, Artificial Sequence
  Description of Artificial Sequence: Synthetic oligonucleotide
ugugggacccucaaaccuc

SEQ ID NO: 1643180 - RNA, 19 nt, Artificial Sequence
  Description of Artificial Sequence: Synthetic oligonucleotide
ggcccuucaauucucaggc

SEQ ID NO: 1643181 - RNA, 19 nt, Artificial Sequence
  Description of Artificial Sequence: Synthetic oligonucleotide
accucauuccaacuccuug

SEQ ID NO: 1643182 - RNA, 19 nt, Artificial Sequence
  Description of Artificial Sequence: Synthetic oligonucleotide
acuguucaaauuguucuug

SEQ ID NO: 1643183 - RNA, 19 nt, Artificial Sequence
  Description of Artificial Sequence: Synthetic oligonucleotide
accaucaaaccuugguuga

SEQ ID NO: 1643184 - RNA, 19 nt, Artificial Sequence
  Description of Artificial Sequence: Synthetic oligonucleotide
uguuuccuacugacauugg

SEQ ID NO: 1643185 - RNA, 19 nt, Artificial Sequence
  Description of Artificial Sequence: Synthetic oligonucleotide
ugagguccauuaaauuggu

SEQ ID NO: 1643186 - RNA, 19 nt, Artificial Sequence
  Description of Artificial Sequence: Synthetic oligonucleotide
aaauugcuacuggcugagc

SEQ ID NO: 1643187 - RNA, 19 nt, Artificial Sequence
  Description of Artificial Sequence: Synthetic oligonucleotide
auaugccuuaggaagaccu

SEQ ID NO: 1643188 - RNA, 19 nt, Artificial Sequence
  Description of Artificial Sequence: Synthetic oligonucleotide
acucucaacugcuccagcu

SEQ ID NO: 1643189 - RNA, 19 nt, Artificial Sequence
  Description of Artificial Sequence: Synthetic oligonucleotide
ucuuccaaaucagcuauuc

SEQ ID NO: 1643190 - RNA, 19 nt, Artificial Sequence
  Description of Artificial Sequence: Synthetic oligonucleotide
guugauuauguccuucaaa

SEQ ID NO: 1643191 - RNA, 19 nt, Artificial Sequence
  Description of Artificial Sequence: Synthetic oligonucleotide
gacccucaaaccucauucc

SEQ ID NO: 1643192 - RNA, 19 nt, Artificial Sequence
  Description of Artificial Sequence: Synthetic oligonucleotide
uggcccaucaaaucucugu

SEQ ID NO: 1643193 - RNA, 19 nt, Artificial Sequence
  Description of Artificial Sequence: Synthetic oligonucleotide
uguuguggcccaucaaauc

SEQ ID NO: 1643194 - RNA, 19 nt, Artificial Sequence
  Description of Artificial Sequence: Synthetic oligonucleotide
caucaaaucuuggcaagag

SEQ ID NO: 1643195 - RNA, 19 nt, Artificial Sequence
  Description of Artificial Sequence: Synthetic oligonucleotide
ccucaaaucugauaccacc

SEQ ID NO: 1643196 - RNA, 19 nt, Artificial Sequence
  Description of Artificial Sequence: Synthetic oligonucleotide
uuccgucuacucuaauagc

SEQ ID NO: 1643197 - RNA, 19 nt, Artificial Sequence
  Description of Artificial Sequence: Synthetic oligonucleotide
cuuaggaagaccuccugaa

SEQ ID NO: 1643198 - RNA, 19 nt, Artificial Sequence
  Description of Artificial Sequence: Synthetic oligonucleotide
aaaggguuuucaacuggug

SEQ ID NO: 1643199 - RNA, 19 nt, Artificial Sequence
  Description of Artificial Sequence: Synthetic oligonucleotide
uaugccuuaggaagaccuc

SEQ ID NO: 1643200 - RNA, 19 nt, Artificial Sequence
  Description of Artificial Sequence: Synthetic oligonucleotide
gaacuguaguccuugagau

SEQ ID NO: 1643201 - RNA, 19 nt, Artificial Sequence
  Description of Artificial Sequence: Synthetic oligonucleotide
cuucaaaccugaucccaac

SEQ ID NO: 1643202 - RNA, 19 nt, Artificial Sequence
  Description of Artificial Sequence: Synthetic oligonucleotide
gggcccucaaaucugauac

SEQ ID NO: 1643203 - RNA, 19 nt, Artificial Sequence
  Description of Artificial Sequence: Synthetic oligonucleotide
aaaccugaucccaaccccu

SEQ ID NO: 1643204 - RNA, 19 nt, Artificial Sequence
  Description of Artificial Sequence: Synthetic oligonucleotide
guaauccaucaaaucuugg

SEQ ID NO: 1643205 - RNA, 19 nt, Artificial Sequence
  Description of Artificial Sequence: Synthetic oligonucleotide
aaagguccuucaaaccuga

SEQ ID NO: 1643206 - RNA, 19 nt, Artificial Sequence
  Description of Artificial Sequence: Synthetic oligonucleotide
ggacccucaaaccucauuc

SEQ ID NO: 1643207 - RNA, 19 nt, Artificial Sequence
  Description of Artificial Sequence: Synthetic oligonucleotide
cuguuaaggggauugggaa

SEQ ID NO: 1643208 - RNA, 19 nt, Artificial Sequence
  Description of Artificial Sequence: Synthetic oligonucleotide
uuacauccaccugacuuga

SEQ ID NO: 1643209 - RNA, 19 nt, Artificial Sequence
  Description of Artificial Sequence: Synthetic oligonucleotide
uguagcaaagggcccucaa

SEQ ID NO: 1643210 - RNA, 19 nt, Artificial Sequence
  Description of Artificial Sequence: Synthetic oligonucleotide
gaugccugaauguuuccua

SEQ ID NO: 1643211 - RNA, 19 nt, Artificial Sequence
  Description of Artificial Sequence: Synthetic oligonucleotide
gaugcuugcugguguugug

SEQ ID NO: 1643212 - RNA, 19 nt, Artificial Sequence
  Description of Artificial Sequence: Synthetic oligonucleotide
aguugauuauguccuucaa

SEQ ID NO: 1643213 - RNA, 19 nt, Artificial Sequence
  Description of Artificial Sequence: Synthetic oligonucleotide
cauuccaacuccuugcugu

SEQ ID NO: 1643214 - RNA, 19 nt, Artificial Sequence
  Description of Artificial Sequence: Synthetic oligonucleotide
ucaaaucuaggaccaccuu

SEQ ID NO: 1643215 - RNA, 19 nt, Artificial Sequence
  Description of Artificial Sequence: Synthetic oligonucleotide
cagacugacugugggaccc

SEQ ID NO: 1643216 - RNA, 19 nt, Artificial Sequence
  Description of Artificial Sequence: Synthetic oligonucleotide
gcccaucaaaucuuugagg

SEQ ID NO: 1643217 - RNA, 19 nt, Artificial Sequence
  Description of Artificial Sequence: Synthetic oligonucleotide
ucuacucuaauagcauuuu

SEQ ID NO: 1643218 - RNA, 19 nt, Artificial Sequence
  Description of Artificial Sequence: Synthetic oligonucleotide
caauguucaacauaauguu

SEQ ID NO: 1643219 - RNA, 19 nt, Artificial Sequence
  Description of Artificial Sequence: Synthetic oligonucleotide
uuugcacguucuuccaaau

SEQ ID NO: 1643220 - RNA, 19 nt, Artificial Sequence
  Description of Artificial Sequence: Synthetic oligonucleotide
ccucaaaccucauuccacc

SEQ ID NO: 1643221 - RNA, 19 nt, Artificial Sequence
  Description of Artificial Sequence: Synthetic oligonucleotide
aaaccucauuccaacuccu

SEQ ID NO: 1643222 - RNA, 19 nt, Artificial Sequence
  Description of Artificial Sequence: Synthetic oligonucleotide
cauaacacgauggauggua

SEQ ID NO: 1643223 - RNA, 19 nt, Artificial Sequence
  Description of Artificial Sequence: Synthetic oligonucleotide
gauaugccuuaggaagacc

SEQ ID NO: 1643224 - RNA, 19 nt, Artificial Sequence
  Description of Artificial Sequence: Synthetic oligonucleotide
uuagcagccuccugaguuu

SEQ ID NO: 1643225 - RNA, 19 nt, Artificial Sequence
  Description of Artificial Sequence: Synthetic oligonucleotide
guugaacuaaagguccuuc

SEQ ID NO: 1643226 - RNA, 19 nt, Artificial Sequence
  Description of Artificial Sequence: Synthetic oligonucleotide
uugcacguucuuccaaauc

SEQ ID NO: 1643227 - RNA, 19 nt, Artificial Sequence
  Description of Artificial Sequence: Synthetic oligonucleotide
cauguggucccucaaaccu

SEQ ID NO: 1643228 - RNA, 19 nt, Artificial Sequence
  Description of Artificial Sequence: Synthetic oligonucleotide
aggauaugccuuaggaaga

SEQ ID NO: 1643229 - RNA, 19 nt, Artificial Sequence
  Description of Artificial Sequence: Synthetic oligonucleotide
uaaggggauugggaaauuc

SEQ ID NO: 1643230 - RNA, 19 nt, Artificial Sequence
  Description of Artificial Sequence: Synthetic oligonucleotide
cugagcaacaccagucaga

SEQ ID NO: 1643231 - RNA, 19 nt, Artificial Sequence
  Description of Artificial Sequence: Synthetic oligonucleotide
gguguuguggcccaucaaa

SEQ ID NO: 1643232 - RNA, 19 nt, Artificial Sequence
  Description of Artificial Sequence: Synthetic oligonucleotide
gaagauguauuuugauaau

SEQ ID NO: 1643233 - RNA, 19 nt, Artificial Sequence
  Description of Artificial Sequence: Synthetic oligonucleotide
ugccugaauguuuccuacu

SEQ ID NO: 1643234 - RNA, 19 nt, Artificial Sequence
  Description of Artificial Sequence: Synthetic oligonucleotide
uaacacgauggaugguaaa

SEQ ID NO: 1643235 - RNA, 19 nt, Artificial Sequence
  Description of Artificial Sequence: Synthetic oligonucleotide
ugcuacuggcugagcaaca

SEQ ID NO: 1643236 - RNA, 19 nt, Artificial Sequence
  Description of Artificial Sequence: Synthetic oligonucleotide
auggcugaccuggcugucc

SEQ ID NO: 1643237 - RNA, 19 nt, Artificial Sequence
  Description of Artificial Sequence: Synthetic oligonucleotide
cuuuccgucuacucuaaua

SEQ ID NO: 1643238 - RNA, 19 nt, Artificial Sequence
  Description of Artificial Sequence: Synthetic oligonucleotide
agcuauucuucaaaucuau

SEQ ID NO: 1643239 - RNA, 19 nt, Artificial Sequence
  Description of Artificial Sequence: Synthetic oligonucleotide
ggcccaucaaaucucugug

SEQ ID NO: 1643240 - RNA, 19 nt, Artificial Sequence
  Description of Artificial Sequence: Synthetic oligonucleotide
guacaggacccucaaaccu

SEQ ID NO: 1643241 - RNA, 19 nt, Artificial Sequence
  Description of Artificial Sequence: Synthetic oligonucleotide
agaugauuaucaggauaug

SEQ ID NO: 1643242 - RNA, 19 nt, Artificial Sequence
  Description of Artificial Sequence: Synthetic oligonucleotide
agaugccugaauguuuccu

SEQ ID NO: 1643243 - RNA, 19 nt, Artificial Sequence
  Description of Artificial Sequence: Synthetic oligonucleotide
gagguacaccaucaaaccu

SEQ ID NO: 1643244 - RNA, 19 nt, Artificial Sequence
  Description of Artificial Sequence: Synthetic oligonucleotide
aucucagaccagcuacaga

SEQ ID NO: 1643245 - RNA, 19 nt, Artificial Sequence
  Description of Artificial Sequence: Synthetic oligonucleotide
ugacaauguucaacauaau

SEQ ID NO: 1643246 - RNA, 19 nt, Artificial Sequence
  Description of Artificial Sequence: Synthetic oligonucleotide
gccugaauguuuccuacug

SEQ ID NO: 1643247 - RNA, 19 nt, Artificial Sequence
  Description of Artificial Sequence: Synthetic oligonucleotide
acaaucaaaagaagaugua

SEQ ID NO: 1643248 - RNA, 19 nt, Artificial Sequence
  Description of Artificial Sequence: Synthetic oligonucleotide
agaaccuguugagaugccu

SEQ ID NO: 1643249 - RNA, 19 nt, Artificial Sequence
  Description of Artificial Sequence: Synthetic oligonucleotide
guagguaaauugccaaagu

SEQ ID NO: 1643250 - RNA, 19 nt, Artificial Sequence
  Description of Artificial Sequence: Synthetic oligonucleotide
gguaaaucuuuccgucuac

SEQ ID NO: 1643251 - RNA, 19 nt, Artificial Sequence
  Description of Artificial Sequence: Synthetic oligonucleotide
caacucucaacugcuccag

SEQ ID NO: 1643252 - RNA, 19 nt, Artificial Sequence
  Description of Artificial Sequence: Synthetic oligonucleotide
uguaguccuugagauggaa

SEQ ID NO: 1643253 - RNA, 19 nt, Artificial Sequence
  Description of Artificial Sequence: Synthetic oligonucleotide
caaauuguucuugacagau

SEQ ID NO: 1643254 - RNA, 19 nt, Artificial Sequence
  Description of Artificial Sequence: Synthetic oligonucleotide
ccucaaaccucauuccaac

SEQ ID NO: 1643255 - RNA, 19 nt, Artificial Sequence
  Description of Artificial Sequence: Synthetic oligonucleotide
caaucaaaagaagauguau

SEQ ID NO: 1643256 - RNA, 19 nt, Artificial Sequence
  Description of Artificial Sequence: Synthetic oligonucleotide
uguugaacuaaagguccuu

SEQ ID NO: 1643257 - RNA, 19 nt, Artificial Sequence
  Description of Artificial Sequence: Synthetic oligonucleotide
augggcaauaucaaaucuu

SEQ ID NO: 1643258 - RNA, 19 nt, Artificial Sequence
  Description of Artificial Sequence: Synthetic oligonucleotide
cuguggaccuggcugacca

SEQ ID NO: 1643259 - RNA, 19 nt, Artificial Sequence
  Description of Artificial Sequence: Synthetic oligonucleotide
cuacagacugacuguggga

SEQ ID NO: 1643260 - RNA, 19 nt, Artificial Sequence
  Description of Artificial Sequence: Synthetic oligonucleotide
agguggcccaucaaaucuc

SEQ ID NO: 1643261 - RNA, 19 nt, Artificial Sequence
  Description of Artificial Sequence: Synthetic oligonucleotide
aucccaaccccugguugac

SEQ ID NO: 1643262 - RNA, 19 nt, Artificial Sequence
  Description of Artificial Sequence: Synthetic oligonucleotide
cagauuucacaacucucaa

SEQ ID NO: 1643263 - RNA, 19 nt, Artificial Sequence
  Description of Artificial Sequence: Synthetic oligonucleotide
gauuaucaggauaugccuu

SEQ ID NO: 1643264 - RNA, 19 nt, Artificial Sequence
  Description of Artificial Sequence: Synthetic oligonucleotide
cauaauguucaaaggguuu

SEQ ID NO: 1643265 - RNA, 19 nt, Artificial Sequence
  Description of Artificial Sequence: Synthetic oligonucleotide
aucaaaccuuaaagaauga

SEQ ID NO: 1643266 - RNA, 19 nt, Artificial Sequence
  Description of Artificial Sequence: Synthetic oligonucleotide
auaacacgauggaugguaa

SEQ ID NO: 1643267 - RNA, 19 nt, Artificial Sequence
  Description of Artificial Sequence: Synthetic oligonucleotide
caaaggguuuucaacuggu

SEQ ID NO: 1643268 - RNA, 19 nt, Artificial Sequence
  Description of Artificial Sequence: Synthetic oligonucleotide
guuaaggggauugggaaau

SEQ ID NO: 1643269 - RNA, 19 nt, Artificial Sequence
  Description of Artificial Sequence: Synthetic oligonucleotide
ggaugguaaaucuuuccgu

SEQ ID NO: 1643270 - RNA, 19 nt, Artificial Sequence
  Description of Artificial Sequence: Synthetic oligonucleotide
cagcuauucuucaaaucua

SEQ ID NO: 1643271 - RNA, 19 nt, Artificial Sequence
  Description of Artificial Sequence: Synthetic oligonucleotide
ucgugucucuggaacugua

SEQ ID NO: 1643272 - RNA, 19 nt, Artificial Sequence
  Description of Artificial Sequence: Synthetic oligonucleotide
cagaaccuguugagaugcc

SEQ ID NO: 1643273 - RNA, 19 nt, Artificial Sequence
  Description of Artificial Sequence: Synthetic oligonucleotide
cagaggcccuucaauucuc

SEQ ID NO: 1643274 - RNA, 19 nt, Artificial Sequence
  Description of Artificial Sequence: Synthetic oligonucleotide
cccucaaaccucauuccac

SEQ ID NO: 1643275 - RNA, 19 nt, Artificial Sequence
  Description of Artificial Sequence: Synthetic oligonucleotide
aaaccucauuccaccuccu

SEQ ID NO: 1643276 - RNA, 19 nt, Artificial Sequence
  Description of Artificial Sequence: Synthetic oligonucleotide
ccaaauugcuacuggcuga

SEQ ID NO: 1643277 - RNA, 19 nt, Artificial Sequence
  Description of Artificial Sequence: Synthetic oligonucleotide
uucccaccuaguugauuau

SEQ ID NO: 1643278 - RNA, 19 nt, Artificial Sequence
  Description of Artificial Sequence: Synthetic oligonucleotide
accugacuugagaugauua

SEQ ID NO: 1643279 - RNA, 19 nt, Artificial Sequence
  Description of Artificial Sequence: Synthetic oligonucleotide
gcacguucuuccaaaucag

SEQ ID NO: 1643280 - RNA, 19 nt, Artificial Sequence
  Description of Artificial Sequence: Synthetic oligonucleotide
agggcccucaaaucugaua

SEQ ID NO: 1643281 - RNA, 19 nt, Artificial Sequence
  Description of Artificial Sequence: Synthetic oligonucleotide
gguucuugcgaauucguuu

SEQ ID NO: 1643282 - RNA, 19 nt, Artificial Sequence
  Description of Artificial Sequence: Synthetic oligonucleotide
cagucuguuacaauucauu

SEQ ID NO: 1643283 - RNA, 19 nt, Artificial Sequence
  Description of Artificial Sequence: Synthetic oligonucleotide
cagaccagcuacagacuga

SEQ ID NO: 1643284 - RNA, 19 nt, Artificial Sequence
  Description of Artificial Sequence: Synthetic oligonucleotide
guacaccaucaaaccuugg

SEQ ID NO: 1643285 - RNA, 19 nt, Artificial Sequence
  Description of Artificial Sequence: Synthetic oligonucleotide
cugugggacccucaaaccu

SEQ ID NO: 1643286 - RNA, 19 nt, Artificial Sequence
  Description of Artificial Sequence: Synthetic oligonucleotide
gguguaucaaauauuuguu

SEQ ID NO: 1643287 - RNA, 19 nt, Artificial Sequence
  Description of Artificial Sequence: Synthetic oligonucleotide
uugguccuugagguguauc

SEQ ID NO: 1643288 - RNA, 19 nt, Artificial Sequence
  Description of Artificial Sequence: Synthetic oligonucleotide
uuaaggggauugggaaauu

SEQ ID NO: 1643289 - RNA, 19 nt, Artificial Sequence
  Description of Artificial Sequence: Synthetic oligonucleotide
cuaagguucccaccuaguu

SEQ ID NO: 1643290 - RNA, 19 nt, Artificial Sequence
  Description of Artificial Sequence: Synthetic oligonucleotide
aaccucauuccaacuccuu

SEQ ID NO: 1643291 - RNA, 19 nt, Artificial Sequence
  Description of Artificial Sequence: Synthetic oligonucleotide
cagucagaaccuguugaga

SEQ ID NO: 1643292 - RNA, 19 nt, Artificial Sequence
  Description of Artificial Sequence: Synthetic oligonucleotide
ggccaugagguccauuaaa

SEQ ID NO: 1643293 - RNA, 19 nt, Artificial Sequence
  Description of Artificial Sequence: Synthetic oligonucleotide
ccaccuaguugauuauguc

SEQ ID NO: 1643294 - RNA, 19 nt, Artificial Sequence
  Description of Artificial Sequence: Synthetic oligonucleotide
cccagaggcccuucaauuc

SEQ ID NO: 1643295 - RNA, 19 nt, Artificial Sequence
  Description of Artificial Sequence: Synthetic oligonucleotide
gucuacucuaauagcauuu

SEQ ID NO: 1643296 - RNA, 19 nt, Artificial Sequence
  Description of Artificial Sequence: Synthetic oligonucleotide
gaagaccuccugaaggauu

SEQ ID NO: 1643297 - RNA, 19 nt, Artificial Sequence
  Description of Artificial Sequence: Synthetic oligonucleotide
gccuuaggaagaccuccug

SEQ ID NO: 1643298 - RNA, 19 nt, Artificial Sequence
  Description of Artificial Sequence: Synthetic oligonucleotide
ucccaaccccugguugacc

SEQ ID NO: 1643299 - RNA, 19 nt, Artificial Sequence
  Description of Artificial Sequence: Synthetic oligonucleotide
gaagcucuguuaaggggau

SEQ ID NO: 1643300 - RNA, 19 nt, Artificial Sequence
  Description of Artificial Sequence: Synthetic oligonucleotide
aucuuuccgucuacucuaa

SEQ ID NO: 1643301 - RNA, 19 nt, Artificial Sequence
  Description of Artificial Sequence: Synthetic oligonucleotide
cucagaccagcuacagacu

SEQ ID NO: 1643302 - RNA, 19 nt, Artificial Sequence
  Description of Artificial Sequence: Synthetic oligonucleotide
cagguacacuuuggaacuc

SEQ ID NO: 1643303 - RNA, 19 nt, Artificial Sequence
  Description of Artificial Sequence: Synthetic oligonucleotide
gacugacugugggacccuc

SEQ ID NO: 1643304 - RNA, 19 nt, Artificial Sequence
  Description of Artificial Sequence: Synthetic oligonucleotide
cuugaugcuugcugguguu

SEQ ID NO: 1643305 - RNA, 19 nt, Artificial Sequence
  Description of Artificial Sequence: Synthetic oligonucleotide
ccauuaaauugguccuuga

SEQ ID NO: 1643306 - RNA, 19 nt, Artificial Sequence
  Description of Artificial Sequence: Synthetic oligonucleotide
aagcucuguuaaggggauu

SEQ ID NO: 1643307 - RNA, 19 nt, Artificial Sequence
  Description of Artificial Sequence: Synthetic oligonucleotide
guguuguggcccaucaaau

SEQ ID NO: 1643308 - RNA, 19 nt, Artificial Sequence
  Description of Artificial Sequence: Synthetic oligonucleotide
aagggcccucaaaucugau

SEQ ID NO: 1643309 - RNA, 19 nt, Artificial Sequence
  Description of Artificial Sequence: Synthetic oligonucleotide
agacugacugugggacccu

SEQ ID NO: 1643310 - RNA, 19 nt, Artificial Sequence
  Description of Artificial Sequence: Synthetic oligonucleotide
guggcccaucaaaucucug

SEQ ID NO: 1643311 - RNA, 19 nt, Artificial Sequence
  Description of Artificial Sequence: Synthetic oligonucleotide
cccucaaaccucauuccaa

SEQ ID NO: 1643312 - RNA, 19 nt, Artificial Sequence
  Description of Artificial Sequence: Synthetic oligonucleotide
ggcaagagugauggcugac

SEQ ID NO: 1643313 - RNA, 19 nt, Artificial Sequence
  Description of Artificial Sequence: Synthetic oligonucleotide
ggccaaauugcuacuggcu

SEQ ID NO: 1643314 - RNA, 19 nt, Artificial Sequence
  Description of Artificial Sequence: Synthetic oligonucleotide
cuuuagcagccuccugagu

SEQ ID NO: 1643315 - RNA, 19 nt, Artificial Sequence
  Description of Artificial Sequence: Synthetic oligonucleotide
cccaccuaguugauuaugu

SEQ ID NO: 1643316 - RNA, 19 nt, Artificial Sequence
  Description of Artificial Sequence: Synthetic oligonucleotide
ggcugaccaguucuuucaa

SEQ ID NO: 1643317 - RNA, 19 nt, Artificial Sequence
  Description of Artificial Sequence: Synthetic oligonucleotide
ccuucaaaucuaggaccac

SEQ ID NO: 1643318 - RNA, 19 nt, Artificial Sequence
  Description of Artificial Sequence: Synthetic oligonucleotide
ccuuaacuuugggacuuuc

SEQ ID NO: 1643319 - RNA, 19 nt, Artificial Sequence
  Description of Artificial Sequence: Synthetic oligonucleotide
guggucccucaaaccuaag

SEQ ID NO: 1643320 - RNA, 19 nt, Artificial Sequence
  Description of Artificial Sequence: Synthetic oligonucleotide
ccagaggcccuucaauucu

SEQ ID NO: 1643321 - RNA, 19 nt, Artificial Sequence
  Description of Artificial Sequence: Synthetic oligonucleotide
cugaucccaaccccugguu

SEQ ID NO: 1643322 - RNA, 19 nt, Artificial Sequence
  Description of Artificial Sequence: Synthetic oligonucleotide
ccuaagguucccaccuagu

SEQ ID NO: 1643323 - RNA, 19 nt, Artificial Sequence
  Description of Artificial Sequence: Synthetic oligonucleotide
gcugguguuguggcccauc

SEQ ID NO: 1643324 - RNA, 19 nt, Artificial Sequence
  Description of Artificial Sequence: Synthetic oligonucleotide
ccaugagguccauuaaauu

SEQ ID NO: 1643325 - RNA, 19 nt, Artificial Sequence
  Description of Artificial Sequence: Synthetic oligonucleotide
ccgucuacucuaauagcau

SEQ ID NO: 1643326 - RNA, 19 nt, Artificial Sequence
  Description of Artificial Sequence: Synthetic oligonucleotide
gaccagcuacagacugacu

SEQ ID NO: 1643327 - RNA, 19 nt, Artificial Sequence
  Description of Artificial Sequence: Synthetic oligonucleotide
caccugacuugagaugauu

SEQ ID NO: 1643328 - RNA, 19 nt, Artificial Sequence
  Description of Artificial Sequence: Synthetic oligonucleotide
ggguucuugcgaauucguu

SEQ ID NO: 1643329 - RNA, 19 nt, Artificial Sequence
  Description of Artificial Sequence: Synthetic oligonucleotide
gguccagcagguacacuuu

SEQ ID NO: 1643330 - RNA, 19 nt, Artificial Sequence
  Description of Artificial Sequence: Synthetic oligonucleotide
cgucuacucuaauagcauu

SEQ ID NO: 1643331 - RNA, 19 nt, Artificial Sequence
  Description of Artificial Sequence: Synthetic oligonucleotide
gucuugcuggggagauggu

SEQ ID NO: 1643332 - RNA, 19 nt, Artificial Sequence
  Description of Artificial Sequence: Synthetic oligonucleotide
gguucccaccuaguugauu

SEQ ID NO: 1643333 - RNA, 19 nt, Artificial Sequence
  Description of Artificial Sequence: Synthetic oligonucleotide
gguugaccauguggucccu

SEQ ID NO: 1643334 - RNA, 19 nt, Artificial Sequence
  Description of Artificial Sequence: Synthetic oligonucleotide
ccaccugacuugagaugau

SEQ ID NO: 1643335 - RNA, 19 nt, Artificial Sequence
  Description of Artificial Sequence: Synthetic oligonucleotide
uuuacuuuggcagagagcg

SEQ ID NO: 1643336 - RNA, 19 nt, Artificial Sequence
  Description of Artificial Sequence: Synthetic oligonucleotide
aaggccaaaacauaguggg

SEQ ID NO: 1643337 - RNA, 19 nt, Artificial Sequence
  Description of Artificial Sequence: Synthetic oligonucleotide
aaauaugguaucaagaguc

SEQ ID NO: 1643338 - RNA, 19 nt, Artificial Sequence
  Description of Artificial Sequence: Synthetic oligonucleotide
aaguagaaaauuccacucc

SEQ ID NO: 1643339 - RNA, 19 nt, Artificial Sequence
  Description of Artificial Sequence: Synthetic oligonucleotide
aaaccaaagauuucacuac

SEQ ID NO: 1643340 - RNA, 19 nt, Artificial Sequence
  Description of Artificial Sequence: Synthetic oligonucleotide
aagaguauugucuguauuc

SEQ ID NO: 1643341 - RNA, 19 nt, Artificial Sequence
  Description of Artificial Sequence: Synthetic oligonucleotide
aaggauuacaauucuuugg

SEQ ID NO: 1643342 - RNA, 19 nt, Artificial Sequence
  Description of Artificial Sequence: Synthetic oligonucleotide
auagucacagaccuuauac

SEQ ID NO: 1643343 - RNA, 19 nt, Artificial Sequence
  Description of Artificial Sequence: Synthetic oligonucleotide
uuugguacaaauaugguau

SEQ ID NO: 1643344 - RNA, 19 nt, Artificial Sequence
  Description of Artificial Sequence: Synthetic oligonucleotide
ucuauaucaacauuacugc

SEQ ID NO: 1643345 - RNA, 19 nt, Artificial Sequence
  Description of Artificial Sequence: Synthetic oligonucleotide
ucuauuuugaccaugccaa

SEQ ID NO: 1643346 - RNA, 19 nt, Artificial Sequence
  Description of Artificial Sequence: Synthetic oligonucleotide
auuuugaccaugccaaacc

SEQ ID NO: 1643347 - RNA, 19 nt, Artificial Sequence
  Description of Artificial Sequence: Synthetic oligonucleotide
ucaauuugacuccugcucg

SEQ ID NO: 1643348 - RNA, 19 nt, Artificial Sequence
  Description of Artificial Sequence: Synthetic oligonucleotide
aguaccgucauucacauga

SEQ ID NO: 1643349 - RNA, 19 nt, Artificial Sequence
  Description of Artificial Sequence: Synthetic oligonucleotide
gauuacaauucuuuggaag

SEQ ID NO: 1643350 - RNA, 19 nt, Artificial Sequence
  Description of Artificial Sequence: Synthetic oligonucleotide
aacaaucccgucuaaauga

SEQ ID NO: 1643351 - RNA, 19 nt, Artificial Sequence
  Description of Artificial Sequence: Synthetic oligonucleotide
cuuucugguagauugagcc

SEQ ID NO: 1643352 - RNA, 19 nt, Artificial Sequence
  Description of Artificial Sequence: Synthetic oligonucleotide
uuauauuuagcagcgaugc

SEQ ID NO: 1643353 - RNA, 19 nt, Artificial Sequence
  Description of Artificial Sequence: Synthetic oligonucleotide
ugacguacaaaccagggug

SEQ ID NO: 1643354 - RNA, 19 nt, Artificial Sequence
  Description of Artificial Sequence: Synthetic oligonucleotide
aaucccgucuaaaugaggc

SEQ ID NO: 1643355 - RNA, 19 nt, Artificial Sequence
  Description of Artificial Sequence: Synthetic oligonucleotide
ugauguuucaaccuucuca

SEQ ID NO: 1643356 - RNA, 19 nt, Artificial Sequence
  Description of Artificial Sequence: Synthetic oligonucleotide
aacucaaccgaaauguggc

SEQ ID NO: 1643357 - RNA, 19 nt, Artificial Sequence
  Description of Artificial Sequence: Synthetic oligonucleotide
agacugauauaacaaaagg

SEQ ID NO: 1643358 - RNA, 19 nt, Artificial Sequence
  Description of Artificial Sequence: Synthetic oligonucleotide
aaugaggccuuuaauuucc

SEQ ID NO: 1643359 - RNA, 19 nt, Artificial Sequence
  Description of Artificial Sequence: Synthetic oligonucleotide
uuguuaaagacauccuugg

SEQ ID NO: 1643360 - RNA, 19 nt, Artificial Sequence
  Description of Artificial Sequence: Synthetic oligonucleotide
aacauaguggguucauuuc

SEQ ID NO: 1643361 - RNA, 19 nt, Artificial Sequence
  Description of Artificial Sequence: Synthetic oligonucleotide
agagcgaaguucuacaauc

SEQ ID NO: 1643362 - RNA, 19 nt, Artificial Sequence
  Description of Artificial Sequence: Synthetic oligonucleotide
auuacaauucuuuggaaga

SEQ ID NO: 1643363 - RNA, 19 nt, Artificial Sequence
  Description of Artificial Sequence: Synthetic oligonucleotide
uuaaggccaaaacauagug

SEQ ID NO: 1643364 - RNA, 19 nt, Artificial Sequence
  Description of Artificial Sequence: Synthetic oligonucleotide
ugguguguuacacauaucu

SEQ ID NO: 1643365 - RNA, 19 nt, Artificial Sequence
  Description of Artificial Sequence: Synthetic oligonucleotide
aaacaaucccgucuaaaug

SEQ ID NO: 1643366 - RNA, 19 nt, Artificial Sequence
  Description of Artificial Sequence: Synthetic oligonucleotide
acuuauucucccaagagac

SEQ ID NO: 1643367 - RNA, 19 nt, Artificial Sequence
  Description of Artificial Sequence: Synthetic oligonucleotide
uaaucucuagacuucagug

SEQ ID NO: 1643368 - RNA, 19 nt, Artificial Sequence
  Description of Artificial Sequence: Synthetic oligonucleotide
cucauuaacuuucugguag

SEQ ID NO: 1643369 - RNA, 19 nt, Artificial Sequence
  Description of Artificial Sequence: Synthetic oligonucleotide
uuuccuaggucacaguaag

SEQ ID NO: 1643370 - RNA, 19 nt, Artificial Sequence
  Description of Artificial Sequence: Synthetic oligonucleotide
acuaaguuguuacugagga

SEQ ID NO: 1643371 - RNA, 19 nt, Artificial Sequence
  Description of Artificial Sequence: Synthetic oligonucleotide
ucuacaauccagcuuauau

SEQ ID NO: 1643372 - RNA, 19 nt, Artificial Sequence
  Description of Artificial Sequence: Synthetic oligonucleotide
uguaucaguauaagcauga

SEQ ID NO: 1643373 - RNA, 19 nt, Artificial Sequence
  Description of Artificial Sequence: Synthetic oligonucleotide
cacguuugaaauuucacag

SEQ ID NO: 1643374 - RNA, 19 nt, Artificial Sequence
  Description of Artificial Sequence: Synthetic oligonucleotide
uauuuacuuuggcagagag

SEQ ID NO: 1643375 - RNA, 19 nt, Artificial Sequence
  Description of Artificial Sequence: Synthetic oligonucleotide
accaaggcaacgcugaagg

SEQ ID NO: 1643376 - RNA, 19 nt, Artificial Sequence
  Description of Artificial Sequence: Synthetic oligonucleotide
uaaggccaaaacauagugg

SEQ ID NO: 1643377 - RNA, 19 nt, Artificial Sequence
  Description of Artificial Sequence: Synthetic oligonucleotide
uauuaaagcugacaggguc

SEQ ID NO: 1643378 - RNA, 19 nt, Artificial Sequence
  Description of Artificial Sequence: Synthetic oligonucleotide
uuuacugauguuucaaccu

SEQ ID NO: 1643379 - RNA, 19 nt, Artificial Sequence
  Description of Artificial Sequence: Synthetic oligonucleotide
ucaaggaccucucuuagga

SEQ ID NO: 1643380 - RNA, 19 nt, Artificial Sequence
  Description of Artificial Sequence: Synthetic oligonucleotide
augauguucuacucaaaac

SEQ ID NO: 1643381 - RNA, 19 nt, Artificial Sequence
  Description of Artificial Sequence: Synthetic oligonucleotide
accgaaauguggcacaaac

SEQ ID NO: 1643382 - RNA, 19 nt, Artificial Sequence
  Description of Artificial Sequence: Synthetic oligonucleotide
acucaaaaccacauuaagc

SEQ ID NO: 1643383 - RNA, 19 nt, Artificial Sequence
  Description of Artificial Sequence: Synthetic oligonucleotide
ucucagaucuauuuugacc

SEQ ID NO: 1643384 - RNA, 19 nt, Artificial Sequence
  Description of Artificial Sequence: Synthetic oligonucleotide
uguguuacacauaucuaca

SEQ ID NO: 1643385 - RNA, 19 nt, Artificial Sequence
  Description of Artificial Sequence: Synthetic oligonucleotide
ucacagaccuuauacuugg

SEQ ID NO: 1643386 - RNA, 19 nt, Artificial Sequence
  Description of Artificial Sequence: Synthetic oligonucleotide
uacacauaucuacaacccg

SEQ ID NO: 1643387 - RNA, 19 nt, Artificial Sequence
  Description of Artificial Sequence: Synthetic oligonucleotide
uaucaguauaagcaugacc

SEQ ID NO: 1643388 - RNA, 19 nt, Artificial Sequence
  Description of Artificial Sequence: Synthetic oligonucleotide
ugauauaacaaaaggucau

SEQ ID NO: 1643389 - RNA, 19 nt, Artificial Sequence
  Description of Artificial Sequence: Synthetic oligonucleotide
uuaaacuggcauuauuuac

SEQ ID NO: 1643390 - RNA, 19 nt, Artificial Sequence
  Description of Artificial Sequence: Synthetic oligonucleotide
aggauuacaauucuuugga

SEQ ID NO: 1643391 - RNA, 19 nt, Artificial Sequence
  Description of Artificial Sequence: Synthetic oligonucleotide
aacauuacugccgagacua

SEQ ID NO: 1643392 - RNA, 19 nt, Artificial Sequence
  Description of Artificial Sequence: Synthetic oligonucleotide
aaccacauuaagcuuccag

SEQ ID NO: 1643393 - RNA, 19 nt, Artificial Sequence
  Description of Artificial Sequence: Synthetic oligonucleotide
uguucuacucaaaaccaca

SEQ ID NO: 1643394 - RNA, 19 nt, Artificial Sequence
  Description of Artificial Sequence: Synthetic oligonucleotide
ucaacauuacugccgagac

SEQ ID NO: 1643395 - RNA, 19 nt, Artificial Sequence
  Description of Artificial Sequence: Synthetic oligonucleotide
aagacuugguucucagauc

SEQ ID NO: 1643396 - RNA, 19 nt, Artificial Sequence
  Description of Artificial Sequence: Synthetic oligonucleotide
agaucuauuuugaccaugc

SEQ ID NO: 1643397 - RNA, 19 nt, Artificial Sequence
  Description of Artificial Sequence: Synthetic oligonucleotide
ugucagaucauuuuccuua

SEQ ID NO: 1643398 - RNA, 19 nt, Artificial Sequence
  Description of Artificial Sequence: Synthetic oligonucleotide
aacccaguccaauuaaacu

SEQ ID NO: 1643399 - RNA, 19 nt, Artificial Sequence
  Description of Artificial Sequence: Synthetic oligonucleotide
cuuauauuuagcagcgaug

SEQ ID NO: 1643400 - RNA, 19 nt, Artificial Sequence
  Description of Artificial Sequence: Synthetic oligonucleotide
uacccuuuguuaaagacau

SEQ ID NO: 1643401 - RNA, 19 nt, Artificial Sequence
  Description of Artificial Sequence: Synthetic oligonucleotide
aaauuauucugagauaguu

SEQ ID NO: 1643402 - RNA, 19 nt, Artificial Sequence
  Description of Artificial Sequence: Synthetic oligonucleotide
gucaguuucaacccauccg

SEQ ID NO: 1643403 - RNA, 19 nt, Artificial Sequence
  Description of Artificial Sequence: Synthetic oligonucleotide
uagaaaauuccacuccacu

SEQ ID NO: 1643404 - RNA, 19 nt, Artificial Sequence
  Description of Artificial Sequence: Synthetic oligonucleotide
aguccaauuaaacuggcau

SEQ ID NO: 1643405 - RNA, 19 nt, Artificial Sequence
  Description of Artificial Sequence: Synthetic oligonucleotide
uaugguaucaagagucagu

SEQ ID NO: 1643406 - RNA, 19 nt, Artificial Sequence
  Description of Artificial Sequence: Synthetic oligonucleotide
aauuucccgcucuucuuuc

SEQ ID NO: 1643407 - RNA, 19 nt, Artificial Sequence
  Description of Artificial Sequence: Synthetic oligonucleotide
cuauaucaacauuacugcc

SEQ ID NO: 1643408 - RNA, 19 nt, Artificial Sequence
  Description of Artificial Sequence: Synthetic oligonucleotide
guguguuacacauaucuac

SEQ ID NO: 1643409 - RNA, 19 nt, Artificial Sequence
  Description of Artificial Sequence: Synthetic oligonucleotide
agaccuuauacuuggucuc

SEQ ID NO: 1643410 - RNA, 19 nt, Artificial Sequence
  Description of Artificial Sequence: Synthetic oligonucleotide
auaucuacaacccgagggu

SEQ ID NO: 1643411 - RNA, 19 nt, Artificial Sequence
  Description of Artificial Sequence: Synthetic oligonucleotide
auaucaacauuacugccga

SEQ ID NO: 1643412 - RNA, 19 nt, Artificial Sequence
  Description of Artificial Sequence: Synthetic oligonucleotide
gagacugauauaacaaaag

SEQ ID NO: 1643413 - RNA, 19 nt, Artificial Sequence
  Description of Artificial Sequence: Synthetic oligonucleotide
uuaggauggauuuguaauc

SEQ ID NO: 1643414 - RNA, 19 nt, Artificial Sequence
  Description of Artificial Sequence: Synthetic oligonucleotide
ucugcguauaacccagucc

SEQ ID NO: 1643415 - RNA, 19 nt, Artificial Sequence
  Description of Artificial Sequence: Synthetic oligonucleotide
acacguuugaaauuucaca

SEQ ID NO: 1643416 - RNA, 19 nt, Artificial Sequence
  Description of Artificial Sequence: Synthetic oligonucleotide
aaggucauggaaaagugga

SEQ ID NO: 1643417 - RNA, 19 nt, Artificial Sequence
  Description of Artificial Sequence: Synthetic oligonucleotide
auuauuuacuuuggcagag

SEQ ID NO: 1643418 - RNA, 19 nt, Artificial Sequence
  Description of Artificial Sequence: Synthetic oligonucleotide
ucccaauccaaccuuguga

SEQ ID NO: 1643419 - RNA, 19 nt, Artificial Sequence
  Description of Artificial Sequence: Synthetic oligonucleotide
aaaacgaguguuguugcug

SEQ ID NO: 1643420 - RNA, 19 nt, Artificial Sequence
  Description of Artificial Sequence: Synthetic oligonucleotide
ugagauaguuuggauuugg

SEQ ID NO: 1643421 - RNA, 19 nt, Artificial Sequence
  Description of Artificial Sequence: Synthetic oligonucleotide
agauaguuuggauuuggcu

SEQ ID NO: 1643422 - RNA, 19 nt, Artificial Sequence
  Description of Artificial Sequence: Synthetic oligonucleotide
uccacuacaagacuugguu

SEQ ID NO: 1643423 - RNA, 19 nt, Artificial Sequence
  Description of Artificial Sequence: Synthetic oligonucleotide
uuagcagcgaugccaaaac

SEQ ID NO: 1643424 - RNA, 19 nt, Artificial Sequence
  Description of Artificial Sequence: Synthetic oligonucleotide
ggauuuguaaucucuagac

SEQ ID NO: 1643425 - RNA, 19 nt, Artificial Sequence
  Description of Artificial Sequence: Synthetic oligonucleotide
cugauauaacaaaagguca

SEQ ID NO: 1643426 - RNA, 19 nt, Artificial Sequence
  Description of Artificial Sequence: Synthetic oligonucleotide
ucuaaaugaggccuuuaau

SEQ ID NO: 1643427 - RNA, 19 nt, Artificial Sequence
  Description of Artificial Sequence: Synthetic oligonucleotide
uauauuuagcagcgaugcc

SEQ ID NO: 1643428 - RNA, 19 nt, Artificial Sequence
  Description of Artificial Sequence: Synthetic oligonucleotide
auggauuuguaaucucuag

SEQ ID NO: 1643429 - RNA, 19 nt, Artificial Sequence
  Description of Artificial Sequence: Synthetic oligonucleotide
uuuugggugaaggugaguc

SEQ ID NO: 1643430 - RNA, 19 nt, Artificial Sequence
  Description of Artificial Sequence: Synthetic oligonucleotide
uacugaggaacauauuuaa

SEQ ID NO: 1643431 - RNA, 19 nt, Artificial Sequence
  Description of Artificial Sequence: Synthetic oligonucleotide
aauccaaccuugugaccuc

SEQ ID NO: 1643432 - RNA, 19 nt, Artificial Sequence
  Description of Artificial Sequence: Synthetic oligonucleotide
gucacaguaaguuggugug

SEQ ID NO: 1643433 - RNA, 19 nt, Artificial Sequence
  Description of Artificial Sequence: Synthetic oligonucleotide
aucaagagucaguuucaac

SEQ ID NO: 1643434 - RNA, 19 nt, Artificial Sequence
  Description of Artificial Sequence: Synthetic oligonucleotide
gucaauuugacuccugcuc

SEQ ID NO: 1643435 - RNA, 19 nt, Artificial Sequence
  Description of Artificial Sequence: Synthetic oligonucleotide
acauaguggguucauuucu

SEQ ID NO: 1643436 - RNA, 19 nt, Artificial Sequence
  Description of Artificial Sequence: Synthetic oligonucleotide
uaacccaguccaauuaaac

SEQ ID NO: 1643437 - RNA, 19 nt, Artificial Sequence
  Description of Artificial Sequence: Synthetic oligonucleotide
gauguucuacucaaaacca

SEQ ID NO: 1643438 - RNA, 19 nt, Artificial Sequence
  Description of Artificial Sequence: Synthetic oligonucleotide
gucauggaaaaguggagug

SEQ ID NO: 1643439 - RNA, 19 nt, Artificial Sequence
  Description of Artificial Sequence: Synthetic oligonucleotide
cacuaaguuguuacugagg

SEQ ID NO: 1643440 - RNA, 19 nt, Artificial Sequence
  Description of Artificial Sequence: Synthetic oligonucleotide
uuugaccaugccaaaccca

SEQ ID NO: 1643441 - RNA, 19 nt, Artificial Sequence
  Description of Artificial Sequence: Synthetic oligonucleotide
aaacuggcauuauuuacuu

SEQ ID NO: 1643442 - RNA, 19 nt, Artificial Sequence
  Description of Artificial Sequence: Synthetic oligonucleotide
cuuaacaugacacuaaguu

SEQ ID NO: 1643443 - RNA, 19 nt, Artificial Sequence
  Description of Artificial Sequence: Synthetic oligonucleotide
uugaccaugccaaacccau

SEQ ID NO: 1643444 - RNA, 19 nt, Artificial Sequence
  Description of Artificial Sequence: Synthetic oligonucleotide
uuacugccgagacuaaaac

SEQ ID NO: 1643445 - RNA, 19 nt, Artificial Sequence
  Description of Artificial Sequence: Synthetic oligonucleotide
ucacacguuugaaauuuca

SEQ ID NO: 1643446 - RNA, 19 nt, Artificial Sequence
  Description of Artificial Sequence: Synthetic oligonucleotide
aauuauucugagauaguuu

SEQ ID NO: 1643447 - RNA, 19 nt, Artificial Sequence
  Description of Artificial Sequence: Synthetic oligonucleotide
aucccgucuaaaugaggcc

SEQ ID NO: 1643448 - RNA, 19 nt, Artificial Sequence
  Description of Artificial Sequence: Synthetic oligonucleotide
uguaaccaagagcaaaauu

SEQ ID NO: 1643449 - RNA, 19 nt, Artificial Sequence
  Description of Artificial Sequence: Synthetic oligonucleotide
caugaccugaaguagaaaa

SEQ ID NO: 1643450 - RNA, 19 nt, Artificial Sequence
  Description of Artificial Sequence: Synthetic oligonucleotide
ucaaccgaaauguggcaca

SEQ ID NO: 1643451 - RNA, 19 nt, Artificial Sequence
  Description of Artificial Sequence: Synthetic oligonucleotide
gauguuucaaccuucucau

SEQ ID NO: 1643452 - RNA, 19 nt, Artificial Sequence
  Description of Artificial Sequence: Synthetic oligonucleotide
cugcguauaacccagucca

SEQ ID NO: 1643453 - RNA, 19 nt, Artificial Sequence
  Description of Artificial Sequence: Synthetic oligonucleotide
aggcaugccuucaaggacc

SEQ ID NO: 1643454 - RNA, 19 nt, Artificial Sequence
  Description of Artificial Sequence: Synthetic oligonucleotide
agucacagaccuuauacuu

SEQ ID NO: 1643455 - RNA, 19 nt, Artificial Sequence
  Description of Artificial Sequence: Synthetic oligonucleotide
ucuacaacccgaggguggg

SEQ ID NO: 1643456 - RNA, 19 nt, Artificial Sequence
  Description of Artificial Sequence: Synthetic oligonucleotide
ucucuuaggauggauuugu

SEQ ID NO: 1643457 - RNA, 19 nt, Artificial Sequence
  Description of Artificial Sequence: Synthetic oligonucleotide
guuugguacaaauauggua

SEQ ID NO: 1643458 - RNA, 19 nt, Artificial Sequence
  Description of Artificial Sequence: Synthetic oligonucleotide
uuccacuuuugggugaagg

SEQ ID NO: 1643459 - RNA, 19 nt, Artificial Sequence
  Description of Artificial Sequence: Synthetic oligonucleotide
uuuccuuaacaugacacua

SEQ ID NO: 1643460 - RNA, 19 nt, Artificial Sequence
  Description of Artificial Sequence: Synthetic oligonucleotide
agagacuucugucccaaga

SEQ ID NO: 1643461 - RNA, 19 nt, Artificial Sequence
  Description of Artificial Sequence: Synthetic oligonucleotide
uuccuuaacaugacacuaa

SEQ ID NO: 1643462 - RNA, 19 nt, Artificial Sequence
  Description of Artificial Sequence: Synthetic oligonucleotide
uuccaggggcaaaugaugu

SEQ ID NO: 1643463 - RNA, 19 nt, Artificial Sequence
  Description of Artificial Sequence: Synthetic oligonucleotide
guacaaaccagggugucag

SEQ ID NO: 1643464 - RNA, 19 nt, Artificial Sequence
  Description of Artificial Sequence: Synthetic oligonucleotide
caauuugacuccugcucgg

SEQ ID NO: 1643465 - RNA, 19 nt, Artificial Sequence
  Description of Artificial Sequence: Synthetic oligonucleotide
uauuuugaccaugccaaac

SEQ ID NO: 1643466 - RNA, 19 nt, Artificial Sequence
  Description of Artificial Sequence: Synthetic oligonucleotide
cauuauuuacuuuggcaga

SEQ ID NO: 1643467 - RNA, 19 nt, Artificial Sequence
  Description of Artificial Sequence: Synthetic oligonucleotide
uccacuuuugggugaaggu

SEQ ID NO: 1643468 - RNA, 19 nt, Artificial Sequence
  Description of Artificial Sequence: Synthetic oligonucleotide
aguaaguugguguguuaca

SEQ ID NO: 1643469 - RNA, 19 nt, Artificial Sequence
  Description of Artificial Sequence: Synthetic oligonucleotide
aauguggcacaaacaugac

SEQ ID NO: 1643470 - RNA, 19 nt, Artificial Sequence
  Description of Artificial Sequence: Synthetic oligonucleotide
uccgccaacuuauucuccc

SEQ ID NO: 1643471 - RNA, 19 nt, Artificial Sequence
  Description of Artificial Sequence: Synthetic oligonucleotide
uagcagcgaugccaaaacg

SEQ ID NO: 1643472 - RNA, 19 nt, Artificial Sequence
  Description of Artificial Sequence: Synthetic oligonucleotide
acugccgagacuaaaacaa

SEQ ID NO: 1643473 - RNA, 19 nt, Artificial Sequence
  Description of Artificial Sequence: Synthetic oligonucleotide
uggcauuauuuacuuuggc

SEQ ID NO: 1643474 - RNA, 19 nt, Artificial Sequence
  Description of Artificial Sequence: Synthetic oligonucleotide
gauuuggcugugucaaaac

SEQ ID NO: 1643475 - RNA, 19 nt, Artificial Sequence
  Description of Artificial Sequence: Synthetic oligonucleotide
gaucuauuuugaccaugcc

SEQ ID NO: 1643476 - RNA, 19 nt, Artificial Sequence
  Description of Artificial Sequence: Synthetic oligonucleotide
uacugccgagacuaaaaca

SEQ ID NO: 1643477 - RNA, 19 nt, Artificial Sequence
  Description of Artificial Sequence: Synthetic oligonucleotide
cauugaaguucuuuccauc

SEQ ID NO: 1643478 - RNA, 19 nt, Artificial Sequence
  Description of Artificial Sequence: Synthetic oligonucleotide
uggaaaaguggagugggac

SEQ ID NO: 1643479 - RNA, 19 nt, Artificial Sequence
  Description of Artificial Sequence: Synthetic oligonucleotide
aguuucaacccauccgcca

SEQ ID NO: 1643480 - RNA, 19 nt, Artificial Sequence
  Description of Artificial Sequence: Synthetic oligonucleotide
ucccuguaucaguauaagc

SEQ ID NO: 1643481 - RNA, 19 nt, Artificial Sequence
  Description of Artificial Sequence: Synthetic oligonucleotide
aucaacauuacugccgaga

SEQ ID NO: 1643482 - RNA, 19 nt, Artificial Sequence
  Description of Artificial Sequence: Synthetic oligonucleotide
guaaguugguguguuacac

SEQ ID NO: 1643483 - RNA, 19 nt, Artificial Sequence
  Description of Artificial Sequence: Synthetic oligonucleotide
ugccgagacuaaaacaauc

SEQ ID NO: 1643484 - RNA, 19 nt, Artificial Sequence
  Description of Artificial Sequence: Synthetic oligonucleotide
aggaugugacguacaaacc

SEQ ID NO: 1643485 - RNA, 19 nt, Artificial Sequence
  Description of Artificial Sequence: Synthetic oligonucleotide
aggauggauuuguaaucuc

SEQ ID NO: 1643486 - RNA, 19 nt, Artificial Sequence
  Description of Artificial Sequence: Synthetic oligonucleotide
acacauaucuacaacccga

SEQ ID NO: 1643487 - RNA, 19 nt, Artificial Sequence
  Description of Artificial Sequence: Synthetic oligonucleotide
acuuucugguagauugagc

SEQ ID NO: 1643488 - RNA, 19 nt, Artificial Sequence
  Description of Artificial Sequence: Synthetic oligonucleotide
uuacaauucuuuggaagaa

SEQ ID NO: 1643489 - RNA, 19 nt, Artificial Sequence
  Description of Artificial Sequence: Synthetic oligonucleotide
cuuaggauggauuuguaau

SEQ ID NO: 1643490 - RNA, 19 nt, Artificial Sequence
  Description of Artificial Sequence: Synthetic oligonucleotide
ggaugugacguacaaacca

SEQ ID NO: 1643491 - RNA, 19 nt, Artificial Sequence
  Description of Artificial Sequence: Synthetic oligonucleotide
uacuuuggcagagagcgaa

SEQ ID NO: 1643492 - RNA, 19 nt, Artificial Sequence
  Description of Artificial Sequence: Synthetic oligonucleotide
cgagacuaaaacaaucccg

SEQ ID NO: 1643493 - RNA, 19 nt, Artificial Sequence
  Description of Artificial Sequence: Synthetic oligonucleotide
uucacaugaguaugcaguu

SEQ ID NO: 1643494 - RNA, 19 nt, Artificial Sequence
  Description of Artificial Sequence: Synthetic oligonucleotide
guauaagcaugaccugaag

SEQ ID NO: 1643495 - RNA, 19 nt, Artificial Sequence
  Description of Artificial Sequence: Synthetic oligonucleotide
auaugguaucaagagucag

SEQ ID NO: 1643496 - RNA, 19 nt, Artificial Sequence
  Description of Artificial Sequence: Synthetic oligonucleotide
cacauuaagcuuccaguuc

SEQ ID NO: 1643497 - RNA, 19 nt, Artificial Sequence
  Description of Artificial Sequence: Synthetic oligonucleotide
ugguacaaauaugguauca

SEQ ID NO: 1643498 - RNA, 19 nt, Artificial Sequence
  Description of Artificial Sequence: Synthetic oligonucleotide
uuguaaucucuagacuuca

SEQ ID NO: 1643499 - RNA, 19 nt, Artificial Sequence
  Description of Artificial Sequence: Synthetic oligonucleotide
ucaguaccgucauucacau

SEQ ID NO: 1643500 - RNA, 19 nt, Artificial Sequence
  Description of Artificial Sequence: Synthetic oligonucleotide
uccuaggucacaguaaguu

SEQ ID NO: 1643501 - RNA, 19 nt, Artificial Sequence
  Description of Artificial Sequence: Synthetic oligonucleotide
caaccuugugaccuccugc

SEQ ID NO: 1643502 - RNA, 19 nt, Artificial Sequence
  Description of Artificial Sequence: Synthetic oligonucleotide
cucuagacuucaguguggg

SEQ ID NO: 1643503 - RNA, 19 nt, Artificial Sequence
  Description of Artificial Sequence: Synthetic oligonucleotide
cccuguaucaguauaagca

SEQ ID NO: 1643504 - RNA, 19 nt, Artificial Sequence
  Description of Artificial Sequence: Synthetic oligonucleotide
uaucuacaacccgagggug

SEQ ID NO: 1643505 - RNA, 19 nt, Artificial Sequence
  Description of Artificial Sequence: Synthetic oligonucleotide
ucauucacaugaguaugca

SEQ ID NO: 1643506 - RNA, 19 nt, Artificial Sequence
  Description of Artificial Sequence: Synthetic oligonucleotide
agagacugauauaacaaaa

SEQ ID NO: 1643507 - RNA, 19 nt, Artificial Sequence
  Description of Artificial Sequence: Synthetic oligonucleotide
uggguuuauuucacucuga

SEQ ID NO: 1643508 - RNA, 19 nt, Artificial Sequence
  Description of Artificial Sequence: Synthetic oligonucleotide
gaccugaaguagaaaauuc

SEQ ID NO: 1643509 - RNA, 19 nt, Artificial Sequence
  Description of Artificial Sequence: Synthetic oligonucleotide
guugguguguuacacauau

SEQ ID NO: 1643510 - RNA, 19 nt, Artificial Sequence
  Description of Artificial Sequence: Synthetic oligonucleotide
caguaaguugguguguuac

SEQ ID NO: 1643511 - RNA, 19 nt, Artificial Sequence
  Description of Artificial Sequence: Synthetic oligonucleotide
ucccgucuaaaugaggccu

SEQ ID NO: 1643512 - RNA, 19 nt, Artificial Sequence
  Description of Artificial Sequence: Synthetic oligonucleotide
ucucgcaccaacgccgucc

SEQ ID NO: 1643513 - RNA, 19 nt, Artificial Sequence
  Description of Artificial Sequence: Synthetic oligonucleotide
caaggcaacgcugaagguc

SEQ ID NO: 1643514 - RNA, 19 nt, Artificial Sequence
  Description of Artificial Sequence: Synthetic oligonucleotide
ugguucucagaucuauuuu

SEQ ID NO: 1643515 - RNA, 19 nt, Artificial Sequence
  Description of Artificial Sequence: Synthetic oligonucleotide
aacccauccgccaacuuau

SEQ ID NO: 1643516 - RNA, 19 nt, Artificial Sequence
  Description of Artificial Sequence: Synthetic oligonucleotide
uuauuuacuuuggcagaga

SEQ ID NO: 1643517 - RNA, 19 nt, Artificial Sequence
  Description of Artificial Sequence: Synthetic oligonucleotide
acaacccgagggugggccc

SEQ ID NO: 1643518 - RNA, 19 nt, Artificial Sequence
  Description of Artificial Sequence: Synthetic oligonucleotide
gagcgaaguucuacaaucc

SEQ ID NO: 1643519 - RNA, 19 nt, Artificial Sequence
  Description of Artificial Sequence: Synthetic oligonucleotide
uuaaagcugacagggucaa

SEQ ID NO: 1643520 - RNA, 19 nt, Artificial Sequence
  Description of Artificial Sequence: Synthetic oligonucleotide
caugccagguuuacugaug

SEQ ID NO: 1643521 - RNA, 19 nt, Artificial Sequence
  Description of Artificial Sequence: Synthetic oligonucleotide
ugggacaugcaggauguga

SEQ ID NO: 1643522 - RNA, 19 nt, Artificial Sequence
  Description of Artificial Sequence: Synthetic oligonucleotide
gguagauugagccuccaaa

SEQ ID NO: 1643523 - RNA, 19 nt, Artificial Sequence
  Description of Artificial Sequence: Synthetic oligonucleotide
caaucccgucuaaaugagg

SEQ ID NO: 1643524 - RNA, 19 nt, Artificial Sequence
  Description of Artificial Sequence: Synthetic oligonucleotide
gagcaaaauuauucugaga

SEQ ID NO: 1643525 - RNA, 19 nt, Artificial Sequence
  Description of Artificial Sequence: Synthetic oligonucleotide
agggucugcguauaaccca

SEQ ID NO: 1643526 - RNA, 19 nt, Artificial Sequence
  Description of Artificial Sequence: Synthetic oligonucleotide
aucuacaacccgagggugg

SEQ ID NO: 1643527 - RNA, 19 nt, Artificial Sequence
  Description of Artificial Sequence: Synthetic oligonucleotide
acuacaagacuugguucuc

SEQ ID NO: 1643528 - RNA, 19 nt, Artificial Sequence
  Description of Artificial Sequence: Synthetic oligonucleotide
ucuagguugccugaugcuu

SEQ ID NO: 1643529 - RNA, 19 nt, Artificial Sequence
  Description of Artificial Sequence: Synthetic oligonucleotide
uuuggcagagagcgaaguu

SEQ ID NO: 1643530 - RNA, 19 nt, Artificial Sequence
  Description of Artificial Sequence: Synthetic oligonucleotide
agagagcgaaguucuacaa

SEQ ID NO: 1643531 - RNA, 19 nt, Artificial Sequence
  Description of Artificial Sequence: Synthetic oligonucleotide
uacaacccgagggugggcc

SEQ ID NO: 1643532 - RNA, 19 nt, Artificial Sequence
  Description of Artificial Sequence: Synthetic oligonucleotide
aucccaauccaaccuugug

SEQ ID NO: 1643533 - RNA, 19 nt, Artificial Sequence
  Description of Artificial Sequence: Synthetic oligonucleotide
aaaaguggagugggacaug

SEQ ID NO: 1643534 - RNA, 19 nt, Artificial Sequence
  Description of Artificial Sequence: Synthetic oligonucleotide
augcuuucccuguaucagu

SEQ ID NO: 1643535 - RNA, 19 nt, Artificial Sequence
  Description of Artificial Sequence: Synthetic oligonucleotide
cagaccuuauacuuggucu

SEQ ID NO: 1643536 - RNA, 19 nt, Artificial Sequence
  Description of Artificial Sequence: Synthetic oligonucleotide
aguauaagcaugaccugaa

SEQ ID NO: 1643537 - RNA, 19 nt, Artificial Sequence
  Description of Artificial Sequence: Synthetic oligonucleotide
agcagcgaugccaaaacga

SEQ ID NO: 1643538 - RNA, 19 nt, Artificial Sequence
  Description of Artificial Sequence: Synthetic oligonucleotide
ggaaaaguggagugggaca

SEQ ID NO: 1643539 - RNA, 19 nt, Artificial Sequence
  Description of Artificial Sequence: Synthetic oligonucleotide
caugcaggaugugacguac

SEQ ID NO: 1643540 - RNA, 19 nt, Artificial Sequence
  Description of Artificial Sequence: Synthetic oligonucleotide
ggacaugcaggaugugacg

SEQ ID NO: 1643541 - RNA, 19 nt, Artificial Sequence
  Description of Artificial Sequence: Synthetic oligonucleotide
acucaaccgaaauguggca

SEQ ID NO: 1643542 - RNA, 19 nt, Artificial Sequence
  Description of Artificial Sequence: Synthetic oligonucleotide
acaaucccgucuaaaugag

SEQ ID NO: 1643543 - RNA, 19 nt, Artificial Sequence
  Description of Artificial Sequence: Synthetic oligonucleotide
ccaugccaaacccauaccc

SEQ ID NO: 1643544 - RNA, 19 nt, Artificial Sequence
  Description of Artificial Sequence: Synthetic oligonucleotide
guaaucucuagacuucagu

SEQ ID NO: 1643545 - RNA, 19 nt, Artificial Sequence
  Description of Artificial Sequence: Synthetic oligonucleotide
cccaauccaaccuugugac

SEQ ID NO: 1643546 - RNA, 19 nt, Artificial Sequence
  Description of Artificial Sequence: Synthetic oligonucleotide
uguuacugaggaacauauu

SEQ ID NO: 1643547 - RNA, 19 nt, Artificial Sequence
  Description of Artificial Sequence: Synthetic oligonucleotide
gugaccuccugcauugaag

SEQ ID NO: 1643548 - RNA, 19 nt, Artificial Sequence
  Description of Artificial Sequence: Synthetic oligonucleotide
uccaucuauuaaagcugac

SEQ ID NO: 1643549 - RNA, 19 nt, Artificial Sequence
  Description of Artificial Sequence: Synthetic oligonucleotide
cacuacaagacuugguucu

SEQ ID NO: 1643550 - RNA, 19 nt, Artificial Sequence
  Description of Artificial Sequence: Synthetic oligonucleotide
aggucuucucgcaccaacg

SEQ ID NO: 1643551 - RNA, 19 nt, Artificial Sequence
  Description of Artificial Sequence: Synthetic oligonucleotide
uucacacguuugaaauuuc

SEQ ID NO: 1643552 - RNA, 19 nt, Artificial Sequence
  Description of Artificial Sequence: Synthetic oligonucleotide
guuucaacccauccgccaa

SEQ ID NO: 1643553 - RNA, 19 nt, Artificial Sequence
  Description of Artificial Sequence: Synthetic oligonucleotide
cagagagcgaaguucuaca

SEQ ID NO: 1643554 - RNA, 19 nt, Artificial Sequence
  Description of Artificial Sequence: Synthetic oligonucleotide
aaucccaauccaaccuugu

SEQ ID NO: 1643555 - RNA, 19 nt, Artificial Sequence
  Description of Artificial Sequence: Synthetic oligonucleotide
ucagaucuauuuugaccau

SEQ ID NO: 1643556 - RNA, 19 nt, Artificial Sequence
  Description of Artificial Sequence: Synthetic oligonucleotide
gggucaauuugacuccugc

SEQ ID NO: 1643557 - RNA, 19 nt, Artificial Sequence
  Description of Artificial Sequence: Synthetic oligonucleotide
agaacucaaccgaaaugug

SEQ ID NO: 1643558 - RNA, 19 nt, Artificial Sequence
  Description of Artificial Sequence: Synthetic oligonucleotide
augccaaacccauacccuu

SEQ ID NO: 1643559 - RNA, 19 nt, Artificial Sequence
  Description of Artificial Sequence: Synthetic oligonucleotide
caguauaagcaugaccuga

SEQ ID NO: 1643560 - RNA, 19 nt, Artificial Sequence
  Description of Artificial Sequence: Synthetic oligonucleotide
augcaaaaccaaagauuuc

SEQ ID NO: 1643561 - RNA, 19 nt, Artificial Sequence
  Description of Artificial Sequence: Synthetic oligonucleotide
gccgagacuaaaacaaucc

SEQ ID NO: 1643562 - RNA, 19 nt, Artificial Sequence
  Description of Artificial Sequence: Synthetic oligonucleotide
agugugggaaggauuacaa

SEQ ID NO: 1643563 - RNA, 19 nt, Artificial Sequence
  Description of Artificial Sequence: Synthetic oligonucleotide
gaaaaguggagugggacau

SEQ ID NO: 1643564 - RNA, 19 nt, Artificial Sequence
  Description of Artificial Sequence: Synthetic oligonucleotide
accgucauucacaugagua

SEQ ID NO: 1643565 - RNA, 19 nt, Artificial Sequence
  Description of Artificial Sequence: Synthetic oligonucleotide
uggucucuagguugccuga

SEQ ID NO: 1643566 - RNA, 19 nt, Artificial Sequence
  Description of Artificial Sequence: Synthetic oligonucleotide
gauagccagcaagccaacc

SEQ ID NO: 1643567 - RNA, 19 nt, Artificial Sequence
  Description of Artificial Sequence: Synthetic oligonucleotide
aggucauggaaaaguggag

SEQ ID NO: 1643568 - RNA, 19 nt, Artificial Sequence
  Description of Artificial Sequence: Synthetic oligonucleotide
uaccgucauucacaugagu

SEQ ID NO: 1643569 - RNA, 19 nt, Artificial Sequence
  Description of Artificial Sequence: Synthetic oligonucleotide
ugguagauugagccuccaa

SEQ ID NO: 1643570 - RNA, 19 nt, Artificial Sequence
  Description of Artificial Sequence: Synthetic oligonucleotide
uuccuaggucacaguaagu

SEQ ID NO: 1643571 - RNA, 19 nt, Artificial Sequence
  Description of Artificial Sequence: Synthetic oligonucleotide
ggcaaaugauguucuacuc

SEQ ID NO: 1643572 - RNA, 19 nt, Artificial Sequence
  Description of Artificial Sequence: Synthetic oligonucleotide
cacagcccagccauagaug

SEQ ID NO: 1643573 - RNA, 19 nt, Artificial Sequence
  Description of Artificial Sequence: Synthetic oligonucleotide
ucacaguaaguuggugugu

SEQ ID NO: 1643574 - RNA, 19 nt, Artificial Sequence
  Description of Artificial Sequence: Synthetic oligonucleotide
augaccugaaguagaaaau

SEQ ID NO: 1643575 - RNA, 19 nt, Artificial Sequence
  Description of Artificial Sequence: Synthetic oligonucleotide
ggucuucucgcaccaacgc

SEQ ID NO: 1643576 - RNA, 19 nt, Artificial Sequence
  Description of Artificial Sequence: Synthetic oligonucleotide
ugauagccagcaagccaac

SEQ ID NO: 1643577 - RNA, 19 nt, Artificial Sequence
  Description of Artificial Sequence: Synthetic oligonucleotide
auugagccuccaaauucag

SEQ ID NO: 1643578 - RNA, 19 nt, Artificial Sequence
  Description of Artificial Sequence: Synthetic oligonucleotide
ccgagacuaaaacaauccc

SEQ ID NO: 1643579 - RNA, 19 nt, Artificial Sequence
  Description of Artificial Sequence: Synthetic oligonucleotide
guauuccacuuuuggguga

SEQ ID NO: 1643580 - RNA, 19 nt, Artificial Sequence
  Description of Artificial Sequence: Synthetic oligonucleotide
acuuuugggugaaggugag

SEQ ID NO: 1643581 - RNA, 19 nt, Artificial Sequence
  Description of Artificial Sequence: Synthetic oligonucleotide
gccaacuuauucucccaag

SEQ ID NO: 1643582 - RNA, 19 nt, Artificial Sequence
  Description of Artificial Sequence: Synthetic oligonucleotide
ucccgcucuucuuuccugu

SEQ ID NO: 1643583 - RNA, 19 nt, Artificial Sequence
  Description of Artificial Sequence: Synthetic oligonucleotide
guuguuacugaggaacaua

SEQ ID NO: 1643584 - RNA, 19 nt, Artificial Sequence
  Description of Artificial Sequence: Synthetic oligonucleotide
acuucagugugggaaggau

SEQ ID NO: 1643585 - RNA, 19 nt, Artificial Sequence
  Description of Artificial Sequence: Synthetic oligonucleotide
gguacaaauaugguaucaa

SEQ ID NO: 1643586 - RNA, 19 nt, Artificial Sequence
  Description of Artificial Sequence: Synthetic oligonucleotide
gucugcguauaacccaguc

SEQ ID NO: 1643587 - RNA, 19 nt, Artificial Sequence
  Description of Artificial Sequence: Synthetic oligonucleotide
gacaugcaggaugugacgu

SEQ ID NO: 1643588 - RNA, 19 nt, Artificial Sequence
  Description of Artificial Sequence: Synthetic oligonucleotide
cugauguuucaaccuucuc

SEQ ID NO: 1643589 - RNA, 19 nt, Artificial Sequence
  Description of Artificial Sequence: Synthetic oligonucleotide
gacaaucuccaggcaugcc

SEQ ID NO: 1643590 - RNA, 19 nt, Artificial Sequence
  Description of Artificial Sequence: Synthetic oligonucleotide
gggugucagaucauuuucc

SEQ ID NO: 1643591 - RNA, 19 nt, Artificial Sequence
  Description of Artificial Sequence: Synthetic oligonucleotide
gggacaugcaggaugugac

SEQ ID NO: 1643592 - RNA, 19 nt, Artificial Sequence
  Description of Artificial Sequence: Synthetic oligonucleotide
cugagauaguuuggauuug

SEQ ID NO: 1643593 - RNA, 19 nt, Artificial Sequence
  Description of Artificial Sequence: Synthetic oligonucleotide
uccaaccuugugaccuccu

SEQ ID NO: 1643594 - RNA, 19 nt, Artificial Sequence
  Description of Artificial Sequence: Synthetic oligonucleotide
acaugcaggaugugacgua

SEQ ID NO: 1643595 - RNA, 19 nt, Artificial Sequence
  Description of Artificial Sequence: Synthetic oligonucleotide
gcuuauauuuagcagcgau

SEQ ID NO: 1643596 - RNA, 19 nt, Artificial Sequence
  Description of Artificial Sequence: Synthetic oligonucleotide
guucacacguuugaaauuu

SEQ ID NO: 1643597 - RNA, 19 nt, Artificial Sequence
  Description of Artificial Sequence: Synthetic oligonucleotide
gugacguacaaaccagggu

SEQ ID NO: 1643598 - RNA, 19 nt, Artificial Sequence
  Description of Artificial Sequence: Synthetic oligonucleotide
guaccgucauucacaugag

SEQ ID NO: 1643599 - RNA, 19 nt, Artificial Sequence
  Description of Artificial Sequence: Synthetic oligonucleotide
ccacuacaagacuugguuc

SEQ ID NO: 1643600 - RNA, 19 nt, Artificial Sequence
  Description of Artificial Sequence: Synthetic oligonucleotide
ugaccaugccaaacccaua

SEQ ID NO: 1643601 - RNA, 19 nt, Artificial Sequence
  Description of Artificial Sequence: Synthetic oligonucleotide
uccaggggcaaaugauguu

SEQ ID NO: 1643602 - RNA, 19 nt, Artificial Sequence
  Description of Artificial Sequence: Synthetic oligonucleotide
gacuccugcucggaggguc

SEQ ID NO: 1643603 - RNA, 19 nt, Artificial Sequence
  Description of Artificial Sequence: Synthetic oligonucleotide
gggucugcguauaacccag

SEQ ID NO: 1643604 - RNA, 19 nt, Artificial Sequence
  Description of Artificial Sequence: Synthetic oligonucleotide
caacccauccgccaacuua

SEQ ID NO: 1643605 - RNA, 19 nt, Artificial Sequence
  Description of Artificial Sequence: Synthetic oligonucleotide
cacuuccaggggcaaauga

SEQ ID NO: 1643606 - RNA, 19 nt, Artificial Sequence
  Description of Artificial Sequence: Synthetic oligonucleotide
guccaauuaaacuggcauu

SEQ ID NO: 1643607 - RNA, 19 nt, Artificial Sequence
  Description of Artificial Sequence: Synthetic oligonucleotide
ggauuacaauucuuuggaa

SEQ ID NO: 1643608 - RNA, 19 nt, Artificial Sequence
  Description of Artificial Sequence: Synthetic oligonucleotide
gagagcgaaguucuacaau

SEQ ID NO: 1643609 - RNA, 19 nt, Artificial Sequence
  Description of Artificial Sequence: Synthetic oligonucleotide
ccaacuuauucucccaaga

SEQ ID NO: 1643610 - RNA, 19 nt, Artificial Sequence
  Description of Artificial Sequence: Synthetic oligonucleotide
caacgcugaaggucuucuc

SEQ ID NO: 1643611 - RNA, 19 nt, Artificial Sequence
  Description of Artificial Sequence: Synthetic oligonucleotide
ccaguccaauuaaacuggc

SEQ ID NO: 1643612 - RNA, 19 nt, Artificial Sequence
  Description of Artificial Sequence: Synthetic oligonucleotide
agcccagccauagaugguu

SEQ ID NO: 1643613 - RNA, 19 nt, Artificial Sequence
  Description of Artificial Sequence: Synthetic oligonucleotide
ggaaggauuacaauucuuu

SEQ ID NO: 1643614 - RNA, 19 nt, Artificial Sequence
  Description of Artificial Sequence: Synthetic oligonucleotide
auggaaaaguggaguggga

SEQ ID NO: 1643615 - RNA, 19 nt, Artificial Sequence
  Description of Artificial Sequence: Synthetic oligonucleotide
aaaccacauuaagcuucca

SEQ ID NO: 1643616 - RNA, 19 nt, Artificial Sequence
  Description of Artificial Sequence: Synthetic oligonucleotide
uucuacaauccagcuuaua

SEQ ID NO: 1643617 - RNA, 19 nt, Artificial Sequence
  Description of Artificial Sequence: Synthetic oligonucleotide
cuacaagacuugguucuca

SEQ ID NO: 1643618 - RNA, 19 nt, Artificial Sequence
  Description of Artificial Sequence: Synthetic oligonucleotide
acuacagcagagacugaua

SEQ ID NO: 1643619 - RNA, 19 nt, Artificial Sequence
  Description of Artificial Sequence: Synthetic oligonucleotide
caacccgagggugggcccg

SEQ ID NO: 1643620 - RNA, 19 nt, Artificial Sequence
  Description of Artificial Sequence: Synthetic oligonucleotide
ucggagggucugcguauaa

SEQ ID NO: 1643621 - RNA, 19 nt, Artificial Sequence
  Description of Artificial Sequence: Synthetic oligonucleotide
ggauuuggcugugucaaaa

SEQ ID NO: 1643622 - RNA, 19 nt, Artificial Sequence
  Description of Artificial Sequence: Synthetic oligonucleotide
aaccgaaauguggcacaaa

SEQ ID NO: 1643623 - RNA, 19 nt, Artificial Sequence
  Description of Artificial Sequence: Synthetic oligonucleotide
ggucauggaaaaguggagu

SEQ ID NO: 1643624 - RNA, 19 nt, Artificial Sequence
  Description of Artificial Sequence: Synthetic oligonucleotide
ggucaauuugacuccugcu

SEQ ID NO: 1643625 - RNA, 19 nt, Artificial Sequence
  Description of Artificial Sequence: Synthetic oligonucleotide
aggccaaaacauagugggu

SEQ ID NO: 1643626 - RNA, 19 nt, Artificial Sequence
  Description of Artificial Sequence: Synthetic oligonucleotide
ggcugugucaaaacucauc

SEQ ID NO: 1643627 - RNA, 19 nt, Artificial Sequence
  Description of Artificial Sequence: Synthetic oligonucleotide
gaccuuauacuuggucucu

SEQ ID NO: 1643628 - RNA, 19 nt, Artificial Sequence
  Description of Artificial Sequence: Synthetic oligonucleotide
gccauagaugguuggucca

SEQ ID NO: 1643629 - RNA, 19 nt, Artificial Sequence
  Description of Artificial Sequence: Synthetic oligonucleotide
cgucauucacaugaguaug

SEQ ID NO: 1643630 - RNA, 19 nt, Artificial Sequence
  Description of Artificial Sequence: Synthetic oligonucleotide
accagggugucagaucauu

SEQ ID NO: 1643631 - RNA, 19 nt, Artificial Sequence
  Description of Artificial Sequence: Synthetic oligonucleotide
cuagguugccugaugcuuu

SEQ ID NO: 1643632 - RNA, 19 nt, Artificial Sequence
  Description of Artificial Sequence: Synthetic oligonucleotide
cuacaacccgagggugggc

SEQ ID NO: 1643633 - RNA, 19 nt, Artificial Sequence
  Description of Artificial Sequence: Synthetic oligonucleotide
cucuuaggauggauuugua

SEQ ID NO: 1643634 - RNA, 19 nt, Artificial Sequence
  Description of Artificial Sequence: Synthetic oligonucleotide
caacauuacugccgagacu

SEQ ID NO: 1643635 - RNA, 19 nt, Artificial Sequence
  Description of Artificial Sequence: Synthetic oligonucleotide
ggccuuuaauuucccgcuc

SEQ ID NO: 1643636 - RNA, 19 nt, Artificial Sequence
  Description of Artificial Sequence: Synthetic oligonucleotide
cucuagguugccugaugcu

SEQ ID NO: 1643637 - RNA, 19 nt, Artificial Sequence
  Description of Artificial Sequence: Synthetic oligonucleotide
ccauccgccaacuuauucu

SEQ ID NO: 1643638 - RNA, 19 nt, Artificial Sequence
  Description of Artificial Sequence: Synthetic oligonucleotide
ccuuuccuaggucacagua

SEQ ID NO: 1643639 - RNA, 19 nt, Artificial Sequence
  Description of Artificial Sequence: Synthetic oligonucleotide
caguaccgucauucacaug

SEQ ID NO: 1643640 - RNA, 19 nt, Artificial Sequence
  Description of Artificial Sequence: Synthetic oligonucleotide
cgcaccaacgccguccgcg

SEQ ID NO: 1643641 - RNA, 19 nt, Artificial Sequence
  Description of Artificial Sequence: Synthetic oligonucleotide
uucucgcaccaacgccguc

SEQ ID NO: 1643642 - RNA, 19 nt, Artificial Sequence
  Description of Artificial Sequence: Synthetic oligonucleotide
cuuuggcagagagcgaagu

SEQ ID NO: 1643643 - RNA, 19 nt, Artificial Sequence
  Description of Artificial Sequence: Synthetic oligonucleotide
cacuacagcagagacugau

SEQ ID NO: 1643644 - RNA, 19 nt, Artificial Sequence
  Description of Artificial Sequence: Synthetic oligonucleotide
caaacccauacccuuuguu

SEQ ID NO: 1643645 - RNA, 19 nt, Artificial Sequence
  Description of Artificial Sequence: Synthetic oligonucleotide
caaccgaaauguggcacaa

SEQ ID NO: 1643646 - RNA, 19 nt, Artificial Sequence
  Description of Artificial Sequence: Synthetic oligonucleotide
cuccacuacaagacuuggu

SEQ ID NO: 1643647 - RNA, 19 nt, Artificial Sequence
  Description of Artificial Sequence: Synthetic oligonucleotide
gccuuuaauuucccgcucu

SEQ ID NO: 1643648 - RNA, 19 nt, Artificial Sequence
  Description of Artificial Sequence: Synthetic oligonucleotide
ggccaaaacauaguggguu

SEQ ID NO: 1643649 - RNA, 19 nt, Artificial Sequence
  Description of Artificial Sequence: Synthetic oligonucleotide
ccgagggugggcccggccc

SEQ ID NO: 1643650 - RNA, 19 nt, Artificial Sequence
  Description of Artificial Sequence: Synthetic oligonucleotide
caaaacauaguggguucau

SEQ ID NO: 1643651 - RNA, 19 nt, Artificial Sequence
  Description of Artificial Sequence: Synthetic oligonucleotide
cccauccgccaacuuauuc

SEQ ID NO: 1643652 - RNA, 19 nt, Artificial Sequence
  Description of Artificial Sequence: Synthetic oligonucleotide
ucgcaccaacgccguccgc

SEQ ID NO: 1643653 - RNA, 19 nt, Artificial Sequence
  Description of Artificial Sequence: Synthetic oligonucleotide
cuucucgcaccaacgccgu

SEQ ID NO: 1643654 - RNA, 19 nt, Artificial Sequence
  Description of Artificial Sequence: Synthetic oligonucleotide
cacaguaaguugguguguu

SEQ ID NO: 1643655 - RNA, 19 nt, Artificial Sequence
  Description of Artificial Sequence: Synthetic oligonucleotide
cugccgagacuaaaacaau

SEQ ID NO: 1643656 - RNA, 19 nt, Artificial Sequence
  Description of Artificial Sequence: Synthetic oligonucleotide
ccuuaacaugacacuaagu

SEQ ID NO: 1643657 - RNA, 19 nt, Artificial Sequence
  Description of Artificial Sequence: Synthetic oligonucleotide
ccgucauucacaugaguau

SEQ ID NO: 1643658 - RNA, 19 nt, Artificial Sequence
  Description of Artificial Sequence: Synthetic oligonucleotide
ggcccgcuccaccaaggca

SEQ ID NO: 1643659 - RNA, 19 nt, Artificial Sequence
  Description of Artificial Sequence: Synthetic oligonucleotide
cugguagauugagccucca

SEQ ID NO: 1643660 - RNA, 19 nt, Artificial Sequence
  Description of Artificial Sequence: Synthetic oligonucleotide
cacagaccuuauacuuggu

SEQ ID NO: 1643661 - RNA, 19 nt, Artificial Sequence
  Description of Artificial Sequence: Synthetic oligonucleotide
caaauucaguaccgucauu

SEQ ID NO: 1643662 - RNA, 19 nt, Artificial Sequence
  Description of Artificial Sequence: Synthetic oligonucleotide
gaccucucuuaggauggau

SEQ ID NO: 1643663 - RNA, 19 nt, Artificial Sequence
  Description of Artificial Sequence: Synthetic oligonucleotide
ccaagaguauugucuguau

SEQ ID NO: 1643664 - RNA, 19 nt, Artificial Sequence
  Description of Artificial Sequence: Synthetic oligonucleotide
cguacaaaccaggguguca

SEQ ID NO: 1643665 - RNA, 19 nt, Artificial Sequence
  Description of Artificial Sequence: Synthetic oligonucleotide
guucuacaauccagcuuau

SEQ ID NO: 1643666 - RNA, 19 nt, Artificial Sequence
  Description of Artificial Sequence: Synthetic oligonucleotide
cucggagggucugcguaua

SEQ ID NO: 1643667 - RNA, 19 nt, Artificial Sequence
  Description of Artificial Sequence: Synthetic oligonucleotide
cagcccagccauagauggu

SEQ ID NO: 1643668 - RNA, 19 nt, Artificial Sequence
  Description of Artificial Sequence: Synthetic oligonucleotide
ccacuccacuacaagacuu

SEQ ID NO: 1643669 - RNA, 19 nt, Artificial Sequence
  Description of Artificial Sequence: Synthetic oligonucleotide
gcuuucccuguaucaguau

SEQ ID NO: 1643670 - RNA, 19 nt, Artificial Sequence
  Description of Artificial Sequence: Synthetic oligonucleotide
ggaccucucuuaggaugga

SEQ ID NO: 1643671 - RNA, 19 nt, Artificial Sequence
  Description of Artificial Sequence: Synthetic oligonucleotide
ggcaugccuucaaggaccu

SEQ ID NO: 1643672 - RNA, 19 nt, Artificial Sequence
  Description of Artificial Sequence: Synthetic oligonucleotide
ccaugccagguuuacugau

SEQ ID NO: 1643673 - RNA, 19 nt, Artificial Sequence
  Description of Artificial Sequence: Synthetic oligonucleotide
acccauccgccaacuuauu

SEQ ID NO: 1643674 - RNA, 19 nt, Artificial Sequence
  Description of Artificial Sequence: Synthetic oligonucleotide
gcuguccaugccagguuua

SEQ ID NO: 1643675 - RNA, 19 nt, Artificial Sequence
  Description of Artificial Sequence: Synthetic oligonucleotide
cgccaacuuauucucccaa

SEQ ID NO: 1643676 - RNA, 19 nt, Artificial Sequence
  Description of Artificial Sequence: Synthetic oligonucleotide
cccgagggugggcccggcc

SEQ ID NO: 1643677 - RNA, 19 nt, Artificial Sequence
  Description of Artificial Sequence: Synthetic oligonucleotide
ccaaggcaacgcugaaggu

SEQ ID NO: 1643678 - RNA, 19 nt, Artificial Sequence
  Description of Artificial Sequence: Synthetic oligonucleotide
ccagggugucagaucauuu

SEQ ID NO: 1643679 - RNA, 19 nt, Artificial Sequence
  Description of Artificial Sequence: Synthetic oligonucleotide
ggucugcguauaacccagu

SEQ ID NO: 1643680 - RNA, 19 nt, Artificial Sequence
  Description of Artificial Sequence: Synthetic oligonucleotide
cccgucuaaaugaggccuu

SEQ ID NO: 1643681 - RNA, 19 nt, Artificial Sequence
  Description of Artificial Sequence: Synthetic oligonucleotide
ccgucuaaaugaggccuuu

SEQ ID NO: 1643682 - RNA, 19 nt, Artificial Sequence
  Description of Artificial Sequence: Synthetic oligonucleotide
aagacugugauucucucgc

SEQ ID NO: 1643683 - RNA, 19 nt, Artificial Sequence
  Description of Artificial Sequence: Synthetic oligonucleotide
uuuaguuucuagaaaagcc

SEQ ID NO: 1643684 - RNA, 19 nt, Artificial Sequence
  Description of Artificial Sequence: Synthetic oligonucleotide
aagggcaagagauacuucc

SEQ ID NO: 1643685 - RNA, 19 nt, Artificial Sequence
  Description of Artificial Sequence: Synthetic oligonucleotide
aaagccacuaaugaaaagg

SEQ ID NO: 1643686 - RNA, 19 nt, Artificial Sequence
  Description of Artificial Sequence: Synthetic oligonucleotide
agcacuuccacacacacac

SEQ ID NO: 1643687 - RNA, 19 nt, Artificial Sequence
  Description of Artificial Sequence: Synthetic oligonucleotide
uuuaaguuuaguuucuaga

SEQ ID NO: 1643688 - RNA, 19 nt, Artificial Sequence
  Description of Artificial Sequence: Synthetic oligonucleotide
uuaguuucuagaaaagcca

SEQ ID NO: 1643689 - RNA, 19 nt, Artificial Sequence
  Description of Artificial Sequence: Synthetic oligonucleotide
ugauuucgaacccaaagcc

SEQ ID NO: 1643690 - RNA, 19 nt, Artificial Sequence
  Description of Artificial Sequence: Synthetic oligonucleotide
acaaauagcaugcgguccc

SEQ ID NO: 1643691 - RNA, 19 nt, Artificial Sequence
  Description of Artificial Sequence: Synthetic oligonucleotide
aaguacaaauagcaugcgg

SEQ ID NO: 1643692 - RNA, 19 nt, Artificial Sequence
  Description of Artificial Sequence: Synthetic oligonucleotide
aggacaaaagaaaagacuc

SEQ ID NO: 1643693 - RNA, 19 nt, Artificial Sequence
  Description of Artificial Sequence: Synthetic oligonucleotide
ucaugggugauuucgaacc

SEQ ID NO: 1643694 - RNA, 19 nt, Artificial Sequence
  Description of Artificial Sequence: Synthetic oligonucleotide
ucugcagucgcuuauaguc

SEQ ID NO: 1643695 - RNA, 19 nt, Artificial Sequence
  Description of Artificial Sequence: Synthetic oligonucleotide
agagcgagcagcgagaugg

SEQ ID NO: 1643696 - RNA, 19 nt, Artificial Sequence
  Description of Artificial Sequence: Synthetic oligonucleotide
aagaaaugguguucuguuc

SEQ ID NO: 1643697 - RNA, 19 nt, Artificial Sequence
  Description of Artificial Sequence: Synthetic oligonucleotide
cacuaaauuuaaauucugg

SEQ ID NO: 1643698 - RNA, 19 nt, Artificial Sequence
  Description of Artificial Sequence: Synthetic oligonucleotide
cuuugaucaucuuugcagc

SEQ ID NO: 1643699 - RNA, 19 nt, Artificial Sequence
  Description of Artificial Sequence: Synthetic oligonucleotide
guaugaaagguuugugugg

SEQ ID NO: 1643700 - RNA, 19 nt, Artificial Sequence
  Description of Artificial Sequence: Synthetic oligonucleotide
auuucucacaggcugugac

SEQ ID NO: 1643701 - RNA, 19 nt, Artificial Sequence
  Description of Artificial Sequence: Synthetic oligonucleotide
ucucccaugauccucccag

SEQ ID NO: 1643702 - RNA, 19 nt, Artificial Sequence
  Description of Artificial Sequence: Synthetic oligonucleotide
uacaccauggcccaggcuc

SEQ ID NO: 1643703 - RNA, 19 nt, Artificial Sequence
  Description of Artificial Sequence: Synthetic oligonucleotide
ugauucucucgccaaagcc

SEQ ID NO: 1643704 - RNA, 19 nt, Artificial Sequence
  Description of Artificial Sequence: Synthetic oligonucleotide
ugaaagguggaaccagucc

SEQ ID NO: 1643705 - RNA, 19 nt, Artificial Sequence
  Description of Artificial Sequence: Synthetic oligonucleotide
gaacccaaagcccucgccg

SEQ ID NO: 1643706 - RNA, 19 nt, Artificial Sequence
  Description of Artificial Sequence: Synthetic oligonucleotide
augauccuacccucaaugc

SEQ ID NO: 1643707 - RNA, 19 nt, Artificial Sequence
  Description of Artificial Sequence: Synthetic oligonucleotide
gugauuucgaacccaaagc

SEQ ID NO: 1643708 - RNA, 19 nt, Artificial Sequence
  Description of Artificial Sequence: Synthetic oligonucleotide
ugguacacaaggacaaaag

SEQ ID NO: 1643709 - RNA, 19 nt, Artificial Sequence
  Description of Artificial Sequence: Synthetic oligonucleotide
agagauacuucccagcagu

SEQ ID NO: 1643710 - RNA, 19 nt, Artificial Sequence
  Description of Artificial Sequence: Synthetic oligonucleotide
ucacuaaauuuaaauucug

SEQ ID NO: 1643711 - RNA, 19 nt, Artificial Sequence
  Description of Artificial Sequence: Synthetic oligonucleotide
uaugaaagguuuguguggc

SEQ ID NO: 1643712 - RNA, 19 nt, Artificial Sequence
  Description of Artificial Sequence: Synthetic oligonucleotide
gauggaggugguaugaaag

SEQ ID NO: 1643713 - RNA, 19 nt, Artificial Sequence
  Description of Artificial Sequence: Synthetic oligonucleotide
aaggagauaaguguccugu

SEQ ID NO: 1643714 - RNA, 19 nt, Artificial Sequence
  Description of Artificial Sequence: Synthetic oligonucleotide
guuggagaauuucucacag

SEQ ID NO: 1643715 - RNA, 19 nt, Artificial Sequence
  Description of Artificial Sequence: Synthetic oligonucleotide
aguucagcaacaucuugag

SEQ ID NO: 1643716 - RNA, 19 nt, Artificial Sequence
  Description of Artificial Sequence: Synthetic oligonucleotide
aguacaaauagcaugcggu

SEQ ID NO: 1643717 - RNA, 19 nt, Artificial Sequence
  Description of Artificial Sequence: Synthetic oligonucleotide
gguaugaaagguuugugug

SEQ ID NO: 1643718 - RNA, 19 nt, Artificial Sequence
  Description of Artificial Sequence: Synthetic oligonucleotide
gaaagguuuguguggcccg

SEQ ID NO: 1643719 - RNA, 19 nt, Artificial Sequence
  Description of Artificial Sequence: Synthetic oligonucleotide
ucuugaguucuccuugcag

SEQ ID NO: 1643720 - RNA, 19 nt, Artificial Sequence
  Description of Artificial Sequence: Synthetic oligonucleotide
aauuuaaauucugggugug

SEQ ID NO: 1643721 - RNA, 19 nt, Artificial Sequence
  Description of Artificial Sequence: Synthetic oligonucleotide
aaaagggcaagagauacuu

SEQ ID NO: 1643722 - RNA, 19 nt, Artificial Sequence
  Description of Artificial Sequence: Synthetic oligonucleotide
gaugucacuaaauuuaaau

SEQ ID NO: 1643723 - RNA, 19 nt, Artificial Sequence
  Description of Artificial Sequence: Synthetic oligonucleotide
caugauccuacccucaaug

SEQ ID NO: 1643724 - RNA, 19 nt, Artificial Sequence
  Description of Artificial Sequence: Synthetic oligonucleotide
ggugauuucgaacccaaag

SEQ ID NO: 1643725 - RNA, 19 nt, Artificial Sequence
  Description of Artificial Sequence: Synthetic oligonucleotide
cuaaauuuaaauucugggu

SEQ ID NO: 1643726 - RNA, 19 nt, Artificial Sequence
  Description of Artificial Sequence: Synthetic oligonucleotide
cuacccucaaugcacacag

SEQ ID NO: 1643727 - RNA, 19 nt, Artificial Sequence
  Description of Artificial Sequence: Synthetic oligonucleotide
uguuggagaauuucucaca

SEQ ID NO: 1643728 - RNA, 19 nt, Artificial Sequence
  Description of Artificial Sequence: Synthetic oligonucleotide
aauagcaugcggucccuga

SEQ ID NO: 1643729 - RNA, 19 nt, Artificial Sequence
  Description of Artificial Sequence: Synthetic oligonucleotide
gguagaagggcuuugggac

SEQ ID NO: 1643730 - RNA, 19 nt, Artificial Sequence
  Description of Artificial Sequence: Synthetic oligonucleotide
gauuucgaacccaaagccc

SEQ ID NO: 1643731 - RNA, 19 nt, Artificial Sequence
  Description of Artificial Sequence: Synthetic oligonucleotide
gagauaaguguccuguguc

SEQ ID NO: 1643732 - RNA, 19 nt, Artificial Sequence
  Description of Artificial Sequence: Synthetic oligonucleotide
cacuucaugggugauuucg

SEQ ID NO: 1643733 - RNA, 19 nt, Artificial Sequence
  Description of Artificial Sequence: Synthetic oligonucleotide
uacaaauagcaugcggucc

SEQ ID NO: 1643734 - RNA, 19 nt, Artificial Sequence
  Description of Artificial Sequence: Synthetic oligonucleotide
agauacuucccagcagucc

SEQ ID NO: 1643735 - RNA, 19 nt, Artificial Sequence
  Description of Artificial Sequence: Synthetic oligonucleotide
uugaguucuccuugcagug

SEQ ID NO: 1643736 - RNA, 19 nt, Artificial Sequence
  Description of Artificial Sequence: Synthetic oligonucleotide
cacagcucaggacucaggg

SEQ ID NO: 1643737 - RNA, 19 nt, Artificial Sequence
  Description of Artificial Sequence: Synthetic oligonucleotide
ccucaaugcacacagagag

SEQ ID NO: 1643738 - RNA, 19 nt, Artificial Sequence
  Description of Artificial Sequence: Synthetic oligonucleotide
uggcacaugauccuacccu

SEQ ID NO: 1643739 - RNA, 19 nt, Artificial Sequence
  Description of Artificial Sequence: Synthetic oligonucleotide
aguuucuagaaaagccagc

SEQ ID NO: 1643740 - RNA, 19 nt, Artificial Sequence
  Description of Artificial Sequence: Synthetic oligonucleotide
gaacugcugguccaguaag

SEQ ID NO: 1643741 - RNA, 19 nt, Artificial Sequence
  Description of Artificial Sequence: Synthetic oligonucleotide
ucgcuuauagucagccucc

SEQ ID NO: 1643742 - RNA, 19 nt, Artificial Sequence
  Description of Artificial Sequence: Synthetic oligonucleotide
gaggagagucaggagagcg

SEQ ID NO: 1643743 - RNA, 19 nt, Artificial Sequence
  Description of Artificial Sequence: Synthetic oligonucleotide
agauaaguguccugugucu

SEQ ID NO: 1643744 - RNA, 19 nt, Artificial Sequence
  Description of Artificial Sequence: Synthetic oligonucleotide
aaagguuuguguggcccgg

SEQ ID NO: 1643745 - RNA, 19 nt, Artificial Sequence
  Description of Artificial Sequence: Synthetic oligonucleotide
uugagaacucgcucuacac

SEQ ID NO: 1643746 - RNA, 19 nt, Artificial Sequence
  Description of Artificial Sequence: Synthetic oligonucleotide
ugugauucucucgccaaag

SEQ ID NO: 1643747 - RNA, 19 nt, Artificial Sequence
  Description of Artificial Sequence: Synthetic oligonucleotide
aacaucuugagaacucgcu

SEQ ID NO: 1643748 - RNA, 19 nt, Artificial Sequence
  Description of Artificial Sequence: Synthetic oligonucleotide
ugcagucgcuuauagucag

SEQ ID NO: 1643749 - RNA, 19 nt, Artificial Sequence
  Description of Artificial Sequence: Synthetic oligonucleotide
gucgcuuauagucagccuc

SEQ ID NO: 1643750 - RNA, 19 nt, Artificial Sequence
  Description of Artificial Sequence: Synthetic oligonucleotide
cucaaugcacacagagagg

SEQ ID NO: 1643751 - RNA, 19 nt, Artificial Sequence
  Description of Artificial Sequence: Synthetic oligonucleotide
aggguugucaaggagcgag

SEQ ID NO: 1643752 - RNA, 19 nt, Artificial Sequence
  Description of Artificial Sequence: Synthetic oligonucleotide
ucgccgaucaccacaugcc

SEQ ID NO: 1643753 - RNA, 19 nt, Artificial Sequence
  Description of Artificial Sequence: Synthetic oligonucleotide
gauucucucgccaaagcca

SEQ ID NO: 1643754 - RNA, 19 nt, Artificial Sequence
  Description of Artificial Sequence: Synthetic oligonucleotide
auuucgaacccaaagcccu

SEQ ID NO: 1643755 - RNA, 19 nt, Artificial Sequence
  Description of Artificial Sequence: Synthetic oligonucleotide
uggagaugucacuaaauuu

SEQ ID NO: 1643756 - RNA, 19 nt, Artificial Sequence
  Description of Artificial Sequence: Synthetic oligonucleotide
cagguuucccugcuaacgg

SEQ ID NO: 1643757 - RNA, 19 nt, Artificial Sequence
  Description of Artificial Sequence: Synthetic oligonucleotide
ugaacugcugguccaguaa

SEQ ID NO: 1643758 - RNA, 19 nt, Artificial Sequence
  Description of Artificial Sequence: Synthetic oligonucleotide
gguaagaaguacaaauagc

SEQ ID NO: 1643759 - RNA, 19 nt, Artificial Sequence
  Description of Artificial Sequence: Synthetic oligonucleotide
ugucucaccagaguucagc

SEQ ID NO: 1643760 - RNA, 19 nt, Artificial Sequence
  Description of Artificial Sequence: Synthetic oligonucleotide
guacaaauagcaugcgguc

SEQ ID NO: 1643761 - RNA, 19 nt, Artificial Sequence
  Description of Artificial Sequence: Synthetic oligonucleotide
ucucaugagggcugcuucc

SEQ ID NO: 1643762 - RNA, 19 nt, Artificial Sequence
  Description of Artificial Sequence: Synthetic oligonucleotide
aacagguagagcagguucu

SEQ ID NO: 1643763 - RNA, 19 nt, Artificial Sequence
  Description of Artificial Sequence: Synthetic oligonucleotide
ucucgccaaagccagggcu

SEQ ID NO: 1643764 - RNA, 19 nt, Artificial Sequence
  Description of Artificial Sequence: Synthetic oligonucleotide
agaguucagcaacaucuug

SEQ ID NO: 1643765 - RNA, 19 nt, Artificial Sequence
  Description of Artificial Sequence: Synthetic oligonucleotide
gaagaggagagggaacccc

SEQ ID NO: 1643766 - RNA, 19 nt, Artificial Sequence
  Description of Artificial Sequence: Synthetic oligonucleotide
augauccucccagugugcc

SEQ ID NO: 1643767 - RNA, 19 nt, Artificial Sequence
  Description of Artificial Sequence: Synthetic oligonucleotide
auaaguguccugugucuca

SEQ ID NO: 1643768 - RNA, 19 nt, Artificial Sequence
  Description of Artificial Sequence: Synthetic oligonucleotide
agguuucccugcuaacggg

SEQ ID NO: 1643769 - RNA, 19 nt, Artificial Sequence
  Description of Artificial Sequence: Synthetic oligonucleotide
cucgccgaucaccacaugc

SEQ ID NO: 1643770 - RNA, 19 nt, Artificial Sequence
  Description of Artificial Sequence: Synthetic oligonucleotide
agagucaggagagcgagca

SEQ ID NO: 1643771 - RNA, 19 nt, Artificial Sequence
  Description of Artificial Sequence: Synthetic oligonucleotide
caagagauacuucccagca

SEQ ID NO: 1643772 - RNA, 19 nt, Artificial Sequence
  Description of Artificial Sequence: Synthetic oligonucleotide
caacaucuugagaacucgc

SEQ ID NO: 1643773 - RNA, 19 nt, Artificial Sequence
  Description of Artificial Sequence: Synthetic oligonucleotide
uucacuucaugggugauuu

SEQ ID NO: 1643774 - RNA, 19 nt, Artificial Sequence
  Description of Artificial Sequence: Synthetic oligonucleotide
agccacuaaugaaaagggc

SEQ ID NO: 1643775 - RNA, 19 nt, Artificial Sequence
  Description of Artificial Sequence: Synthetic oligonucleotide
acggugagagcacucccgg

SEQ ID NO: 1643776 - RNA, 19 nt, Artificial Sequence
  Description of Artificial Sequence: Synthetic oligonucleotide
caugaccucacccacuuca

SEQ ID NO: 1643777 - RNA, 19 nt, Artificial Sequence
  Description of Artificial Sequence: Synthetic oligonucleotide
agggcaagagauacuuccc

SEQ ID NO: 1643778 - RNA, 19 nt, Artificial Sequence
  Description of Artificial Sequence: Synthetic oligonucleotide
aaagggcaagagauacuuc

SEQ ID NO: 1643779 - RNA, 19 nt, Artificial Sequence
  Description of Artificial Sequence: Synthetic oligonucleotide
uccgagugccugaccaggg

SEQ ID NO: 1643780 - RNA, 19 nt, Artificial Sequence
  Description of Artificial Sequence: Synthetic oligonucleotide
cuuggcgggagaagaaaug

SEQ ID NO: 1643781 - RNA, 19 nt, Artificial Sequence
  Description of Artificial Sequence: Synthetic oligonucleotide
cucgcucuacaccauggcc

SEQ ID NO: 1643782 - RNA, 19 nt, Artificial Sequence
  Description of Artificial Sequence: Synthetic oligonucleotide
cacggugagagcacucccg

SEQ ID NO: 1643783 - RNA, 19 nt, Artificial Sequence
  Description of Artificial Sequence: Synthetic oligonucleotide
agguggaaccaguccaguc

SEQ ID NO: 1643784 - RNA, 19 nt, Artificial Sequence
  Description of Artificial Sequence: Synthetic oligonucleotide
ucccagugugcccucagga

SEQ ID NO: 1643785 - RNA, 19 nt, Artificial Sequence
  Description of Artificial Sequence: Synthetic oligonucleotide
uccugugucucaugagggc

SEQ ID NO: 1643786 - RNA, 19 nt, Artificial Sequence
  Description of Artificial Sequence: Synthetic oligonucleotide
ucaccacaugccaggagga

SEQ ID NO: 1643787 - RNA, 19 nt, Artificial Sequence
  Description of Artificial Sequence: Synthetic oligonucleotide
uuggcgggagaagaaaugu

SEQ ID NO: 1643788 - RNA, 19 nt, Artificial Sequence
  Description of Artificial Sequence: Synthetic oligonucleotide
gauaaguguccugugucuc

SEQ ID NO: 1643789 - RNA, 19 nt, Artificial Sequence
  Description of Artificial Sequence: Synthetic oligonucleotide
gaauuucucacaggcugug

SEQ ID NO: 1643790 - RNA, 19 nt, Artificial Sequence
  Description of Artificial Sequence: Synthetic oligonucleotide
gagacaguggagagccugg

SEQ ID NO: 1643791 - RNA, 19 nt, Artificial Sequence
  Description of Artificial Sequence: Synthetic oligonucleotide
augaaagguggaaccaguc

SEQ ID NO: 1643792 - RNA, 19 nt, Artificial Sequence
  Description of Artificial Sequence: Synthetic oligonucleotide
caugggugauuucgaaccc

SEQ ID NO: 1643793 - RNA, 19 nt, Artificial Sequence
  Description of Artificial Sequence: Synthetic oligonucleotide
uuauagucagccuccucuu

SEQ ID NO: 1643794 - RNA, 19 nt, Artificial Sequence
  Description of Artificial Sequence: Synthetic oligonucleotide
agagugggacugucggagg

SEQ ID NO: 1643795 - RNA, 19 nt, Artificial Sequence
  Description of Artificial Sequence: Synthetic oligonucleotide
ugcagcugaccugauggag

SEQ ID NO: 1643796 - RNA, 19 nt, Artificial Sequence
  Description of Artificial Sequence: Synthetic oligonucleotide
ggagaugucacuaaauuua

SEQ ID NO: 1643797 - RNA, 19 nt, Artificial Sequence
  Description of Artificial Sequence: Synthetic oligonucleotide
gucacuaaauuuaaauucu

SEQ ID NO: 1643798 - RNA, 19 nt, Artificial Sequence
  Description of Artificial Sequence: Synthetic oligonucleotide
ugaccucacccacuucacc

SEQ ID NO: 1643799 - RNA, 19 nt, Artificial Sequence
  Description of Artificial Sequence: Synthetic oligonucleotide
ucacggugagagcacuccc

SEQ ID NO: 1643800 - RNA, 19 nt, Artificial Sequence
  Description of Artificial Sequence: Synthetic oligonucleotide
aaggucugcagucgcuuau

SEQ ID NO: 1643801 - RNA, 19 nt, Artificial Sequence
  Description of Artificial Sequence: Synthetic oligonucleotide
agcacucucguuguuguug

SEQ ID NO: 1643802 - RNA, 19 nt, Artificial Sequence
  Description of Artificial Sequence: Synthetic oligonucleotide
cucgccaaagccagggcug

SEQ ID NO: 1643803 - RNA, 19 nt, Artificial Sequence
  Description of Artificial Sequence: Synthetic oligonucleotide
ucggguagaagggcuuugg

SEQ ID NO: 1643804 - RNA, 19 nt, Artificial Sequence
  Description of Artificial Sequence: Synthetic oligonucleotide
acucgcaucuccucuggca

SEQ ID NO: 1643805 - RNA, 19 nt, Artificial Sequence
  Description of Artificial Sequence: Synthetic oligonucleotide
gagugggacugucggaggc

SEQ ID NO: 1643806 - RNA, 19 nt, Artificial Sequence
  Description of Artificial Sequence: Synthetic oligonucleotide
guuaggcuggggaagagga

SEQ ID NO: 1643807 - RNA, 19 nt, Artificial Sequence
  Description of Artificial Sequence: Synthetic oligonucleotide
aggcucgggaaacaggccu

SEQ ID NO: 1643808 - RNA, 19 nt, Artificial Sequence
  Description of Artificial Sequence: Synthetic oligonucleotide
guccugugucucaugaggg

SEQ ID NO: 1643809 - RNA, 19 nt, Artificial Sequence
  Description of Artificial Sequence: Synthetic oligonucleotide
gaucaccacaugccaggag

SEQ ID NO: 1643810 - RNA, 19 nt, Artificial Sequence
  Description of Artificial Sequence: Synthetic oligonucleotide
gugauucucucgccaaagc

SEQ ID NO: 1643811 - RNA, 19 nt, Artificial Sequence
  Description of Artificial Sequence: Synthetic oligonucleotide
uccacucgcaucuccucug

SEQ ID NO: 1643812 - RNA, 19 nt, Artificial Sequence
  Description of Artificial Sequence: Synthetic oligonucleotide
acaaggagauaaguguccu

SEQ ID NO: 1643813 - RNA, 19 nt, Artificial Sequence
  Description of Artificial Sequence: Synthetic oligonucleotide
gucaggagagcgagcagcg

SEQ ID NO: 1643814 - RNA, 19 nt, Artificial Sequence
  Description of Artificial Sequence: Synthetic oligonucleotide
cacuaaugaaaagggcaag

SEQ ID NO: 1643815 - RNA, 19 nt, Artificial Sequence
  Description of Artificial Sequence: Synthetic oligonucleotide
acucucguuguuguuggag

SEQ ID NO: 1643816 - RNA, 19 nt, Artificial Sequence
  Description of Artificial Sequence: Synthetic oligonucleotide
gcaagagauacuucccagc

SEQ ID NO: 1643817 - RNA, 19 nt, Artificial Sequence
  Description of Artificial Sequence: Synthetic oligonucleotide
gugaacaggcucugccuag

SEQ ID NO: 1643818 - RNA, 19 nt, Artificial Sequence
  Description of Artificial Sequence: Synthetic oligonucleotide
cagucgcuuauagucagcc

SEQ ID NO: 1643819 - RNA, 19 nt, Artificial Sequence
  Description of Artificial Sequence: Synthetic oligonucleotide
cuucaccuggcacaugauc

SEQ ID NO: 1643820 - RNA, 19 nt, Artificial Sequence
  Description of Artificial Sequence: Synthetic oligonucleotide
uggguguggcucaggaaac

SEQ ID NO: 1643821 - RNA, 19 nt, Artificial Sequence
  Description of Artificial Sequence: Synthetic oligonucleotide
ugcagcacucucguuguug

SEQ ID NO: 1643822 - RNA, 19 nt, Artificial Sequence
  Description of Artificial Sequence: Synthetic oligonucleotide
caugauccucccagugugc

SEQ ID NO: 1643823 - RNA, 19 nt, Artificial Sequence
  Description of Artificial Sequence: Synthetic oligonucleotide
uguccgagugccugaccag

SEQ ID NO: 1643824 - RNA, 19 nt, Artificial Sequence
  Description of Artificial Sequence: Synthetic oligonucleotide
cuugagaacucgcucuaca

SEQ ID NO: 1643825 - RNA, 19 nt, Artificial Sequence
  Description of Artificial Sequence: Synthetic oligonucleotide
ucaggaggagagugggacu

SEQ ID NO: 1643826 - RNA, 19 nt, Artificial Sequence
  Description of Artificial Sequence: Synthetic oligonucleotide
agucccucggguagaaggg

SEQ ID NO: 1643827 - RNA, 19 nt, Artificial Sequence
  Description of Artificial Sequence: Synthetic oligonucleotide
uuucccugcuaacgggccu

SEQ ID NO: 1643828 - RNA, 19 nt, Artificial Sequence
  Description of Artificial Sequence: Synthetic oligonucleotide
gaggagagugggacugucg

SEQ ID NO: 1643829 - RNA, 19 nt, Artificial Sequence
  Description of Artificial Sequence: Synthetic oligonucleotide
gcagugaacaggcucugcc

SEQ ID NO: 1643830 - RNA, 19 nt, Artificial Sequence
  Description of Artificial Sequence: Synthetic oligonucleotide
agcagcgagauggugucag

SEQ ID NO: 1643831 - RNA, 19 nt, Artificial Sequence
  Description of Artificial Sequence: Synthetic oligonucleotide
uaacgggccucacggugag

SEQ ID NO: 1643832 - RNA, 19 nt, Artificial Sequence
  Description of Artificial Sequence: Synthetic oligonucleotide
uuucgaacccaaagcccuc

SEQ ID NO: 1643833 - RNA, 19 nt, Artificial Sequence
  Description of Artificial Sequence: Synthetic oligonucleotide
aagguuuguguggcccggg

SEQ ID NO: 1643834 - RNA, 19 nt, Artificial Sequence
  Description of Artificial Sequence: Synthetic oligonucleotide
cucacggugagagcacucc

SEQ ID NO: 1643835 - RNA, 19 nt, Artificial Sequence
  Description of Artificial Sequence: Synthetic oligonucleotide
caaggagauaaguguccug

SEQ ID NO: 1643836 - RNA, 19 nt, Artificial Sequence
  Description of Artificial Sequence: Synthetic oligonucleotide
cucucguuguuguuggaga

SEQ ID NO: 1643837 - RNA, 19 nt, Artificial Sequence
  Description of Artificial Sequence: Synthetic oligonucleotide
aacuuggcgggagaagaaa

SEQ ID NO: 1643838 - RNA, 19 nt, Artificial Sequence
  Description of Artificial Sequence: Synthetic oligonucleotide
caguccagaggagagucag

SEQ ID NO: 1643839 - RNA, 19 nt, Artificial Sequence
  Description of Artificial Sequence: Synthetic oligonucleotide
cuggcacaugauccuaccc

SEQ ID NO: 1643840 - RNA, 19 nt, Artificial Sequence
  Description of Artificial Sequence: Synthetic oligonucleotide
ggaggcucgggaaacaggc

SEQ ID NO: 1643841 - RNA, 19 nt, Artificial Sequence
  Description of Artificial Sequence: Synthetic oligonucleotide
accugauggaggugguaug

SEQ ID NO: 1643842 - RNA, 19 nt, Artificial Sequence
  Description of Artificial Sequence: Synthetic oligonucleotide
aaacaggccuugccaacuu

SEQ ID NO: 1643843 - RNA, 19 nt, Artificial Sequence
  Description of Artificial Sequence: Synthetic oligonucleotide
gaggccuguccacagcuca

SEQ ID NO: 1643844 - RNA, 19 nt, Artificial Sequence
  Description of Artificial Sequence: Synthetic oligonucleotide
caucuugagaacucgcucu

SEQ ID NO: 1643845 - RNA, 19 nt, Artificial Sequence
  Description of Artificial Sequence: Synthetic oligonucleotide
uucucucgccaaagccagg

SEQ ID NO: 1643846 - RNA, 19 nt, Artificial Sequence
  Description of Artificial Sequence: Synthetic oligonucleotide
cucuacaccauggcccagg

SEQ ID NO: 1643847 - RNA, 19 nt, Artificial Sequence
  Description of Artificial Sequence: Synthetic oligonucleotide
agugggacugucggaggcg

SEQ ID NO: 1643848 - RNA, 19 nt, Artificial Sequence
  Description of Artificial Sequence: Synthetic oligonucleotide
uuuccacucgcaucuccuc

SEQ ID NO: 1643849 - RNA, 19 nt, Artificial Sequence
  Description of Artificial Sequence: Synthetic oligonucleotide
gcacucucguuguuguugg

SEQ ID NO: 1643850 - RNA, 19 nt, Artificial Sequence
  Description of Artificial Sequence: Synthetic oligonucleotide
ccuagggucugccuggugc

SEQ ID NO: 1643851 - RNA, 19 nt, Artificial Sequence
  Description of Artificial Sequence: Synthetic oligonucleotide
cuccaugguuuccacucgc

SEQ ID NO: 1643852 - RNA, 19 nt, Artificial Sequence
  Description of Artificial Sequence: Synthetic oligonucleotide
ugccaggguuccuccaaag

SEQ ID NO: 1643853 - RNA, 19 nt, Artificial Sequence
  Description of Artificial Sequence: Synthetic oligonucleotide
caggagcacuuccacacac

SEQ ID NO: 1643854 - RNA, 19 nt, Artificial Sequence
  Description of Artificial Sequence: Synthetic oligonucleotide
acgggccucacggugagag

SEQ ID NO: 1643855 - RNA, 19 nt, Artificial Sequence
  Description of Artificial Sequence: Synthetic oligonucleotide
guggaaccaguccagucca

SEQ ID NO: 1643856 - RNA, 19 nt, Artificial Sequence
  Description of Artificial Sequence: Synthetic oligonucleotide
aggguuccuccaaagaaca

SEQ ID NO: 1643857 - RNA, 19 nt, Artificial Sequence
  Description of Artificial Sequence: Synthetic oligonucleotide
uggcgggagaagaaauguc

SEQ ID NO: 1643858 - RNA, 19 nt, Artificial Sequence
  Description of Artificial Sequence: Synthetic oligonucleotide
ucgaacccaaagcccucgc

SEQ ID NO: 1643859 - RNA, 19 nt, Artificial Sequence
  Description of Artificial Sequence: Synthetic oligonucleotide
augaccucacccacuucac

SEQ ID NO: 1643860 - RNA, 19 nt, Artificial Sequence
  Description of Artificial Sequence: Synthetic oligonucleotide
agucgcuuauagucagccu

SEQ ID NO: 1643861 - RNA, 19 nt, Artificial Sequence
  Description of Artificial Sequence: Synthetic oligonucleotide
ugagagcacucccggccug

SEQ ID NO: 1643862 - RNA, 19 nt, Artificial Sequence
  Description of Artificial Sequence: Synthetic oligonucleotide
cuggguuaggcuggggaag

SEQ ID NO: 1643863 - RNA, 19 nt, Artificial Sequence
  Description of Artificial Sequence: Synthetic oligonucleotide
uggcauguccgagugccug

SEQ ID NO: 1643864 - RNA, 19 nt, Artificial Sequence
  Description of Artificial Sequence: Synthetic oligonucleotide
gcgagauggugucaggagc

SEQ ID NO: 1643865 - RNA, 19 nt, Artificial Sequence
  Description of Artificial Sequence: Synthetic oligonucleotide
ucccucggguagaagggcu

SEQ ID NO: 1643866 - RNA, 19 nt, Artificial Sequence
  Description of Artificial Sequence: Synthetic oligonucleotide
caggaggagagugggacug

SEQ ID NO: 1643867 - RNA, 19 nt, Artificial Sequence
  Description of Artificial Sequence: Synthetic oligonucleotide
cuaacgggccucacgguga

SEQ ID NO: 1643868 - RNA, 19 nt, Artificial Sequence
  Description of Artificial Sequence: Synthetic oligonucleotide
guucuccuugcagugaaca

SEQ ID NO: 1643869 - RNA, 19 nt, Artificial Sequence
  Description of Artificial Sequence: Synthetic oligonucleotide
gcuaacgggccucacggug

SEQ ID NO: 1643870 - RNA, 19 nt, Artificial Sequence
  Description of Artificial Sequence: Synthetic oligonucleotide
uggguuaggcuggggaaga

SEQ ID NO: 1643871 - RNA, 19 nt, Artificial Sequence
  Description of Artificial Sequence: Synthetic oligonucleotide
aagguggaaccaguccagu

SEQ ID NO: 1643872 - RNA, 19 nt, Artificial Sequence
  Description of Artificial Sequence: Synthetic oligonucleotide
gaugaaagguggaaccagu

SEQ ID NO: 1643873 - RNA, 19 nt, Artificial Sequence
  Description of Artificial Sequence: Synthetic oligonucleotide
ucuugagaacucgcucuac

SEQ ID NO: 1643874 - RNA, 19 nt, Artificial Sequence
  Description of Artificial Sequence: Synthetic oligonucleotide
guccgagugccugaccagg

SEQ ID NO: 1643875 - RNA, 19 nt, Artificial Sequence
  Description of Artificial Sequence: Synthetic oligonucleotide
uugccaacuuggcgggaga

SEQ ID NO: 1643876 - RNA, 19 nt, Artificial Sequence
  Description of Artificial Sequence: Synthetic oligonucleotide
acaugauccuacccucaau

SEQ ID NO: 1643877 - RNA, 19 nt, Artificial Sequence
  Description of Artificial Sequence: Synthetic oligonucleotide
aaggggacaggaagacugu

SEQ ID NO: 1643878 - RNA, 19 nt, Artificial Sequence
  Description of Artificial Sequence: Synthetic oligonucleotide
ggcacaugauccuacccuc

SEQ ID NO: 1643879 - RNA, 19 nt, Artificial Sequence
  Description of Artificial Sequence: Synthetic oligonucleotide
ucgcaucuccucuggcaug

SEQ ID NO: 1643880 - RNA, 19 nt, Artificial Sequence
  Description of Artificial Sequence: Synthetic oligonucleotide
guuucccugcuaacgggcc

SEQ ID NO: 1643881 - RNA, 19 nt, Artificial Sequence
  Description of Artificial Sequence: Synthetic oligonucleotide
gacaguggagagccuggga

SEQ ID NO: 1643882 - RNA, 19 nt, Artificial Sequence
  Description of Artificial Sequence: Synthetic oligonucleotide
aaggggcgcugcucccgcg

SEQ ID NO: 1643883 - RNA, 19 nt, Artificial Sequence
  Description of Artificial Sequence: Synthetic oligonucleotide
cccaaugacaaggagauaa

SEQ ID NO: 1643884 - RNA, 19 nt, Artificial Sequence
  Description of Artificial Sequence: Synthetic oligonucleotide
agccugggaguggagaugu

SEQ ID NO: 1643885 - RNA, 19 nt, Artificial Sequence
  Description of Artificial Sequence: Synthetic oligonucleotide
cagugugcccucaggagga

SEQ ID NO: 1643886 - RNA, 19 nt, Artificial Sequence
  Description of Artificial Sequence: Synthetic oligonucleotide
aguucuccuugcagugaac

SEQ ID NO: 1643887 - RNA, 19 nt, Artificial Sequence
  Description of Artificial Sequence: Synthetic oligonucleotide
ugcagugaacaggcucugc

SEQ ID NO: 1643888 - RNA, 19 nt, Artificial Sequence
  Description of Artificial Sequence: Synthetic oligonucleotide
cagggagacaguggagagc

SEQ ID NO: 1643889 - RNA, 19 nt, Artificial Sequence
  Description of Artificial Sequence: Synthetic oligonucleotide
augggugauuucgaaccca

SEQ ID NO: 1643890 - RNA, 19 nt, Artificial Sequence
  Description of Artificial Sequence: Synthetic oligonucleotide
ccugcuaacgggccucacg

SEQ ID NO: 1643891 - RNA, 19 nt, Artificial Sequence
  Description of Artificial Sequence: Synthetic oligonucleotide
agaaggggacaggaagacu

SEQ ID NO: 1643892 - RNA, 19 nt, Artificial Sequence
  Description of Artificial Sequence: Synthetic oligonucleotide
uugcagugaacaggcucug

SEQ ID NO: 1643893 - RNA, 19 nt, Artificial Sequence
  Description of Artificial Sequence: Synthetic oligonucleotide
ugcuaacgggccucacggu

SEQ ID NO: 1643894 - RNA, 19 nt, Artificial Sequence
  Description of Artificial Sequence: Synthetic oligonucleotide
guagaagggcuuugggacu

SEQ ID NO: 1643895 - RNA, 19 nt, Artificial Sequence
  Description of Artificial Sequence: Synthetic oligonucleotide
gaaggucugcagucgcuua

SEQ ID NO: 1643896 - RNA, 19 nt, Artificial Sequence
  Description of Artificial Sequence: Synthetic oligonucleotide
ggagaaggggacaggaaga

SEQ ID NO: 1643897 - RNA, 19 nt, Artificial Sequence
  Description of Artificial Sequence: Synthetic oligonucleotide
acuuggcgggagaagaaau

SEQ ID NO: 1643898 - RNA, 19 nt, Artificial Sequence
  Description of Artificial Sequence: Synthetic oligonucleotide
ccacuaaugaaaagggcaa

SEQ ID NO: 1643899 - RNA, 19 nt, Artificial Sequence
  Description of Artificial Sequence: Synthetic oligonucleotide
ggaaccaguccaguccaag

SEQ ID NO: 1643900 - RNA, 19 nt, Artificial Sequence
  Description of Artificial Sequence: Synthetic oligonucleotide
ggagauaaguguccugugu

SEQ ID NO: 1643901 - RNA, 19 nt, Artificial Sequence
  Description of Artificial Sequence: Synthetic oligonucleotide
aagggcuuugggacuccug

SEQ ID NO: 1643902 - RNA, 19 nt, Artificial Sequence
  Description of Artificial Sequence: Synthetic oligonucleotide
uccuacccucaaugcacac

SEQ ID NO: 1643903 - RNA, 19 nt, Artificial Sequence
  Description of Artificial Sequence: Synthetic oligonucleotide
gaaaagggcaagagauacu

SEQ ID NO: 1643904 - RNA, 19 nt, Artificial Sequence
  Description of Artificial Sequence: Synthetic oligonucleotide
cacccacuucaccuggcac

SEQ ID NO: 1643905 - RNA, 19 nt, Artificial Sequence
  Description of Artificial Sequence: Synthetic oligonucleotide
gggcaagagauacuuccca

SEQ ID NO: 1643906 - RNA, 19 nt, Artificial Sequence
  Description of Artificial Sequence: Synthetic oligonucleotide
cugguacacaaggacaaaa

SEQ ID NO: 1643907 - RNA, 19 nt, Artificial Sequence
  Description of Artificial Sequence: Synthetic oligonucleotide
gucacgcagcccaggaggc

SEQ ID NO: 1643908 - RNA, 19 nt, Artificial Sequence
  Description of Artificial Sequence: Synthetic oligonucleotide
ccuccaaagaacagguaga

SEQ ID NO: 1643909 - RNA, 19 nt, Artificial Sequence
  Description of Artificial Sequence: Synthetic oligonucleotide
cauguccgagugccugacc

SEQ ID NO: 1643910 - RNA, 19 nt, Artificial Sequence
  Description of Artificial Sequence: Synthetic oligonucleotide
aggugguaugaaagguuug

SEQ ID NO: 1643911 - RNA, 19 nt, Artificial Sequence
  Description of Artificial Sequence: Synthetic oligonucleotide
gaggcucgggaaacaggcc

SEQ ID NO: 1643912 - RNA, 19 nt, Artificial Sequence
  Description of Artificial Sequence: Synthetic oligonucleotide
augcggucccugaugaagu

SEQ ID NO: 1643913 - RNA, 19 nt, Artificial Sequence
  Description of Artificial Sequence: Synthetic oligonucleotide
gggaaacaggccuugccaa

SEQ ID NO: 1643914 - RNA, 19 nt, Artificial Sequence
  Description of Artificial Sequence: Synthetic oligonucleotide
caaggggcgcugcucccgc

SEQ ID NO: 1643915 - RNA, 19 nt, Artificial Sequence
  Description of Artificial Sequence: Synthetic oligonucleotide
caaacuucuuguccauugu

SEQ ID NO: 1643916 - RNA, 19 nt, Artificial Sequence
  Description of Artificial Sequence: Synthetic oligonucleotide
aguccuggguuaggcuggg

SEQ ID NO: 1643917 - RNA, 19 nt, Artificial Sequence
  Description of Artificial Sequence: Synthetic oligonucleotide
uucccugcuaacgggccuc

SEQ ID NO: 1643918 - RNA, 19 nt, Artificial Sequence
  Description of Artificial Sequence: Synthetic oligonucleotide
caguccaguccaaggagaa

SEQ ID NO: 1643919 - RNA, 19 nt, Artificial Sequence
  Description of Artificial Sequence: Synthetic oligonucleotide
gugggacugucggaggcgc

SEQ ID NO: 1643920 - RNA, 19 nt, Artificial Sequence
  Description of Artificial Sequence: Synthetic oligonucleotide
cacaugauccuacccucaa

SEQ ID NO: 1643921 - RNA, 19 nt, Artificial Sequence
  Description of Artificial Sequence: Synthetic oligonucleotide
gguguggcucaggaaacug

SEQ ID NO: 1643922 - RNA, 19 nt, Artificial Sequence
  Description of Artificial Sequence: Synthetic oligonucleotide
auacuucccagcagucccu

SEQ ID NO: 1643923 - RNA, 19 nt, Artificial Sequence
  Description of Artificial Sequence: Synthetic oligonucleotide
ucucagccaugcagcugac

SEQ ID NO: 1643924 - RNA, 19 nt, Artificial Sequence
  Description of Artificial Sequence: Synthetic oligonucleotide
gggaugaaagguggaacca

SEQ ID NO: 1643925 - RNA, 19 nt, Artificial Sequence
  Description of Artificial Sequence: Synthetic oligonucleotide
ggugguaugaaagguuugu

SEQ ID NO: 1643926 - RNA, 19 nt, Artificial Sequence
  Description of Artificial Sequence: Synthetic oligonucleotide
auccuacccucaaugcaca

SEQ ID NO: 1643927 - RNA, 19 nt, Artificial Sequence
  Description of Artificial Sequence: Synthetic oligonucleotide
gaccugauggaggugguau

SEQ ID NO: 1643928 - RNA, 19 nt, Artificial Sequence
  Description of Artificial Sequence: Synthetic oligonucleotide
cacucgcaucuccucuggc

SEQ ID NO: 1643929 - RNA, 19 nt, Artificial Sequence
  Description of Artificial Sequence: Synthetic oligonucleotide
caaugacaaggagauaagu

SEQ ID NO: 1643930 - RNA, 19 nt, Artificial Sequence
  Description of Artificial Sequence: Synthetic oligonucleotide
gcuuccacaaagccacuaa

SEQ ID NO: 1643931 - RNA, 19 nt, Artificial Sequence
  Description of Artificial Sequence: Synthetic oligonucleotide
ggaguggagaugucacuaa

SEQ ID NO: 1643932 - RNA, 19 nt, Artificial Sequence
  Description of Artificial Sequence: Synthetic oligonucleotide
ccaggguuccuccaaagaa

SEQ ID NO: 1643933 - RNA, 19 nt, Artificial Sequence
  Description of Artificial Sequence: Synthetic oligonucleotide
cucgggaaacaggccuugc

SEQ ID NO: 1643934 - RNA, 19 nt, Artificial Sequence
  Description of Artificial Sequence: Synthetic oligonucleotide
cucggguagaagggcuuug

SEQ ID NO: 1643935 - RNA, 19 nt, Artificial Sequence
  Description of Artificial Sequence: Synthetic oligonucleotide
acccaaagcccucgccgau

SEQ ID NO: 1643936 - RNA, 19 nt, Artificial Sequence
  Description of Artificial Sequence: Synthetic oligonucleotide
acucccggccugugugucu

SEQ ID NO: 1643937 - RNA, 19 nt, Artificial Sequence
  Description of Artificial Sequence: Synthetic oligonucleotide
cccugaugaagucccuggc

SEQ ID NO: 1643938 - RNA, 19 nt, Artificial Sequence
  Description of Artificial Sequence: Synthetic oligonucleotide
agcgagcagcgagauggug

SEQ ID NO: 1643939 - RNA, 19 nt, Artificial Sequence
  Description of Artificial Sequence: Synthetic oligonucleotide
ggcgggagaagaaaugucu

SEQ ID NO: 1643940 - RNA, 19 nt, Artificial Sequence
  Description of Artificial Sequence: Synthetic oligonucleotide
gccgaucaccacaugccag

SEQ ID NO: 1643941 - RNA, 19 nt, Artificial Sequence
  Description of Artificial Sequence: Synthetic oligonucleotide
aguccaguccaaggagaaa

SEQ ID NO: 1643942 - RNA, 19 nt, Artificial Sequence
  Description of Artificial Sequence: Synthetic oligonucleotide
aggccuguccacagcucag

SEQ ID NO: 1643943 - RNA, 19 nt, Artificial Sequence
  Description of Artificial Sequence: Synthetic oligonucleotide
ggccuguccacagcucagg

SEQ ID NO: 1643944 - RNA, 19 nt, Artificial Sequence
  Description of Artificial Sequence: Synthetic oligonucleotide
gugagagcacucccggccu

SEQ ID NO: 1643945 - RNA, 19 nt, Artificial Sequence
  Description of Artificial Sequence: Synthetic oligonucleotide
cgagauggugucaggagca

SEQ ID NO: 1643946 - RNA, 19 nt, Artificial Sequence
  Description of Artificial Sequence: Synthetic oligonucleotide
gguguucuguucaguccug

SEQ ID NO: 1643947 - RNA, 19 nt, Artificial Sequence
  Description of Artificial Sequence: Synthetic oligonucleotide
ccacagcucaggacucagg

SEQ ID NO: 1643948 - RNA, 19 nt, Artificial Sequence
  Description of Artificial Sequence: Synthetic oligonucleotide
gucugcagucgcuuauagu

SEQ ID NO: 1643949 - RNA, 19 nt, Artificial Sequence
  Description of Artificial Sequence: Synthetic oligonucleotide
gggaguggagaugucacua

SEQ ID NO: 1643950 - RNA, 19 nt, Artificial Sequence
  Description of Artificial Sequence: Synthetic oligonucleotide
caguggagagccugggagu

SEQ ID NO: 1643951 - RNA, 19 nt, Artificial Sequence
  Description of Artificial Sequence: Synthetic oligonucleotide
gccaggguuccuccaaaga

SEQ ID NO: 1643952 - RNA, 19 nt, Artificial Sequence
  Description of Artificial Sequence: Synthetic oligonucleotide
cgagcagcgagaugguguc

SEQ ID NO: 1643953 - RNA, 19 nt, Artificial Sequence
  Description of Artificial Sequence: Synthetic oligonucleotide
ggcauguccgagugccuga

SEQ ID NO: 1643954 - RNA, 19 nt, Artificial Sequence
  Description of Artificial Sequence: Synthetic oligonucleotide
ccgagugccugaccagggg

SEQ ID NO: 1643955 - RNA, 19 nt, Artificial Sequence
  Description of Artificial Sequence: Synthetic oligonucleotide
ccccaaggggcgcugcucc

SEQ ID NO: 1643956 - RNA, 19 nt, Artificial Sequence
  Description of Artificial Sequence: Synthetic oligonucleotide
ucccugcuaacgggccuca

SEQ ID NO: 1643957 - RNA, 19 nt, Artificial Sequence
  Description of Artificial Sequence: Synthetic oligonucleotide
gcagcacucucguuguugu

SEQ ID NO: 1643958 - RNA, 19 nt, Artificial Sequence
  Description of Artificial Sequence: Synthetic oligonucleotide
cggguagaagggcuuuggg

SEQ ID NO: 1643959 - RNA, 19 nt, Artificial Sequence
  Description of Artificial Sequence: Synthetic oligonucleotide
aggucugcagucgcuuaua

SEQ ID NO: 1643960 - RNA, 19 nt, Artificial Sequence
  Description of Artificial Sequence: Synthetic oligonucleotide
uugcagcacucucguuguu

SEQ ID NO: 1643961 - RNA, 19 nt, Artificial Sequence
  Description of Artificial Sequence: Synthetic oligonucleotide
gugucucaccagaguucag

SEQ ID NO: 1643962 - RNA, 19 nt, Artificial Sequence
  Description of Artificial Sequence: Synthetic oligonucleotide
cagcaacaucuugagaacu

SEQ ID NO: 1643963 - RNA, 19 nt, Artificial Sequence
  Description of Artificial Sequence: Synthetic oligonucleotide
ccaugcagcugaccugaug

SEQ ID NO: 1643964 - RNA, 19 nt, Artificial Sequence
  Description of Artificial Sequence: Synthetic oligonucleotide
uccucccagugugcccuca

SEQ ID NO: 1643965 - RNA, 19 nt, Artificial Sequence
  Description of Artificial Sequence: Synthetic oligonucleotide
ccaaggggcgcugcucccg

SEQ ID NO: 1643966 - RNA, 19 nt, Artificial Sequence
  Description of Artificial Sequence: Synthetic oligonucleotide
gcacaugauccuacccuca

SEQ ID NO: 1643967 - RNA, 19 nt, Artificial Sequence
  Description of Artificial Sequence: Synthetic oligonucleotide
ggaggcgcugggcccagca

SEQ ID NO: 1643968 - RNA, 19 nt, Artificial Sequence
  Description of Artificial Sequence: Synthetic oligonucleotide
cucucccaugauccuccca

SEQ ID NO: 1643969 - RNA, 19 nt, Artificial Sequence
  Description of Artificial Sequence: Synthetic oligonucleotide
gcagucgcuuauagucagc

SEQ ID NO: 1643970 - RNA, 19 nt, Artificial Sequence
  Description of Artificial Sequence: Synthetic oligonucleotide
cacucccggccuguguguc

SEQ ID NO: 1643971 - RNA, 19 nt, Artificial Sequence
  Description of Artificial Sequence: Synthetic oligonucleotide
cacucucguuguuguugga

SEQ ID NO: 1643972 - RNA, 19 nt, Artificial Sequence
  Description of Artificial Sequence: Synthetic oligonucleotide
aacgggccucacggugaga

SEQ ID NO: 1643973 - RNA, 19 nt, Artificial Sequence
  Description of Artificial Sequence: Synthetic oligonucleotide
gagcagcgagaugguguca

SEQ ID NO: 1643974 - RNA, 19 nt, Artificial Sequence
  Description of Artificial Sequence: Synthetic oligonucleotide
aggcucugccuagggucug

SEQ ID NO: 1643975 - RNA, 19 nt, Artificial Sequence
  Description of Artificial Sequence: Synthetic oligonucleotide
gcauguccgagugccugac

SEQ ID NO: 1643976 - RNA, 19 nt, Artificial Sequence
  Description of Artificial Sequence: Synthetic oligonucleotide
caaauagcaugcggucccu

SEQ ID NO: 1643977 - RNA, 19 nt, Artificial Sequence
  Description of Artificial Sequence: Synthetic oligonucleotide
guccuggguuaggcugggg

SEQ ID NO: 1643978 - RNA, 19 nt, Artificial Sequence
  Description of Artificial Sequence: Synthetic oligonucleotide
gcgagcagcgagauggugu

SEQ ID NO: 1643979 - RNA, 19 nt, Artificial Sequence
  Description of Artificial Sequence: Synthetic oligonucleotide
gagcacucccggccugugu

SEQ ID NO: 1643980 - RNA, 19 nt, Artificial Sequence
  Description of Artificial Sequence: Synthetic oligonucleotide
cucccaugauccucccagu

SEQ ID NO: 1643981 - RNA, 19 nt, Artificial Sequence
  Description of Artificial Sequence: Synthetic oligonucleotide
ccuacccucaaugcacaca

SEQ ID NO: 1643982 - RNA, 19 nt, Artificial Sequence
  Description of Artificial Sequence: Synthetic oligonucleotide
acacacugccaggguuccu

SEQ ID NO: 1643983 - RNA, 19 nt, Artificial Sequence
  Description of Artificial Sequence: Synthetic oligonucleotide
gagagcacucccggccugu

SEQ ID NO: 1643984 - RNA, 19 nt, Artificial Sequence
  Description of Artificial Sequence: Synthetic oligonucleotide
ccucacggugagagcacuc

SEQ ID NO: 1643985 - RNA, 19 nt, Artificial Sequence
  Description of Artificial Sequence: Synthetic oligonucleotide
cccaaggggcgcugcuccc

SEQ ID NO: 1643986 - RNA, 19 nt, Artificial Sequence
  Description of Artificial Sequence: Synthetic oligonucleotide
ggcgcugggcccagcaguc

SEQ ID NO: 1643987 - RNA, 19 nt, Artificial Sequence
  Description of Artificial Sequence: Synthetic oligonucleotide
ccucucccaugauccuccc

SEQ ID NO: 1643988 - RNA, 19 nt, Artificial Sequence
  Description of Artificial Sequence: Synthetic oligonucleotide
ccggccugugugucucacc

SEQ ID NO: 1643989 - RNA, 19 nt, Artificial Sequence
  Description of Artificial Sequence: Synthetic oligonucleotide
caccauggcccaggcucuc

SEQ ID NO: 1643990 - RNA, 19 nt, Artificial Sequence
  Description of Artificial Sequence: Synthetic oligonucleotide
cggugagagcacucccggc

SEQ ID NO: 1643991 - RNA, 19 nt, Artificial Sequence
  Description of Artificial Sequence: Synthetic oligonucleotide
cgagugccugaccagggga

SEQ ID NO: 1643992 - RNA, 19 nt, Artificial Sequence
  Description of Artificial Sequence: Synthetic oligonucleotide
ccugugucucaugagggcu

SEQ ID NO: 1643993 - RNA, 19 nt, Artificial Sequence
  Description of Artificial Sequence: Synthetic oligonucleotide
ccgucaggguugucaagga

SEQ ID NO: 1643994 - RNA, 19 nt, Artificial Sequence
  Description of Artificial Sequence: Synthetic oligonucleotide
ggccucacggugagagcac

SEQ ID NO: 1643995 - RNA, 19 nt, Artificial Sequence
  Description of Artificial Sequence: Synthetic oligonucleotide
caggguugucaaggagcga

SEQ ID NO: 1643996 - RNA, 19 nt, Artificial Sequence
  Description of Artificial Sequence: Synthetic oligonucleotide
cuggcauguccgagugccu

SEQ ID NO: 1643997 - RNA, 19 nt, Artificial Sequence
  Description of Artificial Sequence: Synthetic oligonucleotide
ccccgucaggguugucaag

SEQ ID NO: 1643998 - RNA, 19 nt, Artificial Sequence
  Description of Artificial Sequence: Synthetic oligonucleotide
gggugauuucgaacccaaa

SEQ ID NO: 1643999 - RNA, 19 nt, Artificial Sequence
  Description of Artificial Sequence: Synthetic oligonucleotide
gccuagggucugccuggug

SEQ ID NO: 1644000 - RNA, 19 nt, Artificial Sequence
  Description of Artificial Sequence: Synthetic oligonucleotide
ccaugguuuccacucgcau

SEQ ID NO: 1644001 - RNA, 19 nt, Artificial Sequence
  Description of Artificial Sequence: Synthetic oligonucleotide
cugugacacaaagcuccau

SEQ ID NO: 1644002 - RNA, 19 nt, Artificial Sequence
  Description of Artificial Sequence: Synthetic oligonucleotide
cccaugaccucacccacuu

SEQ ID NO: 1644003 - RNA, 19 nt, Artificial Sequence
  Description of Artificial Sequence: Synthetic oligonucleotide
ccucgccgaucaccacaug

SEQ ID NO: 1644004 - RNA, 19 nt, Artificial Sequence
  Description of Artificial Sequence: Synthetic oligonucleotide
ggcucgggaaacaggccuu

SEQ ID NO: 1644005 - RNA, 19 nt, Artificial Sequence
  Description of Artificial Sequence: Synthetic oligonucleotide
gccaaacuucuuguccauu

SEQ ID NO: 1644006 - RNA, 19 nt, Artificial Sequence
  Description of Artificial Sequence: Synthetic oligonucleotide
cccucgccgaucaccacau

SEQ ID NO: 1644007 - RNA, 19 nt, Artificial Sequence
  Description of Artificial Sequence: Synthetic oligonucleotide
ccacuucaccuggcacaug

SEQ ID NO: 1644008 - RNA, 19 nt, Artificial Sequence
  Description of Artificial Sequence: Synthetic oligonucleotide
cccugcuaacgggccucac

SEQ ID NO: 1644009 - RNA, 19 nt, Artificial Sequence
  Description of Artificial Sequence: Synthetic oligonucleotide
gggagacaguggagagccu

SEQ ID NO: 1644010 - RNA, 19 nt, Artificial Sequence
  Description of Artificial Sequence: Synthetic oligonucleotide
ccucggguagaagggcuuu

SEQ ID NO: 1644011 - RNA, 19 nt, Artificial Sequence
  Description of Artificial Sequence: Synthetic oligonucleotide
aaaucacacacacacacac

SEQ ID NO: 1644012 - RNA, 19 nt, Artificial Sequence
  Description of Artificial Sequence: Synthetic oligonucleotide
aagauuaucauccugaauu

SEQ ID NO: 1644013 - RNA, 19 nt, Artificial Sequence
  Description of Artificial Sequence: Synthetic oligonucleotide
aaauacgugacaugguuac

SEQ ID NO: 1644014 - RNA, 19 nt, Artificial Sequence
  Description of Artificial Sequence: Synthetic oligonucleotide
ugaaacuggaauaaauacg

SEQ ID NO: 1644015 - RNA, 19 nt, Artificial Sequence
  Description of Artificial Sequence: Synthetic oligonucleotide
aauuuauugaaacuggaau

SEQ ID NO: 1644016 - RNA, 19 nt, Artificial Sequence
  Description of Artificial Sequence: Synthetic oligonucleotide
aauaauuuauugaaacugg

SEQ ID NO: 1644017 - RNA, 19 nt, Artificial Sequence
  Description of Artificial Sequence: Synthetic oligonucleotide
auauugagaacagagaugg

SEQ ID NO: 1644018 - RNA, 19 nt, Artificial Sequence
  Description of Artificial Sequence: Synthetic oligonucleotide
gaugcuaacaauccaaggc

SEQ ID NO: 1644019 - RNA, 19 nt, Artificial Sequence
  Description of Artificial Sequence: Synthetic oligonucleotide
agcuguggaagucagaagc

SEQ ID NO: 1644020 - RNA, 19 nt, Artificial Sequence
  Description of Artificial Sequence: Synthetic oligonucleotide
augcuaacaauccaaggcc

SEQ ID NO: 1644021 - RNA, 19 nt, Artificial Sequence
  Description of Artificial Sequence: Synthetic oligonucleotide
uugagaauaaauaauuuau

SEQ ID NO: 1644022 - RNA, 19 nt, Artificial Sequence
  Description of Artificial Sequence: Synthetic oligonucleotide
acagagauggcuuauccac

SEQ ID NO: 1644023 - RNA, 19 nt, Artificial Sequence
  Description of Artificial Sequence: Synthetic oligonucleotide
aucacacacacacacacac

SEQ ID NO: 1644024 - RNA, 19 nt, Artificial Sequence
  Description of Artificial Sequence: Synthetic oligonucleotide
uuugagaauaaauaauuua

SEQ ID NO: 1644025 - RNA, 19 nt, Artificial Sequence
  Description of Artificial Sequence: Synthetic oligonucleotide
aguacaagcguuugcagag

SEQ ID NO: 1644026 - RNA, 19 nt, Artificial Sequence
  Description of Artificial Sequence: Synthetic oligonucleotide
aauacccacuugcugggac

SEQ ID NO: 1644027 - RNA, 19 nt, Artificial Sequence
  Description of Artificial Sequence: Synthetic oligonucleotide
acuggaauaaauacgugac

SEQ ID NO: 1644028 - RNA, 19 nt, Artificial Sequence
  Description of Artificial Sequence: Synthetic oligonucleotide
ucugagucgaugaugggca

SEQ ID NO: 1644029 - RNA, 19 nt, Artificial Sequence
  Description of Artificial Sequence: Synthetic oligonucleotide
aaugccagucaguagccag

SEQ ID NO: 1644030 - RNA, 19 nt, Artificial Sequence
  Description of Artificial Sequence: Synthetic oligonucleotide
uugaggaugcuaacaaucc

SEQ ID NO: 1644031 - RNA, 19 nt, Artificial Sequence
  Description of Artificial Sequence: Synthetic oligonucleotide
aggucugcaaaucaccgcg

SEQ ID NO: 1644032 - RNA, 19 nt, Artificial Sequence
  Description of Artificial Sequence: Synthetic oligonucleotide
aauugguucccacccagug

SEQ ID NO: 1644033 - RNA, 19 nt, Artificial Sequence
  Description of Artificial Sequence: Synthetic oligonucleotide
uuugcagaguucugagucg

SEQ ID NO: 1644034 - RNA, 19 nt, Artificial Sequence
  Description of Artificial Sequence: Synthetic oligonucleotide
uccaagaauaccuggggug

SEQ ID NO: 1644035 - RNA, 19 nt, Artificial Sequence
  Description of Artificial Sequence: Synthetic oligonucleotide
aauuuaggagcucccggug

SEQ ID NO: 1644036 - RNA, 19 nt, Artificial Sequence
  Description of Artificial Sequence: Synthetic oligonucleotide
cuugaggaugcuaacaauc

SEQ ID NO: 1644037 - RNA, 19 nt, Artificial Sequence
  Description of Artificial Sequence: Synthetic oligonucleotide
ugaauugguucccacccag

SEQ ID NO: 1644038 - RNA, 19 nt, Artificial Sequence
  Description of Artificial Sequence: Synthetic oligonucleotide
agauuaucauccugaauug

SEQ ID NO: 1644039 - RNA, 19 nt, Artificial Sequence
  Description of Artificial Sequence: Synthetic oligonucleotide
cacgauucgguucagcugc

SEQ ID NO: 1644040 - RNA, 19 nt, Artificial Sequence
  Description of Artificial Sequence: Synthetic oligonucleotide
auaaauacgugacaugguu

SEQ ID NO: 1644041 - RNA, 19 nt, Artificial Sequence
  Description of Artificial Sequence: Synthetic oligonucleotide
ugagcuaggaggcugguau

SEQ ID NO: 1644042 - RNA, 19 nt, Artificial Sequence
  Description of Artificial Sequence: Synthetic oligonucleotide
gaccuaagggcugugacgg

SEQ ID NO: 1644043 - RNA, 19 nt, Artificial Sequence
  Description of Artificial Sequence: Synthetic oligonucleotide
ggagcggugagcuaggagg

SEQ ID NO: 1644044 - RNA, 19 nt, Artificial Sequence
  Description of Artificial Sequence: Synthetic oligonucleotide
uggaauaaauacgugacau

SEQ ID NO: 1644045 - RNA, 19 nt, Artificial Sequence
  Description of Artificial Sequence: Synthetic oligonucleotide
gaggcugguauagacaccg

SEQ ID NO: 1644046 - RNA, 19 nt, Artificial Sequence
  Description of Artificial Sequence: Synthetic oligonucleotide
uguggaagucagaagcacc

SEQ ID NO: 1644047 - RNA, 19 nt, Artificial Sequence
  Description of Artificial Sequence: Synthetic oligonucleotide
uguuccaggcgcaccaggg

SEQ ID NO: 1644048 - RNA, 19 nt, Artificial Sequence
  Description of Artificial Sequence: Synthetic oligonucleotide
aacagagauggcuuaucca

SEQ ID NO: 1644049 - RNA, 19 nt, Artificial Sequence
  Description of Artificial Sequence: Synthetic oligonucleotide
gaacagagauggcuuaucc

SEQ ID NO: 1644050 - RNA, 19 nt, Artificial Sequence
  Description of Artificial Sequence: Synthetic oligonucleotide
ugguauagacaccgggccg

SEQ ID NO: 1644051 - RNA, 19 nt, Artificial Sequence
  Description of Artificial Sequence: Synthetic oligonucleotide
gaaacuggaauaaauacgu

SEQ ID NO: 1644052 - RNA, 19 nt, Artificial Sequence
  Description of Artificial Sequence: Synthetic oligonucleotide
ugaauggaguguuccaggc

SEQ ID NO: 1644053 - RNA, 19 nt, Artificial Sequence
  Description of Artificial Sequence: Synthetic oligonucleotide
agauggcuuauccacacug

SEQ ID NO: 1644054 - RNA, 19 nt, Artificial Sequence
  Description of Artificial Sequence: Synthetic oligonucleotide
gaagacauauuuacagcag

SEQ ID NO: 1644055 - RNA, 19 nt, Artificial Sequence
  Description of Artificial Sequence: Synthetic oligonucleotide
gauuaucauccugaauugg

SEQ ID NO: 1644056 - RNA, 19 nt, Artificial Sequence
  Description of Artificial Sequence: Synthetic oligonucleotide
cuuccaagaauaccugggg

SEQ ID NO: 1644057 - RNA, 19 nt, Artificial Sequence
  Description of Artificial Sequence: Synthetic oligonucleotide
accuggguuucccagcugc

SEQ ID NO: 1644058 - RNA, 19 nt, Artificial Sequence
  Description of Artificial Sequence: Synthetic oligonucleotide
aaaucaccgcggcugguag

SEQ ID NO: 1644059 - RNA, 19 nt, Artificial Sequence
  Description of Artificial Sequence: Synthetic oligonucleotide
aaagauuaucauccugaau

SEQ ID NO: 1644060 - RNA, 19 nt, Artificial Sequence
  Description of Artificial Sequence: Synthetic oligonucleotide
ugacgguugggacuggcag

SEQ ID NO: 1644061 - RNA, 19 nt, Artificial Sequence
  Description of Artificial Sequence: Synthetic oligonucleotide
agcaugucuucagugaugg

SEQ ID NO: 1644062 - RNA, 19 nt, Artificial Sequence
  Description of Artificial Sequence: Synthetic oligonucleotide
aucccaauuuaggagcucc

SEQ ID NO: 1644063 - RNA, 19 nt, Artificial Sequence
  Description of Artificial Sequence: Synthetic oligonucleotide
uuuacagcagagagaccag

SEQ ID NO: 1644064 - RNA, 19 nt, Artificial Sequence
  Description of Artificial Sequence: Synthetic oligonucleotide
gaauggaguguuccaggcg

SEQ ID NO: 1644065 - RNA, 19 nt, Artificial Sequence
  Description of Artificial Sequence: Synthetic oligonucleotide
auacccacuugcugggacc

SEQ ID NO: 1644066 - RNA, 19 nt, Artificial Sequence
  Description of Artificial Sequence: Synthetic oligonucleotide
acuugcugggaccuuggac

SEQ ID NO: 1644067 - RNA, 19 nt, Artificial Sequence
  Description of Artificial Sequence: Synthetic oligonucleotide
cacacacacacacacacac

SEQ ID NO: 1644068 - RNA, 19 nt, Artificial Sequence
  Description of Artificial Sequence: Synthetic oligonucleotide
ugcuaacaauccaaggcca

SEQ ID NO: 1644069 - RNA, 19 nt, Artificial Sequence
  Description of Artificial Sequence: Synthetic oligonucleotide
aauaaauacgugacauggu

SEQ ID NO: 1644070 - RNA, 19 nt, Artificial Sequence
  Description of Artificial Sequence: Synthetic oligonucleotide
uaaauacgugacaugguua

SEQ ID NO: 1644071 - RNA, 19 nt, Artificial Sequence
  Description of Artificial Sequence: Synthetic oligonucleotide
ugcaaaucaccgcggcugg

SEQ ID NO: 1644072 - RNA, 19 nt, Artificial Sequence
  Description of Artificial Sequence: Synthetic oligonucleotide
ucucagagaacugaaugga

SEQ ID NO: 1644073 - RNA, 19 nt, Artificial Sequence
  Description of Artificial Sequence: Synthetic oligonucleotide
uucugagucgaugaugggc

SEQ ID NO: 1644074 - RNA, 19 nt, Artificial Sequence
  Description of Artificial Sequence: Synthetic oligonucleotide
aggaccuaagggcugugac

SEQ ID NO: 1644075 - RNA, 19 nt, Artificial Sequence
  Description of Artificial Sequence: Synthetic oligonucleotide
ugaggaugcuaacaaucca

SEQ ID NO: 1644076 - RNA, 19 nt, Artificial Sequence
  Description of Artificial Sequence: Synthetic oligonucleotide
ucgaugaugggcaccuuca

SEQ ID NO: 1644077 - RNA, 19 nt, Artificial Sequence
  Description of Artificial Sequence: Synthetic oligonucleotide
uuccaagaauaccuggggu

SEQ ID NO: 1644078 - RNA, 19 nt, Artificial Sequence
  Description of Artificial Sequence: Synthetic oligonucleotide
uccccuuccagguaaccag

SEQ ID NO: 1644079 - RNA, 19 nt, Artificial Sequence
  Description of Artificial Sequence: Synthetic oligonucleotide
cacacacacacacaacagc

SEQ ID NO: 1644080 - RNA, 19 nt, Artificial Sequence
  Description of Artificial Sequence: Synthetic oligonucleotide
aguguugggagggagccgg

SEQ ID NO: 1644081 - RNA, 19 nt, Artificial Sequence
  Description of Artificial Sequence: Synthetic oligonucleotide
agcaccagaaagauuauca

SEQ ID NO: 1644082 - RNA, 19 nt, Artificial Sequence
  Description of Artificial Sequence: Synthetic oligonucleotide
aauaccugggguggggcag

SEQ ID NO: 1644083 - RNA, 19 nt, Artificial Sequence
  Description of Artificial Sequence: Synthetic oligonucleotide
auuaucauccugaauuggu

SEQ ID NO: 1644084 - RNA, 19 nt, Artificial Sequence
  Description of Artificial Sequence: Synthetic oligonucleotide
ucaguguugggagggagcc

SEQ ID NO: 1644085 - RNA, 19 nt, Artificial Sequence
  Description of Artificial Sequence: Synthetic oligonucleotide
gaugcggacagcacugcgg

SEQ ID NO: 1644086 - RNA, 19 nt, Artificial Sequence
  Description of Artificial Sequence: Synthetic oligonucleotide
uaacaauccaaggccacug

SEQ ID NO: 1644087 - RNA, 19 nt, Artificial Sequence
  Description of Artificial Sequence: Synthetic oligonucleotide
uccugaauugguucccacc

SEQ ID NO: 1644088 - RNA, 19 nt, Artificial Sequence
  Description of Artificial Sequence: Synthetic oligonucleotide
aaaaucacacacacacaca

SEQ ID NO: 1644089 - RNA, 19 nt, Artificial Sequence
  Description of Artificial Sequence: Synthetic oligonucleotide
gacgguugggacuggcagg

SEQ ID NO: 1644090 - RNA, 19 nt, Artificial Sequence
  Description of Artificial Sequence: Synthetic oligonucleotide
gagggagccggacagagga

SEQ ID NO: 1644091 - RNA, 19 nt, Artificial Sequence
  Description of Artificial Sequence: Synthetic oligonucleotide
gaaagauuaucauccugaa

SEQ ID NO: 1644092 - RNA, 19 nt, Artificial Sequence
  Description of Artificial Sequence: Synthetic oligonucleotide
aaucaccgcggcugguagg

SEQ ID NO: 1644093 - RNA, 19 nt, Artificial Sequence
  Description of Artificial Sequence: Synthetic oligonucleotide
ugcaauccagcagucagug

SEQ ID NO: 1644094 - RNA, 19 nt, Artificial Sequence
  Description of Artificial Sequence: Synthetic oligonucleotide
cagaggcucuccaucacgg

SEQ ID NO: 1644095 - RNA, 19 nt, Artificial Sequence
  Description of Artificial Sequence: Synthetic oligonucleotide
cacacacacacacacaaca

SEQ ID NO: 1644096 - RNA, 19 nt, Artificial Sequence
  Description of Artificial Sequence: Synthetic oligonucleotide
ccaagcaauacccacuugc

SEQ ID NO: 1644097 - RNA, 19 nt, Artificial Sequence
  Description of Artificial Sequence: Synthetic oligonucleotide
acaugguuacaaauaacug

SEQ ID NO: 1644098 - RNA, 19 nt, Artificial Sequence
  Description of Artificial Sequence: Synthetic oligonucleotide
uucgguucagcugcugagg

SEQ ID NO: 1644099 - RNA, 19 nt, Artificial Sequence
  Description of Artificial Sequence: Synthetic oligonucleotide
cagacaggcaucccgcucc

SEQ ID NO: 1644100 - RNA, 19 nt, Artificial Sequence
  Description of Artificial Sequence: Synthetic oligonucleotide
uuuaggagcucccgguguc

SEQ ID NO: 1644101 - RNA, 19 nt, Artificial Sequence
  Description of Artificial Sequence: Synthetic oligonucleotide
ucgguucagcugcugaggc

SEQ ID NO: 1644102 - RNA, 19 nt, Artificial Sequence
  Description of Artificial Sequence: Synthetic oligonucleotide
acacacaacagcauccuug

SEQ ID NO: 1644103 - RNA, 19 nt, Artificial Sequence
  Description of Artificial Sequence: Synthetic oligonucleotide
ggaauaaauacgugacaug

SEQ ID NO: 1644104 - RNA, 19 nt, Artificial Sequence
  Description of Artificial Sequence: Synthetic oligonucleotide
acacacacacacaacagca

SEQ ID NO: 1644105 - RNA, 19 nt, Artificial Sequence
  Description of Artificial Sequence: Synthetic oligonucleotide
ucugcaaaucaccgcggcu

SEQ ID NO: 1644106 - RNA, 19 nt, Artificial Sequence
  Description of Artificial Sequence: Synthetic oligonucleotide
ggaugcuaacaauccaagg

SEQ ID NO: 1644107 - RNA, 19 nt, Artificial Sequence
  Description of Artificial Sequence: Synthetic oligonucleotide
uucugcgcagcccucuccc

SEQ ID NO: 1644108 - RNA, 19 nt, Artificial Sequence
  Description of Artificial Sequence: Synthetic oligonucleotide
uaagggcugugacgguugg

SEQ ID NO: 1644109 - RNA, 19 nt, Artificial Sequence
  Description of Artificial Sequence: Synthetic oligonucleotide
gaggucugcaaaucaccgc

SEQ ID NO: 1644110 - RNA, 19 nt, Artificial Sequence
  Description of Artificial Sequence: Synthetic oligonucleotide
caccccgccaguacaagcg

SEQ ID NO: 1644111 - RNA, 19 nt, Artificial Sequence
  Description of Artificial Sequence: Synthetic oligonucleotide
aaacuggaauaaauacgug

SEQ ID NO: 1644112 - RNA, 19 nt, Artificial Sequence
  Description of Artificial Sequence: Synthetic oligonucleotide
uggcuuauccacacuguuc

SEQ ID NO: 1644113 - RNA, 19 nt, Artificial Sequence
  Description of Artificial Sequence: Synthetic oligonucleotide
cauccuugauugaggggcg

SEQ ID NO: 1644114 - RNA, 19 nt, Artificial Sequence
  Description of Artificial Sequence: Synthetic oligonucleotide
ccugaauugguucccaccc

SEQ ID NO: 1644115 - RNA, 19 nt, Artificial Sequence
  Description of Artificial Sequence: Synthetic oligonucleotide
accuggcacaucaagggac

SEQ ID NO: 1644116 - RNA, 19 nt, Artificial Sequence
  Description of Artificial Sequence: Synthetic oligonucleotide
ugguuacaaauaacuguaa

SEQ ID NO: 1644117 - RNA, 19 nt, Artificial Sequence
  Description of Artificial Sequence: Synthetic oligonucleotide
uucuugaagcagugugcag

SEQ ID NO: 1644118 - RNA, 19 nt, Artificial Sequence
  Description of Artificial Sequence: Synthetic oligonucleotide
ucuugaggaugcuaacaau

SEQ ID NO: 1644119 - RNA, 19 nt, Artificial Sequence
  Description of Artificial Sequence: Synthetic oligonucleotide
ucacacacacacacacaca

SEQ ID NO: 1644120 - RNA, 19 nt, Artificial Sequence
  Description of Artificial Sequence: Synthetic oligonucleotide
cauucuugaggaugcuaac

SEQ ID NO: 1644121 - RNA, 19 nt, Artificial Sequence
  Description of Artificial Sequence: Synthetic oligonucleotide
cugcaaaucaccgcggcug

SEQ ID NO: 1644122 - RNA, 19 nt, Artificial Sequence
  Description of Artificial Sequence: Synthetic oligonucleotide
auccugaauugguucccac

SEQ ID NO: 1644123 - RNA, 19 nt, Artificial Sequence
  Description of Artificial Sequence: Synthetic oligonucleotide
ucccaauuuaggagcuccc

SEQ ID NO: 1644124 - RNA, 19 nt, Artificial Sequence
  Description of Artificial Sequence: Synthetic oligonucleotide
ggaccuaagggcugugacg

SEQ ID NO: 1644125 - RNA, 19 nt, Artificial Sequence
  Description of Artificial Sequence: Synthetic oligonucleotide
gguauagacaccgggccgg

SEQ ID NO: 1644126 - RNA, 19 nt, Artificial Sequence
  Description of Artificial Sequence: Synthetic oligonucleotide
ccagaucccaauuuaggag

SEQ ID NO: 1644127 - RNA, 19 nt, Artificial Sequence
  Description of Artificial Sequence: Synthetic oligonucleotide
gauccucucagagaacuga

SEQ ID NO: 1644128 - RNA, 19 nt, Artificial Sequence
  Description of Artificial Sequence: Synthetic oligonucleotide
uguccgucaagugcccgcg

SEQ ID NO: 1644129 - RNA, 19 nt, Artificial Sequence
  Description of Artificial Sequence: Synthetic oligonucleotide
cuaagggcugugacgguug

SEQ ID NO: 1644130 - RNA, 19 nt, Artificial Sequence
  Description of Artificial Sequence: Synthetic oligonucleotide
cacacacacacacacacaa

SEQ ID NO: 1644131 - RNA, 19 nt, Artificial Sequence
  Description of Artificial Sequence: Synthetic oligonucleotide
cacacaacagcauccuuga

SEQ ID NO: 1644132 - RNA, 19 nt, Artificial Sequence
  Description of Artificial Sequence: Synthetic oligonucleotide
aaucacacacacacacaca

SEQ ID NO: 1644133 - RNA, 19 nt, Artificial Sequence
  Description of Artificial Sequence: Synthetic oligonucleotide
acgguugggacuggcaggg

SEQ ID NO: 1644134 - RNA, 19 nt, Artificial Sequence
  Description of Artificial Sequence: Synthetic oligonucleotide
uccucuccacccacgauuc

SEQ ID NO: 1644135 - RNA, 19 nt, Artificial Sequence
  Description of Artificial Sequence: Synthetic oligonucleotide
aauacgugacaugguuaca

SEQ ID NO: 1644136 - RNA, 19 nt, Artificial Sequence
  Description of Artificial Sequence: Synthetic oligonucleotide
agacaggcaucccgcuccc

SEQ ID NO: 1644137 - RNA, 19 nt, Artificial Sequence
  Description of Artificial Sequence: Synthetic oligonucleotide
ucuccacccacgauucggu

SEQ ID NO: 1644138 - RNA, 19 nt, Artificial Sequence
  Description of Artificial Sequence: Synthetic oligonucleotide
auacgugacaugguuacaa

SEQ ID NO: 1644139 - RNA, 19 nt, Artificial Sequence
  Description of Artificial Sequence: Synthetic oligonucleotide
aucaccgcggcugguaggg

SEQ ID NO: 1644140 - RNA, 19 nt, Artificial Sequence
  Description of Artificial Sequence: Synthetic oligonucleotide
gcaauacccacuugcuggg

SEQ ID NO: 1644141 - RNA, 19 nt, Artificial Sequence
  Description of Artificial Sequence: Synthetic oligonucleotide
caagugcccgcgcagcugc

SEQ ID NO: 1644142 - RNA, 19 nt, Artificial Sequence
  Description of Artificial Sequence: Synthetic oligonucleotide
agaacugaauggaguguuc

SEQ ID NO: 1644143 - RNA, 19 nt, Artificial Sequence
  Description of Artificial Sequence: Synthetic oligonucleotide
uagacaccgggccgguugc

SEQ ID NO: 1644144 - RNA, 19 nt, Artificial Sequence
  Description of Artificial Sequence: Synthetic oligonucleotide
ccaauuuaggagcucccgg

SEQ ID NO: 1644145 - RNA, 19 nt, Artificial Sequence
  Description of Artificial Sequence: Synthetic oligonucleotide
acacacacacacacaacag

SEQ ID NO: 1644146 - RNA, 19 nt, Artificial Sequence
  Description of Artificial Sequence: Synthetic oligonucleotide
uggaccuggguuucccagc

SEQ ID NO: 1644147 - RNA, 19 nt, Artificial Sequence
  Description of Artificial Sequence: Synthetic oligonucleotide
ggaggucugcaaaucaccg

SEQ ID NO: 1644148 - RNA, 19 nt, Artificial Sequence
  Description of Artificial Sequence: Synthetic oligonucleotide
gugaccacccagcgguugg

SEQ ID NO: 1644149 - RNA, 19 nt, Artificial Sequence
  Description of Artificial Sequence: Synthetic oligonucleotide
gguugggacuggcagggcg

SEQ ID NO: 1644150 - RNA, 19 nt, Artificial Sequence
  Description of Artificial Sequence: Synthetic oligonucleotide
caguacaagcguuugcaga

SEQ ID NO: 1644151 - RNA, 19 nt, Artificial Sequence
  Description of Artificial Sequence: Synthetic oligonucleotide
guugggacuggcagggcgg

SEQ ID NO: 1644152 - RNA, 19 nt, Artificial Sequence
  Description of Artificial Sequence: Synthetic oligonucleotide
uccgucaagugcccgcgca

SEQ ID NO: 1644153 - RNA, 19 nt, Artificial Sequence
  Description of Artificial Sequence: Synthetic oligonucleotide
cucuccacccacgauucgg

SEQ ID NO: 1644154 - RNA, 19 nt, Artificial Sequence
  Description of Artificial Sequence: Synthetic oligonucleotide
caucuccaaggaccuaagg

SEQ ID NO: 1644155 - RNA, 19 nt, Artificial Sequence
  Description of Artificial Sequence: Synthetic oligonucleotide
cccaacaauauugagaaca

SEQ ID NO: 1644156 - RNA, 19 nt, Artificial Sequence
  Description of Artificial Sequence: Synthetic oligonucleotide
uacaagcguuugcagaguu

SEQ ID NO: 1644157 - RNA, 19 nt, Artificial Sequence
  Description of Artificial Sequence: Synthetic oligonucleotide
uugcagaguucugagucga

SEQ ID NO: 1644158 - RNA, 19 nt, Artificial Sequence
  Description of Artificial Sequence: Synthetic oligonucleotide
ccaagaauaccuggggugg

SEQ ID NO: 1644159 - RNA, 19 nt, Artificial Sequence
  Description of Artificial Sequence: Synthetic oligonucleotide
gucugcaaaucaccgcggc

SEQ ID NO: 1644160 - RNA, 19 nt, Artificial Sequence
  Description of Artificial Sequence: Synthetic oligonucleotide
ucugcacccaggagcggug

SEQ ID NO: 1644161 - RNA, 19 nt, Artificial Sequence
  Description of Artificial Sequence: Synthetic oligonucleotide
ccagcgguuggugagaagg

SEQ ID NO: 1644162 - RNA, 19 nt, Artificial Sequence
  Description of Artificial Sequence: Synthetic oligonucleotide
cugauaaugccagucagua

SEQ ID NO: 1644163 - RNA, 19 nt, Artificial Sequence
  Description of Artificial Sequence: Synthetic oligonucleotide
cagucaguagccaggcguc

SEQ ID NO: 1644164 - RNA, 19 nt, Artificial Sequence
  Description of Artificial Sequence: Synthetic oligonucleotide
auggcuuauccacacuguu

SEQ ID NO: 1644165 - RNA, 19 nt, Artificial Sequence
  Description of Artificial Sequence: Synthetic oligonucleotide
acacacacacacacacaac

SEQ ID NO: 1644166 - RNA, 19 nt, Artificial Sequence
  Description of Artificial Sequence: Synthetic oligonucleotide
cuguccgucaagugcccgc

SEQ ID NO: 1644167 - RNA, 19 nt, Artificial Sequence
  Description of Artificial Sequence: Synthetic oligonucleotide
uccucucagagaacugaau

SEQ ID NO: 1644168 - RNA, 19 nt, Artificial Sequence
  Description of Artificial Sequence: Synthetic oligonucleotide
gcugguauagacaccgggc

SEQ ID NO: 1644169 - RNA, 19 nt, Artificial Sequence
  Description of Artificial Sequence: Synthetic oligonucleotide
agaggcuguucaucuccag

SEQ ID NO: 1644170 - RNA, 19 nt, Artificial Sequence
  Description of Artificial Sequence: Synthetic oligonucleotide
gguagaagacauauuuaca

SEQ ID NO: 1644171 - RNA, 19 nt, Artificial Sequence
  Description of Artificial Sequence: Synthetic oligonucleotide
gucgaugaugggcaccuuc

SEQ ID NO: 1644172 - RNA, 19 nt, Artificial Sequence
  Description of Artificial Sequence: Synthetic oligonucleotide
aggagcggugagcuaggag

SEQ ID NO: 1644173 - RNA, 19 nt, Artificial Sequence
  Description of Artificial Sequence: Synthetic oligonucleotide
uuaggagcucccggugucc

SEQ ID NO: 1644174 - RNA, 19 nt, Artificial Sequence
  Description of Artificial Sequence: Synthetic oligonucleotide
caauuuaggagcucccggu

SEQ ID NO: 1644175 - RNA, 19 nt, Artificial Sequence
  Description of Artificial Sequence: Synthetic oligonucleotide
ugcggguagcuguggaagu

SEQ ID NO: 1644176 - RNA, 19 nt, Artificial Sequence
  Description of Artificial Sequence: Synthetic oligonucleotide
cugcggguagcuguggaag

SEQ ID NO: 1644177 - RNA, 19 nt, Artificial Sequence
  Description of Artificial Sequence: Synthetic oligonucleotide
aagaggcuguucaucucca

SEQ ID NO: 1644178 - RNA, 19 nt, Artificial Sequence
  Description of Artificial Sequence: Synthetic oligonucleotide
cagagucgcccagacaggc

SEQ ID NO: 1644179 - RNA, 19 nt, Artificial Sequence
  Description of Artificial Sequence: Synthetic oligonucleotide
gcagaggcucuccaucacg

SEQ ID NO: 1644180 - RNA, 19 nt, Artificial Sequence
  Description of Artificial Sequence: Synthetic oligonucleotide
gaagggucugcggcugggg

SEQ ID NO: 1644181 - RNA, 19 nt, Artificial Sequence
  Description of Artificial Sequence: Synthetic oligonucleotide
ugcacggguucccuccuuc

SEQ ID NO: 1644182 - RNA, 19 nt, Artificial Sequence
  Description of Artificial Sequence: Synthetic oligonucleotide
cagagauggcuuauccaca

SEQ ID NO: 1644183 - RNA, 19 nt, Artificial Sequence
  Description of Artificial Sequence: Synthetic oligonucleotide
caccccuugcacaauccuc

SEQ ID NO: 1644184 - RNA, 19 nt, Artificial Sequence
  Description of Artificial Sequence: Synthetic oligonucleotide
aaggaccuaagggcuguga

SEQ ID NO: 1644185 - RNA, 19 nt, Artificial Sequence
  Description of Artificial Sequence: Synthetic oligonucleotide
ggaagucagaagcaccaga

SEQ ID NO: 1644186 - RNA, 19 nt, Artificial Sequence
  Description of Artificial Sequence: Synthetic oligonucleotide
gucaguguugggagggagc

SEQ ID NO: 1644187 - RNA, 19 nt, Artificial Sequence
  Description of Artificial Sequence: Synthetic oligonucleotide
agggaugcggacagcacug

SEQ ID NO: 1644188 - RNA, 19 nt, Artificial Sequence
  Description of Artificial Sequence: Synthetic oligonucleotide
caauccagcagucaguguu

SEQ ID NO: 1644189 - RNA, 19 nt, Artificial Sequence
  Description of Artificial Sequence: Synthetic oligonucleotide
ucugcacggguucccuccu

SEQ ID NO: 1644190 - RNA, 19 nt, Artificial Sequence
  Description of Artificial Sequence: Synthetic oligonucleotide
caagcaauacccacuugcu

SEQ ID NO: 1644191 - RNA, 19 nt, Artificial Sequence
  Description of Artificial Sequence: Synthetic oligonucleotide
cacaauccucugcacccag

SEQ ID NO: 1644192 - RNA, 19 nt, Artificial Sequence
  Description of Artificial Sequence: Synthetic oligonucleotide
gcagcacccaagcaauacc

SEQ ID NO: 1644193 - RNA, 19 nt, Artificial Sequence
  Description of Artificial Sequence: Synthetic oligonucleotide
caaugucugcacggguucc

SEQ ID NO: 1644194 - RNA, 19 nt, Artificial Sequence
  Description of Artificial Sequence: Synthetic oligonucleotide
ggugggagccauucuugag

SEQ ID NO: 1644195 - RNA, 19 nt, Artificial Sequence
  Description of Artificial Sequence: Synthetic oligonucleotide
gcagugaccacccagcggu

SEQ ID NO: 1644196 - RNA, 19 nt, Artificial Sequence
  Description of Artificial Sequence: Synthetic oligonucleotide
guugggagggagccggaca

SEQ ID NO: 1644197 - RNA, 19 nt, Artificial Sequence
  Description of Artificial Sequence: Synthetic oligonucleotide
agaucccaauuuaggagcu

SEQ ID NO: 1644198 - RNA, 19 nt, Artificial Sequence
  Description of Artificial Sequence: Synthetic oligonucleotide
cagugauggcuuccugccc

SEQ ID NO: 1644199 - RNA, 19 nt, Artificial Sequence
  Description of Artificial Sequence: Synthetic oligonucleotide
agccaggcgucauccaccu

SEQ ID NO: 1644200 - RNA, 19 nt, Artificial Sequence
  Description of Artificial Sequence: Synthetic oligonucleotide
ugugacgguugggacuggc

SEQ ID NO: 1644201 - RNA, 19 nt, Artificial Sequence
  Description of Artificial Sequence: Synthetic oligonucleotide
guggugggagccauucuug

SEQ ID NO: 1644202 - RNA, 19 nt, Artificial Sequence
  Description of Artificial Sequence: Synthetic oligonucleotide
agaggcucuccaucacgga

SEQ ID NO: 1644203 - RNA, 19 nt, Artificial Sequence
  Description of Artificial Sequence: Synthetic oligonucleotide
ucugcgcagcccucucccc

SEQ ID NO: 1644204 - RNA, 19 nt, Artificial Sequence
  Description of Artificial Sequence: Synthetic oligonucleotide
ggaugcggacagcacugcg

SEQ ID NO: 1644205 - RNA, 19 nt, Artificial Sequence
  Description of Artificial Sequence: Synthetic oligonucleotide
gcugugacgguugggacug

SEQ ID NO: 1644206 - RNA, 19 nt, Artificial Sequence
  Description of Artificial Sequence: Synthetic oligonucleotide
caagcguuugcagaguucu

SEQ ID NO: 1644207 - RNA, 19 nt, Artificial Sequence
  Description of Artificial Sequence: Synthetic oligonucleotide
ucccuccuuccaagaauac

SEQ ID NO: 1644208 - RNA, 19 nt, Artificial Sequence
  Description of Artificial Sequence: Synthetic oligonucleotide
uacccacuugcugggaccu

SEQ ID NO: 1644209 - RNA, 19 nt, Artificial Sequence
  Description of Artificial Sequence: Synthetic oligonucleotide
ugcucuccgugcaggccgc

SEQ ID NO: 1644210 - RNA, 19 nt, Artificial Sequence
  Description of Artificial Sequence: Synthetic oligonucleotide
auccuugauugaggggcgg

SEQ ID NO: 1644211 - RNA, 19 nt, Artificial Sequence
  Description of Artificial Sequence: Synthetic oligonucleotide
ccauucuugaggaugcuaa

SEQ ID NO: 1644212 - RNA, 19 nt, Artificial Sequence
  Description of Artificial Sequence: Synthetic oligonucleotide
acggguucccuccuuccaa

SEQ ID NO: 1644213 - RNA, 19 nt, Artificial Sequence
  Description of Artificial Sequence: Synthetic oligonucleotide
gggaggucugcaaaucacc

SEQ ID NO: 1644214 - RNA, 19 nt, Artificial Sequence
  Description of Artificial Sequence: Synthetic oligonucleotide
cugaauugguucccaccca

SEQ ID NO: 1644215 - RNA, 19 nt, Artificial Sequence
  Description of Artificial Sequence: Synthetic oligonucleotide
gccaguacaagcguuugca

SEQ ID NO: 1644216 - RNA, 19 nt, Artificial Sequence
  Description of Artificial Sequence: Synthetic oligonucleotide
ccaguacaagcguuugcag

SEQ ID NO: 1644217 - RNA, 19 nt, Artificial Sequence
  Description of Artificial Sequence: Synthetic oligonucleotide
aagcguuugcagaguucug

SEQ ID NO: 1644218 - RNA, 19 nt, Artificial Sequence
  Description of Artificial Sequence: Synthetic oligonucleotide
gcaaugucugcacggguuc

SEQ ID NO: 1644219 - RNA, 19 nt, Artificial Sequence
  Description of Artificial Sequence: Synthetic oligonucleotide
ugcccgcgcagcugcaccc

SEQ ID NO: 1644220 - RNA, 19 nt, Artificial Sequence
  Description of Artificial Sequence: Synthetic oligonucleotide
ccuugcacaauccucugca

SEQ ID NO: 1644221 - RNA, 19 nt, Artificial Sequence
  Description of Artificial Sequence: Synthetic oligonucleotide
agugaccacccagcgguug

SEQ ID NO: 1644222 - RNA, 19 nt, Artificial Sequence
  Description of Artificial Sequence: Synthetic oligonucleotide
gucgcccagacaggcaucc

SEQ ID NO: 1644223 - RNA, 19 nt, Artificial Sequence
  Description of Artificial Sequence: Synthetic oligonucleotide
cccaauuuaggagcucccg

SEQ ID NO: 1644224 - RNA, 19 nt, Artificial Sequence
  Description of Artificial Sequence: Synthetic oligonucleotide
ugcagaguucugagucgau

SEQ ID NO: 1644225 - RNA, 19 nt, Artificial Sequence
  Description of Artificial Sequence: Synthetic oligonucleotide
gcagagagaccagcaagag

SEQ ID NO: 1644226 - RNA, 19 nt, Artificial Sequence
  Description of Artificial Sequence: Synthetic oligonucleotide
acccacgauucgguucagc

SEQ ID NO: 1644227 - RNA, 19 nt, Artificial Sequence
  Description of Artificial Sequence: Synthetic oligonucleotide
uguugggagggagccggac

SEQ ID NO: 1644228 - RNA, 19 nt, Artificial Sequence
  Description of Artificial Sequence: Synthetic oligonucleotide
agcacugcggguagcugug

SEQ ID NO: 1644229 - RNA, 19 nt, Artificial Sequence
  Description of Artificial Sequence: Synthetic oligonucleotide
accuuggaccuggguuucc

SEQ ID NO: 1644230 - RNA, 19 nt, Artificial Sequence
  Description of Artificial Sequence: Synthetic oligonucleotide
gcgucauccaccuggcaca

SEQ ID NO: 1644231 - RNA, 19 nt, Artificial Sequence
  Description of Artificial Sequence: Synthetic oligonucleotide
acacacacacacacacaca

SEQ ID NO: 1644232 - RNA, 19 nt, Artificial Sequence
  Description of Artificial Sequence: Synthetic oligonucleotide
ggcucuccaucacggauac

SEQ ID NO: 1644233 - RNA, 19 nt, Artificial Sequence
  Description of Artificial Sequence: Synthetic oligonucleotide
gggccgguugcguucugcg

SEQ ID NO: 1644234 - RNA, 19 nt, Artificial Sequence
  Description of Artificial Sequence: Synthetic oligonucleotide
gaggcucuccaucacggau

SEQ ID NO: 1644235 - RNA, 19 nt, Artificial Sequence
  Description of Artificial Sequence: Synthetic oligonucleotide
uggaguguuccaggcgcac

SEQ ID NO: 1644236 - RNA, 19 nt, Artificial Sequence
  Description of Artificial Sequence: Synthetic oligonucleotide
ggucugcaaaucaccgcgg

SEQ ID NO: 1644237 - RNA, 19 nt, Artificial Sequence
  Description of Artificial Sequence: Synthetic oligonucleotide
gagucgcccagacaggcau

SEQ ID NO: 1644238 - RNA, 19 nt, Artificial Sequence
  Description of Artificial Sequence: Synthetic oligonucleotide
ccacgauucgguucagcug

SEQ ID NO: 1644239 - RNA, 19 nt, Artificial Sequence
  Description of Artificial Sequence: Synthetic oligonucleotide
gcuaacaauccaaggccac

SEQ ID NO: 1644240 - RNA, 19 nt, Artificial Sequence
  Description of Artificial Sequence: Synthetic oligonucleotide
agcacccaagcaauaccca

SEQ ID NO: 1644241 - RNA, 19 nt, Artificial Sequence
  Description of Artificial Sequence: Synthetic oligonucleotide
gcgguuggugagaagggag

SEQ ID NO: 1644242 - RNA, 19 nt, Artificial Sequence
  Description of Artificial Sequence: Synthetic oligonucleotide
uuggcgggccgggacuucc

SEQ ID NO: 1644243 - RNA, 19 nt, Artificial Sequence
  Description of Artificial Sequence: Synthetic oligonucleotide
agucaguagccaggcguca

SEQ ID NO: 1644244 - RNA, 19 nt, Artificial Sequence
  Description of Artificial Sequence: Synthetic oligonucleotide
agugcccgcgcagcugcac

SEQ ID NO: 1644245 - RNA, 19 nt, Artificial Sequence
  Description of Artificial Sequence: Synthetic oligonucleotide
uccacagucuggggacaca

SEQ ID NO: 1644246 - RNA, 19 nt, Artificial Sequence
  Description of Artificial Sequence: Synthetic oligonucleotide
guucccuccuuccaagaau

SEQ ID NO: 1644247 - RNA, 19 nt, Artificial Sequence
  Description of Artificial Sequence: Synthetic oligonucleotide
caguguugggagggagccg

SEQ ID NO: 1644248 - RNA, 19 nt, Artificial Sequence
  Description of Artificial Sequence: Synthetic oligonucleotide
ucccgguguccccacuguc

SEQ ID NO: 1644249 - RNA, 19 nt, Artificial Sequence
  Description of Artificial Sequence: Synthetic oligonucleotide
accccgccaguacaagcgu

SEQ ID NO: 1644250 - RNA, 19 nt, Artificial Sequence
  Description of Artificial Sequence: Synthetic oligonucleotide
cugcaccccuugcacaauc

SEQ ID NO: 1644251 - RNA, 19 nt, Artificial Sequence
  Description of Artificial Sequence: Synthetic oligonucleotide
ccgguguccccacuguccg

SEQ ID NO: 1644252 - RNA, 19 nt, Artificial Sequence
  Description of Artificial Sequence: Synthetic oligonucleotide
caccuggcacaucaaggga

SEQ ID NO: 1644253 - RNA, 19 nt, Artificial Sequence
  Description of Artificial Sequence: Synthetic oligonucleotide
ggcagcacccaagcaauac

SEQ ID NO: 1644254 - RNA, 19 nt, Artificial Sequence
  Description of Artificial Sequence: Synthetic oligonucleotide
cuaacaauccaaggccacu

SEQ ID NO: 1644255 - RNA, 19 nt, Artificial Sequence
  Description of Artificial Sequence: Synthetic oligonucleotide
cuccgugcaggccgcuggc

SEQ ID NO: 1644256 - RNA, 19 nt, Artificial Sequence
  Description of Artificial Sequence: Synthetic oligonucleotide
ccagagucgcccagacagg

SEQ ID NO: 1644257 - RNA, 19 nt, Artificial Sequence
  Description of Artificial Sequence: Synthetic oligonucleotide
ggcuguucaucuccagauc

SEQ ID NO: 1644258 - RNA, 19 nt, Artificial Sequence
  Description of Artificial Sequence: Synthetic oligonucleotide
cacccaagcaauacccacu

SEQ ID NO: 1644259 - RNA, 19 nt, Artificial Sequence
  Description of Artificial Sequence: Synthetic oligonucleotide
gugcccgcgcagcugcacc

SEQ ID NO: 1644260 - RNA, 19 nt, Artificial Sequence
  Description of Artificial Sequence: Synthetic oligonucleotide
ggggaggucugcaaaucac

SEQ ID NO: 1644261 - RNA, 19 nt, Artificial Sequence
  Description of Artificial Sequence: Synthetic oligonucleotide
gggcagaggcucuccauca

SEQ ID NO: 1644262 - RNA, 19 nt, Artificial Sequence
  Description of Artificial Sequence: Synthetic oligonucleotide
ugcggacagcacugcgggu

SEQ ID NO: 1644263 - RNA, 19 nt, Artificial Sequence
  Description of Artificial Sequence: Synthetic oligonucleotide
aggcucuccaucacggaua

SEQ ID NO: 1644264 - RNA, 19 nt, Artificial Sequence
  Description of Artificial Sequence: Synthetic oligonucleotide
ggaguguuccaggcgcacc

SEQ ID NO: 1644265 - RNA, 19 nt, Artificial Sequence
  Description of Artificial Sequence: Synthetic oligonucleotide
ugaccacccagcgguuggu

SEQ ID NO: 1644266 - RNA, 19 nt, Artificial Sequence
  Description of Artificial Sequence: Synthetic oligonucleotide
aggagucaggcaggcagau

SEQ ID NO: 1644267 - RNA, 19 nt, Artificial Sequence
  Description of Artificial Sequence: Synthetic oligonucleotide
auggaguguuccaggcgca

SEQ ID NO: 1644268 - RNA, 19 nt, Artificial Sequence
  Description of Artificial Sequence: Synthetic oligonucleotide
agccugcaauccagcaguc

SEQ ID NO: 1644269 - RNA, 19 nt, Artificial Sequence
  Description of Artificial Sequence: Synthetic oligonucleotide
gaauugguucccacccagu

SEQ ID NO: 1644270 - RNA, 19 nt, Artificial Sequence
  Description of Artificial Sequence: Synthetic oligonucleotide
gagccggacagaggaguca

SEQ ID NO: 1644271 - RNA, 19 nt, Artificial Sequence
  Description of Artificial Sequence: Synthetic oligonucleotide
ccccuuccagguaaccagc

SEQ ID NO: 1644272 - RNA, 19 nt, Artificial Sequence
  Description of Artificial Sequence: Synthetic oligonucleotide
gacagcacugcggguagcu

SEQ ID NO: 1644273 - RNA, 19 nt, Artificial Sequence
  Description of Artificial Sequence: Synthetic oligonucleotide
aggcugguauagacaccgg

SEQ ID NO: 1644274 - RNA, 19 nt, Artificial Sequence
  Description of Artificial Sequence: Synthetic oligonucleotide
gcugguagggguggagccc

SEQ ID NO: 1644275 - RNA, 19 nt, Artificial Sequence
  Description of Artificial Sequence: Synthetic oligonucleotide
uggcgggccgggacuuccc

SEQ ID NO: 1644276 - RNA, 19 nt, Artificial Sequence
  Description of Artificial Sequence: Synthetic oligonucleotide
gguucccuccuuccaagaa

SEQ ID NO: 1644277 - RNA, 19 nt, Artificial Sequence
  Description of Artificial Sequence: Synthetic oligonucleotide
caaaucaccgcggcuggua

SEQ ID NO: 1644278 - RNA, 19 nt, Artificial Sequence
  Description of Artificial Sequence: Synthetic oligonucleotide
cacggguucccuccuucca

SEQ ID NO: 1644279 - RNA, 19 nt, Artificial Sequence
  Description of Artificial Sequence: Synthetic oligonucleotide
cugcaauccagcagucagu

SEQ ID NO: 1644280 - RNA, 19 nt, Artificial Sequence
  Description of Artificial Sequence: Synthetic oligonucleotide
agagucgcccagacaggca

SEQ ID NO: 1644281 - RNA, 19 nt, Artificial Sequence
  Description of Artificial Sequence: Synthetic oligonucleotide
ccacccacgauucgguuca

SEQ ID NO: 1644282 - RNA, 19 nt, Artificial Sequence
  Description of Artificial Sequence: Synthetic oligonucleotide
cacacacacacaacagcau

SEQ ID NO: 1644283 - RNA, 19 nt, Artificial Sequence
  Description of Artificial Sequence: Synthetic oligonucleotide
ggggacacagggaugcgga

SEQ ID NO: 1644284 - RNA, 19 nt, Artificial Sequence
  Description of Artificial Sequence: Synthetic oligonucleotide
gcaccccgccaguacaagc

SEQ ID NO: 1644285 - RNA, 19 nt, Artificial Sequence
  Description of Artificial Sequence: Synthetic oligonucleotide
ggaccuuggaccuggguuu

SEQ ID NO: 1644286 - RNA, 19 nt, Artificial Sequence
  Description of Artificial Sequence: Synthetic oligonucleotide
agacaccgggccgguugcg

SEQ ID NO: 1644287 - RNA, 19 nt, Artificial Sequence
  Description of Artificial Sequence: Synthetic oligonucleotide
cagcugcaccccuugcaca

SEQ ID NO: 1644288 - RNA, 19 nt, Artificial Sequence
  Description of Artificial Sequence: Synthetic oligonucleotide
gcuguccucuccacccacg

SEQ ID NO: 1644289 - RNA, 19 nt, Artificial Sequence
  Description of Artificial Sequence: Synthetic oligonucleotide
ccagucaguagccaggcgu

SEQ ID NO: 1644290 - RNA, 19 nt, Artificial Sequence
  Description of Artificial Sequence: Synthetic oligonucleotide
gugacgguugggacuggca

SEQ ID NO: 1644291 - RNA, 19 nt, Artificial Sequence
  Description of Artificial Sequence: Synthetic oligonucleotide
caccgggccgguugcguuc

SEQ ID NO: 1644292 - RNA, 19 nt, Artificial Sequence
  Description of Artificial Sequence: Synthetic oligonucleotide
ggcagaggcucuccaucac

SEQ ID NO: 1644293 - RNA, 19 nt, Artificial Sequence
  Description of Artificial Sequence: Synthetic oligonucleotide
guggagccccagcaaagcu

SEQ ID NO: 1644294 - RNA, 19 nt, Artificial Sequence
  Description of Artificial Sequence: Synthetic oligonucleotide
guccgucaagugcccgcgc

SEQ ID NO: 1644295 - RNA, 19 nt, Artificial Sequence
  Description of Artificial Sequence: Synthetic oligonucleotide
gggacacagggaugcggac

SEQ ID NO: 1644296 - RNA, 19 nt, Artificial Sequence
  Description of Artificial Sequence: Synthetic oligonucleotide
agcggugagcuaggaggcu

SEQ ID NO: 1644297 - RNA, 19 nt, Artificial Sequence
  Description of Artificial Sequence: Synthetic oligonucleotide
cugcgcagcccucucccca

SEQ ID NO: 1644298 - RNA, 19 nt, Artificial Sequence
  Description of Artificial Sequence: Synthetic oligonucleotide
ggcugugacgguugggacu

SEQ ID NO: 1644299 - RNA, 19 nt, Artificial Sequence
  Description of Artificial Sequence: Synthetic oligonucleotide
gcggugagcuaggaggcug

SEQ ID NO: 1644300 - RNA, 19 nt, Artificial Sequence
  Description of Artificial Sequence: Synthetic oligonucleotide
uauagacaccgggccgguu

SEQ ID NO: 1644301 - RNA, 19 nt, Artificial Sequence
  Description of Artificial Sequence: Synthetic oligonucleotide
cacugcggguagcugugga

SEQ ID NO: 1644302 - RNA, 19 nt, Artificial Sequence
  Description of Artificial Sequence: Synthetic oligonucleotide
aggcgucauccaccuggca

SEQ ID NO: 1644303 - RNA, 19 nt, Artificial Sequence
  Description of Artificial Sequence: Synthetic oligonucleotide
gacaggcaucccgcucccc

SEQ ID NO: 1644304 - RNA, 19 nt, Artificial Sequence
  Description of Artificial Sequence: Synthetic oligonucleotide
gcugauaaugccagucagu

SEQ ID NO: 1644305 - RNA, 19 nt, Artificial Sequence
  Description of Artificial Sequence: Synthetic oligonucleotide
ccgguugcguucugcgcag

SEQ ID NO: 1644306 - RNA, 19 nt, Artificial Sequence
  Description of Artificial Sequence: Synthetic oligonucleotide
ccagacaggcaucccgcuc

SEQ ID NO: 1644307 - RNA, 19 nt, Artificial Sequence
  Description of Artificial Sequence: Synthetic oligonucleotide
ucgcccagacaggcauccc

SEQ ID NO: 1644308 - RNA, 19 nt, Artificial Sequence
  Description of Artificial Sequence: Synthetic oligonucleotide
ccgucaagugcccgcgcag

SEQ ID NO: 1644309 - RNA, 19 nt, Artificial Sequence
  Description of Artificial Sequence: Synthetic oligonucleotide
guacaagcguuugcagagu

SEQ ID NO: 1644310 - RNA, 19 nt, Artificial Sequence
  Description of Artificial Sequence: Synthetic oligonucleotide
cccacgauucgguucagcu

SEQ ID NO: 1644311 - RNA, 19 nt, Artificial Sequence
  Description of Artificial Sequence: Synthetic oligonucleotide
caauacccacuugcuggga

SEQ ID NO: 1644312 - RNA, 19 nt, Artificial Sequence
  Description of Artificial Sequence: Synthetic oligonucleotide
gagcucccgguguccccac

SEQ ID NO: 1644313 - RNA, 19 nt, Artificial Sequence
  Description of Artificial Sequence: Synthetic oligonucleotide
gggaugcggacagcacugc

SEQ ID NO: 1644314 - RNA, 19 nt, Artificial Sequence
  Description of Artificial Sequence: Synthetic oligonucleotide
ggcgcaccagggcaauguc

SEQ ID NO: 1644315 - RNA, 19 nt, Artificial Sequence
  Description of Artificial Sequence: Synthetic oligonucleotide
cacccaggagcggugagcu

SEQ ID NO: 1644316 - RNA, 19 nt, Artificial Sequence
  Description of Artificial Sequence: Synthetic oligonucleotide
gguagggguggagccccag

SEQ ID NO: 1644317 - RNA, 19 nt, Artificial Sequence
  Description of Artificial Sequence: Synthetic oligonucleotide
agccugcacagugguggga

SEQ ID NO: 1644318 - RNA, 19 nt, Artificial Sequence
  Description of Artificial Sequence: Synthetic oligonucleotide
cggguucccuccuuccaag

SEQ ID NO: 1644319 - RNA, 19 nt, Artificial Sequence
  Description of Artificial Sequence: Synthetic oligonucleotide
cugugacgguugggacugg

SEQ ID NO: 1644320 - RNA, 19 nt, Artificial Sequence
  Description of Artificial Sequence: Synthetic oligonucleotide
acccagcgguuggugagaa

SEQ ID NO: 1644321 - RNA, 19 nt, Artificial Sequence
  Description of Artificial Sequence: Synthetic oligonucleotide
ccucuccacccacgauucg

SEQ ID NO: 1644322 - RNA, 19 nt, Artificial Sequence
  Description of Artificial Sequence: Synthetic oligonucleotide
cgccaguacaagcguuugc

SEQ ID NO: 1644323 - RNA, 19 nt, Artificial Sequence
  Description of Artificial Sequence: Synthetic oligonucleotide
cagaagcaccagaaagauu

SEQ ID NO: 1644324 - RNA, 19 nt, Artificial Sequence
  Description of Artificial Sequence: Synthetic oligonucleotide
cccaagcaauacccacuug

SEQ ID NO: 1644325 - RNA, 19 nt, Artificial Sequence
  Description of Artificial Sequence: Synthetic oligonucleotide
ggcaaugucugcacggguu

SEQ ID NO: 1644326 - RNA, 19 nt, Artificial Sequence
  Description of Artificial Sequence: Synthetic oligonucleotide
cagucaguguugggaggga

SEQ ID NO: 1644327 - RNA, 19 nt, Artificial Sequence
  Description of Artificial Sequence: Synthetic oligonucleotide
gcggacagcacugcgggua

SEQ ID NO: 1644328 - RNA, 19 nt, Artificial Sequence
  Description of Artificial Sequence: Synthetic oligonucleotide
guauagacaccgggccggu

SEQ ID NO: 1644329 - RNA, 19 nt, Artificial Sequence
  Description of Artificial Sequence: Synthetic oligonucleotide
cggacagcacugcggguag

SEQ ID NO: 1644330 - RNA, 19 nt, Artificial Sequence
  Description of Artificial Sequence: Synthetic oligonucleotide
gacaccgggccgguugcgu

SEQ ID NO: 1644331 - RNA, 19 nt, Artificial Sequence
  Description of Artificial Sequence: Synthetic oligonucleotide
cacccagcgguuggugaga

SEQ ID NO: 1644332 - RNA, 19 nt, Artificial Sequence
  Description of Artificial Sequence: Synthetic oligonucleotide
cccagccugcaauccagca

SEQ ID NO: 1644333 - RNA, 19 nt, Artificial Sequence
  Description of Artificial Sequence: Synthetic oligonucleotide
gcacugcggguagcugugg

SEQ ID NO: 1644334 - RNA, 19 nt, Artificial Sequence
  Description of Artificial Sequence: Synthetic oligonucleotide
gucaguagccaggcgucau

SEQ ID NO: 1644335 - RNA, 19 nt, Artificial Sequence
  Description of Artificial Sequence: Synthetic oligonucleotide
gccauucuugaggaugcua

SEQ ID NO: 1644336 - RNA, 19 nt, Artificial Sequence
  Description of Artificial Sequence: Synthetic oligonucleotide
caccgcggcugguaggggu

SEQ ID NO: 1644337 - RNA, 19 nt, Artificial Sequence
  Description of Artificial Sequence: Synthetic oligonucleotide
ccggagguagaagacauau

SEQ ID NO: 1644338 - RNA, 19 nt, Artificial Sequence
  Description of Artificial Sequence: Synthetic oligonucleotide
caggcgcaccagggcaaug

SEQ ID NO: 1644339 - RNA, 19 nt, Artificial Sequence
  Description of Artificial Sequence: Synthetic oligonucleotide
ggacagcacugcggguagc

SEQ ID NO: 1644340 - RNA, 19 nt, Artificial Sequence
  Description of Artificial Sequence: Synthetic oligonucleotide
ccgccaguacaagcguuug

SEQ ID NO: 1644341 - RNA, 19 nt, Artificial Sequence
  Description of Artificial Sequence: Synthetic oligonucleotide
cacccacgauucgguucag

SEQ ID NO: 1644342 - RNA, 19 nt, Artificial Sequence
  Description of Artificial Sequence: Synthetic oligonucleotide
gcgcagcugcaccccuugc

SEQ ID NO: 1644343 - RNA, 19 nt, Artificial Sequence
  Description of Artificial Sequence: Synthetic oligonucleotide
caggagcggugagcuagga

SEQ ID NO: 1644344 - RNA, 19 nt, Artificial Sequence
  Description of Artificial Sequence: Synthetic oligonucleotide
cccgcaccccgccaguaca

SEQ ID NO: 1644345 - RNA, 19 nt, Artificial Sequence
  Description of Artificial Sequence: Synthetic oligonucleotide
ccagcaagaggcuguucau

SEQ ID NO: 1644346 - RNA, 19 nt, Artificial Sequence
  Description of Artificial Sequence: Synthetic oligonucleotide
caggcaucccgcuccccuu

SEQ ID NO: 1644347 - RNA, 19 nt, Artificial Sequence
  Description of Artificial Sequence: Synthetic oligonucleotide
cguucugcgcagcccucuc

SEQ ID NO: 1644348 - RNA, 19 nt, Artificial Sequence
  Description of Artificial Sequence: Synthetic oligonucleotide
gcgggccgggacuucccuc

SEQ ID NO: 1644349 - RNA, 19 nt, Artificial Sequence
  Description of Artificial Sequence: Synthetic oligonucleotide
ccccgcaccccgccaguac

SEQ ID NO: 1644350 - RNA, 19 nt, Artificial Sequence
  Description of Artificial Sequence: Synthetic oligonucleotide
ccgcggcugguaggggugg

SEQ ID NO: 1644351 - RNA, 19 nt, Artificial Sequence
  Description of Artificial Sequence: Synthetic oligonucleotide
gcgcaccagggcaaugucu

SEQ ID NO: 1644352 - RNA, 19 nt, Artificial Sequence
  Description of Artificial Sequence: Synthetic oligonucleotide
ccuaagggcugugacgguu

SEQ ID NO: 1644353 - RNA, 19 nt, Artificial Sequence
  Description of Artificial Sequence: Synthetic oligonucleotide
gcaaaucaccgcggcuggu

SEQ ID NO: 1644354 - RNA, 19 nt, Artificial Sequence
  Description of Artificial Sequence: Synthetic oligonucleotide
cccggagguagaagacaua

SEQ ID NO: 1644355 - RNA, 19 nt, Artificial Sequence
  Description of Artificial Sequence: Synthetic oligonucleotide
cccgccaguacaagcguuu

SEQ ID NO: 1644356 - RNA, 19 nt, Artificial Sequence
  Description of Artificial Sequence: Synthetic oligonucleotide
cgcaccccgccaguacaag

SEQ ID NO: 1644357 - RNA, 19 nt, Artificial Sequence
  Description of Artificial Sequence: Synthetic oligonucleotide
cagugaccacccagcgguu

SEQ ID NO: 1644358 - RNA, 19 nt, Artificial Sequence
  Description of Artificial Sequence: Synthetic oligonucleotide
ggcgggccgggacuucccu

SEQ ID NO: 1644359 - RNA, 19 nt, Artificial Sequence
  Description of Artificial Sequence: Synthetic oligonucleotide
ccgcaccccgccaguacaa

SEQ ID NO: 1644360 - RNA, 19 nt, Artificial Sequence
  Description of Artificial Sequence: Synthetic oligonucleotide
gggcagcacccaagcaaua

SEQ ID NO: 1644361 - RNA, 19 nt, Artificial Sequence
  Description of Artificial Sequence: Synthetic oligonucleotide
cugcacggguucccuccuu

SEQ ID NO: 1644362 - RNA, 19 nt, Artificial Sequence
  Description of Artificial Sequence: Synthetic oligonucleotide
cgguugggacuggcagggc

SEQ ID NO: 1644363 - RNA, 19 nt, Artificial Sequence
  Description of Artificial Sequence: Synthetic oligonucleotide
gggccgggacuucccuccu

SEQ ID NO: 1644364 - RNA, 19 nt, Artificial Sequence
  Description of Artificial Sequence: Synthetic oligonucleotide
cgguugcguucugcgcagc

SEQ ID NO: 1644365 - RNA, 19 nt, Artificial Sequence
  Description of Artificial Sequence: Synthetic oligonucleotide
gcugcaccccuugcacaau

SEQ ID NO: 1644366 - RNA, 19 nt, Artificial Sequence
  Description of Artificial Sequence: Synthetic oligonucleotide
ccgggacuucccuccuccu

SEQ ID NO: 1644367 - RNA, 19 nt, Artificial Sequence
  Description of Artificial Sequence: Synthetic oligonucleotide
ccccgccaguacaagcguu

SEQ ID NO: 1644368 - RNA, 19 nt, Artificial Sequence
  Description of Artificial Sequence: Synthetic oligonucleotide
gcucuccaucacggauacu

SEQ ID NO: 1644369 - RNA, 19 nt, Artificial Sequence
  Description of Artificial Sequence: Synthetic oligonucleotide
gccccgcaccccgccagua

SEQ ID NO: 1644370 - RNA, 19 nt, Artificial Sequence
  Description of Artificial Sequence: Synthetic oligonucleotide
ccaggcgcaccagggcaau

SEQ ID NO: 1644371 - RNA, 19 nt, Artificial Sequence
  Description of Artificial Sequence: Synthetic oligonucleotide
ccgcgcagcugcaccccuu

SEQ ID NO: 1644372 - RNA, 19 nt, Artificial Sequence
  Description of Artificial Sequence: Synthetic oligonucleotide
uaaacuguccaaaacaagg

SEQ ID NO: 1644373 - RNA, 19 nt, Artificial Sequence
  Description of Artificial Sequence: Synthetic oligonucleotide
aaaggaaacuaaucggacc

SEQ ID NO: 1644374 - RNA, 19 nt, Artificial Sequence
  Description of Artificial Sequence: Synthetic oligonucleotide
augaaauagauccaccugc

SEQ ID NO: 1644375 - RNA, 19 nt, Artificial Sequence
  Description of Artificial Sequence: Synthetic oligonucleotide
ugacgaagagcacagaugg

SEQ ID NO: 1644376 - RNA, 19 nt, Artificial Sequence
  Description of Artificial Sequence: Synthetic oligonucleotide
uggauaaucagcaccaggg

SEQ ID NO: 1644377 - RNA, 19 nt, Artificial Sequence
  Description of Artificial Sequence: Synthetic oligonucleotide
ucuauuuauacaaaaggcu

SEQ ID NO: 1644378 - RNA, 19 nt, Artificial Sequence
  Description of Artificial Sequence: Synthetic oligonucleotide
uuucgaaucaauccaacag

SEQ ID NO: 1644379 - RNA, 19 nt, Artificial Sequence
  Description of Artificial Sequence: Synthetic oligonucleotide
ugggauaaaaggcaacugg

SEQ ID NO: 1644380 - RNA, 19 nt, Artificial Sequence
  Description of Artificial Sequence: Synthetic oligonucleotide
aauaacaccucuuacugau

SEQ ID NO: 1644381 - RNA, 19 nt, Artificial Sequence
  Description of Artificial Sequence: Synthetic oligonucleotide
aaucggaccauuucuaucu

SEQ ID NO: 1644382 - RNA, 19 nt, Artificial Sequence
  Description of Artificial Sequence: Synthetic oligonucleotide
aagacagcagaacaucgcg

SEQ ID NO: 1644383 - RNA, 19 nt, Artificial Sequence
  Description of Artificial Sequence: Synthetic oligonucleotide
gaaucaauccaacagucgc

SEQ ID NO: 1644384 - RNA, 19 nt, Artificial Sequence
  Description of Artificial Sequence: Synthetic oligonucleotide
uacccuaccgcacauaucc

SEQ ID NO: 1644385 - RNA, 19 nt, Artificial Sequence
  Description of Artificial Sequence: Synthetic oligonucleotide
uuaaaacuaacaguuacug

SEQ ID NO: 1644386 - RNA, 19 nt, Artificial Sequence
  Description of Artificial Sequence: Synthetic oligonucleotide
aaacuaaucggaccauuuc

SEQ ID NO: 1644387 - RNA, 19 nt, Artificial Sequence
  Description of Artificial Sequence: Synthetic oligonucleotide
ugaauuaguguucuacacc

SEQ ID NO: 1644388 - RNA, 19 nt, Artificial Sequence
  Description of Artificial Sequence: Synthetic oligonucleotide
aaucaggaaucgcuguagc

SEQ ID NO: 1644389 - RNA, 19 nt, Artificial Sequence
  Description of Artificial Sequence: Synthetic oligonucleotide
uggaauagcgcccugcucc

SEQ ID NO: 1644390 - RNA, 19 nt, Artificial Sequence
  Description of Artificial Sequence: Synthetic oligonucleotide
uagaaagaauuccagcugc

SEQ ID NO: 1644391 - RNA, 19 nt, Artificial Sequence
  Description of Artificial Sequence: Synthetic oligonucleotide
caagguuucgaaucaaucc

SEQ ID NO: 1644392 - RNA, 19 nt, Artificial Sequence
  Description of Artificial Sequence: Synthetic oligonucleotide
aaaaggaaacuaaucggac

SEQ ID NO: 1644393 - RNA, 19 nt, Artificial Sequence
  Description of Artificial Sequence: Synthetic oligonucleotide
aacuaaucggaccauuucu

SEQ ID NO: 1644394 - RNA, 19 nt, Artificial Sequence
  Description of Artificial Sequence: Synthetic oligonucleotide
uccggaauaagacagcaga

SEQ ID NO: 1644395 - RNA, 19 nt, Artificial Sequence
  Description of Artificial Sequence: Synthetic oligonucleotide
aaagccguuucuuguaauc

SEQ ID NO: 1644396 - RNA, 19 nt, Artificial Sequence
  Description of Artificial Sequence: Synthetic oligonucleotide
uuacugauuuacccuaccg

SEQ ID NO: 1644397 - RNA, 19 nt, Artificial Sequence
  Description of Artificial Sequence: Synthetic oligonucleotide
cuccagauuacgauuagcg

SEQ ID NO: 1644398 - RNA, 19 nt, Artificial Sequence
  Description of Artificial Sequence: Synthetic oligonucleotide
aauguuacacgucuccaga

SEQ ID NO: 1644399 - RNA, 19 nt, Artificial Sequence
  Description of Artificial Sequence: Synthetic oligonucleotide
uaugaauuaguguucuaca

SEQ ID NO: 1644400 - RNA, 19 nt, Artificial Sequence
  Description of Artificial Sequence: Synthetic oligonucleotide
ucgaacaagcaacugaacu

SEQ ID NO: 1644401 - RNA, 19 nt, Artificial Sequence
  Description of Artificial Sequence: Synthetic oligonucleotide
uucgaaucaauccaacagu

SEQ ID NO: 1644402 - RNA, 19 nt, Artificial Sequence
  Description of Artificial Sequence: Synthetic oligonucleotide
cuagucguggaauagcgcc

SEQ ID NO: 1644403 - RNA, 19 nt, Artificial Sequence
  Description of Artificial Sequence: Synthetic oligonucleotide
cucuaugccacccacuugg

SEQ ID NO: 1644404 - RNA, 19 nt, Artificial Sequence
  Description of Artificial Sequence: Synthetic oligonucleotide
uaauuauugcaagugaggu

SEQ ID NO: 1644405 - RNA, 19 nt, Artificial Sequence
  Description of Artificial Sequence: Synthetic oligonucleotide
auaaucagcaccagggugg

SEQ ID NO: 1644406 - RNA, 19 nt, Artificial Sequence
  Description of Artificial Sequence: Synthetic oligonucleotide
uuguaauuauugcaaguga

SEQ ID NO: 1644407 - RNA, 19 nt, Artificial Sequence
  Description of Artificial Sequence: Synthetic oligonucleotide
uacugauuuacccuaccgc

SEQ ID NO: 1644408 - RNA, 19 nt, Artificial Sequence
  Description of Artificial Sequence: Synthetic oligonucleotide
auuacgauuagcgugauua

SEQ ID NO: 1644409 - RNA, 19 nt, Artificial Sequence
  Description of Artificial Sequence: Synthetic oligonucleotide
acugauuuacccuaccgca

SEQ ID NO: 1644410 - RNA, 19 nt, Artificial Sequence
  Description of Artificial Sequence: Synthetic oligonucleotide
aaagguuucuaagagucca

SEQ ID NO: 1644411 - RNA, 19 nt, Artificial Sequence
  Description of Artificial Sequence: Synthetic oligonucleotide
guaauuauugcaagugagg

SEQ ID NO: 1644412 - RNA, 19 nt, Artificial Sequence
  Description of Artificial Sequence: Synthetic oligonucleotide
acacuacaagacuuaaaac

SEQ ID NO: 1644413 - RNA, 19 nt, Artificial Sequence
  Description of Artificial Sequence: Synthetic oligonucleotide
gauaaaaggcaacugguaa

SEQ ID NO: 1644414 - RNA, 19 nt, Artificial Sequence
  Description of Artificial Sequence: Synthetic oligonucleotide
uaguccauagugaaggcga

SEQ ID NO: 1644415 - RNA, 19 nt, Artificial Sequence
  Description of Artificial Sequence: Synthetic oligonucleotide
agucgccuuuaucagaggc

SEQ ID NO: 1644416 - RNA, 19 nt, Artificial Sequence
  Description of Artificial Sequence: Synthetic oligonucleotide
cuuguaauuauugcaagug

SEQ ID NO: 1644417 - RNA, 19 nt, Artificial Sequence
  Description of Artificial Sequence: Synthetic oligonucleotide
uuuauaucaucugaaccca

SEQ ID NO: 1644418 - RNA, 19 nt, Artificial Sequence
  Description of Artificial Sequence: Synthetic oligonucleotide
gacauccggaauaagacag

SEQ ID NO: 1644419 - RNA, 19 nt, Artificial Sequence
  Description of Artificial Sequence: Synthetic oligonucleotide
aacuagucguggaauagcg

SEQ ID NO: 1644420 - RNA, 19 nt, Artificial Sequence
  Description of Artificial Sequence: Synthetic oligonucleotide
gacagugcgcacaagagcc

SEQ ID NO: 1644421 - RNA, 19 nt, Artificial Sequence
  Description of Artificial Sequence: Synthetic oligonucleotide
gacagcagaacaucgcgag

SEQ ID NO: 1644422 - RNA, 19 nt, Artificial Sequence
  Description of Artificial Sequence: Synthetic oligonucleotide
ucuacugaaagccguuucu

SEQ ID NO: 1644423 - RNA, 19 nt, Artificial Sequence
  Description of Artificial Sequence: Synthetic oligonucleotide
ugaaauagauccaccugcu

SEQ ID NO: 1644424 - RNA, 19 nt, Artificial Sequence
  Description of Artificial Sequence: Synthetic oligonucleotide
guuagaaagaauuccagcu

SEQ ID NO: 1644425 - RNA, 19 nt, Artificial Sequence
  Description of Artificial Sequence: Synthetic oligonucleotide
gaacaagucgcugacucgg

SEQ ID NO: 1644426 - RNA, 19 nt, Artificial Sequence
  Description of Artificial Sequence: Synthetic oligonucleotide
aaaucaggaaucgcuguag

SEQ ID NO: 1644427 - RNA, 19 nt, Artificial Sequence
  Description of Artificial Sequence: Synthetic oligonucleotide
ucuuguaauuauugcaagu

SEQ ID NO: 1644428 - RNA, 19 nt, Artificial Sequence
  Description of Artificial Sequence: Synthetic oligonucleotide
auuagcgugauuaugaauu

SEQ ID NO: 1644429 - RNA, 19 nt, Artificial Sequence
  Description of Artificial Sequence: Synthetic oligonucleotide
aacuuugggauaaaaggca

SEQ ID NO: 1644430 - RNA, 19 nt, Artificial Sequence
  Description of Artificial Sequence: Synthetic oligonucleotide
auuucuaucugucuauuua

SEQ ID NO: 1644431 - RNA, 19 nt, Artificial Sequence
  Description of Artificial Sequence: Synthetic oligonucleotide
cagacauccggaauaagac

SEQ ID NO: 1644432 - RNA, 19 nt, Artificial Sequence
  Description of Artificial Sequence: Synthetic oligonucleotide
ugaacaagucgcugacucg

SEQ ID NO: 1644433 - RNA, 19 nt, Artificial Sequence
  Description of Artificial Sequence: Synthetic oligonucleotide
uuuaaccacaacagguagu

SEQ ID NO: 1644434 - RNA, 19 nt, Artificial Sequence
  Description of Artificial Sequence: Synthetic oligonucleotide
ugauuuacccuaccgcaca

SEQ ID NO: 1644435 - RNA, 19 nt, Artificial Sequence
  Description of Artificial Sequence: Synthetic oligonucleotide
caucauaggguccaucccc

SEQ ID NO: 1644436 - RNA, 19 nt, Artificial Sequence
  Description of Artificial Sequence: Synthetic oligonucleotide
ucgaaucaauccaacaguc

SEQ ID NO: 1644437 - RNA, 19 nt, Artificial Sequence
  Description of Artificial Sequence: Synthetic oligonucleotide
aucgcgagcgaggauaugc

SEQ ID NO: 1644438 - RNA, 19 nt, Artificial Sequence
  Description of Artificial Sequence: Synthetic oligonucleotide
aaggagaccuuccaucccu

SEQ ID NO: 1644439 - RNA, 19 nt, Artificial Sequence
  Description of Artificial Sequence: Synthetic oligonucleotide
aguaauguccucccuguca

SEQ ID NO: 1644440 - RNA, 19 nt, Artificial Sequence
  Description of Artificial Sequence: Synthetic oligonucleotide
aaggcgaacggcauucugg

SEQ ID NO: 1644441 - RNA, 19 nt, Artificial Sequence
  Description of Artificial Sequence: Synthetic oligonucleotide
uccaaagacaguucugaac

SEQ ID NO: 1644442 - RNA, 19 nt, Artificial Sequence
  Description of Artificial Sequence: Synthetic oligonucleotide
ugugucccacccauggagg

SEQ ID NO: 1644443 - RNA, 19 nt, Artificial Sequence
  Description of Artificial Sequence: Synthetic oligonucleotide
ucucagaaaucaggaaucg

SEQ ID NO: 1644444 - RNA, 19 nt, Artificial Sequence
  Description of Artificial Sequence: Synthetic oligonucleotide
aacggugcaugauuugcug

SEQ ID NO: 1644445 - RNA, 19 nt, Artificial Sequence
  Description of Artificial Sequence: Synthetic oligonucleotide
uuuacccuaccgcacauau

SEQ ID NO: 1644446 - RNA, 19 nt, Artificial Sequence
  Description of Artificial Sequence: Synthetic oligonucleotide
cacaauguuacacgucucc

SEQ ID NO: 1644447 - RNA, 19 nt, Artificial Sequence
  Description of Artificial Sequence: Synthetic oligonucleotide
uuauaucaucugaacccag

SEQ ID NO: 1644448 - RNA, 19 nt, Artificial Sequence
  Description of Artificial Sequence: Synthetic oligonucleotide
gucagcucuacugaaagcc

SEQ ID NO: 1644449 - RNA, 19 nt, Artificial Sequence
  Description of Artificial Sequence: Synthetic oligonucleotide
cuuguaauccuguggcuug

SEQ ID NO: 1644450 - RNA, 19 nt, Artificial Sequence
  Description of Artificial Sequence: Synthetic oligonucleotide
augucggcuggucagauga

SEQ ID NO: 1644451 - RNA, 19 nt, Artificial Sequence
  Description of Artificial Sequence: Synthetic oligonucleotide
caauguuacacgucuccag

SEQ ID NO: 1644452 - RNA, 19 nt, Artificial Sequence
  Description of Artificial Sequence: Synthetic oligonucleotide
augggcucgaacaagcaac

SEQ ID NO: 1644453 - RNA, 19 nt, Artificial Sequence
  Description of Artificial Sequence: Synthetic oligonucleotide
gaaaggaacgguagcuggg

SEQ ID NO: 1644454 - RNA, 19 nt, Artificial Sequence
  Description of Artificial Sequence: Synthetic oligonucleotide
cagaaaucaggaaucgcug

SEQ ID NO: 1644455 - RNA, 19 nt, Artificial Sequence
  Description of Artificial Sequence: Synthetic oligonucleotide
agaaaucaggaaucgcugu

SEQ ID NO: 1644456 - RNA, 19 nt, Artificial Sequence
  Description of Artificial Sequence: Synthetic oligonucleotide
gcacauauccccaauaaag

SEQ ID NO: 1644457 - RNA, 19 nt, Artificial Sequence
  Description of Artificial Sequence: Synthetic oligonucleotide
uccagauuacgauuagcgu

SEQ ID NO: 1644458 - RNA, 19 nt, Artificial Sequence
  Description of Artificial Sequence: Synthetic oligonucleotide
cugaacaagucgcugacuc

SEQ ID NO: 1644459 - RNA, 19 nt, Artificial Sequence
  Description of Artificial Sequence: Synthetic oligonucleotide
gaucugucaggugaagucc

SEQ ID NO: 1644460 - RNA, 19 nt, Artificial Sequence
  Description of Artificial Sequence: Synthetic oligonucleotide
aaggcuacacaauguuaca

SEQ ID NO: 1644461 - RNA, 19 nt, Artificial Sequence
  Description of Artificial Sequence: Synthetic oligonucleotide
cuaucugucuauuuauaca

SEQ ID NO: 1644462 - RNA, 19 nt, Artificial Sequence
  Description of Artificial Sequence: Synthetic oligonucleotide
acagcagaacaucgcgagc

SEQ ID NO: 1644463 - RNA, 19 nt, Artificial Sequence
  Description of Artificial Sequence: Synthetic oligonucleotide
accauuacucaguucucag

SEQ ID NO: 1644464 - RNA, 19 nt, Artificial Sequence
  Description of Artificial Sequence: Synthetic oligonucleotide
uucugaacaagucgcugac

SEQ ID NO: 1644465 - RNA, 19 nt, Artificial Sequence
  Description of Artificial Sequence: Synthetic oligonucleotide
ggcuacacaauguuacacg

SEQ ID NO: 1644466 - RNA, 19 nt, Artificial Sequence
  Description of Artificial Sequence: Synthetic oligonucleotide
aacagucgccuuuaucaga

SEQ ID NO: 1644467 - RNA, 19 nt, Artificial Sequence
  Description of Artificial Sequence: Synthetic oligonucleotide
guaauguccucccugucac

SEQ ID NO: 1644468 - RNA, 19 nt, Artificial Sequence
  Description of Artificial Sequence: Synthetic oligonucleotide
ccagauuacgauuagcgug

SEQ ID NO: 1644469 - RNA, 19 nt, Artificial Sequence
  Description of Artificial Sequence: Synthetic oligonucleotide
aggcgaacggcauucuggg

SEQ ID NO: 1644470 - RNA, 19 nt, Artificial Sequence
  Description of Artificial Sequence: Synthetic oligonucleotide
cauagugaaggcgaacggc

SEQ ID NO: 1644471 - RNA, 19 nt, Artificial Sequence
  Description of Artificial Sequence: Synthetic oligonucleotide
cuggauaaucagcaccagg

SEQ ID NO: 1644472 - RNA, 19 nt, Artificial Sequence
  Description of Artificial Sequence: Synthetic oligonucleotide
cagaacaucgcgagcgagg

SEQ ID NO: 1644473 - RNA, 19 nt, Artificial Sequence
  Description of Artificial Sequence: Synthetic oligonucleotide
cagcagaacaucgcgagcg

SEQ ID NO: 1644474 - RNA, 19 nt, Artificial Sequence
  Description of Artificial Sequence: Synthetic oligonucleotide
cugaugggcucgaacaagc

SEQ ID NO: 1644475 - RNA, 19 nt, Artificial Sequence
  Description of Artificial Sequence: Synthetic oligonucleotide
cagauuacgauuagcguga

SEQ ID NO: 1644476 - RNA, 19 nt, Artificial Sequence
  Description of Artificial Sequence: Synthetic oligonucleotide
uaacaccucuuacugauuu

SEQ ID NO: 1644477 - RNA, 19 nt, Artificial Sequence
  Description of Artificial Sequence: Synthetic oligonucleotide
acuacaagacuuaaaacua

SEQ ID NO: 1644478 - RNA, 19 nt, Artificial Sequence
  Description of Artificial Sequence: Synthetic oligonucleotide
cacaacagguaguccauag

SEQ ID NO: 1644479 - RNA, 19 nt, Artificial Sequence
  Description of Artificial Sequence: Synthetic oligonucleotide
gagguuagaaagaauucca

SEQ ID NO: 1644480 - RNA, 19 nt, Artificial Sequence
  Description of Artificial Sequence: Synthetic oligonucleotide
uuguccucagacauccgga

SEQ ID NO: 1644481 - RNA, 19 nt, Artificial Sequence
  Description of Artificial Sequence: Synthetic oligonucleotide
agagugaaaggaacgguag

SEQ ID NO: 1644482 - RNA, 19 nt, Artificial Sequence
  Description of Artificial Sequence: Synthetic oligonucleotide
cugaagagagaacugguca

SEQ ID NO: 1644483 - RNA, 19 nt, Artificial Sequence
  Description of Artificial Sequence: Synthetic oligonucleotide
ucccuuccuguuuaguugc

SEQ ID NO: 1644484 - RNA, 19 nt, Artificial Sequence
  Description of Artificial Sequence: Synthetic oligonucleotide
uugcaagugagguuagaaa

SEQ ID NO: 1644485 - RNA, 19 nt, Artificial Sequence
  Description of Artificial Sequence: Synthetic oligonucleotide
ggaacgguagcugggaucg

SEQ ID NO: 1644486 - RNA, 19 nt, Artificial Sequence
  Description of Artificial Sequence: Synthetic oligonucleotide
aaggcauccuggccguauc

SEQ ID NO: 1644487 - RNA, 19 nt, Artificial Sequence
  Description of Artificial Sequence: Synthetic oligonucleotide
acgauuagcgugauuauga

SEQ ID NO: 1644488 - RNA, 19 nt, Artificial Sequence
  Description of Artificial Sequence: Synthetic oligonucleotide
cacuaucuccuccaugcgg

SEQ ID NO: 1644489 - RNA, 19 nt, Artificial Sequence
  Description of Artificial Sequence: Synthetic oligonucleotide
agacauccggaauaagaca

SEQ ID NO: 1644490 - RNA, 19 nt, Artificial Sequence
  Description of Artificial Sequence: Synthetic oligonucleotide
aacaucgcgagcgaggaua

SEQ ID NO: 1644491 - RNA, 19 nt, Artificial Sequence
  Description of Artificial Sequence: Synthetic oligonucleotide
cuuacugauuuacccuacc

SEQ ID NO: 1644492 - RNA, 19 nt, Artificial Sequence
  Description of Artificial Sequence: Synthetic oligonucleotide
aggaacgguagcugggauc

SEQ ID NO: 1644493 - RNA, 19 nt, Artificial Sequence
  Description of Artificial Sequence: Synthetic oligonucleotide
ucuuacugauuuacccuac

SEQ ID NO: 1644494 - RNA, 19 nt, Artificial Sequence
  Description of Artificial Sequence: Synthetic oligonucleotide
guccuggcgauauccaagg

SEQ ID NO: 1644495 - RNA, 19 nt, Artificial Sequence
  Description of Artificial Sequence: Synthetic oligonucleotide
uacgauuagcgugauuaug

SEQ ID NO: 1644496 - RNA, 19 nt, Artificial Sequence
  Description of Artificial Sequence: Synthetic oligonucleotide
aaagggcaagguuucgaau

SEQ ID NO: 1644497 - RNA, 19 nt, Artificial Sequence
  Description of Artificial Sequence: Synthetic oligonucleotide
uguggcuuguccucagaca

SEQ ID NO: 1644498 - RNA, 19 nt, Artificial Sequence
  Description of Artificial Sequence: Synthetic oligonucleotide
ggccguauccaccagagug

SEQ ID NO: 1644499 - RNA, 19 nt, Artificial Sequence
  Description of Artificial Sequence: Synthetic oligonucleotide
cauuacucaguucucagaa

SEQ ID NO: 1644500 - RNA, 19 nt, Artificial Sequence
  Description of Artificial Sequence: Synthetic oligonucleotide
acuaacaguuacugcaaaa

SEQ ID NO: 1644501 - RNA, 19 nt, Artificial Sequence
  Description of Artificial Sequence: Synthetic oligonucleotide
cacccauggagguacgccg

SEQ ID NO: 1644502 - RNA, 19 nt, Artificial Sequence
  Description of Artificial Sequence: Synthetic oligonucleotide
ugaaagccguuucuuguaa

SEQ ID NO: 1644503 - RNA, 19 nt, Artificial Sequence
  Description of Artificial Sequence: Synthetic oligonucleotide
aaaggaacgguagcuggga

SEQ ID NO: 1644504 - RNA, 19 nt, Artificial Sequence
  Description of Artificial Sequence: Synthetic oligonucleotide
agcgaggauaugccagggc

SEQ ID NO: 1644505 - RNA, 19 nt, Artificial Sequence
  Description of Artificial Sequence: Synthetic oligonucleotide
acggugcaugauuugcugg

SEQ ID NO: 1644506 - RNA, 19 nt, Artificial Sequence
  Description of Artificial Sequence: Synthetic oligonucleotide
cugauuuacccuaccgcac

SEQ ID NO: 1644507 - RNA, 19 nt, Artificial Sequence
  Description of Artificial Sequence: Synthetic oligonucleotide
gaacuagucguggaauagc

SEQ ID NO: 1644508 - RNA, 19 nt, Artificial Sequence
  Description of Artificial Sequence: Synthetic oligonucleotide
guuucgaaucaauccaaca

SEQ ID NO: 1644509 - RNA, 19 nt, Artificial Sequence
  Description of Artificial Sequence: Synthetic oligonucleotide
acugguaaacuguccaaaa

SEQ ID NO: 1644510 - RNA, 19 nt, Artificial Sequence
  Description of Artificial Sequence: Synthetic oligonucleotide
caacagucgccuuuaucag

SEQ ID NO: 1644511 - RNA, 19 nt, Artificial Sequence
  Description of Artificial Sequence: Synthetic oligonucleotide
acagucgccuuuaucagag

SEQ ID NO: 1644512 - RNA, 19 nt, Artificial Sequence
  Description of Artificial Sequence: Synthetic oligonucleotide
gaucguccuggcgauaucc

SEQ ID NO: 1644513 - RNA, 19 nt, Artificial Sequence
  Description of Artificial Sequence: Synthetic oligonucleotide
uuacacgucuccagauuac

SEQ ID NO: 1644514 - RNA, 19 nt, Artificial Sequence
  Description of Artificial Sequence: Synthetic oligonucleotide
aacugguaaacuguccaaa

SEQ ID NO: 1644515 - RNA, 19 nt, Artificial Sequence
  Description of Artificial Sequence: Synthetic oligonucleotide
cuuaaaacuaacaguuacu

SEQ ID NO: 1644516 - RNA, 19 nt, Artificial Sequence
  Description of Artificial Sequence: Synthetic oligonucleotide
cagcacgaaggacagugcg

SEQ ID NO: 1644517 - RNA, 19 nt, Artificial Sequence
  Description of Artificial Sequence: Synthetic oligonucleotide
uccaagggcuucucccugg

SEQ ID NO: 1644518 - RNA, 19 nt, Artificial Sequence
  Description of Artificial Sequence: Synthetic oligonucleotide
acuagucguggaauagcgc

SEQ ID NO: 1644519 - RNA, 19 nt, Artificial Sequence
  Description of Artificial Sequence: Synthetic oligonucleotide
aaacagcccaucaacugga

SEQ ID NO: 1644520 - RNA, 19 nt, Artificial Sequence
  Description of Artificial Sequence: Synthetic oligonucleotide
uuagcgugauuaugaauua

SEQ ID NO: 1644521 - RNA, 19 nt, Artificial Sequence
  Description of Artificial Sequence: Synthetic oligonucleotide
ucucccugggcaccaaugu

SEQ ID NO: 1644522 - RNA, 19 nt, Artificial Sequence
  Description of Artificial Sequence: Synthetic oligonucleotide
agaccuuccaucccuuccu

SEQ ID NO: 1644523 - RNA, 19 nt, Artificial Sequence
  Description of Artificial Sequence: Synthetic oligonucleotide
cauggagguacgccgcugg

SEQ ID NO: 1644524 - RNA, 19 nt, Artificial Sequence
  Description of Artificial Sequence: Synthetic oligonucleotide
accugcuuauuuuaagcau

SEQ ID NO: 1644525 - RNA, 19 nt, Artificial Sequence
  Description of Artificial Sequence: Synthetic oligonucleotide
ucuuguaauccuguggcuu

SEQ ID NO: 1644526 - RNA, 19 nt, Artificial Sequence
  Description of Artificial Sequence: Synthetic oligonucleotide
uguuacacgucuccagauu

SEQ ID NO: 1644527 - RNA, 19 nt, Artificial Sequence
  Description of Artificial Sequence: Synthetic oligonucleotide
ugggugcaggaguuuaacc

SEQ ID NO: 1644528 - RNA, 19 nt, Artificial Sequence
  Description of Artificial Sequence: Synthetic oligonucleotide
guccugaugggcucgaaca

SEQ ID NO: 1644529 - RNA, 19 nt, Artificial Sequence
  Description of Artificial Sequence: Synthetic oligonucleotide
aggcauccuggccguaucc

SEQ ID NO: 1644530 - RNA, 19 nt, Artificial Sequence
  Description of Artificial Sequence: Synthetic oligonucleotide
acaaaaggcuacacaaugu

SEQ ID NO: 1644531 - RNA, 19 nt, Artificial Sequence
  Description of Artificial Sequence: Synthetic oligonucleotide
aucaauccaacagucgccu

SEQ ID NO: 1644532 - RNA, 19 nt, Artificial Sequence
  Description of Artificial Sequence: Synthetic oligonucleotide
uucucccugggcaccaaug

SEQ ID NO: 1644533 - RNA, 19 nt, Artificial Sequence
  Description of Artificial Sequence: Synthetic oligonucleotide
gaccauuucuaucugucua

SEQ ID NO: 1644534 - RNA, 19 nt, Artificial Sequence
  Description of Artificial Sequence: Synthetic oligonucleotide
uggucagaugacgaagagc

SEQ ID NO: 1644535 - RNA, 19 nt, Artificial Sequence
  Description of Artificial Sequence: Synthetic oligonucleotide
acuaucuccuccaugcgga

SEQ ID NO: 1644536 - RNA, 19 nt, Artificial Sequence
  Description of Artificial Sequence: Synthetic oligonucleotide
cuggccguauccaccagag

SEQ ID NO: 1644537 - RNA, 19 nt, Artificial Sequence
  Description of Artificial Sequence: Synthetic oligonucleotide
cagcccaucaacuggauaa

SEQ ID NO: 1644538 - RNA, 19 nt, Artificial Sequence
  Description of Artificial Sequence: Synthetic oligonucleotide
gcugacucggaucugucag

SEQ ID NO: 1644539 - RNA, 19 nt, Artificial Sequence
  Description of Artificial Sequence: Synthetic oligonucleotide
augacgaagagcacagaug

SEQ ID NO: 1644540 - RNA, 19 nt, Artificial Sequence
  Description of Artificial Sequence: Synthetic oligonucleotide
cugacucggaucugucagg

SEQ ID NO: 1644541 - RNA, 19 nt, Artificial Sequence
  Description of Artificial Sequence: Synthetic oligonucleotide
agucccaaggagaccuucc

SEQ ID NO: 1644542 - RNA, 19 nt, Artificial Sequence
  Description of Artificial Sequence: Synthetic oligonucleotide
uguccugaugggcucgaac

SEQ ID NO: 1644543 - RNA, 19 nt, Artificial Sequence
  Description of Artificial Sequence: Synthetic oligonucleotide
uuacgauuagcgugauuau

SEQ ID NO: 1644544 - RNA, 19 nt, Artificial Sequence
  Description of Artificial Sequence: Synthetic oligonucleotide
ugaugggcucgaacaagca

SEQ ID NO: 1644545 - RNA, 19 nt, Artificial Sequence
  Description of Artificial Sequence: Synthetic oligonucleotide
cauaacacuacaagacuua

SEQ ID NO: 1644546 - RNA, 19 nt, Artificial Sequence
  Description of Artificial Sequence: Synthetic oligonucleotide
agaacaucgcgagcgagga

SEQ ID NO: 1644547 - RNA, 19 nt, Artificial Sequence
  Description of Artificial Sequence: Synthetic oligonucleotide
cuacacaauguuacacguc

SEQ ID NO: 1644548 - RNA, 19 nt, Artificial Sequence
  Description of Artificial Sequence: Synthetic oligonucleotide
uagcgugauuaugaauuag

SEQ ID NO: 1644549 - RNA, 19 nt, Artificial Sequence
  Description of Artificial Sequence: Synthetic oligonucleotide
gcgaggauaugccagggcc

SEQ ID NO: 1644550 - RNA, 19 nt, Artificial Sequence
  Description of Artificial Sequence: Synthetic oligonucleotide
ucuccagauuacgauuagc

SEQ ID NO: 1644551 - RNA, 19 nt, Artificial Sequence
  Description of Artificial Sequence: Synthetic oligonucleotide
agguucacuagaacauaac

SEQ ID NO: 1644552 - RNA, 19 nt, Artificial Sequence
  Description of Artificial Sequence: Synthetic oligonucleotide
ggaucugucaggugaaguc

SEQ ID NO: 1644553 - RNA, 19 nt, Artificial Sequence
  Description of Artificial Sequence: Synthetic oligonucleotide
uccugaugucggcugguca

SEQ ID NO: 1644554 - RNA, 19 nt, Artificial Sequence
  Description of Artificial Sequence: Synthetic oligonucleotide
ucgcgagcgaggauaugcc

SEQ ID NO: 1644555 - RNA, 19 nt, Artificial Sequence
  Description of Artificial Sequence: Synthetic oligonucleotide
uccugaugggcucgaacaa

SEQ ID NO: 1644556 - RNA, 19 nt, Artificial Sequence
  Description of Artificial Sequence: Synthetic oligonucleotide
uccaacagucgccuuuauc

SEQ ID NO: 1644557 - RNA, 19 nt, Artificial Sequence
  Description of Artificial Sequence: Synthetic oligonucleotide
gcgaacggcauucugggcc

SEQ ID NO: 1644558 - RNA, 19 nt, Artificial Sequence
  Description of Artificial Sequence: Synthetic oligonucleotide
cacuagagucccaaggaga

SEQ ID NO: 1644559 - RNA, 19 nt, Artificial Sequence
  Description of Artificial Sequence: Synthetic oligonucleotide
gaaggcgaacggcauucug

SEQ ID NO: 1644560 - RNA, 19 nt, Artificial Sequence
  Description of Artificial Sequence: Synthetic oligonucleotide
gggugcaggaguuuaacca

SEQ ID NO: 1644561 - RNA, 19 nt, Artificial Sequence
  Description of Artificial Sequence: Synthetic oligonucleotide
caccucuuacugauuuacc

SEQ ID NO: 1644562 - RNA, 19 nt, Artificial Sequence
  Description of Artificial Sequence: Synthetic oligonucleotide
acgguagcugggaucgucc

SEQ ID NO: 1644563 - RNA, 19 nt, Artificial Sequence
  Description of Artificial Sequence: Synthetic oligonucleotide
uccuggcgauauccaaggg

SEQ ID NO: 1644564 - RNA, 19 nt, Artificial Sequence
  Description of Artificial Sequence: Synthetic oligonucleotide
caccugcuuauuuuaagca

SEQ ID NO: 1644565 - RNA, 19 nt, Artificial Sequence
  Description of Artificial Sequence: Synthetic oligonucleotide
acugaacuagucguggaau

SEQ ID NO: 1644566 - RNA, 19 nt, Artificial Sequence
  Description of Artificial Sequence: Synthetic oligonucleotide
gugagguuagaaagaauuc

SEQ ID NO: 1644567 - RNA, 19 nt, Artificial Sequence
  Description of Artificial Sequence: Synthetic oligonucleotide
caucugaacccagaagcug

SEQ ID NO: 1644568 - RNA, 19 nt, Artificial Sequence
  Description of Artificial Sequence: Synthetic oligonucleotide
caagucgcugacucggauc

SEQ ID NO: 1644569 - RNA, 19 nt, Artificial Sequence
  Description of Artificial Sequence: Synthetic oligonucleotide
cuggcgauauccaagggcu

SEQ ID NO: 1644570 - RNA, 19 nt, Artificial Sequence
  Description of Artificial Sequence: Synthetic oligonucleotide
cucuacugaaagccguuuc

SEQ ID NO: 1644571 - RNA, 19 nt, Artificial Sequence
  Description of Artificial Sequence: Synthetic oligonucleotide
aaggaacgguagcugggau

SEQ ID NO: 1644572 - RNA, 19 nt, Artificial Sequence
  Description of Artificial Sequence: Synthetic oligonucleotide
cuggucagaugacgaagag

SEQ ID NO: 1644573 - RNA, 19 nt, Artificial Sequence
  Description of Artificial Sequence: Synthetic oligonucleotide
ggagguacgccgcugggug

SEQ ID NO: 1644574 - RNA, 19 nt, Artificial Sequence
  Description of Artificial Sequence: Synthetic oligonucleotide
ggacagugcgcacaagagc

SEQ ID NO: 1644575 - RNA, 19 nt, Artificial Sequence
  Description of Artificial Sequence: Synthetic oligonucleotide
gucgccuuuaucagaggcc

SEQ ID NO: 1644576 - RNA, 19 nt, Artificial Sequence
  Description of Artificial Sequence: Synthetic oligonucleotide
ugacucggaucugucaggu

SEQ ID NO: 1644577 - RNA, 19 nt, Artificial Sequence
  Description of Artificial Sequence: Synthetic oligonucleotide
cagagugaaaggaacggua

SEQ ID NO: 1644578 - RNA, 19 nt, Artificial Sequence
  Description of Artificial Sequence: Synthetic oligonucleotide
gaugucggcuggucagaug

SEQ ID NO: 1644579 - RNA, 19 nt, Artificial Sequence
  Description of Artificial Sequence: Synthetic oligonucleotide
gcacuagagucccaaggag

SEQ ID NO: 1644580 - RNA, 19 nt, Artificial Sequence
  Description of Artificial Sequence: Synthetic oligonucleotide
ucggaccauuucuaucugu

SEQ ID NO: 1644581 - RNA, 19 nt, Artificial Sequence
  Description of Artificial Sequence: Synthetic oligonucleotide
acuaaucggaccauuucua

SEQ ID NO: 1644582 - RNA, 19 nt, Artificial Sequence
  Description of Artificial Sequence: Synthetic oligonucleotide
acgucuccagauuacgauu

SEQ ID NO: 1644583 - RNA, 19 nt, Artificial Sequence
  Description of Artificial Sequence: Synthetic oligonucleotide
aggcaacugguaaacuguc

SEQ ID NO: 1644584 - RNA, 19 nt, Artificial Sequence
  Description of Artificial Sequence: Synthetic oligonucleotide
aucggaccauuucuaucug

SEQ ID NO: 1644585 - RNA, 19 nt, Artificial Sequence
  Description of Artificial Sequence: Synthetic oligonucleotide
acccauggagguacgccgc

SEQ ID NO: 1644586 - RNA, 19 nt, Artificial Sequence
  Description of Artificial Sequence: Synthetic oligonucleotide
ccuggcgauauccaagggc

SEQ ID NO: 1644587 - RNA, 19 nt, Artificial Sequence
  Description of Artificial Sequence: Synthetic oligonucleotide
cgaaucaauccaacagucg

SEQ ID NO: 1644588 - RNA, 19 nt, Artificial Sequence
  Description of Artificial Sequence: Synthetic oligonucleotide
uuacccuaccgcacauauc

SEQ ID NO: 1644589 - RNA, 19 nt, Artificial Sequence
  Description of Artificial Sequence: Synthetic oligonucleotide
gucggcuggucagaugacg

SEQ ID NO: 1644590 - RNA, 19 nt, Artificial Sequence
  Description of Artificial Sequence: Synthetic oligonucleotide
ggugaaguccuagugccug

SEQ ID NO: 1644591 - RNA, 19 nt, Artificial Sequence
  Description of Artificial Sequence: Synthetic oligonucleotide
acacaauguuacacgucuc

SEQ ID NO: 1644592 - RNA, 19 nt, Artificial Sequence
  Description of Artificial Sequence: Synthetic oligonucleotide
uauugcaagugagguuaga

SEQ ID NO: 1644593 - RNA, 19 nt, Artificial Sequence
  Description of Artificial Sequence: Synthetic oligonucleotide
ucguggaauagcgcccugc

SEQ ID NO: 1644594 - RNA, 19 nt, Artificial Sequence
  Description of Artificial Sequence: Synthetic oligonucleotide
uccuguuuaguugcagcau

SEQ ID NO: 1644595 - RNA, 19 nt, Artificial Sequence
  Description of Artificial Sequence: Synthetic oligonucleotide
ucccaaggagaccuuccau

SEQ ID NO: 1644596 - RNA, 19 nt, Artificial Sequence
  Description of Artificial Sequence: Synthetic oligonucleotide
agcagaacaucgcgagcga

SEQ ID NO: 1644597 - RNA, 19 nt, Artificial Sequence
  Description of Artificial Sequence: Synthetic oligonucleotide
gauuagcgugauuaugaau

SEQ ID NO: 1644598 - RNA, 19 nt, Artificial Sequence
  Description of Artificial Sequence: Synthetic oligonucleotide
cuagugccugcaucccacc

SEQ ID NO: 1644599 - RNA, 19 nt, Artificial Sequence
  Description of Artificial Sequence: Synthetic oligonucleotide
gaccuuccaucccuuccug

SEQ ID NO: 1644600 - RNA, 19 nt, Artificial Sequence
  Description of Artificial Sequence: Synthetic oligonucleotide
gacgaagagcacagauggc

SEQ ID NO: 1644601 - RNA, 19 nt, Artificial Sequence
  Description of Artificial Sequence: Synthetic oligonucleotide
cuagagucccaaggagacc

SEQ ID NO: 1644602 - RNA, 19 nt, Artificial Sequence
  Description of Artificial Sequence: Synthetic oligonucleotide
cagguucacuagaacauaa

SEQ ID NO: 1644603 - RNA, 19 nt, Artificial Sequence
  Description of Artificial Sequence: Synthetic oligonucleotide
gagccucuaugccacccac

SEQ ID NO: 1644604 - RNA, 19 nt, Artificial Sequence
  Description of Artificial Sequence: Synthetic oligonucleotide
ggaauagcgcccugcuccc

SEQ ID NO: 1644605 - RNA, 19 nt, Artificial Sequence
  Description of Artificial Sequence: Synthetic oligonucleotide
ccccaaggcauccuggccg

SEQ ID NO: 1644606 - RNA, 19 nt, Artificial Sequence
  Description of Artificial Sequence: Synthetic oligonucleotide
ucguccuggcgauauccaa

SEQ ID NO: 1644607 - RNA, 19 nt, Artificial Sequence
  Description of Artificial Sequence: Synthetic oligonucleotide
acaagucgcugacucggau

SEQ ID NO: 1644608 - RNA, 19 nt, Artificial Sequence
  Description of Artificial Sequence: Synthetic oligonucleotide
ucugucaggugaaguccua

SEQ ID NO: 1644609 - RNA, 19 nt, Artificial Sequence
  Description of Artificial Sequence: Synthetic oligonucleotide
aacaagucgcugacucgga

SEQ ID NO: 1644610 - RNA, 19 nt, Artificial Sequence
  Description of Artificial Sequence: Synthetic oligonucleotide
cugaacuagucguggaaua

SEQ ID NO: 1644611 - RNA, 19 nt, Artificial Sequence
  Description of Artificial Sequence: Synthetic oligonucleotide
cugaaagguuucuaagagu

SEQ ID NO: 1644612 - RNA, 19 nt, Artificial Sequence
  Description of Artificial Sequence: Synthetic oligonucleotide
gaaacuaaucggaccauuu

SEQ ID NO: 1644613 - RNA, 19 nt, Artificial Sequence
  Description of Artificial Sequence: Synthetic oligonucleotide
caacugaacuagucgugga

SEQ ID NO: 1644614 - RNA, 19 nt, Artificial Sequence
  Description of Artificial Sequence: Synthetic oligonucleotide
aucugucaggugaaguccu

SEQ ID NO: 1644615 - RNA, 19 nt, Artificial Sequence
  Description of Artificial Sequence: Synthetic oligonucleotide
agcgcccugcucccgcaac

SEQ ID NO: 1644616 - RNA, 19 nt, Artificial Sequence
  Description of Artificial Sequence: Synthetic oligonucleotide
ggucagcucuacugaaagc

SEQ ID NO: 1644617 - RNA, 19 nt, Artificial Sequence
  Description of Artificial Sequence: Synthetic oligonucleotide
cugaaagccguuucuugua

SEQ ID NO: 1644618 - RNA, 19 nt, Artificial Sequence
  Description of Artificial Sequence: Synthetic oligonucleotide
gacucggaucugucaggug

SEQ ID NO: 1644619 - RNA, 19 nt, Artificial Sequence
  Description of Artificial Sequence: Synthetic oligonucleotide
agguuucuaagaguccaaa

SEQ ID NO: 1644620 - RNA, 19 nt, Artificial Sequence
  Description of Artificial Sequence: Synthetic oligonucleotide
caacugguaaacuguccaa

SEQ ID NO: 1644621 - RNA, 19 nt, Artificial Sequence
  Description of Artificial Sequence: Synthetic oligonucleotide
agguacgccgcuggguguc

SEQ ID NO: 1644622 - RNA, 19 nt, Artificial Sequence
  Description of Artificial Sequence: Synthetic oligonucleotide
auccggaauaagacagcag

SEQ ID NO: 1644623 - RNA, 19 nt, Artificial Sequence
  Description of Artificial Sequence: Synthetic oligonucleotide
gcuacacaauguuacacgu

SEQ ID NO: 1644624 - RNA, 19 nt, Artificial Sequence
  Description of Artificial Sequence: Synthetic oligonucleotide
gaauagcgcccugcucccg

SEQ ID NO: 1644625 - RNA, 19 nt, Artificial Sequence
  Description of Artificial Sequence: Synthetic oligonucleotide
ucggaucugucaggugaag

SEQ ID NO: 1644626 - RNA, 19 nt, Artificial Sequence
  Description of Artificial Sequence: Synthetic oligonucleotide
ugucggcuggucagaugac

SEQ ID NO: 1644627 - RNA, 19 nt, Artificial Sequence
  Description of Artificial Sequence: Synthetic oligonucleotide
ggcuggucagaugacgaag

SEQ ID NO: 1644628 - RNA, 19 nt, Artificial Sequence
  Description of Artificial Sequence: Synthetic oligonucleotide
gcaagguuucgaaucaauc

SEQ ID NO: 1644629 - RNA, 19 nt, Artificial Sequence
  Description of Artificial Sequence: Synthetic oligonucleotide
accgcacauauccccaaua

SEQ ID NO: 1644630 - RNA, 19 nt, Artificial Sequence
  Description of Artificial Sequence: Synthetic oligonucleotide
acccuaccgcacauauccc

SEQ ID NO: 1644631 - RNA, 19 nt, Artificial Sequence
  Description of Artificial Sequence: Synthetic oligonucleotide
ggauaugccagggccccgg

SEQ ID NO: 1644632 - RNA, 19 nt, Artificial Sequence
  Description of Artificial Sequence: Synthetic oligonucleotide
ccuagugccugcaucccac

SEQ ID NO: 1644633 - RNA, 19 nt, Artificial Sequence
  Description of Artificial Sequence: Synthetic oligonucleotide
uggagguacgccgcugggu

SEQ ID NO: 1644634 - RNA, 19 nt, Artificial Sequence
  Description of Artificial Sequence: Synthetic oligonucleotide
ccugcucccgcaacggugc

SEQ ID NO: 1644635 - RNA, 19 nt, Artificial Sequence
  Description of Artificial Sequence: Synthetic oligonucleotide
ccaucauaggguccauccc

SEQ ID NO: 1644636 - RNA, 19 nt, Artificial Sequence
  Description of Artificial Sequence: Synthetic oligonucleotide
agccuuccacuaucuccuc

SEQ ID NO: 1644637 - RNA, 19 nt, Artificial Sequence
  Description of Artificial Sequence: Synthetic oligonucleotide
cuacaccauuacucaguuc

SEQ ID NO: 1644638 - RNA, 19 nt, Artificial Sequence
  Description of Artificial Sequence: Synthetic oligonucleotide
cuguuuaguugcagcaucu

SEQ ID NO: 1644639 - RNA, 19 nt, Artificial Sequence
  Description of Artificial Sequence: Synthetic oligonucleotide
gguuucgaaucaauccaac

SEQ ID NO: 1644640 - RNA, 19 nt, Artificial Sequence
  Description of Artificial Sequence: Synthetic oligonucleotide
uaccgcacauauccccaau

SEQ ID NO: 1644641 - RNA, 19 nt, Artificial Sequence
  Description of Artificial Sequence: Synthetic oligonucleotide
cuaaucggaccauuucuau

SEQ ID NO: 1644642 - RNA, 19 nt, Artificial Sequence
  Description of Artificial Sequence: Synthetic oligonucleotide
caccauuacucaguucuca

SEQ ID NO: 1644643 - RNA, 19 nt, Artificial Sequence
  Description of Artificial Sequence: Synthetic oligonucleotide
guggaauagcgcccugcuc

SEQ ID NO: 1644644 - RNA, 19 nt, Artificial Sequence
  Description of Artificial Sequence: Synthetic oligonucleotide
cccuaccgcacauaucccc

SEQ ID NO: 1644645 - RNA, 19 nt, Artificial Sequence
  Description of Artificial Sequence: Synthetic oligonucleotide
ugaaggcgaacggcauucu

SEQ ID NO: 1644646 - RNA, 19 nt, Artificial Sequence
  Description of Artificial Sequence: Synthetic oligonucleotide
ggauaaaaggcaacuggua

SEQ ID NO: 1644647 - RNA, 19 nt, Artificial Sequence
  Description of Artificial Sequence: Synthetic oligonucleotide
gcucgaacaagcaacugaa

SEQ ID NO: 1644648 - RNA, 19 nt, Artificial Sequence
  Description of Artificial Sequence: Synthetic oligonucleotide
gggauaaaaggcaacuggu

SEQ ID NO: 1644649 - RNA, 19 nt, Artificial Sequence
  Description of Artificial Sequence: Synthetic oligonucleotide
cuaagaguccaaagacagu

SEQ ID NO: 1644650 - RNA, 19 nt, Artificial Sequence
  Description of Artificial Sequence: Synthetic oligonucleotide
gcgagcgaggauaugccag

SEQ ID NO: 1644651 - RNA, 19 nt, Artificial Sequence
  Description of Artificial Sequence: Synthetic oligonucleotide
caguaauguccucccuguc

SEQ ID NO: 1644652 - RNA, 19 nt, Artificial Sequence
  Description of Artificial Sequence: Synthetic oligonucleotide
ggcaacugguaaacugucc

SEQ ID NO: 1644653 - RNA, 19 nt, Artificial Sequence
  Description of Artificial Sequence: Synthetic oligonucleotide
gaaagccguuucuuguaau

SEQ ID NO: 1644654 - RNA, 19 nt, Artificial Sequence
  Description of Artificial Sequence: Synthetic oligonucleotide
gauuuacccuaccgcacau

SEQ ID NO: 1644655 - RNA, 19 nt, Artificial Sequence
  Description of Artificial Sequence: Synthetic oligonucleotide
cucagacauccggaauaag

SEQ ID NO: 1644656 - RNA, 19 nt, Artificial Sequence
  Description of Artificial Sequence: Synthetic oligonucleotide
ucgcugacucggaucuguc

SEQ ID NO: 1644657 - RNA, 19 nt, Artificial Sequence
  Description of Artificial Sequence: Synthetic oligonucleotide
gcggacgcccuccacaaac

SEQ ID NO: 1644658 - RNA, 19 nt, Artificial Sequence
  Description of Artificial Sequence: Synthetic oligonucleotide
ugaugucggcuggucagau

SEQ ID NO: 1644659 - RNA, 19 nt, Artificial Sequence
  Description of Artificial Sequence: Synthetic oligonucleotide
cgagcgaggauaugccagg

SEQ ID NO: 1644660 - RNA, 19 nt, Artificial Sequence
  Description of Artificial Sequence: Synthetic oligonucleotide
ggauaaucagcaccagggu

SEQ ID NO: 1644661 - RNA, 19 nt, Artificial Sequence
  Description of Artificial Sequence: Synthetic oligonucleotide
cgaggauaugccagggccc

SEQ ID NO: 1644662 - RNA, 19 nt, Artificial Sequence
  Description of Artificial Sequence: Synthetic oligonucleotide
uggccguauccaccagagu

SEQ ID NO: 1644663 - RNA, 19 nt, Artificial Sequence
  Description of Artificial Sequence: Synthetic oligonucleotide
auagcgcccugcucccgca

SEQ ID NO: 1644664 - RNA, 19 nt, Artificial Sequence
  Description of Artificial Sequence: Synthetic oligonucleotide
cacgaaggacagugcgcac

SEQ ID NO: 1644665 - RNA, 19 nt, Artificial Sequence
  Description of Artificial Sequence: Synthetic oligonucleotide
gcugcacuagagucccaag

SEQ ID NO: 1644666 - RNA, 19 nt, Artificial Sequence
  Description of Artificial Sequence: Synthetic oligonucleotide
gcacgaaggacagugcgca

SEQ ID NO: 1644667 - RNA, 19 nt, Artificial Sequence
  Description of Artificial Sequence: Synthetic oligonucleotide
cgaacaagcaacugaacua

SEQ ID NO: 1644668 - RNA, 19 nt, Artificial Sequence
  Description of Artificial Sequence: Synthetic oligonucleotide
gagucccaaggagaccuuc

SEQ ID NO: 1644669 - RNA, 19 nt, Artificial Sequence
  Description of Artificial Sequence: Synthetic oligonucleotide
uggcgauauccaagggcuu

SEQ ID NO: 1644670 - RNA, 19 nt, Artificial Sequence
  Description of Artificial Sequence: Synthetic oligonucleotide
ggcgauauccaagggcuuc

SEQ ID NO: 1644671 - RNA, 19 nt, Artificial Sequence
  Description of Artificial Sequence: Synthetic oligonucleotide
cguccuggcgauauccaag

SEQ ID NO: 1644672 - RNA, 19 nt, Artificial Sequence
  Description of Artificial Sequence: Synthetic oligonucleotide
gcuggucagaugacgaaga

SEQ ID NO: 1644673 - RNA, 19 nt, Artificial Sequence
  Description of Artificial Sequence: Synthetic oligonucleotide
aucguccuggcgauaucca

SEQ ID NO: 1644674 - RNA, 19 nt, Artificial Sequence
  Description of Artificial Sequence: Synthetic oligonucleotide
agcccaucaacuggauaau

SEQ ID NO: 1644675 - RNA, 19 nt, Artificial Sequence
  Description of Artificial Sequence: Synthetic oligonucleotide
ccauuacucaguucucaga

SEQ ID NO: 1644676 - RNA, 19 nt, Artificial Sequence
  Description of Artificial Sequence: Synthetic oligonucleotide
ggacgcccuccacaaacug

SEQ ID NO: 1644677 - RNA, 19 nt, Artificial Sequence
  Description of Artificial Sequence: Synthetic oligonucleotide
auuuacccuaccgcacaua

SEQ ID NO: 1644678 - RNA, 19 nt, Artificial Sequence
  Description of Artificial Sequence: Synthetic oligonucleotide
aggugaaguccuagugccu

SEQ ID NO: 1644679 - RNA, 19 nt, Artificial Sequence
  Description of Artificial Sequence: Synthetic oligonucleotide
auaugccagggccccggua

SEQ ID NO: 1644680 - RNA, 19 nt, Artificial Sequence
  Description of Artificial Sequence: Synthetic oligonucleotide
auaacaccucuuacugauu

SEQ ID NO: 1644681 - RNA, 19 nt, Artificial Sequence
  Description of Artificial Sequence: Synthetic oligonucleotide
gccguauccaccagaguga

SEQ ID NO: 1644682 - RNA, 19 nt, Artificial Sequence
  Description of Artificial Sequence: Synthetic oligonucleotide
auagauccaccugcuuauu

SEQ ID NO: 1644683 - RNA, 19 nt, Artificial Sequence
  Description of Artificial Sequence: Synthetic oligonucleotide
ccuaccgcacauaucccca

SEQ ID NO: 1644684 - RNA, 19 nt, Artificial Sequence
  Description of Artificial Sequence: Synthetic oligonucleotide
cagcucuacugaaagccgu

SEQ ID NO: 1644685 - RNA, 19 nt, Artificial Sequence
  Description of Artificial Sequence: Synthetic oligonucleotide
agauuacgauuagcgugau

SEQ ID NO: 1644686 - RNA, 19 nt, Artificial Sequence
  Description of Artificial Sequence: Synthetic oligonucleotide
acaucgcgagcgaggauau

SEQ ID NO: 1644687 - RNA, 19 nt, Artificial Sequence
  Description of Artificial Sequence: Synthetic oligonucleotide
auccaccugcuuauuuuaa

SEQ ID NO: 1644688 - RNA, 19 nt, Artificial Sequence
  Description of Artificial Sequence: Synthetic oligonucleotide
agcucuacugaaagccguu

SEQ ID NO: 1644689 - RNA, 19 nt, Artificial Sequence
  Description of Artificial Sequence: Synthetic oligonucleotide
ccucuuacugauuuacccu

SEQ ID NO: 1644690 - RNA, 19 nt, Artificial Sequence
  Description of Artificial Sequence: Synthetic oligonucleotide
cuaccgcacauauccccaa

SEQ ID NO: 1644691 - RNA, 19 nt, Artificial Sequence
  Description of Artificial Sequence: Synthetic oligonucleotide
gcucccgcaacggugcaug

SEQ ID NO: 1644692 - RNA, 19 nt, Artificial Sequence
  Description of Artificial Sequence: Synthetic oligonucleotide
gucguggaauagcgcccug

SEQ ID NO: 1644693 - RNA, 19 nt, Artificial Sequence
  Description of Artificial Sequence: Synthetic oligonucleotide
ccggaauaagacagcagaa

SEQ ID NO: 1644694 - RNA, 19 nt, Artificial Sequence
  Description of Artificial Sequence: Synthetic oligonucleotide
ggcgaacggcauucugggc

SEQ ID NO: 1644695 - RNA, 19 nt, Artificial Sequence
  Description of Artificial Sequence: Synthetic oligonucleotide
cugaugucggcuggucaga

SEQ ID NO: 1644696 - RNA, 19 nt, Artificial Sequence
  Description of Artificial Sequence: Synthetic oligonucleotide
ugcggacgcccuccacaaa

SEQ ID NO: 1644697 - RNA, 19 nt, Artificial Sequence
  Description of Artificial Sequence: Synthetic oligonucleotide
gaaguccuagugccugcau

SEQ ID NO: 1644698 - RNA, 19 nt, Artificial Sequence
  Description of Artificial Sequence: Synthetic oligonucleotide
ggagaccuuccaucccuuc

SEQ ID NO: 1644699 - RNA, 19 nt, Artificial Sequence
  Description of Artificial Sequence: Synthetic oligonucleotide
ucccgcaacggugcaugau

SEQ ID NO: 1644700 - RNA, 19 nt, Artificial Sequence
  Description of Artificial Sequence: Synthetic oligonucleotide
agccucuaugccacccacu

SEQ ID NO: 1644701 - RNA, 19 nt, Artificial Sequence
  Description of Artificial Sequence: Synthetic oligonucleotide
gauuacgauuagcgugauu

SEQ ID NO: 1644702 - RNA, 19 nt, Artificial Sequence
  Description of Artificial Sequence: Synthetic oligonucleotide
gucgcugacucggaucugu

SEQ ID NO: 1644703 - RNA, 19 nt, Artificial Sequence
  Description of Artificial Sequence: Synthetic oligonucleotide
cuuggcacaccaucaucuu

SEQ ID NO: 1644704 - RNA, 19 nt, Artificial Sequence
  Description of Artificial Sequence: Synthetic oligonucleotide
ccucuaugccacccacuug

SEQ ID NO: 1644705 - RNA, 19 nt, Artificial Sequence
  Description of Artificial Sequence: Synthetic oligonucleotide
agucgcugacucggaucug

SEQ ID NO: 1644706 - RNA, 19 nt, Artificial Sequence
  Description of Artificial Sequence: Synthetic oligonucleotide
ccccgguacagccuuccac

SEQ ID NO: 1644707 - RNA, 19 nt, Artificial Sequence
  Description of Artificial Sequence: Synthetic oligonucleotide
ccgcacauauccccaauaa

SEQ ID NO: 1644708 - RNA, 19 nt, Artificial Sequence
  Description of Artificial Sequence: Synthetic oligonucleotide
cccgguacagccuuccacu

SEQ ID NO: 1644709 - RNA, 19 nt, Artificial Sequence
  Description of Artificial Sequence: Synthetic oligonucleotide
gccucuaugccacccacuu

SEQ ID NO: 1644710 - RNA, 19 nt, Artificial Sequence
  Description of Artificial Sequence: Synthetic oligonucleotide
cugggaucguccuggcgau

SEQ ID NO: 1644711 - RNA, 19 nt, Artificial Sequence
  Description of Artificial Sequence: Synthetic oligonucleotide
gaacaucgcgagcgaggau

SEQ ID NO: 1644712 - RNA, 19 nt, Artificial Sequence
  Description of Artificial Sequence: Synthetic oligonucleotide
ggaucguccuggcgauauc

SEQ ID NO: 1644713 - RNA, 19 nt, Artificial Sequence
  Description of Artificial Sequence: Synthetic oligonucleotide
cgucuccagauuacgauua

SEQ ID NO: 1644714 - RNA, 19 nt, Artificial Sequence
  Description of Artificial Sequence: Synthetic oligonucleotide
cgauuagcgugauuaugaa

SEQ ID NO: 1644715 - RNA, 19 nt, Artificial Sequence
  Description of Artificial Sequence: Synthetic oligonucleotide
aggagaccuuccaucccuu

SEQ ID NO: 1644716 - RNA, 19 nt, Artificial Sequence
  Description of Artificial Sequence: Synthetic oligonucleotide
caucgcgagcgaggauaug

SEQ ID NO: 1644717 - RNA, 19 nt, Artificial Sequence
  Description of Artificial Sequence: Synthetic oligonucleotide
cgcaacggugcaugauuug

SEQ ID NO: 1644718 - RNA, 19 nt, Artificial Sequence
  Description of Artificial Sequence: Synthetic oligonucleotide
cgaacggcauucugggcca

SEQ ID NO: 1644719 - RNA, 19 nt, Artificial Sequence
  Description of Artificial Sequence: Synthetic oligonucleotide
cucccgcaacggugcauga

SEQ ID NO: 1644720 - RNA, 19 nt, Artificial Sequence
  Description of Artificial Sequence: Synthetic oligonucleotide
cgcacauauccccaauaaa

SEQ ID NO: 1644721 - RNA, 19 nt, Artificial Sequence
  Description of Artificial Sequence: Synthetic oligonucleotide
ccucagacauccggaauaa

SEQ ID NO: 1644722 - RNA, 19 nt, Artificial Sequence
  Description of Artificial Sequence: Synthetic oligonucleotide
ggcaagguuucgaaucaau

SEQ ID NO: 1644723 - RNA, 19 nt, Artificial Sequence
  Description of Artificial Sequence: Synthetic oligonucleotide
ugggaucguccuggcgaua

SEQ ID NO: 1644724 - RNA, 19 nt, Artificial Sequence
  Description of Artificial Sequence: Synthetic oligonucleotide
gguacgccgcugggugucc

SEQ ID NO: 1644725 - RNA, 19 nt, Artificial Sequence
  Description of Artificial Sequence: Synthetic oligonucleotide
ccuggccguauccaccaga

SEQ ID NO: 1644726 - RNA, 19 nt, Artificial Sequence
  Description of Artificial Sequence: Synthetic oligonucleotide
ggccccgguacagccuucc

SEQ ID NO: 1644727 - RNA, 19 nt, Artificial Sequence
  Description of Artificial Sequence: Synthetic oligonucleotide
ccauggagguacgccgcug

SEQ ID NO: 1644728 - RNA, 19 nt, Artificial Sequence
  Description of Artificial Sequence: Synthetic oligonucleotide
gcgauauccaagggcuucu

SEQ ID NO: 1644729 - RNA, 19 nt, Artificial Sequence
  Description of Artificial Sequence: Synthetic oligonucleotide
gggaucguccuggcgauau

SEQ ID NO: 1644730 - RNA, 19 nt, Artificial Sequence
  Description of Artificial Sequence: Synthetic oligonucleotide
cgcugacucggaucuguca

SEQ ID NO: 1644731 - RNA, 19 nt, Artificial Sequence
  Description of Artificial Sequence: Synthetic oligonucleotide
gaacgguagcugggaucgu

SEQ ID NO: 1644732 - RNA, 19 nt, Artificial Sequence
  Description of Artificial Sequence: Synthetic oligonucleotide
cgcgagcgaggauaugcca

SEQ ID NO: 1644733 - RNA, 19 nt, Artificial Sequence
  Description of Artificial Sequence: Synthetic oligonucleotide
cguggaauagcgcccugcu

SEQ ID NO: 1644734 - RNA, 19 nt, Artificial Sequence
  Description of Artificial Sequence: Synthetic oligonucleotide
ccguauccaccagagugaa

SEQ ID NO: 1644735 - RNA, 19 nt, Artificial Sequence
  Description of Artificial Sequence: Synthetic oligonucleotide
ccgguacagccuuccacua

SEQ ID NO: 1644736 - RNA, 19 nt, Artificial Sequence
  Description of Artificial Sequence: Synthetic oligonucleotide
cccgcaacggugcaugauu

SEQ ID NO: 1644737 - RNA, 19 nt, Artificial Sequence
  Description of Artificial Sequence: Synthetic oligonucleotide
ggaaucgcuguagcagguu

SEQ ID NO: 1644738 - RNA, 19 nt, Artificial Sequence
  Description of Artificial Sequence: Synthetic oligonucleotide
gcucuacugaaagccguuu

SEQ ID NO: 1644739 - RNA, 19 nt, Artificial Sequence
  Description of Artificial Sequence: Synthetic oligonucleotide
gccccgguacagccuucca

SEQ ID NO: 1644740 - RNA, 19 nt, Artificial Sequence
  Description of Artificial Sequence: Synthetic oligonucleotide
ccauuucuaucugucuauu

SEQ ID NO: 1644741 - RNA, 19 nt, Artificial Sequence
  Description of Artificial Sequence: Synthetic oligonucleotide
ccgcaacggugcaugauuu

SEQ ID NO: 1644742 - RNA, 19 nt, Artificial Sequence
  Description of Artificial Sequence: Synthetic oligonucleotide
guacgccgcuggguguccu

SEQ ID NO: 1644743 - RNA, 19 nt, Artificial Sequence
  Description of Artificial Sequence: Synthetic oligonucleotide
ccacaacagguaguccaua

SEQ ID NO: 1644744 - RNA, 19 nt, Artificial Sequence
  Description of Artificial Sequence: Synthetic oligonucleotide
cccauggagguacgccgcu

SEQ ID NO: 1644745 - RNA, 19 nt, Artificial Sequence
  Description of Artificial Sequence: Synthetic oligonucleotide
ggccagugggauggugggu

SEQ ID NO: 1644746 - RNA, 19 nt, Artificial Sequence
  Description of Artificial Sequence: Synthetic oligonucleotide
cggacgcccuccacaaacu

SEQ ID NO: 1644747 - RNA, 19 nt, Artificial Sequence
  Description of Artificial Sequence: Synthetic oligonucleotide
ccaaggcauccuggccgua

SEQ ID NO: 1644748 - RNA, 19 nt, Artificial Sequence
  Description of Artificial Sequence: Synthetic oligonucleotide
aaugugcucaaacagacac

SEQ ID NO: 1644749 - RNA, 19 nt, Artificial Sequence
  Description of Artificial Sequence: Synthetic oligonucleotide
aagaaguuuggcuuugucc

SEQ ID NO: 1644750 - RNA, 19 nt, Artificial Sequence
  Description of Artificial Sequence: Synthetic oligonucleotide
uucuaaugcauuuacacgg

SEQ ID NO: 1644751 - RNA, 19 nt, Artificial Sequence
  Description of Artificial Sequence: Synthetic oligonucleotide
uccuauuacaccaagaaug

SEQ ID NO: 1644752 - RNA, 19 nt, Artificial Sequence
  Description of Artificial Sequence: Synthetic oligonucleotide
ucucagauaaacuggaggg

SEQ ID NO: 1644753 - RNA, 19 nt, Artificial Sequence
  Description of Artificial Sequence: Synthetic oligonucleotide
auuacuuauaugucucucc

SEQ ID NO: 1644754 - RNA, 19 nt, Artificial Sequence
  Description of Artificial Sequence: Synthetic oligonucleotide
aaguuuuacaagcuguauc

SEQ ID NO: 1644755 - RNA, 19 nt, Artificial Sequence
  Description of Artificial Sequence: Synthetic oligonucleotide
aauuuucucggcuuugauc

SEQ ID NO: 1644756 - RNA, 19 nt, Artificial Sequence
  Description of Artificial Sequence: Synthetic oligonucleotide
uuucuaaugcauuuacacg

SEQ ID NO: 1644757 - RNA, 19 nt, Artificial Sequence
  Description of Artificial Sequence: Synthetic oligonucleotide
uuugcagugaugauguaag

SEQ ID NO: 1644758 - RNA, 19 nt, Artificial Sequence
  Description of Artificial Sequence: Synthetic oligonucleotide
caucaauucagacaggucc

SEQ ID NO: 1644759 - RNA, 19 nt, Artificial Sequence
  Description of Artificial Sequence: Synthetic oligonucleotide
uuugaaauccucgagcagg

SEQ ID NO: 1644760 - RNA, 19 nt, Artificial Sequence
  Description of Artificial Sequence: Synthetic oligonucleotide
uuuauuagcaagaucugcu

SEQ ID NO: 1644761 - RNA, 19 nt, Artificial Sequence
  Description of Artificial Sequence: Synthetic oligonucleotide
ugauguaagaucauucagc

SEQ ID NO: 1644762 - RNA, 19 nt, Artificial Sequence
  Description of Artificial Sequence: Synthetic oligonucleotide
uucucagauaaacuggagg

SEQ ID NO: 1644763 - RNA, 19 nt, Artificial Sequence
  Description of Artificial Sequence: Synthetic oligonucleotide
ucgaauggcacucaagucc

SEQ ID NO: 1644764 - RNA, 19 nt, Artificial Sequence
  Description of Artificial Sequence: Synthetic oligonucleotide
aaaggauuccuuuauugcu

SEQ ID NO: 1644765 - RNA, 19 nt, Artificial Sequence
  Description of Artificial Sequence: Synthetic oligonucleotide
ugcucaaacagacacagga

SEQ ID NO: 1644766 - RNA, 19 nt, Artificial Sequence
  Description of Artificial Sequence: Synthetic oligonucleotide
uuaaaguugcuucaucagc

SEQ ID NO: 1644767 - RNA, 19 nt, Artificial Sequence
  Description of Artificial Sequence: Synthetic oligonucleotide
aguuuuacaagcuguauca

SEQ ID NO: 1644768 - RNA, 19 nt, Artificial Sequence
  Description of Artificial Sequence: Synthetic oligonucleotide
uuuucaauucacuuuccag

SEQ ID NO: 1644769 - RNA, 19 nt, Artificial Sequence
  Description of Artificial Sequence: Synthetic oligonucleotide
uuuggagaaaguuuuacaa

SEQ ID NO: 1644770 - RNA, 19 nt, Artificial Sequence
  Description of Artificial Sequence: Synthetic oligonucleotide
uuagacuuugccuuggcca

SEQ ID NO: 1644771 - RNA, 19 nt, Artificial Sequence
  Description of Artificial Sequence: Synthetic oligonucleotide
uuuccuauuacaccaagaa

SEQ ID NO: 1644772 - RNA, 19 nt, Artificial Sequence
  Description of Artificial Sequence: Synthetic oligonucleotide
cuaucuguuguauugcugc

SEQ ID NO: 1644773 - RNA, 19 nt, Artificial Sequence
  Description of Artificial Sequence: Synthetic oligonucleotide
uauuacaccaagaauggau

SEQ ID NO: 1644774 - RNA, 19 nt, Artificial Sequence
  Description of Artificial Sequence: Synthetic oligonucleotide
accaagaauggauuccugc

SEQ ID NO: 1644775 - RNA, 19 nt, Artificial Sequence
  Description of Artificial Sequence: Synthetic oligonucleotide
aucgaugugggucauaaug

SEQ ID NO: 1644776 - RNA, 19 nt, Artificial Sequence
  Description of Artificial Sequence: Synthetic oligonucleotide
aguaucuggcaucaguuuc

SEQ ID NO: 1644777 - RNA, 19 nt, Artificial Sequence
  Description of Artificial Sequence: Synthetic oligonucleotide
uuaagcuguagccuggucu

SEQ ID NO: 1644778 - RNA, 19 nt, Artificial Sequence
  Description of Artificial Sequence: Synthetic oligonucleotide
uuuucuacgcuuugcagug

SEQ ID NO: 1644779 - RNA, 19 nt, Artificial Sequence
  Description of Artificial Sequence: Synthetic oligonucleotide
uuaacugugugauaauggu

SEQ ID NO: 1644780 - RNA, 19 nt, Artificial Sequence
  Description of Artificial Sequence: Synthetic oligonucleotide
uguauuucaggaccagaag

SEQ ID NO: 1644781 - RNA, 19 nt, Artificial Sequence
  Description of Artificial Sequence: Synthetic oligonucleotide
aauggauuccugcuccguc

SEQ ID NO: 1644782 - RNA, 19 nt, Artificial Sequence
  Description of Artificial Sequence: Synthetic oligonucleotide
uucaaugugcucaaacaga

SEQ ID NO: 1644783 - RNA, 19 nt, Artificial Sequence
  Description of Artificial Sequence: Synthetic oligonucleotide
ugggucauaauguauuuca

SEQ ID NO: 1644784 - RNA, 19 nt, Artificial Sequence
  Description of Artificial Sequence: Synthetic oligonucleotide
uuucagggaauucuugacc

SEQ ID NO: 1644785 - RNA, 19 nt, Artificial Sequence
  Description of Artificial Sequence: Synthetic oligonucleotide
acaagcuguaucaauuucc

SEQ ID NO: 1644786 - RNA, 19 nt, Artificial Sequence
  Description of Artificial Sequence: Synthetic oligonucleotide
guucaaugugcucaaacag

SEQ ID NO: 1644787 - RNA, 19 nt, Artificial Sequence
  Description of Artificial Sequence: Synthetic oligonucleotide
uaguauuuagcucugcaau

SEQ ID NO: 1644788 - RNA, 19 nt, Artificial Sequence
  Description of Artificial Sequence: Synthetic oligonucleotide
uauaugucucuccuuuucc

SEQ ID NO: 1644789 - RNA, 19 nt, Artificial Sequence
  Description of Artificial Sequence: Synthetic oligonucleotide
uuacuuauaugucucuccu

SEQ ID NO: 1644790 - RNA, 19 nt, Artificial Sequence
  Description of Artificial Sequence: Synthetic oligonucleotide
uccaggugaauuuucucgg

SEQ ID NO: 1644791 - RNA, 19 nt, Artificial Sequence
  Description of Artificial Sequence: Synthetic oligonucleotide
agcaagaucugcucgaaug

SEQ ID NO: 1644792 - RNA, 19 nt, Artificial Sequence
  Description of Artificial Sequence: Synthetic oligonucleotide
ugaugauguaagaucauuc

SEQ ID NO: 1644793 - RNA, 19 nt, Artificial Sequence
  Description of Artificial Sequence: Synthetic oligonucleotide
aggcacagacuccagaugg

SEQ ID NO: 1644794 - RNA, 19 nt, Artificial Sequence
  Description of Artificial Sequence: Synthetic oligonucleotide
uugcaucucaagaaguuug

SEQ ID NO: 1644795 - RNA, 19 nt, Artificial Sequence
  Description of Artificial Sequence: Synthetic oligonucleotide
auuuacacgguccuguaga

SEQ ID NO: 1644796 - RNA, 19 nt, Artificial Sequence
  Description of Artificial Sequence: Synthetic oligonucleotide
cugaaugucacugaguuuc

SEQ ID NO: 1644797 - RNA, 19 nt, Artificial Sequence
  Description of Artificial Sequence: Synthetic oligonucleotide
uuucagcuaaccaucgaug

SEQ ID NO: 1644798 - RNA, 19 nt, Artificial Sequence
  Description of Artificial Sequence: Synthetic oligonucleotide
uuugagucucuucuagcag

SEQ ID NO: 1644799 - RNA, 19 nt, Artificial Sequence
  Description of Artificial Sequence: Synthetic oligonucleotide
uucgucuuuucuuugaguc

SEQ ID NO: 1644800 - RNA, 19 nt, Artificial Sequence
  Description of Artificial Sequence: Synthetic oligonucleotide
aagaucauucagcucccuc

SEQ ID NO: 1644801 - RNA, 19 nt, Artificial Sequence
  Description of Artificial Sequence: Synthetic oligonucleotide
uauugcugcguaaaagcug

SEQ ID NO: 1644802 - RNA, 19 nt, Artificial Sequence
  Description of Artificial Sequence: Synthetic oligonucleotide
ucucugaagucuuugaaau

SEQ ID NO: 1644803 - RNA, 19 nt, Artificial Sequence
  Description of Artificial Sequence: Synthetic oligonucleotide
uggauauucuguucguugc

SEQ ID NO: 1644804 - RNA, 19 nt, Artificial Sequence
  Description of Artificial Sequence: Synthetic oligonucleotide
aauuuccuuuccuauuaca

SEQ ID NO: 1644805 - RNA, 19 nt, Artificial Sequence
  Description of Artificial Sequence: Synthetic oligonucleotide
aguuucucagauaaacugg

SEQ ID NO: 1644806 - RNA, 19 nt, Artificial Sequence
  Description of Artificial Sequence: Synthetic oligonucleotide
auugcugcguaaaagcugg

SEQ ID NO: 1644807 - RNA, 19 nt, Artificial Sequence
  Description of Artificial Sequence: Synthetic oligonucleotide
uauuucaggaccagaagua

SEQ ID NO: 1644808 - RNA, 19 nt, Artificial Sequence
  Description of Artificial Sequence: Synthetic oligonucleotide
gagaaaguuuuacaagcug

SEQ ID NO: 1644809 - RNA, 19 nt, Artificial Sequence
  Description of Artificial Sequence: Synthetic oligonucleotide
uauucuuacaaaggauucc

SEQ ID NO: 1644810 - RNA, 19 nt, Artificial Sequence
  Description of Artificial Sequence: Synthetic oligonucleotide
ucgaugugggucauaaugu

SEQ ID NO: 1644811 - RNA, 19 nt, Artificial Sequence
  Description of Artificial Sequence: Synthetic oligonucleotide
ugguccuuaagcuguagcc

SEQ ID NO: 1644812 - RNA, 19 nt, Artificial Sequence
  Description of Artificial Sequence: Synthetic oligonucleotide
agaucauucagcucccucu

SEQ ID NO: 1644813 - RNA, 19 nt, Artificial Sequence
  Description of Artificial Sequence: Synthetic oligonucleotide
agcuguaucaauuuccuuu

SEQ ID NO: 1644814 - RNA, 19 nt, Artificial Sequence
  Description of Artificial Sequence: Synthetic oligonucleotide
ucuccguuaacuguugaag

SEQ ID NO: 1644815 - RNA, 19 nt, Artificial Sequence
  Description of Artificial Sequence: Synthetic oligonucleotide
gauguaagaucauucagcu

SEQ ID NO: 1644816 - RNA, 19 nt, Artificial Sequence
  Description of Artificial Sequence: Synthetic oligonucleotide
acuuauaugucucuccuuu

SEQ ID NO: 1644817 - RNA, 19 nt, Artificial Sequence
  Description of Artificial Sequence: Synthetic oligonucleotide
ugugugauaaugguagcca

SEQ ID NO: 1644818 - RNA, 19 nt, Artificial Sequence
  Description of Artificial Sequence: Synthetic oligonucleotide
agucucuucuagcagaccu

SEQ ID NO: 1644819 - RNA, 19 nt, Artificial Sequence
  Description of Artificial Sequence: Synthetic oligonucleotide
ucuaucuguuguauugcug

SEQ ID NO: 1644820 - RNA, 19 nt, Artificial Sequence
  Description of Artificial Sequence: Synthetic oligonucleotide
uccaguugcuccuucagac

SEQ ID NO: 1644821 - RNA, 19 nt, Artificial Sequence
  Description of Artificial Sequence: Synthetic oligonucleotide
ucuagcagaccucucuucu

SEQ ID NO: 1644822 - RNA, 19 nt, Artificial Sequence
  Description of Artificial Sequence: Synthetic oligonucleotide
uacacgguccuguagaguc

SEQ ID NO: 1644823 - RNA, 19 nt, Artificial Sequence
  Description of Artificial Sequence: Synthetic oligonucleotide
cuguaucuggaguaucugg

SEQ ID NO: 1644824 - RNA, 19 nt, Artificial Sequence
  Description of Artificial Sequence: Synthetic oligonucleotide
ucggcuuugaucuggcucu

SEQ ID NO: 1644825 - RNA, 19 nt, Artificial Sequence
  Description of Artificial Sequence: Synthetic oligonucleotide
ugcuuucagcuaaccaucg

SEQ ID NO: 1644826 - RNA, 19 nt, Artificial Sequence
  Description of Artificial Sequence: Synthetic oligonucleotide
uuuacacgguccuguagag

SEQ ID NO: 1644827 - RNA, 19 nt, Artificial Sequence
  Description of Artificial Sequence: Synthetic oligonucleotide
ucuugcuuucagcuaacca

SEQ ID NO: 1644828 - RNA, 19 nt, Artificial Sequence
  Description of Artificial Sequence: Synthetic oligonucleotide
agucuuugaaauccucgag

SEQ ID NO: 1644829 - RNA, 19 nt, Artificial Sequence
  Description of Artificial Sequence: Synthetic oligonucleotide
ucguuucuaaugcauuuac

SEQ ID NO: 1644830 - RNA, 19 nt, Artificial Sequence
  Description of Artificial Sequence: Synthetic oligonucleotide
ccuauuacaccaagaaugg

SEQ ID NO: 1644831 - RNA, 19 nt, Artificial Sequence
  Description of Artificial Sequence: Synthetic oligonucleotide
cagcuaaccaucgaugugg

SEQ ID NO: 1644832 - RNA, 19 nt, Artificial Sequence
  Description of Artificial Sequence: Synthetic oligonucleotide
auucuugaccuccuguuca

SEQ ID NO: 1644833 - RNA, 19 nt, Artificial Sequence
  Description of Artificial Sequence: Synthetic oligonucleotide
ucguuccuagcuuuaacug

SEQ ID NO: 1644834 - RNA, 19 nt, Artificial Sequence
  Description of Artificial Sequence: Synthetic oligonucleotide
uucaucagcuccuggauau

SEQ ID NO: 1644835 - RNA, 19 nt, Artificial Sequence
  Description of Artificial Sequence: Synthetic oligonucleotide
aaguuuggcuuuguccugg

SEQ ID NO: 1644836 - RNA, 19 nt, Artificial Sequence
  Description of Artificial Sequence: Synthetic oligonucleotide
uccguuaacuguugaagcu

SEQ ID NO: 1644837 - RNA, 19 nt, Artificial Sequence
  Description of Artificial Sequence: Synthetic oligonucleotide
ucacugaguuucuucuccg

SEQ ID NO: 1644838 - RNA, 19 nt, Artificial Sequence
  Description of Artificial Sequence: Synthetic oligonucleotide
uggaguaucuggcaucagu

SEQ ID NO: 1644839 - RNA, 19 nt, Artificial Sequence
  Description of Artificial Sequence: Synthetic oligonucleotide
cuugugcuccgucaggucc

SEQ ID NO: 1644840 - RNA, 19 nt, Artificial Sequence
  Description of Artificial Sequence: Synthetic oligonucleotide
uauugcuguaucuggagua

SEQ ID NO: 1644841 - RNA, 19 nt, Artificial Sequence
  Description of Artificial Sequence: Synthetic oligonucleotide
ucagcuaaccaucgaugug

SEQ ID NO: 1644842 - RNA, 19 nt, Artificial Sequence
  Description of Artificial Sequence: Synthetic oligonucleotide
uugcuuucagcuaaccauc

SEQ ID NO: 1644843 - RNA, 19 nt, Artificial Sequence
  Description of Artificial Sequence: Synthetic oligonucleotide
ucauucaguuccuuccuga

SEQ ID NO: 1644844 - RNA, 19 nt, Artificial Sequence
  Description of Artificial Sequence: Synthetic oligonucleotide
ucuuuucaauucacuuucc

SEQ ID NO: 1644845 - RNA, 19 nt, Artificial Sequence
  Description of Artificial Sequence: Synthetic oligonucleotide
uggucuugcuuucagcuaa

SEQ ID NO: 1644846 - RNA, 19 nt, Artificial Sequence
  Description of Artificial Sequence: Synthetic oligonucleotide
ucguucaaugugcucaaac

SEQ ID NO: 1644847 - RNA, 19 nt, Artificial Sequence
  Description of Artificial Sequence: Synthetic oligonucleotide
uguagagucuccauuucuu

SEQ ID NO: 1644848 - RNA, 19 nt, Artificial Sequence
  Description of Artificial Sequence: Synthetic oligonucleotide
cuugauggacucuugcauc

SEQ ID NO: 1644849 - RNA, 19 nt, Artificial Sequence
  Description of Artificial Sequence: Synthetic oligonucleotide
gaucauucagcucccucug

SEQ ID NO: 1644850 - RNA, 19 nt, Artificial Sequence
  Description of Artificial Sequence: Synthetic oligonucleotide
ucacuuuccaguugaugga

SEQ ID NO: 1644851 - RNA, 19 nt, Artificial Sequence
  Description of Artificial Sequence: Synthetic oligonucleotide
ugaguuucuucuccguuaa

SEQ ID NO: 1644852 - RNA, 19 nt, Artificial Sequence
  Description of Artificial Sequence: Synthetic oligonucleotide
cuuuaacugugugauaaug

SEQ ID NO: 1644853 - RNA, 19 nt, Artificial Sequence
  Description of Artificial Sequence: Synthetic oligonucleotide
aguauuuagcucugcaauu

SEQ ID NO: 1644854 - RNA, 19 nt, Artificial Sequence
  Description of Artificial Sequence: Synthetic oligonucleotide
agcuuuaacugugugauaa

SEQ ID NO: 1644855 - RNA, 19 nt, Artificial Sequence
  Description of Artificial Sequence: Synthetic oligonucleotide
gaaauccucgagcaggcuc

SEQ ID NO: 1644856 - RNA, 19 nt, Artificial Sequence
  Description of Artificial Sequence: Synthetic oligonucleotide
uuccuauuacaccaagaau

SEQ ID NO: 1644857 - RNA, 19 nt, Artificial Sequence
  Description of Artificial Sequence: Synthetic oligonucleotide
ccugaugugauucucuugc

SEQ ID NO: 1644858 - RNA, 19 nt, Artificial Sequence
  Description of Artificial Sequence: Synthetic oligonucleotide
auucagacagguccuugag

SEQ ID NO: 1644859 - RNA, 19 nt, Artificial Sequence
  Description of Artificial Sequence: Synthetic oligonucleotide
ucuguuguauugcugcgua

SEQ ID NO: 1644860 - RNA, 19 nt, Artificial Sequence
  Description of Artificial Sequence: Synthetic oligonucleotide
gacuccagauggucuaggg

SEQ ID NO: 1644861 - RNA, 19 nt, Artificial Sequence
  Description of Artificial Sequence: Synthetic oligonucleotide
cuuugagucucuucuagca

SEQ ID NO: 1644862 - RNA, 19 nt, Artificial Sequence
  Description of Artificial Sequence: Synthetic oligonucleotide
agauaaacuggagggaucu

SEQ ID NO: 1644863 - RNA, 19 nt, Artificial Sequence
  Description of Artificial Sequence: Synthetic oligonucleotide
ucguugcuuguuuucuacg

SEQ ID NO: 1644864 - RNA, 19 nt, Artificial Sequence
  Description of Artificial Sequence: Synthetic oligonucleotide
ugcauuuacacgguccugu

SEQ ID NO: 1644865 - RNA, 19 nt, Artificial Sequence
  Description of Artificial Sequence: Synthetic oligonucleotide
auaugucucuccuuuuccu

SEQ ID NO: 1644866 - RNA, 19 nt, Artificial Sequence
  Description of Artificial Sequence: Synthetic oligonucleotide
ucuugcaucucaagaaguu

SEQ ID NO: 1644867 - RNA, 19 nt, Artificial Sequence
  Description of Artificial Sequence: Synthetic oligonucleotide
ucauuacuuauaugucucu

SEQ ID NO: 1644868 - RNA, 19 nt, Artificial Sequence
  Description of Artificial Sequence: Synthetic oligonucleotide
augguuuucagggaauucu

SEQ ID NO: 1644869 - RNA, 19 nt, Artificial Sequence
  Description of Artificial Sequence: Synthetic oligonucleotide
uguuguauugcugcguaaa

SEQ ID NO: 1644870 - RNA, 19 nt, Artificial Sequence
  Description of Artificial Sequence: Synthetic oligonucleotide
uuucaggaccagaaguaaa

SEQ ID NO: 1644871 - RNA, 19 nt, Artificial Sequence
  Description of Artificial Sequence: Synthetic oligonucleotide
auguaagaucauucagcuc

SEQ ID NO: 1644872 - RNA, 19 nt, Artificial Sequence
  Description of Artificial Sequence: Synthetic oligonucleotide
guugauggaugguuuucag

SEQ ID NO: 1644873 - RNA, 19 nt, Artificial Sequence
  Description of Artificial Sequence: Synthetic oligonucleotide
gcaagaucugcucgaaugg

SEQ ID NO: 1644874 - RNA, 19 nt, Artificial Sequence
  Description of Artificial Sequence: Synthetic oligonucleotide
uucguugcuuguuuucuac

SEQ ID NO: 1644875 - RNA, 19 nt, Artificial Sequence
  Description of Artificial Sequence: Synthetic oligonucleotide
uucuucagccaguuuauua

SEQ ID NO: 1644876 - RNA, 19 nt, Artificial Sequence
  Description of Artificial Sequence: Synthetic oligonucleotide
guauucaguguccugaugu

SEQ ID NO: 1644877 - RNA, 19 nt, Artificial Sequence
  Description of Artificial Sequence: Synthetic oligonucleotide
aacuggagggaucucugaa

SEQ ID NO: 1644878 - RNA, 19 nt, Artificial Sequence
  Description of Artificial Sequence: Synthetic oligonucleotide
uucuucuccguuaacuguu

SEQ ID NO: 1644879 - RNA, 19 nt, Artificial Sequence
  Description of Artificial Sequence: Synthetic oligonucleotide
uaauguauuucaggaccag

SEQ ID NO: 1644880 - RNA, 19 nt, Artificial Sequence
  Description of Artificial Sequence: Synthetic oligonucleotide
gauggucuagggccacucg

SEQ ID NO: 1644881 - RNA, 19 nt, Artificial Sequence
  Description of Artificial Sequence: Synthetic oligonucleotide
uuacaagcuguaucaauuu

SEQ ID NO: 1644882 - RNA, 19 nt, Artificial Sequence
  Description of Artificial Sequence: Synthetic oligonucleotide
cauucaguuccuuccugag

SEQ ID NO: 1644883 - RNA, 19 nt, Artificial Sequence
  Description of Artificial Sequence: Synthetic oligonucleotide
aaacuggagggaucucuga

SEQ ID NO: 1644884 - RNA, 19 nt, Artificial Sequence
  Description of Artificial Sequence: Synthetic oligonucleotide
guauuucaggaccagaagu

SEQ ID NO: 1644885 - RNA, 19 nt, Artificial Sequence
  Description of Artificial Sequence: Synthetic oligonucleotide
gaaguuuggcuuuguccug

SEQ ID NO: 1644886 - RNA, 19 nt, Artificial Sequence
  Description of Artificial Sequence: Synthetic oligonucleotide
cuccugucguucaaugugc

SEQ ID NO: 1644887 - RNA, 19 nt, Artificial Sequence
  Description of Artificial Sequence: Synthetic oligonucleotide
cuggcuaguauuuagcucu

SEQ ID NO: 1644888 - RNA, 19 nt, Artificial Sequence
  Description of Artificial Sequence: Synthetic oligonucleotide
guccuuaagcuguagccug

SEQ ID NO: 1644889 - RNA, 19 nt, Artificial Sequence
  Description of Artificial Sequence: Synthetic oligonucleotide
caagaauggauuccugcuc

SEQ ID NO: 1644890 - RNA, 19 nt, Artificial Sequence
  Description of Artificial Sequence: Synthetic oligonucleotide
uagacuuugccuuggccau

SEQ ID NO: 1644891 - RNA, 19 nt, Artificial Sequence
  Description of Artificial Sequence: Synthetic oligonucleotide
ugugauaaugguagccauu

SEQ ID NO: 1644892 - RNA, 19 nt, Artificial Sequence
  Description of Artificial Sequence: Synthetic oligonucleotide
guuccuagcuuuaacugug

SEQ ID NO: 1644893 - RNA, 19 nt, Artificial Sequence
  Description of Artificial Sequence: Synthetic oligonucleotide
uguucguugcuuguuuucu

SEQ ID NO: 1644894 - RNA, 19 nt, Artificial Sequence
  Description of Artificial Sequence: Synthetic oligonucleotide
auaauguauuucaggacca

SEQ ID NO: 1644895 - RNA, 19 nt, Artificial Sequence
  Description of Artificial Sequence: Synthetic oligonucleotide
agacacaggagcucagacu

SEQ ID NO: 1644896 - RNA, 19 nt, Artificial Sequence
  Description of Artificial Sequence: Synthetic oligonucleotide
ucuucuccguuaacuguug

SEQ ID NO: 1644897 - RNA, 19 nt, Artificial Sequence
  Description of Artificial Sequence: Synthetic oligonucleotide
uccagauggucuagggcca

SEQ ID NO: 1644898 - RNA, 19 nt, Artificial Sequence
  Description of Artificial Sequence: Synthetic oligonucleotide
ucgucuuuucuuugagucu

SEQ ID NO: 1644899 - RNA, 19 nt, Artificial Sequence
  Description of Artificial Sequence: Synthetic oligonucleotide
ucagacuccuugugcuccg

SEQ ID NO: 1644900 - RNA, 19 nt, Artificial Sequence
  Description of Artificial Sequence: Synthetic oligonucleotide
augugauucucuugcuuca

SEQ ID NO: 1644901 - RNA, 19 nt, Artificial Sequence
  Description of Artificial Sequence: Synthetic oligonucleotide
uggugagacugaaugucac

SEQ ID NO: 1644902 - RNA, 19 nt, Artificial Sequence
  Description of Artificial Sequence: Synthetic oligonucleotide
gacugaaugucacugaguu

SEQ ID NO: 1644903 - RNA, 19 nt, Artificial Sequence
  Description of Artificial Sequence: Synthetic oligonucleotide
ugcucgaauggcacucaag

SEQ ID NO: 1644904 - RNA, 19 nt, Artificial Sequence
  Description of Artificial Sequence: Synthetic oligonucleotide
cuaguauuuagcucugcaa

SEQ ID NO: 1644905 - RNA, 19 nt, Artificial Sequence
  Description of Artificial Sequence: Synthetic oligonucleotide
guaucaauuuccuuuccua

SEQ ID NO: 1644906 - RNA, 19 nt, Artificial Sequence
  Description of Artificial Sequence: Synthetic oligonucleotide
uccugagauucucuaucug

SEQ ID NO: 1644907 - RNA, 19 nt, Artificial Sequence
  Description of Artificial Sequence: Synthetic oligonucleotide
uggacucuugcaucucaag

SEQ ID NO: 1644908 - RNA, 19 nt, Artificial Sequence
  Description of Artificial Sequence: Synthetic oligonucleotide
aguuuauuagcaagaucug

SEQ ID NO: 1644909 - RNA, 19 nt, Artificial Sequence
  Description of Artificial Sequence: Synthetic oligonucleotide
ugaacgucucguuccuagc

SEQ ID NO: 1644910 - RNA, 19 nt, Artificial Sequence
  Description of Artificial Sequence: Synthetic oligonucleotide
cugugugauaaugguagcc

SEQ ID NO: 1644911 - RNA, 19 nt, Artificial Sequence
  Description of Artificial Sequence: Synthetic oligonucleotide
ugaaugucacugaguuucu

SEQ ID NO: 1644912 - RNA, 19 nt, Artificial Sequence
  Description of Artificial Sequence: Synthetic oligonucleotide
aggauuccuuuauugcugu

SEQ ID NO: 1644913 - RNA, 19 nt, Artificial Sequence
  Description of Artificial Sequence: Synthetic oligonucleotide
ucucguuccuagcuuuaac

SEQ ID NO: 1644914 - RNA, 19 nt, Artificial Sequence
  Description of Artificial Sequence: Synthetic oligonucleotide
uccuagcuuuaacugugug

SEQ ID NO: 1644915 - RNA, 19 nt, Artificial Sequence
  Description of Artificial Sequence: Synthetic oligonucleotide
cagggaauucuugaccucc

SEQ ID NO: 1644916 - RNA, 19 nt, Artificial Sequence
  Description of Artificial Sequence: Synthetic oligonucleotide
ggguacucguuucuaaugc

SEQ ID NO: 1644917 - RNA, 19 nt, Artificial Sequence
  Description of Artificial Sequence: Synthetic oligonucleotide
gauggaugguuuucaggga

SEQ ID NO: 1644918 - RNA, 19 nt, Artificial Sequence
  Description of Artificial Sequence: Synthetic oligonucleotide
cauuuacacgguccuguag

SEQ ID NO: 1644919 - RNA, 19 nt, Artificial Sequence
  Description of Artificial Sequence: Synthetic oligonucleotide
uacaaaggauuccuuuauu

SEQ ID NO: 1644920 - RNA, 19 nt, Artificial Sequence
  Description of Artificial Sequence: Synthetic oligonucleotide
acucguuucuaaugcauuu

SEQ ID NO: 1644921 - RNA, 19 nt, Artificial Sequence
  Description of Artificial Sequence: Synthetic oligonucleotide
uccaguugauggaugguuu

SEQ ID NO: 1644922 - RNA, 19 nt, Artificial Sequence
  Description of Artificial Sequence: Synthetic oligonucleotide
auuacaccaagaauggauu

SEQ ID NO: 1644923 - RNA, 19 nt, Artificial Sequence
  Description of Artificial Sequence: Synthetic oligonucleotide
gaaaguuuuacaagcugua

SEQ ID NO: 1644924 - RNA, 19 nt, Artificial Sequence
  Description of Artificial Sequence: Synthetic oligonucleotide
aucaauucagacagguccu

SEQ ID NO: 1644925 - RNA, 19 nt, Artificial Sequence
  Description of Artificial Sequence: Synthetic oligonucleotide
guagagucuccauuucuuc

SEQ ID NO: 1644926 - RNA, 19 nt, Artificial Sequence
  Description of Artificial Sequence: Synthetic oligonucleotide
guucaaguucagcuuggug

SEQ ID NO: 1644927 - RNA, 19 nt, Artificial Sequence
  Description of Artificial Sequence: Synthetic oligonucleotide
aucugcucgaauggcacuc

SEQ ID NO: 1644928 - RNA, 19 nt, Artificial Sequence
  Description of Artificial Sequence: Synthetic oligonucleotide
uccugcuccgucuccaaac

SEQ ID NO: 1644929 - RNA, 19 nt, Artificial Sequence
  Description of Artificial Sequence: Synthetic oligonucleotide
uccugaugugauucucuug

SEQ ID NO: 1644930 - RNA, 19 nt, Artificial Sequence
  Description of Artificial Sequence: Synthetic oligonucleotide
ugguuuucagggaauucuu

SEQ ID NO: 1644931 - RNA, 19 nt, Artificial Sequence
  Description of Artificial Sequence: Synthetic oligonucleotide
uguagccuggucucuucca

SEQ ID NO: 1644932 - RNA, 19 nt, Artificial Sequence
  Description of Artificial Sequence: Synthetic oligonucleotide
uacucguuucuaaugcauu

SEQ ID NO: 1644933 - RNA, 19 nt, Artificial Sequence
  Description of Artificial Sequence: Synthetic oligonucleotide
cauuacuuauaugucucuc

SEQ ID NO: 1644934 - RNA, 19 nt, Artificial Sequence
  Description of Artificial Sequence: Synthetic oligonucleotide
acugguauucaguguccug

SEQ ID NO: 1644935 - RNA, 19 nt, Artificial Sequence
  Description of Artificial Sequence: Synthetic oligonucleotide
acacugguauucagugucc

SEQ ID NO: 1644936 - RNA, 19 nt, Artificial Sequence
  Description of Artificial Sequence: Synthetic oligonucleotide
cucggcuuugaucuggcuc

SEQ ID NO: 1644937 - RNA, 19 nt, Artificial Sequence
  Description of Artificial Sequence: Synthetic oligonucleotide
cucgaauggcacucaaguc

SEQ ID NO: 1644938 - RNA, 19 nt, Artificial Sequence
  Description of Artificial Sequence: Synthetic oligonucleotide
agcuccugucugcagagca

SEQ ID NO: 1644939 - RNA, 19 nt, Artificial Sequence
  Description of Artificial Sequence: Synthetic oligonucleotide
cuuuagacuuugccuuggc

SEQ ID NO: 1644940 - RNA, 19 nt, Artificial Sequence
  Description of Artificial Sequence: Synthetic oligonucleotide
aagacuucauucaguuccu

SEQ ID NO: 1644941 - RNA, 19 nt, Artificial Sequence
  Description of Artificial Sequence: Synthetic oligonucleotide
guaucuggaguaucuggca

SEQ ID NO: 1644942 - RNA, 19 nt, Artificial Sequence
  Description of Artificial Sequence: Synthetic oligonucleotide
uugcuuguuuucuacgcuu

SEQ ID NO: 1644943 - RNA, 19 nt, Artificial Sequence
  Description of Artificial Sequence: Synthetic oligonucleotide
uucuguucguugcuuguuu

SEQ ID NO: 1644944 - RNA, 19 nt, Artificial Sequence
  Description of Artificial Sequence: Synthetic oligonucleotide
cagauaaacuggagggauc

SEQ ID NO: 1644945 - RNA, 19 nt, Artificial Sequence
  Description of Artificial Sequence: Synthetic oligonucleotide
cugguccuuaagcuguagc

SEQ ID NO: 1644946 - RNA, 19 nt, Artificial Sequence
  Description of Artificial Sequence: Synthetic oligonucleotide
cuacgcuuugcagugauga

SEQ ID NO: 1644947 - RNA, 19 nt, Artificial Sequence
  Description of Artificial Sequence: Synthetic oligonucleotide
uucuacgcuuugcagugau

SEQ ID NO: 1644948 - RNA, 19 nt, Artificial Sequence
  Description of Artificial Sequence: Synthetic oligonucleotide
acgcuuugcagugaugaug

SEQ ID NO: 1644949 - RNA, 19 nt, Artificial Sequence
  Description of Artificial Sequence: Synthetic oligonucleotide
gcuccugucguucaaugug

SEQ ID NO: 1644950 - RNA, 19 nt, Artificial Sequence
  Description of Artificial Sequence: Synthetic oligonucleotide
ucuacgcuuugcagugaug

SEQ ID NO: 1644951 - RNA, 19 nt, Artificial Sequence
  Description of Artificial Sequence: Synthetic oligonucleotide
cuaaugcauuuacacgguc

SEQ ID NO: 1644952 - RNA, 19 nt, Artificial Sequence
  Description of Artificial Sequence: Synthetic oligonucleotide
ugucguucaaugugcucaa

SEQ ID NO: 1644953 - RNA, 19 nt, Artificial Sequence
  Description of Artificial Sequence: Synthetic oligonucleotide
ugcuuguuuucuacgcuuu

SEQ ID NO: 1644954 - RNA, 19 nt, Artificial Sequence
  Description of Artificial Sequence: Synthetic oligonucleotide
auuucaggaccagaaguaa

SEQ ID NO: 1644955 - RNA, 19 nt, Artificial Sequence
  Description of Artificial Sequence: Synthetic oligonucleotide
uggcaucaguuucucagau

SEQ ID NO: 1644956 - RNA, 19 nt, Artificial Sequence
  Description of Artificial Sequence: Synthetic oligonucleotide
cuagcuuuaacugugugau

SEQ ID NO: 1644957 - RNA, 19 nt, Artificial Sequence
  Description of Artificial Sequence: Synthetic oligonucleotide
guaagaucauucagcuccc

SEQ ID NO: 1644958 - RNA, 19 nt, Artificial Sequence
  Description of Artificial Sequence: Synthetic oligonucleotide
cagacacaggagcucagac

SEQ ID NO: 1644959 - RNA, 19 nt, Artificial Sequence
  Description of Artificial Sequence: Synthetic oligonucleotide
acggucuucucucugcuuu

SEQ ID NO: 1644960 - RNA, 19 nt, Artificial Sequence
  Description of Artificial Sequence: Synthetic oligonucleotide
uucucggcuuugaucuggc

SEQ ID NO: 1644961 - RNA, 19 nt, Artificial Sequence
  Description of Artificial Sequence: Synthetic oligonucleotide
caaacagacacaggagcuc

SEQ ID NO: 1644962 - RNA, 19 nt, Artificial Sequence
  Description of Artificial Sequence: Synthetic oligonucleotide
ugcuccgucaggucccuga

SEQ ID NO: 1644963 - RNA, 19 nt, Artificial Sequence
  Description of Artificial Sequence: Synthetic oligonucleotide
caagaaguuuggcuuuguc

SEQ ID NO: 1644964 - RNA, 19 nt, Artificial Sequence
  Description of Artificial Sequence: Synthetic oligonucleotide
agacagguccuugagcaca

SEQ ID NO: 1644965 - RNA, 19 nt, Artificial Sequence
  Description of Artificial Sequence: Synthetic oligonucleotide
ucggguacucguuucuaau

SEQ ID NO: 1644966 - RNA, 19 nt, Artificial Sequence
  Description of Artificial Sequence: Synthetic oligonucleotide
ugcuccugucguucaaugu

SEQ ID NO: 1644967 - RNA, 19 nt, Artificial Sequence
  Description of Artificial Sequence: Synthetic oligonucleotide
uggugaacgucucguuccu

SEQ ID NO: 1644968 - RNA, 19 nt, Artificial Sequence
  Description of Artificial Sequence: Synthetic oligonucleotide
uggcuaguauuuagcucug

SEQ ID NO: 1644969 - RNA, 19 nt, Artificial Sequence
  Description of Artificial Sequence: Synthetic oligonucleotide
uucuugaccuccuguucaa

SEQ ID NO: 1644970 - RNA, 19 nt, Artificial Sequence
  Description of Artificial Sequence: Synthetic oligonucleotide
uuagcaagaucugcucgaa

SEQ ID NO: 1644971 - RNA, 19 nt, Artificial Sequence
  Description of Artificial Sequence: Synthetic oligonucleotide
guuguauugcugcguaaaa

SEQ ID NO: 1644972 - RNA, 19 nt, Artificial Sequence
  Description of Artificial Sequence: Synthetic oligonucleotide
ucuguucguugcuuguuuu

SEQ ID NO: 1644973 - RNA, 19 nt, Artificial Sequence
  Description of Artificial Sequence: Synthetic oligonucleotide
uuccuagcuuuaacugugu

SEQ ID NO: 1644974 - RNA, 19 nt, Artificial Sequence
  Description of Artificial Sequence: Synthetic oligonucleotide
uacuuauaugucucuccuu

SEQ ID NO: 1644975 - RNA, 19 nt, Artificial Sequence
  Description of Artificial Sequence: Synthetic oligonucleotide
ugguauucaguguccugau

SEQ ID NO: 1644976 - RNA, 19 nt, Artificial Sequence
  Description of Artificial Sequence: Synthetic oligonucleotide
uccuuuccuauuacaccaa

SEQ ID NO: 1644977 - RNA, 19 nt, Artificial Sequence
  Description of Artificial Sequence: Synthetic oligonucleotide
cuagcagaccucucuucuc

SEQ ID NO: 1644978 - RNA, 19 nt, Artificial Sequence
  Description of Artificial Sequence: Synthetic oligonucleotide
uccugucguucaaugugcu

SEQ ID NO: 1644979 - RNA, 19 nt, Artificial Sequence
  Description of Artificial Sequence: Synthetic oligonucleotide
auugcuguaucuggaguau

SEQ ID NO: 1644980 - RNA, 19 nt, Artificial Sequence
  Description of Artificial Sequence: Synthetic oligonucleotide
uuggucuugcuuucagcua

SEQ ID NO: 1644981 - RNA, 19 nt, Artificial Sequence
  Description of Artificial Sequence: Synthetic oligonucleotide
cuguucguugcuuguuuuc

SEQ ID NO: 1644982 - RNA, 19 nt, Artificial Sequence
  Description of Artificial Sequence: Synthetic oligonucleotide
uccuuccugagauucucua

SEQ ID NO: 1644983 - RNA, 19 nt, Artificial Sequence
  Description of Artificial Sequence: Synthetic oligonucleotide
ccagaaguaaauacuuuca

SEQ ID NO: 1644984 - RNA, 19 nt, Artificial Sequence
  Description of Artificial Sequence: Synthetic oligonucleotide
gcuaguauuuagcucugca

SEQ ID NO: 1644985 - RNA, 19 nt, Artificial Sequence
  Description of Artificial Sequence: Synthetic oligonucleotide
ggacucuugcaucucaaga

SEQ ID NO: 1644986 - RNA, 19 nt, Artificial Sequence
  Description of Artificial Sequence: Synthetic oligonucleotide
caagcuguaucaauuuccu

SEQ ID NO: 1644987 - RNA, 19 nt, Artificial Sequence
  Description of Artificial Sequence: Synthetic oligonucleotide
agcuaaccaucgauguggg

SEQ ID NO: 1644988 - RNA, 19 nt, Artificial Sequence
  Description of Artificial Sequence: Synthetic oligonucleotide
aacagacacaggagcucag

SEQ ID NO: 1644989 - RNA, 19 nt, Artificial Sequence
  Description of Artificial Sequence: Synthetic oligonucleotide
gucaagacuucauucaguu

SEQ ID NO: 1644990 - RNA, 19 nt, Artificial Sequence
  Description of Artificial Sequence: Synthetic oligonucleotide
ugcugcguaaaagcuggcu

SEQ ID NO: 1644991 - RNA, 19 nt, Artificial Sequence
  Description of Artificial Sequence: Synthetic oligonucleotide
agacuccuugugcuccguc

SEQ ID NO: 1644992 - RNA, 19 nt, Artificial Sequence
  Description of Artificial Sequence: Synthetic oligonucleotide
cucuuuucagcuccucaca

SEQ ID NO: 1644993 - RNA, 19 nt, Artificial Sequence
  Description of Artificial Sequence: Synthetic oligonucleotide
caguguccugaugugauuc

SEQ ID NO: 1644994 - RNA, 19 nt, Artificial Sequence
  Description of Artificial Sequence: Synthetic oligonucleotide
cuguagccuggucucuucc

SEQ ID NO: 1644995 - RNA, 19 nt, Artificial Sequence
  Description of Artificial Sequence: Synthetic oligonucleotide
uggcacucaaguccuugau

SEQ ID NO: 1644996 - RNA, 19 nt, Artificial Sequence
  Description of Artificial Sequence: Synthetic oligonucleotide
cucaagaaguuuggcuuug

SEQ ID NO: 1644997 - RNA, 19 nt, Artificial Sequence
  Description of Artificial Sequence: Synthetic oligonucleotide
gagucuccauuucuucguc

SEQ ID NO: 1644998 - RNA, 19 nt, Artificial Sequence
  Description of Artificial Sequence: Synthetic oligonucleotide
ggcacucaaguccuugaug

SEQ ID NO: 1644999 - RNA, 19 nt, Artificial Sequence
  Description of Artificial Sequence: Synthetic oligonucleotide
cucguuccuagcuuuaacu

SEQ ID NO: 1645000 - RNA, 19 nt, Artificial Sequence
  Description of Artificial Sequence: Synthetic oligonucleotide
gauuccuuuauugcuguau

SEQ ID NO: 1645001 - RNA, 19 nt, Artificial Sequence
  Description of Artificial Sequence: Synthetic oligonucleotide
uacgcuuugcagugaugau

SEQ ID NO: 1645002 - RNA, 19 nt, Artificial Sequence
  Description of Artificial Sequence: Synthetic oligonucleotide
uggagggaucucugaaguc

SEQ ID NO: 1645003 - RNA, 19 nt, Artificial Sequence
  Description of Artificial Sequence: Synthetic oligonucleotide
aguucagcuuggugagacu

SEQ ID NO: 1645004 - RNA, 19 nt, Artificial Sequence
  Description of Artificial Sequence: Synthetic oligonucleotide
agacuccagauggucuagg

SEQ ID NO: 1645005 - RNA, 19 nt, Artificial Sequence
  Description of Artificial Sequence: Synthetic oligonucleotide
ggagcucagacuccuugug

SEQ ID NO: 1645006 - RNA, 19 nt, Artificial Sequence
  Description of Artificial Sequence: Synthetic oligonucleotide
ugugauucucuugcuucau

SEQ ID NO: 1645007 - RNA, 19 nt, Artificial Sequence
  Description of Artificial Sequence: Synthetic oligonucleotide
gguacucguuucuaaugca

SEQ ID NO: 1645008 - RNA, 19 nt, Artificial Sequence
  Description of Artificial Sequence: Synthetic oligonucleotide
aauccucgagcaggcucag

SEQ ID NO: 1645009 - RNA, 19 nt, Artificial Sequence
  Description of Artificial Sequence: Synthetic oligonucleotide
caggcacagacuccagaug

SEQ ID NO: 1645010 - RNA, 19 nt, Artificial Sequence
  Description of Artificial Sequence: Synthetic oligonucleotide
cuccuuuagacuuugccuu

SEQ ID NO: 1645011 - RNA, 19 nt, Artificial Sequence
  Description of Artificial Sequence: Synthetic oligonucleotide
gaccucucuucuccuggug

SEQ ID NO: 1645012 - RNA, 19 nt, Artificial Sequence
  Description of Artificial Sequence: Synthetic oligonucleotide
gguauucaguguccugaug

SEQ ID NO: 1645013 - RNA, 19 nt, Artificial Sequence
  Description of Artificial Sequence: Synthetic oligonucleotide
uuacacgguccuguagagu

SEQ ID NO: 1645014 - RNA, 19 nt, Artificial Sequence
  Description of Artificial Sequence: Synthetic oligonucleotide
gggucauaauguauuucag

SEQ ID NO: 1645015 - RNA, 19 nt, Artificial Sequence
  Description of Artificial Sequence: Synthetic oligonucleotide
gacuuugccuuggccauca

SEQ ID NO: 1645016 - RNA, 19 nt, Artificial Sequence
  Description of Artificial Sequence: Synthetic oligonucleotide
cugagcuccugucugcaga

SEQ ID NO: 1645017 - RNA, 19 nt, Artificial Sequence
  Description of Artificial Sequence: Synthetic oligonucleotide
caaugugcucaaacagaca

SEQ ID NO: 1645018 - RNA, 19 nt, Artificial Sequence
  Description of Artificial Sequence: Synthetic oligonucleotide
gauaaacuggagggaucuc

SEQ ID NO: 1645019 - RNA, 19 nt, Artificial Sequence
  Description of Artificial Sequence: Synthetic oligonucleotide
guauugcugcguaaaagcu

SEQ ID NO: 1645020 - RNA, 19 nt, Artificial Sequence
  Description of Artificial Sequence: Synthetic oligonucleotide
cagacagguccuugagcac

SEQ ID NO: 1645021 - RNA, 19 nt, Artificial Sequence
  Description of Artificial Sequence: Synthetic oligonucleotide
ccuagcuuuaacuguguga

SEQ ID NO: 1645022 - RNA, 19 nt, Artificial Sequence
  Description of Artificial Sequence: Synthetic oligonucleotide
uccuucagacacugguauu

SEQ ID NO: 1645023 - RNA, 19 nt, Artificial Sequence
  Description of Artificial Sequence: Synthetic oligonucleotide
ucaauucagacagguccuu

SEQ ID NO: 1645024 - RNA, 19 nt, Artificial Sequence
  Description of Artificial Sequence: Synthetic oligonucleotide
acgucucguuccuagcuuu

SEQ ID NO: 1645025 - RNA, 19 nt, Artificial Sequence
  Description of Artificial Sequence: Synthetic oligonucleotide
cacgcuuggucaagacuuc

SEQ ID NO: 1645026 - RNA, 19 nt, Artificial Sequence
  Description of Artificial Sequence: Synthetic oligonucleotide
gaguuucuucuccguuaac

SEQ ID NO: 1645027 - RNA, 19 nt, Artificial Sequence
  Description of Artificial Sequence: Synthetic oligonucleotide
uuucuacgcuuugcaguga

SEQ ID NO: 1645028 - RNA, 19 nt, Artificial Sequence
  Description of Artificial Sequence: Synthetic oligonucleotide
gcuuguuuucuacgcuuug

SEQ ID NO: 1645029 - RNA, 19 nt, Artificial Sequence
  Description of Artificial Sequence: Synthetic oligonucleotide
gugauaaugguagccauuu

SEQ ID NO: 1645030 - RNA, 19 nt, Artificial Sequence
  Description of Artificial Sequence: Synthetic oligonucleotide
uggucucuuccauccuccu

SEQ ID NO: 1645031 - RNA, 19 nt, Artificial Sequence
  Description of Artificial Sequence: Synthetic oligonucleotide
agugaugauguaagaucau

SEQ ID NO: 1645032 - RNA, 19 nt, Artificial Sequence
  Description of Artificial Sequence: Synthetic oligonucleotide
uugcugcguaaaagcuggc

SEQ ID NO: 1645033 - RNA, 19 nt, Artificial Sequence
  Description of Artificial Sequence: Synthetic oligonucleotide
uagcuuuaacugugugaua

SEQ ID NO: 1645034 - RNA, 19 nt, Artificial Sequence
  Description of Artificial Sequence: Synthetic oligonucleotide
gugggucauaauguauuuc

SEQ ID NO: 1645035 - RNA, 19 nt, Artificial Sequence
  Description of Artificial Sequence: Synthetic oligonucleotide
cuauuacaccaagaaugga

SEQ ID NO: 1645036 - RNA, 19 nt, Artificial Sequence
  Description of Artificial Sequence: Synthetic oligonucleotide
augcauuuacacgguccug

SEQ ID NO: 1645037 - RNA, 19 nt, Artificial Sequence
  Description of Artificial Sequence: Synthetic oligonucleotide
guaucuggcaucaguuucu

SEQ ID NO: 1645038 - RNA, 19 nt, Artificial Sequence
  Description of Artificial Sequence: Synthetic oligonucleotide
gaugugggucauaauguau

SEQ ID NO: 1645039 - RNA, 19 nt, Artificial Sequence
  Description of Artificial Sequence: Synthetic oligonucleotide
cugagauucucuaucuguu

SEQ ID NO: 1645040 - RNA, 19 nt, Artificial Sequence
  Description of Artificial Sequence: Synthetic oligonucleotide
cagagccacugcagcuugg

SEQ ID NO: 1645041 - RNA, 19 nt, Artificial Sequence
  Description of Artificial Sequence: Synthetic oligonucleotide
gagucucuucuagcagacc

SEQ ID NO: 1645042 - RNA, 19 nt, Artificial Sequence
  Description of Artificial Sequence: Synthetic oligonucleotide
uccugggccuggcuaguau

SEQ ID NO: 1645043 - RNA, 19 nt, Artificial Sequence
  Description of Artificial Sequence: Synthetic oligonucleotide
aagcuguagccuggucucu

SEQ ID NO: 1645044 - RNA, 19 nt, Artificial Sequence
  Description of Artificial Sequence: Synthetic oligonucleotide
gauauucuguucguugcuu

SEQ ID NO: 1645045 - RNA, 19 nt, Artificial Sequence
  Description of Artificial Sequence: Synthetic oligonucleotide
auucuguucguugcuuguu

SEQ ID NO: 1645046 - RNA, 19 nt, Artificial Sequence
  Description of Artificial Sequence: Synthetic oligonucleotide
ccuuuccuauuacaccaag

SEQ ID NO: 1645047 - RNA, 19 nt, Artificial Sequence
  Description of Artificial Sequence: Synthetic oligonucleotide
gaguaucuggcaucaguuu

SEQ ID NO: 1645048 - RNA, 19 nt, Artificial Sequence
  Description of Artificial Sequence: Synthetic oligonucleotide
gucucuucuagcagaccuc

SEQ ID NO: 1645049 - RNA, 19 nt, Artificial Sequence
  Description of Artificial Sequence: Synthetic oligonucleotide
gugcucaaacagacacagg

SEQ ID NO: 1645050 - RNA, 19 nt, Artificial Sequence
  Description of Artificial Sequence: Synthetic oligonucleotide
gucuugcuuucagcuaacc

SEQ ID NO: 1645051 - RNA, 19 nt, Artificial Sequence
  Description of Artificial Sequence: Synthetic oligonucleotide
cucuaucuguuguauugcu

SEQ ID NO: 1645052 - RNA, 19 nt, Artificial Sequence
  Description of Artificial Sequence: Synthetic oligonucleotide
guucguugcuuguuuucua

SEQ ID NO: 1645053 - RNA, 19 nt, Artificial Sequence
  Description of Artificial Sequence: Synthetic oligonucleotide
ucucggcuuugaucuggcu

SEQ ID NO: 1645054 - RNA, 19 nt, Artificial Sequence
  Description of Artificial Sequence: Synthetic oligonucleotide
gcuguaucuggaguaucug

SEQ ID NO: 1645055 - RNA, 19 nt, Artificial Sequence
  Description of Artificial Sequence: Synthetic oligonucleotide
ggagggaucucugaagucu

SEQ ID NO: 1645056 - RNA, 19 nt, Artificial Sequence
  Description of Artificial Sequence: Synthetic oligonucleotide
gugugauaaugguagccau

SEQ ID NO: 1645057 - RNA, 19 nt, Artificial Sequence
  Description of Artificial Sequence: Synthetic oligonucleotide
agggaauucuugaccuccu

SEQ ID NO: 1645058 - RNA, 19 nt, Artificial Sequence
  Description of Artificial Sequence: Synthetic oligonucleotide
cucuucuagcagaccucuc

SEQ ID NO: 1645059 - RNA, 19 nt, Artificial Sequence
  Description of Artificial Sequence: Synthetic oligonucleotide
cuguagagucuccauuucu

SEQ ID NO: 1645060 - RNA, 19 nt, Artificial Sequence
  Description of Artificial Sequence: Synthetic oligonucleotide
cucggguacucguuucuaa

SEQ ID NO: 1645061 - RNA, 19 nt, Artificial Sequence
  Description of Artificial Sequence: Synthetic oligonucleotide
ccaucaauucagacagguc

SEQ ID NO: 1645062 - RNA, 19 nt, Artificial Sequence
  Description of Artificial Sequence: Synthetic oligonucleotide
agcucccucuggugaacgu

SEQ ID NO: 1645063 - RNA, 19 nt, Artificial Sequence
  Description of Artificial Sequence: Synthetic oligonucleotide
cuucgucuuuucuuugagu

SEQ ID NO: 1645064 - RNA, 19 nt, Artificial Sequence
  Description of Artificial Sequence: Synthetic oligonucleotide
cucguuucuaaugcauuua

SEQ ID NO: 1645065 - RNA, 19 nt, Artificial Sequence
  Description of Artificial Sequence: Synthetic oligonucleotide
cuucuccguuaacuguuga

SEQ ID NO: 1645066 - RNA, 19 nt, Artificial Sequence
  Description of Artificial Sequence: Synthetic oligonucleotide
ccaagaauggauuccugcu

SEQ ID NO: 1645067 - RNA, 19 nt, Artificial Sequence
  Description of Artificial Sequence: Synthetic oligonucleotide
caggugaauuuucucggcu

SEQ ID NO: 1645068 - RNA, 19 nt, Artificial Sequence
  Description of Artificial Sequence: Synthetic oligonucleotide
ggauauucuguucguugcu

SEQ ID NO: 1645069 - RNA, 19 nt, Artificial Sequence
  Description of Artificial Sequence: Synthetic oligonucleotide
ccuccuuuagacuuugccu

SEQ ID NO: 1645070 - RNA, 19 nt, Artificial Sequence
  Description of Artificial Sequence: Synthetic oligonucleotide
cugcguaaaagcuggcuuu

SEQ ID NO: 1645071 - RNA, 19 nt, Artificial Sequence
  Description of Artificial Sequence: Synthetic oligonucleotide
cagcucccucuggugaacg

SEQ ID NO: 1645072 - RNA, 19 nt, Artificial Sequence
  Description of Artificial Sequence: Synthetic oligonucleotide
ggccuggcuaguauuuagc

SEQ ID NO: 1645073 - RNA, 19 nt, Artificial Sequence
  Description of Artificial Sequence: Synthetic oligonucleotide
ccguuaacuguugaagcuc

SEQ ID NO: 1645074 - RNA, 19 nt, Artificial Sequence
  Description of Artificial Sequence: Synthetic oligonucleotide
acgcuuggucaagacuuca

SEQ ID NO: 1645075 - RNA, 19 nt, Artificial Sequence
  Description of Artificial Sequence: Synthetic oligonucleotide
ggauuccugcuccgucucc

SEQ ID NO: 1645076 - RNA, 19 nt, Artificial Sequence
  Description of Artificial Sequence: Synthetic oligonucleotide
cuguuguauugcugcguaa

SEQ ID NO: 1645077 - RNA, 19 nt, Artificial Sequence
  Description of Artificial Sequence: Synthetic oligonucleotide
ugcugccgcacggucuucu

SEQ ID NO: 1645078 - RNA, 19 nt, Artificial Sequence
  Description of Artificial Sequence: Synthetic oligonucleotide
guacucguuucuaaugcau

SEQ ID NO: 1645079 - RNA, 19 nt, Artificial Sequence
  Description of Artificial Sequence: Synthetic oligonucleotide
gcuccgucaggucccugag

SEQ ID NO: 1645080 - RNA, 19 nt, Artificial Sequence
  Description of Artificial Sequence: Synthetic oligonucleotide
gguccuuaagcuguagccu

SEQ ID NO: 1645081 - RNA, 19 nt, Artificial Sequence
  Description of Artificial Sequence: Synthetic oligonucleotide
ugugcuccgucaggucccu

SEQ ID NO: 1645082 - RNA, 19 nt, Artificial Sequence
  Description of Artificial Sequence: Synthetic oligonucleotide
gaccagaaguaaauacuuu

SEQ ID NO: 1645083 - RNA, 19 nt, Artificial Sequence
  Description of Artificial Sequence: Synthetic oligonucleotide
gucuagggccacucgggua

SEQ ID NO: 1645084 - RNA, 19 nt, Artificial Sequence
  Description of Artificial Sequence: Synthetic oligonucleotide
acacgguccuguagagucu

SEQ ID NO: 1645085 - RNA, 19 nt, Artificial Sequence
  Description of Artificial Sequence: Synthetic oligonucleotide
gcuuucagcuaaccaucga

SEQ ID NO: 1645086 - RNA, 19 nt, Artificial Sequence
  Description of Artificial Sequence: Synthetic oligonucleotide
cggguacucguuucuaaug

SEQ ID NO: 1645087 - RNA, 19 nt, Artificial Sequence
  Description of Artificial Sequence: Synthetic oligonucleotide
cguuucuaaugcauuuaca

SEQ ID NO: 1645088 - RNA, 19 nt, Artificial Sequence
  Description of Artificial Sequence: Synthetic oligonucleotide
aaccaucgaugugggucau

SEQ ID NO: 1645089 - RNA, 19 nt, Artificial Sequence
  Description of Artificial Sequence: Synthetic oligonucleotide
ggaguaucuggcaucaguu

SEQ ID NO: 1645090 - RNA, 19 nt, Artificial Sequence
  Description of Artificial Sequence: Synthetic oligonucleotide
gcugcguaaaagcuggcuu

SEQ ID NO: 1645091 - RNA, 19 nt, Artificial Sequence
  Description of Artificial Sequence: Synthetic oligonucleotide
guccuguagagucuccauu

SEQ ID NO: 1645092 - RNA, 19 nt, Artificial Sequence
  Description of Artificial Sequence: Synthetic oligonucleotide
cagggcacgcuuggucaag

SEQ ID NO: 1645093 - RNA, 19 nt, Artificial Sequence
  Description of Artificial Sequence: Synthetic oligonucleotide
agggcacgcuuggucaaga

SEQ ID NO: 1645094 - RNA, 19 nt, Artificial Sequence
  Description of Artificial Sequence: Synthetic oligonucleotide
ggcuaguauuuagcucugc

SEQ ID NO: 1645095 - RNA, 19 nt, Artificial Sequence
  Description of Artificial Sequence: Synthetic oligonucleotide
gcuguagccuggucucuuc

SEQ ID NO: 1645096 - RNA, 19 nt, Artificial Sequence
  Description of Artificial Sequence: Synthetic oligonucleotide
cagaagcugcuccugucgu

SEQ ID NO: 1645097 - RNA, 19 nt, Artificial Sequence
  Description of Artificial Sequence: Synthetic oligonucleotide
acucggguacucguuucua

SEQ ID NO: 1645098 - RNA, 19 nt, Artificial Sequence
  Description of Artificial Sequence: Synthetic oligonucleotide
gucucguuccuagcuuuaa

SEQ ID NO: 1645099 - RNA, 19 nt, Artificial Sequence
  Description of Artificial Sequence: Synthetic oligonucleotide
agcuguagccuggucucuu

SEQ ID NO: 1645100 - RNA, 19 nt, Artificial Sequence
  Description of Artificial Sequence: Synthetic oligonucleotide
gcauuuacacgguccugua

SEQ ID NO: 1645101 - RNA, 19 nt, Artificial Sequence
  Description of Artificial Sequence: Synthetic oligonucleotide
gcacgcuuggucaagacuu

SEQ ID NO: 1645102 - RNA, 19 nt, Artificial Sequence
  Description of Artificial Sequence: Synthetic oligonucleotide
ggcacgcuuggucaagacu

SEQ ID NO: 1645103 - RNA, 19 nt, Artificial Sequence
  Description of Artificial Sequence: Synthetic oligonucleotide
ccugagcuccugucugcag

SEQ ID NO: 1645104 - RNA, 19 nt, Artificial Sequence
  Description of Artificial Sequence: Synthetic oligonucleotide
ggucaagacuucauucagu

SEQ ID NO: 1645105 - RNA, 19 nt, Artificial Sequence
  Description of Artificial Sequence: Synthetic oligonucleotide
cgcuuugcagugaugaugu

SEQ ID NO: 1645106 - RNA, 19 nt, Artificial Sequence
  Description of Artificial Sequence: Synthetic oligonucleotide
ccaucgaugugggucauaa

SEQ ID NO: 1645107 - RNA, 19 nt, Artificial Sequence
  Description of Artificial Sequence: Synthetic oligonucleotide
gagggaucucugaagucuu

SEQ ID NO: 1645108 - RNA, 19 nt, Artificial Sequence
  Description of Artificial Sequence: Synthetic oligonucleotide
ggucuugcuuucagcuaac

SEQ ID NO: 1645109 - RNA, 19 nt, Artificial Sequence
  Description of Artificial Sequence: Synthetic oligonucleotide
cugcuccgucuccaaacaa

SEQ ID NO: 1645110 - RNA, 19 nt, Artificial Sequence
  Description of Artificial Sequence: Synthetic oligonucleotide
cugcucgaauggcacucaa

SEQ ID NO: 1645111 - RNA, 19 nt, Artificial Sequence
  Description of Artificial Sequence: Synthetic oligonucleotide
gggcacgcuuggucaagac

SEQ ID NO: 1645112 - RNA, 19 nt, Artificial Sequence
  Description of Artificial Sequence: Synthetic oligonucleotide
cgaauggcacucaaguccu

SEQ ID NO: 1645113 - RNA, 19 nt, Artificial Sequence
  Description of Artificial Sequence: Synthetic oligonucleotide
agggaucucugaagucuuu

SEQ ID NO: 1645114 - RNA, 19 nt, Artificial Sequence
  Description of Artificial Sequence: Synthetic oligonucleotide
cguuccuagcuuuaacugu

SEQ ID NO: 1645115 - RNA, 19 nt, Artificial Sequence
  Description of Artificial Sequence: Synthetic oligonucleotide
ggucuagggccacucgggu

SEQ ID NO: 1645116 - RNA, 19 nt, Artificial Sequence
  Description of Artificial Sequence: Synthetic oligonucleotide
gcucccucuggugaacguc

SEQ ID NO: 1645117 - RNA, 19 nt, Artificial Sequence
  Description of Artificial Sequence: Synthetic oligonucleotide
cacugguauucaguguccu

SEQ ID NO: 1645118 - RNA, 19 nt, Artificial Sequence
  Description of Artificial Sequence: Synthetic oligonucleotide
gguccuguagagucuccau

SEQ ID NO: 1645119 - RNA, 19 nt, Artificial Sequence
  Description of Artificial Sequence: Synthetic oligonucleotide
gccaguuuauuagcaagau

SEQ ID NO: 1645120 - RNA, 19 nt, Artificial Sequence
  Description of Artificial Sequence: Synthetic oligonucleotide
gucguucaaugugcucaaa

SEQ ID NO: 1645121 - RNA, 19 nt, Artificial Sequence
  Description of Artificial Sequence: Synthetic oligonucleotide
cucuggugaacgucucguu

SEQ ID NO: 1645122 - RNA, 19 nt, Artificial Sequence
  Description of Artificial Sequence: Synthetic oligonucleotide
agcugguccuuaagcugua

SEQ ID NO: 1645123 - RNA, 19 nt, Artificial Sequence
  Description of Artificial Sequence: Synthetic oligonucleotide
cagcuuggucuugcuuuca

SEQ ID NO: 1645124 - RNA, 19 nt, Artificial Sequence
  Description of Artificial Sequence: Synthetic oligonucleotide
ggaugguuuucagggaauu

SEQ ID NO: 1645125 - RNA, 19 nt, Artificial Sequence
  Description of Artificial Sequence: Synthetic oligonucleotide
accaucgaugugggucaua

SEQ ID NO: 1645126 - RNA, 19 nt, Artificial Sequence
  Description of Artificial Sequence: Synthetic oligonucleotide
caucgaugugggucauaau

SEQ ID NO: 1645127 - RNA, 19 nt, Artificial Sequence
  Description of Artificial Sequence: Synthetic oligonucleotide
ccagauggucuagggccac

SEQ ID NO: 1645128 - RNA, 19 nt, Artificial Sequence
  Description of Artificial Sequence: Synthetic oligonucleotide
cugccgcacggucuucucu

SEQ ID NO: 1645129 - RNA, 19 nt, Artificial Sequence
  Description of Artificial Sequence: Synthetic oligonucleotide
gcuaaccaucgaugugggu

SEQ ID NO: 1645130 - RNA, 19 nt, Artificial Sequence
  Description of Artificial Sequence: Synthetic oligonucleotide
ccgucaggucccugagcuc

SEQ ID NO: 1645131 - RNA, 19 nt, Artificial Sequence
  Description of Artificial Sequence: Synthetic oligonucleotide
ccucuggugaacgucucgu

SEQ ID NO: 1645132 - RNA, 19 nt, Artificial Sequence
  Description of Artificial Sequence: Synthetic oligonucleotide
gcuuugcagugaugaugua

SEQ ID NO: 1645133 - RNA, 19 nt, Artificial Sequence
  Description of Artificial Sequence: Synthetic oligonucleotide
ggugaacgucucguuccua

SEQ ID NO: 1645134 - RNA, 19 nt, Artificial Sequence
  Description of Artificial Sequence: Synthetic oligonucleotide
cacggucuucucucugcuu

SEQ ID NO: 1645135 - RNA, 19 nt, Artificial Sequence
  Description of Artificial Sequence: Synthetic oligonucleotide
gugcuccgucaggucccug

SEQ ID NO: 1645136 - RNA, 19 nt, Artificial Sequence
  Description of Artificial Sequence: Synthetic oligonucleotide
cugcugccgcacggucuuc

SEQ ID NO: 1645137 - RNA, 19 nt, Artificial Sequence
  Description of Artificial Sequence: Synthetic oligonucleotide
cuagggccacucggguacu

SEQ ID NO: 1645138 - RNA, 19 nt, Artificial Sequence
  Description of Artificial Sequence: Synthetic oligonucleotide
gccgcacggucuucucucu

SEQ ID NO: 1645139 - RNA, 19 nt, Artificial Sequence
  Description of Artificial Sequence: Synthetic oligonucleotide
ccuuaagcuguagccuggu

SEQ ID NO: 1645140 - RNA, 19 nt, Artificial Sequence
  Description of Artificial Sequence: Synthetic oligonucleotide
cagacuccuugugcuccgu

SEQ ID NO: 1645141 - RNA, 19 nt, Artificial Sequence
  Description of Artificial Sequence: Synthetic oligonucleotide
ccuggauauucuguucguu

SEQ ID NO: 1645142 - RNA, 19 nt, Artificial Sequence
  Description of Artificial Sequence: Synthetic oligonucleotide
cgucucguuccuagcuuua

SEQ ID NO: 1645143 - RNA, 19 nt, Artificial Sequence
  Description of Artificial Sequence: Synthetic oligonucleotide
cgcuuggucaagacuucau

SEQ ID NO: 1645144 - RNA, 19 nt, Artificial Sequence
  Description of Artificial Sequence: Synthetic oligonucleotide
ggccacucggguacucguu

SEQ ID NO: 1645145 - RNA, 19 nt, Artificial Sequence
  Description of Artificial Sequence: Synthetic oligonucleotide
aauguugaccaccaaaugc

SEQ ID NO: 1645146 - RNA, 19 nt, Artificial Sequence
  Description of Artificial Sequence: Synthetic oligonucleotide
uuuaauaucauccguaaca

SEQ ID NO: 1645147 - RNA, 19 nt, Artificial Sequence
  Description of Artificial Sequence: Synthetic oligonucleotide
acuaauuugacacugccuc

SEQ ID NO: 1645148 - RNA, 19 nt, Artificial Sequence
  Description of Artificial Sequence: Synthetic oligonucleotide
aaagguucaaagucuuucc

SEQ ID NO: 1645149 - RNA, 19 nt, Artificial Sequence
  Description of Artificial Sequence: Synthetic oligonucleotide
ugucuagucauccagagug

SEQ ID NO: 1645150 - RNA, 19 nt, Artificial Sequence
  Description of Artificial Sequence: Synthetic oligonucleotide
aauaaaacaucaaacuuuc

SEQ ID NO: 1645151 - RNA, 19 nt, Artificial Sequence
  Description of Artificial Sequence: Synthetic oligonucleotide
agauagacaaucugcagcc

SEQ ID NO: 1645152 - RNA, 19 nt, Artificial Sequence
  Description of Artificial Sequence: Synthetic oligonucleotide
aauaucauccguaacacag

SEQ ID NO: 1645153 - RNA, 19 nt, Artificial Sequence
  Description of Artificial Sequence: Synthetic oligonucleotide
agauaagccuccuuuagcc

SEQ ID NO: 1645154 - RNA, 19 nt, Artificial Sequence
  Description of Artificial Sequence: Synthetic oligonucleotide
uuaaagaaucguuucagag

SEQ ID NO: 1645155 - RNA, 19 nt, Artificial Sequence
  Description of Artificial Sequence: Synthetic oligonucleotide
aaaacugugacucgggacu

SEQ ID NO: 1645156 - RNA, 19 nt, Artificial Sequence
  Description of Artificial Sequence: Synthetic oligonucleotide
aaugcuuuuccacuucagg

SEQ ID NO: 1645157 - RNA, 19 nt, Artificial Sequence
  Description of Artificial Sequence: Synthetic oligonucleotide
aaauuuccuacacacaaca

SEQ ID NO: 1645158 - RNA, 19 nt, Artificial Sequence
  Description of Artificial Sequence: Synthetic oligonucleotide
aaagaaucguuucagagua

SEQ ID NO: 1645159 - RNA, 19 nt, Artificial Sequence
  Description of Artificial Sequence: Synthetic oligonucleotide
ugugccuggguaaugaagg

SEQ ID NO: 1645160 - RNA, 19 nt, Artificial Sequence
  Description of Artificial Sequence: Synthetic oligonucleotide
ucauccguaacacagcagc

SEQ ID NO: 1645161 - RNA, 19 nt, Artificial Sequence
  Description of Artificial Sequence: Synthetic oligonucleotide
cauaugucugaauaggagc

SEQ ID NO: 1645162 - RNA, 19 nt, Artificial Sequence
  Description of Artificial Sequence: Synthetic oligonucleotide
uggaauuuccaacagcucu

SEQ ID NO: 1645163 - RNA, 19 nt, Artificial Sequence
  Description of Artificial Sequence: Synthetic oligonucleotide
ucaggaauguugagaaugg

SEQ ID NO: 1645164 - RNA, 19 nt, Artificial Sequence
  Description of Artificial Sequence: Synthetic oligonucleotide
aagucaaaagguucaaagu

SEQ ID NO: 1645165 - RNA, 19 nt, Artificial Sequence
  Description of Artificial Sequence: Synthetic oligonucleotide
uauuguucgaacucuguug

SEQ ID NO: 1645166 - RNA, 19 nt, Artificial Sequence
  Description of Artificial Sequence: Synthetic oligonucleotide
ucuuaaagaaucguuucag

SEQ ID NO: 1645167 - RNA, 19 nt, Artificial Sequence
  Description of Artificial Sequence: Synthetic oligonucleotide
aggauucucggugacaucc

SEQ ID NO: 1645168 - RNA, 19 nt, Artificial Sequence
  Description of Artificial Sequence: Synthetic oligonucleotide
agucuuauacuccucccac

SEQ ID NO: 1645169 - RNA, 19 nt, Artificial Sequence
  Description of Artificial Sequence: Synthetic oligonucleotide
acaacugacugguaguguc

SEQ ID NO: 1645170 - RNA, 19 nt, Artificial Sequence
  Description of Artificial Sequence: Synthetic oligonucleotide
acugguaguguccaauagg

SEQ ID NO: 1645171 - RNA, 19 nt, Artificial Sequence
  Description of Artificial Sequence: Synthetic oligonucleotide
agccgaagaaauuuccuac

SEQ ID NO: 1645172 - RNA, 19 nt, Artificial Sequence
  Description of Artificial Sequence: Synthetic oligonucleotide
uuaauaucauccguaacac

SEQ ID NO: 1645173 - RNA, 19 nt, Artificial Sequence
  Description of Artificial Sequence: Synthetic oligonucleotide
acaaucugcagcccugagc

SEQ ID NO: 1645174 - RNA, 19 nt, Artificial Sequence
  Description of Artificial Sequence: Synthetic oligonucleotide
agaaucguuucagaguagc

SEQ ID NO: 1645175 - RNA, 19 nt, Artificial Sequence
  Description of Artificial Sequence: Synthetic oligonucleotide
aaaauacgcugcucccggc

SEQ ID NO: 1645176 - RNA, 19 nt, Artificial Sequence
  Description of Artificial Sequence: Synthetic oligonucleotide
ucaacaccuuaacuggagg

SEQ ID NO: 1645177 - RNA, 19 nt, Artificial Sequence
  Description of Artificial Sequence: Synthetic oligonucleotide
ucgguaaggauucucggug

SEQ ID NO: 1645178 - RNA, 19 nt, Artificial Sequence
  Description of Artificial Sequence: Synthetic oligonucleotide
gacugguucacucaaggac

SEQ ID NO: 1645179 - RNA, 19 nt, Artificial Sequence
  Description of Artificial Sequence: Synthetic oligonucleotide
ugugucgaguucaacauaa

SEQ ID NO: 1645180 - RNA, 19 nt, Artificial Sequence
  Description of Artificial Sequence: Synthetic oligonucleotide
aggcugaagauaucaacac

SEQ ID NO: 1645181 - RNA, 19 nt, Artificial Sequence
  Description of Artificial Sequence: Synthetic oligonucleotide
auuguucgaacucuguuga

SEQ ID NO: 1645182 - RNA, 19 nt, Artificial Sequence
  Description of Artificial Sequence: Synthetic oligonucleotide
aaucguuucagaguagccu

SEQ ID NO: 1645183 - RNA, 19 nt, Artificial Sequence
  Description of Artificial Sequence: Synthetic oligonucleotide
aaugugugccaauguugac

SEQ ID NO: 1645184 - RNA, 19 nt, Artificial Sequence
  Description of Artificial Sequence: Synthetic oligonucleotide
caagccaagagucgcagcg

SEQ ID NO: 1645185 - RNA, 19 nt, Artificial Sequence
  Description of Artificial Sequence: Synthetic oligonucleotide
caagguagcaaugugugcc

SEQ ID NO: 1645186 - RNA, 19 nt, Artificial Sequence
  Description of Artificial Sequence: Synthetic oligonucleotide
ugaguagagccgaagaaau

SEQ ID NO: 1645187 - RNA, 19 nt, Artificial Sequence
  Description of Artificial Sequence: Synthetic oligonucleotide
uaucauccguaacacagca

SEQ ID NO: 1645188 - RNA, 19 nt, Artificial Sequence
  Description of Artificial Sequence: Synthetic oligonucleotide
agacuugcuaucccugccc

SEQ ID NO: 1645189 - RNA, 19 nt, Artificial Sequence
  Description of Artificial Sequence: Synthetic oligonucleotide
uccaguuaaagaaaccuuu

SEQ ID NO: 1645190 - RNA, 19 nt, Artificial Sequence
  Description of Artificial Sequence: Synthetic oligonucleotide
agguaagugauguucucag

SEQ ID NO: 1645191 - RNA, 19 nt, Artificial Sequence
  Description of Artificial Sequence: Synthetic oligonucleotide
uaucccugcccguagauga

SEQ ID NO: 1645192 - RNA, 19 nt, Artificial Sequence
  Description of Artificial Sequence: Synthetic oligonucleotide
ucuccacaagccaagaguc

SEQ ID NO: 1645193 - RNA, 19 nt, Artificial Sequence
  Description of Artificial Sequence: Synthetic oligonucleotide
uagaugaccguuuccuucc

SEQ ID NO: 1645194 - RNA, 19 nt, Artificial Sequence
  Description of Artificial Sequence: Synthetic oligonucleotide
aagucuuuccggaagcguc

SEQ ID NO: 1645195 - RNA, 19 nt, Artificial Sequence
  Description of Artificial Sequence: Synthetic oligonucleotide
cuuacuaauuugacacugc

SEQ ID NO: 1645196 - RNA, 19 nt, Artificial Sequence
  Description of Artificial Sequence: Synthetic oligonucleotide
ugcucuggaauuuccaaca

SEQ ID NO: 1645197 - RNA, 19 nt, Artificial Sequence
  Description of Artificial Sequence: Synthetic oligonucleotide
uaaaacugugacucgggac

SEQ ID NO: 1645198 - RNA, 19 nt, Artificial Sequence
  Description of Artificial Sequence: Synthetic oligonucleotide
ugugacucgggacugguuc

SEQ ID NO: 1645199 - RNA, 19 nt, Artificial Sequence
  Description of Artificial Sequence: Synthetic oligonucleotide
acguccuugggcuaaaacu

SEQ ID NO: 1645200 - RNA, 19 nt, Artificial Sequence
  Description of Artificial Sequence: Synthetic oligonucleotide
uggucaucagauaagccuc

SEQ ID NO: 1645201 - RNA, 19 nt, Artificial Sequence
  Description of Artificial Sequence: Synthetic oligonucleotide
cucucgguaaggauucucg

SEQ ID NO: 1645202 - RNA, 19 nt, Artificial Sequence
  Description of Artificial Sequence: Synthetic oligonucleotide
cuaauuugacacugccucc

SEQ ID NO: 1645203 - RNA, 19 nt, Artificial Sequence
  Description of Artificial Sequence: Synthetic oligonucleotide
cuaucuguugcuccugugc

SEQ ID NO: 1645204 - RNA, 19 nt, Artificial Sequence
  Description of Artificial Sequence: Synthetic oligonucleotide
agauaucaacaccuuaacu

SEQ ID NO: 1645205 - RNA, 19 nt, Artificial Sequence
  Description of Artificial Sequence: Synthetic oligonucleotide
uucucggugacauccggag

SEQ ID NO: 1645206 - RNA, 19 nt, Artificial Sequence
  Description of Artificial Sequence: Synthetic oligonucleotide
agaguagccuuauacuucu

SEQ ID NO: 1645207 - RNA, 19 nt, Artificial Sequence
  Description of Artificial Sequence: Synthetic oligonucleotide
gagaugauggcuccuauaa

SEQ ID NO: 1645208 - RNA, 19 nt, Artificial Sequence
  Description of Artificial Sequence: Synthetic oligonucleotide
uccguaacacagcagcuga

SEQ ID NO: 1645209 - RNA, 19 nt, Artificial Sequence
  Description of Artificial Sequence: Synthetic oligonucleotide
uacuaauuugacacugccu

SEQ ID NO: 1645210 - RNA, 19 nt, Artificial Sequence
  Description of Artificial Sequence: Synthetic oligonucleotide
cagcaucuugaguagagcc

SEQ ID NO: 1645211 - RNA, 19 nt, Artificial Sequence
  Description of Artificial Sequence: Synthetic oligonucleotide
auaucauccguaacacagc

SEQ ID NO: 1645212 - RNA, 19 nt, Artificial Sequence
  Description of Artificial Sequence: Synthetic oligonucleotide
uuuugccagucuuauacuc

SEQ ID NO: 1645213 - RNA, 19 nt, Artificial Sequence
  Description of Artificial Sequence: Synthetic oligonucleotide
uguauuguucgaacucugu

SEQ ID NO: 1645214 - RNA, 19 nt, Artificial Sequence
  Description of Artificial Sequence: Synthetic oligonucleotide
ucagcuaauucacacccau

SEQ ID NO: 1645215 - RNA, 19 nt, Artificial Sequence
  Description of Artificial Sequence: Synthetic oligonucleotide
ucaaaagguucaaagucuu

SEQ ID NO: 1645216 - RNA, 19 nt, Artificial Sequence
  Description of Artificial Sequence: Synthetic oligonucleotide
ugccgaaagcuccacaacu

SEQ ID NO: 1645217 - RNA, 19 nt, Artificial Sequence
  Description of Artificial Sequence: Synthetic oligonucleotide
aaauacgcugcucccggcu

SEQ ID NO: 1645218 - RNA, 19 nt, Artificial Sequence
  Description of Artificial Sequence: Synthetic oligonucleotide
cucggugacauccggaggc

SEQ ID NO: 1645219 - RNA, 19 nt, Artificial Sequence
  Description of Artificial Sequence: Synthetic oligonucleotide
caacaccuuaacuggaggc

SEQ ID NO: 1645220 - RNA, 19 nt, Artificial Sequence
  Description of Artificial Sequence: Synthetic oligonucleotide
uuuucgacccagguaagug

SEQ ID NO: 1645221 - RNA, 19 nt, Artificial Sequence
  Description of Artificial Sequence: Synthetic oligonucleotide
auacuguacugucuccggg

SEQ ID NO: 1645222 - RNA, 19 nt, Artificial Sequence
  Description of Artificial Sequence: Synthetic oligonucleotide
auagacaaucugcagcccu

SEQ ID NO: 1645223 - RNA, 19 nt, Artificial Sequence
  Description of Artificial Sequence: Synthetic oligonucleotide
auguucucagcuaauucac

SEQ ID NO: 1645224 - RNA, 19 nt, Artificial Sequence
  Description of Artificial Sequence: Synthetic oligonucleotide
aauuuccuacacacaacag

SEQ ID NO: 1645225 - RNA, 19 nt, Artificial Sequence
  Description of Artificial Sequence: Synthetic oligonucleotide
acauaugucugaauaggag

SEQ ID NO: 1645226 - RNA, 19 nt, Artificial Sequence
  Description of Artificial Sequence: Synthetic oligonucleotide
gaauaaaacaucaaacuuu

SEQ ID NO: 1645227 - RNA, 19 nt, Artificial Sequence
  Description of Artificial Sequence: Synthetic oligonucleotide
uaucaacaccuuaacugga

SEQ ID NO: 1645228 - RNA, 19 nt, Artificial Sequence
  Description of Artificial Sequence: Synthetic oligonucleotide
auaugucugaauaggagcu

SEQ ID NO: 1645229 - RNA, 19 nt, Artificial Sequence
  Description of Artificial Sequence: Synthetic oligonucleotide
uuucgacccagguaaguga

SEQ ID NO: 1645230 - RNA, 19 nt, Artificial Sequence
  Description of Artificial Sequence: Synthetic oligonucleotide
uagacaaucugcagcccug

SEQ ID NO: 1645231 - RNA, 19 nt, Artificial Sequence
  Description of Artificial Sequence: Synthetic oligonucleotide
uuuccuauagcugcugccu

SEQ ID NO: 1645232 - RNA, 19 nt, Artificial Sequence
  Description of Artificial Sequence: Synthetic oligonucleotide
ucugccgaaagcuccacaa

SEQ ID NO: 1645233 - RNA, 19 nt, Artificial Sequence
  Description of Artificial Sequence: Synthetic oligonucleotide
gacuugcuaucccugcccg

SEQ ID NO: 1645234 - RNA, 19 nt, Artificial Sequence
  Description of Artificial Sequence: Synthetic oligonucleotide
gaucgaagaagaauugaca

SEQ ID NO: 1645235 - RNA, 19 nt, Artificial Sequence
  Description of Artificial Sequence: Synthetic oligonucleotide
uaaggauucucggugacau

SEQ ID NO: 1645236 - RNA, 19 nt, Artificial Sequence
  Description of Artificial Sequence: Synthetic oligonucleotide
uugaguagagccgaagaaa

SEQ ID NO: 1645237 - RNA, 19 nt, Artificial Sequence
  Description of Artificial Sequence: Synthetic oligonucleotide
gaagacacguccuugggcu

SEQ ID NO: 1645238 - RNA, 19 nt, Artificial Sequence
  Description of Artificial Sequence: Synthetic oligonucleotide
cuugggcuaaaacugugac

SEQ ID NO: 1645239 - RNA, 19 nt, Artificial Sequence
  Description of Artificial Sequence: Synthetic oligonucleotide
guuguuuggcaccaagcac

SEQ ID NO: 1645240 - RNA, 19 nt, Artificial Sequence
  Description of Artificial Sequence: Synthetic oligonucleotide
gacugguaguguccaauag

SEQ ID NO: 1645241 - RNA, 19 nt, Artificial Sequence
  Description of Artificial Sequence: Synthetic oligonucleotide
cucucaaacaggacacagc

SEQ ID NO: 1645242 - RNA, 19 nt, Artificial Sequence
  Description of Artificial Sequence: Synthetic oligonucleotide
uccacaagccaagagucgc

SEQ ID NO: 1645243 - RNA, 19 nt, Artificial Sequence
  Description of Artificial Sequence: Synthetic oligonucleotide
cagauaagccuccuuuagc

SEQ ID NO: 1645244 - RNA, 19 nt, Artificial Sequence
  Description of Artificial Sequence: Synthetic oligonucleotide
agcaucuugaguagagccg

SEQ ID NO: 1645245 - RNA, 19 nt, Artificial Sequence
  Description of Artificial Sequence: Synthetic oligonucleotide
caaugugugccaauguuga

SEQ ID NO: 1645246 - RNA, 19 nt, Artificial Sequence
  Description of Artificial Sequence: Synthetic oligonucleotide
acaagccaagagucgcagc

SEQ ID NO: 1645247 - RNA, 19 nt, Artificial Sequence
  Description of Artificial Sequence: Synthetic oligonucleotide
guacauggucaucagauaa

SEQ ID NO: 1645248 - RNA, 19 nt, Artificial Sequence
  Description of Artificial Sequence: Synthetic oligonucleotide
guaccucccuuccaaauug

SEQ ID NO: 1645249 - RNA, 19 nt, Artificial Sequence
  Description of Artificial Sequence: Synthetic oligonucleotide
aagaaauuuccuacacaca

SEQ ID NO: 1645250 - RNA, 19 nt, Artificial Sequence
  Description of Artificial Sequence: Synthetic oligonucleotide
guagaugaccguuuccuuc

SEQ ID NO: 1645251 - RNA, 19 nt, Artificial Sequence
  Description of Artificial Sequence: Synthetic oligonucleotide
gaugauggcuccuauaauu

SEQ ID NO: 1645252 - RNA, 19 nt, Artificial Sequence
  Description of Artificial Sequence: Synthetic oligonucleotide
aaggauucucggugacauc

SEQ ID NO: 1645253 - RNA, 19 nt, Artificial Sequence
  Description of Artificial Sequence: Synthetic oligonucleotide
ucugaauaggagcuuucuu

SEQ ID NO: 1645254 - RNA, 19 nt, Artificial Sequence
  Description of Artificial Sequence: Synthetic oligonucleotide
auucagaucgaagaagaau

SEQ ID NO: 1645255 - RNA, 19 nt, Artificial Sequence
  Description of Artificial Sequence: Synthetic oligonucleotide
ucucggugacauccggagg

SEQ ID NO: 1645256 - RNA, 19 nt, Artificial Sequence
  Description of Artificial Sequence: Synthetic oligonucleotide
uccacgucuccacaagcca

SEQ ID NO: 1645257 - RNA, 19 nt, Artificial Sequence
  Description of Artificial Sequence: Synthetic oligonucleotide
accaccaaaugcuuuucca

SEQ ID NO: 1645258 - RNA, 19 nt, Artificial Sequence
  Description of Artificial Sequence: Synthetic oligonucleotide
aucguuucagaguagccuu

SEQ ID NO: 1645259 - RNA, 19 nt, Artificial Sequence
  Description of Artificial Sequence: Synthetic oligonucleotide
guagcaaugugugccaaug

SEQ ID NO: 1645260 - RNA, 19 nt, Artificial Sequence
  Description of Artificial Sequence: Synthetic oligonucleotide
uugggcuaaaacugugacu

SEQ ID NO: 1645261 - RNA, 19 nt, Artificial Sequence
  Description of Artificial Sequence: Synthetic oligonucleotide
cuagucauccagagugaag

SEQ ID NO: 1645262 - RNA, 19 nt, Artificial Sequence
  Description of Artificial Sequence: Synthetic oligonucleotide
uccggaagcgucgagccag

SEQ ID NO: 1645263 - RNA, 19 nt, Artificial Sequence
  Description of Artificial Sequence: Synthetic oligonucleotide
uacuguacugucuccgggu

SEQ ID NO: 1645264 - RNA, 19 nt, Artificial Sequence
  Description of Artificial Sequence: Synthetic oligonucleotide
gagacuugcuaucccugcc

SEQ ID NO: 1645265 - RNA, 19 nt, Artificial Sequence
  Description of Artificial Sequence: Synthetic oligonucleotide
ugagccaucggggauuaca

SEQ ID NO: 1645266 - RNA, 19 nt, Artificial Sequence
  Description of Artificial Sequence: Synthetic oligonucleotide
uugaccaccaaaugcuuuu

SEQ ID NO: 1645267 - RNA, 19 nt, Artificial Sequence
  Description of Artificial Sequence: Synthetic oligonucleotide
gcacauaugucugaauagg

SEQ ID NO: 1645268 - RNA, 19 nt, Artificial Sequence
  Description of Artificial Sequence: Synthetic oligonucleotide
agacucucgguaaggauuc

SEQ ID NO: 1645269 - RNA, 19 nt, Artificial Sequence
  Description of Artificial Sequence: Synthetic oligonucleotide
caauguugaccaccaaaug

SEQ ID NO: 1645270 - RNA, 19 nt, Artificial Sequence
  Description of Artificial Sequence: Synthetic oligonucleotide
augaccguuuccuucccug

SEQ ID NO: 1645271 - RNA, 19 nt, Artificial Sequence
  Description of Artificial Sequence: Synthetic oligonucleotide
caggaugaguacaugguca

SEQ ID NO: 1645272 - RNA, 19 nt, Artificial Sequence
  Description of Artificial Sequence: Synthetic oligonucleotide
uucgaacucuguugaauaa

SEQ ID NO: 1645273 - RNA, 19 nt, Artificial Sequence
  Description of Artificial Sequence: Synthetic oligonucleotide
agaugaccguuuccuuccc

SEQ ID NO: 1645274 - RNA, 19 nt, Artificial Sequence
  Description of Artificial Sequence: Synthetic oligonucleotide
agcaaugugugccaauguu

SEQ ID NO: 1645275 - RNA, 19 nt, Artificial Sequence
  Description of Artificial Sequence: Synthetic oligonucleotide
ccaacaagguccuggaggc

SEQ ID NO: 1645276 - RNA, 19 nt, Artificial Sequence
  Description of Artificial Sequence: Synthetic oligonucleotide
uccuuacuaauuugacacu

SEQ ID NO: 1645277 - RNA, 19 nt, Artificial Sequence
  Description of Artificial Sequence: Synthetic oligonucleotide
aggaauguugagaauggcu

SEQ ID NO: 1645278 - RNA, 19 nt, Artificial Sequence
  Description of Artificial Sequence: Synthetic oligonucleotide
agccaucggggauuacagc

SEQ ID NO: 1645279 - RNA, 19 nt, Artificial Sequence
  Description of Artificial Sequence: Synthetic oligonucleotide
uuacagccugugcugggcc

SEQ ID NO: 1645280 - RNA, 19 nt, Artificial Sequence
  Description of Artificial Sequence: Synthetic oligonucleotide
gcuccuauaauuucucuca

SEQ ID NO: 1645281 - RNA, 19 nt, Artificial Sequence
  Description of Artificial Sequence: Synthetic oligonucleotide
uccuauaauuucucucaaa

SEQ ID NO: 1645282 - RNA, 19 nt, Artificial Sequence
  Description of Artificial Sequence: Synthetic oligonucleotide
uguucgaacucuguugaau

SEQ ID NO: 1645283 - RNA, 19 nt, Artificial Sequence
  Description of Artificial Sequence: Synthetic oligonucleotide
cuccacaagccaagagucg

SEQ ID NO: 1645284 - RNA, 19 nt, Artificial Sequence
  Description of Artificial Sequence: Synthetic oligonucleotide
aucaaacuuuccguccacg

SEQ ID NO: 1645285 - RNA, 19 nt, Artificial Sequence
  Description of Artificial Sequence: Synthetic oligonucleotide
auacuccucccacucagca

SEQ ID NO: 1645286 - RNA, 19 nt, Artificial Sequence
  Description of Artificial Sequence: Synthetic oligonucleotide
uucgacccagguaagugau

SEQ ID NO: 1645287 - RNA, 19 nt, Artificial Sequence
  Description of Artificial Sequence: Synthetic oligonucleotide
uccaauaggcaggaugagu

SEQ ID NO: 1645288 - RNA, 19 nt, Artificial Sequence
  Description of Artificial Sequence: Synthetic oligonucleotide
caaucugcagcccugagcu

SEQ ID NO: 1645289 - RNA, 19 nt, Artificial Sequence
  Description of Artificial Sequence: Synthetic oligonucleotide
gacauccggaggcugaaga

SEQ ID NO: 1645290 - RNA, 19 nt, Artificial Sequence
  Description of Artificial Sequence: Synthetic oligonucleotide
auugacaggcugguucuuc

SEQ ID NO: 1645291 - RNA, 19 nt, Artificial Sequence
  Description of Artificial Sequence: Synthetic oligonucleotide
cucuuccuuacuaauuuga

SEQ ID NO: 1645292 - RNA, 19 nt, Artificial Sequence
  Description of Artificial Sequence: Synthetic oligonucleotide
caauaggcaggaugaguac

SEQ ID NO: 1645293 - RNA, 19 nt, Artificial Sequence
  Description of Artificial Sequence: Synthetic oligonucleotide
agucuuuccggaagcgucg

SEQ ID NO: 1645294 - RNA, 19 nt, Artificial Sequence
  Description of Artificial Sequence: Synthetic oligonucleotide
gccaucggggauuacagcc

SEQ ID NO: 1645295 - RNA, 19 nt, Artificial Sequence
  Description of Artificial Sequence: Synthetic oligonucleotide
cacauaugucugaauagga

SEQ ID NO: 1645296 - RNA, 19 nt, Artificial Sequence
  Description of Artificial Sequence: Synthetic oligonucleotide
ucagcaucuugaguagagc

SEQ ID NO: 1645297 - RNA, 19 nt, Artificial Sequence
  Description of Artificial Sequence: Synthetic oligonucleotide
cagagugaagucaaaaggu

SEQ ID NO: 1645298 - RNA, 19 nt, Artificial Sequence
  Description of Artificial Sequence: Synthetic oligonucleotide
cuguauuguucgaacucug

SEQ ID NO: 1645299 - RNA, 19 nt, Artificial Sequence
  Description of Artificial Sequence: Synthetic oligonucleotide
gagccaucggggauuacag

SEQ ID NO: 1645300 - RNA, 19 nt, Artificial Sequence
  Description of Artificial Sequence: Synthetic oligonucleotide
aucaacaccuuaacuggag

SEQ ID NO: 1645301 - RNA, 19 nt, Artificial Sequence
  Description of Artificial Sequence: Synthetic oligonucleotide
ugaccguuuccuucccugc

SEQ ID NO: 1645302 - RNA, 19 nt, Artificial Sequence
  Description of Artificial Sequence: Synthetic oligonucleotide
aguaccucccuuccaaauu

SEQ ID NO: 1645303 - RNA, 19 nt, Artificial Sequence
  Description of Artificial Sequence: Synthetic oligonucleotide
gaccaccaaaugcuuuucc

SEQ ID NO: 1645304 - RNA, 19 nt, Artificial Sequence
  Description of Artificial Sequence: Synthetic oligonucleotide
uuuccguccacgucuccac

SEQ ID NO: 1645305 - RNA, 19 nt, Artificial Sequence
  Description of Artificial Sequence: Synthetic oligonucleotide
aacuggaggcgaacacagc

SEQ ID NO: 1645306 - RNA, 19 nt, Artificial Sequence
  Description of Artificial Sequence: Synthetic oligonucleotide
cuuugucuagucauccaga

SEQ ID NO: 1645307 - RNA, 19 nt, Artificial Sequence
  Description of Artificial Sequence: Synthetic oligonucleotide
accaaaugcuuuuccacuu

SEQ ID NO: 1645308 - RNA, 19 nt, Artificial Sequence
  Description of Artificial Sequence: Synthetic oligonucleotide
agggcaagguagcaaugug

SEQ ID NO: 1645309 - RNA, 19 nt, Artificial Sequence
  Description of Artificial Sequence: Synthetic oligonucleotide
aguacauggucaucagaua

SEQ ID NO: 1645310 - RNA, 19 nt, Artificial Sequence
  Description of Artificial Sequence: Synthetic oligonucleotide
cugaggagacuugcuaucc

SEQ ID NO: 1645311 - RNA, 19 nt, Artificial Sequence
  Description of Artificial Sequence: Synthetic oligonucleotide
cuaauucacacccaucagu

SEQ ID NO: 1645312 - RNA, 19 nt, Artificial Sequence
  Description of Artificial Sequence: Synthetic oligonucleotide
aacuuuccguccacgucuc

SEQ ID NO: 1645313 - RNA, 19 nt, Artificial Sequence
  Description of Artificial Sequence: Synthetic oligonucleotide
gaguacauggucaucagau

SEQ ID NO: 1645314 - RNA, 19 nt, Artificial Sequence
  Description of Artificial Sequence: Synthetic oligonucleotide
agggcuggcaaggcaaaac

SEQ ID NO: 1645315 - RNA, 19 nt, Artificial Sequence
  Description of Artificial Sequence: Synthetic oligonucleotide
guucgaacucuguugaaua

SEQ ID NO: 1645316 - RNA, 19 nt, Artificial Sequence
  Description of Artificial Sequence: Synthetic oligonucleotide
agaucaaaguucccacuuu

SEQ ID NO: 1645317 - RNA, 19 nt, Artificial Sequence
  Description of Artificial Sequence: Synthetic oligonucleotide
cacgucuccacaagccaag

SEQ ID NO: 1645318 - RNA, 19 nt, Artificial Sequence
  Description of Artificial Sequence: Synthetic oligonucleotide
cuaaaacugugacucggga

SEQ ID NO: 1645319 - RNA, 19 nt, Artificial Sequence
  Description of Artificial Sequence: Synthetic oligonucleotide
aggaacauguuuuccuaua

SEQ ID NO: 1645320 - RNA, 19 nt, Artificial Sequence
  Description of Artificial Sequence: Synthetic oligonucleotide
ucgaacucuguugaauaaa

SEQ ID NO: 1645321 - RNA, 19 nt, Artificial Sequence
  Description of Artificial Sequence: Synthetic oligonucleotide
uugcuaucccugcccguag

SEQ ID NO: 1645322 - RNA, 19 nt, Artificial Sequence
  Description of Artificial Sequence: Synthetic oligonucleotide
ucuagucauccagagugaa

SEQ ID NO: 1645323 - RNA, 19 nt, Artificial Sequence
  Description of Artificial Sequence: Synthetic oligonucleotide
aagaaucguuucagaguag

SEQ ID NO: 1645324 - RNA, 19 nt, Artificial Sequence
  Description of Artificial Sequence: Synthetic oligonucleotide
ugacugguaguguccaaua

SEQ ID NO: 1645325 - RNA, 19 nt, Artificial Sequence
  Description of Artificial Sequence: Synthetic oligonucleotide
uaccucccuuccaaauugc

SEQ ID NO: 1645326 - RNA, 19 nt, Artificial Sequence
  Description of Artificial Sequence: Synthetic oligonucleotide
auccguaacacagcagcug

SEQ ID NO: 1645327 - RNA, 19 nt, Artificial Sequence
  Description of Artificial Sequence: Synthetic oligonucleotide
cugaauaggagcuuucuuu

SEQ ID NO: 1645328 - RNA, 19 nt, Artificial Sequence
  Description of Artificial Sequence: Synthetic oligonucleotide
ccuuugucuagucauccag

SEQ ID NO: 1645329 - RNA, 19 nt, Artificial Sequence
  Description of Artificial Sequence: Synthetic oligonucleotide
ucgggacugguucacucaa

SEQ ID NO: 1645330 - RNA, 19 nt, Artificial Sequence
  Description of Artificial Sequence: Synthetic oligonucleotide
accaagcacauaugucuga

SEQ ID NO: 1645331 - RNA, 19 nt, Artificial Sequence
  Description of Artificial Sequence: Synthetic oligonucleotide
gguaagugauguucucagc

SEQ ID NO: 1645332 - RNA, 19 nt, Artificial Sequence
  Description of Artificial Sequence: Synthetic oligonucleotide
cugucuccggguuguuugg

SEQ ID NO: 1645333 - RNA, 19 nt, Artificial Sequence
  Description of Artificial Sequence: Synthetic oligonucleotide
gcaaugugugccaauguug

SEQ ID NO: 1645334 - RNA, 19 nt, Artificial Sequence
  Description of Artificial Sequence: Synthetic oligonucleotide
uccugugccuggguaauga

SEQ ID NO: 1645335 - RNA, 19 nt, Artificial Sequence
  Description of Artificial Sequence: Synthetic oligonucleotide
aucuugaguagagccgaag

SEQ ID NO: 1645336 - RNA, 19 nt, Artificial Sequence
  Description of Artificial Sequence: Synthetic oligonucleotide
acuuuccguccacgucucc

SEQ ID NO: 1645337 - RNA, 19 nt, Artificial Sequence
  Description of Artificial Sequence: Synthetic oligonucleotide
gaagaauugacaggcuggu

SEQ ID NO: 1645338 - RNA, 19 nt, Artificial Sequence
  Description of Artificial Sequence: Synthetic oligonucleotide
accuuaacuggaggcgaac

SEQ ID NO: 1645339 - RNA, 19 nt, Artificial Sequence
  Description of Artificial Sequence: Synthetic oligonucleotide
gacucuuaaagaaucguuu

SEQ ID NO: 1645340 - RNA, 19 nt, Artificial Sequence
  Description of Artificial Sequence: Synthetic oligonucleotide
caggaaugaccugaagcug

SEQ ID NO: 1645341 - RNA, 19 nt, Artificial Sequence
  Description of Artificial Sequence: Synthetic oligonucleotide
uaguguccaauaggcagga

SEQ ID NO: 1645342 - RNA, 19 nt, Artificial Sequence
  Description of Artificial Sequence: Synthetic oligonucleotide
ucggggauuacagccugug

SEQ ID NO: 1645343 - RNA, 19 nt, Artificial Sequence
  Description of Artificial Sequence: Synthetic oligonucleotide
acauccggaggcugaagau

SEQ ID NO: 1645344 - RNA, 19 nt, Artificial Sequence
  Description of Artificial Sequence: Synthetic oligonucleotide
caagagucgcagcggcugc

SEQ ID NO: 1645345 - RNA, 19 nt, Artificial Sequence
  Description of Artificial Sequence: Synthetic oligonucleotide
acucucgguaaggauucuc

SEQ ID NO: 1645346 - RNA, 19 nt, Artificial Sequence
  Description of Artificial Sequence: Synthetic oligonucleotide
ugcuaucccugcccguaga

SEQ ID NO: 1645347 - RNA, 19 nt, Artificial Sequence
  Description of Artificial Sequence: Synthetic oligonucleotide
guagagccgaagaaauuuc

SEQ ID NO: 1645348 - RNA, 19 nt, Artificial Sequence
  Description of Artificial Sequence: Synthetic oligonucleotide
gggaagacacguccuuggg

SEQ ID NO: 1645349 - RNA, 19 nt, Artificial Sequence
  Description of Artificial Sequence: Synthetic oligonucleotide
ugcguggcugcuuggccug

SEQ ID NO: 1645350 - RNA, 19 nt, Artificial Sequence
  Description of Artificial Sequence: Synthetic oligonucleotide
cagucuuauacuccuccca

SEQ ID NO: 1645351 - RNA, 19 nt, Artificial Sequence
  Description of Artificial Sequence: Synthetic oligonucleotide
uuccuauagcugcugccuu

SEQ ID NO: 1645352 - RNA, 19 nt, Artificial Sequence
  Description of Artificial Sequence: Synthetic oligonucleotide
cuccggguuguuuggcacc

SEQ ID NO: 1645353 - RNA, 19 nt, Artificial Sequence
  Description of Artificial Sequence: Synthetic oligonucleotide
uacagccugugcugggcca

SEQ ID NO: 1645354 - RNA, 19 nt, Artificial Sequence
  Description of Artificial Sequence: Synthetic oligonucleotide
cacaagccaagagucgcag

SEQ ID NO: 1645355 - RNA, 19 nt, Artificial Sequence
  Description of Artificial Sequence: Synthetic oligonucleotide
uggcuccuauaauuucucu

SEQ ID NO: 1645356 - RNA, 19 nt, Artificial Sequence
  Description of Artificial Sequence: Synthetic oligonucleotide
ucguuucagaguagccuua

SEQ ID NO: 1645357 - RNA, 19 nt, Artificial Sequence
  Description of Artificial Sequence: Synthetic oligonucleotide
augauggcuccuauaauuu

SEQ ID NO: 1645358 - RNA, 19 nt, Artificial Sequence
  Description of Artificial Sequence: Synthetic oligonucleotide
gugccuggguaaugaaggc

SEQ ID NO: 1645359 - RNA, 19 nt, Artificial Sequence
  Description of Artificial Sequence: Synthetic oligonucleotide
uccuauagcugcugccuuu

SEQ ID NO: 1645360 - RNA, 19 nt, Artificial Sequence
  Description of Artificial Sequence: Synthetic oligonucleotide
ucuccugugucgaguucaa

SEQ ID NO: 1645361 - RNA, 19 nt, Artificial Sequence
  Description of Artificial Sequence: Synthetic oligonucleotide
ugucaggaauguugagaau

SEQ ID NO: 1645362 - RNA, 19 nt, Artificial Sequence
  Description of Artificial Sequence: Synthetic oligonucleotide
auaggcaggaugaguacau

SEQ ID NO: 1645363 - RNA, 19 nt, Artificial Sequence
  Description of Artificial Sequence: Synthetic oligonucleotide
caucuuuaauaucauccgu

SEQ ID NO: 1645364 - RNA, 19 nt, Artificial Sequence
  Description of Artificial Sequence: Synthetic oligonucleotide
uaugucugaauaggagcuu

SEQ ID NO: 1645365 - RNA, 19 nt, Artificial Sequence
  Description of Artificial Sequence: Synthetic oligonucleotide
aagacacguccuugggcua

SEQ ID NO: 1645366 - RNA, 19 nt, Artificial Sequence
  Description of Artificial Sequence: Synthetic oligonucleotide
ggggauuacagccugugcu

SEQ ID NO: 1645367 - RNA, 19 nt, Artificial Sequence
  Description of Artificial Sequence: Synthetic oligonucleotide
gcaggaugaguacaugguc

SEQ ID NO: 1645368 - RNA, 19 nt, Artificial Sequence
  Description of Artificial Sequence: Synthetic oligonucleotide
gguaaggauucucggugac

SEQ ID NO: 1645369 - RNA, 19 nt, Artificial Sequence
  Description of Artificial Sequence: Synthetic oligonucleotide
cacguccuugggcuaaaac

SEQ ID NO: 1645370 - RNA, 19 nt, Artificial Sequence
  Description of Artificial Sequence: Synthetic oligonucleotide
ccgaagaaauuuccuacac

SEQ ID NO: 1645371 - RNA, 19 nt, Artificial Sequence
  Description of Artificial Sequence: Synthetic oligonucleotide
uuguucgaacucuguugaa

SEQ ID NO: 1645372 - RNA, 19 nt, Artificial Sequence
  Description of Artificial Sequence: Synthetic oligonucleotide
uuccggaagcgucgagcca

SEQ ID NO: 1645373 - RNA, 19 nt, Artificial Sequence
  Description of Artificial Sequence: Synthetic oligonucleotide
gcaagguagcaaugugugc

SEQ ID NO: 1645374 - RNA, 19 nt, Artificial Sequence
  Description of Artificial Sequence: Synthetic oligonucleotide
uccggguuguuuggcacca

SEQ ID NO: 1645375 - RNA, 19 nt, Artificial Sequence
  Description of Artificial Sequence: Synthetic oligonucleotide
cagcuaauucacacccauc

SEQ ID NO: 1645376 - RNA, 19 nt, Artificial Sequence
  Description of Artificial Sequence: Synthetic oligonucleotide
cugccgaaagcuccacaac

SEQ ID NO: 1645377 - RNA, 19 nt, Artificial Sequence
  Description of Artificial Sequence: Synthetic oligonucleotide
cauuguucucagggaagac

SEQ ID NO: 1645378 - RNA, 19 nt, Artificial Sequence
  Description of Artificial Sequence: Synthetic oligonucleotide
guauuguucgaacucuguu

SEQ ID NO: 1645379 - RNA, 19 nt, Artificial Sequence
  Description of Artificial Sequence: Synthetic oligonucleotide
cccgacucuuaaagaaucg

SEQ ID NO: 1645380 - RNA, 19 nt, Artificial Sequence
  Description of Artificial Sequence: Synthetic oligonucleotide
ggcaaggcaaaaccaacaa

SEQ ID NO: 1645381 - RNA, 19 nt, Artificial Sequence
  Description of Artificial Sequence: Synthetic oligonucleotide
gggcuaaaacugugacucg

SEQ ID NO: 1645382 - RNA, 19 nt, Artificial Sequence
  Description of Artificial Sequence: Synthetic oligonucleotide
auguuuuccuauagcugcu

SEQ ID NO: 1645383 - RNA, 19 nt, Artificial Sequence
  Description of Artificial Sequence: Synthetic oligonucleotide
auacgcugcucccggcugu

SEQ ID NO: 1645384 - RNA, 19 nt, Artificial Sequence
  Description of Artificial Sequence: Synthetic oligonucleotide
cuguacugucuccggguug

SEQ ID NO: 1645385 - RNA, 19 nt, Artificial Sequence
  Description of Artificial Sequence: Synthetic oligonucleotide
gugacucgggacugguuca

SEQ ID NO: 1645386 - RNA, 19 nt, Artificial Sequence
  Description of Artificial Sequence: Synthetic oligonucleotide
acuugcuaucccugcccgu

SEQ ID NO: 1645387 - RNA, 19 nt, Artificial Sequence
  Description of Artificial Sequence: Synthetic oligonucleotide
gccgaagaaauuuccuaca

SEQ ID NO: 1645388 - RNA, 19 nt, Artificial Sequence
  Description of Artificial Sequence: Synthetic oligonucleotide
guaaggauucucggugaca

SEQ ID NO: 1645389 - RNA, 19 nt, Artificial Sequence
  Description of Artificial Sequence: Synthetic oligonucleotide
ugaccaccaaaugcuuuuc

SEQ ID NO: 1645390 - RNA, 19 nt, Artificial Sequence
  Description of Artificial Sequence: Synthetic oligonucleotide
cuaucccugcccguagaug

SEQ ID NO: 1645391 - RNA, 19 nt, Artificial Sequence
  Description of Artificial Sequence: Synthetic oligonucleotide
ugcccguagaugaccguuu

SEQ ID NO: 1645392 - RNA, 19 nt, Artificial Sequence
  Description of Artificial Sequence: Synthetic oligonucleotide
cucagcuaauucacaccca

SEQ ID NO: 1645393 - RNA, 19 nt, Artificial Sequence
  Description of Artificial Sequence: Synthetic oligonucleotide
ugucuccggguuguuuggc

SEQ ID NO: 1645394 - RNA, 19 nt, Artificial Sequence
  Description of Artificial Sequence: Synthetic oligonucleotide
ggaauguugagaauggcuu

SEQ ID NO: 1645395 - RNA, 19 nt, Artificial Sequence
  Description of Artificial Sequence: Synthetic oligonucleotide
ggauucucggugacauccg

SEQ ID NO: 1645396 - RNA, 19 nt, Artificial Sequence
  Description of Artificial Sequence: Synthetic oligonucleotide
cagacucucgguaaggauu

SEQ ID NO: 1645397 - RNA, 19 nt, Artificial Sequence
  Description of Artificial Sequence: Synthetic oligonucleotide
gcuuccaguuaaagaaacc

SEQ ID NO: 1645398 - RNA, 19 nt, Artificial Sequence
  Description of Artificial Sequence: Synthetic oligonucleotide
cuccuauaauuucucucaa

SEQ ID NO: 1645399 - RNA, 19 nt, Artificial Sequence
  Description of Artificial Sequence: Synthetic oligonucleotide
cucgguaaggauucucggu

SEQ ID NO: 1645400 - RNA, 19 nt, Artificial Sequence
  Description of Artificial Sequence: Synthetic oligonucleotide
ggucaucagauaagccucc

SEQ ID NO: 1645401 - RNA, 19 nt, Artificial Sequence
  Description of Artificial Sequence: Synthetic oligonucleotide
cuuuccguccacgucucca

SEQ ID NO: 1645402 - RNA, 19 nt, Artificial Sequence
  Description of Artificial Sequence: Synthetic oligonucleotide
auucucggugacauccgga

SEQ ID NO: 1645403 - RNA, 19 nt, Artificial Sequence
  Description of Artificial Sequence: Synthetic oligonucleotide
ucccugcccguagaugacc

SEQ ID NO: 1645404 - RNA, 19 nt, Artificial Sequence
  Description of Artificial Sequence: Synthetic oligonucleotide
cuccuuuagccagggcaag

SEQ ID NO: 1645405 - RNA, 19 nt, Artificial Sequence
  Description of Artificial Sequence: Synthetic oligonucleotide
ugacucgggacugguucac

SEQ ID NO: 1645406 - RNA, 19 nt, Artificial Sequence
  Description of Artificial Sequence: Synthetic oligonucleotide
ggaauuuccaacagcucua

SEQ ID NO: 1645407 - RNA, 19 nt, Artificial Sequence
  Description of Artificial Sequence: Synthetic oligonucleotide
gccgaaagcuccacaacug

SEQ ID NO: 1645408 - RNA, 19 nt, Artificial Sequence
  Description of Artificial Sequence: Synthetic oligonucleotide
gucuagucauccagaguga

SEQ ID NO: 1645409 - RNA, 19 nt, Artificial Sequence
  Description of Artificial Sequence: Synthetic oligonucleotide
cuugcuaucccugcccgua

SEQ ID NO: 1645410 - RNA, 19 nt, Artificial Sequence
  Description of Artificial Sequence: Synthetic oligonucleotide
gaauuuccaacagcucuau

SEQ ID NO: 1645411 - RNA, 19 nt, Artificial Sequence
  Description of Artificial Sequence: Synthetic oligonucleotide
cgaaagcuccacaacugac

SEQ ID NO: 1645412 - RNA, 19 nt, Artificial Sequence
  Description of Artificial Sequence: Synthetic oligonucleotide
ggcaccaagcacauauguc

SEQ ID NO: 1645413 - RNA, 19 nt, Artificial Sequence
  Description of Artificial Sequence: Synthetic oligonucleotide
cauccguaacacagcagcu

SEQ ID NO: 1645414 - RNA, 19 nt, Artificial Sequence
  Description of Artificial Sequence: Synthetic oligonucleotide
agacacguccuugggcuaa

SEQ ID NO: 1645415 - RNA, 19 nt, Artificial Sequence
  Description of Artificial Sequence: Synthetic oligonucleotide
cugccuccagucagccuug

SEQ ID NO: 1645416 - RNA, 19 nt, Artificial Sequence
  Description of Artificial Sequence: Synthetic oligonucleotide
gcuggcaaggcaaaaccaa

SEQ ID NO: 1645417 - RNA, 19 nt, Artificial Sequence
  Description of Artificial Sequence: Synthetic oligonucleotide
agcgucgagccagggucuc

SEQ ID NO: 1645418 - RNA, 19 nt, Artificial Sequence
  Description of Artificial Sequence: Synthetic oligonucleotide
uacgcugcucccggcugug

SEQ ID NO: 1645419 - RNA, 19 nt, Artificial Sequence
  Description of Artificial Sequence: Synthetic oligonucleotide
gaugaccguuuccuucccu

SEQ ID NO: 1645420 - RNA, 19 nt, Artificial Sequence
  Description of Artificial Sequence: Synthetic oligonucleotide
cgaacucuguugaauaaaa

SEQ ID NO: 1645421 - RNA, 19 nt, Artificial Sequence
  Description of Artificial Sequence: Synthetic oligonucleotide
cauccggaggcugaagaua

SEQ ID NO: 1645422 - RNA, 19 nt, Artificial Sequence
  Description of Artificial Sequence: Synthetic oligonucleotide
cugugucgaguucaacaua

SEQ ID NO: 1645423 - RNA, 19 nt, Artificial Sequence
  Description of Artificial Sequence: Synthetic oligonucleotide
ccguaacacagcagcugag

SEQ ID NO: 1645424 - RNA, 19 nt, Artificial Sequence
  Description of Artificial Sequence: Synthetic oligonucleotide
cccguagaugaccguuucc

SEQ ID NO: 1645425 - RNA, 19 nt, Artificial Sequence
  Description of Artificial Sequence: Synthetic oligonucleotide
ccugcguggcugcuuggcc

SEQ ID NO: 1645426 - RNA, 19 nt, Artificial Sequence
  Description of Artificial Sequence: Synthetic oligonucleotide
cucugccgaaagcuccaca

SEQ ID NO: 1645427 - RNA, 19 nt, Artificial Sequence
  Description of Artificial Sequence: Synthetic oligonucleotide
ccgaaagcuccacaacuga

SEQ ID NO: 1645428 - RNA, 19 nt, Artificial Sequence
  Description of Artificial Sequence: Synthetic oligonucleotide
cuggaggcgaacacagcau

SEQ ID NO: 1645429 - RNA, 19 nt, Artificial Sequence
  Description of Artificial Sequence: Synthetic oligonucleotide
cugcguggcugcuuggccu

SEQ ID NO: 1645430 - RNA, 19 nt, Artificial Sequence
  Description of Artificial Sequence: Synthetic oligonucleotide
gaguagccuuauacuucuc

SEQ ID NO: 1645431 - RNA, 19 nt, Artificial Sequence
  Description of Artificial Sequence: Synthetic oligonucleotide
ccugugucgaguucaacau

SEQ ID NO: 1645432 - RNA, 19 nt, Artificial Sequence
  Description of Artificial Sequence: Synthetic oligonucleotide
ggaugaguacauggucauc

SEQ ID NO: 1645433 - RNA, 19 nt, Artificial Sequence
  Description of Artificial Sequence: Synthetic oligonucleotide
gaguagagccgaagaaauu

SEQ ID NO: 1645434 - RNA, 19 nt, Artificial Sequence
  Description of Artificial Sequence: Synthetic oligonucleotide
cuccugugucgaguucaac

SEQ ID NO: 1645435 - RNA, 19 nt, Artificial Sequence
  Description of Artificial Sequence: Synthetic oligonucleotide
ccuuaacuggaggcgaaca

SEQ ID NO: 1645436 - RNA, 19 nt, Artificial Sequence
  Description of Artificial Sequence: Synthetic oligonucleotide
cugacugguaguguccaau

SEQ ID NO: 1645437 - RNA, 19 nt, Artificial Sequence
  Description of Artificial Sequence: Synthetic oligonucleotide
ccguccacgucuccacaag

SEQ ID NO: 1645438 - RNA, 19 nt, Artificial Sequence
  Description of Artificial Sequence: Synthetic oligonucleotide
gggcaagguagcaaugugu

SEQ ID NO: 1645439 - RNA, 19 nt, Artificial Sequence
  Description of Artificial Sequence: Synthetic oligonucleotide
cuccugugccuggguaaug

SEQ ID NO: 1645440 - RNA, 19 nt, Artificial Sequence
  Description of Artificial Sequence: Synthetic oligonucleotide
gcccguagaugaccguuuc

SEQ ID NO: 1645441 - RNA, 19 nt, Artificial Sequence
  Description of Artificial Sequence: Synthetic oligonucleotide
gugucgaguucaacauaaa

SEQ ID NO: 1645442 - RNA, 19 nt, Artificial Sequence
  Description of Artificial Sequence: Synthetic oligonucleotide
ccaguuaaagaaaccuuuu

SEQ ID NO: 1645443 - RNA, 19 nt, Artificial Sequence
  Description of Artificial Sequence: Synthetic oligonucleotide
cccagguaagugauguucu

SEQ ID NO: 1645444 - RNA, 19 nt, Artificial Sequence
  Description of Artificial Sequence: Synthetic oligonucleotide
gacacguccuugggcuaaa

SEQ ID NO: 1645445 - RNA, 19 nt, Artificial Sequence
  Description of Artificial Sequence: Synthetic oligonucleotide
ggcacaggaaugaccugaa

SEQ ID NO: 1645446 - RNA, 19 nt, Artificial Sequence
  Description of Artificial Sequence: Synthetic oligonucleotide
cggggauuacagccugugc

SEQ ID NO: 1645447 - RNA, 19 nt, Artificial Sequence
  Description of Artificial Sequence: Synthetic oligonucleotide
cgguaaggauucucgguga

SEQ ID NO: 1645448 - RNA, 19 nt, Artificial Sequence
  Description of Artificial Sequence: Synthetic oligonucleotide
ugccuccagucagccuugu

SEQ ID NO: 1645449 - RNA, 19 nt, Artificial Sequence
  Description of Artificial Sequence: Synthetic oligonucleotide
gacucgggacugguucacu

SEQ ID NO: 1645450 - RNA, 19 nt, Artificial Sequence
  Description of Artificial Sequence: Synthetic oligonucleotide
ccaucggggauuacagccu

SEQ ID NO: 1645451 - RNA, 19 nt, Artificial Sequence
  Description of Artificial Sequence: Synthetic oligonucleotide
gacucucgguaaggauucu

SEQ ID NO: 1645452 - RNA, 19 nt, Artificial Sequence
  Description of Artificial Sequence: Synthetic oligonucleotide
gcuaucccugcccguagau

SEQ ID NO: 1645453 - RNA, 19 nt, Artificial Sequence
  Description of Artificial Sequence: Synthetic oligonucleotide
ccaguaccucccuuccaaa

SEQ ID NO: 1645454 - RNA, 19 nt, Artificial Sequence
  Description of Artificial Sequence: Synthetic oligonucleotide
cgacucuuaaagaaucguu

SEQ ID NO: 1645455 - RNA, 19 nt, Artificial Sequence
  Description of Artificial Sequence: Synthetic oligonucleotide
gccuuuccagacucucggu

SEQ ID NO: 1645456 - RNA, 19 nt, Artificial Sequence
  Description of Artificial Sequence: Synthetic oligonucleotide
gccuccagucagccuuguc

SEQ ID NO: 1645457 - RNA, 19 nt, Artificial Sequence
  Description of Artificial Sequence: Synthetic oligonucleotide
gcgucgagccagggucucc

SEQ ID NO: 1645458 - RNA, 19 nt, Artificial Sequence
  Description of Artificial Sequence: Synthetic oligonucleotide
cccggcugugcaaucugcu

SEQ ID NO: 1645459 - RNA, 19 nt, Artificial Sequence
  Description of Artificial Sequence: Synthetic oligonucleotide
cggaagcgucgagccaggg

SEQ ID NO: 1645460 - RNA, 19 nt, Artificial Sequence
  Description of Artificial Sequence: Synthetic oligonucleotide
ccggcugugcaaucugcuu

SEQ ID NO: 1645461 - RNA, 19 nt, Artificial Sequence
  Description of Artificial Sequence: Synthetic oligonucleotide
ccggguuguuuggcaccaa

SEQ ID NO: 1645462 - RNA, 19 nt, Artificial Sequence
  Description of Artificial Sequence: Synthetic oligonucleotide
aauagaaauacauaggagg

SEQ ID NO: 1645463 - RNA, 19 nt, Artificial Sequence
  Description of Artificial Sequence: Synthetic oligonucleotide
aaauaauagaaauacauag

SEQ ID NO: 1645464 - RNA, 19 nt, Artificial Sequence
  Description of Artificial Sequence: Synthetic oligonucleotide
gaugauaucauuuacaaca

SEQ ID NO: 1645465 - RNA, 19 nt, Artificial Sequence
  Description of Artificial Sequence: Synthetic oligonucleotide
aaaagaugauaucauuuac

SEQ ID NO: 1645466 - RNA, 19 nt, Artificial Sequence
  Description of Artificial Sequence: Synthetic oligonucleotide
aaaacauaguuguagcuag

SEQ ID NO: 1645467 - RNA, 19 nt, Artificial Sequence
  Description of Artificial Sequence: Synthetic oligonucleotide
aaaggauguaccaugaugg

SEQ ID NO: 1645468 - RNA, 19 nt, Artificial Sequence
  Description of Artificial Sequence: Synthetic oligonucleotide
acugcugaaacauacugcc

SEQ ID NO: 1645469 - RNA, 19 nt, Artificial Sequence
  Description of Artificial Sequence: Synthetic oligonucleotide
aaaacuaaggcugugaggu

SEQ ID NO: 1645470 - RNA, 19 nt, Artificial Sequence
  Description of Artificial Sequence: Synthetic oligonucleotide
auaauagaaauacauagga

SEQ ID NO: 1645471 - RNA, 19 nt, Artificial Sequence
  Description of Artificial Sequence: Synthetic oligonucleotide
agaaacauuauucucagcu

SEQ ID NO: 1645472 - RNA, 19 nt, Artificial Sequence
  Description of Artificial Sequence: Synthetic oligonucleotide
ugcacugugauuuaaaaga

SEQ ID NO: 1645473 - RNA, 19 nt, Artificial Sequence
  Description of Artificial Sequence: Synthetic oligonucleotide
gauacaaauauuaaacugc

SEQ ID NO: 1645474 - RNA, 19 nt, Artificial Sequence
  Description of Artificial Sequence: Synthetic oligonucleotide
acguaaauuuucuaaagcg

SEQ ID NO: 1645475 - RNA, 19 nt, Artificial Sequence
  Description of Artificial Sequence: Synthetic oligonucleotide
aagauggucagacugaaca

SEQ ID NO: 1645476 - RNA, 19 nt, Artificial Sequence
  Description of Artificial Sequence: Synthetic oligonucleotide
uuuauuguuaauagcaacu

SEQ ID NO: 1645477 - RNA, 19 nt, Artificial Sequence
  Description of Artificial Sequence: Synthetic oligonucleotide
aagaaauuucuucuguguc

SEQ ID NO: 1645478 - RNA, 19 nt, Artificial Sequence
  Description of Artificial Sequence: Synthetic oligonucleotide
uucgaaauacuaaacaucu

SEQ ID NO: 1645479 - RNA, 19 nt, Artificial Sequence
  Description of Artificial Sequence: Synthetic oligonucleotide
aaaaguucgaaauacuaaa

SEQ ID NO: 1645480 - RNA, 19 nt, Artificial Sequence
  Description of Artificial Sequence: Synthetic oligonucleotide
ugauacaaauauuaaacug

SEQ ID NO: 1645481 - RNA, 19 nt, Artificial Sequence
  Description of Artificial Sequence: Synthetic oligonucleotide
ugugauuuaaaagacuuag

SEQ ID NO: 1645482 - RNA, 19 nt, Artificial Sequence
  Description of Artificial Sequence: Synthetic oligonucleotide
ugaguauuuucuuugcacg

SEQ ID NO: 1645483 - RNA, 19 nt, Artificial Sequence
  Description of Artificial Sequence: Synthetic oligonucleotide
cucaaauugagaaauaguc

SEQ ID NO: 1645484 - RNA, 19 nt, Artificial Sequence
  Description of Artificial Sequence: Synthetic oligonucleotide
aauuauaauuuaaaugaag

SEQ ID NO: 1645485 - RNA, 19 nt, Artificial Sequence
  Description of Artificial Sequence: Synthetic oligonucleotide
uuauucucagcucaggagc

SEQ ID NO: 1645486 - RNA, 19 nt, Artificial Sequence
  Description of Artificial Sequence: Synthetic oligonucleotide
augcuuuacauccaguuac

SEQ ID NO: 1645487 - RNA, 19 nt, Artificial Sequence
  Description of Artificial Sequence: Synthetic oligonucleotide
uguaccaugauggaaaacc

SEQ ID NO: 1645488 - RNA, 19 nt, Artificial Sequence
  Description of Artificial Sequence: Synthetic oligonucleotide
aaauacuaaacaucuaaaa

SEQ ID NO: 1645489 - RNA, 19 nt, Artificial Sequence
  Description of Artificial Sequence: Synthetic oligonucleotide
ucugcuaugauuuucucac

SEQ ID NO: 1645490 - RNA, 19 nt, Artificial Sequence
  Description of Artificial Sequence: Synthetic oligonucleotide
aaguagucuaacaacuucc

SEQ ID NO: 1645491 - RNA, 19 nt, Artificial Sequence
  Description of Artificial Sequence: Synthetic oligonucleotide
uaauagaaauacauaggag

SEQ ID NO: 1645492 - RNA, 19 nt, Artificial Sequence
  Description of Artificial Sequence: Synthetic oligonucleotide
aaacauuauucucagcuca

SEQ ID NO: 1645493 - RNA, 19 nt, Artificial Sequence
  Description of Artificial Sequence: Synthetic oligonucleotide
cauaguuguagcuaguggc

SEQ ID NO: 1645494 - RNA, 19 nt, Artificial Sequence
  Description of Artificial Sequence: Synthetic oligonucleotide
uccaguuacucccagagug

SEQ ID NO: 1645495 - RNA, 19 nt, Artificial Sequence
  Description of Artificial Sequence: Synthetic oligonucleotide
uucaaauguguaaagucag

SEQ ID NO: 1645496 - RNA, 19 nt, Artificial Sequence
  Description of Artificial Sequence: Synthetic oligonucleotide
uaaauuuucuaaagcgucc

SEQ ID NO: 1645497 - RNA, 19 nt, Artificial Sequence
  Description of Artificial Sequence: Synthetic oligonucleotide
caaauugagaaauagucuc

SEQ ID NO: 1645498 - RNA, 19 nt, Artificial Sequence
  Description of Artificial Sequence: Synthetic oligonucleotide
aguucugccaacuucuagg

SEQ ID NO: 1645499 - RNA, 19 nt, Artificial Sequence
  Description of Artificial Sequence: Synthetic oligonucleotide
auacuaaacaucuaaaauu

SEQ ID NO: 1645500 - RNA, 19 nt, Artificial Sequence
  Description of Artificial Sequence: Synthetic oligonucleotide
ucucacacagguaaacacg

SEQ ID NO: 1645501 - RNA, 19 nt, Artificial Sequence
  Description of Artificial Sequence: Synthetic oligonucleotide
ugagugaacuguuacagug

SEQ ID NO: 1645502 - RNA, 19 nt, Artificial Sequence
  Description of Artificial Sequence: Synthetic oligonucleotide
uugagaaauagucucagaa

SEQ ID NO: 1645503 - RNA, 19 nt, Artificial Sequence
  Description of Artificial Sequence: Synthetic oligonucleotide
aaguucgaaauacuaaaca

SEQ ID NO: 1645504 - RNA, 19 nt, Artificial Sequence
  Description of Artificial Sequence: Synthetic oligonucleotide
aaucagucuuauaacaaac

SEQ ID NO: 1645505 - RNA, 19 nt, Artificial Sequence
  Description of Artificial Sequence: Synthetic oligonucleotide
ucuuuaucuaacaaauccu

SEQ ID NO: 1645506 - RNA, 19 nt, Artificial Sequence
  Description of Artificial Sequence: Synthetic oligonucleotide
aaauccuauuuacagagaa

SEQ ID NO: 1645507 - RNA, 19 nt, Artificial Sequence
  Description of Artificial Sequence: Synthetic oligonucleotide
agugaacuguuacaguggc

SEQ ID NO: 1645508 - RNA, 19 nt, Artificial Sequence
  Description of Artificial Sequence: Synthetic oligonucleotide
aaacacguaaauuuucuaa

SEQ ID NO: 1645509 - RNA, 19 nt, Artificial Sequence
  Description of Artificial Sequence: Synthetic oligonucleotide
uuuuauauuccgaagcuuu

SEQ ID NO: 1645510 - RNA, 19 nt, Artificial Sequence
  Description of Artificial Sequence: Synthetic oligonucleotide
aaagacuuagcaaauguga

SEQ ID NO: 1645511 - RNA, 19 nt, Artificial Sequence
  Description of Artificial Sequence: Synthetic oligonucleotide
cuaugauuuucucacacag

SEQ ID NO: 1645512 - RNA, 19 nt, Artificial Sequence
  Description of Artificial Sequence: Synthetic oligonucleotide
aacacguaaauuuucuaaa

SEQ ID NO: 1645513 - RNA, 19 nt, Artificial Sequence
  Description of Artificial Sequence: Synthetic oligonucleotide
ugugagugaacuguuacag

SEQ ID NO: 1645514 - RNA, 19 nt, Artificial Sequence
  Description of Artificial Sequence: Synthetic oligonucleotide
aauacauaggagguggaug

SEQ ID NO: 1645515 - RNA, 19 nt, Artificial Sequence
  Description of Artificial Sequence: Synthetic oligonucleotide
guuacaguggcuuuuauaa

SEQ ID NO: 1645516 - RNA, 19 nt, Artificial Sequence
  Description of Artificial Sequence: Synthetic oligonucleotide
aacugcugaaacauacugc

SEQ ID NO: 1645517 - RNA, 19 nt, Artificial Sequence
  Description of Artificial Sequence: Synthetic oligonucleotide
cuucacuucagugaggucc

SEQ ID NO: 1645518 - RNA, 19 nt, Artificial Sequence
  Description of Artificial Sequence: Synthetic oligonucleotide
gagaaauagucucagaaaa

SEQ ID NO: 1645519 - RNA, 19 nt, Artificial Sequence
  Description of Artificial Sequence: Synthetic oligonucleotide
auuggcgugaaagagcucg

SEQ ID NO: 1645520 - RNA, 19 nt, Artificial Sequence
  Description of Artificial Sequence: Synthetic oligonucleotide
aauugagaaauagucucag

SEQ ID NO: 1645521 - RNA, 19 nt, Artificial Sequence
  Description of Artificial Sequence: Synthetic oligonucleotide
uggaugucaggaaauaugu

SEQ ID NO: 1645522 - RNA, 19 nt, Artificial Sequence
  Description of Artificial Sequence: Synthetic oligonucleotide
agaaacauuucacuggagu

SEQ ID NO: 1645523 - RNA, 19 nt, Artificial Sequence
  Description of Artificial Sequence: Synthetic oligonucleotide
aguuuuauauuccgaagcu

SEQ ID NO: 1645524 - RNA, 19 nt, Artificial Sequence
  Description of Artificial Sequence: Synthetic oligonucleotide
uauauuccgaagcuuuagc

SEQ ID NO: 1645525 - RNA, 19 nt, Artificial Sequence
  Description of Artificial Sequence: Synthetic oligonucleotide
aagaaacauuauucucagc

SEQ ID NO: 1645526 - RNA, 19 nt, Artificial Sequence
  Description of Artificial Sequence: Synthetic oligonucleotide
cagaaaaucagucuuauaa

SEQ ID NO: 1645527 - RNA, 19 nt, Artificial Sequence
  Description of Artificial Sequence: Synthetic oligonucleotide
caguuuuauauuccgaagc

SEQ ID NO: 1645528 - RNA, 19 nt, Artificial Sequence
  Description of Artificial Sequence: Synthetic oligonucleotide
aguuccuccuuccaaucgc

SEQ ID NO: 1645529 - RNA, 19 nt, Artificial Sequence
  Description of Artificial Sequence: Synthetic oligonucleotide
ucuaaagcguccuucuuca

SEQ ID NO: 1645530 - RNA, 19 nt, Artificial Sequence
  Description of Artificial Sequence: Synthetic oligonucleotide
cagaugaucaaaaugucuc

SEQ ID NO: 1645531 - RNA, 19 nt, Artificial Sequence
  Description of Artificial Sequence: Synthetic oligonucleotide
cucucuuccgaauuggacc

SEQ ID NO: 1645532 - RNA, 19 nt, Artificial Sequence
  Description of Artificial Sequence: Synthetic oligonucleotide
aguucgaaauacuaaacau

SEQ ID NO: 1645533 - RNA, 19 nt, Artificial Sequence
  Description of Artificial Sequence: Synthetic oligonucleotide
uuagggacggcgcaggagc

SEQ ID NO: 1645534 - RNA, 19 nt, Artificial Sequence
  Description of Artificial Sequence: Synthetic oligonucleotide
ucauuggcgugaaagagcu

SEQ ID NO: 1645535 - RNA, 19 nt, Artificial Sequence
  Description of Artificial Sequence: Synthetic oligonucleotide
aguuuccauaaguuccucc

SEQ ID NO: 1645536 - RNA, 19 nt, Artificial Sequence
  Description of Artificial Sequence: Synthetic oligonucleotide
gaccuagagagguuguugg

SEQ ID NO: 1645537 - RNA, 19 nt, Artificial Sequence
  Description of Artificial Sequence: Synthetic oligonucleotide
ucucaaauugagaaauagu

SEQ ID NO: 1645538 - RNA, 19 nt, Artificial Sequence
  Description of Artificial Sequence: Synthetic oligonucleotide
ugcgaagaaacauuauucu

SEQ ID NO: 1645539 - RNA, 19 nt, Artificial Sequence
  Description of Artificial Sequence: Synthetic oligonucleotide
aaaagacuuagcaaaugug

SEQ ID NO: 1645540 - RNA, 19 nt, Artificial Sequence
  Description of Artificial Sequence: Synthetic oligonucleotide
acauaguuguagcuagugg

SEQ ID NO: 1645541 - RNA, 19 nt, Artificial Sequence
  Description of Artificial Sequence: Synthetic oligonucleotide
ucagacugaacauuuguaa

SEQ ID NO: 1645542 - RNA, 19 nt, Artificial Sequence
  Description of Artificial Sequence: Synthetic oligonucleotide
ccgaauuggaccuagagag

SEQ ID NO: 1645543 - RNA, 19 nt, Artificial Sequence
  Description of Artificial Sequence: Synthetic oligonucleotide
auagcaacuuuucauuucu

SEQ ID NO: 1645544 - RNA, 19 nt, Artificial Sequence
  Description of Artificial Sequence: Synthetic oligonucleotide
cuuccaaucgcagaucugg

SEQ ID NO: 1645545 - RNA, 19 nt, Artificial Sequence
  Description of Artificial Sequence: Synthetic oligonucleotide
gugaaagagcucgugaucg

SEQ ID NO: 1645546 - RNA, 19 nt, Artificial Sequence
  Description of Artificial Sequence: Synthetic oligonucleotide
uauuccgaagcuuuagcac

SEQ ID NO: 1645547 - RNA, 19 nt, Artificial Sequence
  Description of Artificial Sequence: Synthetic oligonucleotide
aaagggagcggugcuagac

SEQ ID NO: 1645548 - RNA, 19 nt, Artificial Sequence
  Description of Artificial Sequence: Synthetic oligonucleotide
uccgaauuggaccuagaga

SEQ ID NO: 1645549 - RNA, 19 nt, Artificial Sequence
  Description of Artificial Sequence: Synthetic oligonucleotide
aaauuuucuaaagcguccu

SEQ ID NO: 1645550 - RNA, 19 nt, Artificial Sequence
  Description of Artificial Sequence: Synthetic oligonucleotide
auuuucuaaagcguccuuc

SEQ ID NO: 1645551 - RNA, 19 nt, Artificial Sequence
  Description of Artificial Sequence: Synthetic oligonucleotide
agacaaucaguuuucaaau

SEQ ID NO: 1645552 - RNA, 19 nt, Artificial Sequence
  Description of Artificial Sequence: Synthetic oligonucleotide
uguguaaagucagucaaac

SEQ ID NO: 1645553 - RNA, 19 nt, Artificial Sequence
  Description of Artificial Sequence: Synthetic oligonucleotide
ugugcgaagaaacauuauu

SEQ ID NO: 1645554 - RNA, 19 nt, Artificial Sequence
  Description of Artificial Sequence: Synthetic oligonucleotide
aaagcguccuucuucacuu

SEQ ID NO: 1645555 - RNA, 19 nt, Artificial Sequence
  Description of Artificial Sequence: Synthetic oligonucleotide
aguagucuaacaacuuccc

SEQ ID NO: 1645556 - RNA, 19 nt, Artificial Sequence
  Description of Artificial Sequence: Synthetic oligonucleotide
uuguuaauagcaacuuuuc

SEQ ID NO: 1645557 - RNA, 19 nt, Artificial Sequence
  Description of Artificial Sequence: Synthetic oligonucleotide
uccuacuugaaguucggca

SEQ ID NO: 1645558 - RNA, 19 nt, Artificial Sequence
  Description of Artificial Sequence: Synthetic oligonucleotide
auuacucucuuccgaauug

SEQ ID NO: 1645559 - RNA, 19 nt, Artificial Sequence
  Description of Artificial Sequence: Synthetic oligonucleotide
gaaacauuauucucagcuc

SEQ ID NO: 1645560 - RNA, 19 nt, Artificial Sequence
  Description of Artificial Sequence: Synthetic oligonucleotide
aacauaaaugugcgaagaa

SEQ ID NO: 1645561 - RNA, 19 nt, Artificial Sequence
  Description of Artificial Sequence: Synthetic oligonucleotide
ucuguguuuucucccugcg

SEQ ID NO: 1645562 - RNA, 19 nt, Artificial Sequence
  Description of Artificial Sequence: Synthetic oligonucleotide
ucucuacugaguauuuucu

SEQ ID NO: 1645563 - RNA, 19 nt, Artificial Sequence
  Description of Artificial Sequence: Synthetic oligonucleotide
auuccgaagcuuuagcacu

SEQ ID NO: 1645564 - RNA, 19 nt, Artificial Sequence
  Description of Artificial Sequence: Synthetic oligonucleotide
uuccgaauuggaccuagag

SEQ ID NO: 1645565 - RNA, 19 nt, Artificial Sequence
  Description of Artificial Sequence: Synthetic oligonucleotide
uaacauaaaugugcgaaga

SEQ ID NO: 1645566 - RNA, 19 nt, Artificial Sequence
  Description of Artificial Sequence: Synthetic oligonucleotide
aaaaucagucuuauaacaa

SEQ ID NO: 1645567 - RNA, 19 nt, Artificial Sequence
  Description of Artificial Sequence: Synthetic oligonucleotide
uagucucagaaaaucaguc

SEQ ID NO: 1645568 - RNA, 19 nt, Artificial Sequence
  Description of Artificial Sequence: Synthetic oligonucleotide
uuauauuccgaagcuuuag

SEQ ID NO: 1645569 - RNA, 19 nt, Artificial Sequence
  Description of Artificial Sequence: Synthetic oligonucleotide
aagggcucacagcugcuac

SEQ ID NO: 1645570 - RNA, 19 nt, Artificial Sequence
  Description of Artificial Sequence: Synthetic oligonucleotide
aaucaguuuucaaaugugu

SEQ ID NO: 1645571 - RNA, 19 nt, Artificial Sequence
  Description of Artificial Sequence: Synthetic oligonucleotide
aacauaguuguagcuagug

SEQ ID NO: 1645572 - RNA, 19 nt, Artificial Sequence
  Description of Artificial Sequence: Synthetic oligonucleotide
guaaauuuucuaaagcguc

SEQ ID NO: 1645573 - RNA, 19 nt, Artificial Sequence
  Description of Artificial Sequence: Synthetic oligonucleotide
aaauugagaaauagucuca

SEQ ID NO: 1645574 - RNA, 19 nt, Artificial Sequence
  Description of Artificial Sequence: Synthetic oligonucleotide
cuacugaguauuuucuuug

SEQ ID NO: 1645575 - RNA, 19 nt, Artificial Sequence
  Description of Artificial Sequence: Synthetic oligonucleotide
uucggcaagaaauuucuuc

SEQ ID NO: 1645576 - RNA, 19 nt, Artificial Sequence
  Description of Artificial Sequence: Synthetic oligonucleotide
agucagucaaacuuuguaa

SEQ ID NO: 1645577 - RNA, 19 nt, Artificial Sequence
  Description of Artificial Sequence: Synthetic oligonucleotide
uucacuggaguuuccauaa

SEQ ID NO: 1645578 - RNA, 19 nt, Artificial Sequence
  Description of Artificial Sequence: Synthetic oligonucleotide
aaccaugcuuuacauccag

SEQ ID NO: 1645579 - RNA, 19 nt, Artificial Sequence
  Description of Artificial Sequence: Synthetic oligonucleotide
uucucuacugaguauuuuc

SEQ ID NO: 1645580 - RNA, 19 nt, Artificial Sequence
  Description of Artificial Sequence: Synthetic oligonucleotide
uuuccuacuugaaguucgg

SEQ ID NO: 1645581 - RNA, 19 nt, Artificial Sequence
  Description of Artificial Sequence: Synthetic oligonucleotide
agagauuacucucuuccga

SEQ ID NO: 1645582 - RNA, 19 nt, Artificial Sequence
  Description of Artificial Sequence: Synthetic oligonucleotide
aaguucggcaagaaauuuc

SEQ ID NO: 1645583 - RNA, 19 nt, Artificial Sequence
  Description of Artificial Sequence: Synthetic oligonucleotide
uuuuccuguaaguagucua

SEQ ID NO: 1645584 - RNA, 19 nt, Artificial Sequence
  Description of Artificial Sequence: Synthetic oligonucleotide
ucaaauguguaaagucagu

SEQ ID NO: 1645585 - RNA, 19 nt, Artificial Sequence
  Description of Artificial Sequence: Synthetic oligonucleotide
caaucaguuuucaaaugug

SEQ ID NO: 1645586 - RNA, 19 nt, Artificial Sequence
  Description of Artificial Sequence: Synthetic oligonucleotide
cuaacaaauccuauuuaca

SEQ ID NO: 1645587 - RNA, 19 nt, Artificial Sequence
  Description of Artificial Sequence: Synthetic oligonucleotide
uagcaaaugugagugaacu

SEQ ID NO: 1645588 - RNA, 19 nt, Artificial Sequence
  Description of Artificial Sequence: Synthetic oligonucleotide
aagagcucgugaucguaag

SEQ ID NO: 1645589 - RNA, 19 nt, Artificial Sequence
  Description of Artificial Sequence: Synthetic oligonucleotide
ucuacugaguauuuucuuu

SEQ ID NO: 1645590 - RNA, 19 nt, Artificial Sequence
  Description of Artificial Sequence: Synthetic oligonucleotide
uccuauuuacagagaaugu

SEQ ID NO: 1645591 - RNA, 19 nt, Artificial Sequence
  Description of Artificial Sequence: Synthetic oligonucleotide
acgcagaugaucaaaaugu

SEQ ID NO: 1645592 - RNA, 19 nt, Artificial Sequence
  Description of Artificial Sequence: Synthetic oligonucleotide
agaugaucaaaaugucucu

SEQ ID NO: 1645593 - RNA, 19 nt, Artificial Sequence
  Description of Artificial Sequence: Synthetic oligonucleotide
ucucuuccgaauuggaccu

SEQ ID NO: 1645594 - RNA, 19 nt, Artificial Sequence
  Description of Artificial Sequence: Synthetic oligonucleotide
gaggaagugugccugagga

SEQ ID NO: 1645595 - RNA, 19 nt, Artificial Sequence
  Description of Artificial Sequence: Synthetic oligonucleotide
uccaaucgcagaucugggg

SEQ ID NO: 1645596 - RNA, 19 nt, Artificial Sequence
  Description of Artificial Sequence: Synthetic oligonucleotide
cagacugaacauuuguaac

SEQ ID NO: 1645597 - RNA, 19 nt, Artificial Sequence
  Description of Artificial Sequence: Synthetic oligonucleotide
ucauccguuaucuucugaa

SEQ ID NO: 1645598 - RNA, 19 nt, Artificial Sequence
  Description of Artificial Sequence: Synthetic oligonucleotide
uuuauauuccgaagcuuua

SEQ ID NO: 1645599 - RNA, 19 nt, Artificial Sequence
  Description of Artificial Sequence: Synthetic oligonucleotide
aacauuauucucagcucag

SEQ ID NO: 1645600 - RNA, 19 nt, Artificial Sequence
  Description of Artificial Sequence: Synthetic oligonucleotide
ugcuugauacaaauauuaa

SEQ ID NO: 1645601 - RNA, 19 nt, Artificial Sequence
  Description of Artificial Sequence: Synthetic oligonucleotide
ugcuagacucuccuuccgg

SEQ ID NO: 1645602 - RNA, 19 nt, Artificial Sequence
  Description of Artificial Sequence: Synthetic oligonucleotide
ugaucguaaggggagaaac

SEQ ID NO: 1645603 - RNA, 19 nt, Artificial Sequence
  Description of Artificial Sequence: Synthetic oligonucleotide
ugcgaauggauuccaccag

SEQ ID NO: 1645604 - RNA, 19 nt, Artificial Sequence
  Description of Artificial Sequence: Synthetic oligonucleotide
ucuaacaacuucccagcuc

SEQ ID NO: 1645605 - RNA, 19 nt, Artificial Sequence
  Description of Artificial Sequence: Synthetic oligonucleotide
aacuaaggcugugaggugu

SEQ ID NO: 1645606 - RNA, 19 nt, Artificial Sequence
  Description of Artificial Sequence: Synthetic oligonucleotide
uuaucuucugaaucaggaa

SEQ ID NO: 1645607 - RNA, 19 nt, Artificial Sequence
  Description of Artificial Sequence: Synthetic oligonucleotide
agacuuagcaaaugugagu

SEQ ID NO: 1645608 - RNA, 19 nt, Artificial Sequence
  Description of Artificial Sequence: Synthetic oligonucleotide
uuccaaucgcagaucuggg

SEQ ID NO: 1645609 - RNA, 19 nt, Artificial Sequence
  Description of Artificial Sequence: Synthetic oligonucleotide
aaggauguaccaugaugga

SEQ ID NO: 1645610 - RNA, 19 nt, Artificial Sequence
  Description of Artificial Sequence: Synthetic oligonucleotide
gagugaacuguuacagugg

SEQ ID NO: 1645611 - RNA, 19 nt, Artificial Sequence
  Description of Artificial Sequence: Synthetic oligonucleotide
cacgcagaugaucaaaaug

SEQ ID NO: 1645612 - RNA, 19 nt, Artificial Sequence
  Description of Artificial Sequence: Synthetic oligonucleotide
uucuaggacuggcaaauuc

SEQ ID NO: 1645613 - RNA, 19 nt, Artificial Sequence
  Description of Artificial Sequence: Synthetic oligonucleotide
uccuguaaguagucuaaca

SEQ ID NO: 1645614 - RNA, 19 nt, Artificial Sequence
  Description of Artificial Sequence: Synthetic oligonucleotide
uuauuguuaauagcaacuu

SEQ ID NO: 1645615 - RNA, 19 nt, Artificial Sequence
  Description of Artificial Sequence: Synthetic oligonucleotide
ugaaacauacugccagguc

SEQ ID NO: 1645616 - RNA, 19 nt, Artificial Sequence
  Description of Artificial Sequence: Synthetic oligonucleotide
agcugcaaagggcucacag

SEQ ID NO: 1645617 - RNA, 19 nt, Artificial Sequence
  Description of Artificial Sequence: Synthetic oligonucleotide
uguuuucucccugcgaaug

SEQ ID NO: 1645618 - RNA, 19 nt, Artificial Sequence
  Description of Artificial Sequence: Synthetic oligonucleotide
aaugugcgaagaaacauua

SEQ ID NO: 1645619 - RNA, 19 nt, Artificial Sequence
  Description of Artificial Sequence: Synthetic oligonucleotide
aggggagaaacauuucacu

SEQ ID NO: 1645620 - RNA, 19 nt, Artificial Sequence
  Description of Artificial Sequence: Synthetic oligonucleotide
cuuuaucuaacaaauccua

SEQ ID NO: 1645621 - RNA, 19 nt, Artificial Sequence
  Description of Artificial Sequence: Synthetic oligonucleotide
agagaaugugugcacugug

SEQ ID NO: 1645622 - RNA, 19 nt, Artificial Sequence
  Description of Artificial Sequence: Synthetic oligonucleotide
guucgaaauacuaaacauc

SEQ ID NO: 1645623 - RNA, 19 nt, Artificial Sequence
  Description of Artificial Sequence: Synthetic oligonucleotide
cagucuuauaacaaacaca

SEQ ID NO: 1645624 - RNA, 19 nt, Artificial Sequence
  Description of Artificial Sequence: Synthetic oligonucleotide
uuuucucacacagguaaac

SEQ ID NO: 1645625 - RNA, 19 nt, Artificial Sequence
  Description of Artificial Sequence: Synthetic oligonucleotide
acagagaaugugugcacug

SEQ ID NO: 1645626 - RNA, 19 nt, Artificial Sequence
  Description of Artificial Sequence: Synthetic oligonucleotide
uccuuccaaucgcagaucu

SEQ ID NO: 1645627 - RNA, 19 nt, Artificial Sequence
  Description of Artificial Sequence: Synthetic oligonucleotide
cuggaguuuccauaaguuc

SEQ ID NO: 1645628 - RNA, 19 nt, Artificial Sequence
  Description of Artificial Sequence: Synthetic oligonucleotide
agcucgugaucguaagggg

SEQ ID NO: 1645629 - RNA, 19 nt, Artificial Sequence
  Description of Artificial Sequence: Synthetic oligonucleotide
aaauacauaggagguggau

SEQ ID NO: 1645630 - RNA, 19 nt, Artificial Sequence
  Description of Artificial Sequence: Synthetic oligonucleotide
aaaugugcgaagaaacauu

SEQ ID NO: 1645631 - RNA, 19 nt, Artificial Sequence
  Description of Artificial Sequence: Synthetic oligonucleotide
uaaacacguaaauuuucua

SEQ ID NO: 1645632 - RNA, 19 nt, Artificial Sequence
  Description of Artificial Sequence: Synthetic oligonucleotide
uuacagagaaugugugcac

SEQ ID NO: 1645633 - RNA, 19 nt, Artificial Sequence
  Description of Artificial Sequence: Synthetic oligonucleotide
gcuaguggcugcuugauac

SEQ ID NO: 1645634 - RNA, 19 nt, Artificial Sequence
  Description of Artificial Sequence: Synthetic oligonucleotide
uuuagcacuucauccguua

SEQ ID NO: 1645635 - RNA, 19 nt, Artificial Sequence
  Description of Artificial Sequence: Synthetic oligonucleotide
agcaaaugugagugaacug

SEQ ID NO: 1645636 - RNA, 19 nt, Artificial Sequence
  Description of Artificial Sequence: Synthetic oligonucleotide
gauggcguccuuccggccc

SEQ ID NO: 1645637 - RNA, 19 nt, Artificial Sequence
  Description of Artificial Sequence: Synthetic oligonucleotide
agagcucgugaucguaagg

SEQ ID NO: 1645638 - RNA, 19 nt, Artificial Sequence
  Description of Artificial Sequence: Synthetic oligonucleotide
uucuguguuuucucccugc

SEQ ID NO: 1645639 - RNA, 19 nt, Artificial Sequence
  Description of Artificial Sequence: Synthetic oligonucleotide
aguucggcaagaaauuucu

SEQ ID NO: 1645640 - RNA, 19 nt, Artificial Sequence
  Description of Artificial Sequence: Synthetic oligonucleotide
gagauuacucucuuccgaa

SEQ ID NO: 1645641 - RNA, 19 nt, Artificial Sequence
  Description of Artificial Sequence: Synthetic oligonucleotide
agacucuccuuccgggugg

SEQ ID NO: 1645642 - RNA, 19 nt, Artificial Sequence
  Description of Artificial Sequence: Synthetic oligonucleotide
agggagcggugcuagacuc

SEQ ID NO: 1645643 - RNA, 19 nt, Artificial Sequence
  Description of Artificial Sequence: Synthetic oligonucleotide
acauuauucucagcucagg

SEQ ID NO: 1645644 - RNA, 19 nt, Artificial Sequence
  Description of Artificial Sequence: Synthetic oligonucleotide
cugcuugauacaaauauua

SEQ ID NO: 1645645 - RNA, 19 nt, Artificial Sequence
  Description of Artificial Sequence: Synthetic oligonucleotide
aagggagcggugcuagacu

SEQ ID NO: 1645646 - RNA, 19 nt, Artificial Sequence
  Description of Artificial Sequence: Synthetic oligonucleotide
gugcgaagaaacauuauuc

SEQ ID NO: 1645647 - RNA, 19 nt, Artificial Sequence
  Description of Artificial Sequence: Synthetic oligonucleotide
cuacuugaaguucggcaag

SEQ ID NO: 1645648 - RNA, 19 nt, Artificial Sequence
  Description of Artificial Sequence: Synthetic oligonucleotide
ucucccugcgaauggauuc

SEQ ID NO: 1645649 - RNA, 19 nt, Artificial Sequence
  Description of Artificial Sequence: Synthetic oligonucleotide
ggggagaaacauuucacug

SEQ ID NO: 1645650 - RNA, 19 nt, Artificial Sequence
  Description of Artificial Sequence: Synthetic oligonucleotide
cuaacaacuucccagcucu

SEQ ID NO: 1645651 - RNA, 19 nt, Artificial Sequence
  Description of Artificial Sequence: Synthetic oligonucleotide
acuucuaggacuggcaaau

SEQ ID NO: 1645652 - RNA, 19 nt, Artificial Sequence
  Description of Artificial Sequence: Synthetic oligonucleotide
gaaacauuucacuggaguu

SEQ ID NO: 1645653 - RNA, 19 nt, Artificial Sequence
  Description of Artificial Sequence: Synthetic oligonucleotide
auaguuguagcuaguggcu

SEQ ID NO: 1645654 - RNA, 19 nt, Artificial Sequence
  Description of Artificial Sequence: Synthetic oligonucleotide
acucucuuccgaauuggac

SEQ ID NO: 1645655 - RNA, 19 nt, Artificial Sequence
  Description of Artificial Sequence: Synthetic oligonucleotide
cauuauucucagcucagga

SEQ ID NO: 1645656 - RNA, 19 nt, Artificial Sequence
  Description of Artificial Sequence: Synthetic oligonucleotide
uuguaacauaaaugugcga

SEQ ID NO: 1645657 - RNA, 19 nt, Artificial Sequence
  Description of Artificial Sequence: Synthetic oligonucleotide
gaaucaggaaguucugugu

SEQ ID NO: 1645658 - RNA, 19 nt, Artificial Sequence
  Description of Artificial Sequence: Synthetic oligonucleotide
gucauuggcgugaaagagc

SEQ ID NO: 1645659 - RNA, 19 nt, Artificial Sequence
  Description of Artificial Sequence: Synthetic oligonucleotide
aauccuauuuacagagaau

SEQ ID NO: 1645660 - RNA, 19 nt, Artificial Sequence
  Description of Artificial Sequence: Synthetic oligonucleotide
ugauuuucucacacaggua

SEQ ID NO: 1645661 - RNA, 19 nt, Artificial Sequence
  Description of Artificial Sequence: Synthetic oligonucleotide
uaccaugauggaaaaccau

SEQ ID NO: 1645662 - RNA, 19 nt, Artificial Sequence
  Description of Artificial Sequence: Synthetic oligonucleotide
gguacaugacaguggacgc

SEQ ID NO: 1645663 - RNA, 19 nt, Artificial Sequence
  Description of Artificial Sequence: Synthetic oligonucleotide
ucuuccgaauuggaccuag

SEQ ID NO: 1645664 - RNA, 19 nt, Artificial Sequence
  Description of Artificial Sequence: Synthetic oligonucleotide
cugccaacuucuaggacug

SEQ ID NO: 1645665 - RNA, 19 nt, Artificial Sequence
  Description of Artificial Sequence: Synthetic oligonucleotide
uaggacuggcaaauucaga

SEQ ID NO: 1645666 - RNA, 19 nt, Artificial Sequence
  Description of Artificial Sequence: Synthetic oligonucleotide
agauggucagacugaacau

SEQ ID NO: 1645667 - RNA, 19 nt, Artificial Sequence
  Description of Artificial Sequence: Synthetic oligonucleotide
uugggguuuuccuguaagu

SEQ ID NO: 1645668 - RNA, 19 nt, Artificial Sequence
  Description of Artificial Sequence: Synthetic oligonucleotide
uacucucuuccgaauugga

SEQ ID NO: 1645669 - RNA, 19 nt, Artificial Sequence
  Description of Artificial Sequence: Synthetic oligonucleotide
aucguaaggggagaaacau

SEQ ID NO: 1645670 - RNA, 19 nt, Artificial Sequence
  Description of Artificial Sequence: Synthetic oligonucleotide
aucagucuuauaacaaaca

SEQ ID NO: 1645671 - RNA, 19 nt, Artificial Sequence
  Description of Artificial Sequence: Synthetic oligonucleotide
ugaagacaaucaguuuuca

SEQ ID NO: 1645672 - RNA, 19 nt, Artificial Sequence
  Description of Artificial Sequence: Synthetic oligonucleotide
ucagagagauuacucucuu

SEQ ID NO: 1645673 - RNA, 19 nt, Artificial Sequence
  Description of Artificial Sequence: Synthetic oligonucleotide
ccuauuuacagagaaugug

SEQ ID NO: 1645674 - RNA, 19 nt, Artificial Sequence
  Description of Artificial Sequence: Synthetic oligonucleotide
uuagcacuucauccguuau

SEQ ID NO: 1645675 - RNA, 19 nt, Artificial Sequence
  Description of Artificial Sequence: Synthetic oligonucleotide
ugauaucauuuacaacauu

SEQ ID NO: 1645676 - RNA, 19 nt, Artificial Sequence
  Description of Artificial Sequence: Synthetic oligonucleotide
ugaaagagcucgugaucgu

SEQ ID NO: 1645677 - RNA, 19 nt, Artificial Sequence
  Description of Artificial Sequence: Synthetic oligonucleotide
ucgaaauacuaaacaucua

SEQ ID NO: 1645678 - RNA, 19 nt, Artificial Sequence
  Description of Artificial Sequence: Synthetic oligonucleotide
uuggaaagauggucagacu

SEQ ID NO: 1645679 - RNA, 19 nt, Artificial Sequence
  Description of Artificial Sequence: Synthetic oligonucleotide
uacaugacaguggacgcuc

SEQ ID NO: 1645680 - RNA, 19 nt, Artificial Sequence
  Description of Artificial Sequence: Synthetic oligonucleotide
ggugguacaugacagugga

SEQ ID NO: 1645681 - RNA, 19 nt, Artificial Sequence
  Description of Artificial Sequence: Synthetic oligonucleotide
agucccuugggguuuuccu

SEQ ID NO: 1645682 - RNA, 19 nt, Artificial Sequence
  Description of Artificial Sequence: Synthetic oligonucleotide
ugccguuuucaguucugcc

SEQ ID NO: 1645683 - RNA, 19 nt, Artificial Sequence
  Description of Artificial Sequence: Synthetic oligonucleotide
uagcacuucauccguuauc

SEQ ID NO: 1645684 - RNA, 19 nt, Artificial Sequence
  Description of Artificial Sequence: Synthetic oligonucleotide
gauguaccaugauggaaaa

SEQ ID NO: 1645685 - RNA, 19 nt, Artificial Sequence
  Description of Artificial Sequence: Synthetic oligonucleotide
uggucagacugaacauuug

SEQ ID NO: 1645686 - RNA, 19 nt, Artificial Sequence
  Description of Artificial Sequence: Synthetic oligonucleotide
agaaauagucucagaaaau

SEQ ID NO: 1645687 - RNA, 19 nt, Artificial Sequence
  Description of Artificial Sequence: Synthetic oligonucleotide
gcuagacucuccuuccggg

SEQ ID NO: 1645688 - RNA, 19 nt, Artificial Sequence
  Description of Artificial Sequence: Synthetic oligonucleotide
ucccuugggguuuuccugu

SEQ ID NO: 1645689 - RNA, 19 nt, Artificial Sequence
  Description of Artificial Sequence: Synthetic oligonucleotide
aagcguccuucuucacuuc

SEQ ID NO: 1645690 - RNA, 19 nt, Artificial Sequence
  Description of Artificial Sequence: Synthetic oligonucleotide
aaagagcucgugaucguaa

SEQ ID NO: 1645691 - RNA, 19 nt, Artificial Sequence
  Description of Artificial Sequence: Synthetic oligonucleotide
acuuagcaaaugugaguga

SEQ ID NO: 1645692 - RNA, 19 nt, Artificial Sequence
  Description of Artificial Sequence: Synthetic oligonucleotide
gauggaaaaccaugcuuua

SEQ ID NO: 1645693 - RNA, 19 nt, Artificial Sequence
  Description of Artificial Sequence: Synthetic oligonucleotide
gagaaugugugcacuguga

SEQ ID NO: 1645694 - RNA, 19 nt, Artificial Sequence
  Description of Artificial Sequence: Synthetic oligonucleotide
uucauccguuaucuucuga

SEQ ID NO: 1645695 - RNA, 19 nt, Artificial Sequence
  Description of Artificial Sequence: Synthetic oligonucleotide
agagugcuucuuuaucuaa

SEQ ID NO: 1645696 - RNA, 19 nt, Artificial Sequence
  Description of Artificial Sequence: Synthetic oligonucleotide
guagucuaacaacuuccca

SEQ ID NO: 1645697 - RNA, 19 nt, Artificial Sequence
  Description of Artificial Sequence: Synthetic oligonucleotide
cauaaguuccuccuuccaa

SEQ ID NO: 1645698 - RNA, 19 nt, Artificial Sequence
  Description of Artificial Sequence: Synthetic oligonucleotide
ggcgcaggagccuccaugg

SEQ ID NO: 1645699 - RNA, 19 nt, Artificial Sequence
  Description of Artificial Sequence: Synthetic oligonucleotide
agcggugcuagacucuccu

SEQ ID NO: 1645700 - RNA, 19 nt, Artificial Sequence
  Description of Artificial Sequence: Synthetic oligonucleotide
aaacauaguuguagcuagu

SEQ ID NO: 1645701 - RNA, 19 nt, Artificial Sequence
  Description of Artificial Sequence: Synthetic oligonucleotide
agauuacucucuuccgaau

SEQ ID NO: 1645702 - RNA, 19 nt, Artificial Sequence
  Description of Artificial Sequence: Synthetic oligonucleotide
augauaucauuuacaacau

SEQ ID NO: 1645703 - RNA, 19 nt, Artificial Sequence
  Description of Artificial Sequence: Synthetic oligonucleotide
gcgaauggauuccaccagg

SEQ ID NO: 1645704 - RNA, 19 nt, Artificial Sequence
  Description of Artificial Sequence: Synthetic oligonucleotide
ugggguuuuccuguaagua

SEQ ID NO: 1645705 - RNA, 19 nt, Artificial Sequence
  Description of Artificial Sequence: Synthetic oligonucleotide
guaaacacguaaauuuucu

SEQ ID NO: 1645706 - RNA, 19 nt, Artificial Sequence
  Description of Artificial Sequence: Synthetic oligonucleotide
auggcguccuuccggcccg

SEQ ID NO: 1645707 - RNA, 19 nt, Artificial Sequence
  Description of Artificial Sequence: Synthetic oligonucleotide
agcugauuucucaaauuga

SEQ ID NO: 1645708 - RNA, 19 nt, Artificial Sequence
  Description of Artificial Sequence: Synthetic oligonucleotide
gucagucaaacuuuguaau

SEQ ID NO: 1645709 - RNA, 19 nt, Artificial Sequence
  Description of Artificial Sequence: Synthetic oligonucleotide
uguccagucccuugggguu

SEQ ID NO: 1645710 - RNA, 19 nt, Artificial Sequence
  Description of Artificial Sequence: Synthetic oligonucleotide
ggaagugugccugaggaga

SEQ ID NO: 1645711 - RNA, 19 nt, Artificial Sequence
  Description of Artificial Sequence: Synthetic oligonucleotide
ggcaaauucagagaggacu

SEQ ID NO: 1645712 - RNA, 19 nt, Artificial Sequence
  Description of Artificial Sequence: Synthetic oligonucleotide
uuggaccuagagagguugu

SEQ ID NO: 1645713 - RNA, 19 nt, Artificial Sequence
  Description of Artificial Sequence: Synthetic oligonucleotide
gcgaagaaacauuauucuc

SEQ ID NO: 1645714 - RNA, 19 nt, Artificial Sequence
  Description of Artificial Sequence: Synthetic oligonucleotide
ucuuugcacgcagaugauc

SEQ ID NO: 1645715 - RNA, 19 nt, Artificial Sequence
  Description of Artificial Sequence: Synthetic oligonucleotide
aacaacuucccagcucuuu

SEQ ID NO: 1645716 - RNA, 19 nt, Artificial Sequence
  Description of Artificial Sequence: Synthetic oligonucleotide
ucguaaggggagaaacauu

SEQ ID NO: 1645717 - RNA, 19 nt, Artificial Sequence
  Description of Artificial Sequence: Synthetic oligonucleotide
gugcuagacucuccuuccg

SEQ ID NO: 1645718 - RNA, 19 nt, Artificial Sequence
  Description of Artificial Sequence: Synthetic oligonucleotide
ucucucugcuaugauuuuc

SEQ ID NO: 1645719 - RNA, 19 nt, Artificial Sequence
  Description of Artificial Sequence: Synthetic oligonucleotide
gaaauacauaggaggugga

SEQ ID NO: 1645720 - RNA, 19 nt, Artificial Sequence
  Description of Artificial Sequence: Synthetic oligonucleotide
cugcaaagggcucacagcu

SEQ ID NO: 1645721 - RNA, 19 nt, Artificial Sequence
  Description of Artificial Sequence: Synthetic oligonucleotide
acuaaggcugugagguguc

SEQ ID NO: 1645722 - RNA, 19 nt, Artificial Sequence
  Description of Artificial Sequence: Synthetic oligonucleotide
ucuucugaaucaggaaguu

SEQ ID NO: 1645723 - RNA, 19 nt, Artificial Sequence
  Description of Artificial Sequence: Synthetic oligonucleotide
gcugugaggugucauuggc

SEQ ID NO: 1645724 - RNA, 19 nt, Artificial Sequence
  Description of Artificial Sequence: Synthetic oligonucleotide
uuccgaagcuuuagcacuu

SEQ ID NO: 1645725 - RNA, 19 nt, Artificial Sequence
  Description of Artificial Sequence: Synthetic oligonucleotide
ccugcgaauggauuccacc

SEQ ID NO: 1645726 - RNA, 19 nt, Artificial Sequence
  Description of Artificial Sequence: Synthetic oligonucleotide
caggucgaggaagugugcc

SEQ ID NO: 1645727 - RNA, 19 nt, Artificial Sequence
  Description of Artificial Sequence: Synthetic oligonucleotide
augacaguggacgcucucu

SEQ ID NO: 1645728 - RNA, 19 nt, Artificial Sequence
  Description of Artificial Sequence: Synthetic oligonucleotide
agagaggacucaguagaga

SEQ ID NO: 1645729 - RNA, 19 nt, Artificial Sequence
  Description of Artificial Sequence: Synthetic oligonucleotide
aggucgaggaagugugccu

SEQ ID NO: 1645730 - RNA, 19 nt, Artificial Sequence
  Description of Artificial Sequence: Synthetic oligonucleotide
ucgguuagggacggcgcag

SEQ ID NO: 1645731 - RNA, 19 nt, Artificial Sequence
  Description of Artificial Sequence: Synthetic oligonucleotide
uagggacggcgcaggagcc

SEQ ID NO: 1645732 - RNA, 19 nt, Artificial Sequence
  Description of Artificial Sequence: Synthetic oligonucleotide
caaauccuauuuacagaga

SEQ ID NO: 1645733 - RNA, 19 nt, Artificial Sequence
  Description of Artificial Sequence: Synthetic oligonucleotide
uuggcgugaaagagcucgu

SEQ ID NO: 1645734 - RNA, 19 nt, Artificial Sequence
  Description of Artificial Sequence: Synthetic oligonucleotide
uucuuugcacgcagaugau

SEQ ID NO: 1645735 - RNA, 19 nt, Artificial Sequence
  Description of Artificial Sequence: Synthetic oligonucleotide
agcguccuucuucacuuca

SEQ ID NO: 1645736 - RNA, 19 nt, Artificial Sequence
  Description of Artificial Sequence: Synthetic oligonucleotide
aggauguaccaugauggaa

SEQ ID NO: 1645737 - RNA, 19 nt, Artificial Sequence
  Description of Artificial Sequence: Synthetic oligonucleotide
gcaaaugugagugaacugu

SEQ ID NO: 1645738 - RNA, 19 nt, Artificial Sequence
  Description of Artificial Sequence: Synthetic oligonucleotide
ggcugcuugauacaaauau

SEQ ID NO: 1645739 - RNA, 19 nt, Artificial Sequence
  Description of Artificial Sequence: Synthetic oligonucleotide
aguggacgcucucuguuuu

SEQ ID NO: 1645740 - RNA, 19 nt, Artificial Sequence
  Description of Artificial Sequence: Synthetic oligonucleotide
ccuguaaguagucuaacaa

SEQ ID NO: 1645741 - RNA, 19 nt, Artificial Sequence
  Description of Artificial Sequence: Synthetic oligonucleotide
uuccuacuugaaguucggc

SEQ ID NO: 1645742 - RNA, 19 nt, Artificial Sequence
  Description of Artificial Sequence: Synthetic oligonucleotide
cuucauccguuaucuucug

SEQ ID NO: 1645743 - RNA, 19 nt, Artificial Sequence
  Description of Artificial Sequence: Synthetic oligonucleotide
ccaguuacucccagagugc

SEQ ID NO: 1645744 - RNA, 19 nt, Artificial Sequence
  Description of Artificial Sequence: Synthetic oligonucleotide
ggaaagauggucagacuga

SEQ ID NO: 1645745 - RNA, 19 nt, Artificial Sequence
  Description of Artificial Sequence: Synthetic oligonucleotide
ucacacagguaaacacgua

SEQ ID NO: 1645746 - RNA, 19 nt, Artificial Sequence
  Description of Artificial Sequence: Synthetic oligonucleotide
cuaaagcguccuucuucac

SEQ ID NO: 1645747 - RNA, 19 nt, Artificial Sequence
  Description of Artificial Sequence: Synthetic oligonucleotide
cucccugcgaauggauucc

SEQ ID NO: 1645748 - RNA, 19 nt, Artificial Sequence
  Description of Artificial Sequence: Synthetic oligonucleotide
gaugcuccaguuuuauauu

SEQ ID NO: 1645749 - RNA, 19 nt, Artificial Sequence
  Description of Artificial Sequence: Synthetic oligonucleotide
uugcacgcagaugaucaaa

SEQ ID NO: 1645750 - RNA, 19 nt, Artificial Sequence
  Description of Artificial Sequence: Synthetic oligonucleotide
ccuacuugaaguucggcaa

SEQ ID NO: 1645751 - RNA, 19 nt, Artificial Sequence
  Description of Artificial Sequence: Synthetic oligonucleotide
auggucagacugaacauuu

SEQ ID NO: 1645752 - RNA, 19 nt, Artificial Sequence
  Description of Artificial Sequence: Synthetic oligonucleotide
aaagggcucacagcugcua

SEQ ID NO: 1645753 - RNA, 19 nt, Artificial Sequence
  Description of Artificial Sequence: Synthetic oligonucleotide
cugugauuuaaaagacuua

SEQ ID NO: 1645754 - RNA, 19 nt, Artificial Sequence
  Description of Artificial Sequence: Synthetic oligonucleotide
acucccagagugcuucuuu

SEQ ID NO: 1645755 - RNA, 19 nt, Artificial Sequence
  Description of Artificial Sequence: Synthetic oligonucleotide
cgaauggauuccaccaggg

SEQ ID NO: 1645756 - RNA, 19 nt, Artificial Sequence
  Description of Artificial Sequence: Synthetic oligonucleotide
ugaggagaagcugccguuu

SEQ ID NO: 1645757 - RNA, 19 nt, Artificial Sequence
  Description of Artificial Sequence: Synthetic oligonucleotide
gcacugugauuuaaaagac

SEQ ID NO: 1645758 - RNA, 19 nt, Artificial Sequence
  Description of Artificial Sequence: Synthetic oligonucleotide
gugaggugucauuggcgug

SEQ ID NO: 1645759 - RNA, 19 nt, Artificial Sequence
  Description of Artificial Sequence: Synthetic oligonucleotide
cccaggucgaggaagugug

SEQ ID NO: 1645760 - RNA, 19 nt, Artificial Sequence
  Description of Artificial Sequence: Synthetic oligonucleotide
auuuucucacacagguaaa

SEQ ID NO: 1645761 - RNA, 19 nt, Artificial Sequence
  Description of Artificial Sequence: Synthetic oligonucleotide
ggaccuagagagguuguug

SEQ ID NO: 1645762 - RNA, 19 nt, Artificial Sequence
  Description of Artificial Sequence: Synthetic oligonucleotide
gaaagagcucgugaucgua

SEQ ID NO: 1645763 - RNA, 19 nt, Artificial Sequence
  Description of Artificial Sequence: Synthetic oligonucleotide
cugccguuuucaguucugc

SEQ ID NO: 1645764 - RNA, 19 nt, Artificial Sequence
  Description of Artificial Sequence: Synthetic oligonucleotide
ucuucacuucagugagguc

SEQ ID NO: 1645765 - RNA, 19 nt, Artificial Sequence
  Description of Artificial Sequence: Synthetic oligonucleotide
gaagugugccugaggagaa

SEQ ID NO: 1645766 - RNA, 19 nt, Artificial Sequence
  Description of Artificial Sequence: Synthetic oligonucleotide
caugacaguggacgcucuc

SEQ ID NO: 1645767 - RNA, 19 nt, Artificial Sequence
  Description of Artificial Sequence: Synthetic oligonucleotide
gggugguacaugacagugg

SEQ ID NO: 1645768 - RNA, 19 nt, Artificial Sequence
  Description of Artificial Sequence: Synthetic oligonucleotide
ggacuggcaaauucagaga

SEQ ID NO: 1645769 - RNA, 19 nt, Artificial Sequence
  Description of Artificial Sequence: Synthetic oligonucleotide
cagcugcuacacugcaggc

SEQ ID NO: 1645770 - RNA, 19 nt, Artificial Sequence
  Description of Artificial Sequence: Synthetic oligonucleotide
ucgugaucguaaggggaga

SEQ ID NO: 1645771 - RNA, 19 nt, Artificial Sequence
  Description of Artificial Sequence: Synthetic oligonucleotide
cgaauuggaccuagagagg

SEQ ID NO: 1645772 - RNA, 19 nt, Artificial Sequence
  Description of Artificial Sequence: Synthetic oligonucleotide
ggcgugaaagagcucguga

SEQ ID NO: 1645773 - RNA, 19 nt, Artificial Sequence
  Description of Artificial Sequence: Synthetic oligonucleotide
cuuccgggugguacaugac

SEQ ID NO: 1645774 - RNA, 19 nt, Artificial Sequence
  Description of Artificial Sequence: Synthetic oligonucleotide
uggcgugaaagagcucgug

SEQ ID NO: 1645775 - RNA, 19 nt, Artificial Sequence
  Description of Artificial Sequence: Synthetic oligonucleotide
cugcugaaacauacugcca

SEQ ID NO: 1645776 - RNA, 19 nt, Artificial Sequence
  Description of Artificial Sequence: Synthetic oligonucleotide
agaggacucaguagagaaa

SEQ ID NO: 1645777 - RNA, 19 nt, Artificial Sequence
  Description of Artificial Sequence: Synthetic oligonucleotide
ggucagacugaacauuugu

SEQ ID NO: 1645778 - RNA, 19 nt, Artificial Sequence
  Description of Artificial Sequence: Synthetic oligonucleotide
gagaugcuccaguuuuaua

SEQ ID NO: 1645779 - RNA, 19 nt, Artificial Sequence
  Description of Artificial Sequence: Synthetic oligonucleotide
gcugcuacacugcaggccu

SEQ ID NO: 1645780 - RNA, 19 nt, Artificial Sequence
  Description of Artificial Sequence: Synthetic oligonucleotide
cauuggaaagauggucaga

SEQ ID NO: 1645781 - RNA, 19 nt, Artificial Sequence
  Description of Artificial Sequence: Synthetic oligonucleotide
cucgguuagggacggcgca

SEQ ID NO: 1645782 - RNA, 19 nt, Artificial Sequence
  Description of Artificial Sequence: Synthetic oligonucleotide
gugagugaacuguuacagu

SEQ ID NO: 1645783 - RNA, 19 nt, Artificial Sequence
  Description of Artificial Sequence: Synthetic oligonucleotide
cacuggaguuuccauaagu

SEQ ID NO: 1645784 - RNA, 19 nt, Artificial Sequence
  Description of Artificial Sequence: Synthetic oligonucleotide
cugcuaugauuuucucaca

SEQ ID NO: 1645785 - RNA, 19 nt, Artificial Sequence
  Description of Artificial Sequence: Synthetic oligonucleotide
gaguuuccauaaguuccuc

SEQ ID NO: 1645786 - RNA, 19 nt, Artificial Sequence
  Description of Artificial Sequence: Synthetic oligonucleotide
caaaugugagugaacuguu

SEQ ID NO: 1645787 - RNA, 19 nt, Artificial Sequence
  Description of Artificial Sequence: Synthetic oligonucleotide
gccaacuucuaggacuggc

SEQ ID NO: 1645788 - RNA, 19 nt, Artificial Sequence
  Description of Artificial Sequence: Synthetic oligonucleotide
agcuaguggcugcuugaua

SEQ ID NO: 1645789 - RNA, 19 nt, Artificial Sequence
  Description of Artificial Sequence: Synthetic oligonucleotide
uggaccuagagagguuguu

SEQ ID NO: 1645790 - RNA, 19 nt, Artificial Sequence
  Description of Artificial Sequence: Synthetic oligonucleotide
gucgaggaagugugccuga

SEQ ID NO: 1645791 - RNA, 19 nt, Artificial Sequence
  Description of Artificial Sequence: Synthetic oligonucleotide
guaaguagucuaacaacuu

SEQ ID NO: 1645792 - RNA, 19 nt, Artificial Sequence
  Description of Artificial Sequence: Synthetic oligonucleotide
ccagcucuuuuccuacuug

SEQ ID NO: 1645793 - RNA, 19 nt, Artificial Sequence
  Description of Artificial Sequence: Synthetic oligonucleotide
gaacuguuacaguggcuuu

SEQ ID NO: 1645794 - RNA, 19 nt, Artificial Sequence
  Description of Artificial Sequence: Synthetic oligonucleotide
ccagagugcuucuuuaucu

SEQ ID NO: 1645795 - RNA, 19 nt, Artificial Sequence
  Description of Artificial Sequence: Synthetic oligonucleotide
cuuccgaauuggaccuaga

SEQ ID NO: 1645796 - RNA, 19 nt, Artificial Sequence
  Description of Artificial Sequence: Synthetic oligonucleotide
ccucgguuagggacggcgc

SEQ ID NO: 1645797 - RNA, 19 nt, Artificial Sequence
  Description of Artificial Sequence: Synthetic oligonucleotide
ugcuacacugcaggccuuu

SEQ ID NO: 1645798 - RNA, 19 nt, Artificial Sequence
  Description of Artificial Sequence: Synthetic oligonucleotide
ggguuuuccuguaaguagu

SEQ ID NO: 1645799 - RNA, 19 nt, Artificial Sequence
  Description of Artificial Sequence: Synthetic oligonucleotide
cgugaaagagcucgugauc

SEQ ID NO: 1645800 - RNA, 19 nt, Artificial Sequence
  Description of Artificial Sequence: Synthetic oligonucleotide
augugcgaagaaacauuau

SEQ ID NO: 1645801 - RNA, 19 nt, Artificial Sequence
  Description of Artificial Sequence: Synthetic oligonucleotide
cauuggcgugaaagagcuc

SEQ ID NO: 1645802 - RNA, 19 nt, Artificial Sequence
  Description of Artificial Sequence: Synthetic oligonucleotide
cgcagaugaucaaaauguc

SEQ ID NO: 1645803 - RNA, 19 nt, Artificial Sequence
  Description of Artificial Sequence: Synthetic oligonucleotide
cucccagagugcuucuuua

SEQ ID NO: 1645804 - RNA, 19 nt, Artificial Sequence
  Description of Artificial Sequence: Synthetic oligonucleotide
guacaugacaguggacgcu

SEQ ID NO: 1645805 - RNA, 19 nt, Artificial Sequence
  Description of Artificial Sequence: Synthetic oligonucleotide
gcucgugaucguaagggga

SEQ ID NO: 1645806 - RNA, 19 nt, Artificial Sequence
  Description of Artificial Sequence: Synthetic oligonucleotide
ggaguuuccauaaguuccu

SEQ ID NO: 1645807 - RNA, 19 nt, Artificial Sequence
  Description of Artificial Sequence: Synthetic oligonucleotide
ccguuaucuucugaaucag

SEQ ID NO: 1645808 - RNA, 19 nt, Artificial Sequence
  Description of Artificial Sequence: Synthetic oligonucleotide
gugaucguaaggggagaaa

SEQ ID NO: 1645809 - RNA, 19 nt, Artificial Sequence
  Description of Artificial Sequence: Synthetic oligonucleotide
ccguuuucaguucugccaa

SEQ ID NO: 1645810 - RNA, 19 nt, Artificial Sequence
  Description of Artificial Sequence: Synthetic oligonucleotide
gugguacaugacaguggac

SEQ ID NO: 1645811 - RNA, 19 nt, Artificial Sequence
  Description of Artificial Sequence: Synthetic oligonucleotide
acaugacaguggacgcucu

SEQ ID NO: 1645812 - RNA, 19 nt, Artificial Sequence
  Description of Artificial Sequence: Synthetic oligonucleotide
gagcggugcuagacucucc

SEQ ID NO: 1645813 - RNA, 19 nt, Artificial Sequence
  Description of Artificial Sequence: Synthetic oligonucleotide
cggcaagaaauuucuucug

SEQ ID NO: 1645814 - RNA, 19 nt, Artificial Sequence
  Description of Artificial Sequence: Synthetic oligonucleotide
ccuuccaaucgcagaucug

SEQ ID NO: 1645815 - RNA, 19 nt, Artificial Sequence
  Description of Artificial Sequence: Synthetic oligonucleotide
ccaggucgaggaagugugc

SEQ ID NO: 1645816 - RNA, 19 nt, Artificial Sequence
  Description of Artificial Sequence: Synthetic oligonucleotide
accaggguguccagucccu

SEQ ID NO: 1645817 - RNA, 19 nt, Artificial Sequence
  Description of Artificial Sequence: Synthetic oligonucleotide
ggagcggugcuagacucuc

SEQ ID NO: 1645818 - RNA, 19 nt, Artificial Sequence
  Description of Artificial Sequence: Synthetic oligonucleotide
ggagcugauuucucaaauu

SEQ ID NO: 1645819 - RNA, 19 nt, Artificial Sequence
  Description of Artificial Sequence: Synthetic oligonucleotide
gcgugaaagagcucgugau

SEQ ID NO: 1645820 - RNA, 19 nt, Artificial Sequence
  Description of Artificial Sequence: Synthetic oligonucleotide
aguuacucccagagugcuu

SEQ ID NO: 1645821 - RNA, 19 nt, Artificial Sequence
  Description of Artificial Sequence: Synthetic oligonucleotide
gcguccuucuucacuucag

SEQ ID NO: 1645822 - RNA, 19 nt, Artificial Sequence
  Description of Artificial Sequence: Synthetic oligonucleotide
cuaaggcugugagguguca

SEQ ID NO: 1645823 - RNA, 19 nt, Artificial Sequence
  Description of Artificial Sequence: Synthetic oligonucleotide
cuuuagcacuucauccguu

SEQ ID NO: 1645824 - RNA, 19 nt, Artificial Sequence
  Description of Artificial Sequence: Synthetic oligonucleotide
cguccuuccggcccgcgcc

SEQ ID NO: 1645825 - RNA, 19 nt, Artificial Sequence
  Description of Artificial Sequence: Synthetic oligonucleotide
ccauaaguuccuccuucca

SEQ ID NO: 1645826 - RNA, 19 nt, Artificial Sequence
  Description of Artificial Sequence: Synthetic oligonucleotide
caguuacucccagagugcu

SEQ ID NO: 1645827 - RNA, 19 nt, Artificial Sequence
  Description of Artificial Sequence: Synthetic oligonucleotide
gguuagggacggcgcagga

SEQ ID NO: 1645828 - RNA, 19 nt, Artificial Sequence
  Description of Artificial Sequence: Synthetic oligonucleotide
ggaugucaggaaauaugua

SEQ ID NO: 1645829 - RNA, 19 nt, Artificial Sequence
  Description of Artificial Sequence: Synthetic oligonucleotide
agggacggcgcaggagccu

SEQ ID NO: 1645830 - RNA, 19 nt, Artificial Sequence
  Description of Artificial Sequence: Synthetic oligonucleotide
gacggcgcaggagccucca

SEQ ID NO: 1645831 - RNA, 19 nt, Artificial Sequence
  Description of Artificial Sequence: Synthetic oligonucleotide
gcuacacugcaggccuuug

SEQ ID NO: 1645832 - RNA, 19 nt, Artificial Sequence
  Description of Artificial Sequence: Synthetic oligonucleotide
uccuuccggcccgcgccgc

SEQ ID NO: 1645833 - RNA, 19 nt, Artificial Sequence
  Description of Artificial Sequence: Synthetic oligonucleotide
gcugcuugauacaaauauu

SEQ ID NO: 1645834 - RNA, 19 nt, Artificial Sequence
  Description of Artificial Sequence: Synthetic oligonucleotide
aggugucauuggcgugaaa

SEQ ID NO: 1645835 - RNA, 19 nt, Artificial Sequence
  Description of Artificial Sequence: Synthetic oligonucleotide
cccugcgaauggauuccac

SEQ ID NO: 1645836 - RNA, 19 nt, Artificial Sequence
  Description of Artificial Sequence: Synthetic oligonucleotide
gugugccugaggagaagcu

SEQ ID NO: 1645837 - RNA, 19 nt, Artificial Sequence
  Description of Artificial Sequence: Synthetic oligonucleotide
caguggacgcucucuguuu

SEQ ID NO: 1645838 - RNA, 19 nt, Artificial Sequence
  Description of Artificial Sequence: Synthetic oligonucleotide
gcguccuuccggcccgcgc

SEQ ID NO: 1645839 - RNA, 19 nt, Artificial Sequence
  Description of Artificial Sequence: Synthetic oligonucleotide
gcacgcagaugaucaaaau

SEQ ID NO: 1645840 - RNA, 19 nt, Artificial Sequence
  Description of Artificial Sequence: Synthetic oligonucleotide
cuguuacaguggcuuuuau

SEQ ID NO: 1645841 - RNA, 19 nt, Artificial Sequence
  Description of Artificial Sequence: Synthetic oligonucleotide
acggcgcaggagccuccau

SEQ ID NO: 1645842 - RNA, 19 nt, Artificial Sequence
  Description of Artificial Sequence: Synthetic oligonucleotide
guucggcaagaaauuucuu

SEQ ID NO: 1645843 - RNA, 19 nt, Artificial Sequence
  Description of Artificial Sequence: Synthetic oligonucleotide
uggcguccuuccggcccgc

SEQ ID NO: 1645844 - RNA, 19 nt, Artificial Sequence
  Description of Artificial Sequence: Synthetic oligonucleotide
cucuuccgaauuggaccua

SEQ ID NO: 1645845 - RNA, 19 nt, Artificial Sequence
  Description of Artificial Sequence: Synthetic oligonucleotide
cuucuaggacuggcaaauu

SEQ ID NO: 1645846 - RNA, 19 nt, Artificial Sequence
  Description of Artificial Sequence: Synthetic oligonucleotide
ggacggcgcaggagccucc

SEQ ID NO: 1645847 - RNA, 19 nt, Artificial Sequence
  Description of Artificial Sequence: Synthetic oligonucleotide
ccuugggguuuuccuguaa

SEQ ID NO: 1645848 - RNA, 19 nt, Artificial Sequence
  Description of Artificial Sequence: Synthetic oligonucleotide
cgugaucguaaggggagaa

SEQ ID NO: 1645849 - RNA, 19 nt, Artificial Sequence
  Description of Artificial Sequence: Synthetic oligonucleotide
gggagcggugcuagacucu

SEQ ID NO: 1645850 - RNA, 19 nt, Artificial Sequence
  Description of Artificial Sequence: Synthetic oligonucleotide
cuccuuccgggugguacau

SEQ ID NO: 1645851 - RNA, 19 nt, Artificial Sequence
  Description of Artificial Sequence: Synthetic oligonucleotide
ccgggugguacaugacagu

SEQ ID NO: 1645852 - RNA, 19 nt, Artificial Sequence
  Description of Artificial Sequence: Synthetic oligonucleotide
cugcuacacugcaggccuu

SEQ ID NO: 1645853 - RNA, 19 nt, Artificial Sequence
  Description of Artificial Sequence: Synthetic oligonucleotide
cgggguccccaggucgagg

SEQ ID NO: 1645854 - RNA, 19 nt, Artificial Sequence
  Description of Artificial Sequence: Synthetic oligonucleotide
ccccaggucgaggaagugu

SEQ ID NO: 1645855 - RNA, 19 nt, Artificial Sequence
  Description of Artificial Sequence: Synthetic oligonucleotide
gcggugcuagacucuccuu

SEQ ID NO: 1645856 - RNA, 19 nt, Artificial Sequence
  Description of Artificial Sequence: Synthetic oligonucleotide
gggccgggauggcguccuu

SEQ ID NO: 1645857 - RNA, 19 nt, Artificial Sequence
  Description of Artificial Sequence: Synthetic oligonucleotide
uuuaagauggcuuucacgg

SEQ ID NO: 1645858 - RNA, 19 nt, Artificial Sequence
  Description of Artificial Sequence: Synthetic oligonucleotide
aguugguagaauuugcucc

SEQ ID NO: 1645859 - RNA, 19 nt, Artificial Sequence
  Description of Artificial Sequence: Synthetic oligonucleotide
uuugcaauggccucuaggg

SEQ ID NO: 1645860 - RNA, 19 nt, Artificial Sequence
  Description of Artificial Sequence: Synthetic oligonucleotide
ugaaugauauccaaguaga

SEQ ID NO: 1645861 - RNA, 19 nt, Artificial Sequence
  Description of Artificial Sequence: Synthetic oligonucleotide
uuugcauagggccacuugg

SEQ ID NO: 1645862 - RNA, 19 nt, Artificial Sequence
  Description of Artificial Sequence: Synthetic oligonucleotide
uuugccauacacaagggac

SEQ ID NO: 1645863 - RNA, 19 nt, Artificial Sequence
  Description of Artificial Sequence: Synthetic oligonucleotide
uaucuaguaguacagcaag

SEQ ID NO: 1645864 - RNA, 19 nt, Artificial Sequence
  Description of Artificial Sequence: Synthetic oligonucleotide
gauguuaucuaguaguaca

SEQ ID NO: 1645865 - RNA, 19 nt, Artificial Sequence
  Description of Artificial Sequence: Synthetic oligonucleotide
ugugccauugacgagauug

SEQ ID NO: 1645866 - RNA, 19 nt, Artificial Sequence
  Description of Artificial Sequence: Synthetic oligonucleotide
gaaacuauccacuuugcca

SEQ ID NO: 1645867 - RNA, 19 nt, Artificial Sequence
  Description of Artificial Sequence: Synthetic oligonucleotide
augauauccaaguagauuu

SEQ ID NO: 1645868 - RNA, 19 nt, Artificial Sequence
  Description of Artificial Sequence: Synthetic oligonucleotide
ucgauugucaggauccacg

SEQ ID NO: 1645869 - RNA, 19 nt, Artificial Sequence
  Description of Artificial Sequence: Synthetic oligonucleotide
cacuuugccauacacaagg

SEQ ID NO: 1645870 - RNA, 19 nt, Artificial Sequence
  Description of Artificial Sequence: Synthetic oligonucleotide
gaagacuucugcauaaggg

SEQ ID NO: 1645871 - RNA, 19 nt, Artificial Sequence
  Description of Artificial Sequence: Synthetic oligonucleotide
agaaacuauccacuuugcc

SEQ ID NO: 1645872 - RNA, 19 nt, Artificial Sequence
  Description of Artificial Sequence: Synthetic oligonucleotide
aguggagccaccucuuucc

SEQ ID NO: 1645873 - RNA, 19 nt, Artificial Sequence
  Description of Artificial Sequence: Synthetic oligonucleotide
ucggaaugaauucagagua

SEQ ID NO: 1645874 - RNA, 19 nt, Artificial Sequence
  Description of Artificial Sequence: Synthetic oligonucleotide
caaacuaccagcccuggcg

SEQ ID NO: 1645875 - RNA, 19 nt, Artificial Sequence
  Description of Artificial Sequence: Synthetic oligonucleotide
auuaauguggugacaagcg

SEQ ID NO: 1645876 - RNA, 19 nt, Artificial Sequence
  Description of Artificial Sequence: Synthetic oligonucleotide
aaacuaccagcccuggcgg

SEQ ID NO: 1645877 - RNA, 19 nt, Artificial Sequence
  Description of Artificial Sequence: Synthetic oligonucleotide
ucagaucauaagcugucgg

SEQ ID NO: 1645878 - RNA, 19 nt, Artificial Sequence
  Description of Artificial Sequence: Synthetic oligonucleotide
aguggcaugaacuuccaug

SEQ ID NO: 1645879 - RNA, 19 nt, Artificial Sequence
  Description of Artificial Sequence: Synthetic oligonucleotide
guacgugugaaugauaucc

SEQ ID NO: 1645880 - RNA, 19 nt, Artificial Sequence
  Description of Artificial Sequence: Synthetic oligonucleotide
guuuaagauggcuuucacg

SEQ ID NO: 1645881 - RNA, 19 nt, Artificial Sequence
  Description of Artificial Sequence: Synthetic oligonucleotide
auugacgagauuguccacc

SEQ ID NO: 1645882 - RNA, 19 nt, Artificial Sequence
  Description of Artificial Sequence: Synthetic oligonucleotide
aaguaguuuucuucagauc

SEQ ID NO: 1645883 - RNA, 19 nt, Artificial Sequence
  Description of Artificial Sequence: Synthetic oligonucleotide
aucugaucgagguuucuac

SEQ ID NO: 1645884 - RNA, 19 nt, Artificial Sequence
  Description of Artificial Sequence: Synthetic oligonucleotide
agaguuugggcucugguca

SEQ ID NO: 1645885 - RNA, 19 nt, Artificial Sequence
  Description of Artificial Sequence: Synthetic oligonucleotide
gaucauaagcugucggucc

SEQ ID NO: 1645886 - RNA, 19 nt, Artificial Sequence
  Description of Artificial Sequence: Synthetic oligonucleotide
cucucgauugucaggaucc

SEQ ID NO: 1645887 - RNA, 19 nt, Artificial Sequence
  Description of Artificial Sequence: Synthetic oligonucleotide
agauuguccaccuucgacu

SEQ ID NO: 1645888 - RNA, 19 nt, Artificial Sequence
  Description of Artificial Sequence: Synthetic oligonucleotide
aacccuucccugcucgacc

SEQ ID NO: 1645889 - RNA, 19 nt, Artificial Sequence
  Description of Artificial Sequence: Synthetic oligonucleotide
uuucacguaacugggaaug

SEQ ID NO: 1645890 - RNA, 19 nt, Artificial Sequence
  Description of Artificial Sequence: Synthetic oligonucleotide
uuaauguggugacaagcga

SEQ ID NO: 1645891 - RNA, 19 nt, Artificial Sequence
  Description of Artificial Sequence: Synthetic oligonucleotide
agcgauaccaagcugggga

SEQ ID NO: 1645892 - RNA, 19 nt, Artificial Sequence
  Description of Artificial Sequence: Synthetic oligonucleotide
caucggaaugaauucagag

SEQ ID NO: 1645893 - RNA, 19 nt, Artificial Sequence
  Description of Artificial Sequence: Synthetic oligonucleotide
gcggaaggaaaucugaucg

SEQ ID NO: 1645894 - RNA, 19 nt, Artificial Sequence
  Description of Artificial Sequence: Synthetic oligonucleotide
gaucucauuaaugugguga

SEQ ID NO: 1645895 - RNA, 19 nt, Artificial Sequence
  Description of Artificial Sequence: Synthetic oligonucleotide
aucggaaugaauucagagu

SEQ ID NO: 1645896 - RNA, 19 nt, Artificial Sequence
  Description of Artificial Sequence: Synthetic oligonucleotide
cauucguugcaccagggag

SEQ ID NO: 1645897 - RNA, 19 nt, Artificial Sequence
  Description of Artificial Sequence: Synthetic oligonucleotide
cauuaauguggugacaagc

SEQ ID NO: 1645898 - RNA, 19 nt, Artificial Sequence
  Description of Artificial Sequence: Synthetic oligonucleotide
cuagacgcaagcagggacg

SEQ ID NO: 1645899 - RNA, 19 nt, Artificial Sequence
  Description of Artificial Sequence: Synthetic oligonucleotide
cuaguaguacagcaaguag

SEQ ID NO: 1645900 - RNA, 19 nt, Artificial Sequence
  Description of Artificial Sequence: Synthetic oligonucleotide
uguuucccggagaagaaac

SEQ ID NO: 1645901 - RNA, 19 nt, Artificial Sequence
  Description of Artificial Sequence: Synthetic oligonucleotide
uugaucucauuaauguggu

SEQ ID NO: 1645902 - RNA, 19 nt, Artificial Sequence
  Description of Artificial Sequence: Synthetic oligonucleotide
uugcaauggccucuagggg

SEQ ID NO: 1645903 - RNA, 19 nt, Artificial Sequence
  Description of Artificial Sequence: Synthetic oligonucleotide
agaucauaagcugucgguc

SEQ ID NO: 1645904 - RNA, 19 nt, Artificial Sequence
  Description of Artificial Sequence: Synthetic oligonucleotide
uaaacaguggcaugaacuu

SEQ ID NO: 1645905 - RNA, 19 nt, Artificial Sequence
  Description of Artificial Sequence: Synthetic oligonucleotide
uaauguggugacaagcgau

SEQ ID NO: 1645906 - RNA, 19 nt, Artificial Sequence
  Description of Artificial Sequence: Synthetic oligonucleotide
gguccaagcgaccaggacg

SEQ ID NO: 1645907 - RNA, 19 nt, Artificial Sequence
  Description of Artificial Sequence: Synthetic oligonucleotide
agcggaaggaaaucugauc

SEQ ID NO: 1645908 - RNA, 19 nt, Artificial Sequence
  Description of Artificial Sequence: Synthetic oligonucleotide
uugguguaaacuccuggga

SEQ ID NO: 1645909 - RNA, 19 nt, Artificial Sequence
  Description of Artificial Sequence: Synthetic oligonucleotide
uaugcuauaggcagucuuu

SEQ ID NO: 1645910 - RNA, 19 nt, Artificial Sequence
  Description of Artificial Sequence: Synthetic oligonucleotide
caagcagggacguuccucc

SEQ ID NO: 1645911 - RNA, 19 nt, Artificial Sequence
  Description of Artificial Sequence: Synthetic oligonucleotide
ucugaucgagguuucuacc

SEQ ID NO: 1645912 - RNA, 19 nt, Artificial Sequence
  Description of Artificial Sequence: Synthetic oligonucleotide
uuaagauggcuuucacggc

SEQ ID NO: 1645913 - RNA, 19 nt, Artificial Sequence
  Description of Artificial Sequence: Synthetic oligonucleotide
auaggcagucuuugcauag

SEQ ID NO: 1645914 - RNA, 19 nt, Artificial Sequence
  Description of Artificial Sequence: Synthetic oligonucleotide
ugugcuggagccguaaaca

SEQ ID NO: 1645915 - RNA, 19 nt, Artificial Sequence
  Description of Artificial Sequence: Synthetic oligonucleotide
agaggacauucguugcacc

SEQ ID NO: 1645916 - RNA, 19 nt, Artificial Sequence
  Description of Artificial Sequence: Synthetic oligonucleotide
caagauguuaucuaguagu

SEQ ID NO: 1645917 - RNA, 19 nt, Artificial Sequence
  Description of Artificial Sequence: Synthetic oligonucleotide
gacgagauuguccaccuuc

SEQ ID NO: 1645918 - RNA, 19 nt, Artificial Sequence
  Description of Artificial Sequence: Synthetic oligonucleotide
agauguuaucuaguaguac

SEQ ID NO: 1645919 - RNA, 19 nt, Artificial Sequence
  Description of Artificial Sequence: Synthetic oligonucleotide
guaaacuccugggauaugc

SEQ ID NO: 1645920 - RNA, 19 nt, Artificial Sequence
  Description of Artificial Sequence: Synthetic oligonucleotide
caaacagcuuuguuucccg

SEQ ID NO: 1645921 - RNA, 19 nt, Artificial Sequence
  Description of Artificial Sequence: Synthetic oligonucleotide
accguccgccccuagacgc

SEQ ID NO: 1645922 - RNA, 19 nt, Artificial Sequence
  Description of Artificial Sequence: Synthetic oligonucleotide
ugugaaugauauccaagua

SEQ ID NO: 1645923 - RNA, 19 nt, Artificial Sequence
  Description of Artificial Sequence: Synthetic oligonucleotide
gagauuguccaccuucgac

SEQ ID NO: 1645924 - RNA, 19 nt, Artificial Sequence
  Description of Artificial Sequence: Synthetic oligonucleotide
caagcccuggaccaaagag

SEQ ID NO: 1645925 - RNA, 19 nt, Artificial Sequence
  Description of Artificial Sequence: Synthetic oligonucleotide
uucagaucauaagcugucg

SEQ ID NO: 1645926 - RNA, 19 nt, Artificial Sequence
  Description of Artificial Sequence: Synthetic oligonucleotide
ugguguaaacuccugggau

SEQ ID NO: 1645927 - RNA, 19 nt, Artificial Sequence
  Description of Artificial Sequence: Synthetic oligonucleotide
ucuaguaguacagcaagua

SEQ ID NO: 1645928 - RNA, 19 nt, Artificial Sequence
  Description of Artificial Sequence: Synthetic oligonucleotide
gaugaagacuucugcauaa

SEQ ID NO: 1645929 - RNA, 19 nt, Artificial Sequence
  Description of Artificial Sequence: Synthetic oligonucleotide
auucagaguagcuaugcua

SEQ ID NO: 1645930 - RNA, 19 nt, Artificial Sequence
  Description of Artificial Sequence: Synthetic oligonucleotide
uacgugugaaugauaucca

SEQ ID NO: 1645931 - RNA, 19 nt, Artificial Sequence
  Description of Artificial Sequence: Synthetic oligonucleotide
agcugucggucccaggagc

SEQ ID NO: 1645932 - RNA, 19 nt, Artificial Sequence
  Description of Artificial Sequence: Synthetic oligonucleotide
aucgagguuucuaccaacc

SEQ ID NO: 1645933 - RNA, 19 nt, Artificial Sequence
  Description of Artificial Sequence: Synthetic oligonucleotide
uccauguacgugugaauga

SEQ ID NO: 1645934 - RNA, 19 nt, Artificial Sequence
  Description of Artificial Sequence: Synthetic oligonucleotide
gauaccaagcuggggacag

SEQ ID NO: 1645935 - RNA, 19 nt, Artificial Sequence
  Description of Artificial Sequence: Synthetic oligonucleotide
uugcauagggccacuuggc

SEQ ID NO: 1645936 - RNA, 19 nt, Artificial Sequence
  Description of Artificial Sequence: Synthetic oligonucleotide
caagcgauaccaagcuggg

SEQ ID NO: 1645937 - RNA, 19 nt, Artificial Sequence
  Description of Artificial Sequence: Synthetic oligonucleotide
gaguugguagaauuugcuc

SEQ ID NO: 1645938 - RNA, 19 nt, Artificial Sequence
  Description of Artificial Sequence: Synthetic oligonucleotide
ucgagguuucuaccaaccc

SEQ ID NO: 1645939 - RNA, 19 nt, Artificial Sequence
  Description of Artificial Sequence: Synthetic oligonucleotide
aaugcguugcaagauguua

SEQ ID NO: 1645940 - RNA, 19 nt, Artificial Sequence
  Description of Artificial Sequence: Synthetic oligonucleotide
ugugcucgcgcuuucuucu

SEQ ID NO: 1645941 - RNA, 19 nt, Artificial Sequence
  Description of Artificial Sequence: Synthetic oligonucleotide
gugacaagcgauaccaagc

SEQ ID NO: 1645942 - RNA, 19 nt, Artificial Sequence
  Description of Artificial Sequence: Synthetic oligonucleotide
auguuaucuaguaguacag

SEQ ID NO: 1645943 - RNA, 19 nt, Artificial Sequence
  Description of Artificial Sequence: Synthetic oligonucleotide
ucugcauaagggugcugag

SEQ ID NO: 1645944 - RNA, 19 nt, Artificial Sequence
  Description of Artificial Sequence: Synthetic oligonucleotide
uugcaagauguuaucuagu

SEQ ID NO: 1645945 - RNA, 19 nt, Artificial Sequence
  Description of Artificial Sequence: Synthetic oligonucleotide
uccugugccauugacgaga

SEQ ID NO: 1645946 - RNA, 19 nt, Artificial Sequence
  Description of Artificial Sequence: Synthetic oligonucleotide
ggugacaagcgauaccaag

SEQ ID NO: 1645947 - RNA, 19 nt, Artificial Sequence
  Description of Artificial Sequence: Synthetic oligonucleotide
agcuggacccucauaaggg

SEQ ID NO: 1645948 - RNA, 19 nt, Artificial Sequence
  Description of Artificial Sequence: Synthetic oligonucleotide
cacguaacugggaauguuc

SEQ ID NO: 1645949 - RNA, 19 nt, Artificial Sequence
  Description of Artificial Sequence: Synthetic oligonucleotide
ccagaaacuauccacuuug

SEQ ID NO: 1645950 - RNA, 19 nt, Artificial Sequence
  Description of Artificial Sequence: Synthetic oligonucleotide
ugaucgagguuucuaccaa

SEQ ID NO: 1645951 - RNA, 19 nt, Artificial Sequence
  Description of Artificial Sequence: Synthetic oligonucleotide
ugcuauaggcagucuuugc

SEQ ID NO: 1645952 - RNA, 19 nt, Artificial Sequence
  Description of Artificial Sequence: Synthetic oligonucleotide
accaacccuucccugcucg

SEQ ID NO: 1645953 - RNA, 19 nt, Artificial Sequence
  Description of Artificial Sequence: Synthetic oligonucleotide
gaccaggacgagcggaagg

SEQ ID NO: 1645954 - RNA, 19 nt, Artificial Sequence
  Description of Artificial Sequence: Synthetic oligonucleotide
uugacgagauuguccaccu

SEQ ID NO: 1645955 - RNA, 19 nt, Artificial Sequence
  Description of Artificial Sequence: Synthetic oligonucleotide
agcuaugcuauaggcaguc

SEQ ID NO: 1645956 - RNA, 19 nt, Artificial Sequence
  Description of Artificial Sequence: Synthetic oligonucleotide
ugaagucccggcaggggca

SEQ ID NO: 1645957 - RNA, 19 nt, Artificial Sequence
  Description of Artificial Sequence: Synthetic oligonucleotide
cagaaacuauccacuuugc

SEQ ID NO: 1645958 - RNA, 19 nt, Artificial Sequence
  Description of Artificial Sequence: Synthetic oligonucleotide
cagaguagcuaugcuauag

SEQ ID NO: 1645959 - RNA, 19 nt, Artificial Sequence
  Description of Artificial Sequence: Synthetic oligonucleotide
aagauguuaucuaguagua

SEQ ID NO: 1645960 - RNA, 19 nt, Artificial Sequence
  Description of Artificial Sequence: Synthetic oligonucleotide
uauaggcagucuuugcaua

SEQ ID NO: 1645961 - RNA, 19 nt, Artificial Sequence
  Description of Artificial Sequence: Synthetic oligonucleotide
aacugggaauguucuuugu

SEQ ID NO: 1645962 - RNA, 19 nt, Artificial Sequence
  Description of Artificial Sequence: Synthetic oligonucleotide
ucuuaccucuguucucuug

SEQ ID NO: 1645963 - RNA, 19 nt, Artificial Sequence
  Description of Artificial Sequence: Synthetic oligonucleotide
uuuucacguaacugggaau

SEQ ID NO: 1645964 - RNA, 19 nt, Artificial Sequence
  Description of Artificial Sequence: Synthetic oligonucleotide
aaucccagcccaacaaaca

SEQ ID NO: 1645965 - RNA, 19 nt, Artificial Sequence
  Description of Artificial Sequence: Synthetic oligonucleotide
gaggacauucguugcacca

SEQ ID NO: 1645966 - RNA, 19 nt, Artificial Sequence
  Description of Artificial Sequence: Synthetic oligonucleotide
ucaccguccgccccuagac

SEQ ID NO: 1645967 - RNA, 19 nt, Artificial Sequence
  Description of Artificial Sequence: Synthetic oligonucleotide
ggcaugaacuuccauguac

SEQ ID NO: 1645968 - RNA, 19 nt, Artificial Sequence
  Description of Artificial Sequence: Synthetic oligonucleotide
gaucgagguuucuaccaac

SEQ ID NO: 1645969 - RNA, 19 nt, Artificial Sequence
  Description of Artificial Sequence: Synthetic oligonucleotide
ugguagaauuugcuccugu

SEQ ID NO: 1645970 - RNA, 19 nt, Artificial Sequence
  Description of Artificial Sequence: Synthetic oligonucleotide
auguacgugugaaugauau

SEQ ID NO: 1645971 - RNA, 19 nt, Artificial Sequence
  Description of Artificial Sequence: Synthetic oligonucleotide
gcaagauguuaucuaguag

SEQ ID NO: 1645972 - RNA, 19 nt, Artificial Sequence
  Description of Artificial Sequence: Synthetic oligonucleotide
aauguggugacaagcgaua

SEQ ID NO: 1645973 - RNA, 19 nt, Artificial Sequence
  Description of Artificial Sequence: Synthetic oligonucleotide
auguggugacaagcgauac

SEQ ID NO: 1645974 - RNA, 19 nt, Artificial Sequence
  Description of Artificial Sequence: Synthetic oligonucleotide
ugccauacacaagggacug

SEQ ID NO: 1645975 - RNA, 19 nt, Artificial Sequence
  Description of Artificial Sequence: Synthetic oligonucleotide
acgagauuguccaccuucg

SEQ ID NO: 1645976 - RNA, 19 nt, Artificial Sequence
  Description of Artificial Sequence: Synthetic oligonucleotide
ugcuggagccguaaacagu

SEQ ID NO: 1645977 - RNA, 19 nt, Artificial Sequence
  Description of Artificial Sequence: Synthetic oligonucleotide
uccagaaacuauccacuuu

SEQ ID NO: 1645978 - RNA, 19 nt, Artificial Sequence
  Description of Artificial Sequence: Synthetic oligonucleotide
ucgagcuugccaaugcguu

SEQ ID NO: 1645979 - RNA, 19 nt, Artificial Sequence
  Description of Artificial Sequence: Synthetic oligonucleotide
uucuuugugcuggagccgu

SEQ ID NO: 1645980 - RNA, 19 nt, Artificial Sequence
  Description of Artificial Sequence: Synthetic oligonucleotide
cucugagcuucugugcucg

SEQ ID NO: 1645981 - RNA, 19 nt, Artificial Sequence
  Description of Artificial Sequence: Synthetic oligonucleotide
gacgcaagcagggacguuc

SEQ ID NO: 1645982 - RNA, 19 nt, Artificial Sequence
  Description of Artificial Sequence: Synthetic oligonucleotide
uaagggugcugagacguca

SEQ ID NO: 1645983 - RNA, 19 nt, Artificial Sequence
  Description of Artificial Sequence: Synthetic oligonucleotide
ggacauucguugcaccagg

SEQ ID NO: 1645984 - RNA, 19 nt, Artificial Sequence
  Description of Artificial Sequence: Synthetic oligonucleotide
gacauucguugcaccaggg

SEQ ID NO: 1645985 - RNA, 19 nt, Artificial Sequence
  Description of Artificial Sequence: Synthetic oligonucleotide
uguggccggccgaugaaga

SEQ ID NO: 1645986 - RNA, 19 nt, Artificial Sequence
  Description of Artificial Sequence: Synthetic oligonucleotide
aggagauccccuucuucug

SEQ ID NO: 1645987 - RNA, 19 nt, Artificial Sequence
  Description of Artificial Sequence: Synthetic oligonucleotide
ugaucucauuaauguggug

SEQ ID NO: 1645988 - RNA, 19 nt, Artificial Sequence
  Description of Artificial Sequence: Synthetic oligonucleotide
uggacccucauaagggaau

SEQ ID NO: 1645989 - RNA, 19 nt, Artificial Sequence
  Description of Artificial Sequence: Synthetic oligonucleotide
acauucguugcaccaggga

SEQ ID NO: 1645990 - RNA, 19 nt, Artificial Sequence
  Description of Artificial Sequence: Synthetic oligonucleotide
uguacgugugaaugauauc

SEQ ID NO: 1645991 - RNA, 19 nt, Artificial Sequence
  Description of Artificial Sequence: Synthetic oligonucleotide
gcaguaccaaauccaagcc

SEQ ID NO: 1645992 - RNA, 19 nt, Artificial Sequence
  Description of Artificial Sequence: Synthetic oligonucleotide
guggcaugaacuuccaugu

SEQ ID NO: 1645993 - RNA, 19 nt, Artificial Sequence
  Description of Artificial Sequence: Synthetic oligonucleotide
acgguccagacguguggcc

SEQ ID NO: 1645994 - RNA, 19 nt, Artificial Sequence
  Description of Artificial Sequence: Synthetic oligonucleotide
auaagcugucggucccagg

SEQ ID NO: 1645995 - RNA, 19 nt, Artificial Sequence
  Description of Artificial Sequence: Synthetic oligonucleotide
aagcgauaccaagcugggg

SEQ ID NO: 1645996 - RNA, 19 nt, Artificial Sequence
  Description of Artificial Sequence: Synthetic oligonucleotide
gcuauaggcagucuuugca

SEQ ID NO: 1645997 - RNA, 19 nt, Artificial Sequence
  Description of Artificial Sequence: Synthetic oligonucleotide
cugaggcgcggcuaccugg

SEQ ID NO: 1645998 - RNA, 19 nt, Artificial Sequence
  Description of Artificial Sequence: Synthetic oligonucleotide
ucccaucggaaugaauuca

SEQ ID NO: 1645999 - RNA, 19 nt, Artificial Sequence
  Description of Artificial Sequence: Synthetic oligonucleotide
ugggauaugcuggcugcag

SEQ ID NO: 1646000 - RNA, 19 nt, Artificial Sequence
  Description of Artificial Sequence: Synthetic oligonucleotide
gagaggacauucguugcac

SEQ ID NO: 1646001 - RNA, 19 nt, Artificial Sequence
  Description of Artificial Sequence: Synthetic oligonucleotide
ucgcgcuuucuucuaggca

SEQ ID NO: 1646002 - RNA, 19 nt, Artificial Sequence
  Description of Artificial Sequence: Synthetic oligonucleotide
uuugugcuggagccguaaa

SEQ ID NO: 1646003 - RNA, 19 nt, Artificial Sequence
  Description of Artificial Sequence: Synthetic oligonucleotide
uggccucuaggggagcugg

SEQ ID NO: 1646004 - RNA, 19 nt, Artificial Sequence
  Description of Artificial Sequence: Synthetic oligonucleotide
cucgcgcuuucuucuaggc

SEQ ID NO: 1646005 - RNA, 19 nt, Artificial Sequence
  Description of Artificial Sequence: Synthetic oligonucleotide
ggauccacgguccagacgu

SEQ ID NO: 1646006 - RNA, 19 nt, Artificial Sequence
  Description of Artificial Sequence: Synthetic oligonucleotide
accucccuaacuucucuga

SEQ ID NO: 1646007 - RNA, 19 nt, Artificial Sequence
  Description of Artificial Sequence: Synthetic oligonucleotide
cuuugccauacacaaggga

SEQ ID NO: 1646008 - RNA, 19 nt, Artificial Sequence
  Description of Artificial Sequence: Synthetic oligonucleotide
ucggcuugccaaugaagaa

SEQ ID NO: 1646009 - RNA, 19 nt, Artificial Sequence
  Description of Artificial Sequence: Synthetic oligonucleotide
uucaccguccgccccuaga

SEQ ID NO: 1646010 - RNA, 19 nt, Artificial Sequence
  Description of Artificial Sequence: Synthetic oligonucleotide
cugccuuuugaucucauua

SEQ ID NO: 1646011 - RNA, 19 nt, Artificial Sequence
  Description of Artificial Sequence: Synthetic oligonucleotide
augcuauaggcagucuuug

SEQ ID NO: 1646012 - RNA, 19 nt, Artificial Sequence
  Description of Artificial Sequence: Synthetic oligonucleotide
uggaucgagccuggggccg

SEQ ID NO: 1646013 - RNA, 19 nt, Artificial Sequence
  Description of Artificial Sequence: Synthetic oligonucleotide
uagcuaugcuauaggcagu

SEQ ID NO: 1646014 - RNA, 19 nt, Artificial Sequence
  Description of Artificial Sequence: Synthetic oligonucleotide
acuaccagcccuggcgggg

SEQ ID NO: 1646015 - RNA, 19 nt, Artificial Sequence
  Description of Artificial Sequence: Synthetic oligonucleotide
aacuuccauguacguguga

SEQ ID NO: 1646016 - RNA, 19 nt, Artificial Sequence
  Description of Artificial Sequence: Synthetic oligonucleotide
ugcucgcgcuuucuucuag

SEQ ID NO: 1646017 - RNA, 19 nt, Artificial Sequence
  Description of Artificial Sequence: Synthetic oligonucleotide
acgugugaaugauauccaa

SEQ ID NO: 1646018 - RNA, 19 nt, Artificial Sequence
  Description of Artificial Sequence: Synthetic oligonucleotide
ccuaacuucucugagcuuc

SEQ ID NO: 1646019 - RNA, 19 nt, Artificial Sequence
  Description of Artificial Sequence: Synthetic oligonucleotide
uucguugcaccagggagaa

SEQ ID NO: 1646020 - RNA, 19 nt, Artificial Sequence
  Description of Artificial Sequence: Synthetic oligonucleotide
ccauugacgagauugucca

SEQ ID NO: 1646021 - RNA, 19 nt, Artificial Sequence
  Description of Artificial Sequence: Synthetic oligonucleotide
uaagggaaucccagcccaa

SEQ ID NO: 1646022 - RNA, 19 nt, Artificial Sequence
  Description of Artificial Sequence: Synthetic oligonucleotide
gcagggacguuccuccugg

SEQ ID NO: 1646023 - RNA, 19 nt, Artificial Sequence
  Description of Artificial Sequence: Synthetic oligonucleotide
agccguaaacaguggcaug

SEQ ID NO: 1646024 - RNA, 19 nt, Artificial Sequence
  Description of Artificial Sequence: Synthetic oligonucleotide
acgcaagcagggacguucc

SEQ ID NO: 1646025 - RNA, 19 nt, Artificial Sequence
  Description of Artificial Sequence: Synthetic oligonucleotide
accaggacgagcggaagga

SEQ ID NO: 1646026 - RNA, 19 nt, Artificial Sequence
  Description of Artificial Sequence: Synthetic oligonucleotide
uuguuucccggagaagaaa

SEQ ID NO: 1646027 - RNA, 19 nt, Artificial Sequence
  Description of Artificial Sequence: Synthetic oligonucleotide
uggucuuaccucuguucuc

SEQ ID NO: 1646028 - RNA, 19 nt, Artificial Sequence
  Description of Artificial Sequence: Synthetic oligonucleotide
cucagggucggcuugccaa

SEQ ID NO: 1646029 - RNA, 19 nt, Artificial Sequence
  Description of Artificial Sequence: Synthetic oligonucleotide
gccauugacgagauugucc

SEQ ID NO: 1646030 - RNA, 19 nt, Artificial Sequence
  Description of Artificial Sequence: Synthetic oligonucleotide
guccaagcgaccaggacga

SEQ ID NO: 1646031 - RNA, 19 nt, Artificial Sequence
  Description of Artificial Sequence: Synthetic oligonucleotide
agcagggacguuccuccug

SEQ ID NO: 1646032 - RNA, 19 nt, Artificial Sequence
  Description of Artificial Sequence: Synthetic oligonucleotide
aggucacgcccacugagaa

SEQ ID NO: 1646033 - RNA, 19 nt, Artificial Sequence
  Description of Artificial Sequence: Synthetic oligonucleotide
agucccugaaugacuucgg

SEQ ID NO: 1646034 - RNA, 19 nt, Artificial Sequence
  Description of Artificial Sequence: Synthetic oligonucleotide
aucuaguaguacagcaagu

SEQ ID NO: 1646035 - RNA, 19 nt, Artificial Sequence
  Description of Artificial Sequence: Synthetic oligonucleotide
ucagaguagcuaugcuaua

SEQ ID NO: 1646036 - RNA, 19 nt, Artificial Sequence
  Description of Artificial Sequence: Synthetic oligonucleotide
ucauaagcugucgguccca

SEQ ID NO: 1646037 - RNA, 19 nt, Artificial Sequence
  Description of Artificial Sequence: Synthetic oligonucleotide
auaccaagcuggggacagc

SEQ ID NO: 1646038 - RNA, 19 nt, Artificial Sequence
  Description of Artificial Sequence: Synthetic oligonucleotide
cacuuggcccuugaugaag

SEQ ID NO: 1646039 - RNA, 19 nt, Artificial Sequence
  Description of Artificial Sequence: Synthetic oligonucleotide
ccugggauaugcuggcugc

SEQ ID NO: 1646040 - RNA, 19 nt, Artificial Sequence
  Description of Artificial Sequence: Synthetic oligonucleotide
cauugacgagauuguccac

SEQ ID NO: 1646041 - RNA, 19 nt, Artificial Sequence
  Description of Artificial Sequence: Synthetic oligonucleotide
uguaaacuccugggauaug

SEQ ID NO: 1646042 - RNA, 19 nt, Artificial Sequence
  Description of Artificial Sequence: Synthetic oligonucleotide
augcguugcaagauguuau

SEQ ID NO: 1646043 - RNA, 19 nt, Artificial Sequence
  Description of Artificial Sequence: Synthetic oligonucleotide
ucagggucggcuugccaau

SEQ ID NO: 1646044 - RNA, 19 nt, Artificial Sequence
  Description of Artificial Sequence: Synthetic oligonucleotide
ggugcugagacgucagcuc

SEQ ID NO: 1646045 - RNA, 19 nt, Artificial Sequence
  Description of Artificial Sequence: Synthetic oligonucleotide
uaccugggcuggaucgagc

SEQ ID NO: 1646046 - RNA, 19 nt, Artificial Sequence
  Description of Artificial Sequence: Synthetic oligonucleotide
gguguaaacuccugggaua

SEQ ID NO: 1646047 - RNA, 19 nt, Artificial Sequence
  Description of Artificial Sequence: Synthetic oligonucleotide
ucucucagggucggcuugc

SEQ ID NO: 1646048 - RNA, 19 nt, Artificial Sequence
  Description of Artificial Sequence: Synthetic oligonucleotide
cagaucauaagcugucggu

SEQ ID NO: 1646049 - RNA, 19 nt, Artificial Sequence
  Description of Artificial Sequence: Synthetic oligonucleotide
ucgaccucccuaacuucuc

SEQ ID NO: 1646050 - RNA, 19 nt, Artificial Sequence
  Description of Artificial Sequence: Synthetic oligonucleotide
cgauugucaggauccacgg

SEQ ID NO: 1646051 - RNA, 19 nt, Artificial Sequence
  Description of Artificial Sequence: Synthetic oligonucleotide
uagacgcaagcagggacgu

SEQ ID NO: 1646052 - RNA, 19 nt, Artificial Sequence
  Description of Artificial Sequence: Synthetic oligonucleotide
ggagcggggucacagcgcc

SEQ ID NO: 1646053 - RNA, 19 nt, Artificial Sequence
  Description of Artificial Sequence: Synthetic oligonucleotide
cauaagcugucggucccag

SEQ ID NO: 1646054 - RNA, 19 nt, Artificial Sequence
  Description of Artificial Sequence: Synthetic oligonucleotide
cccaucggaaugaauucag

SEQ ID NO: 1646055 - RNA, 19 nt, Artificial Sequence
  Description of Artificial Sequence: Synthetic oligonucleotide
ccuagacgcaagcagggac

SEQ ID NO: 1646056 - RNA, 19 nt, Artificial Sequence
  Description of Artificial Sequence: Synthetic oligonucleotide
ucucgauugucaggaucca

SEQ ID NO: 1646057 - RNA, 19 nt, Artificial Sequence
  Description of Artificial Sequence: Synthetic oligonucleotide
gggauaugcuggcugcagc

SEQ ID NO: 1646058 - RNA, 19 nt, Artificial Sequence
  Description of Artificial Sequence: Synthetic oligonucleotide
uggugacaagcgauaccaa

SEQ ID NO: 1646059 - RNA, 19 nt, Artificial Sequence
  Description of Artificial Sequence: Synthetic oligonucleotide
gguccagacguguggccgg

SEQ ID NO: 1646060 - RNA, 19 nt, Artificial Sequence
  Description of Artificial Sequence: Synthetic oligonucleotide
gccgaugaagacuucugca

SEQ ID NO: 1646061 - RNA, 19 nt, Artificial Sequence
  Description of Artificial Sequence: Synthetic oligonucleotide
aggacgagcggaaggaaau

SEQ ID NO: 1646062 - RNA, 19 nt, Artificial Sequence
  Description of Artificial Sequence: Synthetic oligonucleotide
gcagggacggucugcaaac

SEQ ID NO: 1646063 - RNA, 19 nt, Artificial Sequence
  Description of Artificial Sequence: Synthetic oligonucleotide
cuuucacggcauccucuac

SEQ ID NO: 1646064 - RNA, 19 nt, Artificial Sequence
  Description of Artificial Sequence: Synthetic oligonucleotide
ucacguaacugggaauguu

SEQ ID NO: 1646065 - RNA, 19 nt, Artificial Sequence
  Description of Artificial Sequence: Synthetic oligonucleotide
cacgguccagacguguggc

SEQ ID NO: 1646066 - RNA, 19 nt, Artificial Sequence
  Description of Artificial Sequence: Synthetic oligonucleotide
acguguggccggccgauga

SEQ ID NO: 1646067 - RNA, 19 nt, Artificial Sequence
  Description of Artificial Sequence: Synthetic oligonucleotide
gaagucccggcaggggcag

SEQ ID NO: 1646068 - RNA, 19 nt, Artificial Sequence
  Description of Artificial Sequence: Synthetic oligonucleotide
ccucuuucccaucggaaug

SEQ ID NO: 1646069 - RNA, 19 nt, Artificial Sequence
  Description of Artificial Sequence: Synthetic oligonucleotide
acgagcggaaggaaaucug

SEQ ID NO: 1646070 - RNA, 19 nt, Artificial Sequence
  Description of Artificial Sequence: Synthetic oligonucleotide
uguccaccuucgacucgag

SEQ ID NO: 1646071 - RNA, 19 nt, Artificial Sequence
  Description of Artificial Sequence: Synthetic oligonucleotide
cccggcacaacugaagagc

SEQ ID NO: 1646072 - RNA, 19 nt, Artificial Sequence
  Description of Artificial Sequence: Synthetic oligonucleotide
ugccauugacgagauuguc

SEQ ID NO: 1646073 - RNA, 19 nt, Artificial Sequence
  Description of Artificial Sequence: Synthetic oligonucleotide
gacggucugcaaacuacca

SEQ ID NO: 1646074 - RNA, 19 nt, Artificial Sequence
  Description of Artificial Sequence: Synthetic oligonucleotide
gccccuagacgcaagcagg

SEQ ID NO: 1646075 - RNA, 19 nt, Artificial Sequence
  Description of Artificial Sequence: Synthetic oligonucleotide
ccaaauccaagcccuggac

SEQ ID NO: 1646076 - RNA, 19 nt, Artificial Sequence
  Description of Artificial Sequence: Synthetic oligonucleotide
uggccggccgaugaagacu

SEQ ID NO: 1646077 - RNA, 19 nt, Artificial Sequence
  Description of Artificial Sequence: Synthetic oligonucleotide
accuucgacucgagcuugc

SEQ ID NO: 1646078 - RNA, 19 nt, Artificial Sequence
  Description of Artificial Sequence: Synthetic oligonucleotide
caccguccgccccuagacg

SEQ ID NO: 1646079 - RNA, 19 nt, Artificial Sequence
  Description of Artificial Sequence: Synthetic oligonucleotide
cucuuucccaucggaauga

SEQ ID NO: 1646080 - RNA, 19 nt, Artificial Sequence
  Description of Artificial Sequence: Synthetic oligonucleotide
cucgauugucaggauccac

SEQ ID NO: 1646081 - RNA, 19 nt, Artificial Sequence
  Description of Artificial Sequence: Synthetic oligonucleotide
caccgcgggagccgcaggg

SEQ ID NO: 1646082 - RNA, 19 nt, Artificial Sequence
  Description of Artificial Sequence: Synthetic oligonucleotide
gauugucaggauccacggu

SEQ ID NO: 1646083 - RNA, 19 nt, Artificial Sequence
  Description of Artificial Sequence: Synthetic oligonucleotide
agggucggcuugccaauga

SEQ ID NO: 1646084 - RNA, 19 nt, Artificial Sequence
  Description of Artificial Sequence: Synthetic oligonucleotide
cuaccugggcuggaucgag

SEQ ID NO: 1646085 - RNA, 19 nt, Artificial Sequence
  Description of Artificial Sequence: Synthetic oligonucleotide
gccguaaacaguggcauga

SEQ ID NO: 1646086 - RNA, 19 nt, Artificial Sequence
  Description of Artificial Sequence: Synthetic oligonucleotide
cauuugcaauggccucuag

SEQ ID NO: 1646087 - RNA, 19 nt, Artificial Sequence
  Description of Artificial Sequence: Synthetic oligonucleotide
cuucgacucgagcuugcca

SEQ ID NO: 1646088 - RNA, 19 nt, Artificial Sequence
  Description of Artificial Sequence: Synthetic oligonucleotide
ccugaaugacuucggcccc

SEQ ID NO: 1646089 - RNA, 19 nt, Artificial Sequence
  Description of Artificial Sequence: Synthetic oligonucleotide
gacgagcggaaggaaaucu

SEQ ID NO: 1646090 - RNA, 19 nt, Artificial Sequence
  Description of Artificial Sequence: Synthetic oligonucleotide
gcucgcgcuuucuucuagg

SEQ ID NO: 1646091 - RNA, 19 nt, Artificial Sequence
  Description of Artificial Sequence: Synthetic oligonucleotide
ccucuaggggagcuggacc

SEQ ID NO: 1646092 - RNA, 19 nt, Artificial Sequence
  Description of Artificial Sequence: Synthetic oligonucleotide
gggacggucugcaaacuac

SEQ ID NO: 1646093 - RNA, 19 nt, Artificial Sequence
  Description of Artificial Sequence: Synthetic oligonucleotide
agggacggucugcaaacua

SEQ ID NO: 1646094 - RNA, 19 nt, Artificial Sequence
  Description of Artificial Sequence: Synthetic oligonucleotide
agcgaccaggacgagcgga

SEQ ID NO: 1646095 - RNA, 19 nt, Artificial Sequence
  Description of Artificial Sequence: Synthetic oligonucleotide
gcgauaccaagcuggggac

SEQ ID NO: 1646096 - RNA, 19 nt, Artificial Sequence
  Description of Artificial Sequence: Synthetic oligonucleotide
ggagccguaaacaguggca

SEQ ID NO: 1646097 - RNA, 19 nt, Artificial Sequence
  Description of Artificial Sequence: Synthetic oligonucleotide
aggcgcggcuaccugggcu

SEQ ID NO: 1646098 - RNA, 19 nt, Artificial Sequence
  Description of Artificial Sequence: Synthetic oligonucleotide
gggaaucccagcccaacaa

SEQ ID NO: 1646099 - RNA, 19 nt, Artificial Sequence
  Description of Artificial Sequence: Synthetic oligonucleotide
ggucggcuugccaaugaag

SEQ ID NO: 1646100 - RNA, 19 nt, Artificial Sequence
  Description of Artificial Sequence: Synthetic oligonucleotide
gcaaacuaccagcccuggc

SEQ ID NO: 1646101 - RNA, 19 nt, Artificial Sequence
  Description of Artificial Sequence: Synthetic oligonucleotide
caggacgagcggaaggaaa

SEQ ID NO: 1646102 - RNA, 19 nt, Artificial Sequence
  Description of Artificial Sequence: Synthetic oligonucleotide
cauguacgugugaaugaua

SEQ ID NO: 1646103 - RNA, 19 nt, Artificial Sequence
  Description of Artificial Sequence: Synthetic oligonucleotide
uaccaacccuucccugcuc

SEQ ID NO: 1646104 - RNA, 19 nt, Artificial Sequence
  Description of Artificial Sequence: Synthetic oligonucleotide
cuaugcuauaggcagucuu

SEQ ID NO: 1646105 - RNA, 19 nt, Artificial Sequence
  Description of Artificial Sequence: Synthetic oligonucleotide
gagccguaaacaguggcau

SEQ ID NO: 1646106 - RNA, 19 nt, Artificial Sequence
  Description of Artificial Sequence: Synthetic oligonucleotide
cucgaccucccuaacuucu

SEQ ID NO: 1646107 - RNA, 19 nt, Artificial Sequence
  Description of Artificial Sequence: Synthetic oligonucleotide
ggcgcggcuaccugggcug

SEQ ID NO: 1646108 - RNA, 19 nt, Artificial Sequence
  Description of Artificial Sequence: Synthetic oligonucleotide
gcuggacccucauaaggga

SEQ ID NO: 1646109 - RNA, 19 nt, Artificial Sequence
  Description of Artificial Sequence: Synthetic oligonucleotide
guguaaacuccugggauau

SEQ ID NO: 1646110 - RNA, 19 nt, Artificial Sequence
  Description of Artificial Sequence: Synthetic oligonucleotide
guggccggccgaugaagac

SEQ ID NO: 1646111 - RNA, 19 nt, Artificial Sequence
  Description of Artificial Sequence: Synthetic oligonucleotide
ugacgagauuguccaccuu

SEQ ID NO: 1646112 - RNA, 19 nt, Artificial Sequence
  Description of Artificial Sequence: Synthetic oligonucleotide
agcuugccaaugcguugca

SEQ ID NO: 1646113 - RNA, 19 nt, Artificial Sequence
  Description of Artificial Sequence: Synthetic oligonucleotide
caccuucgacucgagcuug

SEQ ID NO: 1646114 - RNA, 19 nt, Artificial Sequence
  Description of Artificial Sequence: Synthetic oligonucleotide
cucggcagggacggucugc

SEQ ID NO: 1646115 - RNA, 19 nt, Artificial Sequence
  Description of Artificial Sequence: Synthetic oligonucleotide
caagggacugguucugccu

SEQ ID NO: 1646116 - RNA, 19 nt, Artificial Sequence
  Description of Artificial Sequence: Synthetic oligonucleotide
cagggacguuccuccuggg

SEQ ID NO: 1646117 - RNA, 19 nt, Artificial Sequence
  Description of Artificial Sequence: Synthetic oligonucleotide
ggucuuaccucuguucucu

SEQ ID NO: 1646118 - RNA, 19 nt, Artificial Sequence
  Description of Artificial Sequence: Synthetic oligonucleotide
ggacagagaggacauucgu

SEQ ID NO: 1646119 - RNA, 19 nt, Artificial Sequence
  Description of Artificial Sequence: Synthetic oligonucleotide
cugucggucccaggagcag

SEQ ID NO: 1646120 - RNA, 19 nt, Artificial Sequence
  Description of Artificial Sequence: Synthetic oligonucleotide
cgcgcuuucuucuaggcaa

SEQ ID NO: 1646121 - RNA, 19 nt, Artificial Sequence
  Description of Artificial Sequence: Synthetic oligonucleotide
cuuugugcuggagccguaa

SEQ ID NO: 1646122 - RNA, 19 nt, Artificial Sequence
  Description of Artificial Sequence: Synthetic oligonucleotide
cuucugguuuaagauggcu

SEQ ID NO: 1646123 - RNA, 19 nt, Artificial Sequence
  Description of Artificial Sequence: Synthetic oligonucleotide
cuaccaacccuucccugcu

SEQ ID NO: 1646124 - RNA, 19 nt, Artificial Sequence
  Description of Artificial Sequence: Synthetic oligonucleotide
uccaagcgaccaggacgag

SEQ ID NO: 1646125 - RNA, 19 nt, Artificial Sequence
  Description of Artificial Sequence: Synthetic oligonucleotide
gcaagcagggacguuccuc

SEQ ID NO: 1646126 - RNA, 19 nt, Artificial Sequence
  Description of Artificial Sequence: Synthetic oligonucleotide
guuucccggagaagaaacu

SEQ ID NO: 1646127 - RNA, 19 nt, Artificial Sequence
  Description of Artificial Sequence: Synthetic oligonucleotide
agacguguggccggccgau

SEQ ID NO: 1646128 - RNA, 19 nt, Artificial Sequence
  Description of Artificial Sequence: Synthetic oligonucleotide
gaucgagccuggggccgcc

SEQ ID NO: 1646129 - RNA, 19 nt, Artificial Sequence
  Description of Artificial Sequence: Synthetic oligonucleotide
gccccggcacaacugaaga

SEQ ID NO: 1646130 - RNA, 19 nt, Artificial Sequence
  Description of Artificial Sequence: Synthetic oligonucleotide
caauggccucuaggggagc

SEQ ID NO: 1646131 - RNA, 19 nt, Artificial Sequence
  Description of Artificial Sequence: Synthetic oligonucleotide
ccggcacaacugaagagca

SEQ ID NO: 1646132 - RNA, 19 nt, Artificial Sequence
  Description of Artificial Sequence: Synthetic oligonucleotide
cgagcuugccaaugcguug

SEQ ID NO: 1646133 - RNA, 19 nt, Artificial Sequence
  Description of Artificial Sequence: Synthetic oligonucleotide
gacguguggccggccgaug

SEQ ID NO: 1646134 - RNA, 19 nt, Artificial Sequence
  Description of Artificial Sequence: Synthetic oligonucleotide
uccagacguguggccggcc

SEQ ID NO: 1646135 - RNA, 19 nt, Artificial Sequence
  Description of Artificial Sequence: Synthetic oligonucleotide
ccuggguccaagcgaccag

SEQ ID NO: 1646136 - RNA, 19 nt, Artificial Sequence
  Description of Artificial Sequence: Synthetic oligonucleotide
cgagcggaaggaaaucuga

SEQ ID NO: 1646137 - RNA, 19 nt, Artificial Sequence
  Description of Artificial Sequence: Synthetic oligonucleotide
ccaucggaaugaauucaga

SEQ ID NO: 1646138 - RNA, 19 nt, Artificial Sequence
  Description of Artificial Sequence: Synthetic oligonucleotide
guucaccguccgccccuag

SEQ ID NO: 1646139 - RNA, 19 nt, Artificial Sequence
  Description of Artificial Sequence: Synthetic oligonucleotide
agucccggcaggggcagau

SEQ ID NO: 1646140 - RNA, 19 nt, Artificial Sequence
  Description of Artificial Sequence: Synthetic oligonucleotide
cgccccuagacgcaagcag

SEQ ID NO: 1646141 - RNA, 19 nt, Artificial Sequence
  Description of Artificial Sequence: Synthetic oligonucleotide
ccccggcacaacugaagag

SEQ ID NO: 1646142 - RNA, 19 nt, Artificial Sequence
  Description of Artificial Sequence: Synthetic oligonucleotide
cagggucggcuugccaaug

SEQ ID NO: 1646143 - RNA, 19 nt, Artificial Sequence
  Description of Artificial Sequence: Synthetic oligonucleotide
aucgagccuggggccgccg

SEQ ID NO: 1646144 - RNA, 19 nt, Artificial Sequence
  Description of Artificial Sequence: Synthetic oligonucleotide
gcagcgcguucaccguccg

SEQ ID NO: 1646145 - RNA, 19 nt, Artificial Sequence
  Description of Artificial Sequence: Synthetic oligonucleotide
gcgagcgggccucggcagg

SEQ ID NO: 1646146 - RNA, 19 nt, Artificial Sequence
  Description of Artificial Sequence: Synthetic oligonucleotide
ucguugcaccagggagaag

SEQ ID NO: 1646147 - RNA, 19 nt, Artificial Sequence
  Description of Artificial Sequence: Synthetic oligonucleotide
cagcgcguucaccguccgc

SEQ ID NO: 1646148 - RNA, 19 nt, Artificial Sequence
  Description of Artificial Sequence: Synthetic oligonucleotide
ggacgagcggaaggaaauc

SEQ ID NO: 1646149 - RNA, 19 nt, Artificial Sequence
  Description of Artificial Sequence: Synthetic oligonucleotide
gcugucggucccaggagca

SEQ ID NO: 1646150 - RNA, 19 nt, Artificial Sequence
  Description of Artificial Sequence: Synthetic oligonucleotide
gguggaguugguagaauuu

SEQ ID NO: 1646151 - RNA, 19 nt, Artificial Sequence
  Description of Artificial Sequence: Synthetic oligonucleotide
cuuucccaucggaaugaau

SEQ ID NO: 1646152 - RNA, 19 nt, Artificial Sequence
  Description of Artificial Sequence: Synthetic oligonucleotide
gccucuaggggagcuggac

SEQ ID NO: 1646153 - RNA, 19 nt, Artificial Sequence
  Description of Artificial Sequence: Synthetic oligonucleotide
guaguacagcaaguaguuu

SEQ ID NO: 1646154 - RNA, 19 nt, Artificial Sequence
  Description of Artificial Sequence: Synthetic oligonucleotide
ccuucgacucgagcuugcc

SEQ ID NO: 1646155 - RNA, 19 nt, Artificial Sequence
  Description of Artificial Sequence: Synthetic oligonucleotide
ggccccuggucuuaccucu

SEQ ID NO: 1646156 - RNA, 19 nt, Artificial Sequence
  Description of Artificial Sequence: Synthetic oligonucleotide
cgcagcgcguucaccgucc

SEQ ID NO: 1646157 - RNA, 19 nt, Artificial Sequence
  Description of Artificial Sequence: Synthetic oligonucleotide
ggaucgagccuggggccgc

SEQ ID NO: 1646158 - RNA, 19 nt, Artificial Sequence
  Description of Artificial Sequence: Synthetic oligonucleotide
cggaaggaaaucugaucga

SEQ ID NO: 1646159 - RNA, 19 nt, Artificial Sequence
  Description of Artificial Sequence: Synthetic oligonucleotide
cugcucgaccucccuaacu

SEQ ID NO: 1646160 - RNA, 19 nt, Artificial Sequence
  Description of Artificial Sequence: Synthetic oligonucleotide
cggccgaugaagacuucug

SEQ ID NO: 1646161 - RNA, 19 nt, Artificial Sequence
  Description of Artificial Sequence: Synthetic oligonucleotide
gggucggcuugccaaugaa

SEQ ID NO: 1646162 - RNA, 19 nt, Artificial Sequence
  Description of Artificial Sequence: Synthetic oligonucleotide
cgagguuucuaccaacccu

SEQ ID NO: 1646163 - RNA, 19 nt, Artificial Sequence
  Description of Artificial Sequence: Synthetic oligonucleotide
gcuaccugggcuggaucga

SEQ ID NO: 1646164 - RNA, 19 nt, Artificial Sequence
  Description of Artificial Sequence: Synthetic oligonucleotide
caggggcagauccucuggu

SEQ ID NO: 1646165 - RNA, 19 nt, Artificial Sequence
  Description of Artificial Sequence: Synthetic oligonucleotide
ggcuuucacggcauccucu

SEQ ID NO: 1646166 - RNA, 19 nt, Artificial Sequence
  Description of Artificial Sequence: Synthetic oligonucleotide
ccugcucgaccucccuaac

SEQ ID NO: 1646167 - RNA, 19 nt, Artificial Sequence
  Description of Artificial Sequence: Synthetic oligonucleotide
gugcucgcgcuuucuucua

SEQ ID NO: 1646168 - RNA, 19 nt, Artificial Sequence
  Description of Artificial Sequence: Synthetic oligonucleotide
ccaaguagauuuucuuauu

SEQ ID NO: 1646169 - RNA, 19 nt, Artificial Sequence
  Description of Artificial Sequence: Synthetic oligonucleotide
gcugagacgucagcucucu

SEQ ID NO: 1646170 - RNA, 19 nt, Artificial Sequence
  Description of Artificial Sequence: Synthetic oligonucleotide
gcgaccaggacgagcggaa

SEQ ID NO: 1646171 - RNA, 19 nt, Artificial Sequence
  Description of Artificial Sequence: Synthetic oligonucleotide
agacgcaagcagggacguu

SEQ ID NO: 1646172 - RNA, 19 nt, Artificial Sequence
  Description of Artificial Sequence: Synthetic oligonucleotide
cccagagccugaggcgcgg

SEQ ID NO: 1646173 - RNA, 19 nt, Artificial Sequence
  Description of Artificial Sequence: Synthetic oligonucleotide
ccauguacgugugaaugau

SEQ ID NO: 1646174 - RNA, 19 nt, Artificial Sequence
  Description of Artificial Sequence: Synthetic oligonucleotide
gcgcagcgcguucaccguc

SEQ ID NO: 1646175 - RNA, 19 nt, Artificial Sequence
  Description of Artificial Sequence: Synthetic oligonucleotide
cgagauuguccaccuucga

SEQ ID NO: 1646176 - RNA, 19 nt, Artificial Sequence
  Description of Artificial Sequence: Synthetic oligonucleotide
ggucacgcccacugagaau

SEQ ID NO: 1646177 - RNA, 19 nt, Artificial Sequence
  Description of Artificial Sequence: Synthetic oligonucleotide
ccaacccuucccugcucga

SEQ ID NO: 1646178 - RNA, 19 nt, Artificial Sequence
  Description of Artificial Sequence: Synthetic oligonucleotide
gcguucaccguccgccccu

SEQ ID NO: 1646179 - RNA, 19 nt, Artificial Sequence
  Description of Artificial Sequence: Synthetic oligonucleotide
gcgcggcuaccugggcugg

SEQ ID NO: 1646180 - RNA, 19 nt, Artificial Sequence
  Description of Artificial Sequence: Synthetic oligonucleotide
gcucucucagggucggcuu

SEQ ID NO: 1646181 - RNA, 19 nt, Artificial Sequence
  Description of Artificial Sequence: Synthetic oligonucleotide
gccccuggucuuaccucug

SEQ ID NO: 1646182 - RNA, 19 nt, Artificial Sequence
  Description of Artificial Sequence: Synthetic oligonucleotide
ccguaaacaguggcaugaa

SEQ ID NO: 1646183 - RNA, 19 nt, Artificial Sequence
  Description of Artificial Sequence: Synthetic oligonucleotide
cagggacggucugcaaacu

SEQ ID NO: 1646184 - RNA, 19 nt, Artificial Sequence
  Description of Artificial Sequence: Synthetic oligonucleotide
ggccggccgaugaagacuu

SEQ ID NO: 1646185 - RNA, 19 nt, Artificial Sequence
  Description of Artificial Sequence: Synthetic oligonucleotide
ccugugccauugacgagau

SEQ ID NO: 1646186 - RNA, 19 nt, Artificial Sequence
  Description of Artificial Sequence: Synthetic oligonucleotide
ggccucuaggggagcugga

SEQ ID NO: 1646187 - RNA, 19 nt, Artificial Sequence
  Description of Artificial Sequence: Synthetic oligonucleotide
ccguccgccccuagacgca

SEQ ID NO: 1646188 - RNA, 19 nt, Artificial Sequence
  Description of Artificial Sequence: Synthetic oligonucleotide
ccaggacgagcggaaggaa

SEQ ID NO: 1646189 - RNA, 19 nt, Artificial Sequence
  Description of Artificial Sequence: Synthetic oligonucleotide
ggggugggccccggcacaa

SEQ ID NO: 1646190 - RNA, 19 nt, Artificial Sequence
  Description of Artificial Sequence: Synthetic oligonucleotide
ccucuacuuccucucgauu

SEQ ID NO: 1646191 - RNA, 19 nt, Artificial Sequence
  Description of Artificial Sequence: Synthetic oligonucleotide
cguguggccggccgaugaa

SEQ ID NO: 1646192 - RNA, 19 nt, Artificial Sequence
  Description of Artificial Sequence: Synthetic oligonucleotide
ccgccccuagacgcaagca

SEQ ID NO: 1646193 - RNA, 19 nt, Artificial Sequence
  Description of Artificial Sequence: Synthetic oligonucleotide
cgaccucccuaacuucucu

SEQ ID NO: 1646194 - RNA, 19 nt, Artificial Sequence
  Description of Artificial Sequence: Synthetic oligonucleotide
gccgggcgagcgggccucg

SEQ ID NO: 1646195 - RNA, 19 nt, Artificial Sequence
  Description of Artificial Sequence: Synthetic oligonucleotide
ggggccgugcgcagcgcgu

SEQ ID NO: 1646196 - RNA, 19 nt, Artificial Sequence
  Description of Artificial Sequence: Synthetic oligonucleotide
cugugccauugacgagauu

SEQ ID NO: 1646197 - RNA, 19 nt, Artificial Sequence
  Description of Artificial Sequence: Synthetic oligonucleotide
ccgcgggagccgcagggcu

SEQ ID NO: 1646198 - RNA, 19 nt, Artificial Sequence
  Description of Artificial Sequence: Synthetic oligonucleotide
cccuaacuucucugagcuu

SEQ ID NO: 1646199 - RNA, 19 nt, Artificial Sequence
  Description of Artificial Sequence: Synthetic oligonucleotide
gccggccgaugaagacuuc

SEQ ID NO: 1646200 - RNA, 19 nt, Artificial Sequence
  Description of Artificial Sequence: Synthetic oligonucleotide
cguccgccccuagacgcaa

SEQ ID NO: 1646201 - RNA, 19 nt, Artificial Sequence
  Description of Artificial Sequence: Synthetic oligonucleotide
cguucaccguccgccccua

SEQ ID NO: 1646202 - RNA, 19 nt, Artificial Sequence
  Description of Artificial Sequence: Synthetic oligonucleotide
aauagcaauauauuuuacc

SEQ ID NO: 1646203 - RNA, 19 nt, Artificial Sequence
  Description of Artificial Sequence: Synthetic oligonucleotide
aguuuaauaaaucuccugg

SEQ ID NO: 1646204 - RNA, 19 nt, Artificial Sequence
  Description of Artificial Sequence: Synthetic oligonucleotide
uauuuuaccaaauaaucug

SEQ ID NO: 1646205 - RNA, 19 nt, Artificial Sequence
  Description of Artificial Sequence: Synthetic oligonucleotide
cuuguuaugaagauacucg

SEQ ID NO: 1646206 - RNA, 19 nt, Artificial Sequence
  Description of Artificial Sequence: Synthetic oligonucleotide
uuaccaaauaaucugggag

SEQ ID NO: 1646207 - RNA, 19 nt, Artificial Sequence
  Description of Artificial Sequence: Synthetic oligonucleotide
cuuggaacugaauugaagg

SEQ ID NO: 1646208 - RNA, 19 nt, Artificial Sequence
  Description of Artificial Sequence: Synthetic oligonucleotide
auagcaauauauuuuacca

SEQ ID NO: 1646209 - RNA, 19 nt, Artificial Sequence
  Description of Artificial Sequence: Synthetic oligonucleotide
ucugguacucuuuugaacc

SEQ ID NO: 1646210 - RNA, 19 nt, Artificial Sequence
  Description of Artificial Sequence: Synthetic oligonucleotide
ucugauaggagucauuugu

SEQ ID NO: 1646211 - RNA, 19 nt, Artificial Sequence
  Description of Artificial Sequence: Synthetic oligonucleotide
uuuaauaaaucuccuggcu

SEQ ID NO: 1646212 - RNA, 19 nt, Artificial Sequence
  Description of Artificial Sequence: Synthetic oligonucleotide
ucuuucuaugguaauuggg

SEQ ID NO: 1646213 - RNA, 19 nt, Artificial Sequence
  Description of Artificial Sequence: Synthetic oligonucleotide
ugaauugaaggucgaaaag

SEQ ID NO: 1646214 - RNA, 19 nt, Artificial Sequence
  Description of Artificial Sequence: Synthetic oligonucleotide
  modified_base (3)..(3): a, c, u, g, unknown or other
ucngagauggauuuaauuu

SEQ ID NO: 1646215 - RNA, 19 nt, Artificial Sequence
  Description of Artificial Sequence: Synthetic oligonucleotide
uaugaagauacucgcaucu

SEQ ID NO: 1646216 - RNA, 19 nt, Artificial Sequence
  Description of Artificial Sequence: Synthetic oligonucleotide
ucugagauggcuugaggcg

SEQ ID NO: 1646217 - RNA, 19 nt, Artificial Sequence
  Description of Artificial Sequence: Synthetic oligonucleotide
uagaaguuaaaguugugga

SEQ ID NO: 1646218 - RNA, 19 nt, Artificial Sequence
  Description of Artificial Sequence: Synthetic oligonucleotide
acucugagcggcuagugcc

SEQ ID NO: 1646219 - RNA, 19 nt, Artificial Sequence
  Description of Artificial Sequence: Synthetic oligonucleotide
uuguauaaaucccaggcaa

SEQ ID NO: 1646220 - RNA, 19 nt, Artificial Sequence
  Description of Artificial Sequence: Synthetic oligonucleotide
uucaaauggccauuuagug

SEQ ID NO: 1646221 - RNA, 19 nt, Artificial Sequence
  Description of Artificial Sequence: Synthetic oligonucleotide
aaaucugaguccaaagguc

SEQ ID NO: 1646222 - RNA, 19 nt, Artificial Sequence
  Description of Artificial Sequence: Synthetic oligonucleotide
agugcaaccuucuuuaacu

SEQ ID NO: 1646223 - RNA, 19 nt, Artificial Sequence
  Description of Artificial Sequence: Synthetic oligonucleotide
ucaggugagauauucgagc

SEQ ID NO: 1646224 - RNA, 19 nt, Artificial Sequence
  Description of Artificial Sequence: Synthetic oligonucleotide
uuguuaugaagauacucgc

SEQ ID NO: 1646225 - RNA, 19 nt, Artificial Sequence
  Description of Artificial Sequence: Synthetic oligonucleotide
ucgaauuguguuugcaggg

SEQ ID NO: 1646226 - RNA, 19 nt, Artificial Sequence
  Description of Artificial Sequence: Synthetic oligonucleotide
  modified_base (14)..(14): a, c, u, g, unknown or other
aucuugcuggaacncaugg

SEQ ID NO: 1646227 - RNA, 19 nt, Artificial Sequence
  Description of Artificial Sequence: Synthetic oligonucleotide
uaucuuguauaaaucccag

SEQ ID NO: 1646228 - RNA, 19 nt, Artificial Sequence
  Description of Artificial Sequence: Synthetic oligonucleotide
ucgauuacgggauuccucc

SEQ ID NO: 1646229 - RNA, 19 nt, Artificial Sequence
  Description of Artificial Sequence: Synthetic oligonucleotide
ugucauuagaggaucgaug

SEQ ID NO: 1646230 - RNA, 19 nt, Artificial Sequence
  Description of Artificial Sequence: Synthetic oligonucleotide
auuuuaccaaauaaucugg

SEQ ID NO: 1646231 - RNA, 19 nt, Artificial Sequence
  Description of Artificial Sequence: Synthetic oligonucleotide
ucuaugguaauugggacug

SEQ ID NO: 1646232 - RNA, 19 nt, Artificial Sequence
  Description of Artificial Sequence: Synthetic oligonucleotide
uugaaggucgaaaaggaau

SEQ ID NO: 1646233 - RNA, 19 nt, Artificial Sequence
  Description of Artificial Sequence: Synthetic oligonucleotide
caauuguugaagaaggcuc

SEQ ID NO: 1646234 - RNA, 19 nt, Artificial Sequence
  Description of Artificial Sequence: Synthetic oligonucleotide
aguucaauuguugaagaag

SEQ ID NO: 1646235 - RNA, 19 nt, Artificial Sequence
  Description of Artificial Sequence: Synthetic oligonucleotide
aaaggcguuuucguugugc

SEQ ID NO: 1646236 - RNA, 19 nt, Artificial Sequence
  Description of Artificial Sequence: Synthetic oligonucleotide
uuuugucauuagaggaucg

SEQ ID NO: 1646237 - RNA, 19 nt, Artificial Sequence
  Description of Artificial Sequence: Synthetic oligonucleotide
ugaagauacucgcaucuug

SEQ ID NO: 1646238 - RNA, 19 nt, Artificial Sequence
  Description of Artificial Sequence: Synthetic oligonucleotide
ucaaauggccauuuagugu

SEQ ID NO: 1646239 - RNA, 19 nt, Artificial Sequence
  Description of Artificial Sequence: Synthetic oligonucleotide
uaccaaauaaucugggagu

SEQ ID NO: 1646240 - RNA, 19 nt, Artificial Sequence
  Description of Artificial Sequence: Synthetic oligonucleotide
gagaaaggcguuuucguug

SEQ ID NO: 1646241 - RNA, 19 nt, Artificial Sequence
  Description of Artificial Sequence: Synthetic oligonucleotide
cuuucuaugguaauuggga

SEQ ID NO: 1646242 - RNA, 19 nt, Artificial Sequence
  Description of Artificial Sequence: Synthetic oligonucleotide
ugguaauugggacuggacu

SEQ ID NO: 1646243 - RNA, 19 nt, Artificial Sequence
  Description of Artificial Sequence: Synthetic oligonucleotide
  modified_base (7)..(7): a, c, u, g, unknown or other
auggganacucugagcggc

SEQ ID NO: 1646244 - RNA, 19 nt, Artificial Sequence
  Description of Artificial Sequence: Synthetic oligonucleotide
uuucagagagcacuauggc

SEQ ID NO: 1646245 - RNA, 19 nt, Artificial Sequence
  Description of Artificial Sequence: Synthetic oligonucleotide
uguuaugaagauacucgca

SEQ ID NO: 1646246 - RNA, 19 nt, Artificial Sequence
  Description of Artificial Sequence: Synthetic oligonucleotide
guuggugggacucuguuug

SEQ ID NO: 1646247 - RNA, 19 nt, Artificial Sequence
  Description of Artificial Sequence: Synthetic oligonucleotide
uguauguaaugugagccag

SEQ ID NO: 1646248 - RNA, 19 nt, Artificial Sequence
  Description of Artificial Sequence: Synthetic oligonucleotide
uucuuucuaugguaauugg

SEQ ID NO: 1646249 - RNA, 19 nt, Artificial Sequence
  Description of Artificial Sequence: Synthetic oligonucleotide
gagauuucucauugguggg

SEQ ID NO: 1646250 - RNA, 19 nt, Artificial Sequence
  Description of Artificial Sequence: Synthetic oligonucleotide
ugucaggugagauauucga

SEQ ID NO: 1646251 - RNA, 19 nt, Artificial Sequence
  Description of Artificial Sequence: Synthetic oligonucleotide
ugauaggagucauuuguug

SEQ ID NO: 1646252 - RNA, 19 nt, Artificial Sequence
  Description of Artificial Sequence: Synthetic oligonucleotide
  modified_base (2)..(2): a, c, u, g, unknown or other
cngagauggauuuaauuuc

SEQ ID NO: 1646253 - RNA, 19 nt, Artificial Sequence
  Description of Artificial Sequence: Synthetic oligonucleotide
gucauuagaggaucgauga

SEQ ID NO: 1646254 - RNA, 19 nt, Artificial Sequence
  Description of Artificial Sequence: Synthetic oligonucleotide
uacucuuuugaaccuggag

SEQ ID NO: 1646255 - RNA, 19 nt, Artificial Sequence
  Description of Artificial Sequence: Synthetic oligonucleotide
cauccuuguaauucuggcg

SEQ ID NO: 1646256 - RNA, 19 nt, Artificial Sequence
  Description of Artificial Sequence: Synthetic oligonucleotide
uuucccuacauaugguccc

SEQ ID NO: 1646257 - RNA, 19 nt, Artificial Sequence
  Description of Artificial Sequence: Synthetic oligonucleotide
  modified_base (3)..(3): a, c, u, g, unknown or other
  modified_base (11)..(11): a, c, u, g, unknown or other
acncauggganacucugag

SEQ ID NO: 1646258 - RNA, 19 nt, Artificial Sequence
  Description of Artificial Sequence: Synthetic oligonucleotide
ugaaggucgaaaaggaauu

SEQ ID NO: 1646259 - RNA, 19 nt, Artificial Sequence
  Description of Artificial Sequence: Synthetic oligonucleotide
ugagaaacacugcugccac

SEQ ID NO: 1646260 - RNA, 19 nt, Artificial Sequence
  Description of Artificial Sequence: Synthetic oligonucleotide
  modified_base (5)..(5): a, c, u, g, unknown or other
  modified_base (13)..(13): a, c, u, g, unknown or other
gaacncauggganacucug

SEQ ID NO: 1646261 - RNA, 19 nt, Artificial Sequence
  Description of Artificial Sequence: Synthetic oligonucleotide
ugaggguuaucccuuuccc

SEQ ID NO: 1646262 - RNA, 19 nt, Artificial Sequence
  Description of Artificial Sequence: Synthetic oligonucleotide
aaguuguggacuucacuga

SEQ ID NO: 1646263 - RNA, 19 nt, Artificial Sequence
  Description of Artificial Sequence: Synthetic oligonucleotide
auaggagucauuuguugca

SEQ ID NO: 1646264 - RNA, 19 nt, Artificial Sequence
  Description of Artificial Sequence: Synthetic oligonucleotide
uucuaugguaauugggacu

SEQ ID NO: 1646265 - RNA, 19 nt, Artificial Sequence
  Description of Artificial Sequence: Synthetic oligonucleotide
agcacuauggccucugaga

SEQ ID NO: 1646266 - RNA, 19 nt, Artificial Sequence
  Description of Artificial Sequence: Synthetic oligonucleotide
uuuucguugugcauccagu

SEQ ID NO: 1646267 - RNA, 19 nt, Artificial Sequence
  Description of Artificial Sequence: Synthetic oligonucleotide
aauucuuauggcucuggua

SEQ ID NO: 1646268 - RNA, 19 nt, Artificial Sequence
  Description of Artificial Sequence: Synthetic oligonucleotide
gguaauugggacuggacug

SEQ ID NO: 1646269 - RNA, 19 nt, Artificial Sequence
  Description of Artificial Sequence: Synthetic oligonucleotide
uugacaagcccuuggaguc

SEQ ID NO: 1646270 - RNA, 19 nt, Artificial Sequence
  Description of Artificial Sequence: Synthetic oligonucleotide
  modified_base (16)..(16): a, c, u, g, unknown or other
cuagugccagcauucngag

SEQ ID NO: 1646271 - RNA, 19 nt, Artificial Sequence
  Description of Artificial Sequence: Synthetic oligonucleotide
uggugcuucgauuacggga

SEQ ID NO: 1646272 - RNA, 19 nt, Artificial Sequence
  Description of Artificial Sequence: Synthetic oligonucleotide
uauguaaugugagccagcu

SEQ ID NO: 1646273 - RNA, 19 nt, Artificial Sequence
  Description of Artificial Sequence: Synthetic oligonucleotide
auuuugacaagcccuugga

SEQ ID NO: 1646274 - RNA, 19 nt, Artificial Sequence
  Description of Artificial Sequence: Synthetic oligonucleotide
aaguuaaaguuguggacuu

SEQ ID NO: 1646275 - RNA, 19 nt, Artificial Sequence
  Description of Artificial Sequence: Synthetic oligonucleotide
caggaagguggguugaagg

SEQ ID NO: 1646276 - RNA, 19 nt, Artificial Sequence
  Description of Artificial Sequence: Synthetic oligonucleotide
guaauucuggcguugcuca

SEQ ID NO: 1646277 - RNA, 19 nt, Artificial Sequence
  Description of Artificial Sequence: Synthetic oligonucleotide
uuuaguguuggugggacuc

SEQ ID NO: 1646278 - RNA, 19 nt, Artificial Sequence
  Description of Artificial Sequence: Synthetic oligonucleotide
  modified_base (4)..(4): a, c, u, g, unknown or other
uucngagauggauuuaauu

SEQ ID NO: 1646279 - RNA, 19 nt, Artificial Sequence
  Description of Artificial Sequence: Synthetic oligonucleotide
ucguugugcauccaguuua

SEQ ID NO: 1646280 - RNA, 19 nt, Artificial Sequence
  Description of Artificial Sequence: Synthetic oligonucleotide
auaaucugggaguucaauu

SEQ ID NO: 1646281 - RNA, 19 nt, Artificial Sequence
  Description of Artificial Sequence: Synthetic oligonucleotide
cucuguacucaucauacuc

SEQ ID NO: 1646282 - RNA, 19 nt, Artificial Sequence
  Description of Artificial Sequence: Synthetic oligonucleotide
gaaguuaaaguuguggacu

SEQ ID NO: 1646283 - RNA, 19 nt, Artificial Sequence
  Description of Artificial Sequence: Synthetic oligonucleotide
uuaugaagauacucgcauc

SEQ ID NO: 1646284 - RNA, 19 nt, Artificial Sequence
  Description of Artificial Sequence: Synthetic oligonucleotide
ucccgugucaucugauagg

SEQ ID NO: 1646285 - RNA, 19 nt, Artificial Sequence
  Description of Artificial Sequence: Synthetic oligonucleotide
  modified_base (2)..(2): a, c, u, g, unknown or other
  modified_base (10)..(10): a, c, u, g, unknown or other
cncauggganacucugagc

SEQ ID NO: 1646286 - RNA, 19 nt, Artificial Sequence
  Description of Artificial Sequence: Synthetic oligonucleotide
  modified_base (10)..(10): a, c, u, g, unknown or other
  modified_base (18)..(18): a, c, u, g, unknown or other
ugcuggaacncaugggana

SEQ ID NO: 1646287 - RNA, 19 nt, Artificial Sequence
  Description of Artificial Sequence: Synthetic oligonucleotide
uggagaaaggcguuuucgu

SEQ ID NO: 1646288 - RNA, 19 nt, Artificial Sequence
  Description of Artificial Sequence: Synthetic oligonucleotide
acuuuggugcuucgauuac

SEQ ID NO: 1646289 - RNA, 19 nt, Artificial Sequence
  Description of Artificial Sequence: Synthetic oligonucleotide
agaaaggcguuuucguugu

SEQ ID NO: 1646290 - RNA, 19 nt, Artificial Sequence
  Description of Artificial Sequence: Synthetic oligonucleotide
ugaacauucugguacucuu

SEQ ID NO: 1646291 - RNA, 19 nt, Artificial Sequence
  Description of Artificial Sequence: Synthetic oligonucleotide
uguaauucuggcguugcuc

SEQ ID NO: 1646292 - RNA, 19 nt, Artificial Sequence
  Description of Artificial Sequence: Synthetic oligonucleotide
cauuggugggauucaaaug

SEQ ID NO: 1646293 - RNA, 19 nt, Artificial Sequence
  Description of Artificial Sequence: Synthetic oligonucleotide
ugucuuucgaauuguguuu

SEQ ID NO: 1646294 - RNA, 19 nt, Artificial Sequence
  Description of Artificial Sequence: Synthetic oligonucleotide
caaaggucguuucugagga

SEQ ID NO: 1646295 - RNA, 19 nt, Artificial Sequence
  Description of Artificial Sequence: Synthetic oligonucleotide
  modified_base (8)..(8): a, c, u, g, unknown or other
cauggganacucugagcgg

SEQ ID NO: 1646296 - RNA, 19 nt, Artificial Sequence
  Description of Artificial Sequence: Synthetic oligonucleotide
uaaaucuccuggcuacagu

SEQ ID NO: 1646297 - RNA, 19 nt, Artificial Sequence
  Description of Artificial Sequence: Synthetic oligonucleotide
cuuguauaaaucccaggca

SEQ ID NO: 1646298 - RNA, 19 nt, Artificial Sequence
  Description of Artificial Sequence: Synthetic oligonucleotide
uucuuauggcucugguaag

SEQ ID NO: 1646299 - RNA, 19 nt, Artificial Sequence
  Description of Artificial Sequence: Synthetic oligonucleotide
uucgauuacgggauuccuc

SEQ ID NO: 1646300 - RNA, 19 nt, Artificial Sequence
  Description of Artificial Sequence: Synthetic oligonucleotide
gaagguggguugaaggcag

SEQ ID NO: 1646301 - RNA, 19 nt, Artificial Sequence
  Description of Artificial Sequence: Synthetic oligonucleotide
aauaaaucuccuggcuaca

SEQ ID NO: 1646302 - RNA, 19 nt, Artificial Sequence
  Description of Artificial Sequence: Synthetic oligonucleotide
  modified_base (8)..(8): a, c, u, g, unknown or other
agcauucngagauggauuu

SEQ ID NO: 1646303 - RNA, 19 nt, Artificial Sequence
  Description of Artificial Sequence: Synthetic oligonucleotide
aaggucguuucugaggaga

SEQ ID NO: 1646304 - RNA, 19 nt, Artificial Sequence
  Description of Artificial Sequence: Synthetic oligonucleotide
uggcuugaggcgcuuuccg

SEQ ID NO: 1646305 - RNA, 19 nt, Artificial Sequence
  Description of Artificial Sequence: Synthetic oligonucleotide
cugaauugaaggucgaaaa

SEQ ID NO: 1646306 - RNA, 19 nt, Artificial Sequence
  Description of Artificial Sequence: Synthetic oligonucleotide
auuacgggauuccuccucu

SEQ ID NO: 1646307 - RNA, 19 nt, Artificial Sequence
  Description of Artificial Sequence: Synthetic oligonucleotide
uuaacuccuucacuggguu

SEQ ID NO: 1646308 - RNA, 19 nt, Artificial Sequence
  Description of Artificial Sequence: Synthetic oligonucleotide
cuggagaaaggcguuuucg

SEQ ID NO: 1646309 - RNA, 19 nt, Artificial Sequence
  Description of Artificial Sequence: Synthetic oligonucleotide
uccgaauuugcacucuuuu

SEQ ID NO: 1646310 - RNA, 19 nt, Artificial Sequence
  Description of Artificial Sequence: Synthetic oligonucleotide
uuugucauuagaggaucga

SEQ ID NO: 1646311 - RNA, 19 nt, Artificial Sequence
  Description of Artificial Sequence: Synthetic oligonucleotide
agauacucgcaucuuguau

SEQ ID NO: 1646312 - RNA, 19 nt, Artificial Sequence
  Description of Artificial Sequence: Synthetic oligonucleotide
uggcguugcucauaggaga

SEQ ID NO: 1646313 - RNA, 19 nt, Artificial Sequence
  Description of Artificial Sequence: Synthetic oligonucleotide
ugggaguucaauuguugaa

SEQ ID NO: 1646314 - RNA, 19 nt, Artificial Sequence
  Description of Artificial Sequence: Synthetic oligonucleotide
uuauggcucugguaagucu

SEQ ID NO: 1646315 - RNA, 19 nt, Artificial Sequence
  Description of Artificial Sequence: Synthetic oligonucleotide
ugauaacuuuggugcuucg

SEQ ID NO: 1646316 - RNA, 19 nt, Artificial Sequence
  Description of Artificial Sequence: Synthetic oligonucleotide
aaaggucguuucugaggag

SEQ ID NO: 1646317 - RNA, 19 nt, Artificial Sequence
  Description of Artificial Sequence: Synthetic oligonucleotide
guuaugaagauacucgcau

SEQ ID NO: 1646318 - RNA, 19 nt, Artificial Sequence
  Description of Artificial Sequence: Synthetic oligonucleotide
ggguuugauaacuuuggug

SEQ ID NO: 1646319 - RNA, 19 nt, Artificial Sequence
  Description of Artificial Sequence: Synthetic oligonucleotide
  modified_base (4)..(4): a, c, u, g, unknown or other
  modified_base (12)..(12): a, c, u, g, unknown or other
aacncauggganacucuga

SEQ ID NO: 1646320 - RNA, 19 nt, Artificial Sequence
  Description of Artificial Sequence: Synthetic oligonucleotide
agaggaucgaugaaaucug

SEQ ID NO: 1646321 - RNA, 19 nt, Artificial Sequence
  Description of Artificial Sequence: Synthetic oligonucleotide
guaauugggacuggacugc

SEQ ID NO: 1646322 - RNA, 19 nt, Artificial Sequence
  Description of Artificial Sequence: Synthetic oligonucleotide
cauacucagcauugaaguc

SEQ ID NO: 1646323 - RNA, 19 nt, Artificial Sequence
  Description of Artificial Sequence: Synthetic oligonucleotide
cuggcguugcucauaggag

SEQ ID NO: 1646324 - RNA, 19 nt, Artificial Sequence
  Description of Artificial Sequence: Synthetic oligonucleotide
cuuguaauucuggcguugc

SEQ ID NO: 1646325 - RNA, 19 nt, Artificial Sequence
  Description of Artificial Sequence: Synthetic oligonucleotide
  modified_base (7)..(7): a, c, u, g, unknown or other
  modified_base (15)..(15): a, c, u, g, unknown or other
uggaacncauggganacuc

SEQ ID NO: 1646326 - RNA, 19 nt, Artificial Sequence
  Description of Artificial Sequence: Synthetic oligonucleotide
auuagaggaucgaugaaau

SEQ ID NO: 1646327 - RNA, 19 nt, Artificial Sequence
  Description of Artificial Sequence: Synthetic oligonucleotide
uacgggauuccuccucugc

SEQ ID NO: 1646328 - RNA, 19 nt, Artificial Sequence
  Description of Artificial Sequence: Synthetic oligonucleotide
aagauacucgcaucuugua

SEQ ID NO: 1646329 - RNA, 19 nt, Artificial Sequence
  Description of Artificial Sequence: Synthetic oligonucleotide
ugggacucuguuugucagg

SEQ ID NO: 1646330 - RNA, 19 nt, Artificial Sequence
  Description of Artificial Sequence: Synthetic oligonucleotide
auaaaucuccuggcuacag

SEQ ID NO: 1646331 - RNA, 19 nt, Artificial Sequence
  Description of Artificial Sequence: Synthetic oligonucleotide
uggguuucggacuggaguu

SEQ ID NO: 1646332 - RNA, 19 nt, Artificial Sequence
  Description of Artificial Sequence: Synthetic oligonucleotide
uguggacuucacugagggg

SEQ ID NO: 1646333 - RNA, 19 nt, Artificial Sequence
  Description of Artificial Sequence: Synthetic oligonucleotide
  modified_base (11)..(11): a, c, u, g, unknown or other
  modified_base (19)..(19): a, c, u, g, unknown or other
uugcuggaacncaugggan

SEQ ID NO: 1646334 - RNA, 19 nt, Artificial Sequence
  Description of Artificial Sequence: Synthetic oligonucleotide
cauuuaguguuggugggac

SEQ ID NO: 1646335 - RNA, 19 nt, Artificial Sequence
  Description of Artificial Sequence: Synthetic oligonucleotide
aucugauaggagucauuug

SEQ ID NO: 1646336 - RNA, 19 nt, Artificial Sequence
  Description of Artificial Sequence: Synthetic oligonucleotide
gauuacgggauuccuccuc

SEQ ID NO: 1646337 - RNA, 19 nt, Artificial Sequence
  Description of Artificial Sequence: Synthetic oligonucleotide
uugauaacuuuggugcuuc

SEQ ID NO: 1646338 - RNA, 19 nt, Artificial Sequence
  Description of Artificial Sequence: Synthetic oligonucleotide
  modified_base (2)..(2): a, c, u, g, unknown or other
anacucugagcggcuagug

SEQ ID NO: 1646339 - RNA, 19 nt, Artificial Sequence
  Description of Artificial Sequence: Synthetic oligonucleotide
ccaaaggucguuucugagg

SEQ ID NO: 1646340 - RNA, 19 nt, Artificial Sequence
  Description of Artificial Sequence: Synthetic oligonucleotide
uuagaggaucgaugaaauc

SEQ ID NO: 1646341 - RNA, 19 nt, Artificial Sequence
  Description of Artificial Sequence: Synthetic oligonucleotide
uuucguugugcauccaguu

SEQ ID NO: 1646342 - RNA, 19 nt, Artificial Sequence
  Description of Artificial Sequence: Synthetic oligonucleotide
auggcuugaggcgcuuucc

SEQ ID NO: 1646343 - RNA, 19 nt, Artificial Sequence
  Description of Artificial Sequence: Synthetic oligonucleotide
ucuuauggcucugguaagu

SEQ ID NO: 1646344 - RNA, 19 nt, Artificial Sequence
  Description of Artificial Sequence: Synthetic oligonucleotide
uguugcacacacuguaauu

SEQ ID NO: 1646345 - RNA, 19 nt, Artificial Sequence
  Description of Artificial Sequence: Synthetic oligonucleotide
gauacucgcaucuuguauu

SEQ ID NO: 1646346 - RNA, 19 nt, Artificial Sequence
  Description of Artificial Sequence: Synthetic oligonucleotide
uuggugcuucgauuacggg

SEQ ID NO: 1646347 - RNA, 19 nt, Artificial Sequence
  Description of Artificial Sequence: Synthetic oligonucleotide
gagauggauuuaauuucag

SEQ ID NO: 1646348 - RNA, 19 nt, Artificial Sequence
  Description of Artificial Sequence: Synthetic oligonucleotide
gagcacuauggccucugag

SEQ ID NO: 1646349 - RNA, 19 nt, Artificial Sequence
  Description of Artificial Sequence: Synthetic oligonucleotide
uucggacuggaguuccuca

SEQ ID NO: 1646350 - RNA, 19 nt, Artificial Sequence
  Description of Artificial Sequence: Synthetic oligonucleotide
ugucaucugauaggaguca

SEQ ID NO: 1646351 - RNA, 19 nt, Artificial Sequence
  Description of Artificial Sequence: Synthetic oligonucleotide
uaacuuuggugcuucgauu

SEQ ID NO: 1646352 - RNA, 19 nt, Artificial Sequence
  Description of Artificial Sequence: Synthetic oligonucleotide
uuugauaacuuuggugcuu

SEQ ID NO: 1646353 - RNA, 19 nt, Artificial Sequence
  Description of Artificial Sequence: Synthetic oligonucleotide
aguuaaaguuguggacuuc

SEQ ID NO: 1646354 - RNA, 19 nt, Artificial Sequence
  Description of Artificial Sequence: Synthetic oligonucleotide
  modified_base (15)..(15): a, c, u, g, unknown or other
aaucuugcuggaacncaug

SEQ ID NO: 1646355 - RNA, 19 nt, Artificial Sequence
  Description of Artificial Sequence: Synthetic oligonucleotide
uuguaauucuggcguugcu

SEQ ID NO: 1646356 - RNA, 19 nt, Artificial Sequence
  Description of Artificial Sequence: Synthetic oligonucleotide
uucguugugcauccaguuu

SEQ ID NO: 1646357 - RNA, 19 nt, Artificial Sequence
  Description of Artificial Sequence: Synthetic oligonucleotide
ugggucauucuuucccgug

SEQ ID NO: 1646358 - RNA, 19 nt, Artificial Sequence
  Description of Artificial Sequence: Synthetic oligonucleotide
ugagccagcuuguuaugaa

SEQ ID NO: 1646359 - RNA, 19 nt, Artificial Sequence
  Description of Artificial Sequence: Synthetic oligonucleotide
gaauuuugacaagcccuug

SEQ ID NO: 1646360 - RNA, 19 nt, Artificial Sequence
  Description of Artificial Sequence: Synthetic oligonucleotide
gccauuuaguguugguggg

SEQ ID NO: 1646361 - RNA, 19 nt, Artificial Sequence
  Description of Artificial Sequence: Synthetic oligonucleotide
guuugcuggaugcagucaa

SEQ ID NO: 1646362 - RNA, 19 nt, Artificial Sequence
  Description of Artificial Sequence: Synthetic oligonucleotide
uugucauuagaggaucgau

SEQ ID NO: 1646363 - RNA, 19 nt, Artificial Sequence
  Description of Artificial Sequence: Synthetic oligonucleotide
ugugagccagcuuguuaug

SEQ ID NO: 1646364 - RNA, 19 nt, Artificial Sequence
  Description of Artificial Sequence: Synthetic oligonucleotide
ugagcggcuagugccagca

SEQ ID NO: 1646365 - RNA, 19 nt, Artificial Sequence
  Description of Artificial Sequence: Synthetic oligonucleotide
gaguucaauuguugaagaa

SEQ ID NO: 1646366 - RNA, 19 nt, Artificial Sequence
  Description of Artificial Sequence: Synthetic oligonucleotide
ucauucuuucccgugucau

SEQ ID NO: 1646367 - RNA, 19 nt, Artificial Sequence
  Description of Artificial Sequence: Synthetic oligonucleotide
ugcacucuuuucccuacau

SEQ ID NO: 1646368 - RNA, 19 nt, Artificial Sequence
  Description of Artificial Sequence: Synthetic oligonucleotide
ggagucauuuguugcacac

SEQ ID NO: 1646369 - RNA, 19 nt, Artificial Sequence
  Description of Artificial Sequence: Synthetic oligonucleotide
uuuccgaauuugcacucuu

SEQ ID NO: 1646370 - RNA, 19 nt, Artificial Sequence
  Description of Artificial Sequence: Synthetic oligonucleotide
ggaguucaauuguugaaga

SEQ ID NO: 1646371 - RNA, 19 nt, Artificial Sequence
  Description of Artificial Sequence: Synthetic oligonucleotide
gaagauacucgcaucuugu

SEQ ID NO: 1646372 - RNA, 19 nt, Artificial Sequence
  Description of Artificial Sequence: Synthetic oligonucleotide
uaagucuccagcgcccgga

SEQ ID NO: 1646373 - RNA, 19 nt, Artificial Sequence
  Description of Artificial Sequence: Synthetic oligonucleotide
auacucgcaucuuguauuu

SEQ ID NO: 1646374 - RNA, 19 nt, Artificial Sequence
  Description of Artificial Sequence: Synthetic oligonucleotide
uaggagucauuuguugcac

SEQ ID NO: 1646375 - RNA, 19 nt, Artificial Sequence
  Description of Artificial Sequence: Synthetic oligonucleotide
cugggaguucaauuguuga

SEQ ID NO: 1646376 - RNA, 19 nt, Artificial Sequence
  Description of Artificial Sequence: Synthetic oligonucleotide
  modified_base (4)..(4): a, c, u, g, unknown or other
gganacucugagcggcuag

SEQ ID NO: 1646377 - RNA, 19 nt, Artificial Sequence
  Description of Artificial Sequence: Synthetic oligonucleotide
cugagaaacacugcugcca

SEQ ID NO: 1646378 - RNA, 19 nt, Artificial Sequence
  Description of Artificial Sequence: Synthetic oligonucleotide
accaaauaaucugggaguu

SEQ ID NO: 1646379 - RNA, 19 nt, Artificial Sequence
  Description of Artificial Sequence: Synthetic oligonucleotide
guagggauggcugcagcug

SEQ ID NO: 1646380 - RNA, 19 nt, Artificial Sequence
  Description of Artificial Sequence: Synthetic oligonucleotide
ugaggguguagggauggcu

SEQ ID NO: 1646381 - RNA, 19 nt, Artificial Sequence
  Description of Artificial Sequence: Synthetic oligonucleotide
accaugugucuuucgaauu

SEQ ID NO: 1646382 - RNA, 19 nt, Artificial Sequence
  Description of Artificial Sequence: Synthetic oligonucleotide
  modified_base (6)..(6): a, c, u, g, unknown or other
cauucngagauggauuuaa

SEQ ID NO: 1646383 - RNA, 19 nt, Artificial Sequence
  Description of Artificial Sequence: Synthetic oligonucleotide
guauguaaugugagccagc

SEQ ID NO: 1646384 - RNA, 19 nt, Artificial Sequence
  Description of Artificial Sequence: Synthetic oligonucleotide
  modified_base (6)..(6): a, c, u, g, unknown or other
uggganacucugagcggcu

SEQ ID NO: 1646385 - RNA, 19 nt, Artificial Sequence
  Description of Artificial Sequence: Synthetic oligonucleotide
  modified_base (18)..(18): a, c, u, g, unknown or other
cagaaucuugcuggaacnc

SEQ ID NO: 1646386 - RNA, 19 nt, Artificial Sequence
  Description of Artificial Sequence: Synthetic oligonucleotide
aucgccgucucggugagcu

SEQ ID NO: 1646387 - RNA, 19 nt, Artificial Sequence
  Description of Artificial Sequence: Synthetic oligonucleotide
uuaguguuggugggacucu

SEQ ID NO: 1646388 - RNA, 19 nt, Artificial Sequence
  Description of Artificial Sequence: Synthetic oligonucleotide
aggcgcuuuccgaauuugc

SEQ ID NO: 1646389 - RNA, 19 nt, Artificial Sequence
  Description of Artificial Sequence: Synthetic oligonucleotide
ucuuuugaaccuggagaaa

SEQ ID NO: 1646390 - RNA, 19 nt, Artificial Sequence
  Description of Artificial Sequence: Synthetic oligonucleotide
gcuuguuaugaagauacuc

SEQ ID NO: 1646391 - RNA, 19 nt, Artificial Sequence
  Description of Artificial Sequence: Synthetic oligonucleotide
ggauuuaauuucagagagc

SEQ ID NO: 1646392 - RNA, 19 nt, Artificial Sequence
  Description of Artificial Sequence: Synthetic oligonucleotide
aaauaaucugggaguucaa

SEQ ID NO: 1646393 - RNA, 19 nt, Artificial Sequence
  Description of Artificial Sequence: Synthetic oligonucleotide
ugacaagcccuuggagucc

SEQ ID NO: 1646394 - RNA, 19 nt, Artificial Sequence
  Description of Artificial Sequence: Synthetic oligonucleotide
gucucggugagcuucacau

SEQ ID NO: 1646395 - RNA, 19 nt, Artificial Sequence
  Description of Artificial Sequence: Synthetic oligonucleotide
  modified_base (19)..(19): a, c, u, g, unknown or other
gcagaaucuugcuggaacn

SEQ ID NO: 1646396 - RNA, 19 nt, Artificial Sequence
  Description of Artificial Sequence: Synthetic oligonucleotide
guaagucuccagcgcccgg

SEQ ID NO: 1646397 - RNA, 19 nt, Artificial Sequence
  Description of Artificial Sequence: Synthetic oligonucleotide
ugcuugaucuucugauauu

SEQ ID NO: 1646398 - RNA, 19 nt, Artificial Sequence
  Description of Artificial Sequence: Synthetic oligonucleotide
caauugagcugggaggcuc

SEQ ID NO: 1646399 - RNA, 19 nt, Artificial Sequence
  Description of Artificial Sequence: Synthetic oligonucleotide
uugcacucuuuucccuaca

SEQ ID NO: 1646400 - RNA, 19 nt, Artificial Sequence
  Description of Artificial Sequence: Synthetic oligonucleotide
uuacgggauuccuccucug

SEQ ID NO: 1646401 - RNA, 19 nt, Artificial Sequence
  Description of Artificial Sequence: Synthetic oligonucleotide
uuccgaauuugcacucuuu

SEQ ID NO: 1646402 - RNA, 19 nt, Artificial Sequence
  Description of Artificial Sequence: Synthetic oligonucleotide
ggaucgaugaaaucugagu

SEQ ID NO: 1646403 - RNA, 19 nt, Artificial Sequence
  Description of Artificial Sequence: Synthetic oligonucleotide
uaauugggacuggacugcu

SEQ ID NO: 1646404 - RNA, 19 nt, Artificial Sequence
  Description of Artificial Sequence: Synthetic oligonucleotide
gcaggagauuucucauugg

SEQ ID NO: 1646405 - RNA, 19 nt, Artificial Sequence
  Description of Artificial Sequence: Synthetic oligonucleotide
gugcaaccuucuuuaacuc

SEQ ID NO: 1646406 - RNA, 19 nt, Artificial Sequence
  Description of Artificial Sequence: Synthetic oligonucleotide
cuuucgaauuguguuugca

SEQ ID NO: 1646407 - RNA, 19 nt, Artificial Sequence
  Description of Artificial Sequence: Synthetic oligonucleotide
uaauucuggcguugcucau

SEQ ID NO: 1646408 - RNA, 19 nt, Artificial Sequence
  Description of Artificial Sequence: Synthetic oligonucleotide
  modified_base (17)..(17): a, c, u, g, unknown or other
gcuagugccagcauucnga

SEQ ID NO: 1646409 - RNA, 19 nt, Artificial Sequence
  Description of Artificial Sequence: Synthetic oligonucleotide
gggaauuuugacaagcccu

SEQ ID NO: 1646410 - RNA, 19 nt, Artificial Sequence
  Description of Artificial Sequence: Synthetic oligonucleotide
gcaacgccagcccguagcg

SEQ ID NO: 1646411 - RNA, 19 nt, Artificial Sequence
  Description of Artificial Sequence: Synthetic oligonucleotide
ucucauuggugggauucaa

SEQ ID NO: 1646412 - RNA, 19 nt, Artificial Sequence
  Description of Artificial Sequence: Synthetic oligonucleotide
ggugggauucaaauggcca

SEQ ID NO: 1646413 - RNA, 19 nt, Artificial Sequence
  Description of Artificial Sequence: Synthetic oligonucleotide
gguaagucuccagcgcccg

SEQ ID NO: 1646414 - RNA, 19 nt, Artificial Sequence
  Description of Artificial Sequence: Synthetic oligonucleotide
cacguuugacagguagaag

SEQ ID NO: 1646415 - RNA, 19 nt, Artificial Sequence
  Description of Artificial Sequence: Synthetic oligonucleotide
ggcguuuucguugugcauc

SEQ ID NO: 1646416 - RNA, 19 nt, Artificial Sequence
  Description of Artificial Sequence: Synthetic oligonucleotide
uuucggacuggaguuccuc

SEQ ID NO: 1646417 - RNA, 19 nt, Artificial Sequence
  Description of Artificial Sequence: Synthetic oligonucleotide
  modified_base (9)..(9): a, c, u, g, unknown or other
  modified_base (17)..(17): a, c, u, g, unknown or other
gcuggaacncauggganac

SEQ ID NO: 1646418 - RNA, 19 nt, Artificial Sequence
  Description of Artificial Sequence: Synthetic oligonucleotide
cuaugguaauugggacugg

SEQ ID NO: 1646419 - RNA, 19 nt, Artificial Sequence
  Description of Artificial Sequence: Synthetic oligonucleotide
uccuuguaauucuggcguu

SEQ ID NO: 1646420 - RNA, 19 nt, Artificial Sequence
  Description of Artificial Sequence: Synthetic oligonucleotide
gugcauccaguuuaauaaa

SEQ ID NO: 1646421 - RNA, 19 nt, Artificial Sequence
  Description of Artificial Sequence: Synthetic oligonucleotide
ucugaguccaaaggucguu

SEQ ID NO: 1646422 - RNA, 19 nt, Artificial Sequence
  Description of Artificial Sequence: Synthetic oligonucleotide
ugcuucgauuacgggauuc

SEQ ID NO: 1646423 - RNA, 19 nt, Artificial Sequence
  Description of Artificial Sequence: Synthetic oligonucleotide
ugggauucaaauggccauu

SEQ ID NO: 1646424 - RNA, 19 nt, Artificial Sequence
  Description of Artificial Sequence: Synthetic oligonucleotide
agcggcuagugccagcauu

SEQ ID NO: 1646425 - RNA, 19 nt, Artificial Sequence
  Description of Artificial Sequence: Synthetic oligonucleotide
gaaggucgaaaaggaauua

SEQ ID NO: 1646426 - RNA, 19 nt, Artificial Sequence
  Description of Artificial Sequence: Synthetic oligonucleotide
uuggugggacucuguuugu

SEQ ID NO: 1646427 - RNA, 19 nt, Artificial Sequence
  Description of Artificial Sequence: Synthetic oligonucleotide
cccggguuugauaacuuug

SEQ ID NO: 1646428 - RNA, 19 nt, Artificial Sequence
  Description of Artificial Sequence: Synthetic oligonucleotide
gaggcgcuuuccgaauuug

SEQ ID NO: 1646429 - RNA, 19 nt, Artificial Sequence
  Description of Artificial Sequence: Synthetic oligonucleotide
ggacuggacugcuugaucu

SEQ ID NO: 1646430 - RNA, 19 nt, Artificial Sequence
  Description of Artificial Sequence: Synthetic oligonucleotide
ggugggacucuguuuguca

SEQ ID NO: 1646431 - RNA, 19 nt, Artificial Sequence
  Description of Artificial Sequence: Synthetic oligonucleotide
gaaaggcguuuucguugug

SEQ ID NO: 1646432 - RNA, 19 nt, Artificial Sequence
  Description of Artificial Sequence: Synthetic oligonucleotide
gcgcuuuccgaauuugcac

SEQ ID NO: 1646433 - RNA, 19 nt, Artificial Sequence
  Description of Artificial Sequence: Synthetic oligonucleotide
gugggauucaaauggccau

SEQ ID NO: 1646434 - RNA, 19 nt, Artificial Sequence
  Description of Artificial Sequence: Synthetic oligonucleotide
cagcacggugauguugucc

SEQ ID NO: 1646435 - RNA, 19 nt, Artificial Sequence
  Description of Artificial Sequence: Synthetic oligonucleotide
  modified_base (18)..(18): a, c, u, g, unknown or other
ggcuagugccagcauucng

SEQ ID NO: 1646436 - RNA, 19 nt, Artificial Sequence
  Description of Artificial Sequence: Synthetic oligonucleotide
cuucacuggguuucggacu

SEQ ID NO: 1646437 - RNA, 19 nt, Artificial Sequence
  Description of Artificial Sequence: Synthetic oligonucleotide
caugaacauucugguacuc

SEQ ID NO: 1646438 - RNA, 19 nt, Artificial Sequence
  Description of Artificial Sequence: Synthetic oligonucleotide
gcuucgauuacgggauucc

SEQ ID NO: 1646439 - RNA, 19 nt, Artificial Sequence
  Description of Artificial Sequence: Synthetic oligonucleotide
  modified_base (5)..(5): a, c, u, g, unknown or other
auucngagauggauuuaau

SEQ ID NO: 1646440 - RNA, 19 nt, Artificial Sequence
  Description of Artificial Sequence: Synthetic oligonucleotide
  modified_base (3)..(3): a, c, u, g, unknown or other
ganacucugagcggcuagu

SEQ ID NO: 1646441 - RNA, 19 nt, Artificial Sequence
  Description of Artificial Sequence: Synthetic oligonucleotide
augaagauacucgcaucuu

SEQ ID NO: 1646442 - RNA, 19 nt, Artificial Sequence
  Description of Artificial Sequence: Synthetic oligonucleotide
cucugagcggcuagugcca

SEQ ID NO: 1646443 - RNA, 19 nt, Artificial Sequence
  Description of Artificial Sequence: Synthetic oligonucleotide
aaccuggagaaaggcguuu

SEQ ID NO: 1646444 - RNA, 19 nt, Artificial Sequence
  Description of Artificial Sequence: Synthetic oligonucleotide
gccaccaugugucuuucga

SEQ ID NO: 1646445 - RNA, 19 nt, Artificial Sequence
  Description of Artificial Sequence: Synthetic oligonucleotide
uaaugugagccagcuuguu

SEQ ID NO: 1646446 - RNA, 19 nt, Artificial Sequence
  Description of Artificial Sequence: Synthetic oligonucleotide
acuggguuucggacuggag

SEQ ID NO: 1646447 - RNA, 19 nt, Artificial Sequence
  Description of Artificial Sequence: Synthetic oligonucleotide
gguguagggauggcugcag

SEQ ID NO: 1646448 - RNA, 19 nt, Artificial Sequence
  Description of Artificial Sequence: Synthetic oligonucleotide
aggcguuuucguugugcau

SEQ ID NO: 1646449 - RNA, 19 nt, Artificial Sequence
  Description of Artificial Sequence: Synthetic oligonucleotide
uggcuacagucuccauccu

SEQ ID NO: 1646450 - RNA, 19 nt, Artificial Sequence
  Description of Artificial Sequence: Synthetic oligonucleotide
caccaugugucuuucgaau

SEQ ID NO: 1646451 - RNA, 19 nt, Artificial Sequence
  Description of Artificial Sequence: Synthetic oligonucleotide
ggugcuucgauuacgggau

SEQ ID NO: 1646452 - RNA, 19 nt, Artificial Sequence
  Description of Artificial Sequence: Synthetic oligonucleotide
ggugagauauucgagcuuu

SEQ ID NO: 1646453 - RNA, 19 nt, Artificial Sequence
  Description of Artificial Sequence: Synthetic oligonucleotide
ggcguugcucauaggagac

SEQ ID NO: 1646454 - RNA, 19 nt, Artificial Sequence
  Description of Artificial Sequence: Synthetic oligonucleotide
guaaugugagccagcuugu

SEQ ID NO: 1646455 - RNA, 19 nt, Artificial Sequence
  Description of Artificial Sequence: Synthetic oligonucleotide
ggcgcuuuccgaauuugca

SEQ ID NO: 1646456 - RNA, 19 nt, Artificial Sequence
  Description of Artificial Sequence: Synthetic oligonucleotide
gccccagccgcccgcaacg

SEQ ID NO: 1646457 - RNA, 19 nt, Artificial Sequence
  Description of Artificial Sequence: Synthetic oligonucleotide
cugauaggagucauuuguu

SEQ ID NO: 1646458 - RNA, 19 nt, Artificial Sequence
  Description of Artificial Sequence: Synthetic oligonucleotide
cugguacucuuuugaaccu

SEQ ID NO: 1646459 - RNA, 19 nt, Artificial Sequence
  Description of Artificial Sequence: Synthetic oligonucleotide
cuccauccuggcaugcaaa

SEQ ID NO: 1646460 - RNA, 19 nt, Artificial Sequence
  Description of Artificial Sequence: Synthetic oligonucleotide
aucugggaguucaauuguu

SEQ ID NO: 1646461 - RNA, 19 nt, Artificial Sequence
  Description of Artificial Sequence: Synthetic oligonucleotide
  modified_base (9)..(9): a, c, u, g, unknown or other
cagcauucngagauggauu

SEQ ID NO: 1646462 - RNA, 19 nt, Artificial Sequence
  Description of Artificial Sequence: Synthetic oligonucleotide
guacucuuuugaaccugga

SEQ ID NO: 1646463 - RNA, 19 nt, Artificial Sequence
  Description of Artificial Sequence: Synthetic oligonucleotide
ccuuguaauucuggcguug

SEQ ID NO: 1646464 - RNA, 19 nt, Artificial Sequence
  Description of Artificial Sequence: Synthetic oligonucleotide
cgugucaucugauaggagu

SEQ ID NO: 1646465 - RNA, 19 nt, Artificial Sequence
  Description of Artificial Sequence: Synthetic oligonucleotide
gggacuggacugcuugauc

SEQ ID NO: 1646466 - RNA, 19 nt, Artificial Sequence
  Description of Artificial Sequence: Synthetic oligonucleotide
ggcuugaggcgcuuuccga

SEQ ID NO: 1646467 - RNA, 19 nt, Artificial Sequence
  Description of Artificial Sequence: Synthetic oligonucleotide
gcccggaucgccgucucgg

SEQ ID NO: 1646468 - RNA, 19 nt, Artificial Sequence
  Description of Artificial Sequence: Synthetic oligonucleotide
ggagaaaggcguuuucguu

SEQ ID NO: 1646469 - RNA, 19 nt, Artificial Sequence
  Description of Artificial Sequence: Synthetic oligonucleotide
agagagcacuauggccucu

SEQ ID NO: 1646470 - RNA, 19 nt, Artificial Sequence
  Description of Artificial Sequence: Synthetic oligonucleotide
cgcaacgccagcccguagc

SEQ ID NO: 1646471 - RNA, 19 nt, Artificial Sequence
  Description of Artificial Sequence: Synthetic oligonucleotide
ccaaauaaucugggaguuc

SEQ ID NO: 1646472 - RNA, 19 nt, Artificial Sequence
  Description of Artificial Sequence: Synthetic oligonucleotide
caacgccagcccguagcgc

SEQ ID NO: 1646473 - RNA, 19 nt, Artificial Sequence
  Description of Artificial Sequence: Synthetic oligonucleotide
gcggcuagugccagcauuc

SEQ ID NO: 1646474 - RNA, 19 nt, Artificial Sequence
  Description of Artificial Sequence: Synthetic oligonucleotide
uacucgcaucuuguauuuu

SEQ ID NO: 1646475 - RNA, 19 nt, Artificial Sequence
  Description of Artificial Sequence: Synthetic oligonucleotide
  modified_base (6)..(6): a, c, u, g, unknown or other
  modified_base (14)..(14): a, c, u, g, unknown or other
ggaacncauggganacucu

SEQ ID NO: 1646476 - RNA, 19 nt, Artificial Sequence
  Description of Artificial Sequence: Synthetic oligonucleotide
cuucgauuacgggauuccu

SEQ ID NO: 1646477 - RNA, 19 nt, Artificial Sequence
  Description of Artificial Sequence: Synthetic oligonucleotide
  modified_base (10)..(10): a, c, u, g, unknown or other
ccagcauucngagauggau

SEQ ID NO: 1646478 - RNA, 19 nt, Artificial Sequence
  Description of Artificial Sequence: Synthetic oligonucleotide
cugaggagaugaggcagaa

SEQ ID NO: 1646479 - RNA, 19 nt, Artificial Sequence
  Description of Artificial Sequence: Synthetic oligonucleotide
cccgugucaucugauagga

SEQ ID NO: 1646480 - RNA, 19 nt, Artificial Sequence
  Description of Artificial Sequence: Synthetic oligonucleotide
gucaucugauaggagucau

SEQ ID NO: 1646481 - RNA, 19 nt, Artificial Sequence
  Description of Artificial Sequence: Synthetic oligonucleotide
cuuuccgaauuugcacucu

SEQ ID NO: 1646482 - RNA, 19 nt, Artificial Sequence
  Description of Artificial Sequence: Synthetic oligonucleotide
  modified_base (8)..(8): a, c, u, g, unknown or other
  modified_base (16)..(16): a, c, u, g, unknown or other
cuggaacncauggganacu

SEQ ID NO: 1646483 - RNA, 19 nt, Artificial Sequence
  Description of Artificial Sequence: Synthetic oligonucleotide
gcacucuuuucccuacaua

SEQ ID NO: 1646484 - RNA, 19 nt, Artificial Sequence
  Description of Artificial Sequence: Synthetic oligonucleotide
gaaccuggagaaaggcguu

SEQ ID NO: 1646485 - RNA, 19 nt, Artificial Sequence
  Description of Artificial Sequence: Synthetic oligonucleotide
cuggcaugcaaagcucugu

SEQ ID NO: 1646486 - RNA, 19 nt, Artificial Sequence
  Description of Artificial Sequence: Synthetic oligonucleotide
cacuggguuucggacugga

SEQ ID NO: 1646487 - RNA, 19 nt, Artificial Sequence
  Description of Artificial Sequence: Synthetic oligonucleotide
ccgugucaucugauaggag

SEQ ID NO: 1646488 - RNA, 19 nt, Artificial Sequence
  Description of Artificial Sequence: Synthetic oligonucleotide
ccagccgcccgcaacgcca

SEQ ID NO: 1646489 - RNA, 19 nt, Artificial Sequence
  Description of Artificial Sequence: Synthetic oligonucleotide
ccauuuaguguugguggga

SEQ ID NO: 1646490 - RNA, 19 nt, Artificial Sequence
  Description of Artificial Sequence: Synthetic oligonucleotide
gcucuguacucaucauacu

SEQ ID NO: 1646491 - RNA, 19 nt, Artificial Sequence
  Description of Artificial Sequence: Synthetic oligonucleotide
  modified_base (7)..(7): a, c, u, g, unknown or other
gcauucngagauggauuua

SEQ ID NO: 1646492 - RNA, 19 nt, Artificial Sequence
  Description of Artificial Sequence: Synthetic oligonucleotide
gaucgccgucucggugagc

SEQ ID NO: 1646493 - RNA, 19 nt, Artificial Sequence
  Description of Artificial Sequence: Synthetic oligonucleotide
acgccagcccguagcgcug

SEQ ID NO: 1646494 - RNA, 19 nt, Artificial Sequence
  Description of Artificial Sequence: Synthetic oligonucleotide
cugaguccaaaggucguuu

SEQ ID NO: 1646495 - RNA, 19 nt, Artificial Sequence
  Description of Artificial Sequence: Synthetic oligonucleotide
ggaggcagugcaaccuucu

SEQ ID NO: 1646496 - RNA, 19 nt, Artificial Sequence
  Description of Artificial Sequence: Synthetic oligonucleotide
guuucggacuggaguuccu

SEQ ID NO: 1646497 - RNA, 19 nt, Artificial Sequence
  Description of Artificial Sequence: Synthetic oligonucleotide
  modified_base (5)..(5): a, c, u, g, unknown or other
ggganacucugagcggcua

SEQ ID NO: 1646498 - RNA, 19 nt, Artificial Sequence
  Description of Artificial Sequence: Synthetic oligonucleotide
  modified_base (11)..(11): a, c, u, g, unknown or other
gccagcauucngagaugga

SEQ ID NO: 1646499 - RNA, 19 nt, Artificial Sequence
  Description of Artificial Sequence: Synthetic oligonucleotide
ccgcccgcaacgccagccc

SEQ ID NO: 1646500 - RNA, 19 nt, Artificial Sequence
  Description of Artificial Sequence: Synthetic oligonucleotide
ucgccgucucggugagcuu

SEQ ID NO: 1646501 - RNA, 19 nt, Artificial Sequence
  Description of Artificial Sequence: Synthetic oligonucleotide
cguuugacagguagaaguu

SEQ ID NO: 1646502 - RNA, 19 nt, Artificial Sequence
  Description of Artificial Sequence: Synthetic oligonucleotide
gcguugcucauaggagaca

SEQ ID NO: 1646503 - RNA, 19 nt, Artificial Sequence
  Description of Artificial Sequence: Synthetic oligonucleotide
ggaggccugcaggagauuu

SEQ ID NO: 1646504 - RNA, 19 nt, Artificial Sequence
  Description of Artificial Sequence: Synthetic oligonucleotide
cccagccgcccgcaacgcc

SEQ ID NO: 1646505 - RNA, 19 nt, Artificial Sequence
  Description of Artificial Sequence: Synthetic oligonucleotide
gugagauauucgagcuuuu

SEQ ID NO: 1646506 - RNA, 19 nt, Artificial Sequence
  Description of Artificial Sequence: Synthetic oligonucleotide
cgcccgcaacgccagcccg

SEQ ID NO: 1646507 - RNA, 19 nt, Artificial Sequence
  Description of Artificial Sequence: Synthetic oligonucleotide
cgccgucucggugagcuuc

SEQ ID NO: 1646508 - RNA, 19 nt, Artificial Sequence
  Description of Artificial Sequence: Synthetic oligonucleotide
cagcgcccggaucgccguc

SEQ ID NO: 1646509 - RNA, 19 nt, Artificial Sequence
  Description of Artificial Sequence: Synthetic oligonucleotide
gccgucucggugagcuuca

SEQ ID NO: 1646510 - RNA, 19 nt, Artificial Sequence
  Description of Artificial Sequence: Synthetic oligonucleotide
cgaauuguguuugcagggu

SEQ ID NO: 1646511 - RNA, 19 nt, Artificial Sequence
  Description of Artificial Sequence: Synthetic oligonucleotide
gagcggcuagugccagcau

SEQ ID NO: 1646512 - RNA, 19 nt, Artificial Sequence
  Description of Artificial Sequence: Synthetic oligonucleotide
gugcuucgauuacgggauu

SEQ ID NO: 1646513 - RNA, 19 nt, Artificial Sequence
  Description of Artificial Sequence: Synthetic oligonucleotide
gagauggcuugaggcgcuu

SEQ ID NO: 1646514 - RNA, 19 nt, Artificial Sequence
  Description of Artificial Sequence: Synthetic oligonucleotide
cggguuugauaacuuuggu

SEQ ID NO: 1646515 - RNA, 19 nt, Artificial Sequence
  Description of Artificial Sequence: Synthetic oligonucleotide
cgucucggugagcuucaca

SEQ ID NO: 1646516 - RNA, 19 nt, Artificial Sequence
  Description of Artificial Sequence: Synthetic oligonucleotide
ccgcaacgccagcccguag

SEQ ID NO: 1646517 - RNA, 19 nt, Artificial Sequence
  Description of Artificial Sequence: Synthetic oligonucleotide
ccccagccgcccgcaacgc

SEQ ID NO: 1646518 - RNA, 19 nt, Artificial Sequence
  Description of Artificial Sequence: Synthetic oligonucleotide
gcccugaggguuaucccuu

SEQ ID NO: 1646519 - RNA, 19 nt, Artificial Sequence
  Description of Artificial Sequence: Synthetic oligonucleotide
  modified_base (19)..(19): a, c, u, g, unknown or other
cggcuagugccagcauucn

SEQ ID NO: 1646520 - RNA, 19 nt, Artificial Sequence
  Description of Artificial Sequence: Synthetic oligonucleotide
ccccggguuugauaacuuu

SEQ ID NO: 1646521 - RNA, 19 nt, Artificial Sequence
  Description of Artificial Sequence: Synthetic oligonucleotide
gcccgcaacgccagcccgu

SEQ ID NO: 1646522 - RNA, 19 nt, Artificial Sequence
  Description of Artificial Sequence: Synthetic oligonucleotide
cccgcaacgccagcccgua

SEQ ID NO: 1646523 - RNA, 19 nt, Artificial Sequence
  Description of Artificial Sequence: Synthetic oligonucleotide
cccugaggguuaucccuuu

SEQ ID NO: 1646524 - RNA, 19 nt, Artificial Sequence
  Description of Artificial Sequence: Synthetic oligonucleotide
  modified_base (1)..(1): a, c, u, g, unknown or other
  modified_base (9)..(9): a, c, u, g, unknown or other
ncauggganacucugagcg

SEQ ID NO: 1646525 - RNA, 19 nt, Artificial Sequence
  Description of Artificial Sequence: Synthetic oligonucleotide
  modified_base (1)..(1): a, c, u, g, unknown or other
nacucugagcggcuagugc

SEQ ID NO: 1646526 - RNA, 19 nt, Artificial Sequence
  Description of Artificial Sequence: Synthetic oligonucleotide
aaagaauuuguacugaugc

SEQ ID NO: 1646527 - RNA, 19 nt, Artificial Sequence
  Description of Artificial Sequence: Synthetic oligonucleotide
uugaauauugcuuacaucc

SEQ ID NO: 1646528 - RNA, 19 nt, Artificial Sequence
  Description of Artificial Sequence: Synthetic oligonucleotide
uuacuauuggcucagaagg

SEQ ID NO: 1646529 - RNA, 19 nt, Artificial Sequence
  Description of Artificial Sequence: Synthetic oligonucleotide
auugcuuacauccauggcc

SEQ ID NO: 1646530 - RNA, 19 nt, Artificial Sequence
  Description of Artificial Sequence: Synthetic oligonucleotide
augaucuacagucucaucc

SEQ ID NO: 1646531 - RNA, 19 nt, Artificial Sequence
  Description of Artificial Sequence: Synthetic oligonucleotide
uuauaaaagguccuuagug

SEQ ID NO: 1646532 - RNA, 19 nt, Artificial Sequence
  Description of Artificial Sequence: Synthetic oligonucleotide
agauucuacaaucuacugc

SEQ ID NO: 1646533 - RNA, 19 nt, Artificial Sequence
  Description of Artificial Sequence: Synthetic oligonucleotide
uauaaaagguccuuagugc

SEQ ID NO: 1646534 - RNA, 19 nt, Artificial Sequence
  Description of Artificial Sequence: Synthetic oligonucleotide
uucaagaucaugcugccag

SEQ ID NO: 1646535 - RNA, 19 nt, Artificial Sequence
  Description of Artificial Sequence: Synthetic oligonucleotide
gacuuauugccuuagguag

SEQ ID NO: 1646536 - RNA, 19 nt, Artificial Sequence
  Description of Artificial Sequence: Synthetic oligonucleotide
aaggaaagcgugaacaacc

SEQ ID NO: 1646537 - RNA, 19 nt, Artificial Sequence
  Description of Artificial Sequence: Synthetic oligonucleotide
uuacaguugaaggaaagcg

SEQ ID NO: 1646538 - RNA, 19 nt, Artificial Sequence
  Description of Artificial Sequence: Synthetic oligonucleotide
aguuuaauggagaauacgg

SEQ ID NO: 1646539 - RNA, 19 nt, Artificial Sequence
  Description of Artificial Sequence: Synthetic oligonucleotide
gaaggauccagacaaguag

SEQ ID NO: 1646540 - RNA, 19 nt, Artificial Sequence
  Description of Artificial Sequence: Synthetic oligonucleotide
gguaagaugucccagagag

SEQ ID NO: 1646541 - RNA, 19 nt, Artificial Sequence
  Description of Artificial Sequence: Synthetic oligonucleotide
ugaacaaccucccaugaug

SEQ ID NO: 1646542 - RNA, 19 nt, Artificial Sequence
  Description of Artificial Sequence: Synthetic oligonucleotide
ugaaugauguuguuaacug

SEQ ID NO: 1646543 - RNA, 19 nt, Artificial Sequence
  Description of Artificial Sequence: Synthetic oligonucleotide
uucaaggaggacuagggag

SEQ ID NO: 1646544 - RNA, 19 nt, Artificial Sequence
  Description of Artificial Sequence: Synthetic oligonucleotide
aagauugaauauugcuuac

SEQ ID NO: 1646545 - RNA, 19 nt, Artificial Sequence
  Description of Artificial Sequence: Synthetic oligonucleotide
cucuuagcaucucagaugg

SEQ ID NO: 1646546 - RNA, 19 nt, Artificial Sequence
  Description of Artificial Sequence: Synthetic oligonucleotide
aguuauaaaagguccuuag

SEQ ID NO: 1646547 - RNA, 19 nt, Artificial Sequence
  Description of Artificial Sequence: Synthetic oligonucleotide
aucacuccguccuugaugg

SEQ ID NO: 1646548 - RNA, 19 nt, Artificial Sequence
  Description of Artificial Sequence: Synthetic oligonucleotide
acaagaaaugcccgugucc

SEQ ID NO: 1646549 - RNA, 19 nt, Artificial Sequence
  Description of Artificial Sequence: Synthetic oligonucleotide
gaacaauuauugcugagug

SEQ ID NO: 1646550 - RNA, 19 nt, Artificial Sequence
  Description of Artificial Sequence: Synthetic oligonucleotide
uugcucauuagagacaugg

SEQ ID NO: 1646551 - RNA, 19 nt, Artificial Sequence
  Description of Artificial Sequence: Synthetic oligonucleotide
uucuagaacaagcaauagc

SEQ ID NO: 1646552 - RNA, 19 nt, Artificial Sequence
  Description of Artificial Sequence: Synthetic oligonucleotide
cuguaguuauaaaaggucc

SEQ ID NO: 1646553 - RNA, 19 nt, Artificial Sequence
  Description of Artificial Sequence: Synthetic oligonucleotide
ugaccauccacaaagaauu

SEQ ID NO: 1646554 - RNA, 19 nt, Artificial Sequence
  Description of Artificial Sequence: Synthetic oligonucleotide
cucagaugggcuuauagag

SEQ ID NO: 1646555 - RNA, 19 nt, Artificial Sequence
  Description of Artificial Sequence: Synthetic oligonucleotide
agugcuuugacaaaggugu

SEQ ID NO: 1646556 - RNA, 19 nt, Artificial Sequence
  Description of Artificial Sequence: Synthetic oligonucleotide
auccgggugacuuauugcc

SEQ ID NO: 1646557 - RNA, 19 nt, Artificial Sequence
  Description of Artificial Sequence: Synthetic oligonucleotide
cuuugaaccgcucuucugg

SEQ ID NO: 1646558 - RNA, 19 nt, Artificial Sequence
  Description of Artificial Sequence: Synthetic oligonucleotide
agcuaaauagcacaugcug

SEQ ID NO: 1646559 - RNA, 19 nt, Artificial Sequence
  Description of Artificial Sequence: Synthetic oligonucleotide
guuacuauuggcucagaag

SEQ ID NO: 1646560 - RNA, 19 nt, Artificial Sequence
  Description of Artificial Sequence: Synthetic oligonucleotide
ucagaugggcuuauagagg

SEQ ID NO: 1646561 - RNA, 19 nt, Artificial Sequence
  Description of Artificial Sequence: Synthetic oligonucleotide
uuuguguugagaacaauua

SEQ ID NO: 1646562 - RNA, 19 nt, Artificial Sequence
  Description of Artificial Sequence: Synthetic oligonucleotide
auuauugcugaguguaguc

SEQ ID NO: 1646563 - RNA, 19 nt, Artificial Sequence
  Description of Artificial Sequence: Synthetic oligonucleotide
uguaguuauaaaagguccu

SEQ ID NO: 1646564 - RNA, 19 nt, Artificial Sequence
  Description of Artificial Sequence: Synthetic oligonucleotide
auugaauauugcuuacauc

SEQ ID NO: 1646565 - RNA, 19 nt, Artificial Sequence
  Description of Artificial Sequence: Synthetic oligonucleotide
uauagcaggcugcuguagg

SEQ ID NO: 1646566 - RNA, 19 nt, Artificial Sequence
  Description of Artificial Sequence: Synthetic oligonucleotide
uugaaguuuguguugagaa

SEQ ID NO: 1646567 - RNA, 19 nt, Artificial Sequence
  Description of Artificial Sequence: Synthetic oligonucleotide
cauccuuugcucauuagag

SEQ ID NO: 1646568 - RNA, 19 nt, Artificial Sequence
  Description of Artificial Sequence: Synthetic oligonucleotide
aagaauuuguacugaugcu

SEQ ID NO: 1646569 - RNA, 19 nt, Artificial Sequence
  Description of Artificial Sequence: Synthetic oligonucleotide
acuguaguuauaaaagguc

SEQ ID NO: 1646570 - RNA, 19 nt, Artificial Sequence
  Description of Artificial Sequence: Synthetic oligonucleotide
cuuugauuuggaaggacag

SEQ ID NO: 1646571 - RNA, 19 nt, Artificial Sequence
  Description of Artificial Sequence: Synthetic oligonucleotide
cucauuagagacauggguc

SEQ ID NO: 1646572 - RNA, 19 nt, Artificial Sequence
  Description of Artificial Sequence: Synthetic oligonucleotide
ggagagugcauacaggugg

SEQ ID NO: 1646573 - RNA, 19 nt, Artificial Sequence
  Description of Artificial Sequence: Synthetic oligonucleotide
aaagcgugaacaaccuccc

SEQ ID NO: 1646574 - RNA, 19 nt, Artificial Sequence
  Description of Artificial Sequence: Synthetic oligonucleotide
uguguugagaacaauuauu

SEQ ID NO: 1646575 - RNA, 19 nt, Artificial Sequence
  Description of Artificial Sequence: Synthetic oligonucleotide
uugcuuacauccauggcca

SEQ ID NO: 1646576 - RNA, 19 nt, Artificial Sequence
  Description of Artificial Sequence: Synthetic oligonucleotide
ugaauauugcuuacaucca

SEQ ID NO: 1646577 - RNA, 19 nt, Artificial Sequence
  Description of Artificial Sequence: Synthetic oligonucleotide
aacaauuauugcugagugu

SEQ ID NO: 1646578 - RNA, 19 nt, Artificial Sequence
  Description of Artificial Sequence: Synthetic oligonucleotide
uuugauuuggaaggacagg

SEQ ID NO: 1646579 - RNA, 19 nt, Artificial Sequence
  Description of Artificial Sequence: Synthetic oligonucleotide
uguugagaacaauuauugc

SEQ ID NO: 1646580 - RNA, 19 nt, Artificial Sequence
  Description of Artificial Sequence: Synthetic oligonucleotide
aauagcaaucacugugaca

SEQ ID NO: 1646581 - RNA, 19 nt, Artificial Sequence
  Description of Artificial Sequence: Synthetic oligonucleotide
ucgggcaacaauugcaaag

SEQ ID NO: 1646582 - RNA, 19 nt, Artificial Sequence
  Description of Artificial Sequence: Synthetic oligonucleotide
ugcacuaagcaccaucacu

SEQ ID NO: 1646583 - RNA, 19 nt, Artificial Sequence
  Description of Artificial Sequence: Synthetic oligonucleotide
uggguccccagcuaaauag

SEQ ID NO: 1646584 - RNA, 19 nt, Artificial Sequence
  Description of Artificial Sequence: Synthetic oligonucleotide
agugucgggcaacaauugc

SEQ ID NO: 1646585 - RNA, 19 nt, Artificial Sequence
  Description of Artificial Sequence: Synthetic oligonucleotide
aaguagggucuacaugcac

SEQ ID NO: 1646586 - RNA, 19 nt, Artificial Sequence
  Description of Artificial Sequence: Synthetic oligonucleotide
aauauugcuuacauccaug

SEQ ID NO: 1646587 - RNA, 19 nt, Artificial Sequence
  Description of Artificial Sequence: Synthetic oligonucleotide
acaaccucccaugauggcc

SEQ ID NO: 1646588 - RNA, 19 nt, Artificial Sequence
  Description of Artificial Sequence: Synthetic oligonucleotide
ucucagaugggcuuauaga

SEQ ID NO: 1646589 - RNA, 19 nt, Artificial Sequence
  Description of Artificial Sequence: Synthetic oligonucleotide
ugacuuauugccuuaggua

SEQ ID NO: 1646590 - RNA, 19 nt, Artificial Sequence
  Description of Artificial Sequence: Synthetic oligonucleotide
agacaaguagccgugggcg

SEQ ID NO: 1646591 - RNA, 19 nt, Artificial Sequence
  Description of Artificial Sequence: Synthetic oligonucleotide
cuuagugcacacagugucg

SEQ ID NO: 1646592 - RNA, 19 nt, Artificial Sequence
  Description of Artificial Sequence: Synthetic oligonucleotide
gaacaaccucccaugaugg

SEQ ID NO: 1646593 - RNA, 19 nt, Artificial Sequence
  Description of Artificial Sequence: Synthetic oligonucleotide
aggccaucaaccuuggaug

SEQ ID NO: 1646594 - RNA, 19 nt, Artificial Sequence
  Description of Artificial Sequence: Synthetic oligonucleotide
ugggaauauagcaggcugc

SEQ ID NO: 1646595 - RNA, 19 nt, Artificial Sequence
  Description of Artificial Sequence: Synthetic oligonucleotide
uuagugcacacagugucgg

SEQ ID NO: 1646596 - RNA, 19 nt, Artificial Sequence
  Description of Artificial Sequence: Synthetic oligonucleotide
ucccauagauucuacaauc

SEQ ID NO: 1646597 - RNA, 19 nt, Artificial Sequence
  Description of Artificial Sequence: Synthetic oligonucleotide
acaauuauugcugagugua

SEQ ID NO: 1646598 - RNA, 19 nt, Artificial Sequence
  Description of Artificial Sequence: Synthetic oligonucleotide
uuagcaucucagaugggcu

SEQ ID NO: 1646599 - RNA, 19 nt, Artificial Sequence
  Description of Artificial Sequence: Synthetic oligonucleotide
uauugccuuagguaggacu

SEQ ID NO: 1646600 - RNA, 19 nt, Artificial Sequence
  Description of Artificial Sequence: Synthetic oligonucleotide
acuaagcaccaucacuccg

SEQ ID NO: 1646601 - RNA, 19 nt, Artificial Sequence
  Description of Artificial Sequence: Synthetic oligonucleotide
guagucacaugaucuacag

SEQ ID NO: 1646602 - RNA, 19 nt, Artificial Sequence
  Description of Artificial Sequence: Synthetic oligonucleotide
guuuaauggagaauacggc

SEQ ID NO: 1646603 - RNA, 19 nt, Artificial Sequence
  Description of Artificial Sequence: Synthetic oligonucleotide
aucucagaugggcuuauag

SEQ ID NO: 1646604 - RNA, 19 nt, Artificial Sequence
  Description of Artificial Sequence: Synthetic oligonucleotide
gaauauagcaggcugcugu

SEQ ID NO: 1646605 - RNA, 19 nt, Artificial Sequence
  Description of Artificial Sequence: Synthetic oligonucleotide
auagcaggcugcuguaggg

SEQ ID NO: 1646606 - RNA, 19 nt, Artificial Sequence
  Description of Artificial Sequence: Synthetic oligonucleotide
uugggaauccaccauuaaa

SEQ ID NO: 1646607 - RNA, 19 nt, Artificial Sequence
  Description of Artificial Sequence: Synthetic oligonucleotide
agaacaauuauugcugagu

SEQ ID NO: 1646608 - RNA, 19 nt, Artificial Sequence
  Description of Artificial Sequence: Synthetic oligonucleotide
ucauccgggugacuuauug

SEQ ID NO: 1646609 - RNA, 19 nt, Artificial Sequence
  Description of Artificial Sequence: Synthetic oligonucleotide
gaucuacagucucauccgg

SEQ ID NO: 1646610 - RNA, 19 nt, Artificial Sequence
  Description of Artificial Sequence: Synthetic oligonucleotide
uaauggagaauacggcagu

SEQ ID NO: 1646611 - RNA, 19 nt, Artificial Sequence
  Description of Artificial Sequence: Synthetic oligonucleotide
uuauuuuggcuuccuugug

SEQ ID NO: 1646612 - RNA, 19 nt, Artificial Sequence
  Description of Artificial Sequence: Synthetic oligonucleotide
agugcauacaggugguuca

SEQ ID NO: 1646613 - RNA, 19 nt, Artificial Sequence
  Description of Artificial Sequence: Synthetic oligonucleotide
ucuacagucucauccgggu

SEQ ID NO: 1646614 - RNA, 19 nt, Artificial Sequence
  Description of Artificial Sequence: Synthetic oligonucleotide
cuuuuguguggcuucaguc

SEQ ID NO: 1646615 - RNA, 19 nt, Artificial Sequence
  Description of Artificial Sequence: Synthetic oligonucleotide
ugaguguagucacaugauc

SEQ ID NO: 1646616 - RNA, 19 nt, Artificial Sequence
  Description of Artificial Sequence: Synthetic oligonucleotide
ucuacugcuuugauuugga

SEQ ID NO: 1646617 - RNA, 19 nt, Artificial Sequence
  Description of Artificial Sequence: Synthetic oligonucleotide
uagggguucaaguucuucu

SEQ ID NO: 1646618 - RNA, 19 nt, Artificial Sequence
  Description of Artificial Sequence: Synthetic oligonucleotide
ugauuuggaaggacaggca

SEQ ID NO: 1646619 - RNA, 19 nt, Artificial Sequence
  Description of Artificial Sequence: Synthetic oligonucleotide
guggguugcacuaagcacc

SEQ ID NO: 1646620 - RNA, 19 nt, Artificial Sequence
  Description of Artificial Sequence: Synthetic oligonucleotide
auuagagacaugggucccc

SEQ ID NO: 1646621 - RNA, 19 nt, Artificial Sequence
  Description of Artificial Sequence: Synthetic oligonucleotide
acaucggagcacuuuuggg

SEQ ID NO: 1646622 - RNA, 19 nt, Artificial Sequence
  Description of Artificial Sequence: Synthetic oligonucleotide
gcuaaauagcacaugcugg

SEQ ID NO: 1646623 - RNA, 19 nt, Artificial Sequence
  Description of Artificial Sequence: Synthetic oligonucleotide
acggcuggcucuuagcauc

SEQ ID NO: 1646624 - RNA, 19 nt, Artificial Sequence
  Description of Artificial Sequence: Synthetic oligonucleotide
ggacaaaccuucaaggagg

SEQ ID NO: 1646625 - RNA, 19 nt, Artificial Sequence
  Description of Artificial Sequence: Synthetic oligonucleotide
gauuuggaaggacaggcaa

SEQ ID NO: 1646626 - RNA, 19 nt, Artificial Sequence
  Description of Artificial Sequence: Synthetic oligonucleotide
gacaaguagccgugggcgg

SEQ ID NO: 1646627 - RNA, 19 nt, Artificial Sequence
  Description of Artificial Sequence: Synthetic oligonucleotide
auugccuuagguaggacug

SEQ ID NO: 1646628 - RNA, 19 nt, Artificial Sequence
  Description of Artificial Sequence: Synthetic oligonucleotide
uucccauagauucuacaau

SEQ ID NO: 1646629 - RNA, 19 nt, Artificial Sequence
  Description of Artificial Sequence: Synthetic oligonucleotide
acaagcaauagcaaucacu

SEQ ID NO: 1646630 - RNA, 19 nt, Artificial Sequence
  Description of Artificial Sequence: Synthetic oligonucleotide
cagacgaugaagacuuuug

SEQ ID NO: 1646631 - RNA, 19 nt, Artificial Sequence
  Description of Artificial Sequence: Synthetic oligonucleotide
aauggagaauacggcagug

SEQ ID NO: 1646632 - RNA, 19 nt, Artificial Sequence
  Description of Artificial Sequence: Synthetic oligonucleotide
caauuauugcugaguguag

SEQ ID NO: 1646633 - RNA, 19 nt, Artificial Sequence
  Description of Artificial Sequence: Synthetic oligonucleotide
uuuugggaauccaccauua

SEQ ID NO: 1646634 - RNA, 19 nt, Artificial Sequence
  Description of Artificial Sequence: Synthetic oligonucleotide
uggcucagaaggaucgugc

SEQ ID NO: 1646635 - RNA, 19 nt, Artificial Sequence
  Description of Artificial Sequence: Synthetic oligonucleotide
gaacaagcaauagcaauca

SEQ ID NO: 1646636 - RNA, 19 nt, Artificial Sequence
  Description of Artificial Sequence: Synthetic oligonucleotide
agacgaugaagacuuuugu

SEQ ID NO: 1646637 - RNA, 19 nt, Artificial Sequence
  Description of Artificial Sequence: Synthetic oligonucleotide
guuuagagauguaaggcuc

SEQ ID NO: 1646638 - RNA, 19 nt, Artificial Sequence
  Description of Artificial Sequence: Synthetic oligonucleotide
aucuacugcuuugauuugg

SEQ ID NO: 1646639 - RNA, 19 nt, Artificial Sequence
  Description of Artificial Sequence: Synthetic oligonucleotide
aagcaauagcaaucacugu

SEQ ID NO: 1646640 - RNA, 19 nt, Artificial Sequence
  Description of Artificial Sequence: Synthetic oligonucleotide
ugucgggcaacaauugcaa

SEQ ID NO: 1646641 - RNA, 19 nt, Artificial Sequence
  Description of Artificial Sequence: Synthetic oligonucleotide
uggcgacaaaguuauuuug

SEQ ID NO: 1646642 - RNA, 19 nt, Artificial Sequence
  Description of Artificial Sequence: Synthetic oligonucleotide
uggagagugcauacaggug

SEQ ID NO: 1646643 - RNA, 19 nt, Artificial Sequence
  Description of Artificial Sequence: Synthetic oligonucleotide
cuagggagggguaagaugu

SEQ ID NO: 1646644 - RNA, 19 nt, Artificial Sequence
  Description of Artificial Sequence: Synthetic oligonucleotide
acuuauugccuuagguagg

SEQ ID NO: 1646645 - RNA, 19 nt, Artificial Sequence
  Description of Artificial Sequence: Synthetic oligonucleotide
uagguaggacuggagagcc

SEQ ID NO: 1646646 - RNA, 19 nt, Artificial Sequence
  Description of Artificial Sequence: Synthetic oligonucleotide
uguuguuaacugugccaag

SEQ ID NO: 1646647 - RNA, 19 nt, Artificial Sequence
  Description of Artificial Sequence: Synthetic oligonucleotide
gugaaguagggucuacaug

SEQ ID NO: 1646648 - RNA, 19 nt, Artificial Sequence
  Description of Artificial Sequence: Synthetic oligonucleotide
gaaggaaagcgugaacaac

SEQ ID NO: 1646649 - RNA, 19 nt, Artificial Sequence
  Description of Artificial Sequence: Synthetic oligonucleotide
cagaugggcuuauagagga

SEQ ID NO: 1646650 - RNA, 19 nt, Artificial Sequence
  Description of Artificial Sequence: Synthetic oligonucleotide
acaaucuacugcuuugauu

SEQ ID NO: 1646651 - RNA, 19 nt, Artificial Sequence
  Description of Artificial Sequence: Synthetic oligonucleotide
cagggacaggccaucaacc

SEQ ID NO: 1646652 - RNA, 19 nt, Artificial Sequence
  Description of Artificial Sequence: Synthetic oligonucleotide
ggcgacaaaguuauuuugg

SEQ ID NO: 1646653 - RNA, 19 nt, Artificial Sequence
  Description of Artificial Sequence: Synthetic oligonucleotide
caucggagcacuuuuggga

SEQ ID NO: 1646654 - RNA, 19 nt, Artificial Sequence
  Description of Artificial Sequence: Synthetic oligonucleotide
aaaccuucaaggaggacua

SEQ ID NO: 1646655 - RNA, 19 nt, Artificial Sequence
  Description of Artificial Sequence: Synthetic oligonucleotide
ccacuguaguuauaaaagg

SEQ ID NO: 1646656 - RNA, 19 nt, Artificial Sequence
  Description of Artificial Sequence: Synthetic oligonucleotide
ucuggaaaucagacaucug

SEQ ID NO: 1646657 - RNA, 19 nt, Artificial Sequence
  Description of Artificial Sequence: Synthetic oligonucleotide
uuccuugugaguggaagcu

SEQ ID NO: 1646658 - RNA, 19 nt, Artificial Sequence
  Description of Artificial Sequence: Synthetic oligonucleotide
acuuuuguguggcuucagu

SEQ ID NO: 1646659 - RNA, 19 nt, Artificial Sequence
  Description of Artificial Sequence: Synthetic oligonucleotide
uccuuagugcacacagugu

SEQ ID NO: 1646660 - RNA, 19 nt, Artificial Sequence
  Description of Artificial Sequence: Synthetic oligonucleotide
aaggaucgugcguccacug

SEQ ID NO: 1646661 - RNA, 19 nt, Artificial Sequence
  Description of Artificial Sequence: Synthetic oligonucleotide
uguaccgguggguugcacu

SEQ ID NO: 1646662 - RNA, 19 nt, Artificial Sequence
  Description of Artificial Sequence: Synthetic oligonucleotide
agcgugaacaaccucccau

SEQ ID NO: 1646663 - RNA, 19 nt, Artificial Sequence
  Description of Artificial Sequence: Synthetic oligonucleotide
caucacuccguccuugaug

SEQ ID NO: 1646664 - RNA, 19 nt, Artificial Sequence
  Description of Artificial Sequence: Synthetic oligonucleotide
auggcgacaaaguuauuuu

SEQ ID NO: 1646665 - RNA, 19 nt, Artificial Sequence
  Description of Artificial Sequence: Synthetic oligonucleotide
uuugggaauccaccauuaa

SEQ ID NO: 1646666 - RNA, 19 nt, Artificial Sequence
  Description of Artificial Sequence: Synthetic oligonucleotide
cagacaaguagccgugggc

SEQ ID NO: 1646667 - RNA, 19 nt, Artificial Sequence
  Description of Artificial Sequence: Synthetic oligonucleotide
gcugaguguagucacauga

SEQ ID NO: 1646668 - RNA, 19 nt, Artificial Sequence
  Description of Artificial Sequence: Synthetic oligonucleotide
aaggcuccugaugguaagg

SEQ ID NO: 1646669 - RNA, 19 nt, Artificial Sequence
  Description of Artificial Sequence: Synthetic oligonucleotide
gucccagagagugaaguag

SEQ ID NO: 1646670 - RNA, 19 nt, Artificial Sequence
  Description of Artificial Sequence: Synthetic oligonucleotide
uggaagcuugcuccaguug

SEQ ID NO: 1646671 - RNA, 19 nt, Artificial Sequence
  Description of Artificial Sequence: Synthetic oligonucleotide
guugcacuaagcaccauca

SEQ ID NO: 1646672 - RNA, 19 nt, Artificial Sequence
  Description of Artificial Sequence: Synthetic oligonucleotide
gacagcucagacacaucgg

SEQ ID NO: 1646673 - RNA, 19 nt, Artificial Sequence
  Description of Artificial Sequence: Synthetic oligonucleotide
cacuaagcaccaucacucc

SEQ ID NO: 1646674 - RNA, 19 nt, Artificial Sequence
  Description of Artificial Sequence: Synthetic oligonucleotide
aucggagcacuuuugggaa

SEQ ID NO: 1646675 - RNA, 19 nt, Artificial Sequence
  Description of Artificial Sequence: Synthetic oligonucleotide
cauucaguuuaauggagaa

SEQ ID NO: 1646676 - RNA, 19 nt, Artificial Sequence
  Description of Artificial Sequence: Synthetic oligonucleotide
cauccgggugacuuauugc

SEQ ID NO: 1646677 - RNA, 19 nt, Artificial Sequence
  Description of Artificial Sequence: Synthetic oligonucleotide
acuuuugggaauccaccau

SEQ ID NO: 1646678 - RNA, 19 nt, Artificial Sequence
  Description of Artificial Sequence: Synthetic oligonucleotide
accuucaaggaggacuagg

SEQ ID NO: 1646679 - RNA, 19 nt, Artificial Sequence
  Description of Artificial Sequence: Synthetic oligonucleotide
uacaaucuacugcuuugau

SEQ ID NO: 1646680 - RNA, 19 nt, Artificial Sequence
  Description of Artificial Sequence: Synthetic oligonucleotide
ccacaaagaauuuguacug

SEQ ID NO: 1646681 - RNA, 19 nt, Artificial Sequence
  Description of Artificial Sequence: Synthetic oligonucleotide
uucuuguaccgguggguug

SEQ ID NO: 1646682 - RNA, 19 nt, Artificial Sequence
  Description of Artificial Sequence: Synthetic oligonucleotide
caaaguuauuuuggcuucc

SEQ ID NO: 1646683 - RNA, 19 nt, Artificial Sequence
  Description of Artificial Sequence: Synthetic oligonucleotide
aauacggcaguggguuuug

SEQ ID NO: 1646684 - RNA, 19 nt, Artificial Sequence
  Description of Artificial Sequence: Synthetic oligonucleotide
gaacugaaaggagggugag

SEQ ID NO: 1646685 - RNA, 19 nt, Artificial Sequence
  Description of Artificial Sequence: Synthetic oligonucleotide
agggguaagaugucccaga

SEQ ID NO: 1646686 - RNA, 19 nt, Artificial Sequence
  Description of Artificial Sequence: Synthetic oligonucleotide
gaguguagucacaugaucu

SEQ ID NO: 1646687 - RNA, 19 nt, Artificial Sequence
  Description of Artificial Sequence: Synthetic oligonucleotide
gcgacaaaguuauuuuggc

SEQ ID NO: 1646688 - RNA, 19 nt, Artificial Sequence
  Description of Artificial Sequence: Synthetic oligonucleotide
ucuucuuguaccggugggu

SEQ ID NO: 1646689 - RNA, 19 nt, Artificial Sequence
  Description of Artificial Sequence: Synthetic oligonucleotide
augggcuuauagaggaggg

SEQ ID NO: 1646690 - RNA, 19 nt, Artificial Sequence
  Description of Artificial Sequence: Synthetic oligonucleotide
uaaauagcacaugcuggaa

SEQ ID NO: 1646691 - RNA, 19 nt, Artificial Sequence
  Description of Artificial Sequence: Synthetic oligonucleotide
uggggcuuugaaccgcucu

SEQ ID NO: 1646692 - RNA, 19 nt, Artificial Sequence
  Description of Artificial Sequence: Synthetic oligonucleotide
uuagagacaugggucccca

SEQ ID NO: 1646693 - RNA, 19 nt, Artificial Sequence
  Description of Artificial Sequence: Synthetic oligonucleotide
ggaucacaagaaaugcccg

SEQ ID NO: 1646694 - RNA, 19 nt, Artificial Sequence
  Description of Artificial Sequence: Synthetic oligonucleotide
caagaucaugcugccaggc

SEQ ID NO: 1646695 - RNA, 19 nt, Artificial Sequence
  Description of Artificial Sequence: Synthetic oligonucleotide
cacuuuugggaauccacca

SEQ ID NO: 1646696 - RNA, 19 nt, Artificial Sequence
  Description of Artificial Sequence: Synthetic oligonucleotide
aucuacagucucauccggg

SEQ ID NO: 1646697 - RNA, 19 nt, Artificial Sequence
  Description of Artificial Sequence: Synthetic oligonucleotide
gaugcagacgaugaagacu

SEQ ID NO: 1646698 - RNA, 19 nt, Artificial Sequence
  Description of Artificial Sequence: Synthetic oligonucleotide
gugggcggggcuuuuauca

SEQ ID NO: 1646699 - RNA, 19 nt, Artificial Sequence
  Description of Artificial Sequence: Synthetic oligonucleotide
uagugcacacagugucggg

SEQ ID NO: 1646700 - RNA, 19 nt, Artificial Sequence
  Description of Artificial Sequence: Synthetic oligonucleotide
uaagcaccaucacuccguc

SEQ ID NO: 1646701 - RNA, 19 nt, Artificial Sequence
  Description of Artificial Sequence: Synthetic oligonucleotide
gguggguugcacuaagcac

SEQ ID NO: 1646702 - RNA, 19 nt, Artificial Sequence
  Description of Artificial Sequence: Synthetic oligonucleotide
uugccuuagguaggacugg

SEQ ID NO: 1646703 - RNA, 19 nt, Artificial Sequence
  Description of Artificial Sequence: Synthetic oligonucleotide
uguaaggcuccugauggua

SEQ ID NO: 1646704 - RNA, 19 nt, Artificial Sequence
  Description of Artificial Sequence: Synthetic oligonucleotide
cauuagagacauggguccc

SEQ ID NO: 1646705 - RNA, 19 nt, Artificial Sequence
  Description of Artificial Sequence: Synthetic oligonucleotide
cacaagaaaugcccguguc

SEQ ID NO: 1646706 - RNA, 19 nt, Artificial Sequence
  Description of Artificial Sequence: Synthetic oligonucleotide
caaaccuucaaggaggacu

SEQ ID NO: 1646707 - RNA, 19 nt, Artificial Sequence
  Description of Artificial Sequence: Synthetic oligonucleotide
ccuuagugcacacaguguc

SEQ ID NO: 1646708 - RNA, 19 nt, Artificial Sequence
  Description of Artificial Sequence: Synthetic oligonucleotide
cuagaacaagcaauagcaa

SEQ ID NO: 1646709 - RNA, 19 nt, Artificial Sequence
  Description of Artificial Sequence: Synthetic oligonucleotide
gaucacaagaaaugcccgu

SEQ ID NO: 1646710 - RNA, 19 nt, Artificial Sequence
  Description of Artificial Sequence: Synthetic oligonucleotide
uccaccauuaaagcaucaa

SEQ ID NO: 1646711 - RNA, 19 nt, Artificial Sequence
  Description of Artificial Sequence: Synthetic oligonucleotide
uugcacuaagcaccaucac

SEQ ID NO: 1646712 - RNA, 19 nt, Artificial Sequence
  Description of Artificial Sequence: Synthetic oligonucleotide
cacguggagagcccagugc

SEQ ID NO: 1646713 - RNA, 19 nt, Artificial Sequence
  Description of Artificial Sequence: Synthetic oligonucleotide
gguuuagagauguaaggcu

SEQ ID NO: 1646714 - RNA, 19 nt, Artificial Sequence
  Description of Artificial Sequence: Synthetic oligonucleotide
gguaggacuggagagccag

SEQ ID NO: 1646715 - RNA, 19 nt, Artificial Sequence
  Description of Artificial Sequence: Synthetic oligonucleotide
ugacauccuuugcucauua

SEQ ID NO: 1646716 - RNA, 19 nt, Artificial Sequence
  Description of Artificial Sequence: Synthetic oligonucleotide
aagcuggcugguuacuauu

SEQ ID NO: 1646717 - RNA, 19 nt, Artificial Sequence
  Description of Artificial Sequence: Synthetic oligonucleotide
cacaugaucuacagucuca

SEQ ID NO: 1646718 - RNA, 19 nt, Artificial Sequence
  Description of Artificial Sequence: Synthetic oligonucleotide
ggugacuuauugccuuagg

SEQ ID NO: 1646719 - RNA, 19 nt, Artificial Sequence
  Description of Artificial Sequence: Synthetic oligonucleotide
gagugcauacaggugguuc

SEQ ID NO: 1646720 - RNA, 19 nt, Artificial Sequence
  Description of Artificial Sequence: Synthetic oligonucleotide
gucuacaugcacguggaga

SEQ ID NO: 1646721 - RNA, 19 nt, Artificial Sequence
  Description of Artificial Sequence: Synthetic oligonucleotide
gcacuaagcaccaucacuc

SEQ ID NO: 1646722 - RNA, 19 nt, Artificial Sequence
  Description of Artificial Sequence: Synthetic oligonucleotide
agcgcuggaucacaagaaa

SEQ ID NO: 1646723 - RNA, 19 nt, Artificial Sequence
  Description of Artificial Sequence: Synthetic oligonucleotide
gaucgugcguccacugacc

SEQ ID NO: 1646724 - RNA, 19 nt, Artificial Sequence
  Description of Artificial Sequence: Synthetic oligonucleotide
gacauggguccccagcuaa

SEQ ID NO: 1646725 - RNA, 19 nt, Artificial Sequence
  Description of Artificial Sequence: Synthetic oligonucleotide
cuuauugccuuagguagga

SEQ ID NO: 1646726 - RNA, 19 nt, Artificial Sequence
  Description of Artificial Sequence: Synthetic oligonucleotide
gagaauacggcaguggguu

SEQ ID NO: 1646727 - RNA, 19 nt, Artificial Sequence
  Description of Artificial Sequence: Synthetic oligonucleotide
aagcgugaacaaccuccca

SEQ ID NO: 1646728 - RNA, 19 nt, Artificial Sequence
  Description of Artificial Sequence: Synthetic oligonucleotide
ugcuuugauuuggaaggac

SEQ ID NO: 1646729 - RNA, 19 nt, Artificial Sequence
  Description of Artificial Sequence: Synthetic oligonucleotide
cuacagucucauccgggug

SEQ ID NO: 1646730 - RNA, 19 nt, Artificial Sequence
  Description of Artificial Sequence: Synthetic oligonucleotide
gauggcgacaaaguuauuu

SEQ ID NO: 1646731 - RNA, 19 nt, Artificial Sequence
  Description of Artificial Sequence: Synthetic oligonucleotide
agggguucaaguucuucua

SEQ ID NO: 1646732 - RNA, 19 nt, Artificial Sequence
  Description of Artificial Sequence: Synthetic oligonucleotide
cuuauagaggaggguggug

SEQ ID NO: 1646733 - RNA, 19 nt, Artificial Sequence
  Description of Artificial Sequence: Synthetic oligonucleotide
gcuguagggguucaaguuc

SEQ ID NO: 1646734 - RNA, 19 nt, Artificial Sequence
  Description of Artificial Sequence: Synthetic oligonucleotide
cagugucgggcaacaauug

SEQ ID NO: 1646735 - RNA, 19 nt, Artificial Sequence
  Description of Artificial Sequence: Synthetic oligonucleotide
cuucaaggaggacuaggga

SEQ ID NO: 1646736 - RNA, 19 nt, Artificial Sequence
  Description of Artificial Sequence: Synthetic oligonucleotide
gacaaaccuucaaggagga

SEQ ID NO: 1646737 - RNA, 19 nt, Artificial Sequence
  Description of Artificial Sequence: Synthetic oligonucleotide
aucgugcguccacugacca

SEQ ID NO: 1646738 - RNA, 19 nt, Artificial Sequence
  Description of Artificial Sequence: Synthetic oligonucleotide
accgguggguugcacuaag

SEQ ID NO: 1646739 - RNA, 19 nt, Artificial Sequence
  Description of Artificial Sequence: Synthetic oligonucleotide
cuaagcaccaucacuccgu

SEQ ID NO: 1646740 - RNA, 19 nt, Artificial Sequence
  Description of Artificial Sequence: Synthetic oligonucleotide
auguaaggcuccugauggu

SEQ ID NO: 1646741 - RNA, 19 nt, Artificial Sequence
  Description of Artificial Sequence: Synthetic oligonucleotide
acaugcacguggagagccc

SEQ ID NO: 1646742 - RNA, 19 nt, Artificial Sequence
  Description of Artificial Sequence: Synthetic oligonucleotide
cugaccauccacaaagaau

SEQ ID NO: 1646743 - RNA, 19 nt, Artificial Sequence
  Description of Artificial Sequence: Synthetic oligonucleotide
uacggcaguggguuuugaa

SEQ ID NO: 1646744 - RNA, 19 nt, Artificial Sequence
  Description of Artificial Sequence: Synthetic oligonucleotide
agucucauccgggugacuu

SEQ ID NO: 1646745 - RNA, 19 nt, Artificial Sequence
  Description of Artificial Sequence: Synthetic oligonucleotide
gaaguagggucuacaugca

SEQ ID NO: 1646746 - RNA, 19 nt, Artificial Sequence
  Description of Artificial Sequence: Synthetic oligonucleotide
ugcauacaggugguucagc

SEQ ID NO: 1646747 - RNA, 19 nt, Artificial Sequence
  Description of Artificial Sequence: Synthetic oligonucleotide
ggaucgugcguccacugac

SEQ ID NO: 1646748 - RNA, 19 nt, Artificial Sequence
  Description of Artificial Sequence: Synthetic oligonucleotide
guagggucuacaugcacgu

SEQ ID NO: 1646749 - RNA, 19 nt, Artificial Sequence
  Description of Artificial Sequence: Synthetic oligonucleotide
gcacuuuugggaauccacc

SEQ ID NO: 1646750 - RNA, 19 nt, Artificial Sequence
  Description of Artificial Sequence: Synthetic oligonucleotide
caguugaaggaaagcguga

SEQ ID NO: 1646751 - RNA, 19 nt, Artificial Sequence
  Description of Artificial Sequence: Synthetic oligonucleotide
uugcugaguguagucacau

SEQ ID NO: 1646752 - RNA, 19 nt, Artificial Sequence
  Description of Artificial Sequence: Synthetic oligonucleotide
aggaucgugcguccacuga

SEQ ID NO: 1646753 - RNA, 19 nt, Artificial Sequence
  Description of Artificial Sequence: Synthetic oligonucleotide
ggaagcuugcuccaguugu

SEQ ID NO: 1646754 - RNA, 19 nt, Artificial Sequence
  Description of Artificial Sequence: Synthetic oligonucleotide
gcgugaacaaccucccaug

SEQ ID NO: 1646755 - RNA, 19 nt, Artificial Sequence
  Description of Artificial Sequence: Synthetic oligonucleotide
ugccuggacaaaccuucaa

SEQ ID NO: 1646756 - RNA, 19 nt, Artificial Sequence
  Description of Artificial Sequence: Synthetic oligonucleotide
ugggcuuauagaggagggu

SEQ ID NO: 1646757 - RNA, 19 nt, Artificial Sequence
  Description of Artificial Sequence: Synthetic oligonucleotide
gugucgggcaacaauugca

SEQ ID NO: 1646758 - RNA, 19 nt, Artificial Sequence
  Description of Artificial Sequence: Synthetic oligonucleotide
gcucauuagagacaugggu

SEQ ID NO: 1646759 - RNA, 19 nt, Artificial Sequence
  Description of Artificial Sequence: Synthetic oligonucleotide
gagugaaguagggucuaca

SEQ ID NO: 1646760 - RNA, 19 nt, Artificial Sequence
  Description of Artificial Sequence: Synthetic oligonucleotide
cgaugaagacuuuugugug

SEQ ID NO: 1646761 - RNA, 19 nt, Artificial Sequence
  Description of Artificial Sequence: Synthetic oligonucleotide
gacacaucggagcacuuuu

SEQ ID NO: 1646762 - RNA, 19 nt, Artificial Sequence
  Description of Artificial Sequence: Synthetic oligonucleotide
agacuuuuguguggcuuca

SEQ ID NO: 1646763 - RNA, 19 nt, Artificial Sequence
  Description of Artificial Sequence: Synthetic oligonucleotide
auugcugaguguagucaca

SEQ ID NO: 1646764 - RNA, 19 nt, Artificial Sequence
  Description of Artificial Sequence: Synthetic oligonucleotide
aagcugcaucuggaaauca

SEQ ID NO: 1646765 - RNA, 19 nt, Artificial Sequence
  Description of Artificial Sequence: Synthetic oligonucleotide
gacgugguugggcucugga

SEQ ID NO: 1646766 - RNA, 19 nt, Artificial Sequence
  Description of Artificial Sequence: Synthetic oligonucleotide
caaguagccgugggcgggg

SEQ ID NO: 1646767 - RNA, 19 nt, Artificial Sequence
  Description of Artificial Sequence: Synthetic oligonucleotide
gcuuacauccauggccagg

SEQ ID NO: 1646768 - RNA, 19 nt, Artificial Sequence
  Description of Artificial Sequence: Synthetic oligonucleotide
gcuuugaaccgcucuucug

SEQ ID NO: 1646769 - RNA, 19 nt, Artificial Sequence
  Description of Artificial Sequence: Synthetic oligonucleotide
cuuugcucauuagagacau

SEQ ID NO: 1646770 - RNA, 19 nt, Artificial Sequence
  Description of Artificial Sequence: Synthetic oligonucleotide
agaauacggcaguggguuu

SEQ ID NO: 1646771 - RNA, 19 nt, Artificial Sequence
  Description of Artificial Sequence: Synthetic oligonucleotide
uuauugccuuagguaggac

SEQ ID NO: 1646772 - RNA, 19 nt, Artificial Sequence
  Description of Artificial Sequence: Synthetic oligonucleotide
ccuuagguaggacuggaga

SEQ ID NO: 1646773 - RNA, 19 nt, Artificial Sequence
  Description of Artificial Sequence: Synthetic oligonucleotide
gaagacuuuuguguggcuu

SEQ ID NO: 1646774 - RNA, 19 nt, Artificial Sequence
  Description of Artificial Sequence: Synthetic oligonucleotide
gagauguaaggcuccugau

SEQ ID NO: 1646775 - RNA, 19 nt, Artificial Sequence
  Description of Artificial Sequence: Synthetic oligonucleotide
auuggcucagaaggaucgu

SEQ ID NO: 1646776 - RNA, 19 nt, Artificial Sequence
  Description of Artificial Sequence: Synthetic oligonucleotide
guaccgguggguugcacua

SEQ ID NO: 1646777 - RNA, 19 nt, Artificial Sequence
  Description of Artificial Sequence: Synthetic oligonucleotide
uugaaccgcucuucugguu

SEQ ID NO: 1646778 - RNA, 19 nt, Artificial Sequence
  Description of Artificial Sequence: Synthetic oligonucleotide
ugggcggggcuuuuaucau

SEQ ID NO: 1646779 - RNA, 19 nt, Artificial Sequence
  Description of Artificial Sequence: Synthetic oligonucleotide
aggcuccugaugguaaggu

SEQ ID NO: 1646780 - RNA, 19 nt, Artificial Sequence
  Description of Artificial Sequence: Synthetic oligonucleotide
ucggagcacuuuugggaau

SEQ ID NO: 1646781 - RNA, 19 nt, Artificial Sequence
  Description of Artificial Sequence: Synthetic oligonucleotide
ccgcucuucugguuuagag

SEQ ID NO: 1646782 - RNA, 19 nt, Artificial Sequence
  Description of Artificial Sequence: Synthetic oligonucleotide
guagggguucaaguucuuc

SEQ ID NO: 1646783 - RNA, 19 nt, Artificial Sequence
  Description of Artificial Sequence: Synthetic oligonucleotide
cuuuugggaauccaccauu

SEQ ID NO: 1646784 - RNA, 19 nt, Artificial Sequence
  Description of Artificial Sequence: Synthetic oligonucleotide
cacuugaaugauguuguua

SEQ ID NO: 1646785 - RNA, 19 nt, Artificial Sequence
  Description of Artificial Sequence: Synthetic oligonucleotide
agacauggguccccagcua

SEQ ID NO: 1646786 - RNA, 19 nt, Artificial Sequence
  Description of Artificial Sequence: Synthetic oligonucleotide
uagggucuacaugcacgug

SEQ ID NO: 1646787 - RNA, 19 nt, Artificial Sequence
  Description of Artificial Sequence: Synthetic oligonucleotide
agcaucucagaugggcuua

SEQ ID NO: 1646788 - RNA, 19 nt, Artificial Sequence
  Description of Artificial Sequence: Synthetic oligonucleotide
cgggcaacaauugcaaagc

SEQ ID NO: 1646789 - RNA, 19 nt, Artificial Sequence
  Description of Artificial Sequence: Synthetic oligonucleotide
agccagccacuguaguuau

SEQ ID NO: 1646790 - RNA, 19 nt, Artificial Sequence
  Description of Artificial Sequence: Synthetic oligonucleotide
gaaaugcccguguccuugu

SEQ ID NO: 1646791 - RNA, 19 nt, Artificial Sequence
  Description of Artificial Sequence: Synthetic oligonucleotide
ugucaccauuacaguugaa

SEQ ID NO: 1646792 - RNA, 19 nt, Artificial Sequence
  Description of Artificial Sequence: Synthetic oligonucleotide
gaggacuagggagggguaa

SEQ ID NO: 1646793 - RNA, 19 nt, Artificial Sequence
  Description of Artificial Sequence: Synthetic oligonucleotide
uccuugugaguggaagcuu

SEQ ID NO: 1646794 - RNA, 19 nt, Artificial Sequence
  Description of Artificial Sequence: Synthetic oligonucleotide
ggaauauagcaggcugcug

SEQ ID NO: 1646795 - RNA, 19 nt, Artificial Sequence
  Description of Artificial Sequence: Synthetic oligonucleotide
ugacgugguugggcucugg

SEQ ID NO: 1646796 - RNA, 19 nt, Artificial Sequence
  Description of Artificial Sequence: Synthetic oligonucleotide
cagcuaaauagcacaugcu

SEQ ID NO: 1646797 - RNA, 19 nt, Artificial Sequence
  Description of Artificial Sequence: Synthetic oligonucleotide
cagcgcuggaucacaagaa

SEQ ID NO: 1646798 - RNA, 19 nt, Artificial Sequence
  Description of Artificial Sequence: Synthetic oligonucleotide
cugccaggccaggaauucc

SEQ ID NO: 1646799 - RNA, 19 nt, Artificial Sequence
  Description of Artificial Sequence: Synthetic oligonucleotide
gaaggaucgugcguccacu

SEQ ID NO: 1646800 - RNA, 19 nt, Artificial Sequence
  Description of Artificial Sequence: Synthetic oligonucleotide
guccacugaccauccacaa

SEQ ID NO: 1646801 - RNA, 19 nt, Artificial Sequence
  Description of Artificial Sequence: Synthetic oligonucleotide
ugcguccacugaccaucca

SEQ ID NO: 1646802 - RNA, 19 nt, Artificial Sequence
  Description of Artificial Sequence: Synthetic oligonucleotide
cuacugcuuugauuuggaa

SEQ ID NO: 1646803 - RNA, 19 nt, Artificial Sequence
  Description of Artificial Sequence: Synthetic oligonucleotide
guaggacuggagagccagc

SEQ ID NO: 1646804 - RNA, 19 nt, Artificial Sequence
  Description of Artificial Sequence: Synthetic oligonucleotide
ucgugcguccacugaccau

SEQ ID NO: 1646805 - RNA, 19 nt, Artificial Sequence
  Description of Artificial Sequence: Synthetic oligonucleotide
cuucaagaucaugcugcca

SEQ ID NO: 1646806 - RNA, 19 nt, Artificial Sequence
  Description of Artificial Sequence: Synthetic oligonucleotide
gaauacggcaguggguuuu

SEQ ID NO: 1646807 - RNA, 19 nt, Artificial Sequence
  Description of Artificial Sequence: Synthetic oligonucleotide
ggguaagaugucccagaga

SEQ ID NO: 1646808 - RNA, 19 nt, Artificial Sequence
  Description of Artificial Sequence: Synthetic oligonucleotide
gucgggcaacaauugcaaa

SEQ ID NO: 1646809 - RNA, 19 nt, Artificial Sequence
  Description of Artificial Sequence: Synthetic oligonucleotide
ggguccccagcuaaauagc

SEQ ID NO: 1646810 - RNA, 19 nt, Artificial Sequence
  Description of Artificial Sequence: Synthetic oligonucleotide
gggugacuuauugccuuag

SEQ ID NO: 1646811 - RNA, 19 nt, Artificial Sequence
  Description of Artificial Sequence: Synthetic oligonucleotide
gugaacaaccucccaugau

SEQ ID NO: 1646812 - RNA, 19 nt, Artificial Sequence
  Description of Artificial Sequence: Synthetic oligonucleotide
ucacuccguccuugaugga

SEQ ID NO: 1646813 - RNA, 19 nt, Artificial Sequence
  Description of Artificial Sequence: Synthetic oligonucleotide
ggagcacuuuugggaaucc

SEQ ID NO: 1646814 - RNA, 19 nt, Artificial Sequence
  Description of Artificial Sequence: Synthetic oligonucleotide
ugcagacgaugaagacuuu

SEQ ID NO: 1646815 - RNA, 19 nt, Artificial Sequence
  Description of Artificial Sequence: Synthetic oligonucleotide
ugguuacuauuggcucaga

SEQ ID NO: 1646816 - RNA, 19 nt, Artificial Sequence
  Description of Artificial Sequence: Synthetic oligonucleotide
caugacgugguugggcucu

SEQ ID NO: 1646817 - RNA, 19 nt, Artificial Sequence
  Description of Artificial Sequence: Synthetic oligonucleotide
gucucauccgggugacuua

SEQ ID NO: 1646818 - RNA, 19 nt, Artificial Sequence
  Description of Artificial Sequence: Synthetic oligonucleotide
gguccccagcuaaauagca

SEQ ID NO: 1646819 - RNA, 19 nt, Artificial Sequence
  Description of Artificial Sequence: Synthetic oligonucleotide
ccauagauucuacaaucua

SEQ ID NO: 1646820 - RNA, 19 nt, Artificial Sequence
  Description of Artificial Sequence: Synthetic oligonucleotide
gggaauauagcaggcugcu

SEQ ID NO: 1646821 - RNA, 19 nt, Artificial Sequence
  Description of Artificial Sequence: Synthetic oligonucleotide
cuggacagcucagacacau

SEQ ID NO: 1646822 - RNA, 19 nt, Artificial Sequence
  Description of Artificial Sequence: Synthetic oligonucleotide
gugcguccacugaccaucc

SEQ ID NO: 1646823 - RNA, 19 nt, Artificial Sequence
  Description of Artificial Sequence: Synthetic oligonucleotide
guaagaugucccagagagu

SEQ ID NO: 1646824 - RNA, 19 nt, Artificial Sequence
  Description of Artificial Sequence: Synthetic oligonucleotide
cgugcguccacugaccauc

SEQ ID NO: 1646825 - RNA, 19 nt, Artificial Sequence
  Description of Artificial Sequence: Synthetic oligonucleotide
ccauuacaguugaaggaaa

SEQ ID NO: 1646826 - RNA, 19 nt, Artificial Sequence
  Description of Artificial Sequence: Synthetic oligonucleotide
uaccgguggguugcacuaa

SEQ ID NO: 1646827 - RNA, 19 nt, Artificial Sequence
  Description of Artificial Sequence: Synthetic oligonucleotide
uuguaccgguggguugcac

SEQ ID NO: 1646828 - RNA, 19 nt, Artificial Sequence
  Description of Artificial Sequence: Synthetic oligonucleotide
acauggguccccagcuaaa

SEQ ID NO: 1646829 - RNA, 19 nt, Artificial Sequence
  Description of Artificial Sequence: Synthetic oligonucleotide
cccauagauucuacaaucu

SEQ ID NO: 1646830 - RNA, 19 nt, Artificial Sequence
  Description of Artificial Sequence: Synthetic oligonucleotide
agagugcauacaggugguu

SEQ ID NO: 1646831 - RNA, 19 nt, Artificial Sequence
  Description of Artificial Sequence: Synthetic oligonucleotide
gccuuagguaggacuggag

SEQ ID NO: 1646832 - RNA, 19 nt, Artificial Sequence
  Description of Artificial Sequence: Synthetic oligonucleotide
ggagaauacggcagugggu

SEQ ID NO: 1646833 - RNA, 19 nt, Artificial Sequence
  Description of Artificial Sequence: Synthetic oligonucleotide
accgcucuucugguuuaga

SEQ ID NO: 1646834 - RNA, 19 nt, Artificial Sequence
  Description of Artificial Sequence: Synthetic oligonucleotide
augacgugguugggcucug

SEQ ID NO: 1646835 - RNA, 19 nt, Artificial Sequence
  Description of Artificial Sequence: Synthetic oligonucleotide
cuucuuguaccgguggguu

SEQ ID NO: 1646836 - RNA, 19 nt, Artificial Sequence
  Description of Artificial Sequence: Synthetic oligonucleotide
ccgguggguugcacuaagc

SEQ ID NO: 1646837 - RNA, 19 nt, Artificial Sequence
  Description of Artificial Sequence: Synthetic oligonucleotide
auacggcaguggguuuuga

SEQ ID NO: 1646838 - RNA, 19 nt, Artificial Sequence
  Description of Artificial Sequence: Synthetic oligonucleotide
ggaggguggugacauacuu

SEQ ID NO: 1646839 - RNA, 19 nt, Artificial Sequence
  Description of Artificial Sequence: Synthetic oligonucleotide
agguaggacuggagagcca

SEQ ID NO: 1646840 - RNA, 19 nt, Artificial Sequence
  Description of Artificial Sequence: Synthetic oligonucleotide
ugcucuccuucgggcagau

SEQ ID NO: 1646841 - RNA, 19 nt, Artificial Sequence
  Description of Artificial Sequence: Synthetic oligonucleotide
gcaugacgugguugggcuc

SEQ ID NO: 1646842 - RNA, 19 nt, Artificial Sequence
  Description of Artificial Sequence: Synthetic oligonucleotide
cgugaacaaccucccauga

SEQ ID NO: 1646843 - RNA, 19 nt, Artificial Sequence
  Description of Artificial Sequence: Synthetic oligonucleotide
gggcugugccuggacaaac

SEQ ID NO: 1646844 - RNA, 19 nt, Artificial Sequence
  Description of Artificial Sequence: Synthetic oligonucleotide
cgguggguugcacuaagca

SEQ ID NO: 1646845 - RNA, 19 nt, Artificial Sequence
  Description of Artificial Sequence: Synthetic oligonucleotide
cugugccuggacaaaccuu

SEQ ID NO: 1646846 - RNA, 19 nt, Artificial Sequence
  Description of Artificial Sequence: Synthetic oligonucleotide
cacggcuggcucuuagcau

SEQ ID NO: 1646847 - RNA, 19 nt, Artificial Sequence
  Description of Artificial Sequence: Synthetic oligonucleotide
cauggguccccagcuaaau

SEQ ID NO: 1646848 - RNA, 19 nt, Artificial Sequence
  Description of Artificial Sequence: Synthetic oligonucleotide
ccaugauggccaguccuca

SEQ ID NO: 1646849 - RNA, 19 nt, Artificial Sequence
  Description of Artificial Sequence: Synthetic oligonucleotide
gcggggcuuuuaucauuca

SEQ ID NO: 1646850 - RNA, 19 nt, Artificial Sequence
  Description of Artificial Sequence: Synthetic oligonucleotide
gcgcuggaucacaagaaau

SEQ ID NO: 1646851 - RNA, 19 nt, Artificial Sequence
  Description of Artificial Sequence: Synthetic oligonucleotide
ggaggacuagggaggggua

SEQ ID NO: 1646852 - RNA, 19 nt, Artificial Sequence
  Description of Artificial Sequence: Synthetic oligonucleotide
cugugccaagcuggcuggu

SEQ ID NO: 1646853 - RNA, 19 nt, Artificial Sequence
  Description of Artificial Sequence: Synthetic oligonucleotide
agccgugggcggggcuuuu

SEQ ID NO: 1646854 - RNA, 19 nt, Artificial Sequence
  Description of Artificial Sequence: Synthetic oligonucleotide
cagucucauccgggugacu

SEQ ID NO: 1646855 - RNA, 19 nt, Artificial Sequence
  Description of Artificial Sequence: Synthetic oligonucleotide
ggccaguccucaggaucau

SEQ ID NO: 1646856 - RNA, 19 nt, Artificial Sequence
  Description of Artificial Sequence: Synthetic oligonucleotide
ccgugggcggggcuuuuau

SEQ ID NO: 1646857 - RNA, 19 nt, Artificial Sequence
  Description of Artificial Sequence: Synthetic oligonucleotide
ccguguccuuguucaggau

SEQ ID NO: 1646858 - RNA, 19 nt, Artificial Sequence
  Description of Artificial Sequence: Synthetic oligonucleotide
gccgugggcggggcuuuua

SEQ ID NO: 1646859 - RNA, 19 nt, Artificial Sequence
  Description of Artificial Sequence: Synthetic oligonucleotide
uuaauuaacaacauuauca

SEQ ID NO: 1646860 - RNA, 19 nt, Artificial Sequence
  Description of Artificial Sequence: Synthetic oligonucleotide
aggaaauucacccagagcg

SEQ ID NO: 1646861 - RNA, 19 nt, Artificial Sequence
  Description of Artificial Sequence: Synthetic oligonucleotide
uuuuaaacagcugauaucg

SEQ ID NO: 1646862 - RNA, 19 nt, Artificial Sequence
  Description of Artificial Sequence: Synthetic oligonucleotide
uguaacuccaccaagacca

SEQ ID NO: 1646863 - RNA, 19 nt, Artificial Sequence
  Description of Artificial Sequence: Synthetic oligonucleotide
aucauuuagauuuacagag

SEQ ID NO: 1646864 - RNA, 19 nt, Artificial Sequence
  Description of Artificial Sequence: Synthetic oligonucleotide
aaugccagugcccaugucc

SEQ ID NO: 1646865 - RNA, 19 nt, Artificial Sequence
  Description of Artificial Sequence: Synthetic oligonucleotide
aauggaagcauaccauugc

SEQ ID NO: 1646866 - RNA, 19 nt, Artificial Sequence
  Description of Artificial Sequence: Synthetic oligonucleotide
uuugugacaacauacaaac

SEQ ID NO: 1646867 - RNA, 19 nt, Artificial Sequence
  Description of Artificial Sequence: Synthetic oligonucleotide
uuaguuuucgguuucugcg

SEQ ID NO: 1646868 - RNA, 19 nt, Artificial Sequence
  Description of Artificial Sequence: Synthetic oligonucleotide
aaugaaucacccugcauuc

SEQ ID NO: 1646869 - RNA, 19 nt, Artificial Sequence
  Description of Artificial Sequence: Synthetic oligonucleotide
aauguaacuccaccaagac

SEQ ID NO: 1646870 - RNA, 19 nt, Artificial Sequence
  Description of Artificial Sequence: Synthetic oligonucleotide
ugauagaccacacacacac

SEQ ID NO: 1646871 - RNA, 19 nt, Artificial Sequence
  Description of Artificial Sequence: Synthetic oligonucleotide
acugauagaccacacacac

SEQ ID NO: 1646872 - RNA, 19 nt, Artificial Sequence
  Description of Artificial Sequence: Synthetic oligonucleotide
uugucuaugcuuuggaagg

SEQ ID NO: 1646873 - RNA, 19 nt, Artificial Sequence
  Description of Artificial Sequence: Synthetic oligonucleotide
uguacagccgccaccaucg

SEQ ID NO: 1646874 - RNA, 19 nt, Artificial Sequence
  Description of Artificial Sequence: Synthetic oligonucleotide
uagacuacaagcaauguaa

SEQ ID NO: 1646875 - RNA, 19 nt, Artificial Sequence
  Description of Artificial Sequence: Synthetic oligonucleotide
auagaccacacacacacac

SEQ ID NO: 1646876 - RNA, 19 nt, Artificial Sequence
  Description of Artificial Sequence: Synthetic oligonucleotide
uuaaccgucuuucuucccg

SEQ ID NO: 1646877 - RNA, 19 nt, Artificial Sequence
  Description of Artificial Sequence: Synthetic oligonucleotide
ugauagacuacaagcaaug

SEQ ID NO: 1646878 - RNA, 19 nt, Artificial Sequence
  Description of Artificial Sequence: Synthetic oligonucleotide
accacacacacacacacac

SEQ ID NO: 1646879 - RNA, 19 nt, Artificial Sequence
  Description of Artificial Sequence: Synthetic oligonucleotide
ugagguguuaauuaacaac

SEQ ID NO: 1646880 - RNA, 19 nt, Artificial Sequence
  Description of Artificial Sequence: Synthetic oligonucleotide
uuaaagauccgugugaauc

SEQ ID NO: 1646881 - RNA, 19 nt, Artificial Sequence
  Description of Artificial Sequence: Synthetic oligonucleotide
ucucuuauuauuugaggug

SEQ ID NO: 1646882 - RNA, 19 nt, Artificial Sequence
  Description of Artificial Sequence: Synthetic oligonucleotide
uaaagauccgugugaaucc

SEQ ID NO: 1646883 - RNA, 19 nt, Artificial Sequence
  Description of Artificial Sequence: Synthetic oligonucleotide
uuugaugcaucauuuagau

SEQ ID NO: 1646884 - RNA, 19 nt, Artificial Sequence
  Description of Artificial Sequence: Synthetic oligonucleotide
agaccacacacacacacac

SEQ ID NO: 1646885 - RNA, 19 nt, Artificial Sequence
  Description of Artificial Sequence: Synthetic oligonucleotide
uuaacaacauuaucaacuc

SEQ ID NO: 1646886 - RNA, 19 nt, Artificial Sequence
  Description of Artificial Sequence: Synthetic oligonucleotide
aaauugauacucugaauua

SEQ ID NO: 1646887 - RNA, 19 nt, Artificial Sequence
  Description of Artificial Sequence: Synthetic oligonucleotide
uauuauuugagguggucac

SEQ ID NO: 1646888 - RNA, 19 nt, Artificial Sequence
  Description of Artificial Sequence: Synthetic oligonucleotide
aguggugucgauaauacag

SEQ ID NO: 1646889 - RNA, 19 nt, Artificial Sequence
  Description of Artificial Sequence: Synthetic oligonucleotide
acuauggaaaguaacagug

SEQ ID NO: 1646890 - RNA, 19 nt, Artificial Sequence
  Description of Artificial Sequence: Synthetic oligonucleotide
cucuuauuauuugaggugg

SEQ ID NO: 1646891 - RNA, 19 nt, Artificial Sequence
  Description of Artificial Sequence: Synthetic oligonucleotide
cuagagagugcaaugaauc

SEQ ID NO: 1646892 - RNA, 19 nt, Artificial Sequence
  Description of Artificial Sequence: Synthetic oligonucleotide
aauuacagauuuugugaca

SEQ ID NO: 1646893 - RNA, 19 nt, Artificial Sequence
  Description of Artificial Sequence: Synthetic oligonucleotide
gaaaguaacagugaggugu

SEQ ID NO: 1646894 - RNA, 19 nt, Artificial Sequence
  Description of Artificial Sequence: Synthetic oligonucleotide
uucuguuuugcuugagggg

SEQ ID NO: 1646895 - RNA, 19 nt, Artificial Sequence
  Description of Artificial Sequence: Synthetic oligonucleotide
ucggcauagacuccuuugg

SEQ ID NO: 1646896 - RNA, 19 nt, Artificial Sequence
  Description of Artificial Sequence: Synthetic oligonucleotide
cuguaaaggccuacuaugg

SEQ ID NO: 1646897 - RNA, 19 nt, Artificial Sequence
  Description of Artificial Sequence: Synthetic oligonucleotide
gaauugacguugucuaugc

SEQ ID NO: 1646898 - RNA, 19 nt, Artificial Sequence
  Description of Artificial Sequence: Synthetic oligonucleotide
uguccagcgaccaacugug

SEQ ID NO: 1646899 - RNA, 19 nt, Artificial Sequence
  Description of Artificial Sequence: Synthetic oligonucleotide
uugauacucugaauuaaga

SEQ ID NO: 1646900 - RNA, 19 nt, Artificial Sequence
  Description of Artificial Sequence: Synthetic oligonucleotide
acuuuaaagauccguguga

SEQ ID NO: 1646901 - RNA, 19 nt, Artificial Sequence
  Description of Artificial Sequence: Synthetic oligonucleotide
ucuguuuugcuugaggggu

SEQ ID NO: 1646902 - RNA, 19 nt, Artificial Sequence
  Description of Artificial Sequence: Synthetic oligonucleotide
uuaaggggcagccuacuga

SEQ ID NO: 1646903 - RNA, 19 nt, Artificial Sequence
  Description of Artificial Sequence: Synthetic oligonucleotide
gagacagcuagccagagaa

SEQ ID NO: 1646904 - RNA, 19 nt, Artificial Sequence
  Description of Artificial Sequence: Synthetic oligonucleotide
agagagugcaaugaaucac

SEQ ID NO: 1646905 - RNA, 19 nt, Artificial Sequence
  Description of Artificial Sequence: Synthetic oligonucleotide
aaucuagagagugcaauga

SEQ ID NO: 1646906 - RNA, 19 nt, Artificial Sequence
  Description of Artificial Sequence: Synthetic oligonucleotide
aacaacauuaucaacucuu

SEQ ID NO: 1646907 - RNA, 19 nt, Artificial Sequence
  Description of Artificial Sequence: Synthetic oligonucleotide
caagcaauguaacuccacc

SEQ ID NO: 1646908 - RNA, 19 nt, Artificial Sequence
  Description of Artificial Sequence: Synthetic oligonucleotide
uucaggacaaucuuucuua

SEQ ID NO: 1646909 - RNA, 19 nt, Artificial Sequence
  Description of Artificial Sequence: Synthetic oligonucleotide
uucauuuaaguacucuuuu

SEQ ID NO: 1646910 - RNA, 19 nt, Artificial Sequence
  Description of Artificial Sequence: Synthetic oligonucleotide
ucuacaauggaagcauacc

SEQ ID NO: 1646911 - RNA, 19 nt, Artificial Sequence
  Description of Artificial Sequence: Synthetic oligonucleotide
gucgauaauacagacuugc

SEQ ID NO: 1646912 - RNA, 19 nt, Artificial Sequence
  Description of Artificial Sequence: Synthetic oligonucleotide
ugaccauccgaucugaauu

SEQ ID NO: 1646913 - RNA, 19 nt, Artificial Sequence
  Description of Artificial Sequence: Synthetic oligonucleotide
uaucaacucuccauuguga

SEQ ID NO: 1646914 - RNA, 19 nt, Artificial Sequence
  Description of Artificial Sequence: Synthetic oligonucleotide
uaaaggccuacuauggaaa

SEQ ID NO: 1646915 - RNA, 19 nt, Artificial Sequence
  Description of Artificial Sequence: Synthetic oligonucleotide
ucuacccuagcucugcacu

SEQ ID NO: 1646916 - RNA, 19 nt, Artificial Sequence
  Description of Artificial Sequence: Synthetic oligonucleotide
aacuuuggguacuuuaguu

SEQ ID NO: 1646917 - RNA, 19 nt, Artificial Sequence
  Description of Artificial Sequence: Synthetic oligonucleotide
aauugauacucugaauuaa

SEQ ID NO: 1646918 - RNA, 19 nt, Artificial Sequence
  Description of Artificial Sequence: Synthetic oligonucleotide
acacacacacacgagaauc

SEQ ID NO: 1646919 - RNA, 19 nt, Artificial Sequence
  Description of Artificial Sequence: Synthetic oligonucleotide
cugcguuuugggcagaucc

SEQ ID NO: 1646920 - RNA, 19 nt, Artificial Sequence
  Description of Artificial Sequence: Synthetic oligonucleotide
ugaauugacguugucuaug

SEQ ID NO: 1646921 - RNA, 19 nt, Artificial Sequence
  Description of Artificial Sequence: Synthetic oligonucleotide
cugauaucguuuuauucug

SEQ ID NO: 1646922 - RNA, 19 nt, Artificial Sequence
  Description of Artificial Sequence: Synthetic oligonucleotide
ucggcugucuuucuuuaag

SEQ ID NO: 1646923 - RNA, 19 nt, Artificial Sequence
  Description of Artificial Sequence: Synthetic oligonucleotide
ucuagagagugcaaugaau

SEQ ID NO: 1646924 - RNA, 19 nt, Artificial Sequence
  Description of Artificial Sequence: Synthetic oligonucleotide
cacacacacacacacacac

SEQ ID NO: 1646925 - RNA, 19 nt, Artificial Sequence
  Description of Artificial Sequence: Synthetic oligonucleotide
uagagagugcaaugaauca

SEQ ID NO: 1646926 - RNA, 19 nt, Artificial Sequence
  Description of Artificial Sequence: Synthetic oligonucleotide
ucgauaauacagacuugcc

SEQ ID NO: 1646927 - RNA, 19 nt, Artificial Sequence
  Description of Artificial Sequence: Synthetic oligonucleotide
uguuuagaggugaucaauu

SEQ ID NO: 1646928 - RNA, 19 nt, Artificial Sequence
  Description of Artificial Sequence: Synthetic oligonucleotide
uuuacagagaugacugaua

SEQ ID NO: 1646929 - RNA, 19 nt, Artificial Sequence
  Description of Artificial Sequence: Synthetic oligonucleotide
uaacaaaugccagugccca

SEQ ID NO: 1646930 - RNA, 19 nt, Artificial Sequence
  Description of Artificial Sequence: Synthetic oligonucleotide
gagagugcaaugaaucacc

SEQ ID NO: 1646931 - RNA, 19 nt, Artificial Sequence
  Description of Artificial Sequence: Synthetic oligonucleotide
caucauuuagauuuacaga

SEQ ID NO: 1646932 - RNA, 19 nt, Artificial Sequence
  Description of Artificial Sequence: Synthetic oligonucleotide
uugacguugucuaugcuuu

SEQ ID NO: 1646933 - RNA, 19 nt, Artificial Sequence
  Description of Artificial Sequence: Synthetic oligonucleotide
uuagauuuacagagaugac

SEQ ID NO: 1646934 - RNA, 19 nt, Artificial Sequence
  Description of Artificial Sequence: Synthetic oligonucleotide
uuuaaggccacugcaauuu

SEQ ID NO: 1646935 - RNA, 19 nt, Artificial Sequence
  Description of Artificial Sequence: Synthetic oligonucleotide
aggucuucuacaauggaag

SEQ ID NO: 1646936 - RNA, 19 nt, Artificial Sequence
  Description of Artificial Sequence: Synthetic oligonucleotide
ucugauuuucaggacaauc

SEQ ID NO: 1646937 - RNA, 19 nt, Artificial Sequence
  Description of Artificial Sequence: Synthetic oligonucleotide
auagacuacaagcaaugua

SEQ ID NO: 1646938 - RNA, 19 nt, Artificial Sequence
  Description of Artificial Sequence: Synthetic oligonucleotide
uuuguuuagaggugaucaa

SEQ ID NO: 1646939 - RNA, 19 nt, Artificial Sequence
  Description of Artificial Sequence: Synthetic oligonucleotide
guuucugcguuuugggcag

SEQ ID NO: 1646940 - RNA, 19 nt, Artificial Sequence
  Description of Artificial Sequence: Synthetic oligonucleotide
cacuuuaaagauccgugug

SEQ ID NO: 1646941 - RNA, 19 nt, Artificial Sequence
  Description of Artificial Sequence: Synthetic oligonucleotide
uuuaaggggcagccuacug

SEQ ID NO: 1646942 - RNA, 19 nt, Artificial Sequence
  Description of Artificial Sequence: Synthetic oligonucleotide
agauccgugugaauccucc

SEQ ID NO: 1646943 - RNA, 19 nt, Artificial Sequence
  Description of Artificial Sequence: Synthetic oligonucleotide
agcaauguaacuccaccaa

SEQ ID NO: 1646944 - RNA, 19 nt, Artificial Sequence
  Description of Artificial Sequence: Synthetic oligonucleotide
ugcuugagggguaucauuu

SEQ ID NO: 1646945 - RNA, 19 nt, Artificial Sequence
  Description of Artificial Sequence: Synthetic oligonucleotide
uguccugacuuuccagugc

SEQ ID NO: 1646946 - RNA, 19 nt, Artificial Sequence
  Description of Artificial Sequence: Synthetic oligonucleotide
ggucucuuauuauuugagg

SEQ ID NO: 1646947 - RNA, 19 nt, Artificial Sequence
  Description of Artificial Sequence: Synthetic oligonucleotide
ucuuauuauuugagguggu

SEQ ID NO: 1646948 - RNA, 19 nt, Artificial Sequence
  Description of Artificial Sequence: Synthetic oligonucleotide
uaacaacauuaucaacucu

SEQ ID NO: 1646949 - RNA, 19 nt, Artificial Sequence
  Description of Artificial Sequence: Synthetic oligonucleotide
uuuucagagcaggaccuag

SEQ ID NO: 1646950 - RNA, 19 nt, Artificial Sequence
  Description of Artificial Sequence: Synthetic oligonucleotide
aucgguaacaaaugccagu

SEQ ID NO: 1646951 - RNA, 19 nt, Artificial Sequence
  Description of Artificial Sequence: Synthetic oligonucleotide
guaacaaaugccagugccc

SEQ ID NO: 1646952 - RNA, 19 nt, Artificial Sequence
  Description of Artificial Sequence: Synthetic oligonucleotide
caauguaacuccaccaaga

SEQ ID NO: 1646953 - RNA, 19 nt, Artificial Sequence
  Description of Artificial Sequence: Synthetic oligonucleotide
uaguuuucgguuucugcgu

SEQ ID NO: 1646954 - RNA, 19 nt, Artificial Sequence
  Description of Artificial Sequence: Synthetic oligonucleotide
ucuucgaguucuguuuuag

SEQ ID NO: 1646955 - RNA, 19 nt, Artificial Sequence
  Description of Artificial Sequence: Synthetic oligonucleotide
agagugcaaugaaucaccc

SEQ ID NO: 1646956 - RNA, 19 nt, Artificial Sequence
  Description of Artificial Sequence: Synthetic oligonucleotide
ugcuaucaacucuccauug

SEQ ID NO: 1646957 - RNA, 19 nt, Artificial Sequence
  Description of Artificial Sequence: Synthetic oligonucleotide
acugugaccauccgaucug

SEQ ID NO: 1646958 - RNA, 19 nt, Artificial Sequence
  Description of Artificial Sequence: Synthetic oligonucleotide
cugugcucucugcagaucc

SEQ ID NO: 1646959 - RNA, 19 nt, Artificial Sequence
  Description of Artificial Sequence: Synthetic oligonucleotide
agugagguguuaauuaaca

SEQ ID NO: 1646960 - RNA, 19 nt, Artificial Sequence
  Description of Artificial Sequence: Synthetic oligonucleotide
caaucggcgacuccgugcc

SEQ ID NO: 1646961 - RNA, 19 nt, Artificial Sequence
  Description of Artificial Sequence: Synthetic oligonucleotide
uugugaagccucuucgagu

SEQ ID NO: 1646962 - RNA, 19 nt, Artificial Sequence
  Description of Artificial Sequence: Synthetic oligonucleotide
ugauaucguuuuauucugu

SEQ ID NO: 1646963 - RNA, 19 nt, Artificial Sequence
  Description of Artificial Sequence: Synthetic oligonucleotide
ucucaugcuccguggaccc

SEQ ID NO: 1646964 - RNA, 19 nt, Artificial Sequence
  Description of Artificial Sequence: Synthetic oligonucleotide
uucuucccguaauuccugg

SEQ ID NO: 1646965 - RNA, 19 nt, Artificial Sequence
  Description of Artificial Sequence: Synthetic oligonucleotide
cuucgaguucuguuuuagg

SEQ ID NO: 1646966 - RNA, 19 nt, Artificial Sequence
  Description of Artificial Sequence: Synthetic oligonucleotide
uguugcuaucaacucucca

SEQ ID NO: 1646967 - RNA, 19 nt, Artificial Sequence
  Description of Artificial Sequence: Synthetic oligonucleotide
gacguugucuaugcuuugg

SEQ ID NO: 1646968 - RNA, 19 nt, Artificial Sequence
  Description of Artificial Sequence: Synthetic oligonucleotide
gugucgauaauacagacuu

SEQ ID NO: 1646969 - RNA, 19 nt, Artificial Sequence
  Description of Artificial Sequence: Synthetic oligonucleotide
uugcuaucaacucuccauu

SEQ ID NO: 1646970 - RNA, 19 nt, Artificial Sequence
  Description of Artificial Sequence: Synthetic oligonucleotide
guaaaggccuacuauggaa

SEQ ID NO: 1646971 - RNA, 19 nt, Artificial Sequence
  Description of Artificial Sequence: Synthetic oligonucleotide
acgagaaucuagagagugc

SEQ ID NO: 1646972 - RNA, 19 nt, Artificial Sequence
  Description of Artificial Sequence: Synthetic oligonucleotide
aucaacucuccauugugaa

SEQ ID NO: 1646973 - RNA, 19 nt, Artificial Sequence
  Description of Artificial Sequence: Synthetic oligonucleotide
gucucuuauuauuugaggu

SEQ ID NO: 1646974 - RNA, 19 nt, Artificial Sequence
  Description of Artificial Sequence: Synthetic oligonucleotide
cacgagaaucuagagagug

SEQ ID NO: 1646975 - RNA, 19 nt, Artificial Sequence
  Description of Artificial Sequence: Synthetic oligonucleotide
aggaccuagacaggugccc

SEQ ID NO: 1646976 - RNA, 19 nt, Artificial Sequence
  Description of Artificial Sequence: Synthetic oligonucleotide
caucgguaacaaaugccag

SEQ ID NO: 1646977 - RNA, 19 nt, Artificial Sequence
  Description of Artificial Sequence: Synthetic oligonucleotide
ugcguuuugggcagaucca

SEQ ID NO: 1646978 - RNA, 19 nt, Artificial Sequence
  Description of Artificial Sequence: Synthetic oligonucleotide
uagucugcacucauucccu

SEQ ID NO: 1646979 - RNA, 19 nt, Artificial Sequence
  Description of Artificial Sequence: Synthetic oligonucleotide
uagaccacacacacacaca

SEQ ID NO: 1646980 - RNA, 19 nt, Artificial Sequence
  Description of Artificial Sequence: Synthetic oligonucleotide
ccuguaaaggccuacuaug

SEQ ID NO: 1646981 - RNA, 19 nt, Artificial Sequence
  Description of Artificial Sequence: Synthetic oligonucleotide
cacacacacacacacacga

SEQ ID NO: 1646982 - RNA, 19 nt, Artificial Sequence
  Description of Artificial Sequence: Synthetic oligonucleotide
cuugccuccacaggcaccc

SEQ ID NO: 1646983 - RNA, 19 nt, Artificial Sequence
  Description of Artificial Sequence: Synthetic oligonucleotide
uggugucgauaauacagac

SEQ ID NO: 1646984 - RNA, 19 nt, Artificial Sequence
  Description of Artificial Sequence: Synthetic oligonucleotide
cagagaugacugauagacc

SEQ ID NO: 1646985 - RNA, 19 nt, Artificial Sequence
  Description of Artificial Sequence: Synthetic oligonucleotide
ugcagccgggcaaucggcg

SEQ ID NO: 1646986 - RNA, 19 nt, Artificial Sequence
  Description of Artificial Sequence: Synthetic oligonucleotide
accgucuuucuucccgucg

SEQ ID NO: 1646987 - RNA, 19 nt, Artificial Sequence
  Description of Artificial Sequence: Synthetic oligonucleotide
agggucucuuauuauuuga

SEQ ID NO: 1646988 - RNA, 19 nt, Artificial Sequence
  Description of Artificial Sequence: Synthetic oligonucleotide
agacaagggucucuuauua

SEQ ID NO: 1646989 - RNA, 19 nt, Artificial Sequence
  Description of Artificial Sequence: Synthetic oligonucleotide
uuguuuagaggugaucaau

SEQ ID NO: 1646990 - RNA, 19 nt, Artificial Sequence
  Description of Artificial Sequence: Synthetic oligonucleotide
gcugauaucguuuuauucu

SEQ ID NO: 1646991 - RNA, 19 nt, Artificial Sequence
  Description of Artificial Sequence: Synthetic oligonucleotide
ugcacuucgugaucucaug

SEQ ID NO: 1646992 - RNA, 19 nt, Artificial Sequence
  Description of Artificial Sequence: Synthetic oligonucleotide
uuuaaagauccgugugaau

SEQ ID NO: 1646993 - RNA, 19 nt, Artificial Sequence
  Description of Artificial Sequence: Synthetic oligonucleotide
cacacacgagaaucuagag

SEQ ID NO: 1646994 - RNA, 19 nt, Artificial Sequence
  Description of Artificial Sequence: Synthetic oligonucleotide
gaccauccgaucugaauuc

SEQ ID NO: 1646995 - RNA, 19 nt, Artificial Sequence
  Description of Artificial Sequence: Synthetic oligonucleotide
uggguacuuuaguuuucgg

SEQ ID NO: 1646996 - RNA, 19 nt, Artificial Sequence
  Description of Artificial Sequence: Synthetic oligonucleotide
guugcuaucaacucuccau

SEQ ID NO: 1646997 - RNA, 19 nt, Artificial Sequence
  Description of Artificial Sequence: Synthetic oligonucleotide
uuuaaccgucuuucuuccc

SEQ ID NO: 1646998 - RNA, 19 nt, Artificial Sequence
  Description of Artificial Sequence: Synthetic oligonucleotide
cuuauuauuugaggugguc

SEQ ID NO: 1646999 - RNA, 19 nt, Artificial Sequence
  Description of Artificial Sequence: Synthetic oligonucleotide
ccuacuauggaaaguaaca

SEQ ID NO: 1647000 - RNA, 19 nt, Artificial Sequence
  Description of Artificial Sequence: Synthetic oligonucleotide
aaccuguaaaggccuacua

SEQ ID NO: 1647001 - RNA, 19 nt, Artificial Sequence
  Description of Artificial Sequence: Synthetic oligonucleotide
aucuagagagugcaaugaa

SEQ ID NO: 1647002 - RNA, 19 nt, Artificial Sequence
  Description of Artificial Sequence: Synthetic oligonucleotide
agguggucacucuagccca

SEQ ID NO: 1647003 - RNA, 19 nt, Artificial Sequence
  Description of Artificial Sequence: Synthetic oligonucleotide
aguaacagugagguguuaa

SEQ ID NO: 1647004 - RNA, 19 nt, Artificial Sequence
  Description of Artificial Sequence: Synthetic oligonucleotide
aaucggcgacuccgugccc

SEQ ID NO: 1647005 - RNA, 19 nt, Artificial Sequence
  Description of Artificial Sequence: Synthetic oligonucleotide
ugcacucauucccuguguc

SEQ ID NO: 1647006 - RNA, 19 nt, Artificial Sequence
  Description of Artificial Sequence: Synthetic oligonucleotide
ggaaauucacccagagcgg

SEQ ID NO: 1647007 - RNA, 19 nt, Artificial Sequence
  Description of Artificial Sequence: Synthetic oligonucleotide
cagcucuaaccuguaaagg

SEQ ID NO: 1647008 - RNA, 19 nt, Artificial Sequence
  Description of Artificial Sequence: Synthetic oligonucleotide
uccgaucugaauucugauu

SEQ ID NO: 1647009 - RNA, 19 nt, Artificial Sequence
  Description of Artificial Sequence: Synthetic oligonucleotide
cauccgaucugaauucuga

SEQ ID NO: 1647010 - RNA, 19 nt, Artificial Sequence
  Description of Artificial Sequence: Synthetic oligonucleotide
caaugaaucacccugcauu

SEQ ID NO: 1647011 - RNA, 19 nt, Artificial Sequence
  Description of Artificial Sequence: Synthetic oligonucleotide
ccagcucuaaccuguaaag

SEQ ID NO: 1647012 - RNA, 19 nt, Artificial Sequence
  Description of Artificial Sequence: Synthetic oligonucleotide
cuagcucugcacuucguga

SEQ ID NO: 1647013 - RNA, 19 nt, Artificial Sequence
  Description of Artificial Sequence: Synthetic oligonucleotide
acagcugauaucguuuuau

SEQ ID NO: 1647014 - RNA, 19 nt, Artificial Sequence
  Description of Artificial Sequence: Synthetic oligonucleotide
uaaccgucuuucuucccgu

SEQ ID NO: 1647015 - RNA, 19 nt, Artificial Sequence
  Description of Artificial Sequence: Synthetic oligonucleotide
cacacacacacacacgaga

SEQ ID NO: 1647016 - RNA, 19 nt, Artificial Sequence
  Description of Artificial Sequence: Synthetic oligonucleotide
acacacacgagaaucuaga

SEQ ID NO: 1647017 - RNA, 19 nt, Artificial Sequence
  Description of Artificial Sequence: Synthetic oligonucleotide
cuuuaaagauccgugugaa

SEQ ID NO: 1647018 - RNA, 19 nt, Artificial Sequence
  Description of Artificial Sequence: Synthetic oligonucleotide
uaaccuguaaaggccuacu

SEQ ID NO: 1647019 - RNA, 19 nt, Artificial Sequence
  Description of Artificial Sequence: Synthetic oligonucleotide
uuuuaaggggcagccuacu

SEQ ID NO: 1647020 - RNA, 19 nt, Artificial Sequence
  Description of Artificial Sequence: Synthetic oligonucleotide
gaauccuccagaggagcug

SEQ ID NO: 1647021 - RNA, 19 nt, Artificial Sequence
  Description of Artificial Sequence: Synthetic oligonucleotide
ggucuucuacaauggaagc

SEQ ID NO: 1647022 - RNA, 19 nt, Artificial Sequence
  Description of Artificial Sequence: Synthetic oligonucleotide
uguguccagcgaccaacug

SEQ ID NO: 1647023 - RNA, 19 nt, Artificial Sequence
  Description of Artificial Sequence: Synthetic oligonucleotide
gacugauagaccacacaca

SEQ ID NO: 1647024 - RNA, 19 nt, Artificial Sequence
  Description of Artificial Sequence: Synthetic oligonucleotide
acccuagcucugcacuucg

SEQ ID NO: 1647025 - RNA, 19 nt, Artificial Sequence
  Description of Artificial Sequence: Synthetic oligonucleotide
agugcccauguccugacuu

SEQ ID NO: 1647026 - RNA, 19 nt, Artificial Sequence
  Description of Artificial Sequence: Synthetic oligonucleotide
auucugauuuucaggacaa

SEQ ID NO: 1647027 - RNA, 19 nt, Artificial Sequence
  Description of Artificial Sequence: Synthetic oligonucleotide
ucuaaccuguaaaggccua

SEQ ID NO: 1647028 - RNA, 19 nt, Artificial Sequence
  Description of Artificial Sequence: Synthetic oligonucleotide
acguugucuaugcuuugga

SEQ ID NO: 1647029 - RNA, 19 nt, Artificial Sequence
  Description of Artificial Sequence: Synthetic oligonucleotide
uagacaggugccccauuuc

SEQ ID NO: 1647030 - RNA, 19 nt, Artificial Sequence
  Description of Artificial Sequence: Synthetic oligonucleotide
ccugcauuccuugauagac

SEQ ID NO: 1647031 - RNA, 19 nt, Artificial Sequence
  Description of Artificial Sequence: Synthetic oligonucleotide
aagauccgugugaauccuc

SEQ ID NO: 1647032 - RNA, 19 nt, Artificial Sequence
  Description of Artificial Sequence: Synthetic oligonucleotide
acagccgccaccaucggca

SEQ ID NO: 1647033 - RNA, 19 nt, Artificial Sequence
  Description of Artificial Sequence: Synthetic oligonucleotide
uuucgguuucugcguuuug

SEQ ID NO: 1647034 - RNA, 19 nt, Artificial Sequence
  Description of Artificial Sequence: Synthetic oligonucleotide
gcuccguggacccgcaucg

SEQ ID NO: 1647035 - RNA, 19 nt, Artificial Sequence
  Description of Artificial Sequence: Synthetic oligonucleotide
ucaugcuccguggacccgc

SEQ ID NO: 1647036 - RNA, 19 nt, Artificial Sequence
  Description of Artificial Sequence: Synthetic oligonucleotide
ugucuaugcuuuggaaggu

SEQ ID NO: 1647037 - RNA, 19 nt, Artificial Sequence
  Description of Artificial Sequence: Synthetic oligonucleotide
cagccuacugaauugacgu

SEQ ID NO: 1647038 - RNA, 19 nt, Artificial Sequence
  Description of Artificial Sequence: Synthetic oligonucleotide
cacucuagcccaucugguc

SEQ ID NO: 1647039 - RNA, 19 nt, Artificial Sequence
  Description of Artificial Sequence: Synthetic oligonucleotide
uuugcuugagggguaucau

SEQ ID NO: 1647040 - RNA, 19 nt, Artificial Sequence
  Description of Artificial Sequence: Synthetic oligonucleotide
acacacacacacacacacg

SEQ ID NO: 1647041 - RNA, 19 nt, Artificial Sequence
  Description of Artificial Sequence: Synthetic oligonucleotide
ugacguugucuaugcuuug

SEQ ID NO: 1647042 - RNA, 19 nt, Artificial Sequence
  Description of Artificial Sequence: Synthetic oligonucleotide
gaccaacugugaccauccg

SEQ ID NO: 1647043 - RNA, 19 nt, Artificial Sequence
  Description of Artificial Sequence: Synthetic oligonucleotide
aggcacuuuaaagauccgu

SEQ ID NO: 1647044 - RNA, 19 nt, Artificial Sequence
  Description of Artificial Sequence: Synthetic oligonucleotide
acccgcaucgguaacaaau

SEQ ID NO: 1647045 - RNA, 19 nt, Artificial Sequence
  Description of Artificial Sequence: Synthetic oligonucleotide
gugcaaugaaucacccugc

SEQ ID NO: 1647046 - RNA, 19 nt, Artificial Sequence
  Description of Artificial Sequence: Synthetic oligonucleotide
cuaaccuguaaaggccuac

SEQ ID NO: 1647047 - RNA, 19 nt, Artificial Sequence
  Description of Artificial Sequence: Synthetic oligonucleotide
auccgaucugaauucugau

SEQ ID NO: 1647048 - RNA, 19 nt, Artificial Sequence
  Description of Artificial Sequence: Synthetic oligonucleotide
gcaucgguaacaaaugcca

SEQ ID NO: 1647049 - RNA, 19 nt, Artificial Sequence
  Description of Artificial Sequence: Synthetic oligonucleotide
accaucggcauagacuccu

SEQ ID NO: 1647050 - RNA, 19 nt, Artificial Sequence
  Description of Artificial Sequence: Synthetic oligonucleotide
cagauuuugugacaacaua

SEQ ID NO: 1647051 - RNA, 19 nt, Artificial Sequence
  Description of Artificial Sequence: Synthetic oligonucleotide
agcggggucuacccuagcu

SEQ ID NO: 1647052 - RNA, 19 nt, Artificial Sequence
  Description of Artificial Sequence: Synthetic oligonucleotide
ugcuccguggacccgcauc

SEQ ID NO: 1647053 - RNA, 19 nt, Artificial Sequence
  Description of Artificial Sequence: Synthetic oligonucleotide
gcccaggucuucuacaaug

SEQ ID NO: 1647054 - RNA, 19 nt, Artificial Sequence
  Description of Artificial Sequence: Synthetic oligonucleotide
cuuuccagugcagccgggc

SEQ ID NO: 1647055 - RNA, 19 nt, Artificial Sequence
  Description of Artificial Sequence: Synthetic oligonucleotide
gaguggugucgauaauaca

SEQ ID NO: 1647056 - RNA, 19 nt, Artificial Sequence
  Description of Artificial Sequence: Synthetic oligonucleotide
acacacacacacacgagaa

SEQ ID NO: 1647057 - RNA, 19 nt, Artificial Sequence
  Description of Artificial Sequence: Synthetic oligonucleotide
ggaaaguaacagugaggug

SEQ ID NO: 1647058 - RNA, 19 nt, Artificial Sequence
  Description of Artificial Sequence: Synthetic oligonucleotide
uuuucgguuucugcguuuu

SEQ ID NO: 1647059 - RNA, 19 nt, Artificial Sequence
  Description of Artificial Sequence: Synthetic oligonucleotide
uugaugcaucauuuagauu

SEQ ID NO: 1647060 - RNA, 19 nt, Artificial Sequence
  Description of Artificial Sequence: Synthetic oligonucleotide
gcagccuacugaauugacg

SEQ ID NO: 1647061 - RNA, 19 nt, Artificial Sequence
  Description of Artificial Sequence: Synthetic oligonucleotide
guggugucgauaauacaga

SEQ ID NO: 1647062 - RNA, 19 nt, Artificial Sequence
  Description of Artificial Sequence: Synthetic oligonucleotide
uccguggacccgcaucggu

SEQ ID NO: 1647063 - RNA, 19 nt, Artificial Sequence
  Description of Artificial Sequence: Synthetic oligonucleotide
gccuacugaauugacguug

SEQ ID NO: 1647064 - RNA, 19 nt, Artificial Sequence
  Description of Artificial Sequence: Synthetic oligonucleotide
cagaguguacagccgccac

SEQ ID NO: 1647065 - RNA, 19 nt, Artificial Sequence
  Description of Artificial Sequence: Synthetic oligonucleotide
agcccaucuggucaugguu

SEQ ID NO: 1647066 - RNA, 19 nt, Artificial Sequence
  Description of Artificial Sequence: Synthetic oligonucleotide
gcaaucggcgacuccgugc

SEQ ID NO: 1647067 - RNA, 19 nt, Artificial Sequence
  Description of Artificial Sequence: Synthetic oligonucleotide
uaauuccuggcugucuguu

SEQ ID NO: 1647068 - RNA, 19 nt, Artificial Sequence
  Description of Artificial Sequence: Synthetic oligonucleotide
guuuagaggugaucaauuu

SEQ ID NO: 1647069 - RNA, 19 nt, Artificial Sequence
  Description of Artificial Sequence: Synthetic oligonucleotide
gaggcacuuuaaagauccg

SEQ ID NO: 1647070 - RNA, 19 nt, Artificial Sequence
  Description of Artificial Sequence: Synthetic oligonucleotide
acacacacacacacacgag

SEQ ID NO: 1647071 - RNA, 19 nt, Artificial Sequence
  Description of Artificial Sequence: Synthetic oligonucleotide
ccacagaguguacagccgc

SEQ ID NO: 1647072 - RNA, 19 nt, Artificial Sequence
  Description of Artificial Sequence: Synthetic oligonucleotide
guaacuccaccaagaccag

SEQ ID NO: 1647073 - RNA, 19 nt, Artificial Sequence
  Description of Artificial Sequence: Synthetic oligonucleotide
guaacagugagguguuaau

SEQ ID NO: 1647074 - RNA, 19 nt, Artificial Sequence
  Description of Artificial Sequence: Synthetic oligonucleotide
guacuuuaguuuucgguuu

SEQ ID NO: 1647075 - RNA, 19 nt, Artificial Sequence
  Description of Artificial Sequence: Synthetic oligonucleotide
augccagugcccauguccu

SEQ ID NO: 1647076 - RNA, 19 nt, Artificial Sequence
  Description of Artificial Sequence: Synthetic oligonucleotide
cgcaucgguaacaaaugcc

SEQ ID NO: 1647077 - RNA, 19 nt, Artificial Sequence
  Description of Artificial Sequence: Synthetic oligonucleotide
uggacccgcaucgguaaca

SEQ ID NO: 1647078 - RNA, 19 nt, Artificial Sequence
  Description of Artificial Sequence: Synthetic oligonucleotide
ccucccaugauguugcaga

SEQ ID NO: 1647079 - RNA, 19 nt, Artificial Sequence
  Description of Artificial Sequence: Synthetic oligonucleotide
cucuaaccuguaaaggccu

SEQ ID NO: 1647080 - RNA, 19 nt, Artificial Sequence
  Description of Artificial Sequence: Synthetic oligonucleotide
uucccgucggcugucuuuc

SEQ ID NO: 1647081 - RNA, 19 nt, Artificial Sequence
  Description of Artificial Sequence: Synthetic oligonucleotide
gauagaccacacacacaca

SEQ ID NO: 1647082 - RNA, 19 nt, Artificial Sequence
  Description of Artificial Sequence: Synthetic oligonucleotide
guguccagcgaccaacugu

SEQ ID NO: 1647083 - RNA, 19 nt, Artificial Sequence
  Description of Artificial Sequence: Synthetic oligonucleotide
ccgugugaauccuccagag

SEQ ID NO: 1647084 - RNA, 19 nt, Artificial Sequence
  Description of Artificial Sequence: Synthetic oligonucleotide
agacagcuagccagagaag

SEQ ID NO: 1647085 - RNA, 19 nt, Artificial Sequence
  Description of Artificial Sequence: Synthetic oligonucleotide
gacaagggucucuuauuau

SEQ ID NO: 1647086 - RNA, 19 nt, Artificial Sequence
  Description of Artificial Sequence: Synthetic oligonucleotide
cagcgaccaacugugacca

SEQ ID NO: 1647087 - RNA, 19 nt, Artificial Sequence
  Description of Artificial Sequence: Synthetic oligonucleotide
cuacugaauugacguuguc

SEQ ID NO: 1647088 - RNA, 19 nt, Artificial Sequence
  Description of Artificial Sequence: Synthetic oligonucleotide
gagugcaaugaaucacccu

SEQ ID NO: 1647089 - RNA, 19 nt, Artificial Sequence
  Description of Artificial Sequence: Synthetic oligonucleotide
cccgcaucgguaacaaaug

SEQ ID NO: 1647090 - RNA, 19 nt, Artificial Sequence
  Description of Artificial Sequence: Synthetic oligonucleotide
cgaccaacugugaccaucc

SEQ ID NO: 1647091 - RNA, 19 nt, Artificial Sequence
  Description of Artificial Sequence: Synthetic oligonucleotide
gccgccaccaucggcauag

SEQ ID NO: 1647092 - RNA, 19 nt, Artificial Sequence
  Description of Artificial Sequence: Synthetic oligonucleotide
accauccgaucugaauucu

SEQ ID NO: 1647093 - RNA, 19 nt, Artificial Sequence
  Description of Artificial Sequence: Synthetic oligonucleotide
caagggucucuuauuauuu

SEQ ID NO: 1647094 - RNA, 19 nt, Artificial Sequence
  Description of Artificial Sequence: Synthetic oligonucleotide
agagcggggucuacccuag

SEQ ID NO: 1647095 - RNA, 19 nt, Artificial Sequence
  Description of Artificial Sequence: Synthetic oligonucleotide
ugcccauguccugacuuuc

SEQ ID NO: 1647096 - RNA, 19 nt, Artificial Sequence
  Description of Artificial Sequence: Synthetic oligonucleotide
cacuucgugaucucaugcu

SEQ ID NO: 1647097 - RNA, 19 nt, Artificial Sequence
  Description of Artificial Sequence: Synthetic oligonucleotide
acacacacacacacacaca

SEQ ID NO: 1647098 - RNA, 19 nt, Artificial Sequence
  Description of Artificial Sequence: Synthetic oligonucleotide
uucugauuuucaggacaau

SEQ ID NO: 1647099 - RNA, 19 nt, Artificial Sequence
  Description of Artificial Sequence: Synthetic oligonucleotide
auuuucagagcaggaccua

SEQ ID NO: 1647100 - RNA, 19 nt, Artificial Sequence
  Description of Artificial Sequence: Synthetic oligonucleotide
aucggcgacuccgugccca

SEQ ID NO: 1647101 - RNA, 19 nt, Artificial Sequence
  Description of Artificial Sequence: Synthetic oligonucleotide
ccauguccugacuuuccag

SEQ ID NO: 1647102 - RNA, 19 nt, Artificial Sequence
  Description of Artificial Sequence: Synthetic oligonucleotide
agcaggaccuagacaggug

SEQ ID NO: 1647103 - RNA, 19 nt, Artificial Sequence
  Description of Artificial Sequence: Synthetic oligonucleotide
gaccacacacacacacaca

SEQ ID NO: 1647104 - RNA, 19 nt, Artificial Sequence
  Description of Artificial Sequence: Synthetic oligonucleotide
ucuagcccaucuggucaug

SEQ ID NO: 1647105 - RNA, 19 nt, Artificial Sequence
  Description of Artificial Sequence: Synthetic oligonucleotide
ggaccuagacaggugcccc

SEQ ID NO: 1647106 - RNA, 19 nt, Artificial Sequence
  Description of Artificial Sequence: Synthetic oligonucleotide
guaauuccuggcugucugu

SEQ ID NO: 1647107 - RNA, 19 nt, Artificial Sequence
  Description of Artificial Sequence: Synthetic oligonucleotide
ccgcaucgguaacaaaugc

SEQ ID NO: 1647108 - RNA, 19 nt, Artificial Sequence
  Description of Artificial Sequence: Synthetic oligonucleotide
cccagagcggggucuaccc

SEQ ID NO: 1647109 - RNA, 19 nt, Artificial Sequence
  Description of Artificial Sequence: Synthetic oligonucleotide
gcuaucaacucuccauugu

SEQ ID NO: 1647110 - RNA, 19 nt, Artificial Sequence
  Description of Artificial Sequence: Synthetic oligonucleotide
cgugugaauccuccagagg

SEQ ID NO: 1647111 - RNA, 19 nt, Artificial Sequence
  Description of Artificial Sequence: Synthetic oligonucleotide
ucugcguuuugggcagauc

SEQ ID NO: 1647112 - RNA, 19 nt, Artificial Sequence
  Description of Artificial Sequence: Synthetic oligonucleotide
cugcauuccuugauagacu

SEQ ID NO: 1647113 - RNA, 19 nt, Artificial Sequence
  Description of Artificial Sequence: Synthetic oligonucleotide
cagccgggcaaucggcgac

SEQ ID NO: 1647114 - RNA, 19 nt, Artificial Sequence
  Description of Artificial Sequence: Synthetic oligonucleotide
cgggcaaucggcgacuccg

SEQ ID NO: 1647115 - RNA, 19 nt, Artificial Sequence
  Description of Artificial Sequence: Synthetic oligonucleotide
aaguaacagugagguguua

SEQ ID NO: 1647116 - RNA, 19 nt, Artificial Sequence
  Description of Artificial Sequence: Synthetic oligonucleotide
cuguuuugcuugaggggua

SEQ ID NO: 1647117 - RNA, 19 nt, Artificial Sequence
  Description of Artificial Sequence: Synthetic oligonucleotide
cugaauugacguugucuau

SEQ ID NO: 1647118 - RNA, 19 nt, Artificial Sequence
  Description of Artificial Sequence: Synthetic oligonucleotide
cacugcaauuucuucccgu

SEQ ID NO: 1647119 - RNA, 19 nt, Artificial Sequence
  Description of Artificial Sequence: Synthetic oligonucleotide
gcuuuguuuagaggugauc

SEQ ID NO: 1647120 - RNA, 19 nt, Artificial Sequence
  Description of Artificial Sequence: Synthetic oligonucleotide
ggcaaucggcgacuccgug

SEQ ID NO: 1647121 - RNA, 19 nt, Artificial Sequence
  Description of Artificial Sequence: Synthetic oligonucleotide
ccauccgaucugaauucug

SEQ ID NO: 1647122 - RNA, 19 nt, Artificial Sequence
  Description of Artificial Sequence: Synthetic oligonucleotide
aguguacagccgccaccau

SEQ ID NO: 1647123 - RNA, 19 nt, Artificial Sequence
  Description of Artificial Sequence: Synthetic oligonucleotide
ccgaucugaauucugauuu

SEQ ID NO: 1647124 - RNA, 19 nt, Artificial Sequence
  Description of Artificial Sequence: Synthetic oligonucleotide
gaccagaguggugucgaua

SEQ ID NO: 1647125 - RNA, 19 nt, Artificial Sequence
  Description of Artificial Sequence: Synthetic oligonucleotide
gugcagccgggcaaucggc

SEQ ID NO: 1647126 - RNA, 19 nt, Artificial Sequence
  Description of Artificial Sequence: Synthetic oligonucleotide
ccacugcaauuucuucccg

SEQ ID NO: 1647127 - RNA, 19 nt, Artificial Sequence
  Description of Artificial Sequence: Synthetic oligonucleotide
gugaagccucuucgaguuc

SEQ ID NO: 1647128 - RNA, 19 nt, Artificial Sequence
  Description of Artificial Sequence: Synthetic oligonucleotide
gcggggucuacccuagcuc

SEQ ID NO: 1647129 - RNA, 19 nt, Artificial Sequence
  Description of Artificial Sequence: Synthetic oligonucleotide
cgauaauacagacuugccu

SEQ ID NO: 1647130 - RNA, 19 nt, Artificial Sequence
  Description of Artificial Sequence: Synthetic oligonucleotide
uuucugcguuuugggcaga

SEQ ID NO: 1647131 - RNA, 19 nt, Artificial Sequence
  Description of Artificial Sequence: Synthetic oligonucleotide
ggugucgauaauacagacu

SEQ ID NO: 1647132 - RNA, 19 nt, Artificial Sequence
  Description of Artificial Sequence: Synthetic oligonucleotide
guggacccgcaucgguaac

SEQ ID NO: 1647133 - RNA, 19 nt, Artificial Sequence
  Description of Artificial Sequence: Synthetic oligonucleotide
gucggcugucuuucuuuaa

SEQ ID NO: 1647134 - RNA, 19 nt, Artificial Sequence
  Description of Artificial Sequence: Synthetic oligonucleotide
cugugaccauccgaucuga

SEQ ID NO: 1647135 - RNA, 19 nt, Artificial Sequence
  Description of Artificial Sequence: Synthetic oligonucleotide
gcgaccaacugugaccauc

SEQ ID NO: 1647136 - RNA, 19 nt, Artificial Sequence
  Description of Artificial Sequence: Synthetic oligonucleotide
cuccguggacccgcaucgg

SEQ ID NO: 1647137 - RNA, 19 nt, Artificial Sequence
  Description of Artificial Sequence: Synthetic oligonucleotide
gagcggggucuacccuagc

SEQ ID NO: 1647138 - RNA, 19 nt, Artificial Sequence
  Description of Artificial Sequence: Synthetic oligonucleotide
caugcuccguggacccgca

SEQ ID NO: 1647139 - RNA, 19 nt, Artificial Sequence
  Description of Artificial Sequence: Synthetic oligonucleotide
gccucuucgaguucuguuu

SEQ ID NO: 1647140 - RNA, 19 nt, Artificial Sequence
  Description of Artificial Sequence: Synthetic oligonucleotide
ccuacugaauugacguugu

SEQ ID NO: 1647141 - RNA, 19 nt, Artificial Sequence
  Description of Artificial Sequence: Synthetic oligonucleotide
ggcagccuacugaauugac

SEQ ID NO: 1647142 - RNA, 19 nt, Artificial Sequence
  Description of Artificial Sequence: Synthetic oligonucleotide
cacacacacacacgagaau

SEQ ID NO: 1647143 - RNA, 19 nt, Artificial Sequence
  Description of Artificial Sequence: Synthetic oligonucleotide
gcauuccuugauagacuac

SEQ ID NO: 1647144 - RNA, 19 nt, Artificial Sequence
  Description of Artificial Sequence: Synthetic oligonucleotide
gcccauguccugacuuucc

SEQ ID NO: 1647145 - RNA, 19 nt, Artificial Sequence
  Description of Artificial Sequence: Synthetic oligonucleotide
gacccgcaucgguaacaaa

SEQ ID NO: 1647146 - RNA, 19 nt, Artificial Sequence
  Description of Artificial Sequence: Synthetic oligonucleotide
ccacacacacacacacaca

SEQ ID NO: 1647147 - RNA, 19 nt, Artificial Sequence
  Description of Artificial Sequence: Synthetic oligonucleotide
gcagccgggcaaucggcga

SEQ ID NO: 1647148 - RNA, 19 nt, Artificial Sequence
  Description of Artificial Sequence: Synthetic oligonucleotide
ggggucuacccuagcucug

SEQ ID NO: 1647149 - RNA, 19 nt, Artificial Sequence
  Description of Artificial Sequence: Synthetic oligonucleotide
gcaaugaaucacccugcau

SEQ ID NO: 1647150 - RNA, 19 nt, Artificial Sequence
  Description of Artificial Sequence: Synthetic oligonucleotide
agcgaccaacugugaccau

SEQ ID NO: 1647151 - RNA, 19 nt, Artificial Sequence
  Description of Artificial Sequence: Synthetic oligonucleotide
cguugucuaugcuuuggaa

SEQ ID NO: 1647152 - RNA, 19 nt, Artificial Sequence
  Description of Artificial Sequence: Synthetic oligonucleotide
cugcacucauucccugugu

SEQ ID NO: 1647153 - RNA, 19 nt, Artificial Sequence
  Description of Artificial Sequence: Synthetic oligonucleotide
ggcgacuccgugcccaggu

SEQ ID NO: 1647154 - RNA, 19 nt, Artificial Sequence
  Description of Artificial Sequence: Synthetic oligonucleotide
cccugcauuccuugauaga

SEQ ID NO: 1647155 - RNA, 19 nt, Artificial Sequence
  Description of Artificial Sequence: Synthetic oligonucleotide
ggacccgcaucgguaacaa

SEQ ID NO: 1647156 - RNA, 19 nt, Artificial Sequence
  Description of Artificial Sequence: Synthetic oligonucleotide
ggccuacuauggaaaguaa

SEQ ID NO: 1647157 - RNA, 19 nt, Artificial Sequence
  Description of Artificial Sequence: Synthetic oligonucleotide
ccgugcccaggucuucuac

SEQ ID NO: 1647158 - RNA, 19 nt, Artificial Sequence
  Description of Artificial Sequence: Synthetic oligonucleotide
augcuccguggacccgcau

SEQ ID NO: 1647159 - RNA, 19 nt, Artificial Sequence
  Description of Artificial Sequence: Synthetic oligonucleotide
guccagcgaccaacuguga

SEQ ID NO: 1647160 - RNA, 19 nt, Artificial Sequence
  Description of Artificial Sequence: Synthetic oligonucleotide
cguggacccgcaucgguaa

SEQ ID NO: 1647161 - RNA, 19 nt, Artificial Sequence
  Description of Artificial Sequence: Synthetic oligonucleotide
cggggucuacccuagcucu

SEQ ID NO: 1647162 - RNA, 19 nt, Artificial Sequence
  Description of Artificial Sequence: Synthetic oligonucleotide
ccguggacccgcaucggua

SEQ ID NO: 1647163 - RNA, 19 nt, Artificial Sequence
  Description of Artificial Sequence: Synthetic oligonucleotide
cgucggcugucuuucuuua

SEQ ID NO: 1647164 - RNA, 19 nt, Artificial Sequence
  Description of Artificial Sequence: Synthetic oligonucleotide
gggcaaucggcgacuccgu

SEQ ID NO: 1647165 - RNA, 19 nt, Artificial Sequence
  Description of Artificial Sequence: Synthetic oligonucleotide
ccguaauuccuggcugucu

SEQ ID NO: 1647166 - RNA, 19 nt, Artificial Sequence
  Description of Artificial Sequence: Synthetic oligonucleotide
gccgggcaaucggcgacuc

SEQ ID NO: 1647167 - RNA, 19 nt, Artificial Sequence
  Description of Artificial Sequence: Synthetic oligonucleotide
cagccgccaccaucggcau

SEQ ID NO: 1647168 - RNA, 19 nt, Artificial Sequence
  Description of Artificial Sequence: Synthetic oligonucleotide
ccgucggcugucuuucuuu

SEQ ID NO: 1647169 - RNA, 19 nt, Artificial Sequence
  Description of Artificial Sequence: Synthetic oligonucleotide
ccagaguggugucgauaau

SEQ ID NO: 1647170 - RNA, 19 nt, Artificial Sequence
  Description of Artificial Sequence: Synthetic oligonucleotide
cccgucggcugucuuucuu

SEQ ID NO: 1647171 - RNA, 19 nt, Artificial Sequence
  Description of Artificial Sequence: Synthetic oligonucleotide
ccgccaccaucggcauaga

SEQ ID NO: 1647172 - RNA, 19 nt, Artificial Sequence
  Description of Artificial Sequence: Synthetic oligonucleotide
gaugcuaucaacaagacac

SEQ ID NO: 1647173 - RNA, 19 nt, Artificial Sequence
  Description of Artificial Sequence: Synthetic oligonucleotide
ucuccuguaagauacaggg

SEQ ID NO: 1647174 - RNA, 19 nt, Artificial Sequence
  Description of Artificial Sequence: Synthetic oligonucleotide
aauuuccaaacuuugcgac

SEQ ID NO: 1647175 - RNA, 19 nt, Artificial Sequence
  Description of Artificial Sequence: Synthetic oligonucleotide
uuuauuauccuguuguugc

SEQ ID NO: 1647176 - RNA, 19 nt, Artificial Sequence
  Description of Artificial Sequence: Synthetic oligonucleotide
uggaguaggaagaaaaugc

SEQ ID NO: 1647177 - RNA, 19 nt, Artificial Sequence
  Description of Artificial Sequence: Synthetic oligonucleotide
ucugaugcuaucaacaaga

SEQ ID NO: 1647178 - RNA, 19 nt, Artificial Sequence
  Description of Artificial Sequence: Synthetic oligonucleotide
gauacagggacccugcugg

SEQ ID NO: 1647179 - RNA, 19 nt, Artificial Sequence
  Description of Artificial Sequence: Synthetic oligonucleotide
uaggaaauggucaauccgg

SEQ ID NO: 1647180 - RNA, 19 nt, Artificial Sequence
  Description of Artificial Sequence: Synthetic oligonucleotide
aagaaaaugcucuuuugca

SEQ ID NO: 1647181 - RNA, 19 nt, Artificial Sequence
  Description of Artificial Sequence: Synthetic oligonucleotide
accaugaggugcuaaaacc

SEQ ID NO: 1647182 - RNA, 19 nt, Artificial Sequence
  Description of Artificial Sequence: Synthetic oligonucleotide
caagacacuauuuaucacc

SEQ ID NO: 1647183 - RNA, 19 nt, Artificial Sequence
  Description of Artificial Sequence: Synthetic oligonucleotide
gacacuauuuaucaccucc

SEQ ID NO: 1647184 - RNA, 19 nt, Artificial Sequence
  Description of Artificial Sequence: Synthetic oligonucleotide
agugugcacacccaagucc

SEQ ID NO: 1647185 - RNA, 19 nt, Artificial Sequence
  Description of Artificial Sequence: Synthetic oligonucleotide
cauggcaugaucuccaggg

SEQ ID NO: 1647186 - RNA, 19 nt, Artificial Sequence
  Description of Artificial Sequence: Synthetic oligonucleotide
uuuugcaggacacacacuc

SEQ ID NO: 1647187 - RNA, 19 nt, Artificial Sequence
  Description of Artificial Sequence: Synthetic oligonucleotide
uuaaccaucucagacaucu

SEQ ID NO: 1647188 - RNA, 19 nt, Artificial Sequence
  Description of Artificial Sequence: Synthetic oligonucleotide
agaaaaugcucuuuugcag

SEQ ID NO: 1647189 - RNA, 19 nt, Artificial Sequence
  Description of Artificial Sequence: Synthetic oligonucleotide
auuuaucaccuccugagag

SEQ ID NO: 1647190 - RNA, 19 nt, Artificial Sequence
  Description of Artificial Sequence: Synthetic oligonucleotide
aaugaccuugccugagggc

SEQ ID NO: 1647191 - RNA, 19 nt, Artificial Sequence
  Description of Artificial Sequence: Synthetic oligonucleotide
uccuuuguggaguaggaag

SEQ ID NO: 1647192 - RNA, 19 nt, Artificial Sequence
  Description of Artificial Sequence: Synthetic oligonucleotide
aaaccaguccccguaacac

SEQ ID NO: 1647193 - RNA, 19 nt, Artificial Sequence
  Description of Artificial Sequence: Synthetic oligonucleotide
ggugauaggaucuaggaac

SEQ ID NO: 1647194 - RNA, 19 nt, Artificial Sequence
  Description of Artificial Sequence: Synthetic oligonucleotide
agaauagggacgucuuccc

SEQ ID NO: 1647195 - RNA, 19 nt, Artificial Sequence
  Description of Artificial Sequence: Synthetic oligonucleotide
ucaugggacgccaagguug

SEQ ID NO: 1647196 - RNA, 19 nt, Artificial Sequence
  Description of Artificial Sequence: Synthetic oligonucleotide
guaggaaauggucaauccg

SEQ ID NO: 1647197 - RNA, 19 nt, Artificial Sequence
  Description of Artificial Sequence: Synthetic oligonucleotide
auggacccgaagcacaucc

SEQ ID NO: 1647198 - RNA, 19 nt, Artificial Sequence
  Description of Artificial Sequence: Synthetic oligonucleotide
ucuaaacgcuuuaugcaag

SEQ ID NO: 1647199 - RNA, 19 nt, Artificial Sequence
  Description of Artificial Sequence: Synthetic oligonucleotide
aguuugugcucucccaagc

SEQ ID NO: 1647200 - RNA, 19 nt, Artificial Sequence
  Description of Artificial Sequence: Synthetic oligonucleotide
gaaggcauggagccaaggg

SEQ ID NO: 1647201 - RNA, 19 nt, Artificial Sequence
  Description of Artificial Sequence: Synthetic oligonucleotide
agagcguugcuucucacuc

SEQ ID NO: 1647202 - RNA, 19 nt, Artificial Sequence
  Description of Artificial Sequence: Synthetic oligonucleotide
aacgcuuuaugcaagagau

SEQ ID NO: 1647203 - RNA, 19 nt, Artificial Sequence
  Description of Artificial Sequence: Synthetic oligonucleotide
aaacgcuuuaugcaagaga

SEQ ID NO: 1647204 - RNA, 19 nt, Artificial Sequence
  Description of Artificial Sequence: Synthetic oligonucleotide
gcaauuuccaaacuuugcg

SEQ ID NO: 1647205 - RNA, 19 nt, Artificial Sequence
  Description of Artificial Sequence: Synthetic oligonucleotide
guuacacuucuccagagug

SEQ ID NO: 1647206 - RNA, 19 nt, Artificial Sequence
  Description of Artificial Sequence: Synthetic oligonucleotide
ucuugugcccagcuguugg

SEQ ID NO: 1647207 - RNA, 19 nt, Artificial Sequence
  Description of Artificial Sequence: Synthetic oligonucleotide
guggcuaagggaaagagcc

SEQ ID NO: 1647208 - RNA, 19 nt, Artificial Sequence
  Description of Artificial Sequence: Synthetic oligonucleotide
aaauggucaauccgggccu

SEQ ID NO: 1647209 - RNA, 19 nt, Artificial Sequence
  Description of Artificial Sequence: Synthetic oligonucleotide
uuuaucaccuccugagagc

SEQ ID NO: 1647210 - RNA, 19 nt, Artificial Sequence
  Description of Artificial Sequence: Synthetic oligonucleotide
aaggcauggagccaagggu

SEQ ID NO: 1647211 - RNA, 19 nt, Artificial Sequence
  Description of Artificial Sequence: Synthetic oligonucleotide
ugugaaagggucacugggc

SEQ ID NO: 1647212 - RNA, 19 nt, Artificial Sequence
  Description of Artificial Sequence: Synthetic oligonucleotide
uaagauacagggacccugc

SEQ ID NO: 1647213 - RNA, 19 nt, Artificial Sequence
  Description of Artificial Sequence: Synthetic oligonucleotide
uguagucugagcugugucc

SEQ ID NO: 1647214 - RNA, 19 nt, Artificial Sequence
  Description of Artificial Sequence: Synthetic oligonucleotide
uucuaaacgcuuuaugcaa

SEQ ID NO: 1647215 - RNA, 19 nt, Artificial Sequence
  Description of Artificial Sequence: Synthetic oligonucleotide
gaccccacacuucuaaacg

SEQ ID NO: 1647216 - RNA, 19 nt, Artificial Sequence
  Description of Artificial Sequence: Synthetic oligonucleotide
caaacuuugcgacagcuuc

SEQ ID NO: 1647217 - RNA, 19 nt, Artificial Sequence
  Description of Artificial Sequence: Synthetic oligonucleotide
ggugcuaaaacccaggaga

SEQ ID NO: 1647218 - RNA, 19 nt, Artificial Sequence
  Description of Artificial Sequence: Synthetic oligonucleotide
gauugugugcagauaacag

SEQ ID NO: 1647219 - RNA, 19 nt, Artificial Sequence
  Description of Artificial Sequence: Synthetic oligonucleotide
auguaguuugugcucuccc

SEQ ID NO: 1647220 - RNA, 19 nt, Artificial Sequence
  Description of Artificial Sequence: Synthetic oligonucleotide
aacagagugcuggaguagg

SEQ ID NO: 1647221 - RNA, 19 nt, Artificial Sequence
  Description of Artificial Sequence: Synthetic oligonucleotide
aaggcuggagugugcacac

SEQ ID NO: 1647222 - RNA, 19 nt, Artificial Sequence
  Description of Artificial Sequence: Synthetic oligonucleotide
uguugccuaagcaggagug

SEQ ID NO: 1647223 - RNA, 19 nt, Artificial Sequence
  Description of Artificial Sequence: Synthetic oligonucleotide
uggcacaucauuaaccauc

SEQ ID NO: 1647224 - RNA, 19 nt, Artificial Sequence
  Description of Artificial Sequence: Synthetic oligonucleotide
uucugaugcuaucaacaag

SEQ ID NO: 1647225 - RNA, 19 nt, Artificial Sequence
  Description of Artificial Sequence: Synthetic oligonucleotide
gauaggaucuaggaacucc

SEQ ID NO: 1647226 - RNA, 19 nt, Artificial Sequence
  Description of Artificial Sequence: Synthetic oligonucleotide
acaagacacuauuuaucac

SEQ ID NO: 1647227 - RNA, 19 nt, Artificial Sequence
  Description of Artificial Sequence: Synthetic oligonucleotide
uugugcucucccaagcagg

SEQ ID NO: 1647228 - RNA, 19 nt, Artificial Sequence
  Description of Artificial Sequence: Synthetic oligonucleotide
uauuccagaguugaaauua

SEQ ID NO: 1647229 - RNA, 19 nt, Artificial Sequence
  Description of Artificial Sequence: Synthetic oligonucleotide
aguagcuucacugagguua

SEQ ID NO: 1647230 - RNA, 19 nt, Artificial Sequence
  Description of Artificial Sequence: Synthetic oligonucleotide
uauuuaucaccuccugaga

SEQ ID NO: 1647231 - RNA, 19 nt, Artificial Sequence
  Description of Artificial Sequence: Synthetic oligonucleotide
ugcaagagaugccacugcc

SEQ ID NO: 1647232 - RNA, 19 nt, Artificial Sequence
  Description of Artificial Sequence: Synthetic oligonucleotide
gagaauagggacgucuucc

SEQ ID NO: 1647233 - RNA, 19 nt, Artificial Sequence
  Description of Artificial Sequence: Synthetic oligonucleotide
uuauuauccuguuguugcc

SEQ ID NO: 1647234 - RNA, 19 nt, Artificial Sequence
  Description of Artificial Sequence: Synthetic oligonucleotide
acuauuuaucaccuccuga

SEQ ID NO: 1647235 - RNA, 19 nt, Artificial Sequence
  Description of Artificial Sequence: Synthetic oligonucleotide
aucuaggaacuccucuggc

SEQ ID NO: 1647236 - RNA, 19 nt, Artificial Sequence
  Description of Artificial Sequence: Synthetic oligonucleotide
caggucucuuccaaaacgg

SEQ ID NO: 1647237 - RNA, 19 nt, Artificial Sequence
  Description of Artificial Sequence: Synthetic oligonucleotide
uagccuauggcuuuauuau

SEQ ID NO: 1647238 - RNA, 19 nt, Artificial Sequence
  Description of Artificial Sequence: Synthetic oligonucleotide
gcaggguaaugauagaagg

SEQ ID NO: 1647239 - RNA, 19 nt, Artificial Sequence
  Description of Artificial Sequence: Synthetic oligonucleotide
accccacacuucuaaacgc

SEQ ID NO: 1647240 - RNA, 19 nt, Artificial Sequence
  Description of Artificial Sequence: Synthetic oligonucleotide
uguaguuugugcucuccca

SEQ ID NO: 1647241 - RNA, 19 nt, Artificial Sequence
  Description of Artificial Sequence: Synthetic oligonucleotide
aauagggacgucuucccua

SEQ ID NO: 1647242 - RNA, 19 nt, Artificial Sequence
  Description of Artificial Sequence: Synthetic oligonucleotide
uuuaugcaagagaugccac

SEQ ID NO: 1647243 - RNA, 19 nt, Artificial Sequence
  Description of Artificial Sequence: Synthetic oligonucleotide
uggaagucaaggcaauuuc

SEQ ID NO: 1647244 - RNA, 19 nt, Artificial Sequence
  Description of Artificial Sequence: Synthetic oligonucleotide
aagacacuauuuaucaccu

SEQ ID NO: 1647245 - RNA, 19 nt, Artificial Sequence
  Description of Artificial Sequence: Synthetic oligonucleotide
uccaaaacggggcuuccug

SEQ ID NO: 1647246 - RNA, 19 nt, Artificial Sequence
  Description of Artificial Sequence: Synthetic oligonucleotide
ugaugcuaucaacaagaca

SEQ ID NO: 1647247 - RNA, 19 nt, Artificial Sequence
  Description of Artificial Sequence: Synthetic oligonucleotide
uugcaggacacacacucug

SEQ ID NO: 1647248 - RNA, 19 nt, Artificial Sequence
  Description of Artificial Sequence: Synthetic oligonucleotide
uguccuaaaccaguccccg

SEQ ID NO: 1647249 - RNA, 19 nt, Artificial Sequence
  Description of Artificial Sequence: Synthetic oligonucleotide
aaacggggcuuccugguug

SEQ ID NO: 1647250 - RNA, 19 nt, Artificial Sequence
  Description of Artificial Sequence: Synthetic oligonucleotide
aagauugugugcagauaac

SEQ ID NO: 1647251 - RNA, 19 nt, Artificial Sequence
  Description of Artificial Sequence: Synthetic oligonucleotide
uuaugcaagagaugccacu

SEQ ID NO: 1647252 - RNA, 19 nt, Artificial Sequence
  Description of Artificial Sequence: Synthetic oligonucleotide
uuaucaccuccugagagca

SEQ ID NO: 1647253 - RNA, 19 nt, Artificial Sequence
  Description of Artificial Sequence: Synthetic oligonucleotide
uguuguugccuaagcagga

SEQ ID NO: 1647254 - RNA, 19 nt, Artificial Sequence
  Description of Artificial Sequence: Synthetic oligonucleotide
gacagcuucugcucauggg

SEQ ID NO: 1647255 - RNA, 19 nt, Artificial Sequence
  Description of Artificial Sequence: Synthetic oligonucleotide
uuugcgacagcuucugcuc

SEQ ID NO: 1647256 - RNA, 19 nt, Artificial Sequence
  Description of Artificial Sequence: Synthetic oligonucleotide
uucucacucaggcaggguc

SEQ ID NO: 1647257 - RNA, 19 nt, Artificial Sequence
  Description of Artificial Sequence: Synthetic oligonucleotide
aggggagugcuucugaaca

SEQ ID NO: 1647258 - RNA, 19 nt, Artificial Sequence
  Description of Artificial Sequence: Synthetic oligonucleotide
ugucacaugggugauucca

SEQ ID NO: 1647259 - RNA, 19 nt, Artificial Sequence
  Description of Artificial Sequence: Synthetic oligonucleotide
ggcaagguagaccagggag

SEQ ID NO: 1647260 - RNA, 19 nt, Artificial Sequence
  Description of Artificial Sequence: Synthetic oligonucleotide
auagggacgucuucccuag

SEQ ID NO: 1647261 - RNA, 19 nt, Artificial Sequence
  Description of Artificial Sequence: Synthetic oligonucleotide
uggaguaggaaauggucaa

SEQ ID NO: 1647262 - RNA, 19 nt, Artificial Sequence
  Description of Artificial Sequence: Synthetic oligonucleotide
agggugauaggaucuagga

SEQ ID NO: 1647263 - RNA, 19 nt, Artificial Sequence
  Description of Artificial Sequence: Synthetic oligonucleotide
aaaugcucuuuugcaggac

SEQ ID NO: 1647264 - RNA, 19 nt, Artificial Sequence
  Description of Artificial Sequence: Synthetic oligonucleotide
caaugaccuugccugaggg

SEQ ID NO: 1647265 - RNA, 19 nt, Artificial Sequence
  Description of Artificial Sequence: Synthetic oligonucleotide
aauccgggccuucagggaa

SEQ ID NO: 1647266 - RNA, 19 nt, Artificial Sequence
  Description of Artificial Sequence: Synthetic oligonucleotide
guaacacaccaugaggugc

SEQ ID NO: 1647267 - RNA, 19 nt, Artificial Sequence
  Description of Artificial Sequence: Synthetic oligonucleotide
cuguaagauacagggaccc

SEQ ID NO: 1647268 - RNA, 19 nt, Artificial Sequence
  Description of Artificial Sequence: Synthetic oligonucleotide
agccuauggcuuuauuauc

SEQ ID NO: 1647269 - RNA, 19 nt, Artificial Sequence
  Description of Artificial Sequence: Synthetic oligonucleotide
agagaacaggggcacuggg

SEQ ID NO: 1647270 - RNA, 19 nt, Artificial Sequence
  Description of Artificial Sequence: Synthetic oligonucleotide
ugugggguaaaggcuaacc

SEQ ID NO: 1647271 - RNA, 19 nt, Artificial Sequence
  Description of Artificial Sequence: Synthetic oligonucleotide
gguguccuaaaccaguccc

SEQ ID NO: 1647272 - RNA, 19 nt, Artificial Sequence
  Description of Artificial Sequence: Synthetic oligonucleotide
gugggguaaaggcuaaccc

SEQ ID NO: 1647273 - RNA, 19 nt, Artificial Sequence
  Description of Artificial Sequence: Synthetic oligonucleotide
caauuuccaaacuuugcga

SEQ ID NO: 1647274 - RNA, 19 nt, Artificial Sequence
  Description of Artificial Sequence: Synthetic oligonucleotide
aaacagagugcuggaguag

SEQ ID NO: 1647275 - RNA, 19 nt, Artificial Sequence
  Description of Artificial Sequence: Synthetic oligonucleotide
gaaacagagugcuggagua

SEQ ID NO: 1647276 - RNA, 19 nt, Artificial Sequence
  Description of Artificial Sequence: Synthetic oligonucleotide
guaagauacagggacccug

SEQ ID NO: 1647277 - RNA, 19 nt, Artificial Sequence
  Description of Artificial Sequence: Synthetic oligonucleotide
gucucuuccaaaacggggc

SEQ ID NO: 1647278 - RNA, 19 nt, Artificial Sequence
  Description of Artificial Sequence: Synthetic oligonucleotide
agcuucacugagguuacac

SEQ ID NO: 1647279 - RNA, 19 nt, Artificial Sequence
  Description of Artificial Sequence: Synthetic oligonucleotide
aaggcaauuuccaaacuuu

SEQ ID NO: 1647280 - RNA, 19 nt, Artificial Sequence
  Description of Artificial Sequence: Synthetic oligonucleotide
aacuuugcgacagcuucug

SEQ ID NO: 1647281 - RNA, 19 nt, Artificial Sequence
  Description of Artificial Sequence: Synthetic oligonucleotide
agauugugugcagauaaca

SEQ ID NO: 1647282 - RNA, 19 nt, Artificial Sequence
  Description of Artificial Sequence: Synthetic oligonucleotide
cuggaguaggaaaugguca

SEQ ID NO: 1647283 - RNA, 19 nt, Artificial Sequence
  Description of Artificial Sequence: Synthetic oligonucleotide
uggagugugcacacccaag

SEQ ID NO: 1647284 - RNA, 19 nt, Artificial Sequence
  Description of Artificial Sequence: Synthetic oligonucleotide
ucuucccuagccuagccua

SEQ ID NO: 1647285 - RNA, 19 nt, Artificial Sequence
  Description of Artificial Sequence: Synthetic oligonucleotide
ucccuagccuagccuaugg

SEQ ID NO: 1647286 - RNA, 19 nt, Artificial Sequence
  Description of Artificial Sequence: Synthetic oligonucleotide
gagugggguguccuaaacc

SEQ ID NO: 1647287 - RNA, 19 nt, Artificial Sequence
  Description of Artificial Sequence: Synthetic oligonucleotide
uuugcaggacacacacucu

SEQ ID NO: 1647288 - RNA, 19 nt, Artificial Sequence
  Description of Artificial Sequence: Synthetic oligonucleotide
ucucagacaucuccuguaa

SEQ ID NO: 1647289 - RNA, 19 nt, Artificial Sequence
  Description of Artificial Sequence: Synthetic oligonucleotide
cagggugauaggaucuagg

SEQ ID NO: 1647290 - RNA, 19 nt, Artificial Sequence
  Description of Artificial Sequence: Synthetic oligonucleotide
aaaggcuaacccugugaaa

SEQ ID NO: 1647291 - RNA, 19 nt, Artificial Sequence
  Description of Artificial Sequence: Synthetic oligonucleotide
gagguuacacuucuccaga

SEQ ID NO: 1647292 - RNA, 19 nt, Artificial Sequence
  Description of Artificial Sequence: Synthetic oligonucleotide
uaaacgcuuuaugcaagag

SEQ ID NO: 1647293 - RNA, 19 nt, Artificial Sequence
  Description of Artificial Sequence: Synthetic oligonucleotide
ugaccccacacuucuaaac

SEQ ID NO: 1647294 - RNA, 19 nt, Artificial Sequence
  Description of Artificial Sequence: Synthetic oligonucleotide
ugugcucucccaagcaggu

SEQ ID NO: 1647295 - RNA, 19 nt, Artificial Sequence
  Description of Artificial Sequence: Synthetic oligonucleotide
ugggguguccuaaaccagu

SEQ ID NO: 1647296 - RNA, 19 nt, Artificial Sequence
  Description of Artificial Sequence: Synthetic oligonucleotide
augaccuugccugagggca

SEQ ID NO: 1647297 - RNA, 19 nt, Artificial Sequence
  Description of Artificial Sequence: Synthetic oligonucleotide
uuguugccuaagcaggagu

SEQ ID NO: 1647298 - RNA, 19 nt, Artificial Sequence
  Description of Artificial Sequence: Synthetic oligonucleotide
auuccaaucuugagguggg

SEQ ID NO: 1647299 - RNA, 19 nt, Artificial Sequence
  Description of Artificial Sequence: Synthetic oligonucleotide
guaaaggcuaacccuguga

SEQ ID NO: 1647300 - RNA, 19 nt, Artificial Sequence
  Description of Artificial Sequence: Synthetic oligonucleotide
ugcucaugggacgccaagg

SEQ ID NO: 1647301 - RNA, 19 nt, Artificial Sequence
  Description of Artificial Sequence: Synthetic oligonucleotide
uccaaucuugaggugggcc

SEQ ID NO: 1647302 - RNA, 19 nt, Artificial Sequence
  Description of Artificial Sequence: Synthetic oligonucleotide
aaggggccauugcugaugu

SEQ ID NO: 1647303 - RNA, 19 nt, Artificial Sequence
  Description of Artificial Sequence: Synthetic oligonucleotide
caagguuguagucugagcu

SEQ ID NO: 1647304 - RNA, 19 nt, Artificial Sequence
  Description of Artificial Sequence: Synthetic oligonucleotide
uuguagucugagcuguguc

SEQ ID NO: 1647305 - RNA, 19 nt, Artificial Sequence
  Description of Artificial Sequence: Synthetic oligonucleotide
cuaaaacccaggagagaac

SEQ ID NO: 1647306 - RNA, 19 nt, Artificial Sequence
  Description of Artificial Sequence: Synthetic oligonucleotide
accagggagaauagggacg

SEQ ID NO: 1647307 - RNA, 19 nt, Artificial Sequence
  Description of Artificial Sequence: Synthetic oligonucleotide
ccaaucuugaggugggccg

SEQ ID NO: 1647308 - RNA, 19 nt, Artificial Sequence
  Description of Artificial Sequence: Synthetic oligonucleotide
agggucacugggcacucgg

SEQ ID NO: 1647309 - RNA, 19 nt, Artificial Sequence
  Description of Artificial Sequence: Synthetic oligonucleotide
agguuacacuucuccagag

SEQ ID NO: 1647310 - RNA, 19 nt, Artificial Sequence
  Description of Artificial Sequence: Synthetic oligonucleotide
gugcuaaaacccaggagag

SEQ ID NO: 1647311 - RNA, 19 nt, Artificial Sequence
  Description of Artificial Sequence: Synthetic oligonucleotide
accaguccccguaacacac

SEQ ID NO: 1647312 - RNA, 19 nt, Artificial Sequence
  Description of Artificial Sequence: Synthetic oligonucleotide
guccccguaacacaccaug

SEQ ID NO: 1647313 - RNA, 19 nt, Artificial Sequence
  Description of Artificial Sequence: Synthetic oligonucleotide
aaacuuugcgacagcuucu

SEQ ID NO: 1647314 - RNA, 19 nt, Artificial Sequence
  Description of Artificial Sequence: Synthetic oligonucleotide
cuagccuauggcuuuauua

SEQ ID NO: 1647315 - RNA, 19 nt, Artificial Sequence
  Description of Artificial Sequence: Synthetic oligonucleotide
caccaugaggugcuaaaac

SEQ ID NO: 1647316 - RNA, 19 nt, Artificial Sequence
  Description of Artificial Sequence: Synthetic oligonucleotide
ugggacgccaagguuguag

SEQ ID NO: 1647317 - RNA, 19 nt, Artificial Sequence
  Description of Artificial Sequence: Synthetic oligonucleotide
cuauggcuuuauuauccug

SEQ ID NO: 1647318 - RNA, 19 nt, Artificial Sequence
  Description of Artificial Sequence: Synthetic oligonucleotide
agguagaccagggagaaua

SEQ ID NO: 1647319 - RNA, 19 nt, Artificial Sequence
  Description of Artificial Sequence: Synthetic oligonucleotide
guugccuaagcaggagugg

SEQ ID NO: 1647320 - RNA, 19 nt, Artificial Sequence
  Description of Artificial Sequence: Synthetic oligonucleotide
cugaugcuaucaacaagac

SEQ ID NO: 1647321 - RNA, 19 nt, Artificial Sequence
  Description of Artificial Sequence: Synthetic oligonucleotide
ugaucuccagggugauagg

SEQ ID NO: 1647322 - RNA, 19 nt, Artificial Sequence
  Description of Artificial Sequence: Synthetic oligonucleotide
uggcuaagggaaagagccc

SEQ ID NO: 1647323 - RNA, 19 nt, Artificial Sequence
  Description of Artificial Sequence: Synthetic oligonucleotide
gugaaagggucacugggca

SEQ ID NO: 1647324 - RNA, 19 nt, Artificial Sequence
  Description of Artificial Sequence: Synthetic oligonucleotide
ggcuuuauuauccuguugu

SEQ ID NO: 1647325 - RNA, 19 nt, Artificial Sequence
  Description of Artificial Sequence: Synthetic oligonucleotide
ucuuccaaaacggggcuuc

SEQ ID NO: 1647326 - RNA, 19 nt, Artificial Sequence
  Description of Artificial Sequence: Synthetic oligonucleotide
cacuauuuaucaccuccug

SEQ ID NO: 1647327 - RNA, 19 nt, Artificial Sequence
  Description of Artificial Sequence: Synthetic oligonucleotide
gagugcucuggucaaugac

SEQ ID NO: 1647328 - RNA, 19 nt, Artificial Sequence
  Description of Artificial Sequence: Synthetic oligonucleotide
ugugcccagcuguuggagc

SEQ ID NO: 1647329 - RNA, 19 nt, Artificial Sequence
  Description of Artificial Sequence: Synthetic oligonucleotide
aaugauagaaggggccauu

SEQ ID NO: 1647330 - RNA, 19 nt, Artificial Sequence
  Description of Artificial Sequence: Synthetic oligonucleotide
uuccagaguugaaauuauc

SEQ ID NO: 1647331 - RNA, 19 nt, Artificial Sequence
  Description of Artificial Sequence: Synthetic oligonucleotide
uccccguaacacaccauga

SEQ ID NO: 1647332 - RNA, 19 nt, Artificial Sequence
  Description of Artificial Sequence: Synthetic oligonucleotide
ggucucuuccaaaacgggg

SEQ ID NO: 1647333 - RNA, 19 nt, Artificial Sequence
  Description of Artificial Sequence: Synthetic oligonucleotide
gaggugcuaaaacccagga

SEQ ID NO: 1647334 - RNA, 19 nt, Artificial Sequence
  Description of Artificial Sequence: Synthetic oligonucleotide
aauggacccgaagcacauc

SEQ ID NO: 1647335 - RNA, 19 nt, Artificial Sequence
  Description of Artificial Sequence: Synthetic oligonucleotide
cuaaacgcuuuaugcaaga

SEQ ID NO: 1647336 - RNA, 19 nt, Artificial Sequence
  Description of Artificial Sequence: Synthetic oligonucleotide
ucuggucaaugaccuugcc

SEQ ID NO: 1647337 - RNA, 19 nt, Artificial Sequence
  Description of Artificial Sequence: Synthetic oligonucleotide
aaaacggggcuuccugguu

SEQ ID NO: 1647338 - RNA, 19 nt, Artificial Sequence
  Description of Artificial Sequence: Synthetic oligonucleotide
augauagaaggggccauug

SEQ ID NO: 1647339 - RNA, 19 nt, Artificial Sequence
  Description of Artificial Sequence: Synthetic oligonucleotide
agggagaauagggacgucu

SEQ ID NO: 1647340 - RNA, 19 nt, Artificial Sequence
  Description of Artificial Sequence: Synthetic oligonucleotide
ccaaguagcuucacugagg

SEQ ID NO: 1647341 - RNA, 19 nt, Artificial Sequence
  Description of Artificial Sequence: Synthetic oligonucleotide
gaagcacugcucccucuug

SEQ ID NO: 1647342 - RNA, 19 nt, Artificial Sequence
  Description of Artificial Sequence: Synthetic oligonucleotide
aacggggcuuccugguuga

SEQ ID NO: 1647343 - RNA, 19 nt, Artificial Sequence
  Description of Artificial Sequence: Synthetic oligonucleotide
cacaugggugauuccaauc

SEQ ID NO: 1647344 - RNA, 19 nt, Artificial Sequence
  Description of Artificial Sequence: Synthetic oligonucleotide
aucucagacaucuccugua

SEQ ID NO: 1647345 - RNA, 19 nt, Artificial Sequence
  Description of Artificial Sequence: Synthetic oligonucleotide
aaauggacccgaagcacau

SEQ ID NO: 1647346 - RNA, 19 nt, Artificial Sequence
  Description of Artificial Sequence: Synthetic oligonucleotide
uguaagauacagggacccu

SEQ ID NO: 1647347 - RNA, 19 nt, Artificial Sequence
  Description of Artificial Sequence: Synthetic oligonucleotide
uugcgacagcuucugcuca

SEQ ID NO: 1647348 - RNA, 19 nt, Artificial Sequence
  Description of Artificial Sequence: Synthetic oligonucleotide
guaguuugugcucucccaa

SEQ ID NO: 1647349 - RNA, 19 nt, Artificial Sequence
  Description of Artificial Sequence: Synthetic oligonucleotide
uugagggcaggguaaugau

SEQ ID NO: 1647350 - RNA, 19 nt, Artificial Sequence
  Description of Artificial Sequence: Synthetic oligonucleotide
cacaaacaguccugggaug

SEQ ID NO: 1647351 - RNA, 19 nt, Artificial Sequence
  Description of Artificial Sequence: Synthetic oligonucleotide
agguuguagucugagcugu

SEQ ID NO: 1647352 - RNA, 19 nt, Artificial Sequence
  Description of Artificial Sequence: Synthetic oligonucleotide
cucagacaucuccuguaag

SEQ ID NO: 1647353 - RNA, 19 nt, Artificial Sequence
  Description of Artificial Sequence: Synthetic oligonucleotide
gacgucuucccuagccuag

SEQ ID NO: 1647354 - RNA, 19 nt, Artificial Sequence
  Description of Artificial Sequence: Synthetic oligonucleotide
ccuguaagauacagggacc

SEQ ID NO: 1647355 - RNA, 19 nt, Artificial Sequence
  Description of Artificial Sequence: Synthetic oligonucleotide
gccuauggcuuuauuaucc

SEQ ID NO: 1647356 - RNA, 19 nt, Artificial Sequence
  Description of Artificial Sequence: Synthetic oligonucleotide
cuaaaccaguccccguaac

SEQ ID NO: 1647357 - RNA, 19 nt, Artificial Sequence
  Description of Artificial Sequence: Synthetic oligonucleotide
gcuaaaacccaggagagaa

SEQ ID NO: 1647358 - RNA, 19 nt, Artificial Sequence
  Description of Artificial Sequence: Synthetic oligonucleotide
uaagggaaagagccccuuu

SEQ ID NO: 1647359 - RNA, 19 nt, Artificial Sequence
  Description of Artificial Sequence: Synthetic oligonucleotide
guuguugccuaagcaggag

SEQ ID NO: 1647360 - RNA, 19 nt, Artificial Sequence
  Description of Artificial Sequence: Synthetic oligonucleotide
acacuauuuaucaccuccu

SEQ ID NO: 1647361 - RNA, 19 nt, Artificial Sequence
  Description of Artificial Sequence: Synthetic oligonucleotide
ucacaugggugauuccaau

SEQ ID NO: 1647362 - RNA, 19 nt, Artificial Sequence
  Description of Artificial Sequence: Synthetic oligonucleotide
agccccuuuauuccagagu

SEQ ID NO: 1647363 - RNA, 19 nt, Artificial Sequence
  Description of Artificial Sequence: Synthetic oligonucleotide
ggggccauugcugauguag

SEQ ID NO: 1647364 - RNA, 19 nt, Artificial Sequence
  Description of Artificial Sequence: Synthetic oligonucleotide
caaucuugaggugggccgc

SEQ ID NO: 1647365 - RNA, 19 nt, Artificial Sequence
  Description of Artificial Sequence: Synthetic oligonucleotide
cccguaacacaccaugagg

SEQ ID NO: 1647366 - RNA, 19 nt, Artificial Sequence
  Description of Artificial Sequence: Synthetic oligonucleotide
ggaaauggucaauccgggc

SEQ ID NO: 1647367 - RNA, 19 nt, Artificial Sequence
  Description of Artificial Sequence: Synthetic oligonucleotide
augaggugcuaaaacccag

SEQ ID NO: 1647368 - RNA, 19 nt, Artificial Sequence
  Description of Artificial Sequence: Synthetic oligonucleotide
ugcuaaaacccaggagaga

SEQ ID NO: 1647369 - RNA, 19 nt, Artificial Sequence
  Description of Artificial Sequence: Synthetic oligonucleotide
uaggaucuaggaacuccuc

SEQ ID NO: 1647370 - RNA, 19 nt, Artificial Sequence
  Description of Artificial Sequence: Synthetic oligonucleotide
gcagugaaggaaggcaugg

SEQ ID NO: 1647371 - RNA, 19 nt, Artificial Sequence
  Description of Artificial Sequence: Synthetic oligonucleotide
caucauuaaccaucucaga

SEQ ID NO: 1647372 - RNA, 19 nt, Artificial Sequence
  Description of Artificial Sequence: Synthetic oligonucleotide
cuucagggaaggaugaggu

SEQ ID NO: 1647373 - RNA, 19 nt, Artificial Sequence
  Description of Artificial Sequence: Synthetic oligonucleotide
gggguaaaggcuaacccug

SEQ ID NO: 1647374 - RNA, 19 nt, Artificial Sequence
  Description of Artificial Sequence: Synthetic oligonucleotide
guagucugagcugugucca

SEQ ID NO: 1647375 - RNA, 19 nt, Artificial Sequence
  Description of Artificial Sequence: Synthetic oligonucleotide
ugggcacucggccccaagu

SEQ ID NO: 1647376 - RNA, 19 nt, Artificial Sequence
  Description of Artificial Sequence: Synthetic oligonucleotide
cucggccccaaguagcuuc

SEQ ID NO: 1647377 - RNA, 19 nt, Artificial Sequence
  Description of Artificial Sequence: Synthetic oligonucleotide
cauuaaccaucucagacau

SEQ ID NO: 1647378 - RNA, 19 nt, Artificial Sequence
  Description of Artificial Sequence: Synthetic oligonucleotide
agacaucuccuguaagaua

SEQ ID NO: 1647379 - RNA, 19 nt, Artificial Sequence
  Description of Artificial Sequence: Synthetic oligonucleotide
auggcaugaucuccagggu

SEQ ID NO: 1647380 - RNA, 19 nt, Artificial Sequence
  Description of Artificial Sequence: Synthetic oligonucleotide
caaguagcuucacugaggu

SEQ ID NO: 1647381 - RNA, 19 nt, Artificial Sequence
  Description of Artificial Sequence: Synthetic oligonucleotide
ugcuaucaacaagacacua

SEQ ID NO: 1647382 - RNA, 19 nt, Artificial Sequence
  Description of Artificial Sequence: Synthetic oligonucleotide
uggcaagguagaccaggga

SEQ ID NO: 1647383 - RNA, 19 nt, Artificial Sequence
  Description of Artificial Sequence: Synthetic oligonucleotide
agggucggcacagaaggug

SEQ ID NO: 1647384 - RNA, 19 nt, Artificial Sequence
  Description of Artificial Sequence: Synthetic oligonucleotide
ggcugugcacaucaugggc

SEQ ID NO: 1647385 - RNA, 19 nt, Artificial Sequence
  Description of Artificial Sequence: Synthetic oligonucleotide
ccaaaacggggcuuccugg

SEQ ID NO: 1647386 - RNA, 19 nt, Artificial Sequence
  Description of Artificial Sequence: Synthetic oligonucleotide
gcugauguaguuugugcuc

SEQ ID NO: 1647387 - RNA, 19 nt, Artificial Sequence
  Description of Artificial Sequence: Synthetic oligonucleotide
acugccugucacaugggug

SEQ ID NO: 1647388 - RNA, 19 nt, Artificial Sequence
  Description of Artificial Sequence: Synthetic oligonucleotide
ugcucuuuugcaggacaca

SEQ ID NO: 1647389 - RNA, 19 nt, Artificial Sequence
  Description of Artificial Sequence: Synthetic oligonucleotide
cuuugcgacagcuucugcu

SEQ ID NO: 1647390 - RNA, 19 nt, Artificial Sequence
  Description of Artificial Sequence: Synthetic oligonucleotide
guguccuaaaccagucccc

SEQ ID NO: 1647391 - RNA, 19 nt, Artificial Sequence
  Description of Artificial Sequence: Synthetic oligonucleotide
uggggcauggcaugaucuc

SEQ ID NO: 1647392 - RNA, 19 nt, Artificial Sequence
  Description of Artificial Sequence: Synthetic oligonucleotide
ggguaaugauagaaggggc

SEQ ID NO: 1647393 - RNA, 19 nt, Artificial Sequence
  Description of Artificial Sequence: Synthetic oligonucleotide
uugugcccagcuguuggag

SEQ ID NO: 1647394 - RNA, 19 nt, Artificial Sequence
  Description of Artificial Sequence: Synthetic oligonucleotide
aaguccuuaggcaggcuuu

SEQ ID NO: 1647395 - RNA, 19 nt, Artificial Sequence
  Description of Artificial Sequence: Synthetic oligonucleotide
ugauguaguuugugcucuc

SEQ ID NO: 1647396 - RNA, 19 nt, Artificial Sequence
  Description of Artificial Sequence: Synthetic oligonucleotide
gacugugggguaaaggcua

SEQ ID NO: 1647397 - RNA, 19 nt, Artificial Sequence
  Description of Artificial Sequence: Synthetic oligonucleotide
ucccucuugugcccagcug

SEQ ID NO: 1647398 - RNA, 19 nt, Artificial Sequence
  Description of Artificial Sequence: Synthetic oligonucleotide
gcucuggucaaugaccuug

SEQ ID NO: 1647399 - RNA, 19 nt, Artificial Sequence
  Description of Artificial Sequence: Synthetic oligonucleotide
caggagagaacaggggcac

SEQ ID NO: 1647400 - RNA, 19 nt, Artificial Sequence
  Description of Artificial Sequence: Synthetic oligonucleotide
guagcuucacugagguuac

SEQ ID NO: 1647401 - RNA, 19 nt, Artificial Sequence
  Description of Artificial Sequence: Synthetic oligonucleotide
cucuuuugcaggacacaca

SEQ ID NO: 1647402 - RNA, 19 nt, Artificial Sequence
  Description of Artificial Sequence: Synthetic oligonucleotide
ugggauccuguucuugcuu

SEQ ID NO: 1647403 - RNA, 19 nt, Artificial Sequence
  Description of Artificial Sequence: Synthetic oligonucleotide
ggaccacaaacaguccugg

SEQ ID NO: 1647404 - RNA, 19 nt, Artificial Sequence
  Description of Artificial Sequence: Synthetic oligonucleotide
uacagggacccugcuggcc

SEQ ID NO: 1647405 - RNA, 19 nt, Artificial Sequence
  Description of Artificial Sequence: Synthetic oligonucleotide
ucggccccaaguagcuuca

SEQ ID NO: 1647406 - RNA, 19 nt, Artificial Sequence
  Description of Artificial Sequence: Synthetic oligonucleotide
ucaccuccugagagcaggu

SEQ ID NO: 1647407 - RNA, 19 nt, Artificial Sequence
  Description of Artificial Sequence: Synthetic oligonucleotide
gacgccaagguuguagucu

SEQ ID NO: 1647408 - RNA, 19 nt, Artificial Sequence
  Description of Artificial Sequence: Synthetic oligonucleotide
uggacccgaagcacauccu

SEQ ID NO: 1647409 - RNA, 19 nt, Artificial Sequence
  Description of Artificial Sequence: Synthetic oligonucleotide
uaaccaucucagacaucuc

SEQ ID NO: 1647410 - RNA, 19 nt, Artificial Sequence
  Description of Artificial Sequence: Synthetic oligonucleotide
ugagagcguugcuucucac

SEQ ID NO: 1647411 - RNA, 19 nt, Artificial Sequence
  Description of Artificial Sequence: Synthetic oligonucleotide
cucacucaggcagggucgg

SEQ ID NO: 1647412 - RNA, 19 nt, Artificial Sequence
  Description of Artificial Sequence: Synthetic oligonucleotide
auggggcauggcaugaucu

SEQ ID NO: 1647413 - RNA, 19 nt, Artificial Sequence
  Description of Artificial Sequence: Synthetic oligonucleotide
ggcacucggccccaaguag

SEQ ID NO: 1647414 - RNA, 19 nt, Artificial Sequence
  Description of Artificial Sequence: Synthetic oligonucleotide
caaggcuggagugugcaca

SEQ ID NO: 1647415 - RNA, 19 nt, Artificial Sequence
  Description of Artificial Sequence: Synthetic oligonucleotide
uucugcucaugggacgcca

SEQ ID NO: 1647416 - RNA, 19 nt, Artificial Sequence
  Description of Artificial Sequence: Synthetic oligonucleotide
cuggcugaccccacacuuc

SEQ ID NO: 1647417 - RNA, 19 nt, Artificial Sequence
  Description of Artificial Sequence: Synthetic oligonucleotide
augcuaucaacaagacacu

SEQ ID NO: 1647418 - RNA, 19 nt, Artificial Sequence
  Description of Artificial Sequence: Synthetic oligonucleotide
uagccuagccuauggcuuu

SEQ ID NO: 1647419 - RNA, 19 nt, Artificial Sequence
  Description of Artificial Sequence: Synthetic oligonucleotide
cagcauggggcauggcaug

SEQ ID NO: 1647420 - RNA, 19 nt, Artificial Sequence
  Description of Artificial Sequence: Synthetic oligonucleotide
ugauaggaucuaggaacuc

SEQ ID NO: 1647421 - RNA, 19 nt, Artificial Sequence
  Description of Artificial Sequence: Synthetic oligonucleotide
cacaggcuccuuuguggag

SEQ ID NO: 1647422 - RNA, 19 nt, Artificial Sequence
  Description of Artificial Sequence: Synthetic oligonucleotide
ccuuuguggaguaggaaga

SEQ ID NO: 1647423 - RNA, 19 nt, Artificial Sequence
  Description of Artificial Sequence: Synthetic oligonucleotide
gaauagggacgucuucccu

SEQ ID NO: 1647424 - RNA, 19 nt, Artificial Sequence
  Description of Artificial Sequence: Synthetic oligonucleotide
uggaagcacugcucccucu

SEQ ID NO: 1647425 - RNA, 19 nt, Artificial Sequence
  Description of Artificial Sequence: Synthetic oligonucleotide
cuuccaaaacggggcuucc

SEQ ID NO: 1647426 - RNA, 19 nt, Artificial Sequence
  Description of Artificial Sequence: Synthetic oligonucleotide
gcucuuuugcaggacacac

SEQ ID NO: 1647427 - RNA, 19 nt, Artificial Sequence
  Description of Artificial Sequence: Synthetic oligonucleotide
gggucggcacagaaggugg

SEQ ID NO: 1647428 - RNA, 19 nt, Artificial Sequence
  Description of Artificial Sequence: Synthetic oligonucleotide
gugcacaucaugggcugag

SEQ ID NO: 1647429 - RNA, 19 nt, Artificial Sequence
  Description of Artificial Sequence: Synthetic oligonucleotide
cuccuguaagauacaggga

SEQ ID NO: 1647430 - RNA, 19 nt, Artificial Sequence
  Description of Artificial Sequence: Synthetic oligonucleotide
gagagcguugcuucucacu

SEQ ID NO: 1647431 - RNA, 19 nt, Artificial Sequence
  Description of Artificial Sequence: Synthetic oligonucleotide
ggagaauagggacgucuuc

SEQ ID NO: 1647432 - RNA, 19 nt, Artificial Sequence
  Description of Artificial Sequence: Synthetic oligonucleotide
ugcacaucaugggcugaga

SEQ ID NO: 1647433 - RNA, 19 nt, Artificial Sequence
  Description of Artificial Sequence: Synthetic oligonucleotide
gcuuuaugcaagagaugcc

SEQ ID NO: 1647434 - RNA, 19 nt, Artificial Sequence
  Description of Artificial Sequence: Synthetic oligonucleotide
gggauccuguucuugcuuc

SEQ ID NO: 1647435 - RNA, 19 nt, Artificial Sequence
  Description of Artificial Sequence: Synthetic oligonucleotide
ugcgacagcuucugcucau

SEQ ID NO: 1647436 - RNA, 19 nt, Artificial Sequence
  Description of Artificial Sequence: Synthetic oligonucleotide
gggaguggcaagguagacc

SEQ ID NO: 1647437 - RNA, 19 nt, Artificial Sequence
  Description of Artificial Sequence: Synthetic oligonucleotide
cugucacaugggugauucc

SEQ ID NO: 1647438 - RNA, 19 nt, Artificial Sequence
  Description of Artificial Sequence: Synthetic oligonucleotide
uucccuagccuagccuaug

SEQ ID NO: 1647439 - RNA, 19 nt, Artificial Sequence
  Description of Artificial Sequence: Synthetic oligonucleotide
uuccaaucuugaggugggc

SEQ ID NO: 1647440 - RNA, 19 nt, Artificial Sequence
  Description of Artificial Sequence: Synthetic oligonucleotide
guugaggcugggcacucaa

SEQ ID NO: 1647441 - RNA, 19 nt, Artificial Sequence
  Description of Artificial Sequence: Synthetic oligonucleotide
cugagagcguugcuucuca

SEQ ID NO: 1647442 - RNA, 19 nt, Artificial Sequence
  Description of Artificial Sequence: Synthetic oligonucleotide
cguggcuaagggaaagagc

SEQ ID NO: 1647443 - RNA, 19 nt, Artificial Sequence
  Description of Artificial Sequence: Synthetic oligonucleotide
cuugugcccagcuguugga

SEQ ID NO: 1647444 - RNA, 19 nt, Artificial Sequence
  Description of Artificial Sequence: Synthetic oligonucleotide
gggugauaggaucuaggaa

SEQ ID NO: 1647445 - RNA, 19 nt, Artificial Sequence
  Description of Artificial Sequence: Synthetic oligonucleotide
uaagcaggagugggguguc

SEQ ID NO: 1647446 - RNA, 19 nt, Artificial Sequence
  Description of Artificial Sequence: Synthetic oligonucleotide
ccgaagcacauccuggcug

SEQ ID NO: 1647447 - RNA, 19 nt, Artificial Sequence
  Description of Artificial Sequence: Synthetic oligonucleotide
ccugucacaugggugauuc

SEQ ID NO: 1647448 - RNA, 19 nt, Artificial Sequence
  Description of Artificial Sequence: Synthetic oligonucleotide
aucuccagggugauaggau

SEQ ID NO: 1647449 - RNA, 19 nt, Artificial Sequence
  Description of Artificial Sequence: Synthetic oligonucleotide
cuggaagcacugcucccuc

SEQ ID NO: 1647450 - RNA, 19 nt, Artificial Sequence
  Description of Artificial Sequence: Synthetic oligonucleotide
cuagccuagccuauggcuu

SEQ ID NO: 1647451 - RNA, 19 nt, Artificial Sequence
  Description of Artificial Sequence: Synthetic oligonucleotide
ggguguccuaaaccagucc

SEQ ID NO: 1647452 - RNA, 19 nt, Artificial Sequence
  Description of Artificial Sequence: Synthetic oligonucleotide
cguaacacaccaugaggug

SEQ ID NO: 1647453 - RNA, 19 nt, Artificial Sequence
  Description of Artificial Sequence: Synthetic oligonucleotide
gucggcacagaagguggcc

SEQ ID NO: 1647454 - RNA, 19 nt, Artificial Sequence
  Description of Artificial Sequence: Synthetic oligonucleotide
aggagugggguguccuaaa

SEQ ID NO: 1647455 - RNA, 19 nt, Artificial Sequence
  Description of Artificial Sequence: Synthetic oligonucleotide
gggagugcuucugaacagc

SEQ ID NO: 1647456 - RNA, 19 nt, Artificial Sequence
  Description of Artificial Sequence: Synthetic oligonucleotide
cuggucaaugaccuugccu

SEQ ID NO: 1647457 - RNA, 19 nt, Artificial Sequence
  Description of Artificial Sequence: Synthetic oligonucleotide
acgcuuuaugcaagagaug

SEQ ID NO: 1647458 - RNA, 19 nt, Artificial Sequence
  Description of Artificial Sequence: Synthetic oligonucleotide
ggagugugcacacccaagu

SEQ ID NO: 1647459 - RNA, 19 nt, Artificial Sequence
  Description of Artificial Sequence: Synthetic oligonucleotide
ggagugggguguccuaaac

SEQ ID NO: 1647460 - RNA, 19 nt, Artificial Sequence
  Description of Artificial Sequence: Synthetic oligonucleotide
ccccguaacacaccaugag

SEQ ID NO: 1647461 - RNA, 19 nt, Artificial Sequence
  Description of Artificial Sequence: Synthetic oligonucleotide
caauccgggccuucaggga

SEQ ID NO: 1647462 - RNA, 19 nt, Artificial Sequence
  Description of Artificial Sequence: Synthetic oligonucleotide
caucaggggagugcuucug

SEQ ID NO: 1647463 - RNA, 19 nt, Artificial Sequence
  Description of Artificial Sequence: Synthetic oligonucleotide
caaaacggggcuuccuggu

SEQ ID NO: 1647464 - RNA, 19 nt, Artificial Sequence
  Description of Artificial Sequence: Synthetic oligonucleotide
caguccccguaacacacca

SEQ ID NO: 1647465 - RNA, 19 nt, Artificial Sequence
  Description of Artificial Sequence: Synthetic oligonucleotide
cugauguaguuugugcucu

SEQ ID NO: 1647466 - RNA, 19 nt, Artificial Sequence
  Description of Artificial Sequence: Synthetic oligonucleotide
ccuuaggcaggcuuucuga

SEQ ID NO: 1647467 - RNA, 19 nt, Artificial Sequence
  Description of Artificial Sequence: Synthetic oligonucleotide
ggucaaugaccuugccuga

SEQ ID NO: 1647468 - RNA, 19 nt, Artificial Sequence
  Description of Artificial Sequence: Synthetic oligonucleotide
cuuaggcaggcuuucugau

SEQ ID NO: 1647469 - RNA, 19 nt, Artificial Sequence
  Description of Artificial Sequence: Synthetic oligonucleotide
gcguggcuaagggaaagag

SEQ ID NO: 1647470 - RNA, 19 nt, Artificial Sequence
  Description of Artificial Sequence: Synthetic oligonucleotide
ccguaacacaccaugaggu

SEQ ID NO: 1647471 - RNA, 19 nt, Artificial Sequence
  Description of Artificial Sequence: Synthetic oligonucleotide
acaguccugggaugcccau

SEQ ID NO: 1647472 - RNA, 19 nt, Artificial Sequence
  Description of Artificial Sequence: Synthetic oligonucleotide
cucuugugcccagcuguug

SEQ ID NO: 1647473 - RNA, 19 nt, Artificial Sequence
  Description of Artificial Sequence: Synthetic oligonucleotide
cagccagaaacagagugcu

SEQ ID NO: 1647474 - RNA, 19 nt, Artificial Sequence
  Description of Artificial Sequence: Synthetic oligonucleotide
gcugaccccacacuucuaa

SEQ ID NO: 1647475 - RNA, 19 nt, Artificial Sequence
  Description of Artificial Sequence: Synthetic oligonucleotide
guuguagucugagcugugu

SEQ ID NO: 1647476 - RNA, 19 nt, Artificial Sequence
  Description of Artificial Sequence: Synthetic oligonucleotide
ggcuuucugaugcuaucaa

SEQ ID NO: 1647477 - RNA, 19 nt, Artificial Sequence
  Description of Artificial Sequence: Synthetic oligonucleotide
gacacacacucuggaccac

SEQ ID NO: 1647478 - RNA, 19 nt, Artificial Sequence
  Description of Artificial Sequence: Synthetic oligonucleotide
cuccagggugauaggaucu

SEQ ID NO: 1647479 - RNA, 19 nt, Artificial Sequence
  Description of Artificial Sequence: Synthetic oligonucleotide
aggugggccgcguggcuaa

SEQ ID NO: 1647480 - RNA, 19 nt, Artificial Sequence
  Description of Artificial Sequence: Synthetic oligonucleotide
gccccuuuauuccagaguu

SEQ ID NO: 1647481 - RNA, 19 nt, Artificial Sequence
  Description of Artificial Sequence: Synthetic oligonucleotide
gcuucacugagguuacacu

SEQ ID NO: 1647482 - RNA, 19 nt, Artificial Sequence
  Description of Artificial Sequence: Synthetic oligonucleotide
cacucaggcagggucggca

SEQ ID NO: 1647483 - RNA, 19 nt, Artificial Sequence
  Description of Artificial Sequence: Synthetic oligonucleotide
cugaccccacacuucuaaa

SEQ ID NO: 1647484 - RNA, 19 nt, Artificial Sequence
  Description of Artificial Sequence: Synthetic oligonucleotide
auccgggccuucagggaag

SEQ ID NO: 1647485 - RNA, 19 nt, Artificial Sequence
  Description of Artificial Sequence: Synthetic oligonucleotide
ucacucaggcagggucggc

SEQ ID NO: 1647486 - RNA, 19 nt, Artificial Sequence
  Description of Artificial Sequence: Synthetic oligonucleotide
acugugggguaaaggcuaa

SEQ ID NO: 1647487 - RNA, 19 nt, Artificial Sequence
  Description of Artificial Sequence: Synthetic oligonucleotide
gauccuguucuugcuuccu

SEQ ID NO: 1647488 - RNA, 19 nt, Artificial Sequence
  Description of Artificial Sequence: Synthetic oligonucleotide
gucuucccuagccuagccu

SEQ ID NO: 1647489 - RNA, 19 nt, Artificial Sequence
  Description of Artificial Sequence: Synthetic oligonucleotide
agccagaaacagagugcug

SEQ ID NO: 1647490 - RNA, 19 nt, Artificial Sequence
  Description of Artificial Sequence: Synthetic oligonucleotide
cauugcugauguaguuugu

SEQ ID NO: 1647491 - RNA, 19 nt, Artificial Sequence
  Description of Artificial Sequence: Synthetic oligonucleotide
ggacgucuucccuagccua

SEQ ID NO: 1647492 - RNA, 19 nt, Artificial Sequence
  Description of Artificial Sequence: Synthetic oligonucleotide
gguuguagucugagcugug

SEQ ID NO: 1647493 - RNA, 19 nt, Artificial Sequence
  Description of Artificial Sequence: Synthetic oligonucleotide
ccuagccuagccuauggcu

SEQ ID NO: 1647494 - RNA, 19 nt, Artificial Sequence
  Description of Artificial Sequence: Synthetic oligonucleotide
ccccuuuauuccagaguug

SEQ ID NO: 1647495 - RNA, 19 nt, Artificial Sequence
  Description of Artificial Sequence: Synthetic oligonucleotide
acacaccaugaggugcuaa

SEQ ID NO: 1647496 - RNA, 19 nt, Artificial Sequence
  Description of Artificial Sequence: Synthetic oligonucleotide
cccuagccuagccuauggc

SEQ ID NO: 1647497 - RNA, 19 nt, Artificial Sequence
  Description of Artificial Sequence: Synthetic oligonucleotide
gcuaucaacaagacacuau

SEQ ID NO: 1647498 - RNA, 19 nt, Artificial Sequence
  Description of Artificial Sequence: Synthetic oligonucleotide
cauggagccaaggguggaa

SEQ ID NO: 1647499 - RNA, 19 nt, Artificial Sequence
  Description of Artificial Sequence: Synthetic oligonucleotide
ggacgccaagguuguaguc

SEQ ID NO: 1647500 - RNA, 19 nt, Artificial Sequence
  Description of Artificial Sequence: Synthetic oligonucleotide
cugugggguaaaggcuaac

SEQ ID NO: 1647501 - RNA, 19 nt, Artificial Sequence
  Description of Artificial Sequence: Synthetic oligonucleotide
ggccgcguggcuaagggaa

SEQ ID NO: 1647502 - RNA, 19 nt, Artificial Sequence
  Description of Artificial Sequence: Synthetic oligonucleotide
ccaguccccguaacacacc

SEQ ID NO: 1647503 - RNA, 19 nt, Artificial Sequence
  Description of Artificial Sequence: Synthetic oligonucleotide
cuccuuuguggaguaggaa

SEQ ID NO: 1647504 - RNA, 19 nt, Artificial Sequence
  Description of Artificial Sequence: Synthetic oligonucleotide
gcuccuuuguggaguagga

SEQ ID NO: 1647505 - RNA, 19 nt, Artificial Sequence
  Description of Artificial Sequence: Synthetic oligonucleotide
gggguguccuaaaccaguc

SEQ ID NO: 1647506 - RNA, 19 nt, Artificial Sequence
  Description of Artificial Sequence: Synthetic oligonucleotide
gugggccgcguggcuaagg

SEQ ID NO: 1647507 - RNA, 19 nt, Artificial Sequence
  Description of Artificial Sequence: Synthetic oligonucleotide
gcaaggcuggagugugcac

SEQ ID NO: 1647508 - RNA, 19 nt, Artificial Sequence
  Description of Artificial Sequence: Synthetic oligonucleotide
gcugagagcguugcuucuc

SEQ ID NO: 1647509 - RNA, 19 nt, Artificial Sequence
  Description of Artificial Sequence: Synthetic oligonucleotide
ccagggugauaggaucuag

SEQ ID NO: 1647510 - RNA, 19 nt, Artificial Sequence
  Description of Artificial Sequence: Synthetic oligonucleotide
caugggugauuccaaucuu

SEQ ID NO: 1647511 - RNA, 19 nt, Artificial Sequence
  Description of Artificial Sequence: Synthetic oligonucleotide
ggucggcacagaagguggc

SEQ ID NO: 1647512 - RNA, 19 nt, Artificial Sequence
  Description of Artificial Sequence: Synthetic oligonucleotide
ggacugugggguaaaggcu

SEQ ID NO: 1647513 - RNA, 19 nt, Artificial Sequence
  Description of Artificial Sequence: Synthetic oligonucleotide
gggacgccaagguuguagu

SEQ ID NO: 1647514 - RNA, 19 nt, Artificial Sequence
  Description of Artificial Sequence: Synthetic oligonucleotide
gggacgucuucccuagccu

SEQ ID NO: 1647515 - RNA, 19 nt, Artificial Sequence
  Description of Artificial Sequence: Synthetic oligonucleotide
ccuaaaccaguccccguaa

SEQ ID NO: 1647516 - RNA, 19 nt, Artificial Sequence
  Description of Artificial Sequence: Synthetic oligonucleotide
aggcuccuuuguggaguag

SEQ ID NO: 1647517 - RNA, 19 nt, Artificial Sequence
  Description of Artificial Sequence: Synthetic oligonucleotide
cuucccuagccuagccuau

SEQ ID NO: 1647518 - RNA, 19 nt, Artificial Sequence
  Description of Artificial Sequence: Synthetic oligonucleotide
ggagugcuucugaacagcu

SEQ ID NO: 1647519 - RNA, 19 nt, Artificial Sequence
  Description of Artificial Sequence: Synthetic oligonucleotide
cugguugaggcugggcacu

SEQ ID NO: 1647520 - RNA, 19 nt, Artificial Sequence
  Description of Artificial Sequence: Synthetic oligonucleotide
gccgggcagugaaggaagg

SEQ ID NO: 1647521 - RNA, 19 nt, Artificial Sequence
  Description of Artificial Sequence: Synthetic oligonucleotide
gcuggcugaccccacacuu

SEQ ID NO: 1647522 - RNA, 19 nt, Artificial Sequence
  Description of Artificial Sequence: Synthetic oligonucleotide
cgucuucccuagccuagcc

SEQ ID NO: 1647523 - RNA, 19 nt, Artificial Sequence
  Description of Artificial Sequence: Synthetic oligonucleotide
caucaugggcugagagcgu

SEQ ID NO: 1647524 - RNA, 19 nt, Artificial Sequence
  Description of Artificial Sequence: Synthetic oligonucleotide
gccuaagcaggaguggggu

SEQ ID NO: 1647525 - RNA, 19 nt, Artificial Sequence
  Description of Artificial Sequence: Synthetic oligonucleotide
aguccccguaacacaccau

SEQ ID NO: 1647526 - RNA, 19 nt, Artificial Sequence
  Description of Artificial Sequence: Synthetic oligonucleotide
agccuagccuauggcuuua

SEQ ID NO: 1647527 - RNA, 19 nt, Artificial Sequence
  Description of Artificial Sequence: Synthetic oligonucleotide
gcacaucauuaaccaucuc

SEQ ID NO: 1647528 - RNA, 19 nt, Artificial Sequence
  Description of Artificial Sequence: Synthetic oligonucleotide
acggggcuuccugguugag

SEQ ID NO: 1647529 - RNA, 19 nt, Artificial Sequence
  Description of Artificial Sequence: Synthetic oligonucleotide
cucccucuugugcccagcu

SEQ ID NO: 1647530 - RNA, 19 nt, Artificial Sequence
  Description of Artificial Sequence: Synthetic oligonucleotide
cuaagggaaagagccccuu

SEQ ID NO: 1647531 - RNA, 19 nt, Artificial Sequence
  Description of Artificial Sequence: Synthetic oligonucleotide
gcuggcccucagauugacc

SEQ ID NO: 1647532 - RNA, 19 nt, Artificial Sequence
  Description of Artificial Sequence: Synthetic oligonucleotide
gcaucaggggagugcuucu

SEQ ID NO: 1647533 - RNA, 19 nt, Artificial Sequence
  Description of Artificial Sequence: Synthetic oligonucleotide
gccauugcugauguaguuu

SEQ ID NO: 1647534 - RNA, 19 nt, Artificial Sequence
  Description of Artificial Sequence: Synthetic oligonucleotide
ggaguaggaaauggucaau

SEQ ID NO: 1647535 - RNA, 19 nt, Artificial Sequence
  Description of Artificial Sequence: Synthetic oligonucleotide
gggagaauagggacgucuu

SEQ ID NO: 1647536 - RNA, 19 nt, Artificial Sequence
  Description of Artificial Sequence: Synthetic oligonucleotide
gggccauugcugauguagu

SEQ ID NO: 1647537 - RNA, 19 nt, Artificial Sequence
  Description of Artificial Sequence: Synthetic oligonucleotide
ggccauugcugauguaguu

SEQ ID NO: 1647538 - RNA, 19 nt, Artificial Sequence
  Description of Artificial Sequence: Synthetic oligonucleotide
cagggucggcacagaaggu

SEQ ID NO: 1647539 - RNA, 19 nt, Artificial Sequence
  Description of Artificial Sequence: Synthetic oligonucleotide
ggugggacugugggguaaa

SEQ ID NO: 1647540 - RNA, 19 nt, Artificial Sequence
  Description of Artificial Sequence: Synthetic oligonucleotide
gcuaagggaaagagccccu

SEQ ID NO: 1647541 - RNA, 19 nt, Artificial Sequence
  Description of Artificial Sequence: Synthetic oligonucleotide
ccgcguggcuaagggaaag

SEQ ID NO: 1647542 - RNA, 19 nt, Artificial Sequence
  Description of Artificial Sequence: Synthetic oligonucleotide
ggccccaaguagcuucacu

SEQ ID NO: 1647543 - RNA, 19 nt, Artificial Sequence
  Description of Artificial Sequence: Synthetic oligonucleotide
guccuuaggcaggcuuucu

SEQ ID NO: 1647544 - RNA, 19 nt, Artificial Sequence
  Description of Artificial Sequence: Synthetic oligonucleotide
aggggccauugcugaugua

SEQ ID NO: 1647545 - RNA, 19 nt, Artificial Sequence
  Description of Artificial Sequence: Synthetic oligonucleotide
gguggaagucaaggcaauu

SEQ ID NO: 1647546 - RNA, 19 nt, Artificial Sequence
  Description of Artificial Sequence: Synthetic oligonucleotide
ggugggccgcguggcuaag

SEQ ID NO: 1647547 - RNA, 19 nt, Artificial Sequence
  Description of Artificial Sequence: Synthetic oligonucleotide
acugggcacucggccccaa

SEQ ID NO: 1647548 - RNA, 19 nt, Artificial Sequence
  Description of Artificial Sequence: Synthetic oligonucleotide
cacugggcacucggcccca

SEQ ID NO: 1647549 - RNA, 19 nt, Artificial Sequence
  Description of Artificial Sequence: Synthetic oligonucleotide
ggguggaagucaaggcaau

SEQ ID NO: 1647550 - RNA, 19 nt, Artificial Sequence
  Description of Artificial Sequence: Synthetic oligonucleotide
cccacacuucuaaacgcuu

SEQ ID NO: 1647551 - RNA, 19 nt, Artificial Sequence
  Description of Artificial Sequence: Synthetic oligonucleotide
gccgcguggcuaagggaaa

SEQ ID NO: 1647552 - RNA, 19 nt, Artificial Sequence
  Description of Artificial Sequence: Synthetic oligonucleotide
cgcguggcuaagggaaaga

SEQ ID NO: 1647553 - RNA, 19 nt, Artificial Sequence
  Description of Artificial Sequence: Synthetic oligonucleotide
ggcugaccccacacuucua

SEQ ID NO: 1647554 - RNA, 19 nt, Artificial Sequence
  Description of Artificial Sequence: Synthetic oligonucleotide
gcauggggcauggcaugau

SEQ ID NO: 1647555 - RNA, 19 nt, Artificial Sequence
  Description of Artificial Sequence: Synthetic oligonucleotide
gccuagccuauggcuuuau

SEQ ID NO: 1647556 - RNA, 19 nt, Artificial Sequence
  Description of Artificial Sequence: Synthetic oligonucleotide
cggccccaaguagcuucac

SEQ ID NO: 1647557 - RNA, 19 nt, Artificial Sequence
  Description of Artificial Sequence: Synthetic oligonucleotide
ccgggccuucagggaagga

SEQ ID NO: 1647558 - RNA, 19 nt, Artificial Sequence
  Description of Artificial Sequence: Synthetic oligonucleotide
aagaaguaaacucuggugc

SEQ ID NO: 1647559 - RNA, 19 nt, Artificial Sequence
  Description of Artificial Sequence: Synthetic oligonucleotide
agaacaaugacaucaagac

SEQ ID NO: 1647560 - RNA, 19 nt, Artificial Sequence
  Description of Artificial Sequence: Synthetic oligonucleotide
aaaacaucgagauggauca

SEQ ID NO: 1647561 - RNA, 19 nt, Artificial Sequence
  Description of Artificial Sequence: Synthetic oligonucleotide
ucaaguauucgguaggugg

SEQ ID NO: 1647562 - RNA, 19 nt, Artificial Sequence
  Description of Artificial Sequence: Synthetic oligonucleotide
guaacuuugaucuucauca

SEQ ID NO: 1647563 - RNA, 19 nt, Artificial Sequence
  Description of Artificial Sequence: Synthetic oligonucleotide
aucgagauggaucauauuc

SEQ ID NO: 1647564 - RNA, 19 nt, Artificial Sequence
  Description of Artificial Sequence: Synthetic oligonucleotide
aaaguaauuguuccuaggu

SEQ ID NO: 1647565 - RNA, 19 nt, Artificial Sequence
  Description of Artificial Sequence: Synthetic oligonucleotide
aaaggcaaaacaucgagau

SEQ ID NO: 1647566 - RNA, 19 nt, Artificial Sequence
  Description of Artificial Sequence: Synthetic oligonucleotide
uaagguuugaguuccuugg

SEQ ID NO: 1647567 - RNA, 19 nt, Artificial Sequence
  Description of Artificial Sequence: Synthetic oligonucleotide
acagaucaugaacaaaggc

SEQ ID NO: 1647568 - RNA, 19 nt, Artificial Sequence
  Description of Artificial Sequence: Synthetic oligonucleotide
ucucgaagaagcauuaccc

SEQ ID NO: 1647569 - RNA, 19 nt, Artificial Sequence
  Description of Artificial Sequence: Synthetic oligonucleotide
ucaugaauuuuguagaagu

SEQ ID NO: 1647570 - RNA, 19 nt, Artificial Sequence
  Description of Artificial Sequence: Synthetic oligonucleotide
aucaagacuguccuugggc

SEQ ID NO: 1647571 - RNA, 19 nt, Artificial Sequence
  Description of Artificial Sequence: Synthetic oligonucleotide
acaagaaugcccaugcggc

SEQ ID NO: 1647572 - RNA, 19 nt, Artificial Sequence
  Description of Artificial Sequence: Synthetic oligonucleotide
auugcuaggugacugagcu

SEQ ID NO: 1647573 - RNA, 19 nt, Artificial Sequence
  Description of Artificial Sequence: Synthetic oligonucleotide
ucaacaugcugcuauuugc

SEQ ID NO: 1647574 - RNA, 19 nt, Artificial Sequence
  Description of Artificial Sequence: Synthetic oligonucleotide
gaagcauuaccccuccggg

SEQ ID NO: 1647575 - RNA, 19 nt, Artificial Sequence
  Description of Artificial Sequence: Synthetic oligonucleotide
uggauucccagacugaugu

SEQ ID NO: 1647576 - RNA, 19 nt, Artificial Sequence
  Description of Artificial Sequence: Synthetic oligonucleotide
uuugccucgguucaccugc

SEQ ID NO: 1647577 - RNA, 19 nt, Artificial Sequence
  Description of Artificial Sequence: Synthetic oligonucleotide
ugagccaugucauaucggc

SEQ ID NO: 1647578 - RNA, 19 nt, Artificial Sequence
  Description of Artificial Sequence: Synthetic oligonucleotide
agaagcauuaccccuccgg

SEQ ID NO: 1647579 - RNA, 19 nt, Artificial Sequence
  Description of Artificial Sequence: Synthetic oligonucleotide
uucugaauuugucuugacc

SEQ ID NO: 1647580 - RNA, 19 nt, Artificial Sequence
  Description of Artificial Sequence: Synthetic oligonucleotide
aaccucaaguauucgguag

SEQ ID NO: 1647581 - RNA, 19 nt, Artificial Sequence
  Description of Artificial Sequence: Synthetic oligonucleotide
uguuuccuacaccacaacc

SEQ ID NO: 1647582 - RNA, 19 nt, Artificial Sequence
  Description of Artificial Sequence: Synthetic oligonucleotide
aguaauuguuccuagguua

SEQ ID NO: 1647583 - RNA, 19 nt, Artificial Sequence
  Description of Artificial Sequence: Synthetic oligonucleotide
aaauucaucaccacaaauu

SEQ ID NO: 1647584 - RNA, 19 nt, Artificial Sequence
  Description of Artificial Sequence: Synthetic oligonucleotide
aaucaacuugcuucuccgg

SEQ ID NO: 1647585 - RNA, 19 nt, Artificial Sequence
  Description of Artificial Sequence: Synthetic oligonucleotide
ugggauuguggcuaggugc

SEQ ID NO: 1647586 - RNA, 19 nt, Artificial Sequence
  Description of Artificial Sequence: Synthetic oligonucleotide
uguuccuagguuaagguuu

SEQ ID NO: 1647587 - RNA, 19 nt, Artificial Sequence
  Description of Artificial Sequence: Synthetic oligonucleotide
uuaagguuugaguuccuug

SEQ ID NO: 1647588 - RNA, 19 nt, Artificial Sequence
  Description of Artificial Sequence: Synthetic oligonucleotide
aucaacuugcuucuccggg

SEQ ID NO: 1647589 - RNA, 19 nt, Artificial Sequence
  Description of Artificial Sequence: Synthetic oligonucleotide
cacaagaaugcccaugcgg

SEQ ID NO: 1647590 - RNA, 19 nt, Artificial Sequence
  Description of Artificial Sequence: Synthetic oligonucleotide
aaacgaagagguuuggguu

SEQ ID NO: 1647591 - RNA, 19 nt, Artificial Sequence
  Description of Artificial Sequence: Synthetic oligonucleotide
acucuccagggguaaaucc

SEQ ID NO: 1647592 - RNA, 19 nt, Artificial Sequence
  Description of Artificial Sequence: Synthetic oligonucleotide
ugggugaagaaguaaacuc

SEQ ID NO: 1647593 - RNA, 19 nt, Artificial Sequence
  Description of Artificial Sequence: Synthetic oligonucleotide
uugcugaaagaacaaauau

SEQ ID NO: 1647594 - RNA, 19 nt, Artificial Sequence
  Description of Artificial Sequence: Synthetic oligonucleotide
uuugugggcguucacuuca

SEQ ID NO: 1647595 - RNA, 19 nt, Artificial Sequence
  Description of Artificial Sequence: Synthetic oligonucleotide
ugcacuuuccucuccgccg

SEQ ID NO: 1647596 - RNA, 19 nt, Artificial Sequence
  Description of Artificial Sequence: Synthetic oligonucleotide
ucgagauggaucauauucu

SEQ ID NO: 1647597 - RNA, 19 nt, Artificial Sequence
  Description of Artificial Sequence: Synthetic oligonucleotide
agauggaucauauucugaa

SEQ ID NO: 1647598 - RNA, 19 nt, Artificial Sequence
  Description of Artificial Sequence: Synthetic oligonucleotide
aucacaacaguaaacgaag

SEQ ID NO: 1647599 - RNA, 19 nt, Artificial Sequence
  Description of Artificial Sequence: Synthetic oligonucleotide
cuguugucaagccaggccc

SEQ ID NO: 1647600 - RNA, 19 nt, Artificial Sequence
  Description of Artificial Sequence: Synthetic oligonucleotide
gacaucaagacuguccuug

SEQ ID NO: 1647601 - RNA, 19 nt, Artificial Sequence
  Description of Artificial Sequence: Synthetic oligonucleotide
caaguauucgguagguggc

SEQ ID NO: 1647602 - RNA, 19 nt, Artificial Sequence
  Description of Artificial Sequence: Synthetic oligonucleotide
ucggccauagucucgaaga

SEQ ID NO: 1647603 - RNA, 19 nt, Artificial Sequence
  Description of Artificial Sequence: Synthetic oligonucleotide
uuuuaaaccgaagcugagc

SEQ ID NO: 1647604 - RNA, 19 nt, Artificial Sequence
  Description of Artificial Sequence: Synthetic oligonucleotide
uccuuggauucccagacug

SEQ ID NO: 1647605 - RNA, 19 nt, Artificial Sequence
  Description of Artificial Sequence: Synthetic oligonucleotide
aauugcuaggugacugagc

SEQ ID NO: 1647606 - RNA, 19 nt, Artificial Sequence
  Description of Artificial Sequence: Synthetic oligonucleotide
gaagacgcgcgccggaucg

SEQ ID NO: 1647607 - RNA, 19 nt, Artificial Sequence
  Description of Artificial Sequence: Synthetic oligonucleotide
aaguaauuguuccuagguu

SEQ ID NO: 1647608 - RNA, 19 nt, Artificial Sequence
  Description of Artificial Sequence: Synthetic oligonucleotide
agggguaaauccgucaugg

SEQ ID NO: 1647609 - RNA, 19 nt, Artificial Sequence
  Description of Artificial Sequence: Synthetic oligonucleotide
uacauggucagcuguuugc

SEQ ID NO: 1647610 - RNA, 19 nt, Artificial Sequence
  Description of Artificial Sequence: Synthetic oligonucleotide
uuuccuacaccacaaccaa

SEQ ID NO: 1647611 - RNA, 19 nt, Artificial Sequence
  Description of Artificial Sequence: Synthetic oligonucleotide
uucgguagguggcugagga

SEQ ID NO: 1647612 - RNA, 19 nt, Artificial Sequence
  Description of Artificial Sequence: Synthetic oligonucleotide
uguguuuccuacaccacaa

SEQ ID NO: 1647613 - RNA, 19 nt, Artificial Sequence
  Description of Artificial Sequence: Synthetic oligonucleotide
ugggcaucggguaacuuug

SEQ ID NO: 1647614 - RNA, 19 nt, Artificial Sequence
  Description of Artificial Sequence: Synthetic oligonucleotide
ucgaagaagcauuaccccu

SEQ ID NO: 1647615 - RNA, 19 nt, Artificial Sequence
  Description of Artificial Sequence: Synthetic oligonucleotide
accucaaguauucgguagg

SEQ ID NO: 1647616 - RNA, 19 nt, Artificial Sequence
  Description of Artificial Sequence: Synthetic oligonucleotide
cucgaagaagcauuacccc

SEQ ID NO: 1647617 - RNA, 19 nt, Artificial Sequence
  Description of Artificial Sequence: Synthetic oligonucleotide
uuagccuguugauagcucu

SEQ ID NO: 1647618 - RNA, 19 nt, Artificial Sequence
  Description of Artificial Sequence: Synthetic oligonucleotide
ucaacuugcuucuccgggc

SEQ ID NO: 1647619 - RNA, 19 nt, Artificial Sequence
  Description of Artificial Sequence: Synthetic oligonucleotide
aagaaugcccaugcggcuc

SEQ ID NO: 1647620 - RNA, 19 nt, Artificial Sequence
  Description of Artificial Sequence: Synthetic oligonucleotide
cacaacaguaaacgaagag

SEQ ID NO: 1647621 - RNA, 19 nt, Artificial Sequence
  Description of Artificial Sequence: Synthetic oligonucleotide
acaggaggcaccuucgugu

SEQ ID NO: 1647622 - RNA, 19 nt, Artificial Sequence
  Description of Artificial Sequence: Synthetic oligonucleotide
auggucagcuguuugccuc

SEQ ID NO: 1647623 - RNA, 19 nt, Artificial Sequence
  Description of Artificial Sequence: Synthetic oligonucleotide
gucucgaagaagcauuacc

SEQ ID NO: 1647624 - RNA, 19 nt, Artificial Sequence
  Description of Artificial Sequence: Synthetic oligonucleotide
aaaagccagugucuguccu

SEQ ID NO: 1647625 - RNA, 19 nt, Artificial Sequence
  Description of Artificial Sequence: Synthetic oligonucleotide
aacgaagagguuuggguua

SEQ ID NO: 1647626 - RNA, 19 nt, Artificial Sequence
  Description of Artificial Sequence: Synthetic oligonucleotide
uggguuauuguuaguuugu

SEQ ID NO: 1647627 - RNA, 19 nt, Artificial Sequence
  Description of Artificial Sequence: Synthetic oligonucleotide
ugcugcuauuugcagaugu

SEQ ID NO: 1647628 - RNA, 19 nt, Artificial Sequence
  Description of Artificial Sequence: Synthetic oligonucleotide
accaucaacaugcugcuau

SEQ ID NO: 1647629 - RNA, 19 nt, Artificial Sequence
  Description of Artificial Sequence: Synthetic oligonucleotide
caagcggcgauccaccagg

SEQ ID NO: 1647630 - RNA, 19 nt, Artificial Sequence
  Description of Artificial Sequence: Synthetic oligonucleotide
guuugaguuccuuggauuc

SEQ ID NO: 1647631 - RNA, 19 nt, Artificial Sequence
  Description of Artificial Sequence: Synthetic oligonucleotide
ugcuauuugcagaugucuc

SEQ ID NO: 1647632 - RNA, 19 nt, Artificial Sequence
  Description of Artificial Sequence: Synthetic oligonucleotide
agccaugucauaucggcca

SEQ ID NO: 1647633 - RNA, 19 nt, Artificial Sequence
  Description of Artificial Sequence: Synthetic oligonucleotide
uguagaagucauuccagua

SEQ ID NO: 1647634 - RNA, 19 nt, Artificial Sequence
  Description of Artificial Sequence: Synthetic oligonucleotide
ugaccacuccacauugucc

SEQ ID NO: 1647635 - RNA, 19 nt, Artificial Sequence
  Description of Artificial Sequence: Synthetic oligonucleotide
caguaaacgaagagguuug

SEQ ID NO: 1647636 - RNA, 19 nt, Artificial Sequence
  Description of Artificial Sequence: Synthetic oligonucleotide
ugcuaggugacugagcuuc

SEQ ID NO: 1647637 - RNA, 19 nt, Artificial Sequence
  Description of Artificial Sequence: Synthetic oligonucleotide
aagacuguccuugggcauc

SEQ ID NO: 1647638 - RNA, 19 nt, Artificial Sequence
  Description of Artificial Sequence: Synthetic oligonucleotide
caucggguaacuuugaucu

SEQ ID NO: 1647639 - RNA, 19 nt, Artificial Sequence
  Description of Artificial Sequence: Synthetic oligonucleotide
guuaguuuguaaaacugga

SEQ ID NO: 1647640 - RNA, 19 nt, Artificial Sequence
  Description of Artificial Sequence: Synthetic oligonucleotide
guuccuuggauucccagac

SEQ ID NO: 1647641 - RNA, 19 nt, Artificial Sequence
  Description of Artificial Sequence: Synthetic oligonucleotide
ugucauguccaugacuggc

SEQ ID NO: 1647642 - RNA, 19 nt, Artificial Sequence
  Description of Artificial Sequence: Synthetic oligonucleotide
aacaugaugcccucauguu

SEQ ID NO: 1647643 - RNA, 19 nt, Artificial Sequence
  Description of Artificial Sequence: Synthetic oligonucleotide
uugauagcucucugcaucu

SEQ ID NO: 1647644 - RNA, 19 nt, Artificial Sequence
  Description of Artificial Sequence: Synthetic oligonucleotide
auuugugggcguucacuuc

SEQ ID NO: 1647645 - RNA, 19 nt, Artificial Sequence
  Description of Artificial Sequence: Synthetic oligonucleotide
uauuugugggcguucacuu

SEQ ID NO: 1647646 - RNA, 19 nt, Artificial Sequence
  Description of Artificial Sequence: Synthetic oligonucleotide
uaaaccgaagcugagccau

SEQ ID NO: 1647647 - RNA, 19 nt, Artificial Sequence
  Description of Artificial Sequence: Synthetic oligonucleotide
aaccgguucccgaacugcc

SEQ ID NO: 1647648 - RNA, 19 nt, Artificial Sequence
  Description of Artificial Sequence: Synthetic oligonucleotide
ucacaacaguaaacgaaga

SEQ ID NO: 1647649 - RNA, 19 nt, Artificial Sequence
  Description of Artificial Sequence: Synthetic oligonucleotide
uccaugacuggcacaagaa

SEQ ID NO: 1647650 - RNA, 19 nt, Artificial Sequence
  Description of Artificial Sequence: Synthetic oligonucleotide
acgccuucagggcaggagg

SEQ ID NO: 1647651 - RNA, 19 nt, Artificial Sequence
  Description of Artificial Sequence: Synthetic oligonucleotide
aagcauuaccccuccgggu

SEQ ID NO: 1647652 - RNA, 19 nt, Artificial Sequence
  Description of Artificial Sequence: Synthetic oligonucleotide
guaaacgaagagguuuggg

SEQ ID NO: 1647653 - RNA, 19 nt, Artificial Sequence
  Description of Artificial Sequence: Synthetic oligonucleotide
uuaaaccgaagcugagcca

SEQ ID NO: 1647654 - RNA, 19 nt, Artificial Sequence
  Description of Artificial Sequence: Synthetic oligonucleotide
uccccguuggcacugggca

SEQ ID NO: 1647655 - RNA, 19 nt, Artificial Sequence
  Description of Artificial Sequence: Synthetic oligonucleotide
cauaucggccauagucucg

SEQ ID NO: 1647656 - RNA, 19 nt, Artificial Sequence
  Description of Artificial Sequence: Synthetic oligonucleotide
ggaacaauugcugaaagaa

SEQ ID NO: 1647657 - RNA, 19 nt, Artificial Sequence
  Description of Artificial Sequence: Synthetic oligonucleotide
guuguguggggcguggacg

SEQ ID NO: 1647658 - RNA, 19 nt, Artificial Sequence
  Description of Artificial Sequence: Synthetic oligonucleotide
guuuccuacaccacaacca

SEQ ID NO: 1647659 - RNA, 19 nt, Artificial Sequence
  Description of Artificial Sequence: Synthetic oligonucleotide
ucauaucggccauagucuc

SEQ ID NO: 1647660 - RNA, 19 nt, Artificial Sequence
  Description of Artificial Sequence: Synthetic oligonucleotide
uggucagcuguuugccucg

SEQ ID NO: 1647661 - RNA, 19 nt, Artificial Sequence
  Description of Artificial Sequence: Synthetic oligonucleotide
ugucuugaccaguucaaua

SEQ ID NO: 1647662 - RNA, 19 nt, Artificial Sequence
  Description of Artificial Sequence: Synthetic oligonucleotide
ucuggugccaucaccucuc

SEQ ID NO: 1647663 - RNA, 19 nt, Artificial Sequence
  Description of Artificial Sequence: Synthetic oligonucleotide
ucgcucaggaaccgguucc

SEQ ID NO: 1647664 - RNA, 19 nt, Artificial Sequence
  Description of Artificial Sequence: Synthetic oligonucleotide
aucgcucaggaaccgguuc

SEQ ID NO: 1647665 - RNA, 19 nt, Artificial Sequence
  Description of Artificial Sequence: Synthetic oligonucleotide
uuguguggggcguggacgc

SEQ ID NO: 1647666 - RNA, 19 nt, Artificial Sequence
  Description of Artificial Sequence: Synthetic oligonucleotide
uguugucaagccaggccca

SEQ ID NO: 1647667 - RNA, 19 nt, Artificial Sequence
  Description of Artificial Sequence: Synthetic oligonucleotide
ucgguucaccugcaagcgg

SEQ ID NO: 1647668 - RNA, 19 nt, Artificial Sequence
  Description of Artificial Sequence: Synthetic oligonucleotide
aguaaacgaagagguuugg

SEQ ID NO: 1647669 - RNA, 19 nt, Artificial Sequence
  Description of Artificial Sequence: Synthetic oligonucleotide
ggcauuguaguggaagacg

SEQ ID NO: 1647670 - RNA, 19 nt, Artificial Sequence
  Description of Artificial Sequence: Synthetic oligonucleotide
uucagggaauucaguaaaa

SEQ ID NO: 1647671 - RNA, 19 nt, Artificial Sequence
  Description of Artificial Sequence: Synthetic oligonucleotide
cuagguuaagguuugaguu

SEQ ID NO: 1647672 - RNA, 19 nt, Artificial Sequence
  Description of Artificial Sequence: Synthetic oligonucleotide
uccuagguuaagguuugag

SEQ ID NO: 1647673 - RNA, 19 nt, Artificial Sequence
  Description of Artificial Sequence: Synthetic oligonucleotide
auugcugaaagaacaaaua

SEQ ID NO: 1647674 - RNA, 19 nt, Artificial Sequence
  Description of Artificial Sequence: Synthetic oligonucleotide
ucaggaaccgguucccgaa

SEQ ID NO: 1647675 - RNA, 19 nt, Artificial Sequence
  Description of Artificial Sequence: Synthetic oligonucleotide
cuguugauagcucucugca

SEQ ID NO: 1647676 - RNA, 19 nt, Artificial Sequence
  Description of Artificial Sequence: Synthetic oligonucleotide
ugggcguucacuucauaau

SEQ ID NO: 1647677 - RNA, 19 nt, Artificial Sequence
  Description of Artificial Sequence: Synthetic oligonucleotide
uugggcaucggguaacuuu

SEQ ID NO: 1647678 - RNA, 19 nt, Artificial Sequence
  Description of Artificial Sequence: Synthetic oligonucleotide
agcauuaccccuccggguu

SEQ ID NO: 1647679 - RNA, 19 nt, Artificial Sequence
  Description of Artificial Sequence: Synthetic oligonucleotide
aagccagugucuguccuug

SEQ ID NO: 1647680 - RNA, 19 nt, Artificial Sequence
  Description of Artificial Sequence: Synthetic oligonucleotide
uccagggguaaauccguca

SEQ ID NO: 1647681 - RNA, 19 nt, Artificial Sequence
  Description of Artificial Sequence: Synthetic oligonucleotide
augggauuguggcuaggug

SEQ ID NO: 1647682 - RNA, 19 nt, Artificial Sequence
  Description of Artificial Sequence: Synthetic oligonucleotide
gauuguggcuaggugccag

SEQ ID NO: 1647683 - RNA, 19 nt, Artificial Sequence
  Description of Artificial Sequence: Synthetic oligonucleotide
uguuguguggggcguggac

SEQ ID NO: 1647684 - RNA, 19 nt, Artificial Sequence
  Description of Artificial Sequence: Synthetic oligonucleotide
ucgugucauguccaugacu

SEQ ID NO: 1647685 - RNA, 19 nt, Artificial Sequence
  Description of Artificial Sequence: Synthetic oligonucleotide
gaacugccgucucuucccg

SEQ ID NO: 1647686 - RNA, 19 nt, Artificial Sequence
  Description of Artificial Sequence: Synthetic oligonucleotide
uguugauagcucucugcau

SEQ ID NO: 1647687 - RNA, 19 nt, Artificial Sequence
  Description of Artificial Sequence: Synthetic oligonucleotide
cuaggugccaguucaggga

SEQ ID NO: 1647688 - RNA, 19 nt, Artificial Sequence
  Description of Artificial Sequence: Synthetic oligonucleotide
ucggguaacuuugaucuuc

SEQ ID NO: 1647689 - RNA, 19 nt, Artificial Sequence
  Description of Artificial Sequence: Synthetic oligonucleotide
ggccgaaaguaauuguucc

SEQ ID NO: 1647690 - RNA, 19 nt, Artificial Sequence
  Description of Artificial Sequence: Synthetic oligonucleotide
aacaucgagauggaucaua

SEQ ID NO: 1647691 - RNA, 19 nt, Artificial Sequence
  Description of Artificial Sequence: Synthetic oligonucleotide
caacaugcugcuauuugca

SEQ ID NO: 1647692 - RNA, 19 nt, Artificial Sequence
  Description of Artificial Sequence: Synthetic oligonucleotide
cagacugauguccaccauc

SEQ ID NO: 1647693 - RNA, 19 nt, Artificial Sequence
  Description of Artificial Sequence: Synthetic oligonucleotide
ugcggcucuguugucaagc

SEQ ID NO: 1647694 - RNA, 19 nt, Artificial Sequence
  Description of Artificial Sequence: Synthetic oligonucleotide
auagucucgaagaagcauu

SEQ ID NO: 1647695 - RNA, 19 nt, Artificial Sequence
  Description of Artificial Sequence: Synthetic oligonucleotide
aucggccauagucucgaag

SEQ ID NO: 1647696 - RNA, 19 nt, Artificial Sequence
  Description of Artificial Sequence: Synthetic oligonucleotide
aauccgucaugggauugug

SEQ ID NO: 1647697 - RNA, 19 nt, Artificial Sequence
  Description of Artificial Sequence: Synthetic oligonucleotide
uagucucgaagaagcauua

SEQ ID NO: 1647698 - RNA, 19 nt, Artificial Sequence
  Description of Artificial Sequence: Synthetic oligonucleotide
cugagccaugucauaucgg

SEQ ID NO: 1647699 - RNA, 19 nt, Artificial Sequence
  Description of Artificial Sequence: Synthetic oligonucleotide
ugagcuucugagccacagu

SEQ ID NO: 1647700 - RNA, 19 nt, Artificial Sequence
  Description of Artificial Sequence: Synthetic oligonucleotide
ggguaaauccgucauggga

SEQ ID NO: 1647701 - RNA, 19 nt, Artificial Sequence
  Description of Artificial Sequence: Synthetic oligonucleotide
auaucggccauagucucga

SEQ ID NO: 1647702 - RNA, 19 nt, Artificial Sequence
  Description of Artificial Sequence: Synthetic oligonucleotide
gacgccuccccguuggcac

SEQ ID NO: 1647703 - RNA, 19 nt, Artificial Sequence
  Description of Artificial Sequence: Synthetic oligonucleotide
agguuugaguuccuuggau

SEQ ID NO: 1647704 - RNA, 19 nt, Artificial Sequence
  Description of Artificial Sequence: Synthetic oligonucleotide
acucgguacauggucagcu

SEQ ID NO: 1647705 - RNA, 19 nt, Artificial Sequence
  Description of Artificial Sequence: Synthetic oligonucleotide
ugcuuagccuguugauagc

SEQ ID NO: 1647706 - RNA, 19 nt, Artificial Sequence
  Description of Artificial Sequence: Synthetic oligonucleotide
ugacugagcuucugagcca

SEQ ID NO: 1647707 - RNA, 19 nt, Artificial Sequence
  Description of Artificial Sequence: Synthetic oligonucleotide
gaaccgguucccgaacugc

SEQ ID NO: 1647708 - RNA, 19 nt, Artificial Sequence
  Description of Artificial Sequence: Synthetic oligonucleotide
agucucgaagaagcauuac

SEQ ID NO: 1647709 - RNA, 19 nt, Artificial Sequence
  Description of Artificial Sequence: Synthetic oligonucleotide
guggacgccuccccguugg

SEQ ID NO: 1647710 - RNA, 19 nt, Artificial Sequence
  Description of Artificial Sequence: Synthetic oligonucleotide
accucucacauagaaauuu

SEQ ID NO: 1647711 - RNA, 19 nt, Artificial Sequence
  Description of Artificial Sequence: Synthetic oligonucleotide
caugaugcccucauguugu
